United States Patent Application Publication US 2007/0054278 A1 - sequence listing, part 125

SEQ ID NO: 264986 - DNA, 201 bp, Homo sapiens
ttggagacagagtctcgctgtgttgtccaggctggagtgcagtggcatgatcttggctcactgcaacctccacctcccgctttcaagcaattctcctgccycagcctccaaagtagctgggattacaggcgcccactaccaggcccagctatttttttgtatttttagtagagagggcttcaccacgttggccaggctgat

SEQ ID NO: 264987 - DNA, 201 bp, Homo sapiens
tccccatgctattgtacactagctaaagtagtaaacgcatagttttccagcactttgggaggccgaggcgggcggattgcgaggtcaagagatggagaccrtcctagccaacatggtgaaaccccatctctactaaaaaaaaaaattaaaaattagccgggtgtggtggtgcatgcctgtagtcccagctactcgggaggc

SEQ ID NO: 264988 - DNA, 201 bp, Homo sapiens
taatcatgaggaatatatgtttaagttttcacagtagtttgaataagccatggtgaaatatttaaggttatccagagggagaaaagcaccctttagtttayagacaattaaatttaaatgcagccataacttacaaggataaatttgaaccatccatcctttgctttactagctagagtctgccctctcatgttggcagtt

SEQ ID NO: 264989 - DNA, 201 bp, Homo sapiens
tactcgggaggccgaggcaggagaatcgcttgaacctgggaggcagaggttgcagtgagcagagatctcaccactgcactccagcctggcgacagagagasactccatctcaaaaaaaaaaaaaaaaaggaaaaatactggattagatatgtttaaggttcattttgcttgaggcactatttcaagagtctaaaagagttt

SEQ ID NO: 264990 - DNA, 201 bp, Homo sapiens
tacactaaatcttaaggaacacagaggcaattgtaagacaatacagtctctcttgcccatctttgtgtttgaacagattttgtaaattcattggtttgtartaatatttggcaagaggttcagaagtagtgatgtagcagccagttgtaaatagagaataaatttcacaggctaaatgattatgagtgaccaagagaatag

SEQ ID NO: 264991 - DNA, 201 bp, Homo sapiens
cagtggctttcattaactgatttgcaaatccaaaaatgtgttcttccacactaagccatatttaaaaatatatatatatttttgtagagatgagggtctcrctatgttgtccaggctggtctcaaactcctggtctcaagcagtcctcctgccttggccttccaaagcattgggattacaggcatgagccactgtgctcaa

SEQ ID NO: 264992 - DNA, 201 bp, Homo sapiens
cttccacactaagccatatttaaaaatatatatatatttttgtagagatgagggtctcactatgttgtccaggctggtctcaaactcctggtctcaagcartcctcctgccttggccttccaaagcattgggattacaggcatgagccactgtgctcaaccatcagccgtattttttaacatgagtgaatatattttgata

SEQ ID NO: 264993 - DNA, 201 bp, Homo sapiens
catttctaaagacccaggtcaaatttgctgtcctctgtgaggcattcccagagcttatggaaataattttgtcccacatgggttcctgaagaagttccatrtatctgctacttccccaaaccccatcaaaatgatacggaaggagttaaaatagtgtaagtccacaagaacacaaagagttagagagaagataaaagtcag

SEQ ID NO: 264994 - DNA, 201 bp, Homo sapiens
ttgaagtgtatgtataagttaacatatataaattattttacaagggcaatgaaaatattttttagagagacactaaaatggcatgtaaagcagacaatgtkgccctttgcctgattttgcacttacaggtttatggcacaaaacttccccctcatgacttacccttctcatttatgccattgccaccgccatctcctgagt

SEQ ID NO: 264995 - DNA, 201 bp, Homo sapiens
tgaagtgtatgtataagttaacatatataaattattttacaagggcaatgaaaatattttttagagagacactaaaatggcatgtaaagcagacaatgtgrccctttgcctgattttgcacttacaggtttatggcacaaaacttccccctcatgacttacccttctcatttatgccattgccaccgccatctcctgagtc

SEQ ID NO: 264996 - DNA, 201 bp, Homo sapiens
cgagtagctgggactacaggcgcccgccaccacgcccagctaatttttttttttttcgtatttttagtagagacggggtttcaccgtgttagccaggatgrtctcgatctcctgaccttatgatacgcccgccttggcctcccaaagtgctgggattacaggcgtgagccaccacgccccgctgtatcatttctttatata

SEQ ID NO: 264997 - DNA, 201 bp, Homo sapiens
gatctcttcttcttacccaaggaagacagtttatttcctgagtccatttggtcatgggttaagcatcagatatattaaaaataaatgcatttggactaagkgccatttattcagtgggaaatagaataaatgagatgggtttgtttcatgtgggcctctttatttataattccatggcctcagaaagaagtcagtattata

SEQ ID NO: 264998 - DNA, 201 bp, Homo sapiens
aaaaagaagatatgggaagttgctttggggaatttaaaacttttcttttgcaatttcaatgtttgatcattgttattcgtttcagtaaatttagaaaacargatactttagatgttatttttcagcatcgcttagagcagggacctgcatgtgttttggtaagggatacgtggtaaatattttcagctttgggggccgtaa

SEQ ID NO: 264999 - DNA, 201 bp, Homo sapiens
attgttggttaatataatatatgatgtagacaatttttgagataacataaaacccagtttttttgtccattttagtttaccagaatgattccttcattcasttttttaaattcaatgccaaaatcacataagaacatgtagtaggcatggtgcttgccaggctcttgaactaagattagtgtaagattattttatcaagga

SEQ ID NO: 265000 - DNA, 201 bp, Homo sapiens
ttttttttttttttggtgacagaatctcactctttcacccaggttggagtgcagtggcgtgatgtcagctcactgcaacttccgtctccacgggtcaagcrattctcatgcctcagcctcccgagtaactgggattacaggcatgcactaccacacccagctaatttttgtatttttagtagagacagggcttcaccatgt

SEQ ID NO: 265001 - DNA, 201 bp, Homo sapiens
gggaggcctaggtgggcagatcacctggggttgggagttcgagaccagcctggccaacatagtgaaaccctgtctctactaaaaacacaaaaattagctgratgtggtggtgcatgcctgtaatcccagctacttgggaggctgaggcaggagaattgcctgaacccaggaggcagaggttgaatgagccgagattgcgcc

SEQ ID NO: 265002 - DNA, 201 bp, Homo sapiens
gctaatcttgagacagacagaccaagcctggagacccagctgcagagttccagagatggcctcagagggctaatcagcagccccgccactgttgagatgaygccagaccatgtaccaggtggactgggacccaagatagccactggaacaagatgcacaggcatcgtcctcagcacagttctggcatgcctttcgtatcaa

SEQ ID NO: 265003 - DNA, 201 bp, Homo sapiens
gttacataaatgatcacaattcagaatatataaatcataattcagaataagttatacattccctttaaatgaacttatgtaaatgtatttcacgtttgtayaaataagagaaaagtacggaaagatgctagccaaatttttaactaggaaggggtgggtgatggaagtggcattggtagaccagaggatgtgactcattat

SEQ ID NO: 265004 - DNA, 201 bp, Homo sapiens
ttcaccaacagtatatgagggttcccttttctccacaaccttgacagcatttgttattgcctgtcttttgggatacaagccattttacctggggtgagatratagctcattgtagttttgattcgcctttctctgatgatgagtgatgttgaccaccttttcatatgcctgtttgccatttgtatgtcttcttttgagaaa

SEQ ID NO: 265005 - DNA, 201 bp, Homo sapiens
agtctcgctgtgtcgcccaagctagagtgcagtggtgcaatcttggcttactgcaacctccacctcacaggttcaagggattctcctgcctcagcctcccrcgtagctgggactacaggcacgcatcaccatattttttgtatttttagtagagatggggtttcaccatgttagccaggctggtctcgagctcctgacttc

SEQ ID NO: 265006 - DNA, 201 bp, Homo sapiens
gtggtgcaatcttggcttactgcaacctccacctcacaggttcaagggattctcctgcctcagcctcccacgtagctgggactacaggcacgcatcaccawattttttgtatttttagtagagatggggtttcaccatgttagccaggctggtctcgagctcctgacttcaagtggtccacctgcctcagcctcccaaagt

SEQ ID NO: 265007 - DNA, 201 bp, Homo sapiens
ttacaggcatgagccactgtgcccagcgaggttaattttcaaaagaatgaggacagttttactacctgatgcctaaaattgtcaacatttgccttgtctcycaattcataattgctattccatcctctaagtctggtttatgtccagttaccttctccagtcactcgtcttgaactttgacagtccagtcatgaaaagcta

SEQ ID NO: 265008 - DNA, 201 bp, Homo sapiens
ccgttgcccaggctggagtgtactggcaccatctcggctcactgcaacctccacctcccaggttcaagcaattctcctgcctcagcctttcgagtagtgtrggcaccacacccagctactttttgtatttttagtagagacggtttcgctgtgttggccaggctgatcttgaactcctgacctcagatgatccacccgcct

SEQ ID NO: 265009 - DNA, 201 bp, Homo sapiens
cagtggcttcctgcagagaaaataaataatttacccagcgtgtccttattactccattgcatgcagcagtgctcctagaaaatgaagggattggcatgcayctataaagagcagaaggcggccgggcgcggtggctcacgcctgtaatcccagcactttgggaggcggaggcgggtggatcacaaggtcaggaggtcgaga

SEQ ID NO: 265010 - DNA, 201 bp, Homo sapiens
aaccttgtaggagaaggggtgaatgtacagatttttgtctagtagagatacagataatttctatctggtggaaaagatgatttaaaaattatagtttattkccctgttggacattatcccattttattaatatatctaaccaggtgatcttaccataaaattactttgtaaaattgcctttaaacacctacctcttcaaat

SEQ ID NO: 265011 - DNA, 201 bp, Homo sapiens
gggtgaatgtacagatttttgtctagtagagatacagataatttctatctggtggaaaagatgatttaaaaattatagtttattgccctgttggacattawcccattttattaatatatctaaccaggtgatcttaccataaaattactttgtaaaattgcctttaaacacctacctcttcaaattttaatttcaactggt

SEQ ID NO: 265012 - DNA, 201 bp, Homo sapiens
taattggaaatgaatgcatgaaaatcagtatcaacaaagtaaatttaggaataagtaatttgaaatagtgacttttaaagaagttctgaaactaaatggtraaaagcaagtttctcattcatctaatgatccaaatttacaaggatttggtaaaattattgttttaattaagatataattttaatttaattgtattttatg

SEQ ID NO: 265013 - DNA, 201 bp, Homo sapiens
ctgcagccttgagctcctgggctcaagcagccctcccacttcggcctcccgacttactacaggtgcatgccaccattcccagatgagactgagtctctgtrtgttgcccaagctggtcttgaactcctggactcaagggatccttctgcctccgcctcccaaagttctgggattacagctgttagccaccatgcccagttg

SEQ ID NO: 265014 - DNA, 201 bp, Homo sapiens
tgcctccgcctcccaaagttctgggattacagctgttagccaccatgcccagttgttttgcttctttatgggtgtttatttcatttccgtttcattcaccraatgtctgcattttgtgtcactgtttacacaagtcactgtctcttggttgttaatgtgaaaacttggagaacagaaacaaaacttctctagtgatcttga

SEQ ID NO: 265015 - DNA, 201 bp, Homo sapiens
aggagacttttgaccttgctggggtggcatgtgcattgcatcagagaccttctgtgctccttccagtcactctgcatctgtgagtgcctgccaagggtgtmcataggtctgtgtgcaggtctaaaaaaaaaatccatctcatggaaattgaggaagttaaatttgagatggtatcttgaactacatagcaggtatactgct

SEQ ID NO: 265016 - DNA, 201 bp, Homo sapiens
gcactagtgaacattatcaaaaaaaataagccaaaacatagaactgactcaccaaaaattgttaattgtatgcttaggttgcgtaattttctaagtcacakgttggtgggaaattttttttgatatgggctgacaaagcacaataaacttggagacaaaataaattgtactattgctacttaaggtatgtgctcatatttt

SEQ ID NO: 265017 - DNA, 201 bp, Homo sapiens
ctaatcatgaatatattgttaggctgatttttaacctaagcataaagcatgtgtattatttctacttatgaagctaacatagtcaaatagaaacttctaasgtttttattgcacttatatgcaaatagttgtatctgaatgaaatcaccttaatgaaatgctgtctttgaaacctaattataacctctttattaacgaatg

SEQ ID NO: 265018 - DNA, 201 bp, Homo sapiens
ttgaccaccttttcatatgcctgtttgccatttgtatgtcttcttttgagaaatgtctgttcaaatcttttgcctatttaaaatgatcagattattatatwtttttttcctatagcattgtttgagctccttgtatattctgattattaatcccctggcagggtttgcaaatatgttctcccattattttggttgtctctt

SEQ ID NO: 265019 - DNA, 201 bp, Homo sapiens
tggcagggtttgcaaatatgttctcccattattttggttgtctcttcactttgttgattgtatcctttttctgtgcagaagcctttttttcagggctagcygaggttttattttggggggaaaaaaataaaagcaattgagttgttttgtagctgaaggcatgggcaaggtggtccccaggcagtaaactcccccgtgggt

SEQ ID NO: 265020 - DNA, 201 bp, Homo sapiens
gatgtaatgttgaattcagtttgctagtattttgttgaggatttttgcatcaatattcatcagaaatattggcctgtagttttctttttttgatgtgtctstggttttggtatcagagtaatactggccttgtagaacaagtttggaagtattccctcctcctctgtcttttggaatagtttgagtagggttggtattagt

SEQ ID NO: 265021 - DNA, 201 bp, Homo sapiens
gcaacctctccctcctgggttcaagtgactctcccacctcagcctccggagtacctgggattacatgcacccaccaccatgcctggctagtttttgtattyttagtagaggtgaagttttaccatgttggccaggctggtctagaactcctcacctcaagtgatctgcctgcctcgacctcccaaagtgctgggcttatag

SEQ ID NO: 265022 - DNA, 201 bp, Homo sapiens
ttggagctccattgtatgttatttatttctttccttttgctgcctttaggatcctttctttatccttgacctttgggagtttgattattaaatgccttgakgtagttttctttgcattaaatctccttggtgttctgtaaccttgttgtagttgtatattgatatctttctctaggtttgggaagttctctgttattatcc

SEQ ID NO: 265023 - DNA, 201 bp, Homo sapiens
tttttttttgttttttgttttttaagatggagtctcgctctgtcgccgaagctggagtgcagtggcgcgatctcagctcactgcaagctccgcctcctggrttcacgccattctcctgcctcagcctcccgagtagctgggactacaggcgcccaccactacgtctggctaatttttttgtattccttagtaaagacaggg

SEQ ID NO: 265024 - DNA, 201 bp, Homo sapiens
tacctcgaaggcaaagattacgtctgaccaacagttagtactgttgtgcatagcaccgtatgctagactgatcttttatcactataattgaataattgcartgttttctcatttttcaggaaaaataagtaaatggataatatattccaaatttaaagtttttatcctataattgtttttaaacctacctttgttaataaa

SEQ ID NO: 265025 - DNA, 201 bp, Homo sapiens
tcatacaacttaccaattgcctttttttttttttttttttgagacggaatcttgctctgtcgcccaggcaggagtgcagtggcacgatcttggctcactayaagctccgcctcctgggttcacgccattctcctgcctcagcctcccaagtagctgggactacaggcacctggcaccatgcccagctaattttttgtattt

SEQ ID NO: 265026 - DNA, 201 bp, Homo sapiens
cttttcttttttatttatttatttagagatggagttttgctcttgctgcccaggctggaatgcaatggggcgatctcggctcactgcaaactctgcctccygagttcaagtgattctcctgcctcagcctcccaagtagctgggattacaggcattaccaccacgcccggctaattttgtatttttagtagaaatggggtt

SEQ ID NO: 265027 - DNA, 201 bp, Homo sapiens
agcatagaggcagccagtcatacttagatcagttgcttactgcttttgtggatgtgcatgctcataattttgatttttgtaataacattgttgccacttaygcatgacaaaattagtaacacctatgacggacactaggtataacaataactgcaaagaacattgtgactcccaggtattctgatgcttaaataaggctga

SEQ ID NO: 265028 - DNA, 201 bp, Homo sapiens
agccctcctgccatgactcctgtctttatccacctgagattccaaagttcatcatttcactcatgttctttcagctgccttttccccactcacttttaccytttttttttttttttttttttttttttttttttttttttttttttttgagatggattcttgctctgttgcccatactggagtacagtgatgcaatctcgt

SEQ ID NO: 265029 - DNA, 201 bp, Homo sapiens
agtaaaggtatactttgtgctaaattccatagttaatgcttgatttccacccctcccatgaccatattagcagatccccatcaagaaaatcttttgttgtrataagaaatgacacaacccatttttagtaaggagaagctgtaaggaaagtgatgatagtaacattttcattcttccactttaatttgttacatattgctg

SEQ ID NO: 265030 - DNA, 201 bp, Homo sapiens
tattggctgggtgcggtggctcacgcctgcaatcccagcactttgggaggccgaggcagatgatcacctgagggcaggagttggagacagcctggccaacrtggtgaaacctcgtctctactaaaagtacaaaaattagccaggcatggtgtcatatgcctgtagtcccagctacttgggaggctgaggcaggagaatcac

SEQ ID NO: 265031 - DNA, 201 bp, Homo sapiens
tctacagttgcagaatttacatataagacatttaatgtctaaatcacatgaaaactgtgagaaaggaaaacactgtagacatttttttttgtattctgtayagttctgtgtacatgtctgtgttcctgtttcacagtttttctagcaggtaaaacaaactgcactttaaggcaatatggtacatgtacatctagaatgtct

SEQ ID NO: 265032 - DNA, 201 bp, Homo sapiens
atgcctgtagtcccagctacttgggaggctgaggcaggagaatcacttgaactcaggaggcagcggttgcagtgagtcgagattgcaccactgcacttcarcctgggccacagagcaagactcggtcaaaaaaaaaaaaaaaaaagattatcgcattctattactattagttttgtctttctacctcccctgctaggctgt

SEQ ID NO: 265033 - DNA, 201 bp, Homo sapiens
taatgtatctcagtaagtgctacaaacacaattagtaagtaataccaaagagtggtagcttccaggcctgataagaaaaaaaaaagtaatattaaattagkcagacacaaagaaaacatataaaaggggacataattaaaatgtaaaattactgggttattttctatagaaaaactttaagatctcaatcatgaaaaaata

SEQ ID NO: 265034 - DNA, 201 bp, Homo sapiens
cagtatgctattggtctttataaatggttgtttcattaaaatttcctttatgaaacctacttttcttcccaaatgtaggaaaattttattgttcagtgggwatatatatatgtatatatgttttgtttttttatttgtttgtttgtttttgagactgagtctcgctctattgcccagggtggagtgcagtggcgcaatctc

SEQ ID NO: 265035 - DNA, 201 bp, Homo sapiens
tctttttgtaaagaaactttatcttcctttattttgtttgttttttgtttgttttttgttttttgttttttgagacagggtcttgctgtgtcacccaggckggagtgaagtggtgcaatcacggctcactgcagcctcaacctcccgggcttatatagcttctgtcttatttctagtattagatagaggcttctgagatgc

SEQ ID NO: 265036 - DNA, 201 bp, Homo sapiens
gtctgaaataatttcttatgttaaatagcttctaacatttatggccactggactgattcttagcacattaattcttcctgtcatgaggtttggggatacaycagaacaatttatttcacagtggggttcttatccaaacaagatctgtcttcatatctttctcaatttagcagaatgcttttgcagtggatctgggcatta

SEQ ID NO: 265037 - DNA, 201 bp, Homo sapiens
atagagtttggactgcagtccttcatcctgcctgggactctgcccaagccttttctgttctacttcgttgagtattcagtaatttaactaacatttattcrgtaatccatccagtattgactgagcccctacagcatgtcggatctgtgcagaatgccaaggataatcctgtgaataaagtagatagaggtgatcttcgtc

SEQ ID NO: 265038 - DNA, 201 bp, Homo sapiens
gggataggaaagtatcgtgataattttttatgagctgcgtttttctcccatgggccaaataccctttggaatttttagtttcttttcttttctttttacaygcaacaattatttcattatgatttatccactatttacaattacatgtcagtgtctgttttctagtataaaagcctcggcaagaaagctagggtaaaccaa

SEQ ID NO: 265039 - DNA, 201 bp, Homo sapiens
ccctattaaaaataatatgctggctgggtgcggtagctcacgcctgtaatcccagcactttgggaggccgaggcgggaggatgacttgaggtcaggagttygagaccagcctggccaacatggcaaaaccctgtctctacgaaaaattcaaaaattagctgggcatgttggtgggcgcctgtaatcccagctactcgggag

SEQ ID NO: 265040 - DNA, 201 bp, Homo sapiens
agtttcttggtcaggctaactcatttttgctttttcggccttagtttgtattttccttctttcaggaaatatcctgtgcctgaccaacattggactgagtsgcctcttactagatcttccaaggtgtccctgactgagttttctcatcatcagacagacttcctgagagcaacagctgcatccccctctcaggtctagtgc

SEQ ID NO: 265041 - DNA, 201 bp, Homo sapiens
gtcaggctaactcatttttgctttttcggccttagtttgtattttccttctttcaggaaatatcctgtgcctgaccaacattggactgagtcgcctcttaytagatcttccaaggtgtccctgactgagttttctcatcatcagacagacttcctgagagcaacagctgcatccccctctcaggtctagtgcagggaccgg

SEQ ID NO: 265042 - DNA, 201 bp, Homo sapiens
caggtgttgtctgcatctttatgcactggaatcctgaccgtttttcaaatgcccctacattcatgaattcttttctggtcttcaacctatatatgacctcytcctcctctgaacctgaattagttagatattgctgaataacaaagtatcccataacttagtggctgaagaaaataataaacattgcctctcacagtttca

SEQ ID NO: 265043 - DNA, 201 bp, Homo sapiens
ctggcccattggggtgaaatcatctctggatcgatcaattaacatttatatgtagataattagagcaaagggcacacaggaatgtcaggaggaacaaaagrcccatgagaggataagtcctggcgggtcctgctctgaaatgtcacccgttcttcttctcatttccactcccagagccatttgcacatcatagtccagttc

SEQ ID NO: 265044 - DNA, 201 bp, Homo sapiens
gtatttatccactcactgggtgctgtagtccacatgcatttactaagtgcctactttagtcaaagtagatgttcaataagaaatttagtgaacaacatgtraatgagagcagagaaattataaaagtatgagaaactacaaaaatagtgacccattcatttatccactagaataatcaataactcttgattacaaaacgat

SEQ ID NO: 265045 - DNA, 201 bp, Homo sapiens
gatgaagagctgaaatacatttaaactacgtactcaatagactgttggacttaatttgaaactaatatctttacttttttctctttgtgagtaaataaaayccttaattgacattaccagatgctgaactagacaaatggctgatatttttgtggaatgtgtacaattgtatcacccacacaaattggctaatgatctaaa

SEQ ID NO: 265046 - DNA, 201 bp, Homo sapiens
ccctttaccttccttagtcagcaggaagataaggggagtgagcggaccagtgaaaaaagcacccgagagttatttacccaatgccatttctaaaatgtcamgttatttaacttgagatgattgccacaggaaataatccatgaaatagctcttggtctttttgaaattttgtgtcattattagactcgttcatcaagaaat

SEQ ID NO: 265047 - DNA, 201 bp, Homo sapiens
tgccacttatgcatgacaaaattagtaacacctatgacggacactaggtataacaataactgcaaagaacattgtgactcccaggtattctgatgcttaamtaaggctgagaacctattcataatataaggggaattctcccttgttgttatttcagttattgatttagctgaaaatgtgagttgcatgctggtaattgag

SEQ ID NO: 265048 - DNA, 201 bp, Homo sapiens
atctgataaaggaccactagaagattcacttgtctttcatggggcttggctgtttacagtcagtgttttcttctgaaggaagctattttatccctacccgkacaacagatgggtactctagtatttcataaaagatgacaggaaaattacattaccacaaatggcaaaagttgggaggtatgcaataggatagtttattgg

SEQ ID NO: 265049 - DNA, 201 bp, Homo sapiens
ctggggatagcaaaggtacatcctttgtaatgtaagacatttgctatctctgtaacttttctatcccaggatggtatttgactattgtcactttcaaactmatttattttttaatgatttgagatgcatggatgtgtatataatgttttgggaaaaatctatgaattatgcatgatttacctgagagaatgttctaagata

SEQ ID NO: 265050 - DNA, 201 bp, Homo sapiens
ccttgtctcttctcctcggccccttaagtccactgtgatgcgcttaagggcatgaaggcacctgtgatgtgctcttgcctccaagctggtgctggatggarctatttgctccttgaactttcctaaactcatctcgtcatctcttcccactgtattgatatctcctccttacctcttctcccgaagcaagaattcctcatc

SEQ ID NO: 265051 - DNA, 201 bp, Homo sapiens
gaaggcacctgtgatgtgctcttgcctccaagctggtgctggatggagctatttgctccttgaactttcctaaactcatctcgtcatctcttcccactgtrttgatatctcctccttacctcttctcccgaagcaagaattcctcatctttcccaaagctgaccctttcacccgggatcatgattccatttttatcccacc

SEQ ID NO: 265052 - DNA, 201 bp, Homo sapiens
tgggttcaagtgattttcctgcctcagcctcccaagtagctgggattacaggctcctgcctctacacccagctcattttttttgtatttttagtagagacrgggtttcaccatgttggccaagctggtctccaactcctgacctcacgattcgtccacctcagcctcccaaagtgctgggattacaggtgtgagccaccat

SEQ ID NO: 265053 - DNA, 201 bp, Homo sapiens
tctgaccctccctaaactgcctctaagatcagtgcttgagatatttgcagaccctgcacttgatggatcagctggccccacccagatggattaactggctyatctgatcttgtgctcccacctaggaactgactgaatgcaggaagacagctccgggtcctatgatttcatctctggccaatcagcactcctggctcactg

SEQ ID NO: 265054 - DNA, 201 bp, Homo sapiens
tgtgctcccacctaggaactgactgaatgcaggaagacagctccgggtcctatgatttcatctctggccaatcagcactcctggctcactggcttcccccyacccaccaagttatccttaaacactctgctccctgaatgcttggggagactgatttgagtaattataaaactcaggtctcccgcacagccggctctgcgt

SEQ ID NO: 265055 - DNA, 201 bp, Homo sapiens
tatagctgcacattttggaatcttctttggctgccccttttcttcactcccagcaccaaatggaggatcaagtcctagaaaactgagacctcagttaaagytcccttcctttgctgggtaactgaagcaatataggaacttgttgcccctgcctcccatctctcctgccttacaccttcccttacaatgtggttatcctac

SEQ ID NO: 265056 - DNA, 201 bp, Homo sapiens
tacaggcgtgaaccaccacgcctggcctgtacattttttttttttttttttttttttggagatggagtcttgctctgttacccaggccggagtgcagtggygtgatcttggtttactgcaatctccgcctcccgggttcaagcaattctcctgcctcaggctaccaagtaactgggaccacaggcacacgcggccatgccc

SEQ ID NO: 265057 - DNA, 201 bp, Homo sapiens
tcaaaaatcgaattgagtggggaaaattaggatacagaagatactgtgaaaattttttacattactgaaagggaggagggcaacaatagttatagaaatayaattgaaaaacagggtaatttctatttattgctgcatgctatgaggatgtgacgggggagtaaagagaactttaggaaacatcaggaactgtcttccaat

SEQ ID NO: 265058 - DNA, 201 bp, Homo sapiens
agtatgcttattttaataggggcatgccatgcctttttatgacactaccacaatgcatgtaatcattgtcctgttgataaacattttgtatgttgccaaattttttgcaattacaaataaggctgcattaaaaatccttgtacgtgtttacttgaacatatgaaaatagtgcccctagaacataggtacgaagttgctagg

SEQ ID NO: 265059 - DNA, 201 bp, Homo sapiens
tgatcttggtttactgcaatctccgcctcccgggttcaagcaattctcctgcctcaggctaccaagtaactgggaccacaggcacacgcggccatgccctkctaattatttgtattttagtagagacagggtttcaccatgttgcacaggctggtctcaaattcctgagctcaggcattccacccacctcggcttcccaaa

SEQ ID NO: 265060 - DNA, 201 bp, Homo sapiens
ccttggaggtagctgtaaattgcttactaaaagtatcacttagagaggaaaaagtaaaaggtaataggcagctgccagttcatctcaaaaatcgaattgartggggaaaattaggatacagaagatactgtgaaaattttttacattactgaaagggaggagggcaacaatagttatagaaatataattgaaaaacagggt

SEQ ID NO: 265061 - DNA, 201 bp, Homo sapiens
ggtttactgcaatctccgcctcccgggttcaagcaattctcctgcctcaggctaccaagtaactgggaccacaggcacacgcggccatgccctgctaattwtttgtattttagtagagacagggtttcaccatgttgcacaggctggtctcaaattcctgagctcaggcattccacccacctcggcttcccaaagtaccag

SEQ ID NO: 265062 - DNA, 201 bp, Homo sapiens
tatagaatattaatggcctcactcacttcatccacccagctatttgttagcactttatttctttggactaataaaaaaaaatcagaaaaaagtgcgtaatkgtaaaaacatatcatttttaactgaggcatttataaagagatagtgggggggacaggtatagcatttaccagagatagtctcatcttttgagagtattgt

SEQ ID NO: 265063 - DNA, 201 bp, Homo sapiens
cttagtagctctttacacatttctctctatctggtcatacaaataaactcctacgtggccactggcagtttatggaagtgctcattgctctgcattttccyctcccttagtatcttcggaatcttagatttttccacaataaaatggctataagatggggcagccttgccatgttcctcagcgttccctgattcatgctga

SEQ ID NO: 265064 - DNA, 201 bp, Homo sapiens
tctccgcctcccgggttcaagcaattctcctgcctcaggctaccaagtaactgggaccacaggcacacgcggccatgccctgctaattatttgtattttartagagacagggtttcaccatgttgcacaggctggtctcaaattcctgagctcaggcattccacccacctcggcttcccaaagtaccaggattatgggcgt

SEQ ID NO: 265065 - DNA, 201 bp, Homo sapiens
cctactaatacagaatgctgtatctgtcgtacaccaagatgtcatatctatgtagggcttctattccagtccattgatctattatctgttccctatgccartatgtcactgttttagttactacttttattataacattttttgtgtgtttttatcctcccagagccctgggcttcattgccacttatttgggtgaagttt

SEQ ID NO: 265066 - DNA, 201 bp, Homo sapiens
cggagtttcacttcacccaggctggagtgcagaggtacaatctcggctcactgcaacctccacctcccgggttcaagcgattctcctgcctcagcctcccragtagctgggattacaggcacccaccaccacgcctggctaattttttgtatttttagtagaaacagggtttcaccgtgttagccaggctggtcttgaagt

SEQ ID NO: 265067 - DNA, 201 bp, Homo sapiens
agatgtcatatctatgtagggcttctattccagtccattgatctattatctgttccctatgccagtatgtcactgttttagttactacttttattataacrttttttgtgtgtttttatcctcccagagccctgggcttcattgccacttatttgggtgaagttttgtaaaccccttttccaagtgtgtcttccagggtca

SEQ ID NO: 265068 - DNA, 201 bp, Homo sapiens
tccacaaaccttcagtacttttttttttttttaaagcgcgatctcggctcactgcaacctccgcctcccgggttcaaatgattctcctgcctcagcctccygagtagctgggactgcaggcatgcgccaccaggcccggctagtttttgtatttttagtagagatgggtttttactatgttggccaggctggagttgaact

SEQ ID NO: 265069 - DNA, 201 bp, Homo sapiens
gaagttttgtaaaccccttttccaagtgtgtcttccagggtcatggcttatgcacagattctcagatctagctttctgcctcttgcaggccctaaaacacrtgtctcgtattagcaagtatgctcagctccatccttcagccttgacagcagggtctgggaccaggaccctaggctgatgcggagtcagctggtgttctca

SEQ ID NO: 265070 - DNA, 201 bp, Homo sapiens
ttgcctctacaaacccagcaaagtttccttttactgtctccaacctttggccttcaggaaggataaagggagaagtcacctttggtccttcctcttcgcarttctcccttttccattttaaattgcctctctcttcctctacataaagggatggtggttctgagaagcagctgcagcaggttggcgatagaaatgtccatt

SEQ ID NO: 265071 - DNA, 201 bp, Homo sapiens
agggtctgggaccaggaccctaggctgatgcggagtcagctggtgttctcaccactccgggttggccttccctctgcctttccaacccctggagtttcccrtcagcctgccttcctctctgcctttgtgatctctctctctctctctgtgtcctctctgtctctctttccagtagttctgcctggagcaggaagaagagcc

SEQ ID NO: 265072 - DNA, 201 bp, Homo sapiens
tctctctctctctctctgtgtcctctctgtctctctttccagtagttctgcctggagcaggaagaagagcccttctcaattcagtcagctgtgttgccaaraagtccttctctgcttcttaaaaaattctgatgtgctctttttgtcatctaaaaataattcagatttcttttgcacggcattgaaacactttgtaatctg

SEQ ID NO: 265073 - DNA, 201 bp, Homo sapiens
agctgtgttgccaagaagtccttctctgcttcttaaaaaattctgatgtgctctttttgtcatctaaaaataattcagatttcttttgcacggcattgaarcactttgtaatctgacttagaattagcatgatgttccagccttgtccttcttcacttgccccatcaccctcctgtttacccacattgggtaagtttaggt

SEQ ID NO: 265074 - DNA, 201 bp, Homo sapiens
ttggctttgaatatgaaggtgagtattaccgtgagactagatggcaaagagcatgcatctaggtgtacaggaactagaagaatcctaggctacgcaaggamcttcccagctggaggggacggaggtgcggagagaacaggatggacggtaggggaggggcagtttattttacgaggatgaaatgaaaggaagtctgcgaag

SEQ ID NO: 265075 - DNA, 201 bp, Homo sapiens
ctgtgttgccaagaagtccttctctgcttcttaaaaaattctgatgtgctctttttgtcatctaaaaataattcagatttcttttgcacggcattgaaacrctttgtaatctgacttagaattagcatgatgttccagccttgtccttcttcacttgccccatcaccctcctgtttacccacattgggtaagtttaggtta

SEQ ID NO: 265076 - DNA, 201 bp, Homo sapiens
ctaaaaatgaggttgctagataccttttccacagtatattcatataagaattatcttgattttggtccaagttatttacaatttgctggggaaactctgcttttttctcattagaaagcatcctttatatgtattagaaatttaacttagaatttaattaacttttctatattcactctacagctacttttcttaaaagct

SEQ ID NO: 265077 - DNA, 201 bp, Homo sapiens
ttgcattccacacctgcgtctgggcagtggcgtttcttcaagggagttacatgagtctctgtcttcacttccaatgctagtcccttcactgctcactctcyggtaacccactgttacctggtgccaatttctcctattttttattcaaggtagacatcctcagttcaaggaggttgaggtggcctggtgcagctgtagctt

SEQ ID NO: 265078 - DNA, 201 bp, Homo sapiens
gttacatgagtctctgtcttcacttccaatgctagtcccttcactgctcactctctggtaacccactgttacctggtgccaatttctcctattttttattmaaggtagacatcctcagttcaaggaggttgaggtggcctggtgcagctgtagcttagttttcagtaggactcttcctgtgtccctaggaagatacacttc

SEQ ID NO: 265079 - DNA, 201 bp, Homo sapiens
tcgccttggggctgatttcaaattcatgtattgagcttgtctcctgtttgacataaacttgtgtggttcgttttccagtaaaaatacatggcttttaagattttttttttctacagagtattttaaagggataaaaaaaattaggatttatatatattgattaattagtaatcccataaccatactctgagaaactgaata

SEQ ID NO: 265080 - DNA, 201 bp, Homo sapiens
aagtttctgtatgaacatttgctttcatttaccttggatatataccgagaagcagaattcgaagtttaacctttaggagaactgcccactgtgttccacakctgctgtaccgttttatattgccaccagcagtgtagcaatgtcccaggtttctctctctccacattcttgtcgtcacttgttactgtttctaactagtca

SEQ ID NO: 265081 - DNA, 201 bp, Homo sapiens
gtaagtgtgaagtggtgtcttattgtggatttgattttcatttctctaatgactgtgatgttgattatcttaattcatatctcttccttataagaatgtcrgttcaagtcctttctttgctcatttttaaattgagttatgtttttgttgttgagttgtaagagttctttatatattctggatactggatccttaccagat

SEQ ID NO: 265082 - DNA, 201 bp, Homo sapiens
gttttaagttcaatttatttcaagatttagttttaatgtcaattatagctgaaaaatatacctccaaatgataaaaagatccaaatggaataaattaattkctttgttgactttgtaaattatgatactcacttttaagcatatctaccaataatgcaatgatttttaaaactaagattcacataatatatgttaacatat

SEQ ID NO: 265083 - DNA, 201 bp, Homo sapiens
atgtatagttatgtcatcaattgaatatgtatttctcattgcttttttttaaattttttaattaattaatttatttttttgagatggagtcttgctctgtygccgaggctggagtgcagtggcatgatctcggctcactgcaaccttggcctcccgggttcaagtgattctcctgcctcagcctcccaagtagctgggact

SEQ ID NO: 265084 - DNA, 201 bp, Homo sapiens
tttccaaatttctctcccagtagtggtgcgctttccatgcccatcagcaattgcaaagtgcagtatcaggctctccacttcctccccaacaggggagccgmaaggcttttgctttgtttctaattatatatttgagaaatgttattctatgtagttggctgtatgtttctttttaattttaaacaaagttgagcatctttt

SEQ ID NO: 265085 - DNA, 201 bp, Homo sapiens
gtgaatgtggccacctcatcactggttacttaaatataatactcatagaaatttgcttttattttttaaaataccagttgctattgagaacttatattccstggcacctcttttccttaatgtttaataactacaagtgctaaagttacatatttgtgtgttttgctattttaaaaaatgaactagtaaccagaagctgag

SEQ ID NO: 265086 - DNA, 201 bp, Homo sapiens
gatgtgctcttgcctccaagctggtgctggatggagctatttgctccttgaactttcctaaactcatctcgtcatctcttcccactgtattgatatctccyccttacctcttctcccgaagcaagaattcctcatctttcccaaagctgaccctttcacccgggatcatgattccatttttatcccacctcttcctaaact

SEQ ID NO: 265087 - DNA, 201 bp, Homo sapiens
acatacatgagtaaaaatggaaattccaaataggatcaggcataggggcgtttccttaatttgacctaaaacatgcatgcctggagattctcattggtttrataagacaaagaaagaaagtcaaagaattattgggaatattcagctaagagtaacaggaattcttccttctatagacagccctgtgatttttgtggtgtt

SEQ ID NO: 265088 - DNA, 201 bp, Homo sapiens
ttaaactttgtaaaatctggattttatcaggacaagtgaaaaattgcagaggactaattcctaaatattagtgagtgtttaaccctccgccaaaaaaaaamaaaaaaaaaaaaaaagggaaatggtggatgtagtgtctgttcttatgtctgggaggctgtctaggcaaaactcttctttttggtgttaaaatacccatta

SEQ ID NO: 265089 - DNA, 201 bp, Homo sapiens
tgtaaaatctggattttatcaggacaagtgaaaaattgcagaggactaattcctaaatattagtgagtgtttaaccctccgccaaaaaaaaaaaaaaaaamaaaaaaagggaaatggtggatgtagtgtctgttcttatgtctgggaggctgtctaggcaaaactcttctttttggtgttaaaatacccattattttaatt

SEQ ID NO: 265090 - DNA, 201 bp, Homo sapiens
gcgatttgtgtgaatgcaacttaatagccactgacaatcatttgacgtaaaacaggctttgcatatgcgatagaagattatggttctttaggattttctarcaagcctttagctccttcaggttctccagccagactgaagatgcagtgggtgagattccatttctgtcagtgtgactgtggttccctcaaatctcaatca

SEQ ID NO: 265091 - DNA, 201 bp, Homo sapiens
caatggcacattaaaaaaaaagcaaaagtgaaatggatgtggtggctcatgcctgtaattccagcactttgggagaccgatgcaggaggatcctttgagcmcaggcatatgagaccagcctgggcaacatagtgagactcctgtctctaaaaaaaaaacaagaataaaaaaaattgccctgtgtagtggcacatgcctatt

SEQ ID NO: 265092 - DNA, 201 bp, Homo sapiens
aagacaaaggattcaatgtgattaaatttgtgcctaaaattttgatctcaggctatggtattttaaacataatgctttacaccaggagtcccccctccccsccattgtgaaatgtacatgtgaagaatctaggttgcacgctccttatgagaatctaatgcctgatgatctgtcactgttgcccatcactcccaatgagac

SEQ ID NO: 265093 - DNA, 201 bp, Homo sapiens
ttttgatctcaggctatggtattttaaacataatgctttacaccaggagtcccccctccccgccattgtgaaatgtacatgtgaagaatctaggttgcacrctccttatgagaatctaatgcctgatgatctgtcactgttgcccatcactcccaatgagaccatctagttgcaggaaaacaagctcacagctcccactga

SEQ ID NO: 265094 - DNA, 201 bp, Homo sapiens
aaacctcgtctctactaataaaaaaaaaaaaaaaaaattaaccaggcgtggtggcacatgcctgtaatcccagatattcgggaggctgaggcactagaatygcttgaaccagggaggtggaggctgcagtgagccgagattacaccacagcactccagcctgggtgacagagttaaactgtgtctcaaaaaaaaaaaaagg

SEQ ID NO: 265095 - DNA, 201 bp, Homo sapiens
cactcccaatgagaccatctagttgcaggaaaacaagctcacagctcccactgactctacattatggtgagctgtataattattccattatatattacaawgtacaaataatagaaataaggtgcacaataaatgtaatgcgcttgaatcatcctgaaaccatctccctgctccagtctgtggagaaactgtctcccacga

SEQ ID NO: 265096 - DNA, 201 bp, Homo sapiens
taaaaaaaaaaaaaaaaaattaaccaggcgtggtggcacatgcctgtaatcccagatattcgggaggctgaggcactagaattgcttgaaccagggaggtrgaggctgcagtgagccgagattacaccacagcactccagcctgggtgacagagttaaactgtgtctcaaaaaaaaaaaaaggaaaaaagggatttagaaa

SEQ ID NO: 265097 - DNA, 201 bp, Homo sapiens
tccaaactccactagtttagaatttatcttttggagcttgggggaggagggatattaaaacaccttttattactattattattagagatagagtcttgccstgttgcccaggctggactacagaggtgtgatcatagtttgaactcctggattcaagcaatcgtctcgccacaacctccctgagttgttggtactacaggc

SEQ ID NO: 265098 - DNA, 201 bp, Homo sapiens
cttgggggaggagggatattaaaacaccttttattactattattattagagatagagtcttgccgtgttgcccaggctggactacagaggtgtgatcatartttgaactcctggattcaagcaatcgtctcgccacaacctccctgagttgttggtactacaggcattcaacaccatgcctggctagtttttcaaattttt

SEQ ID NO: 265099 - DNA, 201 bp, Homo sapiens
cagagaccccacatcacatcagcaatgtgcttataaaccatggaaaagagcataattatagaggcacatgataagcactggaaatatgagaagagacatcwttttcaaaagacctgacttgctctttaggacaccagaggacagaacttggattgatagatgaaaggtatagaggaccagatttctttcctgaggggaact

SEQ ID NO: 265100 - DNA, 201 bp, Homo sapiens
aagagactctactgacttaggtcattcttctattgttcaaattactaaggtttcacagcctatgaaaatctgttatctgttgagaatactcattccgtccrtcttcctgagaaatggagttaactccaccatatagacgtgcagtaagaatggctgtttgggccgggcgcagtggctcacgcctgtaatcccagcacttta

SEQ ID NO: 265101 - DNA, 201 bp, Homo sapiens
gtcttcctgagaaatggagttaactccaccatatagacgtgcagtaagaatggctgtttgggccgggcgcagtggctcacgcctgtaatcccagcactttrggagtctgaggcgggtggatcacctgaggtcgggagttcaagaccagcctggccaacatgtaaaacaccgtctctactaaaaatacaaaaaattagctgg

SEQ ID NO: 265102 - DNA, 201 bp, Homo sapiens
gcagtgagccgatatcatgcactgcactccagcctgggtaacagagtgaaactctgtcaccaaaaaaaaaaaaaaaaagaagaaaagagaaaggctgtttrtggctgtttggtgtgatgggaggagatgtgcacctgagctgagaagggcagggtagggatgacaggaacccacctttgctaatatgagtgccatgagcca

SEQ ID NO: 265103 - DNA, 201 bp, Homo sapiens
atgaccaagtccttgttctagatggcatccttaactagaaaagaaaataaatggtcagtttattaattcagatattgtctatagatatattgtcaaggcarccttttttttggtaaggttttctttttattaaaacctagaaaagatgatatatttgacactccatacattgtatcagagacctgtcataagtagtctgaa

SEQ ID NO: 265104 - DNA, 201 bp, Homo sapiens
ttctgtctcggagcctattttataatcacattgatgttcacgtatgtaccgacatcgtcagtgttgccgttttctcattttcctcatgtttagattattasttctatctttaattaatagtttctttgaaggattatttttaagtcacctatctgttttaatagggttaatttaattaaaatgagataagttattcattat

SEQ ID NO: 265105 - DNA, 201 bp, Homo sapiens
caagtccttgttctagatggcatccttaactagaaaagaaaataaatggtcagtttattaattcagatattgtctatagatatattgtcaaggcaaccttwtttttggtaaggttttctttttattaaaacctagaaaagatgatatatttgacactccatacattgtatcagagacctgtcataagtagtctgaaattaa

SEQ ID NO: 265106 - DNA, 201 bp, Homo sapiens
tctttgtggaggtcaattctttccatattttttgcataatacctgtgtaagtcctaatattacccccataaaccagtgaaccatttttcacaaatcctggkttatatacggcacctcagaaaagcctagttcaaatgctggctctgaatcttactatatacataatacagggcaaggttcttcaccttagtgtgacttgat

SEQ ID NO: 265107 - DNA, 201 bp, Homo sapiens
aaggttcttcaccttagtgtgacttgatttcatcttaggtaaaatggggataatgcattagcatcattttatgtggacacattaaaataatgccttatgargtacctttagggtacatgctgaagacagtaggcacgcaatgtacactggcttttgttattttggttgtgatttaagcatgcactccagtaaacatataca

SEQ ID NO: 265108 - DNA, 201 bp, Homo sapiens
aggtaggcagatcacttgaggctaggcatgagaccagccaggccaacatgatgaaaccctgtctctactaaaaatacaaaaattagctaggtgtggtggcrcatgcctataatcccagctactggggaggctgagacaggagaatcgcttgaacccaggtgatggaagttgcagtgagccacgatcacaccactgcactcc

SEQ ID NO: 265109 - DNA, 201 bp, Homo sapiens
aaggcttcagagtccatgcctgatcctgtctgtggtcagatgcagcacagcccctgacaacacgatgggcactttgggcacgttgctgatcgtgcactccyggtgctgtggaatgtttctctggaggttcttggctgacctcctcagcaattctaattgtataaaatggctggacctccagagtcagaccccagtgttgtc

SEQ ID NO: 265110 - DNA, 201 bp, Homo sapiens
actttgggcacgttgctgatcgtgcactcctggtgctgtggaatgtttctctggaggttcttggctgacctcctcagcaattctaattgtataaaatggcyggacctccagagtcagaccccagtgttgtctttgacgtatggaatcttgggagtggcccttgctgatttctctgaagagtggtccattaacctctccacc

SEQ ID NO: 265111 - DNA, 201 bp, Homo sapiens
taaaatgcctgtgcgaattgttttgagcccccgtggggactactggctatttttggattgtaattcctccaagaaaattaaagcaagatttatttatgcamtcaaaggacattttatccctaaagccatcggttcctttcaatgataaagtttctatctaatcataaaagatggattaatctggtactggaatccatagct

SEQ ID NO: 265112 - DNA, 201 bp, Homo sapiens
cgtggggactactggctatttttggattgtaattcctccaagaaaattaaagcaagatttatttatgcaatcaaaggacattttatccctaaagccatcgkttcctttcaatgataaagtttctatctaatcataaaagatggattaatctggtactggaatccatagctccaatccattccttgattttcctgaacttag

SEQ ID NO: 265113 - DNA, 201 bp, Homo sapiens
taaagcaagatttatttatgcaatcaaaggacattttatccctaaagccatcggttcctttcaatgataaagtttctatctaatcataaaagatggattartctggtactggaatccatagctccaatccattccttgattttcctgaacttaggagtgtgaatgaagctgcaaatggggtagatttattggtaaatatgt

SEQ ID NO: 265114 - DNA, 201 bp, Homo sapiens
catttctgtcagtgtgactgtggttccctcaaatctcaatcacctgtgtctgtgcactccagtaggcgactaactgagattgaacaggttgctccaaaggktagttaactcagattaatgtgaacagttgttggggtaaagacaagtgtagtgggtgtcagtacaaagcagctgtctccttggtgagttaaaccacgtgtg

SEQ ID NO: 265115 - DNA, 201 bp, Homo sapiens
tgggtgtcagtacaaagcagctgtctccttggtgagttaaaccacgtgtggcatcccagtaccctgctactgcatcaaattgagttactagttgtggagasgaagataaataccagtgtgcaggtgggagtcaagtgctaatttactattttgagaaaaaccaatcacatttattttggctttctgctgtaacatttaagt

SEQ ID NO: 265116 - DNA, 201 bp, Homo sapiens
gcagctgtctccttggtgagttaaaccacgtgtggcatcccagtaccctgctactgcatcaaattgagttactagttgtggagaggaagataaataccagygtgcaggtgggagtcaagtgctaatttactattttgagaaaaaccaatcacatttattttggctttctgctgtaacatttaagtctacttctgacctcaa

SEQ ID NO: 265117 - DNA, 201 bp, Homo sapiens
gaataaagtcagatttacaaataaaatttgttcccgacaaaagtgacatgcttcaatttcattcatttcttaatgaatatcatcactttagagctgccctrttgtgctttatgaagtttttcccctcagttaagtttctctctgcccttgtattgcttgtgattattcgctcagaaagtgatgtctaggctagcgtgctgg

SEQ ID NO: 265118 - DNA, 201 bp, Homo sapiens
taaagagcctatgcatctcattttagagttgggttttggagtagatatttattcttgcttgctttcttttctctgctttcatttatccattttacatagtrtacttggttcatgtatttttctttcgttgtttttaatatgaaggctttaaaaaattatggataaccaatcaacattagatgtcacaaatagttacttttg

SEQ ID NO: 265119 - DNA, 201 bp, Homo sapiens
ggttttctttttattaaaacctagaaaagatgatatatttgacactccatacattgtatcagagacctgtcataagtagtctgaaattaagatacagaatrtctccctaagcaaacaaataatgtttttaagtgccaactgtaactgttcctctcggctagagacacattagaactttgtcacttttagaaaatgtcaggt

SEQ ID NO: 265120 - DNA, 201 bp, Homo sapiens
agaactttgtcacttttagaaaatgtcaggtagccacagagctaaggaatgctttggacaaccaccttagctaatgccaggagttgcacaaaaagattaattttccaaaagtctttcaacctttgaagacagtgtccgggtctcctgaattccagttaattgtctgttctctttgtcatagttgccccagtctccacattt

SEQ ID NO: 265121 - DNA, 201 bp, Homo sapiens
ttgcctacaatttgctgggtaccatgctaggcactgggcatgcagataagagtatcatacggcctgcaagagtctagtggacaagagagataaagaaacaratttgaagaggtgtgacaaatgctatgacaaaggaaagcccaggatgctgtgggtacctagaggaggaacagctgctctagatttgaataatatgaaaga

SEQ ID NO: 265122 - DNA, 201 bp, Homo sapiens
ttcactgagcatctactatgcacaaagcagtgacagtatagtgaaatttattatagtcaaattacatggggcacaaagggaggttaatggttatgccacamcctataaaggagatttccattggctgaagagttgatatatgaactgagttaaaaggaaaagtgaggctgattcagaatttatacaattagccattacaac

SEQ ID NO: 265123 - DNA, 201 bp, Homo sapiens
atatgtatttataagttatttcccattggattccacctaaaggaggtttcgaaacatggcagcctctttcttcattataaggtgattttgctgtaaaccargacagtggcagatagacattcaaatacaagtgtagccttgaaggaataaacaacatggaaaatgggcttatagttacaagtatttcatatacataattat

SEQ ID NO: 265124 - DNA, 201 bp, Homo sapiens
taatcttctctacagctttgtcacatagatatcattgcttccatttttagaaggagaaaaaccaaggcttaaatggaaaataacacactcaggatcattgmgaggagccagaatttgcacgcatgtgtataagcctttcctattctgtatgtgtttaaggagagagagagagatttgtttcatctgagacatttattatct

SEQ ID NO: 265125 - DNA, 201 bp, Homo sapiens
agatatcattgcttccatttttagaaggagaaaaaccaaggcttaaatggaaaataacacactcaggatcattgcgaggagccagaatttgcacgcatgtktataagcctttcctattctgtatgtgtttaaggagagagagagagatttgtttcatctgagacatttattatctactgaggagtcaacttttctaaatga

SEQ ID NO: 265126 - DNA, 201 bp, Homo sapiens
atcattgcttccatttttagaaggagaaaaaccaaggcttaaatggaaaataacacactcaggatcattgcgaggagccagaatttgcacgcatgtgtatragcctttcctattctgtatgtgtttaaggagagagagagagatttgtttcatctgagacatttattatctactgaggagtcaacttttctaaatgaatct

SEQ ID NO: 265127 - DNA, 201 bp, Homo sapiens
gtatataaaatatctcttatatattgtgtatatatatattatatatatattctcatatatataatatatatatatgagaatatccgtagagttagcaaacyattttccaaattacactggtctcatgcaccaaacgtcttaacagtgtctgtatatattcatttctagataaatatctaatacctcttgctatcaagatgt

SEQ ID NO: 265128 - DNA, 201 bp, Homo sapiens
tgtgtctctttcaaacttcttaagctaaacaccttatacattcttcaaggtatggccaggcaacaatgaaccaatctttttcattgacaaaattatgatgrtgaataattaaaactggcttaaaataccatccaggtagaaaccctgctctcctagtgtgaactcattctttgaccagatattgtgttatactttctaagg

SEQ ID NO: 265129 - DNA, 201 bp, Homo sapiens
tcgatgcctagggagtcaagaaacttgggttgcagacacctacttagggagcaaaacataaaatctaatatgaaggaatattttttggttttcgaacattrctctcctaaatacaaataatcatgttaatataactcctaaaacacattggaaaactaggtaaatatattaaaagatgcgttacaaaagaatatatgcaaa

SEQ ID NO: 265130 - DNA, 201 bp, Homo sapiens
gtcagcagttggcacaatttttgaatgtatgcattctgcattgtcatcagagtgggcacctcctgaggctgggaggattctaacgtagtcaataaaatacyaattgacctttaaatatatcattttaaatggtttgatgtattcttaaatttattatgagccatattatgcatacacaagagtgcttatagcacttgtata

SEQ ID NO: 265131 - DNA, 201 bp, Homo sapiens
gctttggccacttacatacaaacacacacacacatacacacacacattcggtaactgtgataaaactttattcttcctccctgtgcgatgtcttgtgttamtgagacttcatgcatagaaattgctatgagctagtgacctcctactatctttgaaataattaataatgtgcttagaggggttgatttacatatttatgag

SEQ ID NO: 265132 - DNA, 201 bp, Homo sapiens
ggggcccattatttctgatgcttattttgaaaaacttccaatccggcctcccataactaaggctttctctccatttcagcgtctcatccagcttttttttwaaaaaagttatattcagtaggctttaaagtcaatcttgatattttccactgttatggtttaaaaccctaaatagattacactgacaatactgacaaattt

SEQ ID NO: 265133 - DNA, 201 bp, Homo sapiens
ctctttaggtatcacactgagatctggctttgaagtgtgtgtgtgccaggtggctcacacggcacactggaggtgagacagtcagtgggctgtgggtgtcrgcttggacatcagaatagagtgggaaacaatggttccccaagctcttggcattcaggtctcacctccctcccccagccactggcccactgtgtcatttgg

SEQ ID NO: 265134 - DNA, 201 bp, Homo sapiens
gttctttttggcttcgccatcatttccttggagggagaggttaagtacttgttagctactatgttctggtctctaataaaaataggattagattctcttargtttagagtggagccagggttctgttagcttagtccctggtacgacataggcaaaatgcctacttcgcttgattctacagctatgaaaaaatgagagaga

SEQ ID NO: 265135 - DNA, 201 bp, Homo sapiens
gcccaggctgtagatgacaacagcctgtgtaagctgcagaatgaagggtggctgcttcagcccatcttccagatcccacctaagaacctctcttatttatrgtgcaccacaatgggagacatggagagaatgggattctgggaaatgtagtccagacagccacagtggcacattgcagcatctccacaatgaggcaggaaa

SEQ ID NO: 265136 - DNA, 201 bp, Homo sapiens
caggaaagacgaaatagatggacagtaacagtaaggaggggattgggtaaaggccatgtaatcatccatcatgcgattcagtcaccacattgcagagtggraagaggatatagaggtcattgagttttctccctcatctcacaaatggggaagtccagtcaaagcctaggaggctggttttcctgaagacactggatgagg

SEQ ID NO: 265137 - DNA, 201 bp, Homo sapiens
aaaggccatgtaatcatccatcatgcgattcagtcaccacattgcagagtgggaagaggatatagaggtcattgagttttctccctcatctcacaaatggrgaagtccagtcaaagcctaggaggctggttttcctgaagacactggatgaggccagctggtgagaggtggaaagccccttcttctccatctttatttagc

SEQ ID NO: 265138 - DNA, 201 bp, Homo sapiens
acggcaactgcagtcaggtgctgtctgggcgcagctgcaggcagtggctggagcatgaaggtggactaaaggttgtagggtgacgtcgtcacgcacacctrgtgcgtcacctctgtctgggccctggagacccagtgaagcatggtgatctcaggttttccttcattgtgttttcaaaatggttcttatgctgagcaattt

SEQ ID NO: 265139 - DNA, 201 bp, Homo sapiens
gacgtcgtcacgcacacctggtgcgtcacctctgtctgggccctggagacccagtgaagcatggtgatctcaggttttccttcattgtgttttcaaaatgsttcttatgctgagcaatttgttgtttacaccctacaaagtggtccctggtgccatccttggttggttggtttttttttttttttttgagccagagtctca

SEQ ID NO: 265140 - DNA, 201 bp, Homo sapiens
tcaaaatggttcttatgctgagcaatttgttgtttacaccctacaaagtggtccctggtgccatccttggttggttggtttttttttttttttttgagccrgagtctcattctgttgcccaggctggagtgcagtggtgcaatctcagctcactgcagcctccatctcctgggttcaaatgaatcgtgtgcctcagcctcc

SEQ ID NO: 265141 - DNA, 201 bp, Homo sapiens
aattgcacaaagtcactgtgcccacatgttttaaaaataagctatgcaaacacaattgttatctctagctgagttttaatgctgtaagtaaaaaataataygtaccattcctctaaagaatccttagttgatcatgagctttgaattgaagaatatccctaaatatccaatttttctaaggaataaagaaaaatcctatta

SEQ ID NO: 265142 - DNA, 201 bp, Homo sapiens
gttttaaatatttttgtagtaaagtcagtgccctgtatcaagcatggagatcattgaaaaggatctttaaggagcctggctttttggacataacctaattrtcccaggagataaggttatcacaccacttttcattatctgagtaaacatagttattctgggcagtgagtgttgccatgggtttctataactagaagttta

SEQ ID NO: 265143 - DNA, 201 bp, Homo sapiens
attgctatgagctagtgacctcctactatctttgaaataattaataatgtgcttagaggggttgatttacatatttatgagggtttatactgtttggttcyaaagcaggagactgagataatttcatgttttcaatgcataccaagttagcaagaggaggagtggcttaatattctaatgtcaagatgaacataaatatct

SEQ ID NO: 265144 - DNA, 201 bp, Homo sapiens
cctcctactatctttgaaataattaataatgtgcttagaggggttgatttacatatttatgagggtttatactgtttggttctaaagcaggagactgagakaatttcatgttttcaatgcataccaagttagcaagaggaggagtggcttaatattctaatgtcaagatgaacataaatatctaatacccaaaccaagtaa

SEQ ID NO: 265145 - DNA, 201 bp, Homo sapiens
aggaaaacactgtacaaaaggcagtggtgaaacacaaggaaggaggaataagaacagcattcaaagaagtaatcttatttacttcctcagcatcactcctratccctcccccaagctgctacctgtgacagctctttcttgtggctcaagcacagcagtgcttttattttattttattttattttattttatttttttttt

SEQ ID NO: 265146 - DNA, 201 bp, Homo sapiens
ggtgcccgccatgatgccaggctaattttttatatttttagtagagacagggtttcaccgtgttagccaggatggtctcgatctcctgacctcgtaatccrcccacctcggcctcccaaagtgctgggattacaggcatgagccactgcgcccggccatcaactactgtctcagtttgcccaggcttctattacaaaatac

SEQ ID NO: 265147 - DNA, 201 bp, Homo sapiens
  misc_feature (1)...(201): n = A,T,C or G
ccaaagcagttagtactgatgaatttcatggtgtgtgcggggagaacctaatgcattaggagaccacaaacaccaagtgaggtttgctattagttccagcnctaagaggctgtggtcagcatcacagagactggaaatgggtggtcctgcattgtagattgtgcgcctgcagggagcctgaatgtaccttcttcccttgcc

SEQ ID NO: 265148 - DNA, 201 bp, Homo sapiens
taaatattagtgagtgtttaaccctccgccaaaaaaaaaaaaaaaaaaaaaaaaagggaaatggtggatgtagtgtctgttcttatgtctgggaggctgtmtaggcaaaactcttctttttggtgttaaaatacccattattttaatttaattttattattttttgaaagtagagatgggggtcgcactttgttgcacagg

SEQ ID NO: 265149 - DNA, 201 bp, Homo sapiens
aaatatcacaattaaatggcttataaacaacagatatttatttctgacagttttgaaggctggaagtccaagatcagggtgccagcaaggtcaggctctgstgagagctctcttctgggttgcagaccactttctccttatgtccttacatagcagaaggcaactttcataaagacactaatcccaatcatgaaggttgta

SEQ ID NO: 265150 - DNA, 201 bp, Homo sapiens
ggagcgggtggagtgggggcagtcactgatgttaagtaatttaggagagcgcatgataagtgcttgaatgaatacctcccatacttcatccatgtggtatrctacacattcattcttatttattgagcagctagtatgtgccagacattggggatagagtagtgaacaaaacgaataaatcttgattttcatgatgaattg

SEQ ID NO: 265151 - DNA, 201 bp, Homo sapiens
ctcattgggaggtcacagcagtgctggcttcgtgctaccacttcacagacaaggaaaccaaggcttgcagcagtcagtggtttaccttgggctgcatggcracggagaagccgacactcagttctagctcatcagagtccgcatttctatttgtgatatcatacagtgtcatgtgacatcatgtgataccatgcaaggcat

SEQ ID NO: 265152 - DNA, 201 bp, Homo sapiens
atgttgaagattggacaaaaaataaaatatgggctatatttcacataaccttgactaacttggcattgaagtttcattggtggggaactagagaaaaatgkcatgccatagaaggaaatgggaagtctgaagacccggtttggttgggggaaggatgctgcattgttccaacatgacgggagttgatgccagctgagtacg

SEQ ID NO: 265153 - DNA, 201 bp, Homo sapiens
acaaacgccaagcaactgctgggtgctaggaacagtgctgagtgatgggaaacaaagatggaacaaacaagtcattagacaaaataaaatcacacacatawataacttcattttaaatgtttcaaagctctcgtgtactttatagtaattctaagaaatgcagatttacttaatattgttcaaataagatagcaattttta

SEQ ID NO: 265154 - DNA, 201 bp, Homo sapiens
ttccctgttttcttggagggtaagtcaagtgagggagatgacctcagtctaataaccacaacagacagatgaaactgaatctgcgactcccgctacaaagraatcatcactcagctacaggaatatataatagggaaattcgcccaggtcttgacctgcgtatttaggtatataagtatgagtctcttttaggactaccga

SEQ ID NO: 265155 - DNA, 201 bp, Homo sapiens
tcacttaccacagttttcaaatgggaataataacagagcctacttcaaagggttagtgtaaggttttattgagttaatatatttcaggcacatacagcatygaatgccataatgtgaagctcaaaaatgtgatcatattagatcttataattcttttcgtacttatttctatccacactttatttcccttgttaaagctgc

SEQ ID NO: 265156 - DNA, 201 bp, Homo sapiens
agtgagctgagatcttgccactgcactccagcctgggcgacagagcaagactctgtctcaaaaaaaaaaaaaaaaaaaaaaaagagaaagtttatgcactrtggctcagggtcagaatttgtctcctttcattctggaaatgacaagaatggggtttggtgggagtcttttgagaagacacgtagagtacgtgaatagaag

SEQ ID NO: 265157 - DNA, 201 bp, Homo sapiens
agtatgagtctcttttaggactaccgaatagatcatagcatgtctccctcaccgactgcctttctacaggtcaagaacgaagtggcagttccttgtcattmtaagtgttcaccactcccatttacttagaggtagactctccgtaactttcaaacagaacagttcgttttgaaaagttcctaaaatagattacagaactta

SEQ ID NO: 265158 - DNA, 201 bp, Homo sapiens
tgtctcctttcattctggaaatgacaagaatggggtttggtgggagtcttttgagaagacacgtagagtacgtgaatagaagcaaggtggctatcaaacartctcatcagttatatccgatttgttgattattacttttatgtgaatactttttccttgaaagcacaatttagttttcaaaagacaatttttgagtatttc

SEQ ID NO: 265159 - DNA, 201 bp, Homo sapiens
gccggtgacaacactaagttgaaattttccaagaaagtggcctttcaaatcactaatagctacagtaattatattatatataactctattacagaatttayatagaacagtatcctaggaaaatgctaaaatgcacgaaataggatgactccatcacacacattggtttttacataggtgtcactgttcaactctaatctg

SEQ ID NO: 265160 - DNA, 201 bp, Homo sapiens
taatacctatctagacatcaaaggaaaagagatgaaatactaagtaatatccctaaaagaagcacttgaactgaaaatatttaggatcattggactacttytttgcacctgtaatccctgtcatctgaattctcttaccttccgcaacctgggaacttgggtatctgtaatatcacttctgcagtcaatatttgacttgac

SEQ ID NO: 265161 - DNA, 201 bp, Homo sapiens
aatctggttttctggaattatatatataattgcatatatatgtatatgtttttgcaactcctagtccatatggagagagattttaattcaggaaattaaaraataaatttcagaacatttattgttgtatcccttactaaattatagatggatggaactatccttttatcttgaaaatttggcttaattgagagagtttat

SEQ ID NO: 265162 - DNA, 201 bp, Homo sapiens
ttattgttgtatcccttactaaattatagatggatggaactatccttttatcttgaaaatttggcttaattgagagagtttatttttccataaatacagtrgaatgctttcctgagagagcactgtactctctcacttgcttcttgtccatttgtgctattttatgccatactgattttgcactgagactggcagaaggca

SEQ ID NO: 265163 - DNA, 201 bp, Homo sapiens
agtccggttaaaaatggggtaacagagttgtgagattgcagaaaggaagcccccatatttttgaacactgcctaaaacaccagaacagaaaagtctacagyttttctgaatcctacctctttgtaaaatttcaggagaactaatttcatgtaaaactgagcaacagcaaaggaacaaggtaaaactctaacagaaaagaag

SEQ ID NO: 265164 - DNA, 201 bp, Homo sapiens
ttatcttcccacatgtagctagtttgtcctggtacataaactatctgaggactaccttcacttctccctttcatagacaattttgggtctcctgtatgtgscagaactgtggtctgccctgggaagaagacaatgaataagttggcaggaaaacaaaagggagaagacagctgaagagctctttcaaaggagggatccaca

SEQ ID NO: 265165 - DNA, 201 bp, Homo sapiens
atctacaaggaacttcaacaaatttacaagaaaaaaaacagactccaaggttttaaaactaggaagatgatggtgttactgaccgaaagagggagttctgytttagggctgtgatgaggcaacggtgtccattgagttgttttagaaaaagtgagtgcgagatggcaaatatggtaaaatctgatgttgaaaaagaagatt

SEQ ID NO: 265166 - DNA, 201 bp, Homo sapiens
aaaaaaacagactccaaggttttaaaactaggaagatgatggtgttactgaccgaaagagggagttctgctttagggctgtgatgaggcaacggtgtccawtgagttgttttagaaaaagtgagtgcgagatggcaaatatggtaaaatctgatgttgaaaaagaagatttaagtgggatattaatttccttttcaagtcc

SEQ ID NO: 265167 - DNA, 201 bp, Homo sapiens
acgctcaactgatttttgtacttttagcagacatggggtttcgtcatgttggccaggctggtctttaactcctgacctcaggtgatccacccgcctcggcytcccaaagtgctgggataacaggcataagccatcgcgcccagctatcccctttaatttttaataacttctatttcttagcatgttctgctttagaaaaat

SEQ ID NO: 265168 - DNA, 201 bp, Homo sapiens
gaagcaaactacagaagcctgtttcctttagccttaaaatagactccacgtccctccgtttttctccagatatactcccttcttatttatctaactgtacrctagcatctaattatgtgccttctttgaagatttgggggctaatcttgagacagacagaccaagcctggagacccagctgcagagttccagagatggcct

SEQ ID NO: 265169 - DNA, 201 bp, Homo sapiens
ataaataaataaataaataaataaataaataaataaataaataaatgaaagatttttcccatgattgctaatagttgacagataaagttagaataaaaccyagttctcttgcttttgtgtcactcattatgatgccaaatagctctttactatggcaagtatttatctgcttatgtaattaatctaaacagacatcatcat

SEQ ID NO: 265170 - DNA, 201 bp, Homo sapiens
aatctaaacagacatcatcattaccaccttttttctattttcatcatcatcttttcatgtttttatatatctgcttttccataatttagaataaaacaagrtgagaggtcagcacactgaggccctctgactaaatgtggccagcagtctgctgttgtacagggcatgagctaagaatgtattttacatttttacaaggtt

SEQ ID NO: 265171 - DNA, 201 bp, Homo sapiens
aaacagaaaaggagaggtctgtgtcaaagtggcattttctttatcttgtggaataatcttttatgttattcttctgtctcaaaaattgaatgttctttagwgataaatgcattatagagaagaatatcccaaaacagaataatggcaagaaacagttttcacgttgtaatctcaagcctctctttcaattgaggttttgct

SEQ ID NO: 265172 - DNA, 201 bp, Homo sapiens
tcaaatgattctcctgcctcagcttcccgagcagctgggattacaggtgcccgccctcatgcctggctaatttttgtatttttagtagagactgggtttcrccgtgttgaccaggctggtcttgaactcctgacctcaggtgatctgcccacctcggcctcccaaagtgctgggtttacaggcgtgagccaccgcacctag

SEQ ID NO: 265173 - DNA, 201 bp, Homo sapiens
tggagaaggagacagaaggtggcttcagtggctctgtggttttgaggtcaggtatctgggagactcatgaggggctgttattcagaaggagagtcacggartagacccggcttcaggataataatatagagtttggtttggggccttcacgggaggcttaaattatgcaatcctcttaaacttttctgactataaattatt

SEQ ID NO: 265174 - DNA, 201 bp, Homo sapiens
cttcagatgaacagagccccttccatagctcgtgctcactgtgattaagtgtgagtgggaagaaatgtggtgttgtaaggacccccttatctgagatgtgraaagatgtgttaattaaaggagaacagtttggccatgaatccatgtaagttaggcagacagaattttcctggctcattttatatatgtcatagtcctcca

SEQ ID NO: 265175 - DNA, 201 bp, Homo sapiens
ttgggatagaaaaacagtctctgtccatgaaaagaaaacacttcattacatacaaaaccttctgcatttcctcgaacccccatctccacctcctaggactrccaccaccacaggcccccaaagagcttatggttggttcctgaggaaactcttggctcagggtgtttgcacacatgtccgcatcttgctgtagagccccta

SEQ ID NO: 265176 - DNA, 201 bp, Homo sapiens
ctgtaactctgttttcttttttgataatatgacatgaggcaagaatctagatataataatacccttaaatagctgtaagttagtggctttcatccggggtrgttttttcccaatggggacctttggcaatgtctggagacattttatttgtcaccaatgaagggtggtgctcctggcatccggtgtgttgatgccagggct

SEQ ID NO: 265177 - DNA, 201 bp, Homo sapiens
ggtgctcctggcatccggtgtgttgatgccagggctgctgttgagcatcttacaaagcacgagtcagccccacagcaaagggttatcttgcccaactttcratgatgctgaggtcaggaaagcctgctctaggtggaagaagaggtggggctgacccaggaatgattttgtgagacaggacgatgacttcctccgagactg

SEQ ID NO: 265178 - DNA, 201 bp, Homo sapiens
aactttcaatgatgctgaggtcaggaaagcctgctctaggtggaagaagaggtggggctgacccaggaatgattttgtgagacaggacgatgacttcctcygagactgcttaaaccatgtacattccaaactctcctgttcctctccattgtttcatggtctgaagagaaatacatttagttccaaatttaagattgtgca

SEQ ID NO: 265179 - DNA, 201 bp, Homo sapiens
gattgtgcatgtgaactcctggcctttcacattgagccatggggctggctcttttccattggattttgataaaggaaggaagaaaaactggctgagccaayactggaaaacatgcttcatggtaaacaggcagtgattaggaggcctgcactgtgaaggagaggctgagtctggttgtacagagataaagcaattctgaaa

SEQ ID NO: 265180 - DNA, 201 bp, Homo sapiens
tgtctcactgtggcggcatcagtgatgtggcatacagagcttctgtggtattagaacattcttggctaaacctcagtcttgccaggattataatgagtttmcagtctttagtggaactgatgaagaagatactgctcagcgctgcagcacattcacagaagccatatgcctctaagtgcttcgcttcgatgtattatagaa

SEQ ID NO: 265181 - DNA, 201 bp, Homo sapiens
attgtaaatttgatgagcaaaatgctctctttctggtaaaaaagtttaaattactattaataatgaggttaaacagtttcaagcatttactgggataggtrcgtttatgtcactggcctattttctgtggcttgataatagcatgtttttactaaattgtaagagctctttatatactgaggataataattttttcagtgt

SEQ ID NO: 265182 - DNA, 201 bp, Homo sapiens
gctcatatatgttcacaaactcaggtctatacgttattgaatttttattcagccttttccaaggttatttttagatgtactttaaaggtttcatctagagwtttttattatgaaaagttccagacatccagttagatatttaaagtagcataatcaatgtccatgtacacactacccggctttgatgacttcattagttta

SEQ ID NO: 265183 - DNA, 201 bp, Homo sapiens
tgactggtacacggacaaggaccagaaaaagagctgtaggacaaaattgatggtgttgcagagctcattctagctggatcaacagggcactgtctgttcgrtcatctttttggccttggaaatgctgcctttatagaattctacttcagagaagacaacagaattttatgtttgcctgatgcatgcatgtgtctggattac

SEQ ID NO: 265184 - DNA, 201 bp, Homo sapiens
aaaccagaaaataccaatctgcatcaattttaatataaattatgaaatcacagctatctgagcttcatacacactatgctgagctcctaaaagatacttcrcatcttctggactggtaactgcctcatctacaagtaagaaattgaatagataatatttcatggcttctttcagcttattctgaaagcatcaaaatttaca

SEQ ID NO: 265185 - DNA, 201 bp, Homo sapiens
agagctattattgcccaggtgaaccgtctgatttcctgttaagagagatggctactcagatgagcaaactgtctggttaaattatttgcaggagtttcttsaagcaaacagtgaagttatttattgctttacaagcttatcttccagggcagaattcttctggaacaaataattaggtctcagtggtctcagttctcagcc

SEQ ID NO: 265186 - DNA, 201 bp, Homo sapiens
tttgtgaatggcttggtgcctcctcaaggtaatgagtgaattctcacttgatgagttcttgcaagaactgattgttaaaaagagcctagcctctctctatmtatatatatatctctctctggcctgggcccctttcctctctttctctctgtctgtctttctcttcctgccatgtggtctctatatgtagactccccttca

SEQ ID NO: 265187 - DNA, 201 bp, Homo sapiens
ctgaaaatgatacaatgaaagtactttgtattaagatatgtaaatccattcctacctccaaagtttctttgaaaaatgcaaaaaaaagagttcttacttcraaatgcttcatattcatgaaagcagttttaatgcaaaatactttattctgttagctattagttctttgatcaatgaaaattgtttcttacctgctgtttc

SEQ ID NO: 265188 - DNA, 201 bp, Homo sapiens
gtctcactgtggcggcatcagtgatgtggcatacagagcttctgtggtattagaacattcttggctaaacctcagtcttgccaggattataatgagtttcsagtctttagtggaactgatgaagaagatactgctcagcgctgcagcacattcacagaagccatatgcctctaagtgcttcgcttcgatgtattatagaag

SEQ ID NO: 265189 - DNA, 201 bp, Homo sapiens
ttctgtggtattagaacattcttggctaaacctcagtcttgccaggattataatgagtttccagtctttagtggaactgatgaagaagatactgctcagcrctgcagcacattcacagaagccatatgcctctaagtgcttcgcttcgatgtattatagaagctacgtttcagctacacggctgagattcctatcaaccaa

SEQ ID NO: 265190 - DNA, 201 bp, Homo sapiens
tcaatgtcacatagtcaataagttacagtagggtctcaagcccaggttttgtactaaagtgtgtattcctaggtgcgccccattctgcctcagtaccactrattataagtaggaaagggcttattcatggatctgaaattcagggtgcgtcgtgctagctcacacctgtcttgtaactctgatgcccagtcttcctgctga

SEQ ID NO: 265191 - DNA, 201 bp, Homo sapiens
actggaaagatgctggttggaatttagtcactggcacaagggctcccatagtctttttcctatgtcaggcctatgctgggatcagctacatggatgcagcattgagcttcccaacctgggtgaacatggatctgagtcataagacgacagctctgaactcaattcatgcatgtatgacacttacgtctggtttcatttatc

SEQ ID NO: 265192 - DNA, 201 bp, Homo sapiens
tcccctgagcataggaactgtgtctaatcgtctgtattcctcttatctagaccagttcctggcatttggattttgtgccatatatatttgtagaaggaatrtaggcataatcagaacattaatatcatcaaatgatattgatattctttcgtctactagccccacattatataaacagaagagtatattaaagagaatatt

SEQ ID NO: 265193 - DNA, 201 bp, Homo sapiens
ttgtaacaaaatcttaacttggtggtgttttcataattagtaaatgtagttactgatttcctacccaccagataggaaaatgtccaccatcccgacatgayggtgacatctgtccgacatcggcctctgaaggaaagagatacagttagcaaggatttcactgtagttcatggtaaaacagtaaataaaaaatgcttattt

SEQ ID NO: 265194 - DNA, 201 bp, Homo sapiens
ctaagcaagttccaaatctttctgtatctcaaggccttcgcatgtctcatggccagagaaattgtctgcattttttcatgcagctgactcctgtccaggtytcaggtctctgtttatctgattttccacagagaacagttccttgtcctgattcttgcagcctgtgacaactctcacctccttctttactcttctttcatg

SEQ ID NO: 265195 - DNA, 201 bp, Homo sapiens
agctatgtgaccttggacatgtaacttcatctttgagctttcttcatttgtaaaatcaggatcttaatttttaaaaagtaaagaaaactgaggctgatgtrggggggaaatcactggagcccagaagtttgaaaccagactgggcaacatagggagaccctctctctacaaataatacaaaaattagccaggcatggtggc

SEQ ID NO: 265196 - DNA, 201 bp, Homo sapiens
accaaggacccctatggacatacttgatttatcacaacggctgcagagtatacattccattgtactgtaatttatttagctttgctctattagtagacatkgagatcgcttactttttttccttctccaaatgttgggattaacagcagtgtacatgtatctttacagccttgccagtatttctaaagaacagatttccag

SEQ ID NO: 265197 - DNA, 201 bp, Homo sapiens
agttcttttgcaaaaagtgccatttgcaacccagataagaataaagatttctttcttcactgcatgtgtctttagaagaaaaccatcttccctaatcatcrtctttgcaaatgtctattttaaattttttgcctcaaaatatctcctgttggatactccagctattttctctttttgcctactcttaaaggggtatatgct

SEQ ID NO: 265198 - DNA, 201 bp, Homo sapiens
tgagtcagacatgaagccaacaaagggctgagtctcacccaagtcctgctgtaaccactccctggctactgcctatgttcactcaaggccctggggttttrtaatcagtaggtgataaaggcctgttttttccccttcagggcagtgaggtctgccaggctctctgggtaggtccagaggtgccatctgggggtcaggaac

SEQ ID NO: 265199 - DNA, 201 bp, Homo sapiens
tttaactttttaaaaaatactttttaaactcttcatgtgatttcttctgtgtagaccctgcacaaaagttcttcttatgctaactttatactatccttaayttttcccctaaatatctaatgtagtctctttagaataatatacaacagccagggttggaaacagttcaaggggtaaacgtctctatctgaacaaactctt

SEQ ID NO: 265200 - DNA, 201 bp, Homo sapiens
acagtggctcatgcctgtaatcccagcactttgggaggccgaggcaggtggatcacttgaggtcaggagttcaagaccagcctgactaacatggtgaaacsccatctctgctaaaaatacgaaaagtagctgggtgtggtggtgggtgcctgtagtcccagctgcttgggaggctgaagcaggagaaccacttgaactcag

SEQ ID NO: 265201 - DNA, 201 bp, Homo sapiens
taattttcagaagcaatactctattagatatctgccagttttctacagggaaatgtctagacattggtattcaggaagaatttcattatggtttgactatrtattttttattcacaaacctttaagaagttcacttttttcatccaattttcagaacaatgaattaaactttagaataaggttggataaatacttatcaag

SEQ ID NO: 265202 - DNA, 201 bp, Homo sapiens
ttagggaggaaagtattgagacactgtccagcggaagcaagagagcacatgtcccgaaagcctaagatagaggggctggaggctgcgtcagtgccacctgkcagtcatcatcttttcatacatgtccggttccttctatgagttcctcaggccctattactctacatccattttcttcccaccattaatatatgtgaagaa

SEQ ID NO: 265203 - DNA, 201 bp, Homo sapiens
tcaacaatagaggacatcaaaggatgcaagcttccttttgcttctaagcttcgtctcctccctactcagcattcattcagaggattagaatgtgaatgttwggattttacaagttattcatcctgcagtaaaggaatttggactccttctatgagcggcctctgatttgctggcttatgttttactgagctctgattggct

SEQ ID NO: 265204 - DNA, 201 bp, Homo sapiens
gaggcttgtagtgcggcttctgaaatcgctcctgactgcaccctaaccgatgtcagtacctcctcccttgcttctcagttagattctgctggctgagagcrttgccctaaacttctcctggatccacatcaccctgttcatgtctacaggagtcatttttctgaaacaccagtctgatcaggtcccatttttgagcaaacg

SEQ ID NO: 265205 - DNA, 201 bp, Homo sapiens
catccagaccttgtggttacaggccgacaaggggatgtgctttctgtctctgacaacactgccttgccacaggcatccgtttctccgttctgactcacctrtgggacagaacccattcccatcagtaacgataactcacttacagtcttaggagtcccaaaaagttgcttgggttttagggggtgggggatgtgtgtgtgt

SEQ ID NO: 265206 - DNA, 201 bp, Homo sapiens
gtaatagtgaaagtctggattaaaaaaaaaatcccttttattgggatgggttaaacacatttttatatagccatagaattataaccagacattaataagartgatgattatgtacgggctaggaaagatctccaagatggatcgatatgcacaggataattctgcctatattttaaaaagatttaattctgcctatatttt

SEQ ID NO: 265207 - DNA, 201 bp, Homo sapiens
ctgagcagcctgccgccacatggactgcagggatccaccagtttattcactcatcagttgaggaacatttgggtggcttcctgtttggggctatttcaaayagagctgccaggagcatttgtgtacaagtttttgcatgcacatgggttttctctgcattggttagaaattctggagaagaatggctggatctcctgttag

SEQ ID NO: 265208 - DNA, 201 bp, Homo sapiens
gcgggtctgacccaagagtggtgggagcagagcctaggctggcaaagctgtaaatatcagtggatgcagccagagtttggcttctcagctttgccggcatsctccagacacgctccgtgttctttcagtctggcaaccacatgtgccctaggactctgaggtcagcaagcacccagttgaaaggaaaaaatatcagtgtgt

SEQ ID NO: 265209 - DNA, 201 bp, Homo sapiens
tattcactcatcagttgaggaacatttgggtggcttcctgtttggggctatttcaaatagagctgccaggagcatttgtgtacaagtttttgcatgcacaygggttttctctgcattggttagaaattctggagaagaatggctggatctcctgttagatacatgttcacctttttaagaaattgccaaactatttttcca

SEQ ID NO: 265210 - DNA, 201 bp, Homo sapiens
tatttttccatagtgagtgtacgtgtgcataccattttccaaagcgcaggtttacaccagcagccagacgcttcaggtgaacccgtcgtacagttttctartcttctctgtgcagctctctctgctcagttctgttaactccagctgccccgtcttccccctacacacagacctgtgggttcaattccgcaagtctgctga

SEQ ID NO: 265211 - DNA, 201 bp, Homo sapiens
aatgtttgaaaggagactttcaattctcaacagctaaagcataagggaaattctcttagaggtttggaaccccaaagaagcagtggggtatggctctccayacactccccgcgtcttcccaagtgccccttctcactgttgtctcactaaaggcacctgcagaaaataactgactcttaatgaatgcctttgtcagtgacc

SEQ ID NO: 265212 - DNA, 201 bp, Homo sapiens
tgggaggcattgtttttccttggactgaaaaaaaataccctggcccaataaggggatagaaaaataaaagcaagcacaagagaaaaaagtttaagactgtrtggaaagccaactctacctctagctattttgacaggaaacctgggatcaagacctttgccccagtcacacttgggatcagtcaccttggattgggccacc

SEQ ID NO: 265213 - DNA, 201 bp, Homo sapiens
gaaaaaaaaaaaccaggggtgaatatcactgcagactgcaaggctctgtgcaaaggtaaagctttgtagttattatctgtgatggtgggaggcattgtttktccttggactgaaaaaaaataccctggcccaataaggggatagaaaaataaaagcaagcacaagagaaaaaagtttaagactgtgtggaaagccaactct

SEQ ID NO: 265214 - DNA, 201 bp, Homo sapiens
ccagcctgggcaaaagagagagattcagtctcgaaaaaaaaaaaccaggggtgaatatcactgcagactgcaaggctctgtgcaaaggtaaagctttgtarttattatctgtgatggtgggaggcattgtttttccttggactgaaaaaaaataccctggcccaataaggggatagaaaaataaaagcaagcacaagagaa

SEQ ID NO: 265215 - DNA, 201 bp, Homo sapiens
ctgcactccagcctgggcaaaagagagagattcagtctcgaaaaaaaaaaaccaggggtgaatatcactgcagactgcaaggctctgtgcaaaggtaaagytttgtagttattatctgtgatggtgggaggcattgtttttccttggactgaaaaaaaataccctggcccaataaggggatagaaaaataaaagcaagcac

SEQ ID NO: 265216 - DNA, 201 bp, Homo sapiens
aacgagagtcaaaactcaaggctgctacatttgatattgaagtcttatcaatcaaggcaggccaggttcaaataggagggctcgttaaatgaacttttccraactattattttggaggaatgcagatagaatctttccaaatggtaatagtggttcagtgagttaaacgggatgtaatatgtgatacgctggatgtaatgc

SEQ ID NO: 265217 - DNA, 201 bp, Homo sapiens
tgaaaaaagcaactgttttaaattttagcattaaaaactcacctatgccaagaaatttcctctaaatgtttagggaaattagtcactgtattcattttctmttgccgcagctcaacaaattaccacacacttaacacaaatgtattacccctcagtttccacaagtccaggcctgagtaccaaggtcctctgctgatcaga

SEQ ID NO: 265218 - DNA, 201 bp, Homo sapiens
tccagccatggtttcccagtggaggtcgattctgacaccagcatcttccagctcaaggaggtggttgctaagcgacagggggttccggctgaccagttgcstgtgattttcgcagggaaggagctgaggaatgactggactgtgcaggtgagtctcccttggcggccgttcttgggatgccgccagctccattgctcatgc

SEQ ID NO: 265219 - DNA, 201 bp, Homo sapiens
ggcgcccgctgtcctcatcgctccatcctaattccctcttaagggacattgttctggtcaagcagtcccctgatttagttcattcccctttaagtggattycccttgccttcctggtgaaggccagatgacttcaccaggtgtgcctggacctcgccgtcagcccctcctcttcctgtgcacctgcactcgggcctttgtc

SEQ ID NO: 265220 - DNA, 201 bp, Homo sapiens
caaggccctgccactcagtagctctgtaatcttgctgggcttcacttaccacagttttcaaatgggaataataacagagcctacttcaaagggttagtgtraggttttattgagttaatatatttcaggcacatacagcattgaatgccataatgtgaagctcaaaaatgtgatcatattagatcttataattcttttcgt

SEQ ID NO: 265221 - DNA, 201 bp, Homo sapiens
gtgtacactgtatgcatcttgaatgtttgtttatctaataaaagttttaaaggctttcggaaatataaaagtgaattatctccacacacacacacacacamaaaaaaaaaacctctgaagaaatgcaagctgaacaatgagaacacattgacacaaagacaggaacagcagacactggagcctacctgagcatggagggtg

SEQ ID NO: 265222 - DNA, 201 bp, Homo sapiens
ttaaaaacagtctgtctgcattatgaacgggaagtaatgcatacttctgaaatgataaggttcacttaatctctctttactcttttggagtagaactgatygagaacaacatttgctaatttgtaaggtcaagatatctttatttgcaggatgaatgaagaaatatacaggacttaaaaatagttaaaaaaaaaaaaatag

SEQ ID NO: 265223 - DNA, 201 bp, Homo sapiens
tgttagaatccctacacagacagtccccaatatatgattatttgactttatgatggtgcaaaagtgatacacaatggttgaaaccatacttcaagtaccartccaaccttgtttttcactttttgtacagtattcaataaattgcataagataatcaacacgttattataaaacttgtttcatgtcagattgttttgccca

SEQ ID NO: 265224 - DNA, 201 bp, Homo sapiens
tccttatttgtgttttctggaagcttggcaggtcaagttctttttgaaaatattgggttgaggaaatttaagatgagatttcttacgctgtaggagtagcrttgtcattcgtgatcatgtgtgattgtgttcacagttctttgtttttattgtaacttagtctatataaaccaaaaccaaaatgtcgataaaattttccac

SEQ ID NO: 265225 - DNA, 201 bp, Homo sapiens
gatggggtttcaccatgttggccaggatggtctcaatctcttgacctcatcatccgcctgcctctgcctcccaaagttctgggattacaggagtgagccamcgcgcccagccaaaggttctttttattacttttcctgatgccttctgccccctgtactgggtacagaggtaggatatgttgggtgggagagttgatagga

SEQ ID NO: 265226 - DNA, 201 bp, Homo sapiens
gcctgggtcccaccgaggacaattaatgatgaggtctgggcatctgagtttagtgaatgcccaccaggagattctgatcccgcagtgagtgtcaagccacwgttcgggacttctaagtactgggagcccccacttcacaaagctgccaattctgttttctacacagcacaactcagctgagaattcttccttagtttgcat

SEQ ID NO: 265227 - DNA, 201 bp, Homo sapiens
ttctaagtactgggagcccccacttcacaaagctgccaattctgttttctacacagcacaactcagctgagaattcttccttagtttgcattgaaatctgyaactgtcatcctcatgttagcaaacagggagtctgtcacccatacggtccacgtgaaaaagtgggaactttaaccactgattccaagaagattcactatt

SEQ ID NO: 265228 - DNA, 201 bp, Homo sapiens
acagcacaactcagctgagaattcttccttagtttgcattgaaatctgcaactgtcatcctcatgttagcaaacagggagtctgtcacccatacggtccasgtgaaaaagtgggaactttaaccactgattccaagaagattcactatttgagaatccaaaaagggatttggacagttagatagatgtgcatccagttctt

SEQ ID NO: 265229 - DNA, 201 bp, Homo sapiens
tcattttaacaggaagtctgggaaatatatagtttcaaataaaggactttcttctaattggaaaatttgtccttgtcactagttggtggtgacaaacatayactaggtctaaatccctggggactgggcatgggaaacccacgtggccctgtttactctccagttctgagggggctacttcttagctctgcagtgaggctc

SEQ ID NO: 265230 - DNA, 201 bp, Homo sapiens
atcagctgagagatacttccactcagtaaaactttgcacccattcgccaagccaacgtgtgatctgattcttctggtacaccaaggcaagaaactggggayacagaaagccctctgtccttgtaacaaggtagacgctctaattgagttggttaacacaaggtgcccgtaggcaaactaagagaacaccctgtaacacacg

SEQ ID NO: 265231 - DNA, 201 bp, Homo sapiens
aaaattagccgggtgtggtggcaaatgcctgtaatcctagctacttggaaggctgaagcaggagtatcacttgaacctgggaggcagagtttgcagtgagyggagatcgcaccactgcactccagcctgagcgaccgagtgaaactctgtatcaaaaaaaaaaagaaagaaattccaaaaccgttttcaaagtggttgttt

SEQ ID NO: 265232 - DNA, 201 bp, Homo sapiens
ggctgatcacgaggtcaagagatcgagaccatcctggccaacatggtgaaacctcgtctctactaaaaatacaaaaattagctgggtgtggtggtggtgcrcctgtagtcccaggtactcgggaggctgaggcaggagaatccactgaacctggaaggtggaggtggcagtgagccgagatcatgccactgcactccagcc

SEQ ID NO: 265233 - DNA, 201 bp, Homo sapiens
ttttttgtatttttagtagagacagggtttcactgtgttagccaggatggtcttgatctcctgacctcgtgatccacccgcctcggccccccaaagtgctkggattacaggcgtgagccaccacgcccggcccattcagtatttcttatccattctctctgtgtttgctctcaccacatttttccccaagagcagtgcatt

SEQ ID NO: 265234 - DNA, 201 bp, Homo sapiens
caagcaccttcccatagccccttcccagtgagagtcccgccctgtccatccttatgcccagcccatagcccctggccttatctgccccacacttagcactsctctgtatcctcagcagtgaactagccttccagaaagctctgtgcttcaatctcatgccaacatagacaaataggacagtctcaaccactgtaccatcac

SEQ ID NO: 265235 - DNA, 201 bp, Homo sapiens
agtcaggtgggaggctcctgaagcaactcaaagatgcagcaggggcccgagcgctgactttcagtctgcacgcccatcgctgaggatttcgctccttgacmgaatggtttggagaacaggtcttctttcagaatgtcatcttcccgcaagttaatattctgaagtggagaaaacaagctccaaagttacccgagctgccac

SEQ ID NO: 265236 - DNA, 201 bp, Homo sapiens
gtgtgcatgtgcgtgtgtgtgtatgaaagtaatgaaagcccaaagccaggacctcattttttcagttcccttttgcagggagaacttacctatgggtaccrttttggaggacaggaatcaaggcatatactgaaccctgttctctttgtgagtgaccctgttgccatttgggacatctgaaacagggcatgctttcaaatg

SEQ ID NO: 265237 - DNA, 201 bp, Homo sapiens
ttccgcaagtctgctgagctcccgctggggtctccctccctgaaccagggcctggccactctctgaaggcagcaggctggagtgattgcaggactcagcaygcttgcttcctgtctctcacggacctttgtcccacattgtctcatgtcactgtcttgaaaaccattgtttcatatattttgtggaattattaggttgctt

SEQ ID NO: 265238 - DNA, 201 bp, Homo sapiens
ttgtgttttataatagaaatatttggttatttgaaatcctcttgcttaattaggcagattcatactaaatggttcaacaggttgcatctataatcttgtgrctaaaagtggttattttcaagtcaatatttggggttcctttttagagatgagagtttactaattcaatatttgtagtcacaagatacataagagtcatgt

SEQ ID NO: 265239 - DNA, 201 bp, Homo sapiens
aaccgcagtgcgttgagggtattgaaacattcatgcactcagatgccacttattgaatgtctccaggcctaaccacagtacatgttagatggataaggccstcttcacctgtccactgactccgtctggctcccatgcccacctgtatacctacagggcttgaccttccctatcttaccccacattcaaagacttctccag

SEQ ID NO: 265240 - DNA, 201 bp, Homo sapiens
aaattgctatcattctgctgtggtttcactgttctctccaaaactcatgttgaacttcaattgtcagtgtaatagtgttaagaggtgggacctttaggcartgattaggtcctaaggactctaccctcatggatggattaatgccctgtgtttcataacatagttacaataataatcgtacagtgaacagccttggaagat

SEQ ID NO: 265241 - DNA, 201 bp, Homo sapiens
atacttagaaatcattgctaccgggacattttttgcctttttaatgattttcatttttgccctgtattcactgtttttctctctcttttttagtatgtttyctgttaccaatttgtttataggattccaagaaaataccatttgctgagtaccatgttccaggcactttctgtagtcagagctcgtttacttttcagagca

SEQ ID NO: 265242 - DNA, 201 bp, Homo sapiens
cagtgaacagccttggaagatagagatactgtctctttccgcagcagaggggaagtttgcttataacaaagacaatgtctccctctgttgacaatggcagkcctgctcacggcccattataaaagactcagattccctaaagtcagggtcctcacacctgtaatgcaacccatgccatgtgcagctgccatctggtccatt

SEQ ID NO: 265243 - DNA, 201 bp, Homo sapiens
aatatactgcattttgtttatgtattcatcaattgatgggcatctgggttgtttctacttccttgctattagaaaaatgctgctgttactgatcatgtacragtttttatatggacatacattttcttttcttttggatatatacctagaagggaagttgctggagatatggtaacactattttaaggtatgccactcttt

SEQ ID NO: 265244 - DNA, 201 bp, Homo sapiens
caaaggcagccacaatgccacacacttagagatgcaagaaggtgccacggcctttatggctgctgccctgggcacgggcatctgcgatgccagccaggttmgaagatggacggagcagccgcctgtctctccgtgaggctcgtgtggaccctgaagctcacagactccggcggatggcaggcttctgtctgcactctccac

SEQ ID NO: 265245 - DNA, 201 bp, Homo sapiens
tgaagtacttaatataaagctacccagtaaattctgataaaatctgatcaggaatttttgctcttgagaatttttgtagcctgtggtttcacattcattargatcataaaaccctttgatcagtccctatatgatgttatcctttagatgattctcaaaatgttggttgagtgtacattttaaagcattcatttaccattt

SEQ ID NO: 265246 - DNA, 201 bp, Homo sapiens
tgcaagaaggtgccacggcctttatggctgctgccctgggcacgggcatctgcgatgccagccaggttagaagatggacggagcagccgcctgtctctccrtgaggctcgtgtggaccctgaagctcacagactccggcggatggcaggcttctgtctgcactctccaccccagcagcccgtcctgcctccctctgcccct

SEQ ID NO: 265247 - DNA, 201 bp, Homo sapiens
gtaaataaaattaaagctcatttaagaaacctaaggtatattaatgatgatgaagtacttaatataaagctacccagtaaattctgataaaatctgatcargaatttttgctcttgagaatttttgtagcctgtggtttcacattcattaggatcataaaaccctttgatcagtccctatatgatgttatcctttagatga

SEQ ID NO: 265248 - DNA, 201 bp, Homo sapiens
tgagttatctcagcaacagtgtttttgttaaatgtagttgatacctattactgatgaaaagcaatagaaaagaaagcttctatttgggtaatgttttaagyttttctttacccaatggattagtgtaatttgctctctcattttcattaattttattgatgactgaaattgctcattactcaaaaagctggaattttttta

SEQ ID NO: 265249 - DNA, 201 bp, Homo sapiens
tttattttctgtaacttttctttgacaagctgccaatttctctcagcagcaggagaactaaatttagtccaacctagtaaaatcagtgtaatcattttttrgctacttctggtttaaaacctagactctttttgacagtatccagttgattccagtattgtcgttattgtggacattgttcacagtttaaagcctttctct

SEQ ID NO: 265250 - DNA, 201 bp, Homo sapiens
tcttgttctgccttctctttagggaaagagcaccttggtcatcattctctagataaaataagcaaaggcagttgcgttctgcctcatgctcaaggggaacrtgccaagaatgtgtcgaaacacaaaaatgggtcctcaaccctgataggtatagcaagctttgtacagctggcagctccacgctgtcagtctccttgcagt

SEQ ID NO: 265251 - DNA, 201 bp, Homo sapiens
gactttctccagatgtcttgtcttcatttgcttttcattcatactttttttaaaagcattttaaaaaaactgattggaaaccgtgtgcaaggtcaggcttsttaaattctgcatttcacctgagtacctgtagtagagcagtgaacaggatgtgaggaaggggcacacctgcacccaaacactggactatttctagggtgg

SEQ ID NO: 265252 - DNA, 201 bp, Homo sapiens
caccttggtcatcattctctagataaaataagcaaaggcagttgcgttctgcctcatgctcaaggggaacgtgccaagaatgtgtcgaaacacaaaaatgrgtcctcaaccctgataggtatagcaagctttgtacagctggcagctccacgctgtcagtctccttgcagtccccactcctcaccccgaccccatgtctgc

SEQ ID NO: 265253 - DNA, 201 bp, Homo sapiens
gcccattcttgaaccaggatcagaagaagtgtacaagtgagaaggaacccagtcagaagcagataagcctcactcttgcactctaggaggtaatttgtcargcgggcctattgctgcacttccaaaaagcaattttcttcctcctttctgtagaagaaggccaagaatgcctgtttctttatccaatcaaagttgcctgtt

SEQ ID NO: 265254 - DNA, 201 bp, Homo sapiens
ccaaggatctgcaacagatgtagaaatcacatttcctgagattccaagaaatgcagccatttttcctccttctccgcttggcatctcagtgggccccaggrttctaccagttgaagtcctcaaagactcactttggcctctttttgcaccaagaagtggaaacttgaagtgtcccctaggcaaatctgatctgtcctggct

SEQ ID NO: 265255 - DNA, 201 bp, Homo sapiens
tgcacaggcatacctggctgcagcaatgaattggggatgaaatgcggcttatggtctgttccctagacttagttccctggtatgtggttgcacacacctaragagagtttttctcattgtcataaaagtacctcaaagacccataaattcagagaagaaactgtgtgatatgatttggttgtgtctccacccaatctcatc

SEQ ID NO: 265256 - DNA, 201 bp, Homo sapiens
tttttgaagtcctcccaccaagataaggagcatggtttgaaaattggagagtgtattttgttgtttcttagactcatctctcaatacaattaaaaatgcastttaatctctttttaagttttcatttgaaaatttcaaatttatagataatacaaaaataatattaagaacaccctttataacatctgtcacagttgagct

SEQ ID NO: 265257 - DNA, 201 bp, Homo sapiens
aattcaacccctcgtagtgcccaggttgatccagatgtttggcagctcctaggtgaagggagctggaccctaggggcggggcgggaagagggcaggacctkggctagagctgcaacaagcttccaaaggtaagcctcccggttgctaagcgactggtcaacacggcgggcgcatagccccgccccccggtgacgtaagatt

SEQ ID NO: 265258 - DNA, 201 bp, Homo sapiens
cagatgtttggcagctcctaggtgaagggagctggaccctaggggcggggcgggaagagggcaggaccttggctagagctgcaacaagcttccaaaggtargcctcccggttgctaagcgactggtcaacacggcgggcgcatagccccgccccccggtgacgtaagattgctgggcctgaagccggaaagggcggcggtg

SEQ ID NO: 265259 - DNA, 201 bp, Homo sapiens
caccatagatgtagcagtgcattgatttcctactgctactatctaggttgggatccatgtccccagagagagtgctattctaaatatttatcaactggttkttcctgggcacctcccaatgtgaatgcacactacagccaatcaaaatggaccctggccatattttactggcattcgagccattctgatgcacattgattt

SEQ ID NO: 265260 - DNA, 201 bp, Homo sapiens
tgaataaagctgctgtaaacatctgtgtgcaggcttttgtgtggacatgattttagttttcaactcctttgggtaaatactccaggtattgctgcattgtrtggttatagtatgtttagttttgtaagaaaccaccagatttccaaagtgactataccgttttgcattcccagtagcaatgaacgagagttctgttattcc

SEQ ID NO: 265261 - DNA, 201 bp, Homo sapiens
tctaggtttgcctgggcacaggcttatcctataaccttctctgtggtgcccaggcagctgtagttcaggcctactcaggctttttatgaccttcgttgtaytacttagataaaacagaatacttgaaatcactagttacagagaacaagagtctataaactcattctgtaaaacaaaggaaaatttgtttttcttctccct

SEQ ID NO: 265262 - DNA, 201 bp, Homo sapiens
ttctgggagatacaattcaagttgagatttgggtggggacacagccaaaccatatcatctcccaagctataaaatgacttatttgaaattttaaaaggagractccaaggaagtgttcaaatattcacgtacctaaactgaaacatgtgtttatatttttgaaaaatagcctgagcacttgacaactaatgttatatattg

SEQ ID NO: 265263 - DNA, 201 bp, Homo sapiens
gagggtgtacctgcggcggaaagtcccccacgctggctttgctcatgaggcccgttagcctgtgaagttccgggtgacaaatgaagcttcttcacacattrcactcaccgggcatctctccagtgtgagcattcgggatgcttaaggcctgagtgtggctgaagaatctcgcatagacggcctctcctgggtgtgaattct

SEQ ID NO: 265264 - DNA, 201 bp, Homo sapiens
acacattcagtgtcttagacttttaagaagatttttgattgacaaaaaccattcattggaacatagtctcttctataccttgtttcacttagcatctcttygagaatttacatatctgcatgtccagatccactccacagcgattcctgcctagtcttttataggatacactaattatgaaaatatttaccaataaataag

SEQ ID NO: 265265 - DNA, 201 bp, Homo sapiens
gttagcctgtgaagttccgggtgacaaatgaagcttcttcacacattgcactcaccgggcatctctccagtgtgagcattcgggatgcttaaggcctgagygtggctgaagaatctcgcatagacggcctctcctgggtgtgaattctctgtgctgagtgagtgggaactttctcagcctggcttccccaacaaatccctt

SEQ ID NO: 265266 - DNA, 201 bp, Homo sapiens
tttttgtcagtacttttagagaccatcttttagctggagcagctttttggcaaatttatatttctagaaaatgtaaattgtgcttgctacaaatgaggcaygaacagaacacttagtaaccttgatgaggaagtgagccattctcggtgggggtaatcaggagagttagagagcaagaggagaagggcatgaaggcattac

SEQ ID NO: 265267 - DNA, 201 bp, Homo sapiens
tccttaaacaaacaccatgctgtgtcgctcggaggcaggtttgtcagggaactaatgaggcattcaccttgggctcctcacttgcatggaccctttccaartcctcttaaccatgttcatcttcttgcattggttttcttaaaaagggtttcgaaaattataaaaatgaagttgtaaagcctccctcaaatgtggttttag

SEQ ID NO: 265268 - DNA, 201 bp, Homo sapiens
tcctatttttactactgctcataaaaaaattaattgatttcctaaagaattcatgttatgcattattctttttttctggccttattgctattcatcagaaytatctcacaaactttaatgactccgatgcaaaatgctgacgtgtttagtgctggaaaacagcaacaaaatatggaatacattatactcactgacctggga

SEQ ID NO: 265269 - DNA, 201 bp, Homo sapiens
aacttctaggctcaaatgatcctctcacctcagcctcctgagtagctgggactacaggtacatgccaccatgcccaggtaattttttttaaattttttgtmgaaatggggtcttgctgtgttgcctaggctggcctcaaactcctggtctcaaacgatcctcccacgtcagcctcccaaagtgcttggattacagacatga

SEQ ID NO: 265270 - DNA, 201 bp, Homo sapiens
ctgaagccttgaacttctaggctcaaatgatcctctcacctcagcctcctgagtagctgggactacaggtacatgccaccatgcccaggtaattttttttwaattttttgtagaaatggggtcttgctgtgttgcctaggctggcctcaaactcctggtctcaaacgatcctcccacgtcagcctcccaaagtgcttggat

SEQ ID NO: 265271 - DNA, 201 bp, Homo sapiens
tatctgcatagcaaggagaaatggctaaatcataagctgatgttcctctctgacgttattatagtttttttaatccaaagaggaagttctataataaactrtttttcattagtttctaaaagatggcagaggaatagtgagctgaattttcttttttttttttttgagaaagtctcattctgttgcccaagctagagtgca

SEQ ID NO: 265272 - DNA, 201 bp, Homo sapiens
acctaacactatcataataaactagaagtcaaggctgaaaatccagatcatggatatagcaaagaattaggttgaccacagaggttcttcaatgctttccycctgtctagggtgtctcaatgatcaaggctgaaggggactctggtggtgatataatcatcattatcagaatagaagcctgtggattcctgggggaagcag

SEQ ID NO: 265273 - DNA, 201 bp, Homo sapiens
ccttcaggatactcttactatcctcatccctaccagtcaatgcacataaatgacagctcacattatcccattttttaaatgtgggaatggattccagagtygggatgttgcttcagaagagaaggggtgggaaggcaagtagcttggggtgctgggaaaccttgctaatttcccagggttggttagaaggggtcctttacc

SEQ ID NO: 265274 - DNA, 201 bp, Homo sapiens
tgcaaacttaatcaattgactaatgataagcatgtgcagtgcatggcccaaaatggacatgattagcaacaatgatgatcaggataatgcatttcagagtygcttcatgtgatccacaaaaagcagtttttaacacaactcataaaaaagcttttatgcccagatgattcagtgatccaggtattccttctcacatggctg

SEQ ID NO: 265275 - DNA, 201 bp, Homo sapiens
agaatcgtttaacagtgtagagggcaagaaagatgtcaacaacagagttcaaggcggagcaagggagaggagtcctagaagactggggaaaggctggggaygaatcctagaagaacttgatgttcgcctggagacttggatcttacaagttcactggaagcacagagttcatcagatgcacctcagccagctggagcatgt

SEQ ID NO: 265276 - DNA, 201 bp, Homo sapiens
tcacagtaggttatcagccaatggtaaatcgtgacctcttcatctccaagggtctgtgttctattttccattgccttaattcctcttcatcattcaatgtrtcagccatccttttcctggttaatgtactgttttctttcatggtcccctagtctcttagtagtcaagattcactgtcaaaaattccttgttatgccaggt

SEQ ID NO: 265277 - DNA, 201 bp, Homo sapiens
cctagcagtatggctgcatatttatttaaggttaggccctcctgttactttgagtgcagtccttaccagagaggatggcaaatctcagagatgtactggcytatcttttaatatgcaaactgtaccttcatcctaacatccacagtgtctgagttagttgagcaagcagaattgtttaagcttctgcctaaacagatcaga

SEQ ID NO: 265278 - DNA, 201 bp, Homo sapiens
catatctttttacttgcacatgtaagcatagatgtaaaataaaaatcgtatgacaatttgagttaaagagtttgtagattttacattttcctaggtatttyaaaatttttccaaaataagttgcccaattttacaagcctatctaaagcctccactaatacaacatggtagtaaagagctgccctgcccctctgggctgaa

SEQ ID NO: 265279 - DNA, 201 bp, Homo sapiens
catgtaagcatagatgtaaaataaaaatcgtatgacaatttgagttaaagagtttgtagattttacattttcctaggtatttcaaaatttttccaaaatawgttgcccaattttacaagcctatctaaagcctccactaatacaacatggtagtaaagagctgccctgcccctctgggctgaaaattgccaaaagacgtcc

SEQ ID NO: 265280 - DNA, 201 bp, Homo sapiens
catgaaatcatttttagtacctttagactatttttaaagtttaacacttacagcgcaaatcaaaggaatgaagacaacctttttggaaatcggtaactacyatcctcattaggttcagatggagcttacagtgggagttaggtgggtttttatgcaggtggtgttcggatgatttctcactatttgcgaaaaatttcacat

SEQ ID NO: 265281 - DNA, 201 bp, Homo sapiens
catagatgtaaaataaaaatcgtatgacaatttgagttaaagagtttgtagattttacattttcctaggtatttcaaaatttttccaaaataagttgcccwattttacaagcctatctaaagcctccactaatacaacatggtagtaaagagctgccctgcccctctgggctgaaaattgccaaaagacgtccttcctgag

SEQ ID NO: 265282 - DNA, 201 bp, Homo sapiens
caccaaatagaaaccttttttccttgaatgaataggtatttatgattattatttcagtgtcatttctttataccatatgtattagatggtgctgggtaggratgggtacacataggttgtatttgtctatatattgcctgtggggaaggtacatagaaatgaccatttcttcccaataagtttgtggcctagttgggctga

SEQ ID NO: 265283 - DNA, 201 bp, Homo sapiens
ggcaagtctggcttgtaagtctgactggggaagttttgctgctaaggagggaacctgtccatgcagagttcagtatgagttgggaaaggagaaatgatgcrggtgctttcgagtccaaacatcatgcgctgcctctgtcctgtgttcgggaagccacaaccgtgagtgctgttcctgtgtgcgatatcagggcccgtcagt

SEQ ID NO: 265284 - DNA, 201 bp, Homo sapiens
ctcactagagcaacaggaaatagtaaagacaggatctggtcatcagaagatgaaagcacaaacagggagctctatgtgtacatgtgtgtgtacatgcatgyatgtgtgtgtgtgtgtgtgtgtgtgtgtgtgtgtgtgcatgtgtgtactcaggaaggccacagaaggagggctccctagcgggacctcgatggcatcctc

SEQ ID NO: 265285 - DNA, 201 bp, Homo sapiens
aggtgggtatcataatataggtttatacaaggaagtactggaaaactcagcctatagagcttggaagatccagctgtttcccagtggagccattccagttktcctgcaggacaagtaggagttaactaggtgaaggcggccttctagacaggcatggaggggagagaagagaatagaatgaaaggtatctggtgaggctgc

SEQ ID NO: 265286 - DNA, 201 bp, Homo sapiens
ataggtttatacaaggaagtactggaaaactcagcctatagagcttggaagatccagctgtttcccagtggagccattccagttttcctgcaggacaagtrggagttaactaggtgaaggcggccttctagacaggcatggaggggagagaagagaatagaatgaaaggtatctggtgaggctgcaggcacaccagataag

SEQ ID NO: 265287 - DNA, 201 bp, Homo sapiens
cccgagtagctgggactacaggcgcctgccaccatgcccagctaattttttttgtatttttagtatagacggggtatcaccgtgttagtcaggatggtctygatctcctgacctcgtgatccacctgtctcggcctcccaaagtgctgagattacaggcatgagccaccgcgcctggcctctggaataatttttaatggag

SEQ ID NO: 265288 - DNA, 201 bp, Homo sapiens
tattccagcaaatctcataccgtactaaatttctcagaagcacgaaaatatctaggcctttattgctcactttaactgggctctttgcatgctcttattttgttttaataaattatctgaaaggattaaaattaaaacatgattcttttcctaatgctaaaagcacttctgtgacacaatatgcttaacactgaagaaact

SEQ ID NO: 265289 - DNA, 201 bp, Homo sapiens
tgggtttaagcaattctcctgcctcagcctgctgagtagctgggactacaggcatgcgccaccacgcccagctatttttttttgtatttttagtagagacrgggtttcaccatgttggccaggatggtctcgatctttgaccttgtgatccacccacctcggcctcccaaagtgctgggattacaggcataagccaccgcg

SEQ ID NO: 265290 - DNA, 201 bp, Homo sapiens
ttatggactgctctattatgggcatgtacgtactaaatatagtgataatgatgctatttttcaaatgtcatcattgtgcgaagtaatcacctaccacacarcaatcatacggcatacagaacgatttagttccctgtcctcaggcctcagttacaggttctagaggcagccacttagcgttgttattccagaaattttctg

SEQ ID NO: 265291 - DNA, 201 bp, Homo sapiens
tcactagagcaacaggaaatagtaaagacaggatctggtcatcagaagatgaaagcacaaacagggagctctatgtgtacatgtgtgtgtacatgcatgcrtgtgtgtgtgtgtgtgtgtgtgtgtgtgtgtgtgtgcatgtgtgtactcaggaaggccacagaaggagggctccctagcgggacctcgatggcatcctca

SEQ ID NO: 265292 - DNA, 201 bp, Homo sapiens
ttttgcaatatcttgattatgcctatttgcagtgtgtgtgtgctgtataattatattgtgtgtgtatgtatatatatatatatatatatagtttcgtatcrtgctttttccatttagcaggacattatgataaattttctctgtgccaggcatgcacgtggcagctcatgcctgtaatcccagaactttgggaggccaggc

SEQ ID NO: 265293 - DNA, 201 bp, Homo sapiens
tacttccttatgaaggaagaatgacagagagctacaacttgatttttgcctattgtgaggtcacttaaaggtaatgcagtagtgttacacatgaggagtctgtgtgtgtgtgtgtgtgtgtgcgcgtgtgtgtgtgcgtgcgcgcgcgcgcaggcgggtagggtgtatggactagttgatgaagctagccaaggacataac

SEQ ID NO: 265294 - DNA, 201 bp, Homo sapiens
acttccttatgaaggaagaatgacagagagctacaacttgatttttgcctattgtgaggtcacttaaaggtaatgcagtagtgttacacatgaggagtctgtgtgtgtgtgtgtgtgtgtgcgcgtgtgtgtgtgcgtgcgcgcgcgcgcaggcgggtagggtgtatggactagttgatgaagctagccaaggacataact

SEQ ID NO: 265295 - DNA, 201 bp, Homo sapiens
tatgtatatgaaatatatttcctataatcatatgaaatatatatatgaaacatctatatataagtatattatagatgtttcatatatatatttatgaaatygctattttcagccatgaagtatattaggagagagacttgtcctgttccacccccacctccaccacgcgtgcgtacacacatgcatgcatgcaattcctcc

SEQ ID NO: 265296 - DNA, 201 bp, Homo sapiens
tgaaggatgcaaagcaaagatgtgctcctcctggtagaaatcccctctcggaagtggcagtcaaaggtctaaaccagtggcctgggcaccgcccactcccrgggtgtcatagagctgcttctcctgccccccaggtccctggggctggcagcagtggcagcagtcactgggtctgggactcccctccctccccgtggatcc

SEQ ID NO: 265297 - DNA, 201 bp, Homo sapiens
cagtagtgttacacatgaggagtctgtgtgtgtgtgtgtgtgtgtgcgcgtgtgtgtgtgcgtgcgcgcgcgcgcaggcgggtagggtgtatggactagttgatgaagctagccaaggacataactcacttttcaaggtagttttctcaggtggcaaaagaaggtgtgaatattctcctggactcccatagtgcattgcag

SEQ ID NO: 265298 - DNA, 201 bp, Homo sapiens
agtagtgttacacatgaggagtctgtgtgtgtgtgtgtgtgtgtgcgcgtgtgtgtgtgcgtgcgcgcgcgcgcaggcgggtagggtgtatggactagttgatgaagctagccaaggacataactcacttttcaaggtagttttctcaggtggcaaaagaaggtgtgaatattctcctggactcccatagtgcattgcagc

SEQ ID NO: 265299 - DNA, 201 bp, Homo sapiens
caaaacaggactgacatctttgcttttaacttactttttaaaaagaacagaagttaatttttttatttctaatatctcttgttacattgtaatgttttcartctagcactttgagaagttaatgggttatgtttgggttcaacctgtcaacagtaattatatttagaaatgcaatacacaaattagactaaaggcaaatgg

SEQ ID NO: 265300 - DNA, 201 bp, Homo sapiens
gaggccggggtggcgttggggtgcaggtcggtggggggatgggtgtttgccacgtgtcactgacggttaggaccacccaagactctgtggtgactggaagrcgtgccatgaagatgcatacctagttaccaagttgtgaaatggccctcactaaccacagcgccctcactgggcctctgccgtgagtggatcttagcaaag

SEQ ID NO: 265301 - DNA, 201 bp, Homo sapiens
cagtgctcctagaaaatgaagggattggcatgcacctataaagagcagaaggcggccgggcgcggtggctcacgcctgtaatcccagcactttgggaggckgaggcgggtggatcacaaggtcaggaggtcgagaccatcctggctaacacagtgaaaccccgtctctactaaaaatacaaaaaattagccgggtgtggtg

SEQ ID NO: 265302 - DNA, 201 bp, Homo sapiens
ttctctctgcaggagccccgtcctggttttccagtgcaactcccgccacgtgatttgcttagactgtttccacttatactgtgtgacaagactcaatgatyggcagtttgttcacgaccctcaacttggctactccctgccttgtgtgggtaagtctagcatgttttctctccatctctaatgctaatgaagaacagaaga

SEQ ID NO: 265303 - DNA, 201 bp, Homo sapiens
cagtgaggtgtgagatggaaggttaaaaccggctgatctaaggcccgttcgattattttcataactgaaaagcagccacaggtaaaagtggctgaaagtcrtggactctaggttgttgcccactgtgtttgacagatgcacagaggcaggtcttagaaaccgtgacactgttcgatgtttatagctcaataagttaaagcc

SEQ ID NO: 265304 - DNA, 201 bp, Homo sapiens
gtagtgttacacatgaggagtctgtgtgtgtgtgtgtgtgtgtgcgcgtgtgtgtgtgcgtgcgcgcgcgcgcaggcgggtagggtgtatggactagttgatgaagctagccaaggacataactcacttttcaaggtagttttctcaggtggcaaaagaaggtgtgaatattctcctggactcccatagtgcattgcagct

SEQ ID NO: 265305 - DNA, 201 bp, Homo sapiens
cttttataacaagcagtaagtcagtctgctgtttgtccaaggggagaggttgcctcatctctcacctgcgaaagcaacctgagaagtagcccaggttattaaaaaaaaaaaaaaagtgttcagacccttgatgtcttggcatacccagtaagacagtagtctccaacctttttggcaccagggatcggtttcataagacaa

SEQ ID NO: 265306 - DNA, 201 bp, Homo sapiens
ttttataacaagcagtaagtcagtctgctgtttgtccaaggggagaggttgcctcatctctcacctgcgaaagcaacctgagaagtagcccaggttattaaaaaaaaaaaaaaagtgttcagacccttgatgtcttggcatacccagtaagacagtagtctccaacctttttggcaccagggatcggtttcataagacaat

SEQ ID NO: 265307 - DNA, 201 bp, Homo sapiens
taaaacccttggtttaatagaagatacagggaaacattttattcataaatgaaactattccctatatgctttcatgagcttctgttggtttcattttgtcggggggtgtgtgtgtgtgtgtgtgtgtatgtatgtatgtgagtgtgtgtgtgtgtgtatgtatgtgaatgtgtgtgtgtgttcctattggaaatgagtttt

SEQ ID NO: 265308 - DNA, 201 bp, Homo sapiens
aaaacccttggtttaatagaagatacagggaaacattttattcataaatgaaactattccctatatgctttcatgagcttctgttggtttcattttgtcggggggtgtgtgtgtgtgtgtgtgtgtatgtatgtatgtgagtgtgtgtgtgtgtgtatgtatgtgaatgtgtgtgtgtgttcctattggaaatgagttttt

SEQ ID NO: 265309 - DNA, 201 bp, Homo sapiens
ccttggtttaatagaagatacagggaaacattttattcataaatgaaactattccctatatgctttcatgagcttctgttggtttcattttgtcggggggtgtgtgtgtgtgtgtgtgtgtatgtatgtatgtgagtgtgtgtgtgtgtgtatgtatgtgaatgtgtgtgtgtgttcctattggaaatgagtttttgaagt

SEQ ID NO: 265310 - DNA, 201 bp, Homo sapiens
ttcataaatgaaactattccctatatgctttcatgagcttctgttggtttcattttgtcggggggtgtgtgtgtgtgtgtgtgtgtatgtatgtatgtgaktgtgtgtgtgtgtgtatgtatgtgaatgtgtgtgtgtgttcctattggaaatgagtttttgaagttatacttttgctaatactgaaagattagtgatgat

SEQ ID NO: 265311 - DNA, 201 bp, Homo sapiens
aatgtaacctcagggatttgttaacaatttgttttttaaaagttcttcctggctaagtgcggtagctcatacctctagtcccaacaccttgggaggccgargtagatggatccctcgagcccaagagttcaagaccagcttatgcaacatggcaagaccccatctctacaaaagatttaaaaaaattagctgggcatggtg

SEQ ID NO: 265312 - DNA, 201 bp, Homo sapiens
tgcaacatggcaagaccccatctctacaaaagatttaaaaaaattagctgggcatggtggcacacacctgtagtccctgctgcttgggaggatggcttgarcctgggagtgcagtgagccaagattgcaccactgcactccagcctgggtgacagagtaagaccctatctcaaaaaaaaaaaaaaaaaaaaaaagtttttc

SEQ ID NO: 265313 - DNA, 201 bp, Homo sapiens
ttaaccctttactgcacaagtctcttgatacacagggaaatgaaatcccagttcaactgtctggacaaccatgattttttttttttttaattttctaatcttttttttttattatactttaagttttagggtacatgtgcacattgtgcaggcataggcatgggcaaggacttcatgtccaaaacaccaaaagcaatggca

SEQ ID NO: 265314 - DNA, 201 bp, Homo sapiens
tgacccaataattctacctttgaaaatctatcctaaaggactaacctgaaatatataataggcaaacacacccacacccccacacacattttaggaaaaarggtgccaactgcagcattatttatattagcgtaaactgaaaatcatcgaagtgtctaaaggcctcagtatgagaaagattggtttattttgtgataaatc

SEQ ID NO: 265315 - DNA, 201 bp, Homo sapiens
tgaggcaggagaattacttgaacctgggaggcggaatttgcagtgagctgagatcatgccattgcactccagcctgagtgacagagcaagactctgtctcaaaaaaaaaaaaaaaaaaaaaggaagtggtcagcgaacctggacctgttgctttctgtttctctcctccgtggttgtttggttcagcacttactgtcggct

SEQ ID NO: 265316 - DNA, 201 bp, Homo sapiens
ggagagctcatgtcccatgactactggttggtcataatacccaacccactaacgaaattcaggaccaccctgagagctgccccatccccagagctcctggrcgtcagctcaggcctcttaggctgtgcccgagctgggcttctcctctgcccagtctgccctcctccctttccatctcagtgtctgcttccccctttaccc

SEQ ID NO: 265317 - DNA, 201 bp, Homo sapiens
ctttctcaaaacactctcataataagcagacgttttctttatttggccctccataaagtcaacaggcaaaaatgccttgagcctcccaaaaactgttaccrgccgggcatggtgactcacgcctgtaatcccagcactttgggaggcaaaggcaggtggatcacgaggtcaggagatggagaccatcctggctaacacaat

SEQ ID NO: 265318 - DNA, 201 bp, Homo sapiens
tcctgaaacttctattttttatctaaatttggggttcaatgttgggaagttaaaattaataattgtcagaggagattgttttactagattaatacaggatsgtgaataagtgaggggaaaaaacctgtctctcaaagtaacaacatatatttaaaatacaagcataaaacatagaggataaagacaattgtaaagaatctt

SEQ ID NO: 265319 - DNA, 201 bp, Homo sapiens
tagacagaccagcccttggtgcgatgtcagaacacagatgtgtcttgaagcaggacccccaccctttgactctctcatggtgttctagtgtcttcacagcmcttattatggtgtaaagttatcctgtgctatggtttgaatgtgctcctcaaagttcaagtgtggaaatgcaccagtgttgggaggtgggtgggacctttg

SEQ ID NO: 265320 - DNA, 201 bp, Homo sapiens
aaatgtactttcttcccatttataaaccttcaaagactatccttaactaatatgcaactctctcacatacaataacagcaagatgagtcgtgtctttcaamactgacatgcatttcctagcctgatccagataccatttttatggatgatcaatctgtagataaatgccctaacctgagtgaatccctaactttgcaccca

SEQ ID NO: 265321 - DNA, 201 bp, Homo sapiens
tcaatgttgggaagttaaaattaataattgtcagaggagattgttttactagattaatacaggatcgtgaataagtgaggggaaaaaacctgtctctcaargtaacaacatatatttaaaatacaagcataaaacatagaggataaagacaattgtaaagaatcttagctcttccttaagtgaggcaacattttttgccct

SEQ ID NO: 265322 - DNA, 201 bp, Homo sapiens
ctttcttcccatttataaaccttcaaagactatccttaactaatatgcaactctctcacatacaataacagcaagatgagtcgtgtctttcaaaactgacrtgcatttcctagcctgatccagataccatttttatggatgatcaatctgtagataaatgccctaacctgagtgaatccctaactttgcacccaacagtct

SEQ ID NO: 265323 - DNA, 201 bp, Homo sapiens
attcatttacttgaggcccacatttgaatattctcccaagtgatttcccactttcaatatctggtctctgttaccataatgctaactgagttgttacctcmcctcatgtattagtcagggttctctagagggacagaactaataggataggtgttgtatatatgaaagggagtttattaaagataattgactcacatgatc

SEQ ID NO: 265324 - DNA, 201 bp, Homo sapiens
cacagttccacatgtctggggatgcctcaagaaaatgacaatcatgatggaaggcaaaagggaggcaggcatcttcttcacaaagcgacaggagagagaartgctgagggaaaggggaagagcctcttataaaaccatcagatctcctgaaaactggctcattatcatgagaacttcatggcgaagcgcccccgtgattca

SEQ ID NO: 265325 - DNA, 201 bp, Homo sapiens
aaaccactggtttaagtccaagagtcaaaagctgaagaactaggagcctgatgtttgagggcaaaaggcatccagcatgggagaaagatgaaggctggaasactcagccagtctgctctttccatcttctgctgctgccttattctagctgtgctggcagctgattagatggtgcccacccaggttgagggtgtctgcttc

SEQ ID NO: 265326 - DNA, 201 bp, Homo sapiens
atggaaggcaaaagggaggcaggcatcttcttcacaaagcgacaggagagagaagtgctgagggaaaggggaagagcctcttataaaaccatcagatctcytgaaaactggctcattatcatgagaacttcatggcgaagcgcccccgtgattcaattacctcttcctggtctctctcgttacctggggattatggggatt

SEQ ID NO: 265327 - DNA, 201 bp, Homo sapiens
tacaatgcatatatgtacctttctatatgtattaattcatgtataatgtatacatgcatcagtgtgtatttttactgtagtaacaatgcttcctccatttrcattaccatcgtgctgctttctcatcgttatatgtatttccctttcttccattctaacagtaaaactatcaaaggcaggaaccagacctgtaatgtcttt

SEQ ID NO: 265328 - DNA, 201 bp, Homo sapiens
agagagaagtgctgagggaaaggggaagagcctcttataaaaccatcagatctcctgaaaactggctcattatcatgagaacttcatggcgaagcgccccygtgattcaattacctcttcctggtctctctcgttacctggggattatggggattacagggattacaattcaaggtgagatttgggcagggatacaaagcc

SEQ ID NO: 265329 - DNA, 201 bp, Homo sapiens
ctacaaaaatatttatttatattgtgctatattccaaagacatttaaggtatcttggtaatttgtatgttttggggtaattttattcatccttaaactttrtcttagatgttttacatatagaattcttatataatgcttaaagcttaatacatggaaactctgaggttatttgggatttgagatttaatggagacagcaa

SEQ ID NO: 265330 - DNA, 201 bp, Homo sapiens
attgctatttcagcaagatacttgacagataattgagattgtgtgttgtacataagcattctagctgactagcagaagtcagagacacataaaacataatktttttatagctacacacatccttttttcgctttgcaaagtggcaaaaatgaaaatggtcattaacataagctaaagatttggcttccctcgagcatgtaa

SEQ ID NO: 265331 - DNA, 201 bp, Homo sapiens
tagaacaaaggttagaattgtactcctagaggttaaattaatatcaaaatttccacgtgaattatttgttcagactttggtactttacaaagtatgtgttmtgagagaaaagcaagaaatgtttctactttttctctgaaaaaagagctctcatgcacaatcatataaaattaattgagtctgataaattcatgttagagt

SEQ ID NO: 265332 - DNA, 201 bp, Homo sapiens
ttcactcacatctatggataaataaacagacaccaagatgtcaggttgtgaactccttagttcacctagttcttccttgagctgggactggaacccaggcygtctgaaccccagtatggctcattgttttatttctgtccaagagagaatgctggcttcaggtaaattcagtggcattgccaacaggtaaattcagtggca

SEQ ID NO: 265333 - DNA, 201 bp, Homo sapiens
taatattttttatgcttcttcagtaactttatctaaagttcttcactctaaaataatttcattgagacatttactatggtactgtttatttttgtaaagtwttttttttttttaaacagagtttcactttgttgcccaggctggagtgcagtggcagggtcttggctcactgcaacttccgcctcccaagttcaagcaaag

SEQ ID NO: 265334 - DNA, 201 bp, Homo sapiens
aggcacccttgctgctgtcaagaagcaaatgacagtgaagcaaagcttgacagtgtgtccgagatgcattttgagaggcgtgaacccggggtgttatgggrgcaccttggtgggcacaagacccactgaggccagtcagcgacagtttccttcagaaaggtgactcctgagctaggtcctgaaaagcgggtgggatcttgc

SEQ ID NO: 265335 - DNA, 201 bp, Homo sapiens
gtggggttaaaattgcagtgggaattaaattttgtgttttctagctagatttggattctatgacaataatcttgatctcatgacctgtatgtgtgtatatrtatatagtatatatgttttttaatttgtttctcaaatattaaatatatatatacacacacatacagtacatataaatatatctgtattttcttcctcaaa

SEQ ID NO: 265336 - DNA, 201 bp, Homo sapiens
gcaggagaattcgcttgaacctgggaggcagaggttgcagtgagccaagatcgcgccactgcactccagccgggcaacagagccagactccgtttcataaataaataaataaataaataaataaataaataaaataaagtcttctttctctgccgccccaaaatgtgcttcctctatgttaccatccttaattaattttgt

SEQ ID NO: 265337 - DNA, 201 bp, Homo sapiens
caggagaattcgcttgaacctgggaggcagaggttgcagtgagccaagatcgcgccactgcactccagccgggcaacagagccagactccgtttcataaataaataaataaataaataaataaataaataaaataaagtcttctttctctgccgccccaaaatgtgcttcctctatgttaccatccttaattaattttgtc

SEQ ID NO: 265338 - DNA, 201 bp, Homo sapiens
aggagaattcgcttgaacctgggaggcagaggttgcagtgagccaagatcgcgccactgcactccagccgggcaacagagccagactccgtttcataaataaataaataaataaataaataaataaataaaataaagtcttctttctctgccgccccaaaatgtgcttcctctatgttaccatccttaattaattttgtca

SEQ ID NO: 265339 - DNA, 201 bp, Homo sapiens
ggagaattcgcttgaacctgggaggcagaggttgcagtgagccaagatcgcgccactgcactccagccgggcaacagagccagactccgtttcataaataaataaataaataaataaataaataaataaaataaagtcttctttctctgccgccccaaaatgtgcttcctctatgttaccatccttaattaattttgtcac

SEQ ID NO: 265340 - DNA, 201 bp, Homo sapiens
ccaccacacccagctaatttttgtattttcagtagagacgaggtttcaccatgttggccaggatggtctcgatctcctgaccttgtgatccacccgcctcrgcctcccaaagtgctgggattacaggcatgagccaccacgcctggcctgactcttctttagtatgcctataagtaatttttcatcaataagcagtatagt

SEQ ID NO: 265341 - DNA, 201 bp, Homo sapiens
atcttagcgctctgtggagataggaaatttgagtcctgtaacttgtttcttaaaagtaattgcagagcatttgtatatacaatgccatttttaaaaaatgatattttagttcacatctgttttccaaggaattatagcttctttgcagatttacttattttccccagatcagtggaaaatccaggatatttattcactagt

SEQ ID NO: 265342 - DNA, 201 bp, Homo sapiens
tcttagcgctctgtggagataggaaatttgagtcctgtaacttgtttcttaaaagtaattgcagagcatttgtatatacaatgccatttttaaaaaatgatattttagttcacatctgttttccaaggaattatagcttctttgcagatttacttattttccccagatcagtggaaaatccaggatatttattcactagtc

SEQ ID NO: 265343 - DNA, 201 bp, Homo sapiens
ttagcgctctgtggagataggaaatttgagtcctgtaacttgtttcttaaaagtaattgcagagcatttgtatatacaatgccatttttaaaaaatgatattttagttcacatctgttttccaaggaattatagcttctttgcagatttacttattttccccagatcagtggaaaatccaggatatttattcactagtctc

SEQ ID NO: 265344 - DNA, 201 bp, Homo sapiens
tgggagtgaggaagtactgataagtgcccctcctgcaggccactagccagcaatgccgcctggccctggcctgtgggctgacccctgggaacaggctgtgsagtcgtagccaggaggaacgggcatgccagcaggtttgtgacgggttttctgccttgatgtatttgctcctagggctgccattataaagtgccacaagcc

SEQ ID NO: 265345 - DNA, 201 bp, Homo sapiens
tagcgctctgtggagataggaaatttgagtcctgtaacttgtttcttaaaagtaattgcagagcatttgtatatacaatgccatttttaaaaaatgatattttagttcacatctgttttccaaggaattatagcttctttgcagatttacttattttccccagatcagtggaaaatccaggatatttattcactagtctca

SEQ ID NO: 265346 - DNA, 201 bp, Homo sapiens
aagctaaatattccatttattaattaatacactctataacatgatactgatttgcagcctgaataaaaatccccttggtgagcagaggtttctatcagctraattatgaatagtataggttagaaattgattaacaataatttgtcttttttcccacatgtgaatttaaccaatctaataagagctttataaataactaat

SEQ ID NO: 265347 - DNA, 201 bp, Homo sapiens
gtaacaaacaacttcaacatttcagtggtttgaaacaacaaaggtttgtttctcacgcgtaaggcctgtccaatagggttggcagggagactgatgtgacstcgttctccatcagggtcggcaggtggagcccttccttcaggaagcaggatggtgggagggatggagagttgagtgccagaaattaaaggctctggcctc

SEQ ID NO: 265348 - DNA, 201 bp, Homo sapiens
tagagatgggattttgccatgttggtcaggctggtcttgaacacctgacctcaggtgatccacccacctcagcctcccaaagtgctgggattacaggcatragccactgcgcctggcctgactatctttttatgtgtttatttgccattctcttactttctttggtgaagtgcctgttaaaatcttttgcacatattttat

SEQ ID NO: 265349 - DNA, 201 bp, Homo sapiens
atgataccagccaagaattgaagaatgagcagatatgagcaaggcaaggaagagcaggaggaggcgtcctaggccccaggactgcatgagcaaagacaccrggtgtgcgcgcgccggtgtgcggaggcagcccctgctgctcgtgttccaggcaccgcacgcaggagcctcagctgaagcagtaggtaggatgcagaattg

SEQ ID NO: 265350 - DNA, 201 bp, Homo sapiens
agcgattgctttttgagtgccatctcgccctggcttctgtgtttcctgccatgtttatggagtcatctggtatggtcatggctttgttctaggcagttttkctttacagtccaaggccctgccactcagtagctctgtaatcttgctgggcttcacttaccacagttttcaaatgggaataataacagagcctacttcaaa

SEQ ID NO: 265351 - DNA, 201 bp, Homo sapiens
acagtgttgagcttcactaaaccatgtcagagactcaggccattgaagcctcagacaaaacacaaatttggagctgtgagaacaggacctttcttcccackttgggcttacccttctgacccagaatagatgaggtcttggggtttctcagacagcagggaacattcaaaatataaaacatttctaatttgtacccccaga

SEQ ID NO: 265352 - DNA, 201 bp, Homo sapiens
ccaagtctttccagcttatagtacattgaatttctcattcatgctgaatcaaaactttggcctttacctgtaaagtttcagtccatgggaaccaagaaatkggaatactccatatctggatatcaagatggtcaaagaaagcatctggtaggtatagtgtaggttgatgtaaagatccctccaaccttggtagttgatgcc

SEQ ID NO: 265353 - DNA, 201 bp, Homo sapiens
tgagcttcactaaaccatgtcagagactcaggccattgaagcctcagacaaaacacaaatttggagctgtgagaacaggacctttcttcccactttgggcytacccttctgacccagaatagatgaggtcttggggtttctcagacagcagggaacattcaaaatataaaacatttctaatttgtacccccagaaagttgt

SEQ ID NO: 265354 - DNA, 201 bp, Homo sapiens
agctgcagtgctgagaacatacaacccctacctttttaagcctctcatgtgcttatatttcttaaacaaaatggctatgtctattccttgctttcagtaaraggcatactcgtcagtttaataaaatgtatgttaattttcctaagccaatttacaagcagcattggtcaaatagctacatgcgggatgatcacccgaata

SEQ ID NO: 265355 - DNA, 201 bp, Homo sapiens
gtgtctcctgcttcataatgccaaatatgaatgtgtgatccttcttttgcttcagtcatcatcacctccataaatggacacaagcatcatctccaagttaycttgactcctctcttgctctcacaccacacatgctacctacccatcagcaaatcctgcagacaattccttcaaaacaccttccacaatctgaccatggct

SEQ ID NO: 265356 - DNA, 201 bp, Homo sapiens
tttcacctgtttcttagactgcaactagagtgcaaccagacctaaaactcactagattatatattcctcaatttgcaaattgctgcaacagggataagacraacatgaaggtagccttggtagaggtcaccaggccccaggaatgtgttgaaagggtcgatgtattaagaactcaactgctgcagccctctgaacacacat

SEQ ID NO: 265357 - DNA, 201 bp, Homo sapiens
atttacaagcagcattggtcaaatagctacatgcgggatgatcacccgaatatctaataatgatagagcacttaacggtttactaattccttaacaacatscatcatctatttttcgattttcttctctctctcggtttccacatgacccatgcattgaaagatttagatttcctattttgccgaattgtactgttttccc

SEQ ID NO: 265358 - DNA, 201 bp, Homo sapiens
tcaaaggtgcagaagaaacttcccaggcaagggacatttggaaacatgtggagttacttttgtgttgccgcaattaaccggggcgtgcctctgatacttaytgggctgcaggtggagccgaacatcccacggagcttaggaaaccctctcatgaggaagaattgcctgccttcagtgcactgagtccatttttgtgctcat

SEQ ID NO: 265359 - DNA, 201 bp, Homo sapiens
caacaacaacaatatttttttcccagcaagtcttaacatttgacctcaacagtgatgccaggtgaattctgggcatgttcccagcctccccacgggcagcygtggttcttgtttgtggagggactctctcccctagtttactcacagggtacttccacagtttacattttcactgaaatagattatctcatcttcctgcct

SEQ ID NO: 265360 - DNA, 201 bp, Homo sapiens
aagaattgcctgccttcagtgcactgagtccatttttgtgctcatgttaatggtctatcttgggctgtgattttctttgggtctctcagcaaaactgtctraggcatcacatgatgttatttgccatctaaaaggacttcaccgaacctttgacagttctggatatgactttgattagtccaccttatgtcacctgtattc

SEQ ID NO: 265361 - DNA, 201 bp, Homo sapiens
aagggcttagagctatttctctgcattgattgagcacattagactaatatttatccatttgaaactttgggaattggccatacatcatttagtagctgtgyacccattatgaaaagtaattgtatattagtatttccaaaaatttacatctggggtagaaaacctgtcaatcacaaatgttttcgtgatgattacattggg

SEQ ID NO: 265362 - DNA, 201 bp, Homo sapiens
cttaacatttgacctcaacagtgatgccaggtgaattctgggcatgttcccagcctccccacgggcagccgtggttcttgtttgtggagggactctctccsctagtttactcacagggtacttccacagtttacattttcactgaaatagattatctcatcttcctgcctgttaactgtgtttgaaaagcaaatcgaatgt

SEQ ID NO: 265363 - DNA, 201 bp, Homo sapiens
agagatctatgttggtattgccctgtgtgccatttaaaatgacattatattggttttcagaaatatttagggctagtttttcttctatgttttataagctytttaaattatctcctttttatgtttatgtgtttttttaattctaaagacatctatttttatgatcagaaaaatatttttataatcagaaatatattgtgt

SEQ ID NO: 265364 - DNA, 201 bp, Homo sapiens
atcaggaacagggaggccacatgggaggatcctccagccatgctgcaagatgcctgccagcctggagggagctgtgacctggtgtccataggtggcagcamcaggacataacgtcagcatagtgagtcatggttttgtttaaactgcaattgtgaaatatgatcacagcataagaacatgcattttttatgagttaattga

SEQ ID NO: 265365 - DNA, 201 bp, Homo sapiens
aaacttaataatattttttctgtgatttatggtttttaatatttactaagtgtcaacaaagtgtgaagatttataagagcattatagtgtgtatgtaattyttacgcaaagggtttattggttgatctatgtagataagtaggatgtaaacatatgggaagaatgaggggaaagtcagatgttctgtatcatgccacccac

SEQ ID NO: 265366 - DNA, 201 bp, Homo sapiens
tcctttacgggtgaagcaggaggtcatttgagtgcagtaaggtgttgtataatgacaatgacacttcagtccatgacagacacaggatggtggtcccatamaattatagtggagctgaaaaattcctatcgcctagtgacactgtagctgttgcaatgtagtagctcaaggcattattcatgtttgtggtggtgctggtgt

SEQ ID NO: 265367 - DNA, 201 bp, Homo sapiens
aacttaataatattttttctgtgatttatggtttttaatatttactaagtgtcaacaaagtgtgaagatttataagagcattatagtgtgtatgtaatttytacgcaaagggtttattggttgatctatgtagataagtaggatgtaaacatatgggaagaatgaggggaaagtcagatgttctgtatcatgccacccaca

SEQ ID NO: 265368 - DNA, 201 bp, Homo sapiens
ccttgagtagagacagggtttcaccatgttggccaggctagtctcaaactcctgaccttaagtgatccgcctgccttagcaccccaaagtgctgggattayaggcgtgaaccagcacgcccagccggtgttatggtttccaacagtattcagtccagtaacatgctgtacaggtttttaacccagcagcaaaaggctctac

SEQ ID NO: 265369 - DNA, 201 bp, Homo sapiens
tctaggtttgtagcaggtgataccatctaggtttgtgtaagtatgctctgtgatgtccacacaaagacctatttctcagaatgtatccatgtggttaagcractcatgacagtaattaaaaacgtatgcttactatctgtcctaaggaggataggaatgtgatttttcaactttacctgtgtccctgtcatcacttacaaa

SEQ ID NO: 265370 - DNA, 201 bp, Homo sapiens
aaatctgactcttggctgaccagcaaattccatctcagcattcccggctctcttttcctccccggcatcacccaagcctcagggaggcctctatggaatcygaaaaatctctggatgttgcccttttccacacctgtgtgttcccaagtggttgctccactgctgccatgcccagtggagctgcctcgtggggcccattgg

SEQ ID NO: 265371 - DNA, 201 bp, Homo sapiens
ctgaggctccagctgcccctttaaattgtgaacctatttgtatttccagcacttgctaagacttcactggtttgggaagatgacagttcataatggtaagwtcctataacaggaacaactgaaacctttaaccatctagagcaagctatgttcttactgaattccaataactttattggggtataatttacacatcatgca

SEQ ID NO: 265372 - DNA, 201 bp, Homo sapiens
atgatgtgccgctgtggcatcagacactctcatctggagctgtgctggttggcataatctatttatactatgtttagagacatgtgcacctgcacacacawgcatgtgcgtgtgtgtgtctgtccttccctcaaatagctcaattcacttctcctgggggtcaccaataagcatcgtgaaatgggtgtgttttttctttat

SEQ ID NO: 265373 - DNA, 201 bp, Homo sapiens
tagcacctgtcaaggaaatatgataggtcattctgccctataattttattcccctttcttccaagggtgacatgatcagcgaagcctgcatctcgctctcmttcacccattgtggttaacagcagttcaaacgtggaaatgaatcacctgctatattacttctgtgcagcaggaggcaaattgaaaaactaaatttttaca

SEQ ID NO: 265374 - DNA, 201 bp, Homo sapiens
aaaatgagtatggctgtatttggactctgaatattgcttagtatttgtgtctagtattatgctgttgtgtgcctaaatgttgtaaacatttgttgtctgtraatctcttaggatttcataagaagcttccaaagccagaggtctaaagatctattcacttggccatataattctcctggctgtgttaaccttaagaattgt

SEQ ID NO: 265375 - DNA, 201 bp, Homo sapiens
gatctcatcagtgctggccgagatccttttcggttgtgcatgttccattgatactgtcatttgatgcctggtgggtaggaaattcatagaaaacactttayaataatttcaattttggatgattctagaataggtcagagactcaagagttcttgtgaaataaattgctcatagtttagtacaggaaaggccttatttcat

SEQ ID NO: 265376 - DNA, 201 bp, Homo sapiens
agcgctctgtggagataggaaatttgagtcctgtaacttgtttcttaaaagtaattgcagagcatttgtatatacaatgccatttttaaaaaatgatattttagttcacatctgttttccaaggaattatagcttctttgcagatttacttattttccccagatcagtggaaaatccaggatatttattcactagtctcat

SEQ ID NO: 265377 - DNA, 201 bp, Homo sapiens
tcaggtttgttgaagatcagatggttatagatgtgtggtgttatttctgaggtctctgttctgctccattagtctgtatgtctattttggtaccagtaccrtgctgttttggttactgtacccttgtagtatagtttgaagtcaggtagcatgatgtctccaactttgttccttttgcttaggattgtctaggctatacag

SEQ ID NO: 265378 - DNA, 201 bp, Homo sapiens
ggtacattacttatgttaactttcttaatctgtatactgtgtaggaatggaaatagctctttttcagaggcaatatagaaaagtagcttacaatgttatctatgtcacaaatcaaattggaatgaaacttgttccaatataaaccttaaaaatccaaagctggaagttggccaaacaacatatttaagttaaaggaaaaaa

SEQ ID NO: 265379 - DNA, 201 bp, Homo sapiens
gtacattacttatgttaactttcttaatctgtatactgtgtaggaatggaaatagctctttttcagaggcaatatagaaaagtagcttacaatgttatctatgtcacaaatcaaattggaatgaaacttgttccaatataaaccttaaaaatccaaagctggaagttggccaaacaacatatttaagttaaaggaaaaaag

SEQ ID NO: 265380 - DNA, 201 bp, Homo sapiens
tgagttgatttttaaaaaattattatgaaaaatccttaaaatatttcaaagaacatgcttatacacacagagacacacacacagacacgcacacaaacacvcacacacacaaacacaaactcccattctgaattaatcagtcttcatgtcttgacatatttgctttagcaaatgctttcaagaagttctataggtacagtt

SEQ ID NO: 265381 - DNA, 201 bp, Homo sapiens
tagcaaatgctttcaagaagttctataggtacagttgaaactgctttggacctctttccagtctcattaaactgtttgtatatccttcctgaatccaaaarcaatgcaatcatcgatttttaaatcttttaaactcagttagaattctctagagcaagaaacccaaagacttcacttaaaattgtttatgacagctagtaa

SEQ ID NO: 265382 - DNA, 201 bp, Homo sapiens
ccccgtctctactaaaaatacaaacattagccaggtgtggtggcacatgcttgtaatcccagctactcgggaggctgaggcaggagaatcacttgaacccrgcgggcggaggttgcagtgagtcaagatggcaccactgcactccagcttgggaaacagagcaagactccatcttaaaaaaataaaaaaagaaagaacacc

SEQ ID NO: 265383 - DNA, 201 bp, Homo sapiens
ggagaatcacttgaacccggcgggcggaggttgcagtgagtcaagatggcaccactgcactccagcttgggaaacagagcaagactccatcttaaaaaaawaaaaaaagaaagaacaccaaggatttaattacctcagaggagttgcatatagaaagaatgctgccatgctttaaacacatagtgaccattggaatcccat

SEQ ID NO: 265384 - DNA, 201 bp, Homo sapiens
attagttgggaatgggtgatgtgggggaatatttaggaacttttctagtactcaacaaattttgccccgtagacttttttttttttttttttttttttttktgcactgtggacatatagagatggttctaggacctagcactgggagctctaacatgatcttatatagctagaaagaaagtacttcttcattgtttgcaat

SEQ ID NO: 265385 - DNA, 201 bp, Homo sapiens
aggatccctggagcccagggtgtcaaggccacagtgagctatgattacaccactgcactctagcctgggcagaagagagagactctgtctatgaaaaaataaaaaaaaaaactttgtattttaattttaaaaaccttttatttattttatatgtttggtttctttgtgtgattttacctgggaaaactggaatctgcttta

SEQ ID NO: 265386 - DNA, 201 bp, Homo sapiens
ttttctgtcccctacagtgcttagcaaacatttgcaaatgaatggatgagtaaatgtaaaattatatcagagggtttgctcctcatgtagcaattactgawgctttgagattttatttcattatatttatttatattacttatatttatatatatattttaatatttctattttatttaagatgttagcagagcttctaat

SEQ ID NO: 265387 - DNA, 201 bp, Homo sapiens
gattctatataaactccaattacctaccccttctttgagccttatattttgagggactctcatgcatatgtatgtaataaatttgtatgtattttatcgtrttgatctgtctactgtcagtttatttcatagactacattatcgaaccttcagaggataaagaaagtcttttctgtcccctacagtgcttagcaaacattt

SEQ ID NO: 265388 - DNA, 201 bp, Homo sapiens
accaatgaaattatggtgaaggatagatcaaagtgaattagcacctgtcaaggaaatatgataggtcattctgccctataattttattcccctttcttccragggtgacatgatcagcgaagcctgcatctcgctctccttcacccattgtggttaacagcagttcaaacgtggaaatgaatcacctgctatattacttct

SEQ ID NO: 265389 - DNA, 201 bp, Homo sapiens
aaagtgctgagattacaggcatgagccaccgcacccaacgcaaaaaagaacattttaaaacaacatgattttcagtgatatctgcctacttttctcccatstaaattcagagcctgggctgtctaggaatgcctagagttccttaagcacttcttagaaactttgcttccccatagacacatttattgctggtgagaccag

SEQ ID NO: 265390 - DNA, 201 bp, Homo sapiens
gttatctgcatctcctgtcttttgttggaaatcagactgtgctgcctagagtttagggtggtccattgttactcatataacctgcaggtcgaataatttaytagtgtggttgatttgtcttcaagagttaccaagaaagttgaactcagcttggcatgacatatcattgctgcttaaacaaaggaagtgtgtggaccgctc

SEQ ID NO: 265391 - DNA, 201 bp, Homo sapiens
ataaaaagaaaaatagttcgagatgcatttttaaataattaatagattaagggttgtacctttaattttgttattgctaaattttgtctgtccaaattatrgaactggtgtttttttttttcattgaaaagaacttcactgattttgtgataattacataccaatctggattttaaattaaactattcgtttttttttctt

SEQ ID NO: 265392 - DNA, 201 bp, Homo sapiens
ttcaagagttaccaagaaagttgaactcagcttggcatgacatatcattgctgcttaaacaaaggaagtgtgtggaccgctccaagcaagagtgaactctrtcgagttcatgagatttcactgcagtttccagaagcgtcggctaccactgtggagccgcagaactttatattagtctgtactaaatctgactgagaccaa

SEQ ID NO: 265393 - DNA, 201 bp, Homo sapiens
aaatagttcgagatgcatttttaaataattaatagattaagggttgtacctttaattttgttattgctaaattttgtctgtccaaattatagaactggtgtttttttttttcattgaaaagaacttcactgattttgtgataattacataccaatctggattttaaattaaactattcgtttttttttcttgtaatcactt

SEQ ID NO: 265394 - DNA, 201 bp, Homo sapiens
ggatttggtgggtcaaaattcaatgtgactggtgggttttgtttgtttgtttgtttgtttgtttttgagacagagtctcgctctgttgctaggctggagtkcagtggcattatttcagctcactgcaagctctgcctcccgggttcatgccattctcctgcctcagcctcccgagtagctgggacaacaggcacccgccac

SEQ ID NO: 265395 - DNA, 201 bp, Homo sapiens
gtccaaattatagaactggtgtttttttttttcattgaaaagaacttcactgattttgtgataattacataccaatctggattttaaattaaactattcgtttttttttcttgtaatcacttcaggcagaaaaagaataagtaaagtgtggaataaaatgttttttacctctgtcaaaatgatttaagaccattttactct

SEQ ID NO: 265396 - DNA, 201 bp, Homo sapiens
gaatttgctgtgagagacctgggcttgtataaacaagatgccctgtttccatccggaagattctttcagactaggacctctctaggtatcgtccatgtacyggaaatctgccccactgactctcacgtgctccccaggtcattgacggttccgagctaaattgattgaatactgctgttcacatttatttcacaaatgtca

SEQ ID NO: 265397 - DNA, 201 bp, Homo sapiens
ggattgttaattagttaatattgattatccatctactatgtgccaaatatttgtaagtataatgtatttttttctgcacaatatagactattataaaagaraccatcccaggcctcattataataagtccatccctcctgtacttgtccgaccctaactgcctacacagagaagaattaatggagcttaatatcttaggga

SEQ ID NO: 265398 - DNA, 201 bp, Homo sapiens
gagagacctgggcttgtataaacaagatgccctgtttccatccggaagattctttcagactaggacctctctaggtatcgtccatgtaccggaaatctgcyccactgactctcacgtgctccccaggtcattgacggttccgagctaaattgattgaatactgctgttcacatttatttcacaaatgtcaagttttgagtt

SEQ ID NO: 265399 - DNA, 201 bp, Homo sapiens
tttccatccggaagattctttcagactaggacctctctaggtatcgtccatgtaccggaaatctgccccactgactctcacgtgctccccaggtcattgayggttccgagctaaattgattgaatactgctgttcacatttatttcacaaatgtcaagttttgagtttcactttcctggaaaattccttatgttctttgtt

SEQ ID NO: 265400 - DNA, 201 bp, Homo sapiens
gagggccttgtagtcatgctaggaactgtggagtttatcctgtagtggtgtgagatccagggtaataatgatgacggctaaaactcctgctgagttttctrtatggtggattgagttgggtttggaaaagctgaagcacaaagctcagggggactagtgtttctgcagggctgctctttctgtgtgggccagactttcctt

SEQ ID NO: 265401 - DNA, 201 bp, Homo sapiens
ctgggattacaggcacccgcccccacacccggctaatttttgtgtatttagtagagacagggtttcaccatgttggccaggctggttttgaactcctgacytcaggtgatccacccgccttggcctcccaaagtgctgggacgataggcataagcccctgcgcctcgccggaaattctttatgttctaataattgcagcct

SEQ ID NO: 265402 - DNA, 201 bp, Homo sapiens
cttctcagctccacacgctgcccccaggaacctgagccaggaggcaggagcagactctgatgtccatgctgggcatgggctggagtgggtagacatccagsctgttggaaaagacaagacagagggccctaatattccgcatcagtggtgaggatgccttggggctgctgagagggtaaaggggaggctgtcagttcagcg

SEQ ID NO: 265403 - DNA, 201 bp, Homo sapiens
gtgtatttagtagagacagggtttcaccatgttggccaggctggttttgaactcctgacttcaggtgatccacccgccttggcctcccaaagtgctgggaygataggcataagcccctgcgcctcgccggaaattctttatgttctaataattgcagccttcttaagtttgcacctttgctgagagcgctgtttggtcctt

SEQ ID NO: 265404 - DNA, 201 bp, Homo sapiens
atcaacagaaaaaaaatgtttaagatcttcataggttgagtttgtttggtggatacatgtaactctcttctatgtcagcctcagttacctgtatactggcmacatatagagttggccttttttggtttttcaacagaaaaaaatagccatatcccagatttaggaacataatactaaatctatattaaataataaaatata

SEQ ID NO: 265405 - DNA, 201 bp, Homo sapiens
aatatagaatatgtgtatatatgtgtaaaaatgaagagatttgcaagtgtggttatgttgcggaaataatttttaaggtgtaataggagttgagatgctgwttgcctcaacaataactagtttgtgcatcccattcttttcgagctttttttttccaaatagtctcaaaacccttgacgattttgccttatttttattcaa

SEQ ID NO: 265406 - DNA, 201 bp, Homo sapiens
ggatccctggagcccagggtgtcaaggccacagtgagctatgattacaccactgcactctagcctgggcagaagagagagactctgtctatgaaaaaataaaaaaaaaaactttgtattttaattttaaaaaccttttatttattttatatgtttggtttctttgtgtgattttacctgggaaaactggaatctgctttag

SEQ ID NO: 265407 - DNA, 201 bp, Homo sapiens
acccaggaggtggagcttgcagtgagctgagatcttgccactgcactccagcctgggcgacagagcaagactctgtctcaaaaaaaaaaaaaaaaaaaaaraagagaaagtttatgcactgtggctcagggtcagaatttgtctcctttcattctggaaatgacaagaatggggtttggtgggagtcttttgagaagacac

SEQ ID NO: 265408 - DNA, 201 bp, Homo sapiens
ttttttggtaaattctgttcagttttgatagaattattcacaagatataaaaaaataaaaggagctcatgaaaactttactgccaaacttcacattaaaamaaaactagaaaatgacttctctatgttaaaatgataaattggccttagagttaacagagggcggatggagtgacaaaagatcattctttacctgcagagt

SEQ ID NO: 265409 - DNA, 201 bp, Homo sapiens
gaggaattacattatcattagaacaaattgcatgctgaaaaggaacttcacatttcagcatttcttttatttttttaaaaaatgaaactatgaaagaaactatataaaggaatctgagaatgtcatctgccttcgttatattgtaggattgacagttgagggcttttagagatgctttcttcaaggagcttcaatcattca

SEQ ID NO: 265410 - DNA, 201 bp, Homo sapiens
aggaattacattatcattagaacaaattgcatgctgaaaaggaacttcacatttcagcatttcttttatttttttaaaaaatgaaactatgaaagaaactatataaaggaatctgagaatgtcatctgccttcgttatattgtaggattgacagttgagggcttttagagatgctttcttcaaggagcttcaatcattcat

SEQ ID NO: 265411 - DNA, 201 bp, Homo sapiens
ggaattacattatcattagaacaaattgcatgctgaaaaggaacttcacatttcagcatttcttttatttttttaaaaaatgaaactatgaaagaaactatataaaggaatctgagaatgtcatctgccttcgttatattgtaggattgacagttgagggcttttagagatgctttcttcaaggagcttcaatcattcatt

SEQ ID NO: 265412 - DNA, 201 bp, Homo sapiens
ttgaagctctctaaaaattggtctgttctctgaagtagagcagcatgacagcctttttctcttaaaagaagcaagccttgggccaggtgtggtggctcacrcctgtaatcccagcactttgggaggccaagacgggcggatcacctgaggtcaggagttcgagactagcctgaccaacatagagaaaccccgtctccacta

SEQ ID NO: 265413 - DNA, 201 bp, Homo sapiens
gaattacattatcattagaacaaattgcatgctgaaaaggaacttcacatttcagcatttcttttatttttttaaaaaatgaaactatgaaagaaactatataaaggaatctgagaatgtcatctgccttcgttatattgtaggattgacagttgagggcttttagagatgctttcttcaaggagcttcaatcattcattg

SEQ ID NO: 265414 - DNA, 201 bp, Homo sapiens
ttccattaagatgcccttaacaaggcatgttaccttcagtcatctctttaccctctttgtgccaagtttcttcatttgtaaaatgggaaggttagaaacakaactagatcttatttattggttggtttatttctcccccacattgctccacaggaggtggagatggctcaaaaatttcaaagctatttttagccaaacatt

SEQ ID NO: 265415 - DNA, 201 bp, Homo sapiens
gaggtggagatggctcaaaaatttcaaagctatttttagccaaacatttggtgctatttatttcatgttgggcttaaagcaaaaatttatgtcactaagattttttttttttctactgacttgttgcaaaagaaaaaacaaatgtattgtccaataataagattaagagtatatgaaaattagagcaatttaacattaact

SEQ ID NO: 265416 - DNA, 201 bp, Homo sapiens
ttttttttttttctactgacttgttgcaaaagaaaaaacaaatgtattgtccaataataagattaagagtatatgaaaattagagcaatttaacattaacttttttgtgggcaaattatattactatgtaagtaatatatagctgttgctgatatttggcaagtgccttcagaatatttaatttttataatttccactact

SEQ ID NO: 265417 - DNA, 201 bp, Homo sapiens
agtgacaggcatttctctcgcttgtccaacattccactgggaaaggctaagtcgatcagttattcaatcaaatctctctacaagctcctgggaggtaatarggcttttcttgggtaaagaccagccagtcccatgggcactggtctccaaggatctgcaacagatgtagaaatcacatttcctgagattccaagaaatgca

SEQ ID NO: 265418 - DNA, 201 bp, Homo sapiens
aggactagagtgacaggcatttctctcgcttgtccaacattccactgggaaaggctaagtcgatcagttattcaatcaaatctctctacaagctcctgggmggtaatagggcttttcttgggtaaagaccagccagtcccatgggcactggtctccaaggatctgcaacagatgtagaaatcacatttcctgagattccaa

SEQ ID NO: 265419 - DNA, 201 bp, Homo sapiens
gccccttgggggtaagggcagagattgtctagcacatgccaagaacatcgcatgttagcctcatggcatgatgaagaagcagcacgccctcactcttcacmcgaaacaggaacaccaaggtcagcgctaagtacctgctgttattcctgttgttcatgacatttaggcagagttcaagggagcccacacagaatgagcact

SEQ ID NO: 265420 - DNA, 201 bp, Homo sapiens; identical to SEQ ID NO: 52805

SEQ ID NO: 265421 - DNA, 201 bp, Homo sapiens
ttttcgagctttttttttccaaatagtctcaaaacccttgacgattttgccttatttttattcaaagaacagtgaagtttcttgtaaaccagtgaaattcrtctagaaccagcatgaaataatgttctccaaaatgaaatacagaagtgtatcctttatccataagggcagagaaaagaacaaagccataggaatagtact

SEQ ID NO: 265422 - DNA, 201 bp, Homo sapiens
ttcttttgctgtgctcatctctacccaatacatttaaaccgtgagagggagctgtgtctctatttttccctgaaaagtgctcgtctgttggcatttctggyggactcctcacagctggatatttggggttgctttacataacctggcatgtaagggacccaggtcacttctcctccataagctcctgacttccatgcattg

SEQ ID NO: 265423 - DNA, 201 bp, Homo sapiens
agtgtatcctttatccataagggcagagaaaagaacaaagccataggaatagtactgaaaatttcacatctcagaggaatatctggtgtgatggttaacaytgagtgtcaacttgattggactgaaggatgcaaagtatcattcctggtgtgtctgtgagggtgttcccaaaggagataaacatttgagtcagtggactgg

SEQ ID NO: 265424 - DNA, 201 bp, Homo sapiens
tcttttgctgtgctcatctctacccaatacatttaaaccgtgagagggagctgtgtctctatttttccctgaaaagtgctcgtctgttggcatttctggcrgactcctcacagctggatatttggggttgctttacataacctggcatgtaagggacccaggtcacttctcctccataagctcctgacttccatgcattgg

SEQ ID NO: 265425 - DNA, 201 bp, Homo sapiens
ccaccctcaatctgggtgggcaccatctaatcagctgccagtgtagccagaataaaagcaggcagaagagcgtggatggactagactggctgagtcttccrgccttcatctttctcccgtgctggaaactttctggcatcgaacatcagactccaagttcttcagcttcggggcttttggaccttaaaccacagactgaag

SEQ ID NO: 265426 - DNA, 201 bp, Homo sapiens
cctctctcccggcggctgctcctcgtggtccaccagccaccctctcaccacagggccggctgttgggagcttagagaatcataggaaagaaggaggcaagrgaagaatggagggagaaggaaagagtttaacttaggccaaatattgttattaaaatcatacataaagtgaaatcctttgcagtttaataaaaagtccaag

SEQ ID NO: 265427 - DNA, 201 bp, Homo sapiens
catctaaccaagagaaagctagatggagtcccagagtcgagtggcttctccttggccagagaggtcccttaagctacagcaatgagaagccatgtcctgtrccaggcacagagcttgctgtcagccctctgatgctgatggtggaagctgggcaaatgtcagcaaggttctgagaagaagtttctttcaacatggattcct

SEQ ID NO: 265428 - DNA, 201 bp, Homo sapiens
agttgttaaatacattaacctgacagataaagtctaatatttctgactcatctggagacaaaacttgcctgacatgcactcttggtggcaaatcctggcawgaactgcagtgaggctgtttatatccttgatttatcccactaagtatgaatattcatatatttcaccacagttgtatccatgtgttcgattagaccctgc

SEQ ID NO: 265429 - DNA, 201 bp, Homo sapiens
accagaaacctgtccatagacatacagcaaaaagatttttcaaagttagtgtaaggaataattattcgtttgatctgaatttcagaaaattcctcctgggktgacccaggtttaggaacacaagaatgagactgtaccttcaggctccagccagcaaacgtagttagttagtgtcacgagtgtgtctatttcacttccagc

SEQ ID NO: 265430 - DNA, 201 bp, Homo sapiens
agagtggtcagagacttcgccaaagtcgaaggtccggtgtcagagctaggatttcactccccagaggctgctgcacttgccaccgccacatgtattagtcyattctcatgctgctaataaagacatacctgagattgggtaatttataaagaaaaagaggcataatggactcacagttccacgtgactgggaagcctcaca

SEQ ID NO: 265431 - DNA, 201 bp, Homo sapiens
aggtcccaccctcttttctttgccttcgcgaagtttgacttctgtctccttggtcaagacatattcatctttttgactcagaactagctttcatccaacarttggtgaaagtttagcaagcagatctccgaggtaaacaaaagagcccactttgcagttgctgccaatttctgtggtgtaaatacacccatctgggccagc

SEQ ID NO: 265432 - DNA, 201 bp, Homo sapiens
aggaggagcaaagtcacatcttccatggcggcaggcaagagagagagcatgttcaggggaactcccctttataaaaccatcagctcttgtgagacttattmattatcatgacaacagcacgggaaaaacccacccctatgattcacttacctcctaccggatttcttccacgacatgtggggattatgggagctacaattc

SEQ ID NO: 265433 - DNA, 201 bp, Homo sapiens
ttccatggcggcaggcaagagagagagcatgttcaggggaactcccctttataaaaccatcagctcttgtgagacttattcattatcatgacaacagcacrggaaaaacccacccctatgattcacttacctcctaccggatttcttccacgacatgtggggattatgggagctacaattcaagatgaaatttgggtgggg

SEQ ID NO: 265434 - DNA, 201 bp, Homo sapiens
gagtctttcctgcagccacgatgaatttacaaaatgtaacaatcaaaacctgttcttgttaatatttgttttaaggcaaatatctacatttttatgtcctyctccctgtttaaatcagacccgctccattgtttgtaatctgttgtctgaatgccgttgtttctgtatgccagaccaaaaattccacattagaacacttat

SEQ ID NO: 265435 - DNA, 201 bp, Homo sapiens
gtggaggcagcgactgtctgcatccaggtcagcacaggcagagtgcagtcaggctaaatctcatcgcaaaatagcacattcctcttagaaccccctctacktgcactttttaaagctttttattccacccctgatggcttactgaagaattttttttgagccaacattcacgttacgaactttccctctgtgcagctcatt

SEQ ID NO: 265436 - DNA, 201 bp, Homo sapiens
ctcctgagttcaaatgacccacctgcctcagcctcccgagtagctgggattccaggtgcccaccaccacacccggctaatttttgtatttttagtagagayggggtttcaccatattggccaggctggtcttaaactcctgacctcaggtgatcctcccacgtcggcctcccaaagtgctgtgattacacgtgggagccac

SEQ ID NO: 265437 - DNA, 201 bp, Homo sapiens
ccactgagaatcaacaaactcttaaatcataatgacagttgaaagacctaaatgtcaaccaaattaagaaataatttcttagagtaatgaaaattaataatattattataataaaataagaaaacttaataacaagatgaaataatgttaacaaagctacgacataaggtctactcttggagaatatttgaatttcagggt

SEQ ID NO: 265438 - DNA, 201 bp, Homo sapiens
cactgagaatcaacaaactcttaaatcataatgacagttgaaagacctaaatgtcaaccaaattaagaaataatttcttagagtaatgaaaattaataatattattataataaaataagaaaacttaataacaagatgaaataatgttaacaaagctacgacataaggtctactcttggagaatatttgaatttcagggta

SEQ ID NO: 265439 - DNA, 201 bp, Homo sapiens
actgagaatcaacaaactcttaaatcataatgacagttgaaagacctaaatgtcaaccaaattaagaaataatttcttagagtaatgaaaattaataatattattataataaaataagaaaacttaataacaagatgaaataatgttaacaaagctacgacataaggtctactcttggagaatatttgaatttcagggtaa

SEQ ID NO: 265440 - DNA, 201 bp, Homo sapiens
tccagatcaataaccacaaaccatttatcccagacaatgttcttacccgagccctgatggtctcattcataacacctgtaagtaagccatccaccttttgwccccttatcactttattctgagcagtcaccatctcagatgcaccacctttttaatgtgaccttggggagaacacactgggcttcctgtgttgccagagtc

SEQ ID NO: 265441 - DNA, 201 bp, Homo sapiens
cagactgctttccacagtggctggactaatttacattcccaccaacagtgtgtaagtgtataagcgtttccttttgtttgcagccttgccacatctttttyttttttttttactttttaataatagccattctgactggtataagatggtatcttattgtggttttgatttgcatttatctgttgattaactggctgtatg

SEQ ID NO: 265442 - DNA, 201 bp, Homo sapiens
gttggagaccaacctggccaacattgcaaaaccccgtctctactaaaaatgcaaaaattcgcctggggagcagagcgagactctgctaccaaaaaaaaacaaaaaaaaaaaaaaacagaatttgaaaggaaataatagctgtaaaggctgttatgaaaaaggaacaatcaaaacaagaaatttccaggaaattaaaagtat

SEQ ID NO: 265443 - DNA, 201 bp, Homo sapiens
gtgttggatgaaaatcccttccctaaggatctaattacactactacattttgcaatgaatagtattcagtagtcataatgctagaaatgttgcttatgttgagttttaatttttagaatcaaattttacacaaagcattggagactaaattattctcttgatgttagaaaaaaaataatgtaattaacaataaccagaagg

SEQ ID NO: 265444 - DNA, 201 bp, Homo sapiens
gaaatgatcttacaatatggcaggggagaatttttcatcatgtgtaatggagccataaggactgaccctcaggaaaagcgtttccgaggttaaagaaaaakaaaatacttaaaaatattctccttgagacaggtttttaaaggatagacagtcgacaaggagttttatatcttgttctgcctaaaggcagggtttgtgcca

SEQ ID NO: 265445 - DNA, 201 bp, Homo sapiens
tttttgttcagctagtgccccttgggggtaagggcagagattgtctagcacatgccaagaacatcgcatgttagcctcatggcatgatgaagaagcagcaygccctcactcttcacacgaaacaggaacaccaaggtcagcgctaagtacctgctgttattcctgttgttcatgacatttaggcagagttcaagggagccc

SEQ ID NO: 265446 - DNA, 201 bp, Homo sapiens
tgttggatgaaaatcccttccctaaggatctaattacactactacattttgcaatgaatagtattcagtagtcataatgctagaaatgttgcttatgttgagttttaatttttagaatcaaattttacacaaagcattggagactaaattattctcttgatgttagaaaaaaaataatgtaattaacaataaccagaaggt

SEQ ID NO: 265447 - DNA, 201 bp, Homo sapiens
tatgaagagtaaggtcaatccgtgtcctgatacggaatcacttttaatacacagaatgaagtaaagacagcatgaaaaggggatccatgcacatgagcatwtaagatattttctggaaagaatcaaagacaccccgggaacagtggctgcctttgggtagaggaagtgatgatgtgagggaggaagcttttacttttcagt

SEQ ID NO: 265448 - DNA, 201 bp, Homo sapiens
ataatttcacttgtatgtggaatctaaaaatgctgaaatcatagaagcagaggctggagtggaaggaaatagggagatgttggtcaaagggtacaaagttctagctagctagacagaaggaataattgcatgggatgctgatcatagttaataatgtattatatggccaggcatggtgactcatgcctgtaatcccagcac

SEQ ID NO: 265449 - DNA, 201 bp, Homo sapiens
taatttcacttgtatgtggaatctaaaaatgctgaaatcatagaagcagaggctggagtggaaggaaatagggagatgttggtcaaagggtacaaagttctagctagctagacagaaggaataattgcatgggatgctgatcatagttaataatgtattatatggccaggcatggtgactcatgcctgtaatcccagcact

SEQ ID NO: 265450 - DNA, 201 bp, Homo sapiens
tactgtattgaacagtgcagatatagcccattttcatcactgcagaaagttctactggacagttccagtctggaaaaggacagggacgtctgtccaaggartaacatttgcaaactcaggtttcctgtgttttcaacacaagcactttgagctattcagctgtagttgagggaaaaaaagaaaaaaactttccagaaataa

SEQ ID NO: 265451 - DNA, 201 bp, Homo sapiens
aatttcacttgtatgtggaatctaaaaatgctgaaatcatagaagcagaggctggagtggaaggaaatagggagatgttggtcaaagggtacaaagttctagctagctagacagaaggaataattgcatgggatgctgatcatagttaataatgtattatatggccaggcatggtgactcatgcctgtaatcccagcactg

SEQ ID NO: 265452 - DNA, 201 bp, Homo sapiens
attttagttaaagaaactgttcacaaatgtacaaacaagttctgcataccattcatctggaaagcatctatcagttggcagacattcctagaaagtgttcygtgattttgaggtacagctgatctttgatgagctacggggagttgaggggtgccaacccctcctgcaactgaaagtcggcagatagcttaaacttaacta

SEQ ID NO: 265453 - DNA, 201 bp, Homo sapiens
gtaaaaatatgtaatttcattaaattatgcttagatattttttaaaccatattgagtttttttaagactagagattaaaatctagtctccaaatatatgaygttttcagggagacatcagaaagaacaggtgtttctcaggatgactaactgtgggttcatgagccttcactccagctgtccccatgtaagtttgcctcaa

SEQ ID NO: 265454 - DNA, 201 bp, Homo sapiens; identical to SEQ ID NO: 52803

SEQ ID NO: 265455 - DNA, 201 bp, Homo sapiens
cttataaaatacaaaactttggaaaatctattttctgaagacaaaaaagcaaaaagtaaacacacttatatgtcttgccagttgaatttggtagacttttwctgcattgaaccatattcgtcctcccctatcaaccccgtggccctctccctccccctacacacacacacacacacacacatgcattattttactgaaact

SEQ ID NO: 265456 - DNA, 201 bp, Homo sapiens
gcttaccagatgttatctattcagagcttcagcatatctaggaggagtggattcagttaatctagtcttagccttgtatattttgtcataatttggtagaygtttttggcttgccttttccccatatttcagcatttgattatatattgatttggattaattttttcttgttagtctttttttcttttcaataagattata

SEQ ID NO: 265457 - DNA, 201 bp, Homo sapiens
cgaacatagcagccaggtggatgtctttaaaatattagtcaaattatgtcatgcctcagcctcagagttctgcagtggttctggtatcttccagaataacrcccagggttctgaaagcagctgtcagggaactacatattctagatcctcacaaactctccaacttcaccttctgtttttttccctccttgttctctctgc

SEQ ID NO: 265458 - DNA, 201 bp, Homo sapiens
tataaaaatatatattatttttctctaattttctctaatttgatcccacactcagtggcagcagcatccaggctcatgtgttattggcgtcacccaaagcyccatgtcttgtttcctgatgctgctgctgctgcttctcagtggactccctctcacttccatttcaacacgttcacatctcacctgcacggtgcatagtcc

SEQ ID NO: 265459 - DNA, 201 bp, Homo sapiens
accaccacacccggctaatttttgtatttttagtagagacggggtttcaccatattggccaggctggtcttaaactcctgacctcaggtgatcctcccacrtcggcctcccaaagtgctgtgattacacgtgggagccactgtgcccagcgtacttgtaccacacatttattcaatacgtatctttcaggcactgttctag

SEQ ID NO: 265460 - DNA, 201 bp, Homo sapiens
tcagctttaaatttattctgcttcctctgaattcactaaaattttccgattatctatatttttattttattttattttattttattatttttgagtcagartctcactctgtcacctaggctggagtgaagtggcatgatctcagctcactgcaacctctgcctcccaggtccaagcaaatctccctgcctcagcctcccg

SEQ ID NO: 265461 - DNA, 201 bp, Homo sapiens
catattggccaggctggtcttaaactcctgacctcaggtgatcctcccacgtcggcctcccaaagtgctgtgattacacgtgggagccactgtgcccagcrtacttgtaccacacatttattcaatacgtatctttcaggcactgttctagatgttgatgatgtggctgtatacagtacaacacctctgccttcacagaac

SEQ ID NO: 265462 - DNA, 201 bp, Homo sapiens
tgtaatatcttagttttacagattcgttttaactggaaaattggcaaatacaaggcagcttaaagtatcaattacaagtatcaattatagtgattttgctytactatggaaaatttgctacaagttctgttatagtcatccttcttaaaactcaataatcagagatttgttcttgatttaattgaagatgtagcagatgag

SEQ ID NO: 265463 - DNA, 201 bp, Homo sapiens
caggttcacgccattctcctgcctcagcctcccgagtagctgggactacaggcgcccgccactacgcccggctaactttttgtattttcagtagagacggrgtttcaccttggtctcgatctcctgacctcgtgatccacccgcctctgcctcccaaagtgctgggattacaggcgtgagccatcgcgcccggccgcaact

SEQ ID NO: 265464 - DNA, 201 bp, Homo sapiens
aagcatctcattatccacatgtagaacctgaataagtgtggatagtaagcagtcctgagtcaccgcctccttctgcagatacccaggggcttagaaagacsattcataacttgccaagatcacacagccagtgacgacaagccgagatctgacctcaggcctgtctgactccaaaacccgacctggagaccatgtcctcca

SEQ ID NO: 265465 - DNA, 201 bp, Homo sapiens
aaatgggcctaaaaaagagataatactttagcagctattttttggattagaccttttggagtcttgaaagggagcctcaacacatacataaataaggtgaycgcatatctgaaaaagaagagaagttgaatgagagggatgataggagagaagaagcatgaaacaccagctgctctcatagcatgtgatgtagctgcattc

SEQ ID NO: 265466 - DNA, 201 bp, Homo sapiens
tctgtgcccctcatcaggatctggaattcaaatgaaaagttggggctagagacagagatttggaatcatcctcgttgagatgctggttaaaggactgaaaygtttcattggatttaggaaccagtaggcatgttccatggcatctcagagtccctggaaggtctctgcaggcctcctcccaactccaacagctcagagcag

SEQ ID NO: 265467 - DNA, 201 bp, Homo sapiens
tgccaagatcacacagccagtgacgacaagccgagatctgacctcaggcctgtctgactccaaaacccgacctggagaccatgtcctccagggccgttgcycacctgcttttgtgtcagccttcctcccagtccctcgagtgacaccaagcaccttcccatagccccttcccagtgagagtcccgccctgtccatccttat

SEQ ID NO: 265468 - DNA, 201 bp, Homo sapiens
gtaggaacttgcttacggagtcccttccaacccggtactgctgcaacggttgttaaacatttttgacatctctccttaggaccctgtagtgctaaaaggarccatcgatatggaaggctttggagctggagagtgaggctctctgtgcgtatatgcccactggctatcggagctaccaccttccacgtccactgcttttga

SEQ ID NO: 265469 - DNA, 201 bp, Homo sapiens
taacttgccaagatcacacagccagtgacgacaagccgagatctgacctcaggcctgtctgactccaaaacccgacctggagaccatgtcctccagggccrttgcccacctgcttttgtgtcagccttcctcccagtccctcgagtgacaccaagcaccttcccatagccccttcccagtgagagtcccgccctgtccatc

SEQ ID NO: 265470 - DNA, 201 bp, Homo sapiens
tgcataaaattaatgtactgcaaatgctgaaaatctccttgacagagaaaaaccatcaccaaggccagacctgatgctcaggaggtaggaacttgcttacrgagtcccttccaacccggtactgctgcaacggttgttaaacatttttgacatctctccttaggaccctgtagtgctaaaaggagccatcgatatggaagg

SEQ ID NO: 265471 - DNA, 201 bp, Homo sapiens
ccatggctttaaaaacattaatttaattctgtcaaataaaatatatatattttaaagtgttcataatatttatcacaactagtaataaaataatacttaawgaaaaaagaagtgatacttgaggcatttcttgcaatgttgacaatataaaacacaattttaaagtgggtttaatgggcatagctttggtgatccgatatc

SEQ ID NO: 265472 - DNA, 201 bp, Homo sapiens
tttatcacaactagtaataaaataatacttaatgaaaaaagaagtgatacttgaggcatttcttgcaatgttgacaatataaaacacaattttaaagtggktttaatgggcatagctttggtgatccgatatcctttgtattcatgaaagagggaacccagagaagtgaaatcccgaccctacatgctcaaacagcactgt

SEQ ID NO: 265473 - DNA, 201 bp, Homo sapiens
tcacagcagagagaagaaaaaatcacacaaagccttttgctaatattaaaatgtttgaagtgactggcttaatctcaaccttgaggcaaatcaatgatttyataccaagcggctgctccattatatgcctatcctcagaaaagtgaaaggaaaagcaattaatccaccacttctgaggaaaagggtccattttccctgaca

SEQ ID NO: 265474 - DNA, 201 bp, Homo sapiens
caaagacaatcaggagaaaaaaaaaaaagatttacttggactctttaaaaagagttgcaattggaaaaaggtaaaaatgataacttaagttatttttcctkatcaagtattttctagagatcatgagaagaaattccaaataatatttagttgctgacaaaagtacgtcttttgcattttggccacaaaagcatacccatc

SEQ ID NO: 265475 - DNA, 201 bp, Homo sapiens
ggaaaaaggtaaaaatgataacttaagttatttttcctgatcaagtattttctagagatcatgagaagaaattccaaataatatttagttgctgacaaaartacgtcttttgcattttggccacaaaagcatacccatctttaaaaacctattaacaaggctgggtgcagtcgcttaggcctgtaatcccagcactttggg

SEQ ID NO: 265476 - DNA, 201 bp, Homo sapiens
ccagtagtcccagctacttgggagtctgaggcaggagaatcgcttgaacccaggaggcggaggttgcagtgagccaagattgcgccattgcactccagccygggcgacagagggagacttggtctcaaaaaaaaaaaaaaaaagaaaaaaaaaaactaaactaaacatacgcttaccatatgatctagcaaacatgcttct

SEQ ID NO: 265477 - DNA, 201 bp, Homo sapiens
aggagcactgaacatgcctagcacccaatttatggtcttgaaatttttaagaagcagtgcttcttttaaaagtaggcaattcctggcctggagcaggaaaygtgtaagatgaacctgagtaattttccatagcagatagcgaggaagctattgaatggtgtcaggatcatgttatggaaactcatcttgataggattgcca

SEQ ID NO: 265478 - DNA, 201 bp, Homo sapiens
tgtgttcttgagaaccagtgtggaagaaaggagcaacagaggtaaaacagaaaatgttaagtaaaaaccttgtagttctgagatacctgtccttcaaagtragaactgagaggacttagaaacaatgactaacttaggagcactgaacatgcctagcacccaatttatggtcttgaaatttttaagaagcagtgcttcttt

SEQ ID NO: 265479 - DNA, 201 bp, Homo sapiens
tgaacccaggaggcggaggttgcagtgagccaagattgcgccattgcactccagcctgggcgacagagggagacttggtctcaaaaaaaaaaaaaaaaagaaaaaaaaaaactaaactaaacatacgcttaccatatgatctagcaaacatgcttcttggtatttacttgaattagttgaaaacttatgtatacaactaaa

SEQ ID NO: 265480 - DNA, 201 bp, Homo sapiens
tgcctgcatgcgtgtgtgtgtgtgtgtgtgtgtgtgtgtgtgtatagaagtaagataacatgaaggttaagagaaagacagcatagttcgaaatggccgcrtgtgttaacagtgtggatacagtataattattttaaaaattttgtgggagaatgagtagagcatatgaaaacatatttgaagttttcagaaatcataggc

SEQ ID NO: 265481 - DNA, 201 bp, Homo sapiens
ccttttcaaggtgaaccaagttattaggaaattattaggaaattacacaaatacatataatagatattgtcttaaaagaaatagaaaatgaaaagtgaagraaattctaaaaaacacaaataagaaaattaaaaagggatttgagataagctgttggaattagaagtgaggtaaagaagatccaatatatgtatactagaa

SEQ ID NO: 265482 - DNA, 201 bp, Homo sapiens
aaattgttattggacgttgtccatacattaacttcttccgagataaaagctattgtcatagtaataaaattacctaactaaattaaatagactaggtgatrtgttgtcaaatgagaaaatagtcaattacttaagagcaacttattttaaaaaattatttttgtaggtaaaataatcctgagttactgttattaatttcca

SEQ ID NO: 265483 - DNA, 201 bp, Homo sapiens
ccagtttgctgacctgagctccaaggcattttagctggctaggaaatggctgggctaggaactgctgcaggagctttctttaccttgaatcattgatctaytgaactccagatcagattatgcaaattaatgtagtgggtccctgattaaaagagactcaagaactccttgttggagagacattgttagatagcactacat

SEQ ID NO: 265484 - DNA, 201 bp, Homo sapiens
ataatttttaaaattccatcaatatttgagaccactatgaatgcagtcaacaagaatttctaaattgttattggacgttgtccatacattaacttcttcckagataaaagctattgtcatagtaataaaattacctaactaaattaaatagactaggtgatgtgttgtcaaatgagaaaatagtcaattacttaagagcaa

SEQ ID NO: 265485 - DNA, 201 bp, Homo sapiens
atgatatgtaattacatgactaaattatttccttagtatattaagctttctacaaatactagcacattctttgttccaggtcagtgtttttcttataaatrtcacaatgttaattttgaaaagtaatactttcaataggcatatttcaggtattgtgtgtactttttaatcatcagaaattcccaggcgcatatgttaaaa

SEQ ID NO: 265486 - DNA, 201 bp, Homo sapiens
atacaggagaaaaacagttattgttttccttaggttcagagtagtattctttgtgaatatttacatttattttcaaatatttttgcaaatattgtacaatmaattcaaaattattttagttgtctgtggattattcactttatgaaagcatatctagaaatttgcaaactatttttaatagcttaaaactgtcagtatagt

SEQ ID NO: 265487 - DNA, 201 bp, Homo sapiens
cgttgtgaaaccctatctctactaaaaatacaaaaattagccaggcgtgtggtggtgcgtgcctgtaatcccagctactctggaggctgaggcaggagaattcgcttgaacctgggaggcagaggttgcagtgagccaagatcgcgccactgcactccagccgggcaacagagccagactccgtttcataaataaataaat

SEQ ID NO: 265488 - DNA, 201 bp, Homo sapiens
ttaatgtcttcaactatgttgtgtctgtataatcattttacttctaatttgttgctattaatctattcagatgtgaagagcataagaacatgtttcctttaaaaaaaaaagatgtcctcatgctttttaagtttcacaagtagaagtttcaggcttttaggtcaatgatatggtggcttttctgtggtgaggtatactggg

SEQ ID NO: 265489 - DNA, 201 bp, Homo sapiens
aaaaccgagtgaattctgttatcagcatgaggcatttatgacccgaagaagctaacgaacaagatccaaaaaaaagaggttgaggctgaagcctaatgacygggtttccagtttaagtcagcaggttcaacacactagcttaattctcttttctcatatggtagcattaaaacaatggaaaaggttttttttgtttgtttt

SEQ ID NO: 265490 - DNA, 201 bp, Homo sapiens
atgaaacaatatgaattacccatacaaatcaatgtcatttttcacttagaaaagtaactaggattatcagatccaagaatcatcaatcagatatttagggraaaactgtatttagaagaatgaaaagggcaaccgataccagaagattcatgtacaattcagggattaccagaaacttttaaaaaggtgtctaattaatac

SEQ ID NO: 265491 - DNA, 201 bp, Homo sapiens
agtagtgtcagaaaagtctccaatggtgagaactttccatctgaggacacaggagaaggtcacaccatttaatgcaaacagaactcactatttatagcacrtagaacttagctggggataggaataggatcgataatgaatgtggctttttacttcatatgtttgttcattcaaaaataattttgtgttcttctttgtgac

SEQ ID NO: 265492 - DNA, 201 bp, Homo sapiens
gactggtccatattttacatgtagaaactgaggctcagaaaagatgaagaacttgcccaaggtcgctcctctagtctgtctctgttcctgcaacagtaacrtagtgataacatagtgaaggcacagacagtgtttaaggtttgagcccagtgtctatttaaactatattattgttgtttctaacattaggcatctatagga

SEQ ID NO: 265493 - DNA, 201 bp, Homo sapiens
atgtttgggtttaatgccatctaggtacttttcgtcagtttgaaaaactatgttgaattggtattaaaagcaaattcagcttttataactttacatcaccyggggctctttggaagtttcctttaaagtattttctgctttgccacctccttttaacttttaatagctggtttggttgtattctagcatgcaataagtaat

SEQ ID NO: 265494 - DNA, 201 bp, Homo sapiens
ttcaacctctcattacaaaaagtgctttttagattaaaaagaaaagtcacttttatggtaagattgttttgaacagcacaagctgtgcctagtgtttcctyggggcgcccatgaacttggctgtgatcctatcagccaaaaaactagcagagcccccaggggaaggggaggcgctgtggcccccctggggtccgcctccgg

SEQ ID NO: 265495 - DNA, 201 bp, Homo sapiens
gttgaattggtattaaaagcaaattcagcttttataactttacatcacccggggctctttggaagtttcctttaaagtattttctgctttgccacctcctyttaacttttaatagctggtttggttgtattctagcatgcaataagtaatttccaaagtcacataaatagctagagagtatcacattatcttctccattag

SEQ ID NO: 265496 - DNA, 201 bp, Homo sapiens
atggtaagattgttttgaacagcacaagctgtgcctagtgtttcctcggggcgcccatgaacttggctgtgatcctatcagccaaaaaactagcagagccyccaggggaaggggaggcgctgtggcccccctggggtccgcctccggaacaccctctccccgtgcttttaaacacggccaagttctgacttggagcagcca

SEQ ID NO: 265497 - DNA, 201 bp, Homo sapiens
tttggttgtattctagcatgcaataagtaatttccaaagtcacataaatagctagagagtatcacattatcttctccattagaatcatatatcatgttttrcttctttatatctacatacataagttatttcttaatttctatatcaaaattatctattgttttagaataataagaacaaataacttactataaatgtcag

SEQ ID NO: 265498 - DNA, 201 bp, Homo sapiens
agtgttatgttcacggcacagacagacatctgtcttcccaactctgttaggaccacattagatctgagacagcatccaccttttctccagcattcccccarggcttaaatccggccgcatggctcctcttcgtcttcagcccatgagtcccaaactcagtgagcttttctgaacgcatagcatagattaaatgactacatc

SEQ ID NO: 265499 - DNA, 201 bp, Homo sapiens
tataaatgtcagtaatcccttatcgctacacattggactgtagtttaagaatgtaatgataaaactagaaaaatacttaaagcaacataaacccctatgtrtgaatgcaaggtgaaaagattttcttatataaatataatactatagtctacttgatagaccttcatttatgaatgataatttagtgattatatcatatcc

SEQ ID NO: 265500 - DNA, 201 bp, Homo sapiens
ggccgcatggctcctcttcgtcttcagcccatgagtcccaaactcagtgagcttttctgaacgcatagcatagattaaatgactacatccttttgctctcrtctccgttgtggaaccccagagtctgaaatcttgggaagctctgtgtcatttactgagtgtgatgcgatgccaagaccagggctgctgtacactgaatat

SEQ ID NO: 265501 - DNA, 201 bp, Homo sapiens
ggctgcagggttgccatcctaacacttctccctgcaccactacacactgggggcaacttcctggcaccctacatgctgctactaaaaggcctctgtaaagwtatgttgcatctgtaaagattgggaaaagagagatggtgcatcccaggtcaactttcagatttaactctgtgttaaactaacagctaaactacaagtaat

SEQ ID NO: 265502 - DNA, 201 bp, Homo sapiens
taccctgtgaggctgatttttgctgccataccttgacttgcattttctgctgacattgatacattagttctgtctatcactaccctgactttcttttatayaaatagccctgtctttagatatacatgtgtaacaaaacagcatttcctcatggctaatgctgcccctgtttcttgctatgagtgattgagatgcttttgg

SEQ ID NO: 265503 - DNA, 201 bp, Homo sapiens
tccttttgctctcgtctccgttgtggaaccccagagtctgaaatcttgggaagctctgtgtcatttactgagtgtgatgcgatgccaagaccagggctgcygtacactgaatattgtgtaagatggattaaggcctctttcatcctgaaggaaaaaagggaagtttgccagctacaaggaggttggcaaagagaacaggga

SEQ ID NO: 265504 - DNA, 201 bp, Homo sapiens
aataaaaaaatcacattgtttagagcaaaattaaacctttacttattatctgaatattaaaaacaatttgagcacaagaatcctgttgtgtacatattcaygttctttaatacatttcctagtgcatctggctctactctcttatcaaccatattcatctgaaaattttagtcttcttattttgttttatcataaaattgc

SEQ ID NO: 265505 - DNA, 201 bp, Homo sapiens
tgacctggcctccatccctccagtctgtctgtctgagaatgctggatgaatggaaccatgcagtaggtaacctttaaggcgctccctttattcagggcaaygcctttgagatgctgtgcgcccgttgttcatccctctctgttgctcagtggtgactgttgtgtggctggcaccacagtgtatttgagcatttactcaata

SEQ ID NO: 265506 - DNA, 201 bp, Homo sapiens
tggaaaaacttgcagagtgtcatgaattctgtacttcagaaacatcaaaatgttcaaatgctcagtgatgaatgtttttctgtataacacagatgactgtygtatgggttttatgaaattcctattatataatggaggaacacattacctttgatttccatttgtgggtcccagctcagggctcttggtaagggtgtgtga

SEQ ID NO: 265507 - DNA, 201 bp, Homo sapiens
cctctctgttgctcagtggtgactgttgtgtggctggcaccacagtgtatttgagcatttactcaataagggacatctgggctctcgtttttggcagttgygattggagctgctgtgtacattcatatacagtgtttgtgtgatcatcggtctccatttctctctgttttcaaaattgagttgttttgtccattcttcatt

SEQ ID NO: 265508 - DNA, 201 bp, Homo sapiens
gtgccttttagcaatgaaatagctttcaaattaaattttatgtgacaaataatgcaatgcactctcattatataacacttaaccaatataaaaaaggtgargtagaaactgctgatacaaccattgctaaccattttagtgaaaatcctttctgatatctctggcatgcattcacactcacacatagaaataagttttttc

SEQ ID NO: 265509 - DNA, 201 bp, Homo sapiens
agctttcaaattaaattttatgtgacaaataatgcaatgcactctcattatataacacttaaccaatataaaaaaggtgaagtagaaactgctgatacaascattgctaaccattttagtgaaaatcctttctgatatctctggcatgcattcacactcacacatagaaataagttttttcttttttcttctgaatttgtt

SEQ ID NO: 265510 - DNA, 201 bp, Homo sapiens
tctctttgcagatgtcacttacaatttctggtgacacaagtttgtacatatgttcgttgtagtgctggggagtagagaaagacaaactgtataaaacacawggaaataccatgctaagacatttaggcactaaatacatcaacataccttaaattataaatgtctggaaagagaattccttatcgtaacaaagcaccttat

SEQ ID NO: 265511 - DNA, 201 bp, Homo sapiens
tatacttatttccttaatttcaggctgtaataattcacacttttgctttcattttatgaaaggactccttttcccaaaaaaaaaaaaaaaaggaatttcaytgtgttcagagtctgattagccaaaacaaaatattcttgtaacttaaattttgtttcatctgtttattgagcatttctctctgctcccatacattaggta

SEQ ID NO: 265512 - DNA, 201 bp, Homo sapiens
tgttttactgcaccagctggcctctatgtagtccaacccatgtggaggtggggtgaaaaaggctgatgtttagaatcctatttctatcacttactagctaygtgaccttgtaagacattctctaagcttccctttactcaacccagaacatgggattactaatctctgtctggcagcattcttggggagaccagattaatt

SEQ ID NO: 265513 - DNA, 201 bp, Homo sapiens
gttttgacacaactgactttagataatagtaaggatgcattgattttcattaacatttcaactgcaccttaaagatgcgtgagattttgtaaggaaacatggccgaaggacttttggcaaagacactgcatgaacaaaagtggggaaggaggagagtgagggcagcattcagaagacaacttggtgttcagtttatctgta

SEQ ID NO: 265514 - DNA, 201 bp, Homo sapiens
tatgatgtctggagtcaataggtttgtagggcctttgaaccaattgcatttcagaagtacctccatttataccagcttcctccaccttaggtttaatcacygaaattttatggaaataacctttatccattcaacaaaaatgtattgaatactttcttgtactattattgtgctagtgttggataaaatagtaaatgagga

SEQ ID NO: 265515 - DNA, 201 bp, Homo sapiens
aagaaatgaggtagctgagggatggagataagaaaatgaccttcttaatgggaaaaattgcagcatgtctatgtactgatggtaatgattcagtagaggarttgggagactgatgatgcagaagggggaagggagaattcaggagcagtgtccttggatgtaggcatgggcttggacaagagagtggccagttccgcctgg

SEQ ID NO: 265516 - DNA, 201 bp, Homo sapiens
ctgatacttactgagtacctactatgtgctatataccatcctaggttatagggatagaggagtgaaaaatctccatattctacttagagaaaaccatattrtatacacataaacacatttagtgtatattatgttagatggctatcattgctatggagaaaaaggaaatgaaaaaggacagcactcaggtgtggtggctca

SEQ ID NO: 265517 - DNA, 201 bp, Homo sapiens
tatttcctaaaacgcaaacacacgcgcaaacacacacacacacatgcagacatacacacacttccttctttctttcagctgatacttactgagtacctacyatgtgctatataccatcctaggttatagggatagaggagtgaaaaatctccatattctacttagagaaaaccatattatatacacataaacacatttagt

SEQ ID NO: 265518 - DNA, 201 bp, Homo sapiens
ggagtcttctcttcaaacttgtaccaatatttgcagtgtttccatttttgttttagagtccatgggtaattagtaaggaaagaagccaacagtaatcatcycctcagatctgctttgtaaaggtcaggtcactttgcattctcctagaaatttaattgagccataatcaaaattaatatcactacgattagttttggtaat

SEQ ID NO: 265519 - DNA, 201 bp, Homo sapiens
cttttacgttgatctcccaatctgtaaatgttgtcttagattcttttcaagcactctgtgagccaaaaaaaaaaaaaaaatgtgtgtgtgtgtgtgtccasaccctgctcacaagccaccagttgtgacctttgaacgaaaccctagctgggaaggttggtttggactagatcacagggtttcagcctgagttctgagaaa

SEQ ID NO: 265520 - DNA, 201 bp, Homo sapiens
catttcatctcaagactcaagcaggaagcaagcactgcatagtggcagatgagcaaacaaataaatgcagagatgaattatgcctgagggatcgatggtcrtagacattcctaagttgctgtctgtgggtgaatgtgtgagcattttttttttttttaccaggtttttgtattgggtgtttgttatctgtatttcatggca

SEQ ID NO: 265521 - DNA, 201 bp, Homo sapiens
ttgagggtttggctttttttgtggttggttagatgtgtgtttttcaggtacacgtctgtgtcctcccaaaaggcaacactggcagttgatagtcataactstgtgtaagaacatataaccacacagagtgaaaatgacgtttttgtgattaattcttctttccaacagctggctgtcccaactccttgattaaagagctcc

SEQ ID NO: 265522 - DNA, 201 bp, Homo sapiens
atgacatcctaaggccagatcataatcagaggggagagaaagcctggccagagtcacatgcaactgttttctaaagaggtgcggttggaggccaggcagcrgccatagctcttttgagggtttggctttttttgtggttggttagatgtgtgtttttcaggtacacgtctgtgtcctcccaaaaggcaacactggcagttg

SEQ ID NO: 265523 - DNA, 201 bp, Homo sapiens
tatgaggaaccagtgacatgctgaacatgtttctaagaaccagagtggcatgacatcctaaggccagatcataatcagaggggagagaaagcctggccagrgtcacatgcaactgttttctaaagaggtgcggttggaggccaggcagcggccatagctcttttgagggtttggctttttttgtggttggttagatgtgtg

SEQ ID NO: 265524 - DNA, 201 bp, Homo sapiens
gccagctgagccccccaaagaatggatgtctagctacccgacctttgctcttacctctcaatgagcaggcccctggccttgatggtgagcaaacaggacaygatgaataagtcagagcctgtggtcaccaactcccctactctggccctgcggaatcctggctatatatgaggaaccagtgacatgctgaacatgtttcta

SEQ ID NO: 265525 - DNA, 201 bp, Homo sapiens
aggaaatggaacattaaagagttaggggcaatagtgaatagagtcagtaggtccaacatctgattaatacaaaataataagacaatgaaaggcagaaaatraagtttcatgacaacattttataagctcaagaaatagtctatgtcaattaacctttgttatgtaacacatgacttcaaaacttagtgatttaaaacaaag

SEQ ID NO: 265526 - DNA, 201 bp, Homo sapiens
cgtgagccgccatgcccggctaacacactttcttatatcataggttactatggctatgagtgcagaatattatttgtcttattttgagtaaatattatctygttgtatgactcttcacaagcattttattaagtatgtctttgcataaagagctagactctacagaaagaaagttgaatagatatgatgcttgctcagtac

SEQ ID NO: 265527 - DNA, 201 bp, Homo sapiens
ttggtttttctctacacatgtaatatccccaaagcctaaaacaagatgtttatctttttgatagacaagcaattaacttttgggggggagtttcaaggcartaaagcccatctgttaggacactggaaataaataggaatttctgacagaagaacattatggcctttcatttgttatgctgtagctaaagctctgtcagca

SEQ ID NO: 265528 - DNA, 201 bp, Homo sapiens
agattgccagtcagactatcaaggcaattcccaatcactgtgaccaccaaagggaaatagattattgtgagtctgtgctccaagcaaaaccaaacacacarattcagaaaagaaaaaggggaaaaagtggagaaccccggttgcagatttcaagatctgtctgacttcaggaactattccttagtatattagtccatgagg

SEQ ID NO: 265529 - DNA, 201 bp, Homo sapiens
aggacacatttctcagaatatatccctgttgttaaacaatgcctgactgtatataagcatgtttagatttctctaagtttaccttttatagaggcaatgargaatacatgccggcctgtgactctgcagcattctcaaagcccgatgtttttcttctttaggcagagacaatatcaaaagtaaacagaaacattactgtaa

SEQ ID NO: 265530 - DNA, 201 bp, Homo sapiens
gaatgtgaatggttttcctttccgtgaacttgttaaagttgttctgtgctgccacagtattgccttgtgcaaatcttctgatttgtgcaaagtcccagaaraaatgacgatagactgctgctctcctcctaagtaaaatgaagaagtatctaagagaaacagatgattcaaaatgcttttaaaaatagatattaatgaagt

SEQ ID NO: 265531 - DNA, 201 bp, Homo sapiens
tgtgcacattgctaagtctatttattcagcaaggattgattgacttaatattgtgtgccaaggtgtgttagatgctagagatagaaataagaataaagtasgcaagctcccttgtccccagcgggcttactatcaagcaaataaatactctaccatgaactactatgggataatgcacaaagtcttcagaaggcagtgggg

SEQ ID NO: 265532 - DNA, 201 bp, Homo sapiens
ctactggaacatgatattaatgttcaaatcacatctgataattaggcaaatggtcaaatttttcttgaaatttaataaatttctccattgatgtcaagcarttttagaaggtgggccattattgcatttttaaaccatatgttcaaaactaagacattttatttgaaagatttttaaacagaatatgcacttctatttcca

SEQ ID NO: 265533 - DNA, 201 bp, Homo sapiens
aggggtagtgtccagaggatatgggtaaatgggccttaaataaaagagggaaaccctattctgtctcttaaatgaaggagagaaggatacatttggatacmctaatatttataggtttaagagccatgagttaggaggttcctgggtgacagctcatggttttgaatatacgggtatagaattgttttacttccaaattgg

SEQ ID NO: 265534 - DNA, 201 bp, Homo sapiens
tattaatgttcaaatcacatctgataattaggcaaatggtcaaatttttcttgaaatttaataaatttctccattgatgtcaagcagttttagaaggtggkccattattgcatttttaaaccatatgttcaaaactaagacattttatttgaaagatttttaaacagaatatgcacttctatttccaagctccttaaaggg

SEQ ID NO: 265535 - DNA, 201 bp, Homo sapiens
atttctggtgacacaagtttgtacatatgttcgttgtagtgctggggagtagagaaagacaaactgtataaaacacaaggaaataccatgctaagacattyaggcactaaatacatcaacataccttaaattataaatgtctggaaagagaattccttatcgtaacaaagcaccttatctttagggtctggcatctgagtc

SEQ ID NO: 265536 - DNA, 201 bp, Homo sapiens
aggcactaaatacatcaacataccttaaattataaatgtctggaaagagaattccttatcgtaacaaagcaccttatctttagggtctggcatctgagtcycttaattctctctccctgtacaaactcataaagaaaagttagtaaaaaactataccacagctgacataaacaaatattgcattatgctcgtggactctgt

SEQ ID NO: 265537 - DNA, 201 bp, Homo sapiens
tatgttcaaaactaagacattttatttgaaagatttttaaacagaatatgcacttctatttccaagctccttaaagggtgaggatatacattttcataacwgacacaattattttttaaaacaaattcataaaacagtggaaatattctaaacatctgtcttcaaagtgtttgctccagagttcaacttccttttataaaa

SEQ ID NO: 265538 - DNA, 201 bp, Homo sapiens
ataactgacacaattattttttaaaacaaattcataaaacagtggaaatattctaaacatctgtcttcaaagtgtttgctccagagttcaacttccttttwtaaaaaagatatttctatatctggtaaaaatcgcatcgaccttaatgggacaaaataactgtttttgttacttttctaaaatatctgctagattgcattt

SEQ ID NO: 265539 - DNA, 201 bp, Homo sapiens
cttcaaagtcacatagtgtcactgtaccctgttggttgagacactcacagtgttctgcctgagcttggggagagacaacattgtccctaccactcagtggyggagtgtcaacctgacactgtgagaagaacattcaaatgataaatatgtgacagccatctttggaagatacagttggccatactttgggtctggcatttt

SEQ ID NO: 265540 - DNA, 201 bp, Homo sapiens
tcactgtaccctgttggttgagacactcacagtgttctgcctgagcttggggagagacaacattgtccctaccactcagtggtggagtgtcaacctgacaytgtgagaagaacattcaaatgataaatatgtgacagccatctttggaagatacagttggccatactttgggtctggcattttagtcatttaattcattct

SEQ ID NO: 265541 - DNA, 201 bp, Homo sapiens
agaaggtgagaaataaaacacaaaagtctcttatgtccttttcataggaaataggtccatgaactacgtctctaaaccattctgaacctggtttatataarcagcttaagaagtatgtcccaaatgcttgtcagccattgggtaaaatcaaacacgtacttcttttattttatatacagtcatgttgcaaacagagaagca

SEQ ID NO: 265542 - DNA, 201 bp, Homo sapiens
gcttaattatgaccagctgcattttagtgtccagaggtcaccatgagtttcttgccctagtttctaacatgatttatgatgataaccctccacatttctcycttctacccttgggattctcagattcatgttttatgtgcctccgtctcagcaaatgcttggctgttttcctgattctctgctatgtttaggaaaatcacc

SEQ ID NO: 265543 - DNA, 201 bp, Homo sapiens
agaatgaactacacctcacagttaaaacagaaaactggagaggaggtgatttactatggctactcttaatagtgaagacagaataatactgtttaattttrtgagaatccacattggcaattaagaactatagggctggctccatggacagttgcaggaaagtccacagactatccctggcccctataaacatgagcctag

SEQ ID NO: 265544 - DNA, 201 bp, Homo sapiens
tagtagagacggggtttctctgtgttggtcaggctggtctcaaactcctgacctcagatgatccgcccgcctcggcctcctatagtgctgggattacaggygtgagccactgcacccagcctattaaatattcttgatgattttaaagcaccaaggccaacatcacaaactttggagaagtttgttttcatgttttcaatg

SEQ ID NO: 265545 - DNA, 201 bp, Homo sapiens
cccccatcccacccatccctcttgtgacatgctttttgcatctagtaccagagttggttcataagtgtgaataacatcaagaggcttgttccaggcaatckcttctgtagactggtacgaggcctggcagtagacgatgccaatgaactggcccaggaagagcaaagcctgaagcttaattatgaccagctgcattttagt

SEQ ID NO: 265546 - DNA, 201 bp, Homo sapiens
agtccacagactatccctggcccctataaacatgagcctaggtgtttgttctcctccctactgtttcattaaactctgatggacacacacccttgcccccratctattgatggcttatatactgggataatgggcagaagggatatatactcagtaagacctcccttatggatcaaagctttgtctacatactactgagct

SEQ ID NO: 265547 - DNA, 201 bp, Homo sapiens
ttcaatgcttagattttaattatggtttcaagaaattattaatgaaaaacctcaaagaattctatcagattgagatttatcagtaaatctgtatttcgtcraattcatgcatgttctatttgtgtatcacatcatttatcattttaagttaaaaatttaattcttattttttacataatgtgatatgtgaatagaatatac

SEQ ID NO: 265548 - DNA, 201 bp, Homo sapiens
gcctgaagtcttcagcacagctcagtttggacacttgagtgtttggaatcctcttacatatctcactagtgcagcaggatataaaatttaggaatctggcyggccagcaaagaaccttccaagaaaacagaaatacgtatcagaacaatgggtaacaataagcttttaaattttgttcatttttatatagcatgtctgtgg

SEQ ID NO: 265549 - DNA, 201 bp, Homo sapiens
gtccttgggcatctcaaggctatcagatcttttactggagaagcaagcttgttttgtctccacctgaataatccctggctggaagagagccaaaagaccasatttcagcatttctacccattctgtgcatcatgcaccagtaataaatgcccaagtaaacaaagagatgaaatagcaatgctatagccataaaaccaattc

SEQ ID NO: 265550 - DNA, 201 bp, Homo sapiens
actttaaagcacttgtttggagaagattcatttgttaaacctagagcatttcactcagttttgcaaatgcaaaccattattttatatccccacatttggaraggaaacaggttagcattgatggaggtaccattgccacctccttgtgtgatgaaaactcctttcttccctcctcaaacttgggacatagagtctgaatga

SEQ ID NO: 265551 - DNA, 201 bp, Homo sapiens
gacatgaccacggatgtttgcaaagatctccattgctttacagtctctaagaataaggttttcaacaaatttataaaatgtatacaatttgtttgacttaytctttttcaaatatgactctttacctaaagaaaataatattttaaactgttacaaagtcacttctaaagggcataaaacttgcaaaataataacttgtaa

SEQ ID NO: 265552 - DNA, 201 bp, Homo sapiens; identical to SEQ ID NO: 52793

SEQ ID NO: 265553 - DNA, 201 bp, Homo sapiens
actggagaagcaagcttgttttgtctccacctgaataatccctggctggaagagagccaaaagaccacatttcagcatttctacccattctgtgcatcatrcaccagtaataaatgcccaagtaaacaaagagatgaaatagcaatgctatagccataaaaccaattctattgattttattccagcaaatctcataccgta

SEQ ID NO: 265554 - DNA, 201 bp, Homo sapiens
atattttcaaaatttttaaaaattatatgaacagttatcctcattttttcttatgatatcccaatgacttaattcagagaatgttgttctacaggagggckcagacattctttttttttttttttgagacagagtctcgctctgtcacccaggctggagtgcagtggtgcaatcttggcccactgcaagctccgcctcccg

SEQ ID NO: 265555 - DNA, 201 bp, Homo sapiens
tactgctttaggataagcctgtgggtaaatgtatcatgcaaaatatttacattaaaatgctgcatgacttaattttgcctgacttataatccctgggaacrctgaatatcatttcttcaaaaattctttctactttatgattcgtgtatttaatttgtcttctaacataactattatttttgtcttaatttgttgtaactt

SEQ ID NO: 265556 - DNA, 201 bp, Homo sapiens
aaaaaaaaacgaaatctaaggaatgttccacctgtaggctcttcaaatgtttaaagcagctacaatgatttacttcctagggctttccttctgtattaaasttacgattcaagcattaaaaagggacagagtattctcctgcctcaaagaagttttcttttcaaagaacagcgttggagccacgaaaggtatggcaagact

SEQ ID NO: 265557 - DNA, 201 bp, Homo sapiens
aagggtataaaatgttagagtattagaatttagataatttggcaaatcctttgtgttcttgtctcgtaattgtaggcttctgttaccagggagacagagtyggaaagtcacagaattaatggtgataagctttcaaaccggctcctttacaatgagttggcacagaacaagcgtatacaggctagggaaaaaaactcttag

SEQ ID NO: 265558 - DNA, 201 bp, Homo sapiens
aaaaaagtatataacatgctatcaattatctaagagaggtgcttaaatacacacacacacacacacacagacacacacacacacaccagcttctgttagasgtaaagcagaaatctaaaaacaaacaaaaagatagtgaatatattaaacagacaaaagtagaagtgagacatctttgacaattttatgtttttaaagttt

SEQ ID NO: 265559 - DNA, 201 bp, Homo sapiens
ttttttctttgttagcctggctaaagatttgtctattttgtttgacttttcaagaaaccaactttttgttttattgatcttttgtatttttttcatttcartttatttatttctgctctgatctttattattattttcttctactaattcttggcatatagaaatgctgctgatttttgggctatcatgaagattaagtct

SEQ ID NO: 265560 - DNA, 201 bp, Homo sapiens
cccaccccgtgttgccactgtcatctgttaacctcctgccccccgccacctcactgaggatgtttatctgtcctgtctgccacccccagttctccaaattytgtccgttttcttttcttttttatttatttatttagagatggagttttgctcttgctgcccaggctggaatgcaatggggcgatctcggctcactgcaaa

SEQ ID NO: 265561 - DNA, 201 bp, Homo sapiens
agtacatatggctattaatttccttaactctccatgcctgagcatggttggcaaacgctggaataatactgcttatcggaatgacactatggtttgaaactttttttttttttttttgagacagagtctcactctgtcacccaggctggagtgcagtggtgcaatctcagctcactgcaacctctgctttctggtttcaag

SEQ ID NO: 265562 - DNA, 201 bp, Homo sapiens
gtacatatggctattaatttccttaactctccatgcctgagcatggttggcaaacgctggaataatactgcttatcggaatgacactatggtttgaaactttttttttttttttttgagacagagtctcactctgtcacccaggctggagtgcagtggtgcaatctcagctcactgcaacctctgctttctggtttcaagc

SEQ ID NO: 265563 - DNA, 201 bp, Homo sapiens
gttaaatgtattaaatgcattttcagattatggtattttcaacttacaatgaatttatggtgatataaacctattgtaagtcaaggagtatctgcataggtttttttttttcccagtgaagaactagctttttagtttatttgatgtttctgctctttttgcccattttctgattcagcaatttctatttttttcttaata

SEQ ID NO: 265564 - DNA, 201 bp, Homo sapiens
aggctgtatgtttgtgcacactctatgagatcagtgcctgttggtaaaaggagcttactcacaaactgtcaagatgacatttaaaagagagaacactggcyggctgtcgtggctcacgcctgtaatcccagcactttgggaggctgaggcgggtggatcacttgaggtcaggagtttgagaccaacctggccaacatggtg

SEQ ID NO: 265565 - DNA, 201 bp, Homo sapiens
ctgaattgaaagggaaaggagcgagaagagcagctgaaaatactttgtggtgcaaagtattcagtctgtaagtgggatatggtgtgtgtgtgtgtgtgtgwgagagagagagagagagagagagagacatgtaagcactgtgcacacacacagacttgagaattgtacccttgactcttttcaatgggaatacagagtttt

SEQ ID NO: 265566 - DNA, 201 bp, Homo sapiens
ctaaaaatacaaacattagccaggtgtggtggcacatgcttgtaatcccagctactcgggaggctgaggcaggagaatcacttgaacccggcgggcggagrttgcagtgagtcaagatggcaccactgcactccagcttgggaaacagagcaagactccatcttaaaaaaataaaaaaagaaagaacaccaaggatttaat

SEQ ID NO: 265567 - DNA, 201 bp, Homo sapiens
tatagaaagaatgctgccatgctttaaacacatagtgaccattggaatcccatttagtataatgtaaaatcacagtacagagagatattacaaaaacgtgrttataaaatctattttttaggcagagcattttgaagcttgctggagaaggctgtctgtctttcctttgtcaagtagttacatgtgatatttaatacagta

SEQ ID NO: 265568 - DNA, 201 bp, Homo sapiens
ccttttaaatatgcactatggaacaaacaccgctatcaaggtttttgctgtaacaataaagatggttattttagtcatctgtcaattattcatagcactgsaaaacaaagtaaaatagaaaataaaaatatcaaaccaatcttaaagtcagtctggaaagttttatatatatatataatatatatataataaatatatatt

SEQ ID NO: 265569 - DNA, 201 bp, Homo sapiens
actgtgtttggctaatttttgtatttttagtggagatggggttttaccatgttggccaggctgatctcgaactcctgacctcaggtgatccgcccgcctcrgcctcccaaagtgttgggattacaggtgtgtgctcggcatatatctctttttataagatagaaaatacatgctcagacaaagtattttgggcaagatcac

SEQ ID NO: 265570 - DNA, 201 bp, Homo sapiens
aaaattatatcccaggatagaaagatttagaacattagcaaacttcttcatttagatgactaatatgtttttctcaatgggattttgagcatgtttgtatsagcacagcccaaatctgaaaactcttactatttctattgaaaaaaaaaatgttgacaaggaatatactctctgagtatgggcccatacccagttgcactt

SEQ ID NO: 265571 - DNA, 201 bp, Homo sapiens
cccgagcagctgggactacaggggcccgccaccacgcctggctaatttttttgtatttttagtagagacggggtttcactgtgttagccaggatggtctckatctcctgacctcgtgatctgcccgcctcggcctcccaaagtgctgggattacaggctgagccaccgcacccggcccagacattcttattgttgaataga

SEQ ID NO: 265572 - DNA, 201 bp, Homo sapiens
aatctgaaaactcttactatttctattgaaaaaaaaaatgttgacaaggaatatactctctgagtatgggcccatacccagttgcacttttaaacacaggmagtttgtgctggcagcaggatttaattgactgagctgtggtggtggctgcacttgtcatctctgcttactatgctctgtttttaaatatttattgacttc

SEQ ID NO: 265573 - DNA, 201 bp, Homo sapiens
caccacgcctggctaatttttttgtatttttagtagagacggggtttcactgtgttagccaggatggtctctatctcctgacctcgtgatctgcccgcctyggcctcccaaagtgctgggattacaggctgagccaccgcacccggcccagacattcttattgttgaatagacagctaaaatgacaaatgaaacctccctt

SEQ ID NO: 265574 - DNA, 201 bp, Homo sapiens
ctgagctgtggtggtggctgcacttgtcatctctgcttactatgctctgtttttaaatatttattgacttcacacactctgcacgatggctgctcagagamctcagccctgactgaagaagccactgcagggtgagcaggggcagagagccacgcctgtcgacgagatgctattaaccagtttttgctctgcccctgtcat

SEQ ID NO: 265575 - DNA, 201 bp, Homo sapiens
ctcggcctcccaaagtgctgggattacaggctgagccaccgcacccggcccagacattcttattgttgaatagacagctaaaatgacaaatgaaacctccyttatctgctctgtgaacccagatagaagccagtcactgtggtttaaactagcacttcccatacgctgatgttcactcagatgccctgggcagtgaagaag

SEQ ID NO: 265576 - DNA, 201 bp, Homo sapiens
attaaccagtttttgctctgcccctgtcatgccctatcagaccctctcttattttgtatgttctgcatactgttcagaagataacagttggaaacaatatwtgaaaaggctctgaatggaaatccttataggtaaggatgtacgtctcagggaagggttcggtgaatcactctgggttacacagctagttggggacaggtg

SEQ ID NO: 265577 - DNA, 201 bp, Homo sapiens
gaatagacagctaaaatgacaaatgaaacctcccttatctgctctgtgaacccagatagaagccagtcactgtggtttaaactagcacttcccatacgctsatgttcactcagatgccctgggcagtgaagaagcagattgaatgccttgggcatcttgaagaagcaggttcagattcagtaggtccggggtgaagcctga

SEQ ID NO: 265578 - DNA, 201 bp, Homo sapiens
tgcgttagccaggtttaagaactgaatcatcttagctattgagagatagttatatgacatctttggaatacctaaataaagtagattgcaatatacacttyttaatatctgttcactggcctatgtttaaatgaatttaactttttggttaaagatgtccatttagaatatattatttttccgagagtaaacactattgaa

SEQ ID NO: 265579 - DNA, 201 bp, Homo sapiens
ttttttagtttttcttctttctttcaaatcagctttctcatggttaaatgcatttataataagcttctagttaatgaagatgcagtaggtctagaactacrttcatgaatagcaaaagtttagaccaggggtctataaactacagatagcattttttttttttttgtaaataaagttttattggaacacagtcagcccatt

SEQ ID NO: 265580 - DNA, 201 bp, Homo sapiens
gtgttttaacaagtcagttgtgttcctttgcagacctgtttttactagttgtgcttaatatggatttcttaatttaattaaaaaaatcaagtaagccaggraaccatcaatgaaaaaagaagtgtttctacaaaaaactaagttgagtgatttgcaaagatttaataaagcaggcttattagaaaactattgttgagctat

SEQ ID NO: 265581 - DNA, 201 bp, Homo sapiens
atttataataagcttctagttaatgaagatgcagtaggtctagaactacgttcatgaatagcaaaagtttagaccaggggtctataaactacagatagcattttttttttttttgtaaataaagttttattggaacacagtcagcccattcatttatgtgtctagtgctattctttgctgcaatggtagagttgggtggtt

SEQ ID NO: 265582 - DNA, 201 bp, Homo sapiens
tagagttgacaacaggcctgggaacgcagaggagaaaaggctaccttgttctgtagaaacacgaaaggcaggtcgtgctgcagcctccaagggagcagtargctgggctttgttcttttattctgggtaagaagttagagggccagagacattaaattatgtagatattttcatttctttttctttccctccttttttttt

SEQ ID NO: 265583 - DNA, 201 bp, Homo sapiens
cttttatggttatgttgtttatatatatttaatcgtagttctgtctccatttgccacattttggcatgaaaacatactttttattccttgtttttaaaaayacttgcttttgcaactatgaatttttctctgagcatcagttcagatgcacagcgtgggttgccttgtgttgcgtttccattatcatcaatgtttttacta

SEQ ID NO: 265584 - DNA, 201 bp, Homo sapiens
gagaaatgtttttctccagaaatatacaaatgttattttgcaattgtattcctatacattcattctcgttaattaaaaaaaaaatgtttacatggagaaasactcaatataaatacattttacagctctagccaaagccacagtcttaaggtattgttcattgtgttaatatgtcccctggtttctattttactgatgctc

SEQ ID NO: 265585 - DNA, 201 bp, Homo sapiens
ccggtcatccctcctcctgcctttctgtaggtcggactgaagctctgaaacagcctgtaaacatcctgtgtggaccacaggcctgtatttctgttgggccwcctgtttaatctcgactttgtattttttttatatatacatagagacagggtctggctatgtttccctggctggtcttgaactcctgcctcaagcgatcat

SEQ ID NO: 265586 - DNA, 201 bp, Homo sapiens
cagagcccccaaaactgggataattgatgagaagctgactagaatggtcagaggatgagctcattgtgggagtgctgctttcctgcaggaaggcccggagrgaagctgccgcctgggctggggaggcggctcactgcctgccgcagcctcccctccctggagggccgcaccacctgcctgattcttgcaccgcacgccccc

SEQ ID NO: 265587 - DNA, 201 bp, Homo sapiens
ttcggttttttccaaaaaattttgagaacaatattcaacatgctgtattacttttcttggaacactctttccttgtgttttttactggtgtcattttagcttttttttttttttttttttttgatatttacatgttgctgtgggaaagtcagaggcaagtctgatttatttctccacataagtgaattgatctttctgctt

SEQ ID NO: 265588 - DNA, 201 bp, Homo sapiens
attaagtatcatttccattgctctgagttgctgaccatcagacccatggggattgtacgtatttgcaacgctcttcccatttgtcctggccccttaccgartgcaggagggaatgcatatttgcagtgggattcatggaatctggtcgtgtgtgaggaggactgtggtggtcgcagccctaaaccactcagccccactcag

SEQ ID NO: 265589 - DNA, 201 bp, Homo sapiens
ctgaggcaggagaatcacttgaacccaggaggcggaggttgcagtgagtcgagatcacgccattgcaatccagcctggagacagagcaagactctgtctcaaaaaaaaaaaaaaaaaaaaattaacagaattctccctgtaagtgaatttgtaagaaaacaagaacattgactattccatttaataacaaaacttctggga

SEQ ID NO: 265590 - DNA, 201 bp, Homo sapiens
tcggttttttccaaaaaattttgagaacaatattcaacatgctgtattacttttcttggaacactctttccttgtgttttttactggtgtcattttagcttttttttttttttttttttttgatatttacatgttgctgtgggaaagtcagaggcaagtctgatttatttctccacataagtgaattgatctttctgcttg

SEQ ID NO: 265591 - DNA, 201 bp, Homo sapiens
tggcttattttaatgcactttgaatgctgaagctatcaatttgtacagaccattttaatgtactgctggggggaaaagaactcaacaagaaatagttaacracttacacatttttttattagtttttcttcccagatactttctacagtcctaaatgggataaattgggtaagaatgcatgtcaggatatgtttttatttc

SEQ ID NO: 265592 - DNA, 201 bp, Homo sapiens
tgagaacaatattcaacatgctgtattacttttcttggaacactctttccttgtgttttttactggtgtcattttagcttttttttttttttttttttttkatatttacatgttgctgtgggaaagtcagaggcaagtctgatttatttctccacataagtgaattgatctttctgcttggctgtccagaagattcttttg

SEQ ID NO: 265593 - DNA, 201 bp, Homo sapiens
attttaataagttataatctggtgttgtctacaggtcattttccttttattacaaagtgttatttccatatgtagattcaaatcttctttgtttttttttkttgttgttgtttgtttgtttttttcttgagacagagtcttgctctgtcacccaggctggagtgcagtggcacaatctcaggtcactgcaacttccacctc

SEQ ID NO: 265594 - DNA, 201 bp, Homo sapiens
tattttaaagcatatgcaccttgaaattcaaactgctaaaccacacaacaaccccaggtgacagtgggcatctggagtaagaactttctttttttttttgcaaacaaaggagaatttcttgtaactttggcgtttgtatcagtgtctatggctgcataatgagttacttcaaaacgtatggcctaggacaatagtcatgca

SEQ ID NO: 265595 - DNA, 201 bp, Homo sapiens
attttaaagcatatgcaccttgaaattcaaactgctaaaccacacaacaaccccaggtgacagtgggcatctggagtaagaactttctttttttttttgcaaacaaaggagaatttcttgtaactttggcgtttgtatcagtgtctatggctgcataatgagttacttcaaaacgtatggcctaggacaatagtcatgcat

SEQ ID NO: 265596 - DNA, 201 bp, Homo sapiens
gagttatattcccatggctttagaaaccatctatatgctaatgactcccaaatttatatctccagctcggctctcctctcagcactcccgtctcatttatycaaattacttacctgacaactccacgcggatgtttctcaaacatctgaaatgtaatatgttcaaaactaaactcttgctttttttcatggaaacttattt

SEQ ID NO: 265597 - DNA, 201 bp, Homo sapiens
tattattttatgattgtttaaagacatttaaaatttctcgaaaaaaaaaaacaactctacggaaatggatcacatttgttagatccaccacaagagaagayaatcctgaaaatgtatacggtataaacaggactccatgtttcctggtatactaacttccattcggttaatgttgactcataaggtttggagaggtattat

SEQ ID NO: 265598 - DNA, 201 bp, Homo sapiens
ttttaaagcatatgcaccttgaaattcaaactgctaaaccacacaacaaccccaggtgacagtgggcatctggagtaagaactttctttttttttttgcaaacaaaggagaatttcttgtaactttggcgtttgtatcagtgtctatggctgcataatgagttacttcaaaacgtatggcctaggacaatagtcatgcatt

SEQ ID NO: 265599 - DNA, 201 bp, Homo sapiens
tgattctctgtggttgatactaataatctccttctgcagatgaggaaactaaggctctcagaagctaaatgtaaacataggtctgcctgactgtaaagttmattttccctctccaccttttattcacaaaacctctttcatgtctaggacttcttccacctcaaagatgttatgatccttgtctgctggcccctaaaccaa

SEQ ID NO: 265600 - DNA, 201 bp, Homo sapiens
tttaaagcatatgcaccttgaaattcaaactgctaaaccacacaacaaccccaggtgacagtgggcatctggagtaagaactttctttttttttttgcaaacaaaggagaatttcttgtaactttggcgtttgtatcagtgtctatggctgcataatgagttacttcaaaacgtatggcctaggacaatagtcatgcatta

SEQ ID NO: 265601 - DNA, 201 bp, Homo sapiens
aactgattatagatcctagtcacatctacaagaaagcttcacagaaacaccaagattagtgtctgcttgagtaactgaggaccatagcctagccaagttartacataaactctcgtcacagggactataatacagtccatgtgtttgattgccttctaaccaaatctataagggaatagactttagagagccaatgaaata

SEQ ID NO: 265602 - DNA, 201 bp, Homo sapiens
tggaggttgtttttggacctacagcaagatgcactcattagctaacttgttcttcaaattagatcactatggtagaaatagtactgaactataagtcgtgrggctaatcctgactctaccccaacttaacctggttattttggtcacgttactttctagctactggatactagggcaggccttttgcgtacattaccatat

SEQ ID NO: 265603 - DNA, 201 bp, Homo sapiens
taaaagattttgggcatattgcttttcttctactggattagcaatgaaaacagggtgtacaaccaaggaatttatgtactaatcaatagcatccaaaaggaaaaaaaatcatgaaatggcagtactaagaaaagtgaagaatgttaaaatacataggacaatatcataaagatatacagactacctaaaatccataatctt

SEQ ID NO: 265604 - DNA, 201 bp, Homo sapiens
acacccgactaattttgtttttgtatttttagtagagatggcgtttcaccgtgttagccaggatggtctcgatctcctgacctagtgatccgcccgcctcrgcctcccaaagtgctgggattacaggcatgagccaccgtgcccggcccatgctgattgttgtaagggaaatgctgagtttgtcttggaggttgtttttgg

SEQ ID NO: 265605 - DNA, 201 bp, Homo sapiens
ggcccaggacacagtgctgtcgaggagtttcacgtcccaccgctctgcctggctgcttctctcaggcaccccttccttcctggagttatcatctctttctsccacctctgcctcgcttccctttccacagtctcctcttcagaaggcaggaaagagaaaggaacagcagctgggtgaggctcaccctgcctgacttcatgc

SEQ ID NO: 265606 - DNA, 201 bp, Homo sapiens
tctggacatgaacacaatatagaaacgtatagaagttatatacatatataaaaatatgtaataaatgtttcataatataaaaaaagacttatttggtgcaygtgctgactataaacaacaaaggaatgaaacactggacttatttttgagatgcttacagtttagtctaatttataagactgctttctctttgtttttgca

SEQ ID NO: 265607 - DNA, 201 bp, Homo sapiens
agtgagccgagattgcgccactgcactccaggctgggcgacagagcgagactccgtctcaaaaaaaaaaaaaaaaaaatacaatctggacatgaacacaayatagaaacgtatagaagttatatacatatataaaaatatgtaataaatgtttcataatataaaaaaagacttatttggtgcatgtgctgactataaacaa

SEQ ID NO: 265608 - DNA, 201 bp, Homo sapiens
ttattgggaattatatacttcaatttcaattttaattttctgccattttctctgacatgctattcagtcattatacttttaaaacataataattattctarattctgtgacaaaattcagatttaattctaacattgtttaaagcacatgtcccaaattagatatggcttatatgaaatacatcatttttttaaacagcta

SEQ ID NO: 265609 - DNA, 201 bp, Homo sapiens
tactttcaagttttcattttaaaatgaatattttattgaatataatgcagttaaagacatgtgaagggactatattttaatcatcttatgctcagttaaatttttttttttttttggagacagagtctcgctgtgttgtccaggctggagtgcagtggcatgatcttggctcactgcaacctccacctcccgctttcaagc

SEQ ID NO: 265610 - DNA, 201 bp, Homo sapiens
tttatactttgaattttgctgaaattattggacaattagttaatggcattagtcctaataggagatctaaagtcagaataagttccatttggaggggagaygcatgtgtgtgaataaattcgatctcagctggcgagggatgctgtgggtgccttacgtggtatcagaccacagggcctgtgtgtagccatgtcaggcctt

SEQ ID NO: 265611 - DNA, 201 bp, Homo sapiens
aatactgtgggggaaaaataacgatgcagagatgtagatagctgaggttatataaattacccatatacttacatttcctaaaatgaagataaatatgatcrtatctctcagtgccatagagctttacatttacgctctaaatatgcatgttcaaaatataattatgtgaggatgaccagaaatagaaatttttattatata

SEQ ID NO: 265612 - DNA, 201 bp, Homo sapiens
taacttaaagatgatgaatttgtgaaagtttgaatttgactctggtaaatggcaacacactggtacttctgaaactgctttaaaagacatcttaaaacaawgtaattcttggaagtacaggaagatttaagatactctctgcttttggaaactcattaaattaaataaatttggtttatttaatttcagttctgaaattct

SEQ ID NO: 265613 - DNA, 201 bp, Homo sapiens
aacacactggtacttctgaaactgctttaaaagacatcttaaaacaatgtaattcttggaagtacaggaagatttaagatactctctgcttttggaaactmattaaattaaataaatttggtttatttaatttcagttctgaaattctattatgatgacagtataaactatgtcaatggtaacttccatttattggggaca

SEQ ID NO: 265614 - DNA, 201 bp, Homo sapiens
gcttaaaatagtcatgatgtaggccatgaaatggcaaaatttggagaggtgtttccctggaggggccatggagggcagtggtgagagctctgggatggtcrggaacatgagcccttcacaggagcctgaggctgtcctcacctagcagggtccagacaggaggaatggggccgccgtggctggagtgggggacaccagtgg

SEQ ID NO: 265615 - DNA, 201 bp, Homo sapiens
tttaggtctgctccactcacattaactggattcttcagcacgagcttatgtgcagcatcttcctgaagatcaaattggcatttgctaggtgggtggggaargaggcaggcagagcgagagtgcggaggatggttgggtgagaataccaggatggaaaacattaaaaaagcgtccgtggttcagggccagcctgggaagggc

SEQ ID NO: 265616 - DNA, 201 bp, Homo sapiens
ccatctttcctagaactctccgccacaaataaagacctttggaggtcttctcagtgtttgtaactgactgtctggcgatgggctttatgaaagcatttgawgacacttgctacactcctcttgttctttatagtaaacactgtttttaatccattttaagtagcatgtaaagtccaaggctgtacatcacatgacacagtg

SEQ ID NO: 265617 - DNA, 201 bp, Homo sapiens
caaaaacagaaaagtaacgatgagtaaaaaattattggcatccaaaaaacaaaaaatggaaagacaataatctcaaaatcaaggatgatgggagatattcrgtaatatagtttaagtacccagaagaagcagtgtaataatcaatatggcttaaaagaaagcaaaaatgttaaaacatttatatttgtttggtaactaatg

SEQ ID NO: 265618 - DNA, 201 bp, Homo sapiens
caatttgtgcacatgattgcatggaaatcttagcacgagtgttagatgttactctcccctttaagaagtggttctacgtagccgccacattgctcctctgygcttacccctcaacgatgggttatatgcagaagaaataattgagaaatcatctactttattttttattgattttttaaaattatactttaagttctaggg

SEQ ID NO: 265619 - DNA, 201 bp, Homo sapiens
gtgttgagtgaaggtcaaagtcatgggttacataacggcacccatggaacatctggtaacatcctgcatggccccagtacttatgagtgggatgccagtgrggggaggatcataggacatgagttcgaggtcaagatcctgtgtctcactttactaattatgtcaccacgggcacatttcctcagagcagttaggtgaatg

SEQ ID NO: 265620 - DNA, 201 bp, Homo sapiens
catttggaggggagacgcatgtgtgtgaataaattcgatctcagctggcgagggatgctgtgggtgccttacgtggtatcagaccacagggcctgtgtgtrgccatgtcaggccttttgtgtaaatatagactgataaatagcaataattccatgatatcaaggcaatcgagtaaaaagtttaaaattctgtcaaacccca

SEQ ID NO: 265621 - DNA, 201 bp, Homo sapiens
accccgtctctacaaaaaatacaaaaattagccaggtgtgatggctcgcacatgtaatcccagctactgggaggctgaggcatgagaataacttgaacccrggaggaggaggttgcagtcagcagagatcaagccactccactctagcctgggaaacagagtgagactctgtctcagaaaaaaatgtatacatatatacac

SEQ ID NO: 265622 - DNA, 201 bp, Homo sapiens
cctccatatgggtaccgagcgaccagcatttggaagagctccctgatgttgtcacgcacaagccccagcaccagcgaatgctgggaggctgcgtgcatgcygcttctcacacagattctgaaatacaacttgcctagttaatatattgttgagctgcatattggctgaacttatgtagggctgtatattaaatgtatgttc

SEQ ID NO: 265623 - DNA, 201 bp, Homo sapiens
ggcagacctgcgtgcccaggaattgaatgggaatggcggccagatcttcagaggctacacagccctaagcaaagagagaactttcccttttcaaagaagtyagcagccagagcaggtggtgacagggagaccactactgcagcagctggtgaggaatagagggcagccccccatctgcaaacagcctggggacccctcctc

SEQ ID NO: 265624 - DNA, 201 bp, Homo sapiens
aaggttgcagtgagctgagattgtgccagtgcactccagactgggtgacagaacgagactctgtctcaaaaaaatccaaatatatatatatatataaggtktgtgtgtgtgtgtgtgtgtgtgtgtgtgtgtatatatatatatatatatataccttagcagtataatcaccatgtggcattcccctccaaaaagtcagaa

SEQ ID NO: 265625 - DNA, 201 bp, Homo sapiens
gtctctctcctctctctctgttcacctccttctctctctcaggccaagctctgaagaagtttgaggaagcttgaaagggtgtaggaaggaggagaatgggrccaggaaacagagcttttggctcgggtacttggagcctggccaagggttccagctgattcctcagcaccgggggctttcatgaactcttagtacatttgc

SEQ ID NO: 265626 - DNA, 201 bp, Homo sapiens
gcccgccaccacacccgactaattttgtttttgtatttttagtagagatggcgtttcaccgtgttagccaggatggtctcgatctcctgacctagtgatcygcccgcctcagcctcccaaagtgctgggattacaggcatgagccaccgtgcccggcccatgctgattgttgtaagggaaatgctgagtttgtcttggagg

SEQ ID NO: 265627 - DNA, 201 bp, Homo sapiens
taagaactattactaaggaaaaaaataagcttttgttcagaataataacctttagtataaaaattatcacagccttccagtaaacatttggttggagaaatttttttttttttttttgcttattttttcttagtgtgtaattactggattttcaattcttgttgcctttatgaaccttctaaaatgtttcattcattttat

SEQ ID NO: 265628 - DNA, 201 bp, Homo sapiens
ggcgggagtgcagtggcctgatcttggctcactgcaagctccgcctcccgggctcacgccattctcctgcttcagcctcctgagtagctgggactacaggygcccgccaccacacccgactaattttgtttttgtatttttagtagagatggcgtttcaccgtgttagccaggatggtctcgatctcctgacctagtgatc

SEQ ID NO: 265629 - DNA, 201 bp, Homo sapiens
gccacaactccttccactacttgataccacctctcctgtgtctttgtgcaaagcaaattggttcatgcagccttgatgttaatgatacatatatatatgtrtatatacatatatatatatatatacacacatatatatgtgtgtatatatacatatatatatatacacacatatatatatgtgtgtatatatatatatagc

SEQ ID NO: 265630 - DNA, 201 bp, Homo sapiens
tccttccactacttgataccacctctcctgtgtctttgtgcaaagcaaattggttcatgcagccttgatgttaatgatacatatatatatgtatatatacatatatatatatatatacacacatatatatgtgtgtatatatacatatatatatatacacacatatatatatgtgtgtatatatatatatagctttaaact

SEQ ID NO: 265631 - DNA, 201 bp, Homo sapiens
ccttccactacttgataccacctctcctgtgtctttgtgcaaagcaaattggttcatgcagccttgatgttaatgatacatatatatatgtatatatacatatatatatatatatacacacatatatatgtgtgtatatatacatatatatatatacacacatatatatatgtgtgtatatatatatatagctttaaacta

SEQ ID NO: 265632 - DNA, 201 bp, Homo sapiens
attcccagatgcacagggcacagacaggggactcagacctagtagctgatgtcccagacaagaaccgtgggtccatgtccacccaaaattcagtgaaaagwatatttacttgtgtatatgtgttatatgttaatatgtatatatatgtatatatatctagagagagagagtggggtgtgtgtttgtgtgtgtgtgtgtgtg

SEQ ID NO: 265633 - DNA, 201 bp, Homo sapiens
aaaattcagtgaaaagaatatttacttgtgtatatgtgttatatgttaatatgtatatatatgtatatatatctagagagagagagtggggtgtgtgtttktgtgtgtgtgtgtgtgtgtgtgtgtgtgtgtacaaagccatatttgtatcagattggcagagtctttcttgtactaaggaattttcaaaaccattttgta

SEQ ID NO: 265634 - DNA, 201 bp, Homo sapiens
cagtgaaaagaatatttacttgtgtatatgtgttatatgttaatatgtatatatatgtatatatatctagagagagagagtggggtgtgtgtttgtgtgtgtgtgtgtgtgtgtgtgtgtgtgtgtacaaagccatatttgtatcagattggcagagtctttcttgtactaaggaattttcaaaaccattttgtaagtaca

SEQ ID NO: 265635 - DNA, 201 bp, Homo sapiens
gtgaaaagaatatttacttgtgtatatgtgttatatgttaatatgtatatatatgtatatatatctagagagagagagtggggtgtgtgtttgtgtgtgtgtgtgtgtgtgtgtgtgtgtgtgtacaaagccatatttgtatcagattggcagagtctttcttgtactaaggaattttcaaaaccattttgtaagtacatg

SEQ ID NO: 265636 - DNA, 201 bp, Homo sapiens
ctattgcttttgactaaactcatgtactaggctccaaccgaccagaccaaaccaaactaaagtcactcatactaaatatcacataaacaaactaaaacttaaaaaaaaaaaaaaactatagcagaccaggttttatctcctaaaatcaaaaaatttcaacacacagaggttccttctactctaatccttacagaaaagtaa

SEQ ID NO: 265637 - DNA, 201 bp, Homo sapiens
tcaggcaggagaattgcttgaacctgggaggcagaggttccagtgagccaagatcgcgccattgcactccagcccgggtgacagagaaagacttcatctcaaaaaaaaaaggaagttaagtcactttcccgtacaaagttccaggagcaaatgaaatggctgggatttgaacttctctacatgccactctgaaatgtgtgt

SEQ ID NO: 265638 - DNA, 201 bp, Homo sapiens
acctggccaacattgcaaaaccccgtctctactaaaaatgcaaaaattcgcctggggagcagagcgagactctgctaccaaaaaaaaacaaaaaaaaaaamaaacagaatttgaaaggaaataatagctgtaaaggctgttatgaaaaaggaacaatcaaaacaagaaatttccaggaaattaaaagtatgattatcacag

SEQ ID NO: 265639 - DNA, 201 bp, Homo sapiens
gtgatttttttgcaaggagcaaggtctctctctgttgcccgggctggagtgcagtggcatgatcatggctcactgcagcctggacctcccagactcaagcratcctcccacctcagcctcctgagtatctggggccacaggcatgtgccaccatgcccagctgatttttatatttttttgtagagacagagttttgccatg

SEQ ID NO: 265640 - DNA, 201 bp, Homo sapiens
tgttggatacttgtgcgcttcattttgtgcatcattaaggaaatgtcagtgatcatggtggtctccagtatcatagtaagtaaacccttctgtcactggtrcacagccacgaccagaggagacccccttcgggcactgcacacgtggcccgtgcctcggcatcatcctttgcttcctgctccacgtgccttgctgcccaca

SEQ ID NO: 265641 - DNA, 201 bp, Homo sapiens
cttgctggctgtcagccatggttgctttcagctccttgaggctcctgcaatgccctgacacgtgggactctcagcatgatagttcacatcttcaaagcggkcggaagctctatctccgtatcttcgtttccacaagatctggactgtttttctatgggagcttctctgattgggtcaggccgacccagggtatctcctttt

SEQ ID NO: 265642 - DNA, 201 bp, Homo sapiens
aaaagcaaataggagtccaccatgagacaccaagccccccagattactcctttggtatttttttcagtttgaaataaatgttataataatttcagtctgargattttatgtgtgctaataaatctgaatatttccagaaataataggaaaagcttatgttggcccatataaaggacacaaacacacgcatgtatttcttgt

SEQ ID NO: 265643 - DNA, 201 bp, Homo sapiens
attctttatatgagaacattaattctagtagaatgaaaatcagtttaggccaggcgcagtggctcatgcctgtaatcccagcactttgagaggctgaggtrggcagatcacttgaggtcaggagtttgggacaagctggccaacatggcaaaactctgtctttactaaaaatacacacacacacacacacacaaaaattag

SEQ ID NO: 265644 - DNA, 201 bp, Homo sapiens
tattgcttttgactaaactcatgtactaggctccaaccgaccagaccaaaccaaactaaagtcactcatactaaatatcacataaacaaactaaaacttaaaaaaaaaaaaaaactatagcagaccaggttttatctcctaaaatcaaaaaatttcaacacacagaggttccttctactctaatccttacagaaaagtaac

SEQ ID NO: 265645 - DNA, 201 bp, Homo sapiens
attgcttttgactaaactcatgtactaggctccaaccgaccagaccaaaccaaactaaagtcactcatactaaatatcacataaacaaactaaaacttaaaaaaaaaaaaaaactatagcagaccaggttttatctcctaaaatcaaaaaatttcaacacacagaggttccttctactctaatccttacagaaaagtaacc

SEQ ID NO: 265646 - DNA, 201 bp, Homo sapiens
aggagtttgggacaagctggccaacatggcaaaactctgtctttactaaaaatacacacacacacacacacacaaaaattagctgggcttggtggtgcacrcctgtagtgccaggtactcaggaggctgaggcgggagaatcacttgaacccaggaggcggagggtgcagtgaggtgagatcgtgccactgcgctccaggc

SEQ ID NO: 265647 - DNA, 201 bp, Homo sapiens
agaaaacttaaacttgcaatgaaattctgttttacatgaaagctccgttgaagtagctattatattactagttacacatcgttaaccatttaaaccattatttttttccaaatattctgttccagttattcaggtctcattagttgtggtaggtaaatgtactttctcctcactgtcttagtctctcaaagagatctatta

SEQ ID NO: 265648 - DNA, 201 bp, Homo sapiens
aaattagctgggcttggtggtgcacacctgtagtgccaggtactcaggaggctgaggcgggagaatcacttgaacccaggaggcggagggtgcagtgaggygagatcgtgccactgcgctccaggctgggtgacagagcaagactctgtcttaaaaaaaaagagaatcagttaaaatacactgtctccttccatactatct

SEQ ID NO: 265649 - DNA, 201 bp, Homo sapiens
ttgaaaatgattttttaaacatgatatggtaaagatacacgggctttagtgtcaggtacaccagactgcaaagtccccttcttaactgtattttaaaaaawtttatttattcatttatttgtaatttacagttttttataatttcaacttttattttacattcaggtggtacctgtgtaggtttgctggatgggtatattg

SEQ ID NO: 265650 - DNA, 201 bp, Homo sapiens
aaagatacacgggctttagtgtcaggtacaccagactgcaaagtccccttcttaactgtattttaaaaaaatttatttattcatttatttgtaatttacarttttttataatttcaacttttattttacattcaggtggtacctgtgtaggtttgctggatgggtatattgcgtgatgctgagctttggggttcaaatcat

SEQ ID NO: 265651 - DNA, 201 bp, Homo sapiens
tgacttcttctttatgacttggtggcctcatcatttatgggttttggtttttatgatttgctagagtcagggaagcccttgaagatggggtgggcagtgtyctaggctgtttttcccctcgctaacacagcagcagtccccgtccgctggtctctggtgggcttcaccagcagcactcggtcctcctggtcattgtttggg

SEQ ID NO: 265652 - DNA, 201 bp, Homo sapiens
tagacaaatggctgatatttttgtggaatgtgtacaattgtatcacccacacaaattggctaatgatctaaatattttttaaaagacattgggtagtatartaagagtcacacctgatgttcaagggtagatttatggcactgttatcttttaatcatgtgaaaattttctcaggtggaatgatatttcatagaactagag

SEQ ID NO: 265653 - DNA, 201 bp, Homo sapiens
agctgataaaaaagaaattcctattgatgttatctttttaatcacaaggtaattgtgctgacagctaagagaactaggccaatattacaagtagcctaagkgagcagcagagacacaggtttggctctctgtaattgtgaaaaaacacttggttgttggcatcacaaattatgctatatcaattagagaaaatatttgaag

SEQ ID NO: 265654 - DNA, 201 bp, Homo sapiens
ggtggcctcatcatttatgggttttggtttttatgatttgctagagtcagggaagcccttgaagatggggtgggcagtgtcctaggctgtttttcccctcrctaacacagcagcagtccccgtccgctggtctctggtgggcttcaccagcagcactcggtcctcctggtcattgtttgggtgactgcttttcagtcatgt

SEQ ID NO: 265655 - DNA, 201 bp, Homo sapiens
aaaaaaaatgcttagtaaagtatatttagaaaacagggaaattggaacagtttttagccaaagaaaatcccacactacatattggcaaaaaaaaaaaaaaraaagagagagagagagagggagaagagagatttctattctaaaaaatgccttagggcttgtagtttcttataacttctgtgactacctatggcatataag

SEQ ID NO: 265656 - DNA, 201 bp, Homo sapiens
agaccacatctgcaagggtggtcccataagattgtcatggagctgaaaagctcctatagcctagtgatgtcttcgccatggtaacatcctagtacaatgcrttcctcgtgtgcgtggtgaccctggggtcaatgagcctactacgataccaattgtgtaaaagtccagcacatacaattatgtatagtacgtgattagaaa

SEQ ID NO: 265657 - DNA, 201 bp, Homo sapiens
aaaaaatgcttagtaaagtatatttagaaaacagggaaattggaacagtttttagccaaagaaaatcccacactacatattggcaaaaaaaaaaaaaaaaragagagagagagagagggagaagagagatttctattctaaaaaatgccttagggcttgtagtttcttataacttctgtgactacctatggcatataagta

SEQ ID NO: 265658 - DNA, 201 bp, Homo sapiens
atagcctagtgatgtcttcgccatggtaacatcctagtacaatgcgttcctcgtgtgcgtggtgaccctggggtcaatgagcctactacgataccaattgkgtaaaagtccagcacatacaattatgtatagtacgtgattagaaaaatgaccatattactggtttgtgtatttatagttattttatagaacttatactat

SEQ ID NO: 265659 - DNA, 201 bp, Homo sapiens
aaaaaaaaaagagagagagagagagggagaagagagatttctattctaaaaaatgccttagggcttgtagtttcttataacttctgtgactacctatggcrtataagtattagattgtattctacaaattgacagcccaggatcatattcctggttgctttgttttttacacaaatatctttatctgaactctggctcatt

SEQ ID NO: 265660 - DNA, 201 bp, Homo sapiens
aggagaatcgcttgaacccaggaggcagatgttgcagtgagctgagattgagatcatgccactgcactccagcctgggcaacagagtgagactctgtctcaaaaaaaaaaaaaaaaaaggaaagaaagaaagagagagagagagggagagagagagagagagagaaagcaagcaagcaagcaagaaagaaaagtagagaga

SEQ ID NO: 265661 - DNA, 201 bp, Homo sapiens
tccagcctgggcaacagagtgagactctgtctcaaaaaaaaaaaaaaaaaaggaaagaaagaaagagagagagagagggagagagagagagagagagaaavcaagcaagcaagcaagaaagaaaagtagagagatttacgtagattagagggacagaccaccgccatggcacttttgtgctgggagcgagcatgccaaaga

SEQ ID NO: 265662 - DNA, 201 bp, Homo sapiens
aggtgatccacctacctcggcctcccaaagtgctggggttgcaggcatgagccactgtgcccggccagaaatttgtatttttatgattatattgcccatgtttttttttttccagtatgaatgtaatcacttaactgacaaggcaactaaaatacaaaatgtataaataaaacaatttctattaagaaaaggaaggaaggg

SEQ ID NO: 265663 - DNA, 201 bp, Homo sapiens
acagcagacctctaatttctttgtatgtggttcctttctgttttcgttgatctttagtaggtatcttgattttttagatttggattaaaaattaaacactrtgtatcactgccttcccaaaataaaaataaactccttaaaataatacatttatattagcttcttagccccttctctgatttgtgttcacaattcatattc

SEQ ID NO: 265664 - DNA, 201 bp, Homo sapiens
tccatcatacattgcttagtgaaaaaagcagcagaacagtaagaatagaagtatgatttattcaacatgcttcagtcggcctgcttgcctatctgcggtaktgtgtgtgtgtgtgtgtgtgtgagtggaaaaagtgaaaggatagataccaacacttctgtattattactttttatacaactgttatatttgtaagtaaaa

SEQ ID NO: 265665 - DNA, 201 bp, Homo sapiens
gggtttcggggagcagcctctacacctggtgaccacacacactagttgtcatctaccctacttggtaccaggttcaaagccatgcctctccagcatctgcrtgtgtgggagctggtggcacggggagcctgtggtgcctgtgctttgattactcagggacacattttaccctttgctatgttaccttaaagacaataatgt

SEQ ID NO: 265666 - DNA, 201 bp, Homo sapiens
atggttgctttcagctccttgaggctcctgcaatgccctgacacgtgggactctcagcatgatagttcacatcttcaaagcggtcggaagctctatctccrtatcttcgtttccacaagatctggactgtttttctatgggagcttctctgattgggtcaggccgacccagggtatctccttttggattaattcaaaatca

SEQ ID NO: 265667 - DNA, 201 bp, Homo sapiens
ttttcttctccagcaggtagatcaatctacaacagcttttatgtgtattgcaaaggcccctgtcaaagagtgcagccgggaaaactcagggtacagtgcarcacctgcaggcaggcaacgctcaccttgacccaggtaaggaaatgcagtgtcagcatgagactgccaggaaaatgaatgtgtactaacacattgcctttc

SEQ ID NO: 265668 - DNA, 201 bp, Homo sapiens
aagggaacaaagtgtagagcagcctcacatcagcaaatataaagatacaaattttctatatgtgtaagtatttcttagaagaaaatcattgctttggacakcccatcacctttctcaagtgtattttaaaatcgtataacttcaggaattctacctttaaactgtatacaaaatgcacttaaaaagtggatgcaatttatt

SEQ ID NO: 265669 - DNA, 201 bp, Homo sapiens
atgtcttcgccatggtaacatcctagtacaatgcgttcctcgtgtgcgtggtgaccctggggtcaatgagcctactacgataccaattgtgtaaaagtccrgcacatacaattatgtatagtacgtgattagaaaaatgaccatattactggtttgtgtatttatagttattttatagaacttatactatttttttttttt

SEQ ID NO: 265670 - DNA, 201 bp, Homo sapiens
cctggggtcaatgagcctactacgataccaattgtgtaaaagtccagcacatacaattatgtatagtacgtgattagaaaaatgaccatattactggtttrtgtatttatagttattttatagaacttatactattttttttttttttgagacaaaatcttgctctctcacccaggctggagtgcagtggcacaatcttgg

SEQ ID NO: 265671 - DNA, 201 bp, Homo sapiens
gagactgaggcaggagaatctcctgaacctgggatacagaggtttcagtgagccaagatcacaccaccgcactccaacccgggcaacagagcatgacaccrtctcaaaaaaaaagaaaaaagttttaaaggttgtttttttttttaaggtggaaaacagcatatagagtaaggatatgaagaaggaatacttttgtgtagc

SEQ ID NO: 265672 - DNA, 201 bp, Homo sapiens
gacaaagcgagactccgtctcaaaatacataaatagataaatagtgctgttttgtacttccagaggcgtaaataaataaatagtggtgttttgtacttccrgaggcatgacgcagctagccgcattgcacacgcagccctgtgcttgtgtctcttgatttgcacacgtacactcacatgcacactcatgcaaacacacaca

SEQ ID NO: 265673 - DNA, 201 bp, Homo sapiens
tagaaatggtagtattagtaacacaccaatgttgttattttttaaactgagttggccagaactgctttgaactgatattctgcttatgtgagctgtgtctmaacattttaaaagcaaactgatacatttaacagatacagacatatgggcacacccatacacataccccaacgtagatttgctagattgaaaatgtgggcc

SEQ ID NO: 265674 - DNA, 201 bp, Homo sapiens
aatgtaactgggcagcataacctcaaaatgcattttaaaacttttttttttcctctttctcttgggtttcaagatgtaaccttgaagcaaactacagaagsctgtttcctttagccttaaaatagactccacgtccctccgtttttctccagatatactcccttcttatttatctaactgtacgctagcatctaattatgt

SEQ ID NO: 265675 - DNA, 201 bp, Homo sapiens
gtgaacccgtcgtacagttttctagtcttctctgtgcagctctctctgctcagttctgttaactccagctgccccgtcttccccctacacacagacctgtsggttcaattccgcaagtctgctgagctcccgctggggtctccctccctgaaccagggcctggccactctctgaaggcagcaggctggagtgattgcagga

SEQ ID NO: 265676 - DNA, 201 bp, Homo sapiens
gaacccgtcgtacagttttctagtcttctctgtgcagctctctctgctcagttctgttaactccagctgccccgtcttccccctacacacagacctgtggsttcaattccgcaagtctgctgagctcccgctggggtctccctccctgaaccagggcctggccactctctgaaggcagcaggctggagtgattgcaggact

SEQ ID NO: 265677 - DNA, 201 bp, Homo sapiens
atgaaatactaagtaatatccctaaaagaagcacttgaactgaaaatatttaggatcattggactacttctttgcacctgtaatccctgtcatctgaattytcttaccttccgcaacctgggaacttgggtatctgtaatatcacttctgcagtcaatatttgacttgaccttcaccttaacaaactcaccaaacacaaca

SEQ ID NO: 265678 - DNA, 201 bp, Homo sapiens
ccctgaatgctcaattgatttgacacactagcgctcaagctacctttggaacatggaaggcagcacagagccttaattcgctggcatctgtactccgacarcatgcctactcttgtactagtttaagttattccgtattttaaatgagtcacttcgtaaatactgaccctcccttattgccagtaggtttttgtttgtttg

SEQ ID NO: 265679 - DNA, 201 bp, Homo sapiens
ccattgtaaaactctcttgacttcagtagaaattcttttgcttccttttttcttcctacctctaaaggcattcctttttttttttttttttttttgcttcytctttattttcccaagggttctgttgtcagtgatattttcatcttgccttaccaccatttgctgtctctattatcaaataccaactattgaatgaggaca

SEQ ID NO: 265680 - DNA, 201 bp, Homo sapiens
ttaagacactgccttatttagagtaggtgacatttacaatttaggaaaaaggaagaggaaggaaggaaggaaggaagggtgagctccttctccctggaccsctgctcctttctccctgtgccaaattgttaactcctactcatctttaaagtttcaggagtggtggcttatcctggatctccacagacagacccagacccc

SEQ ID NO: 265681 - DNA, 201 bp, Homo sapiens
catttgtgggatttaaaattgttcggagctagacacccatgtgttgagctctgggctccagaggattctaatcttctagtcatttcacccacgaccatgtrcctgggtggtcttccgcacagctgtggtttctgttgtatatcctttccatttgaaggcttctgtgtctttagttcagcttctgtaaaataggtgctatag

SEQ ID NO: 265682 - DNA, 201 bp, Homo sapiens
atctttaaagtttcaggagtggtggcttatcctggatctccacagacagacccagaccccaggcttcaggaacacctttacccccttcttagtatcacctrtcagagttctaatttcagtttgcatgattattaaatatttgtctttcctgctagagtgtaaactccatgagggcaggaccctttcattgcttgactatgg

SEQ ID NO: 265683 - DNA, 201 bp, Homo sapiens
acttatcatcttcatggttacttttttcatacgtatacagtaatagcacctaaaatctacttttttgcaaattttcattatacaatattataattatagtcctctagtacatttctagaatatttgtcctacctgtaactttgtatgctttgacccatatctccccattttctgccacaattccccccaccacttccggta

SEQ ID NO: 265684 - DNA, 201 bp, Homo sapiens
aatattaatgaacaaagatctttctgggtgccactcaggatacaataaaagatttcagttttctcattcacttcaacatttgtagcatgtctcttctgtgycaggcattctaattagtgagacgagggatgccacccaagtgagggagaatgttctatttattgattcggttgttatatatggagcaatttccatgttcca

SEQ ID NO: 265685 - DNA, 201 bp, Homo sapiens
cttatcatcttcatggttacttttttcatacgtatacagtaatagcacctaaaatctacttttttgcaaattttcattatacaatattataattatagtcctctagtacatttctagaatatttgtcctacctgtaactttgtatgctttgacccatatctccccattttctgccacaattccccccaccacttccggtaa

SEQ ID NO: 265686 - DNA, 201 bp, Homo sapiens
ttatcatcttcatggttacttttttcatacgtatacagtaatagcacctaaaatctacttttttgcaaattttcattatacaatattataattatagtcctctagtacatttctagaatatttgtcctacctgtaactttgtatgctttgacccatatctccccattttctgccacaattccccccaccacttccggtaac

SEQ ID NO: 265687 - DNA, 201 bp, Homo sapiens
aggcttgataatattccattttatatatatatatgtatataaataaatttatggatatataggtatctatatatataatgctcccctctccctaatatatrtgtatataatatattccacaatttctttatccattcatcctttgatgcttacttaggttgtttgcatatcttgctattgtaaataatgccacagtgaaca

SEQ ID NO: 265688 - DNA, 201 bp, Homo sapiens
gataagagtgagggctgacttctccatcaaaaacaatggaagccagaaaacaatggaatgatatggaaagaaaaaagtatactaaaattccatgtctagtaaaaaaaaaaaaatccccaaaagaaaggcccccaaaaataacattttcagatgacaaaagctgacagaatccatcagacttgtactgcatgaaatactaaa

SEQ ID NO: 265689 - DNA, 201 bp, Homo sapiens
agaaagttttcttagaacatttttcaaaaacccaatccagcattcagactcaaggacagcttatttctaaaccaagttttgaatacttgataacaaaaaawttcttgttttttttttttaattgttaaggttaaaattagaagatagatttttattacagaattagcttaaattttgcaaatttgaatcaaaatttcgttt

SEQ ID NO: 265690 - DNA, 201 bp, Homo sapiens
atatatggtggctcttgaaaactgacatgtcagcacagatctataaacacgtcttatttccaagtaccaagtacagtggactccatctcatagactgatcrtgacgatgagaatagctgacacccaatgaacatttgctccagccaagcactttatacccattatcttatttattcctcacaataaccctataaagtaata

SEQ ID NO: 265691 - DNA, 201 bp, Homo sapiens
aagcaatttagtgagaaagtctgtttaatttaaaaaaaaaaaaaagctgcatcaaaatagatacctgaaaatgtccaggacgcactccacatgtggctgcycacaagtgtcaaaggtcaacaccaaggaaggcttcgtcagtttttatggagttgccactttaaatctcaagccactaaagaacaatgaattgtctaacac

SEQ ID NO: 265692 - DNA, 201 bp, Homo sapiens
atattagatttggggactgaattgaaatgaattttccattccttataacatgaaaccaaattttcaggcattttcttattatttttttctcccagatgttytcagtgtttttcttgcttactgagcactcccctgtaatctagaatggactttgctgtgcagggcggtcatatgtcagaggggaaatcagacaggaaatgc

SEQ ID NO: 265693 - DNA, 201 bp, Homo sapiens
gccgtgcagccctgtaggctgcagtaaggagtgtagattttatcctgtgaacaatagaaggccattgaggcctttaaagtaggaagtgacgtgagtttttycttgtgtcaagggattcctctgactgcctttgggagtcctgttctgagagtattgctctgattcaaaagacagataatggtcacgacaatgcagatggag

SEQ ID NO: 265694 - DNA, 201 bp, Homo sapiens
cacgacaatgcagatggagagaggtagagaaatctaataaatattttggagatagaaccaaaggctcaatgatagggataaagggatacactgatgacgaycgctaaatttttatcatgagctattcattcatggtgctgtttcctcattcagtggaggctggatgaggagcgggtggagtgggggcagtcactgatgtta

SEQ ID NO: 265695 - DNA, 201 bp, Homo sapiens
catgataagtgcttgaatgaatacctcccatacttcatccatgtggtatactacacattcattcttatttattgagcagctagtatgtgccagacattggrgatagagtagtgaacaaaacgaataaatcttgattttcatgatgaattgtgtttgatattgatgaaagctgtggagaaaaaggaagaagggaaaaaggtt

SEQ ID NO: 265696 - DNA, 201 bp, Homo sapiens
atatattttctaaatgtccatgtcactgtgtgtagatcaaatcagcattcagtttcttccctgccattgtcacttgacattatttctataattaaactaayattaacacttcctattctttcttgaaattgctaaagaaattacatttggctaagtaatacctccagaaaagaattattttgcattttgatgtctttggaa

SEQ ID NO: 265697 - DNA, 201 bp, Homo sapiens
ttggctcatggttgtggcggctggcaaggctgaaatttgtgcggcaggctggcagactggaagctcagacagggttcctgtgttgcagtcttgaggcacarttccttctcttcaagaaacgtggtttttgctcatatgaccttcaactgattagatgaggacccccaagttttttagggtaaacttatttacttaaagtca

SEQ ID NO: 265698 - DNA, 201 bp, Homo sapiens
gttaactctattgattatcctcccttttcttttatattcagcctcatcttatcagtgggatgttttccatgtgtttttaaacagacccaggtttcccccattaaaaaaaaaaactcatttaatttctctctctctttggaaacaaccctgactctcttcccaccttggcagtaacacctctggaatgggtaaagttgtgct

SEQ ID NO: 265699 - DNA, 201 bp, Homo sapiens
taactctattgattatcctcccttttcttttatattcagcctcatcttatcagtgggatgttttccatgtgtttttaaacagacccaggtttcccccattwaaaaaaaaaactcatttaatttctctctctctttggaaacaaccctgactctcttcccaccttggcagtaacacctctggaatgggtaaagttgtgcttc

SEQ ID NO: 265700 - DNA, 201 bp, Homo sapiens
aggtttctaagtacatatttttcaagtcaacatcagtgacatatttacaaatgattttatctgatggtttatttttctgtagttttcctctaaaagagacraagcttagtatgtagcctagtagacaatagctcagacagtagagaaacttgatttgaacttttgttatgatacttacaggctggtggccccagatgaaac

SEQ ID NO: 265701 - DNA, 201 bp, Homo sapiens
tgttttgattatgatggcatagcaaaaatatatatacagtacatagggatgtaaatattaaaatatttagtctaaccaaggaaacatgagatgtgggtgaragcatatatttatgactcattttcctcatttccactattccttccctgaattttgtctgtttggaagaaatcaaatggttttaaagaagcaagttgccct

SEQ ID NO: 265702 - DNA, 201 bp, Homo sapiens
tacctcggctgtctccccagactagaaagctgtaacaaacgtggtttattctggaagcagccaggaagatgctcagttgctttctgatttataccatacamgtgaatcaaagaatgtgactgaaatatttatgcatatgaccgtgtgtgtgtgtgtgtgtgtgtgtgtgtgtgtatgtgtgtgtgtgtgtgtgcatgtgtg

SEQ ID NO: 265703 - DNA, 201 bp, Homo sapiens
catgaaaccaaattttcaggcattttcttattatttttttctcccagatgttttcagtgtttttcttgcttactgagcactcccctgtaatctagaatggrctttgctgtgcagggcggtcatatgtcagaggggaaatcagacaggaaatgcagaggcgatgcgggtgtcttcagcaccactggctttgaccactgtttt

SEQ ID NO: 265704 - DNA, 201 bp, Homo sapiens
actcccctgtaatctagaatggactttgctgtgcagggcggtcatatgtcagaggggaaatcagacaggaaatgcagaggcgatgcgggtgtcttcagcascactggctttgaccactgtttttcagagtgtggtgggagagaggctagttcctcgacctgccctaggtttcatggccatatagttagaatgagctttatg

SEQ ID NO: 265705 - DNA, 201 bp, Homo sapiens
aggcaggtccctggcaaagccccacctttaagccaaaaagcctgaacccatggcccaaagtgagagcttctacccctgcttacccgctctctcccgagtasttctttctgaataatgtctttttaccaattgaagctgccctttccaaactacttatggctcgcctcacccccatcctgtgcctataaagaccccaggctc

SEQ ID NO: 265706 - DNA, 201 bp, Homo sapiens
cactgggagctctaacatgatcttatatagctagaaagaaagtacttcttcattgtttgcaatagaggagtgatagataaagtggtgacagaggaaagagrcaagaaaaggaatataaagtagggaaaattgtgaggttgtgatcagactgagctcagaaacaaactttctgcttccttggtgagtggcaggaattactac

SEQ ID NO: 265707 - DNA, 201 bp, Homo sapiens
gattcaggtagcttctatatattattaataattcagctttaaagccaaactttcttaactacctctcacttagattcctggattttagatttttaaggctkttaagacctttccatagtgcatctgctcatgcgtttgaatcacaattttgtaatattaagtaaccaaattaaaatacccaaataaaatgagtgttaagat

SEQ ID NO: 265708 - DNA, 201 bp, Homo sapiens
tttaaggctgttaagacctttccatagtgcatctgctcatgcgtttgaatcacaattttgtaatattaagtaaccaaattaaaatacccaaataaaatgartgttaagatttgttaagtctaaaatagccctccatgacatctgacctaatatgttttttctccaaaaacagattgtttgttctcattgatttacttattg

SEQ ID NO: 265709 - DNA, 201 bp, Homo sapiens
acagactgcatatgtgacagtggtcctgtgagattataagactgtgtttttaatgtaccttctccatgtctagatatgtttaggtacacaaatacttaccrtgtgttacagttgcctacagtatgcagtagagtaacatgctgttcagcttgtagcccaggagcaggaggctctaccatacagcctaggtgtgtagtaggc

SEQ ID NO: 265710 - DNA, 201 bp, Homo sapiens
tttagttttcaaaagacaatttttgagtatttcaaaaagcactttttttttcttccttagcatttcatgtagtggcccatacagctaaacaactatgccarcaaaaaatttataggatcaaagaaataattaaggaatccctgactttgttttttccatgctatgaaagagaaaactctatgaaagaagagctgcaattga

SEQ ID NO: 265711 - DNA, 201 bp, Homo sapiens
ttttgagtatttcaaaaagcactttttttttcttccttagcatttcatgtagtggcccatacagctaaacaactatgccagcaaaaaatttataggatcaragaaataattaaggaatccctgactttgttttttccatgctatgaaagagaaaactctatgaaagaagagctgcaattgacctcttttattgtagctctt

SEQ ID NO: 265712 - DNA, 201 bp, Homo sapiens
caaacaaaaaaatgaggttctggttttgaagactctttgtaaactgtgaagctgtatactaactgctattattggaatctcttctttttcctaacatgcctttttttttttttctagcagttcagtacataggaatttgaatgtgggtcagaatatcactaattttgattattattacaaaggattattattattacaaag

SEQ ID NO: 265713 - DNA, 201 bp, Homo sapiens
ggacatagtgcccacctggctggacagtgttatgaagttcccatttcctgggaaactcagttgttttttagaaatcctagtttaatattgtttgctttttktttttgttaatgtgaggaatattacattctgatcatcctatttcttactgaaatttggcctttctcacagcaaaactcactttgttccggtgggcgccgc

SEQ ID NO: 265714 - DNA, 201 bp, Homo sapiens
tttttgtttttgttaatgtgaggaatattacattctgatcatcctatttcttactgaaatttggcctttctcacagcaaaactcactttgttccggtgggygccgcggtgcacacctctaatcccagcactctgggaggctgaggcaggcagatcacttgaggtcaggagttcaagaccagcctggccaacatggtgaaac

SEQ ID NO: 265715 - DNA, 201 bp, Homo sapiens
gcggaggttgcagtgagccaagatagtgccactgcactctagcttgggtgacagattgagactccatctaaaaaaaaaaaaaaaactcaaaaactcacttwgttcaagtatgtttatgttgatatgtaacttttttcccaaagaaaatatgaaaatttctagttatttgtattattgagagccaagttatgaaagatgtat

SEQ ID NO: 265716 - DNA, 201 bp, Homo sapiens
actaggagaggtagactcaccctcaatctgggtgggcacaatctaatcagctgccaatgtggccataataaagcagcagcagaaaatgaaagagcagactkgctgagtcttccggcctccgtctttctcccgtgctggatgcttcctgcccttgaacatcagactccaagttcttcaacttttggactcttacatctgtga

SEQ ID NO: 265717 - DNA, 201 bp, Homo sapiens
ttctaatcctccctagaattcctgaaactgaaacagtgttttatgtctttcagctcaagtcttttgtagggaaaaaaatattgtccctaataaaggaagayatgatgataatatttacatgttgcaatcaaatagaacaaagttctgcgccagtgaagaactcaaaggaaaataaaagatcaaaagcagcgcctccttgag

SEQ ID NO: 265718 - DNA, 201 bp, Homo sapiens
cccgtggactcacatgcagttattcgtggagctccggggctggattctgaagcatgtggagacagtccctatgggctgtatttagggatgtgctacacgaygttggcagcgtttttcccgtttctatgtttgctaactgttagtgtcattcttattaaatcagaactgaggactacgtgtcacattcccacaggacagctg

SEQ ID NO: 265719 - DNA, 201 bp, Homo sapiens
ttttatcattagcagattataaattatcctgaaagagtataattgaggccatttaagatgtcttttgaatttcccctgtattaattgcatttcctttagaktgccttttatgtgcagaagcattttctaagctctggtcttgcagtaccagttgcatttttgtcagtacttttagagaccatcttttagctggagcagctt

SEQ ID NO: 265720 - DNA, 201 bp, Homo sapiens
ataattaaggaatccctgactttgttttttccatgctatgaaagagaaaactctatgaaagaagagctgcaattgacctcttttattgtagctcttagctrtcttctgtaagacaggtaaggtttgccatagctcagctgcataactgagtgactgtttgcttcttgatgcacaaaaatcagctggtgtccttgaagattt

SEQ ID NO: 265721 - DNA, 201 bp, Homo sapiens
agtgactgtttgcttcttgatgcacaaaaatcagctggtgtccttgaagatttcatcccttggatttttagtttgggtaccctgtcttttccatgaatgakgctgcaatagttacaatatttcttttccttttttttgatattttatgtaatttcctgtaaagaatcatgttaggaagatagcaaaggtcacagaccttca

SEQ ID NO: 265722 - DNA, 201 bp, Homo sapiens
ctgacaacactttgatttttgccttctacaatttgattgcaaatttagaaaaaaaaaatttcagtgtaaaatgtcttttacatctaatgctatctttgtgttttgagggggcctcataaagattattctttcactttataagtaaaagaatactagaaataattgggtttgtttcatgggttccatatgtcttaattacct

SEQ ID NO: 265723 - DNA, 201 bp, Homo sapiens
attctttcactttataagtaaaagaatactagaaataattgggtttgtttcatgggttccatatgtcttaattacctcaaactattgtgagaactgtatgragatagttgtcaaatcaggaaagatgcttaaccttcactaggttaaatttgtataagtaaaatgttattcatttttttaaatattttatagagtgtacac

SEQ ID NO: 265724 - DNA, 201 bp, Homo sapiens
cctgtggaaaggcctgtaccagcattatgaaccattgccccttcagggaattgtcaagcacagccttacaaacaggtattgcttagacaacttgcagactrtatcagtgactaaggatttccaggacttctttcagtccagcagcagacatactttatgaaagcagtatccagcagaataaaacttaattactaaggacta

SEQ ID NO: 265725 - DNA, 201 bp, Homo sapiens
gctcaatactataaggctctagattttcagatcaaactcgaggcctgtgtgtttgattaggactcttgttgccttgcatccatgtgaataattagaccaarcctaatgaggctagactttttctttaaagataatctttgaggattatttataatcataaggggtagaatatcagaaaagttttctgaaacaaaaatggag

SEQ ID NO: 265726 - DNA, 201 bp, Homo sapiens
ttatagcaatgtgaagtagcaagacacaggaagactggcaaacttgacctagctcgtatagtggccaaagtcacagaagcatagagatatgtatgaaaggygggtgggtggatcgcctgaggtcaggagtttgagaccagcctggctaacatagtgaaaccccgtctctactaaaaatataaaaaattagctgggtgtggt

SEQ ID NO: 265727 - DNA, 201 bp, Homo sapiens
tgaaacatgtgtttatatttttgaaaaatagcctgagcacttgacaactaatgttatatattgagttaccatttctgaaactttaattttatgaaagctcyttctcctaatttgttaaacggggcatggacagacatgaaggtgacccccacccccccggcccagtgacctcccaccacctcctgtacatgctcatgtgaa

SEQ ID NO: 265728 - DNA, 201 bp, Homo sapiens
gacttatttgaaattttaaaaggagaactccaaggaagtgttcaaatattcacgtacctaaactgaaacatgtgtttatatttttgaaaaatagcctgagyacttgacaactaatgttatatattgagttaccatttctgaaactttaattttatgaaagctctttctcctaatttgttaaacggggcatggacagacatg

SEQ ID NO: 265729 - DNA, 201 bp, Homo sapiens
ccattatggttgagagcagtgcacacaaaatagaccaggctaccaagcccccaaaccggaagcgaatcatgtgactgaggcactcacttgtgtcaagtgamagatctgcctgtgtacaattattggtggaatcatcagaggctgttaatcatcaccaaattgttttccttggaactgttttttatatgattaccactgaga

SEQ ID NO: 265730 - DNA, 201 bp, Homo sapiens
ctatactacacaccaaaatgtgatgtgttattcataaagcttaattttgagaactaaataataatatttctatgatgatgatggtatctgagcattcactrgaaatctaataaacttcttatttaataagcatagttgagttccagtcataattatcaagatcataaagccagctgaggtaactatgaatctttatatgat

SEQ ID NO: 265731 - DNA, 201 bp, Homo sapiens
ttgcagtgttagcagaaggcatcacacgtgtgcctccgcattttagggaaagccaacttgccttccatttgtcatgtgtctatgaatacgcgaatacatayaagagttctctgtcttcacggagttgcggaagtgatagtccacaaagttacacagatgtcaacatatttcaaagcaattcactgaaagaactaagaaatg

SEQ ID NO: 265732 - DNA, 201 bp, Homo sapiens
ttatactctatttcatgagttaccttctgataggtggctgaaaacagcagactcccagcaaaaaaataatctcaaagaaacatagaaggctttaatatgawttcagatattaaattaagaagtttcaacaaagttgcaacaaaatgttgagaccagaggactgaaagtattattattatggaagacaagctgttgataaaa

SEQ ID NO: 265733 - DNA, 201 bp, Homo sapiens
ccaaacagaaaaccttcctaatggtattcctttttaaaattttcattatttaacagccttgtattatatttcctatcagttacatagaaaatatgccaaamatttatcgtaccctgacaattatactctatttcatgagttaccttctgataggtggctgaaaacagcagactcccagcaaaaaaataatctcaaagaaac

SEQ ID NO: 265734 - DNA, 201 bp, Homo sapiens
agacagaggctcagcgtgtaacatttcctgaggagaaagaagagaacaaccgttgagacagaaaactgaatttattatttagaactatatgatagatcacrtccatcacccaaacagaaaaccttcctaatggtattcctttttaaaattttcattatttaacagccttgtattatatttcctatcagttacatagaaaat

SEQ ID NO: 265735 - DNA, 201 bp, Homo sapiens
gggccgatggatcatgaggtcaagagatcgagaccatgctggccaacatggtgaaaccccgtctctactaaaaatagaaaaattagctggccatggtggcrtgtgcctttagtcccagctacttgggagactgaggcaggagactctcttgaacctgggaggcggaggttgcagtgagctgagatcacgcctctgcactca

SEQ ID NO: 265736 - DNA, 201 bp, Homo sapiens
tgctggccaacatggtgaaaccccgtctctactaaaaatagaaaaattagctggccatggtggcgtgtgcctttagtcccagctacttgggagactgaggsaggagactctcttgaacctgggaggcggaggttgcagtgagctgagatcacgcctctgcactcagcctggtgacagagcgagactccgtcttaaaaacaa

SEQ ID NO: 265737 - DNA, 201 bp, Homo sapiens
ggccatggtggcgtgtgcctttagtcccagctacttgggagactgaggcaggagactctcttgaacctgggaggcggaggttgcagtgagctgagatcacrcctctgcactcagcctggtgacagagcgagactccgtcttaaaaacaataacagcaacaacagcaaatgtccatcactcttctcgtgtcagccattgcac

SEQ ID NO: 265738 - DNA, 201 bp, Homo sapiens
agagactgttctggggacaccagtcatggggtgcactgggcctctgcattcagcaagtgggacaaaactcaggcaatctgcaacctccaggtttgtgtgawttcacatgatttctcaactagaaaatcagccaaatgtgtgaagttctggaaatccggttttatacataattgaatttctctagaaactggagttttagga

SEQ ID NO: 265739 - DNA, 201 bp, Homo sapiens
ctaggctggaatgcagtggtgtgatctcagctcactgcaacctccgcctcctggattcaactgattctcctgcctcagcctcccaaataactgggcttacmggcacctaccaccatgcctggctaattttttgtatttttagtagagatggggtttcaccacgtcggccaggctggtctcgaactccttacctcaagttat

SEQ ID NO: 265740 - DNA, 201 bp, Homo sapiens
tatattattgtaacaaactggatttttgtcttgggcatatttttctgtatcatttcaagttttatttttgtcttttctacctacttctgtttcttattacrgttacacaaaagtgagttctttttatttatttttttaatttatatttttaattttagcttttatcttagatacaggagtacatgtgtaggtttgttacat

SEQ ID NO: 265741 - DNA, 201 bp, Homo sapiens
gcatagtagccgataggtagtttttcaacccatgcctccctccctcctccttctcatagtccccagtgtccattgttatgtccaggtgtgttcaatgtttmgttcccacttataagtgaaacgtgcagtatttcttttttttgttcctgtattaattcatttaggattatggcctctagcttcatccatgttgctgcaaag

SEQ ID NO: 265742 - DNA, 201 bp, Homo sapiens
gtgtatgcattgtgaaatacccttcacggtgtttcggaatacatctcagtgttattctaggatttgaaaactgttaaagggaggcttgtcttgattgtttyattattttctcacaaactactagtgttgagtccatgagatttcccccaatatttattgttaacattattgatagatggcatcttgataggtttttaatat

SEQ ID NO: 265743 - DNA, 201 bp, Homo sapiens
gtttgtttttaaccatgagcatctattatgtgattgtgtaaaacaatattttccccccaaatttgtacagtacgtgtgcagcctggttctcctgctatatrttctactttcaatcaggtggggggcggtgacaagcccctcttcctctcaaccttggcaggtgcagtgcgagtctggtgggatccctcacacggggttttg

SEQ ID NO: 265744 - DNA, 201 bp, Homo sapiens
gtgtgtgtgtgtgtgtgtgtgtgtgtgtgtgtgtgtgtgtgtgtgtgtatggtttttttttggaaatatttttactatagtaataattctacaaaatatayattttttttatttttttaaggcagggtgtcattctgtagcccaggctgaagtgcagtgacaccatgttagctcactgcagccttgacctcccaggctcaa

SEQ ID NO: 265745 - DNA, 201 bp, Homo sapiens
ttatgcaaaacaacagaatagaggagctcacactacaaaaccaaacaatctcttccccgctcctacgcatacgccacatgccagggagagtgtccccatcygcctagtagctgtctagcatttgtcaagtgcattgatatttaggcttcttgcccgaaggcactcctgtcttcaagaatttcctgtaccgacgtacaggga

SEQ ID NO: 265746 - DNA, 201 bp, Homo sapiens
ataaatttaccattttaccaatgaaaaagttatttttttgcttaagtgaaccctaaaacttgcgaattttaattttaatccagttagttttacacaaatcmcagtctctaggcaaatttttctgcaagaagcatcttgtacttatagacacatagatagattatatatatatatatatagagagagagagagagagagaga

SEQ ID NO: 265747 - DNA, 201 bp, Homo sapiens
ggactgaattaaactactgagcttgcacagcaaaagaaattatcaacagactaaagagacaacctacagaatggcagaggatatttacaaactatgcattygacaaaggcctaatatccagaatttatagggaatctaacaaatcaagaagcaaaacacaataaaaaaaatttaaaaatgggcaaaggacatgaacaggca

SEQ ID NO: 265748 - DNA, 201 bp, Homo sapiens
catgaacaggcacttcacaaaagaatacatgcaagctaccaacaaacctatgaaaaaatgctcagcatcactaaaaatcaattcttaaagcacccttcttwtaaggaattccaggcagaacgcagagttagtattgcagtttttagttggaaaagctggttaatataacagaagtaataaaccagtcctctatttgtgttt

SEQ ID NO: 265749 - DNA, 201 bp, Homo sapiens
ttttttactttttgtgcttttcagactcattttgcttcctgttgatttttggctttacaagttagcaattctggttgcaaagtttattattctgaatgctsatcatcaacttgggaacctgcttccaaatacaagtgtaagacagtatcatgcttacaatgtattgatatctgattacatttttggtgaaagggaagatgt

SEQ ID NO: 265750 - DNA, 201 bp, Homo sapiens
gtgcttttcagactcattttgcttcctgttgatttttggctttacaagttagcaattctggttgcaaagtttattattctgaatgctcatcatcaacttgrgaacctgcttccaaatacaagtgtaagacagtatcatgcttacaatgtattgatatctgattacatttttggtgaaagggaagatgtggacaaaatggcc

SEQ ID NO: 265751 - DNA, 201 bp, Homo sapiens
tatgaaattgactggaaatattacagataaagatatctttgcttctgattgtgaatgctgtatacaagattcatgatagaatcagttattggaggtagaaraatcttaaatccccattacatgttcttcactagatagaagtcatgttctagaaacaggattttagataatgattacctctggcacatccaatgtatatta

SEQ ID NO: 265752 - DNA, 201 bp, Homo sapiens
atcttaaatccccattacatgttcttcactagatagaagtcatgttctagaaacaggattttagataatgattacctctggcacatccaatgtatattacrttgtcaacgattgatgttaatgtcgatggctgcttgtaatcaggcagaatgctcagatttgggattgtttcaaaagaactctaattactaaattccatta

SEQ ID NO: 265753 - DNA, 201 bp, Homo sapiens
actatatgactaaggtggtaaatcaatgtgtgcaccgtaagagtaagaacttgtttgattcgaaaagtatggatcttttatttcagcaaacacctttagcrcctacttgtgcagaccatcgtgcacagttgacgcatgtgatgaatcagtcataatcctggcccagtaggattttacactgcagctaggtagtttatccaa

SEQ ID NO: 265754 - DNA, 201 bp, Homo sapiens
tcctgatttcatgacagtctggcttctaaccccacaaactctcaaattttcctccaatgacttccttattgctacctctaaagactgttatagtccttatrtattttcttctgtcgacctcatgacattgtgtcctactccctgtagcccatgttcattggctctatcactcgagtgataccgagtggtttgatgtctccc

SEQ ID NO: 265755 - DNA, 201 bp, Homo sapiens
aactccaaagtaggcagcgtagagctcttcacaatctggggaaataatttctatacaaaatcatttcctatgacaaacattgagttgatagtaaatatttytgaataacctcttaaaacatcttccaggtcattgaatgccctctattctgggtgaagccatcacagactgtttcctgaatgtgctttcttttcacctctg

SEQ ID NO: 265756 - DNA, 201 bp, Homo sapiens
ctgtgtctcaaacaaacagacaaataaacaaacaaaaaaatgtaagtagtgggaccaagtctgagaagccagagcagtaaggagaaggaacatgtggatgygtgtgtttgtttttctgcttccttcttcctacccccacacagaggctgtagaaagggatgtggaaaccatgcatatcaggagagagactgaggggaacaa

SEQ ID NO: 265757 - DNA, 201 bp, Homo sapiens
ttttgctccattgcaagggaaattattactgaacgggaagaagcccttcataaagacaaacaagaaaaaaacttttagatatttctcctattttgtagagttttttttttttttttttttgagacgtagtctcgctctgtcaccaggctggagtgcagtggtgcaatctcagctcactgcaacctctgcctcccgggttca

SEQ ID NO: 265758 - DNA, 201 bp, Homo sapiens
taccctggaacatataaacattcgctgctggctactatttccttgtagtttattcaacagtttggatttgatgtatgggttgttttttttttttttaaagraaaaaaaacccagacacccaggaaattaagaagtttatcaattggagtcctagagcagcccaatgctaaggctgtgaatgaggttcacaggactaaagac

SEQ ID NO: 265759 - DNA, 201 bp, Homo sapiens
ggcgcatgtcattgtgtcacactgtgtggctgtaagacaccatggaggccttagggatcggcctgtattacagttccgcgggtatacactgatattgatctttttttttttttttttttttgagatggaatctcactctgttgcccaggctggagtgcagcggcatgatctcacctcactgcaaccaccgcctcctgggtt

SEQ ID NO: 265760 - DNA, 201 bp, Homo sapiens
gcgcatgtcattgtgtcacactgtgtggctgtaagacaccatggaggccttagggatcggcctgtattacagttccgcgggtatacactgatattgatctttttttttttttttttttttgagatggaatctcactctgttgcccaggctggagtgcagcggcatgatctcacctcactgcaaccaccgcctcctgggttc

SEQ ID NO: 265761 - DNA, 201 bp, Homo sapiens
atcgagaccatcctggctaacacggtgaaacactgtctctactaaaaacagaaaaaaattagctcggcatggtggcgggcacctgtagtcccagctcctcrggaggctgaggcaggagaatggcgtgaacccaggaggcggagcttgcagtgagccaagatcgcgccaccgcactccagcctgggcaacagagcgagactc

SEQ ID NO: 265762 - DNA, 201 bp, Homo sapiens
tcccggccaagctacggacatggcgagaggcagatccctagctctgcaaacttgttcacttgctacatatgttatattcccatccttggttcttgtattgrcattttttttttttttttttttggcatttagtgctaagtggcatgaaggttaaagacttggggtcctcatacacaggttcccgaagctctggtgccttca

SEQ ID NO: 265763 - DNA, 201 bp, Homo sapiens
catgagtatccctaactttaaaagagacttggcaatgtagtcttcatcctgtatgaccgcatgtcccattaaatattggggtgttattgctaagaaagactgagtgagtgaatattagagaacagcaaatggtctgagctccagatataaataaaccattatcaatagaaatgtcaatagccaagcaacttaaaaagtgaa

SEQ ID NO: 265764 - DNA, 201 bp, Homo sapiens
atgagtatccctaactttaaaagagacttggcaatgtagtcttcatcctgtatgaccgcatgtcccattaaatattggggtgttattgctaagaaagactgagtgagtgaatattagagaacagcaaatggtctgagctccagatataaataaaccattatcaatagaaatgtcaatagccaagcaacttaaaaagtgaac

SEQ ID NO: 265765 - DNA, 201 bp, Homo sapiens
tgagtatccctaactttaaaagagacttggcaatgtagtcttcatcctgtatgaccgcatgtcccattaaatattggggtgttattgctaagaaagactgagtgagtgaatattagagaacagcaaatggtctgagctccagatataaataaaccattatcaatagaaatgtcaatagccaagcaacttaaaaagtgaact

SEQ ID NO: 265766 - DNA, 201 bp, Homo sapiens
gtagtaatttataaatgaaagttcttcctctatgattaattcgagagtcattctcaagggcacagtgtcttcctttgaggggaaaagctttttggaagtgmaagtattatgctgtccctgagaggtcttgtgttttgcaaatatagcacagtcattctctacctttcaaatggaaacattacacaaatgcattagaaaatg

SEQ ID NO: 265767 - DNA, 201 bp, Homo sapiens
agagatcataatttttcagaaaggaactatgagatgtgtattaattttcaggtttttgcaactagataaattttatataagttttagatatgtttttgcamacataagtttatatatatatacacacacacacacatatatatacatgatacacacacatacataaatacatatacacacacacatgcaaatggtggtgaa

SEQ ID NO: 265768 - DNA, 201 bp, Homo sapiens
acgtcatccttcatctggtactaagcattgtatcagtgaggattgtctgagctgcagtgataattgatccaggggcttcaacaacactgatttattcctcrctcagttacacgctcatcgtgagtttgcagtggcacggctgaagttgccctcactccacgacagaagctgatggagctggttctatctggagcacgttca

SEQ ID NO: 265769 - DNA, 201 bp, Homo sapiens
ttcagccttatgacagagagaagagacatcacagtgatttcatctaattccatttcattggccaaagcaagtcacttatgcaagagccttacctgagtgargaagggaaatagagccttcccagaaggaagggcatagtaggaagtggtagcagatggttgaaacactaattgtattttcctcacttaggtatttaatttt

SEQ ID NO: 265770 - DNA, 201 bp, Homo sapiens
cacaatgtggcttcagcttccgatgtgatttctatttgaactccgatattagaaaccatgtcttagacctcccatgcagctctcaaagtgctttgcattgytgtggttacatggaaatgttaaacaaatgagttaatggaataatttttatttaattgtttttaataaatattcatgaaaaatgtatctatacttgtaaat

SEQ ID NO: 265771 - DNA, 201 bp, Homo sapiens
agacagggtttcaccatgttagccaggctgatctcgacctcccgacctcaggtgatccgcccacctcggcctcccaaagtgctgggattacaggtgtgagmcaccatgcctggcagatttcagttttgtttgagaaaaacggtgtctttgtggtatctcaggaccctgaatgaagctaggctgtgaagcatctctgccccc

SEQ ID NO: 265772 - DNA, 201 bp, Homo sapiens
gagtatccctaactttaaaagagacttggcaatgtagtcttcatcctgtatgaccgcatgtcccattaaatattggggtgttattgctaagaaagactgagtgagtgaatattagagaacagcaaatggtctgagctccagatataaataaaccattatcaatagaaatgtcaatagccaagcaacttaaaaagtgaactc

SEQ ID NO: 265773 - DNA, 201 bp, Homo sapiens
ctgaaagttaacacttctggatatgtttcttaaagaggatagaaagaagtgtactaagctgtttcatacaacattatttgtaatagtgaaagtctggattaaaaaaaaaatcccttttattgggatgggttaaacacatttttatatagccatagaattataaccagacattaataagaatgatgattatgtacgggctag

SEQ ID NO: 265774 - DNA, 201 bp, Homo sapiens
tgaaagttaacacttctggatatgtttcttaaagaggatagaaagaagtgtactaagctgtttcatacaacattatttgtaatagtgaaagtctggattaaaaaaaaaatcccttttattgggatgggttaaacacatttttatatagccatagaattataaccagacattaataagaatgatgattatgtacgggctagg

SEQ ID NO: 265775 - DNA, 201 bp, Homo sapiens
gaaagttaacacttctggatatgtttcttaaagaggatagaaagaagtgtactaagctgtttcatacaacattatttgtaatagtgaaagtctggattaaaaaaaaaatcccttttattgggatgggttaaacacatttttatatagccatagaattataaccagacattaataagaatgatgattatgtacgggctagga

SEQ ID NO: 265776 - DNA, 201 bp, Homo sapiens
aaagttaacacttctggatatgtttcttaaagaggatagaaagaagtgtactaagctgtttcatacaacattatttgtaatagtgaaagtctggattaaaaaaaaaatcccttttattgggatgggttaaacacatttttatatagccatagaattataaccagacattaataagaatgatgattatgtacgggctaggaa

SEQ ID NO: 265777 - DNA, 201 bp, Homo sapiens
cttgatatgaattatattaccagtttgtttttcagagaggttttgctaatttatattcccactagcaatgtatgagtgaacccattttgccagagctaacyaccattgaatttttattcaatggtggttattgaatttttagaaagattgtaaatttgatgagcaaaatgctctctttctggtaaaaaagtttaaattact

SEQ ID NO: 265778 - DNA, 201 bp, Homo sapiens
gtcatgggagggaccctgtgggaggtaattgaatcatgggggcgggtctttcccatgctgctctcctgataatgaataagtttcatgagacctgatagttytatgaaaggcagttcccggctgggcgcggttactcatgcctgtaatcctagcactttgggaggctgaggtgggcagatcacctgaggtcgggagttcgag

SEQ ID NO: 265779 - DNA, 201 bp, Homo sapiens
tgagaaattaccaataccaagactgtagttacacaaagaagttcaatgatttccttaggctaggtgggcataggatggtgttgactgcagatgggcgtgaraaaacctttttcagaacatggaaaggttataaaatacatcctgattgtagtggtgcatatattgccaaaactcatcaaagtatacaattaaaactgacat

SEQ ID NO: 265780 - DNA, 201 bp, Homo sapiens
aaatacaaaattagctgggcatggtggcacatgcctgtaatctcagctacttgggaggctgaggcaggagaattgcttgaacccgggaggcggaggttgcrgtgagccaagattgggccattgcactccagcctgggcaacaagagtgaaactccatctcaaaaaaaagaaaaaaaggcagttcccctgcacacactctct

SEQ ID NO: 265781 - DNA, 201 bp, Homo sapiens
cactgttgactgttccctcccctgctagcttgtgggtgcccttctcacccacctttccagccatcttcccccaccattgccatccttcacagcccacattrcaagctagtcttccacctgccctttaaccgctgttattttcaaggtgaccatccttggtcctctcttcaagccaagccctccctcagaccttctcgtgta

SEQ ID NO: 265782 - DNA, 201 bp, Homo sapiens
tgaaccaggatgatgagaagttcatatcctttccactgcacttcctcccacaagctaagcctctcctttaggaaatccaactgtcttcctgtcagttaaarcagaatccatccaaggaggttaagcatctggtcttcctgctacgagtctctcacctgcttcagtccaacttccatgtctgatttatcttttgaataaaca

SEQ ID NO: 265783 - DNA, 201 bp, Homo sapiens
gatccagcagagagggaggaatcggcccctaacaggaggaaggccactttttgtgttgtgagaggggctggagagggtgagtgcaggtgcaggtgtgttcrtagttgcagggatgtgaagaggagagatgcagtatgatggctccacgaaggaagatgtcatttttcactgctgcgtcttccacatagaagagtacttgac

SEQ ID NO: 265784 - DNA, 201 bp, Homo sapiens
tgtgggtgcccttctcacccacctttccagccatcttcccccaccattgccatccttcacagcccacattacaagctagtcttccacctgccctttaaccrctgttattttcaaggtgaccatccttggtcctctcttcaagccaagccctccctcagaccttctcgtgtatttctgcagttctgactgcctatagttgat

SEQ ID NO: 265785 - DNA, 201 bp, Homo sapiens
tgagaatcatttgaacctgggagacgaaggctacagtgagccgagattgcgccactgcactccagcctgagctagagagtgagaccctgtctcagaaaagaaaaaaaaaaaaaaagaaaagaaaacagtaatacaaataacatgtaataatactaagttaggccaggcacggtgactcatgcctgtaatcccagcactttg

SEQ ID NO: 265786 - DNA, 201 bp, Homo sapiens
aagctgagaaggcgggccttccagaggaggaatggtgatttgtgttgaatgctactgagagtttgcagaagatgaggtcagggagcgtccttcgcctgtgrcactgtggcaaaagtcacgaatgaccataatgagcagttttgggggatgcgtaaagacaggagccagagttttatgggatgaagagtgaacagaagggga

SEQ ID NO: 265787 - DNA, 201 bp, Homo sapiens
aggccaatatttatattaattatataattctataaaattatatatttacatatataatttatatatgtgagttatataaaaatatatataactcatatctrtacattaaatataattatataatattttatacatacgtattttaattgtgtgtgtatgtgtgcatatatatatatatatatatatttttttttttttttt

SEQ ID NO: 265788 - DNA, 201 bp, Homo sapiens
caacatctgattaatacaaaataataagacaatgaaaggcagaaaataaagtttcatgacaacattttataagctcaagaaatagtctatgtcaattaacmtttgttatgtaacacatgacttcaaaacttagtgatttaaaacaaagaccattcatttagcttgtgtctgattcggctggttgattcttctgatgtgggc

SEQ ID NO: 265789 - DNA, 201 bp, Homo sapiens
tcttccaaagctaggcacaaattggggccattgctgctctcaatttaccataggcatcaatagacagatgtaaaagtctggcaagcgggctggatcaaagctggatatgtggagatatcttgatgaaatttcaaaataaagaagatgccacaagcttccaatgagactaaaatagattgtctgcaaaggaatgaaaaccag

SEQ ID NO: 265790 - DNA, 201 bp, Homo sapiens
tccaaagctaggcacaaattggggccattgctgctctcaatttaccataggcatcaatagacagatgtaaaagtctggcaagcgggctggatcaaagctgratatgtggagatatcttgatgaaatttcaaaataaagaagatgccacaagcttccaatgagactaaaatagattgtctgcaaaggaatgaaaaccaggct

SEQ ID NO: 265791 - DNA, 201 bp, Homo sapiens
ccaaagctaggcacaaattggggccattgctgctctcaatttaccataggcatcaatagacagatgtaaaagtctggcaagcgggctggatcaaagctgghtatgtggagatatcttgatgaaatttcaaaataaagaagatgccacaagcttccaatgagactaaaatagattgtctgcaaaggaatgaaaaccaggcta

SEQ ID NO: 265792 - DNA, 201 bp, Homo sapiens
tagaaagaccccatctttattaaaaattaaaaagaatatctatatgcaaatgtgttgggtgttaacccaaaaaaaatgagtaaaaggatgatatacaggaraagtgatagctgaatataaattaaagggaaaactgaaactaaatggagaactaaaagggaataaaaagataatacatgaaggcctgaaactttcaaaact

SEQ ID NO: 265793 - DNA, 201 bp, Homo sapiens
gataatacatgaaggcctgaaactttcaaaactctttcttatgcagcagcacattagtgttggatgaaaatcccttccctaaggatctaattacactactwcattttgcaatgaatagtattcagtagtcataatgctagaaatgttgcttatgttgagttttaatttttagaatcaaattttacacaaagcattggagac

SEQ ID NO: 265794 - DNA, 201 bp, Homo sapiens
aaccagaaggtggcagaacacggaaaaagtggaatcaagtgtctacgcagcagttcctcattttcactgaaaaagatgttgacttaaggttgataagtcarcaagacagcttaaatatatattacttgaagttataaatgataacctgttgaggagataaaagtaaaatacaaatgccagaagtcaggaggtagaatagga

SEQ ID NO: 265795 - DNA, 201 bp, Homo sapiens
ctcattttcactgaaaaagatgttgacttaaggttgataagtcaacaagacagcttaaatatatattacttgaagttataaatgataacctgttgaggagmtaaaagtaaaatacaaatgccagaagtcaggaggtagaataggaaagaaggagggaatgggtataacatccctcaattctttatcttccatagaagacaa

SEQ ID NO: 265796 - DNA, 201 bp, Homo sapiens; identical to SEQ ID NO: 52799

SEQ ID NO: 265797 - DNA, 201 bp, Homo sapiens
ctgaggcagaagaatcgcttgagccttggaggcagagactgtgatgggctaagatcactccactgcactccagcctgagtgatagaatgagaccccatctmagaaattaaaaaaaaaaaagtagaaaattgctgggcacagtggctcatgcctgtaatcccagcactttgggaggctgaggcaggcagatcacctgaaatc

SEQ ID NO: 265798 - DNA, 201 bp, Homo sapiens
cgaaggctacagtgagccgagattgcgccactgcactccagcctgagctagagagtgagaccctgtctcagaaaagaaaaaaaaaaaaaaagaaaagaaamcagtaatacaaataacatgtaataatactaagttaggccaggcacggtgactcatgcctgtaatcccagcactttgggaggccgaggcgggtggatcatg

SEQ ID NO: 265799 - DNA, 201 bp, Homo sapiens
aggaaatcatgtaatagaatttgaatacagatgttataagaccataataataatttttaaacccctgggactgttaactagatatacatacatatatatayacatatatatgtatacatatatatacatatatacgtatacatatacatatatacacatatatacatatatacgtatacatatacatatatacacatatat

SEQ ID NO: 265800 - DNA, 201 bp, Homo sapiens
gaaatcatgtaatagaatttgaatacagatgttataagaccataataataatttttaaacccctgggactgttaactagatatacatacatatatatatayatatatatgtatacatatatatacatatatacgtatacatatacatatatacacatatatacatatatacgtatacatatacatatatacacatatatac

SEQ ID NO: 265801 - DNA, 201 bp, Homo sapiens
aaatcatgtaatagaatttgaatacagatgttataagaccataataataatttttaaacccctgggactgttaactagatatacatacatatatatatacatatatatgtatacatatatatacatatatacgtatacatatacatatatacacatatatacatatatacgtatacatatacatatatacacatatataca

SEQ ID NO: 265802 - DNA, 201 bp, Homo sapiens
acctttgtcataaggagcagccatctaaagagtatatttaaaaggagagatatagatacttgtgtgtagatattaatatataggttctcaccatggtgatyatgcctaagagtcaaaactttattttcttgtagggcaactgggcaaaaattacaagttttgctgctcttgaagcttcccccatgatctgattcttgagct

SEQ ID NO: 265803 - DNA, 201 bp, Homo sapiens
aattttttccacccatttctgccaaaaactcttaaaaagcacattctacctttgttttatgagggcaaacacaaacaatttttagctataaatttattacttatgcaaagaaatgtggaaagatgtctgtcagtacttaaggtagctacaaaagttgctcaaaacagctgtctttaggatttcttcttctttttagtgtgt

SEQ ID NO: 265804 - DNA, 201 bp, Homo sapiens
ttgaggtggtcagaagaagccctatattgtcaaggatagatactgttgttaacagcaccatccgccgagcatagtggctcacgcctgtaatcccagcactytgggaggccgaggcaggtggatcacttgaggtcaggagttcgagaccagccaggccaacatggtgaaacctcatctctactaaaaatacaaaaattagct

SEQ ID NO: 265805 - DNA, 201 bp, Homo sapiens
gttgctcaaaacagctgtctttaggatttcttcttctttttagtgtgtgtttgtgtagtgtgtatgtgcagatagataaatggatagatgaatggatggaygggttgattgattgataatagatagatagatgatagatagataaacagatagtagaatggcctgaattctttccccctgcctcgtcagcagttggcacaa

SEQ ID NO: 265806 - DNA, 201 bp, Homo sapiens
ttctgtgctggcaacatcggggtttcctgagtatgggtagtaacacttgtcataaggtagaggtggtgcctttctgtacaatattgcttggatataaaagmtacacatctaattgtttaaatgtattatcttttatctgctttatttcatcaaatggggcaggtgctcagtttcctttgtctgatatcctgtgaaggtagc

SEQ ID NO: 265807 - DNA, 201 bp, Homo sapiens
aatcttatttacttcctcagcatcactcctgatccctcccccaagctgctacctgtgacagctctttcttgtggctcaagcacagcagtgcttttattttwttttattttattttattttattttttttttttttttgaggtggagtcttgttctgtcgcccaagctggagcgcagtggcgcgatctcggctcactgcaag

SEQ ID NO: 265808 - DNA, 201 bp, Homo sapiens
acttcctcagcatcactcctgatccctcccccaagctgctacctgtgacagctctttcttgtggctcaagcacagcagtgcttttattttattttattttattttattttattttttttttttttttgaggtggagtcttgttctgtcgcccaagctggagcgcagtggcgcgatctcggctcactgcaagctctgcctcc

SEQ ID NO: 265809 - DNA, 201 bp, Homo sapiens
ttcctcagcatcactcctgatccctcccccaagctgctacctgtgacagctctttcttgtggctcaagcacagcagtgcttttattttattttattttatyttattttattttttttttttttttgaggtggagtcttgttctgtcgcccaagctggagcgcagtggcgcgatctcggctcactgcaagctctgcctccca

SEQ ID NO: 265810 - DNA, 201 bp, Homo sapiens
  misc_feature (1)...(201): n = A,T,C or G
agtcaggaggtagaataggaaagaaggagggaatgggtataacatccctcaattctttatcttccatagaagacaagcagaatgcacgtgcaaagcagttnagaaataatatgtatttgatatattttggtatgtctaatatgtatttaagcatatcagattgcaatgtcatgtatgttaatgcatgtgcaaatattacct

SEQ ID NO: 265811 - DNA, 201 bp, Homo sapiens
atcttccatagaagacaagcagaatgcacgtgcaaagcagttaagaaataatatgtatttgatatattttggtatgtctaatatgtatttaagcatatcarattgcaatgtcatgtatgttaatgcatgtgcaaatattacctttctgtttataaaaaatattgtgagagagaagataccctcattaactaataaagtgca

SEQ ID NO: 265812 - DNA, 201 bp, Homo sapiens
aagcatatcagattgcaatgtcatgtatgttaatgcatgtgcaaatattacctttctgtttataaaaaatattgtgagagagaagataccctcattaactrataaagtgcattgtagaatatgtataaaatggaaactgtccattcgtcagaatgaatgaggcctttatcaaagatgtccatcatacattgcttagtgaaa

SEQ ID NO: 265813 - DNA, 201 bp, Homo sapiens
tttgcttgaggcactatttcaagagtctaaaagagtttcaccttcattttgaagtttgttttgtaaagttattatagtcatttatgtggcagtaaatcaakccttattggtatactaaaatctaggtattatagatgctagtgtcactatgcagagaatcctgtactttttaagaagttggagtcatccagctgttcctta

SEQ ID NO: 265814 - DNA, 201 bp, Homo sapiens
gtgtcactatgcagagaatcctgtactttttaagaagttggagtcatccagctgttccttactctgatgccctgagagagtatggctctcttactgcgaaygcatttcggacacaatgtgttgctcgagtattggtttttctctacacatgtaatatccccaaagcctaaaacaagatgtttatctttttgatagacaagc

SEQ ID NO: 265815 - DNA, 201 bp, Homo sapiens
cacttcataagaccctttccttaaaatattgaaatttgagtggctgatcctgaatatcattcctattctgaaatgtgctccaaacagttttaaaaaatgayttcagtttcagacagaaagaggcatgtaatagtaatttatttttattcacatgaaagtataaagacactaaagaaagaataatgtttaacactaacagca

SEQ ID NO: 265816 - DNA, 201 bp, Homo sapiens
tatttttattcacatgaaagtataaagacactaaagaaagaataatgtttaacactaacagcatgggtttaaaccctcagtctaccacttatcagctgccrtcctgggaaaattccttcaaatctctgcacctcaggttcctagggaagaataaatactgataatgattattcttgtgttactggggctgctctgagtttt

SEQ ID NO: 265817 - DNA, 201 bp, Homo sapiens
aatgttttaagtttttctttacccaatggattagtgtaatttgctctctcattttcattaattttattgatgactgaaattgctcattactcaaaaagctrgaatttttttaacttttaaatttggcatcctagtaaaatcttggttcaaagaatattttactggttgggttagaaatgaatccattttgtttaatatact

SEQ ID NO: 265818 - DNA, 201 bp, Homo sapiens
tgcctccatatataatatatatagccattattgacttttgccagtcatttaccatgtgtttgcattggggtatcacatactgacctgtgcaccaacctatgggcccttcctacttggttttttgttgcatgtggctgaaaagtctgttagaagcatagtccattgcatataaaaggaactgaataagtgacttttgagtta

SEQ ID NO: 265819 - DNA, 201 bp, Homo sapiens
gcctagattctttacttgagaagacagggataataaaaatcaggataacatctgatcttcagggcgctgtgagggtaaataaaataatgttaggcaagtayccagagagtgcctggcacaaaacagccacgcaggtgctgcctgttgcttccttcctgatggagggttattgataaacatcgtgcataataagatttccaa

SEQ ID NO: 265820 - DNA, 201 bp, Homo sapiens
ctcagcatcactcctgatccctcccccaagctgctacctgtgacagctctttcttgtggctcaagcacagcagtgcttttattttattttattttattttattttattttttttttttttttgaggtggagtcttgttctgtcgcccaagctggagcgcagtggcgcgatctcggctcactgcaagctctgcctcccaatt

SEQ ID NO: 265821 - DNA, 201 bp, Homo sapiens
caaaccccattgttaaattctcagtctcattttagaacatttctgtggtgacctggccttggctgggtctttcgccttctctggaggccgtcccaatgtaygcctggctccggcaaggccatgagatgcttcctcctcaacaccagccaagctgccattcccatggctctagtaaaagcccctgatcttcatgccattgcg

SEQ ID NO: 265822 - DNA, 201 bp, Homo sapiens
ccataatgacatatgatggtgagcatcttttaatatgcttacttgccagctgtatttatttatttctttatttttcctttggtaggatgtctgcttaactmttttgaccatttaaaaatgggtcccttacttatgtgtttctgagttgcaagacttctttgtatatcttggatactactcctttatcagatatatattttg

SEQ ID NO: 265823 - DNA, 201 bp, Homo sapiens
catcactcctgatccctcccccaagctgctacctgtgacagctctttcttgtggctcaagcacagcagtgcttttattttattttattttattttattttattttttttttttttttgaggtggagtcttgttctgtcgcccaagctggagcgcagtggcgcgatctcggctcactgcaagctctgcctcccaatttcaca

SEQ ID NO: 265824 - DNA, 201 bp, Homo sapiens
atttctgattacaaataaaccaaaaaattgaactaagagtacataataggttaacatttcatgtagctaaattaagagaggccaaaatatcaaagggaaakttgaaagtcacaaggaaccaccctgggtcttagctccatcaactgtgtctcatgggatggcaggtaaattagttaatgttcttaacagcctagattcttt

SEQ ID NO: 265825 - DNA, 201 bp, Homo sapiens
caagctgctacctgtgacagctctttcttgtggctcaagcacagcagtgcttttattttattttattttattttattttattttttttttttttttgaggkggagtcttgttctgtcgcccaagctggagcgcagtggcgcgatctcggctcactgcaagctctgcctcccaatttcacaccattctcctgcctcagcctc

SEQ ID NO: 265826 - DNA, 201 bp, Homo sapiens
aaaatcttattttctttttgacattttctacattaatactttgatataggaataattaattcctttgaatcagggattaacattataagaaatgtaaaackttccataaatacgtgcttgtgaaaacaaataacttggaaagttattgatagttctttataaaattcttatattagatctattgcacaaaaccagattttc

SEQ ID NO: 265827 - DNA, 201 bp, Homo sapiens
ggaaagttattgatagttctttataaaattcttatattagatctattgcacaaaaccagattttctaaactaatctttttcagaaagaggtatatgtaggmgtataaatagcggcattactgaggctaccactctgtattatttttctcttctcactgatagcattggtaggctgctttaactgggttgttagtataactt

SEQ ID NO: 265828 - DNA, 201 bp, Homo sapiens
tagttctttataaaattcttatattagatctattgcacaaaaccagattttctaaactaatctttttcagaaagaggtatatgtaggcgtataaatagcgkcattactgaggctaccactctgtattatttttctcttctcactgatagcattggtaggctgctttaactgggttgttagtataacttctaagtcctttcc

SEQ ID NO: 265829 - DNA, 201 bp, Homo sapiens
atttatttatttagagatggagttttgctcttgctgcccaggctggaatgcaatggggcgatctcggctcactgcaaactctgcctcctgagttcaagtgrttctcctgcctcagcctcccaagtagctgggattacaggcattaccaccacgcccggctaattttgtatttttagtagaaatggggtttctcgatgttgg

SEQ ID NO: 265830 - DNA, 201 bp, Homo sapiens
agtcttactatttactgaatccatgaaattggtcagactcagcatgaaaaaatacaatcaaatcagtacgtggagacagtgcctcctaatggctctgcaaracacactagcatctcagcctctctgcagtacctttagattgatgtttatcaaactgtgttctgtggaaccgtggggaggggttgtccataaagcatatca

SEQ ID NO: 265831 - DNA, 201 bp, Homo sapiens
tctcgatgttggtcaggctggtcatgaactcccgacctcaggtgatccgcccgcctcagcctcccaaagtgctgggattacaggcgtgagccactgcgccyggccattctgtccgttttcttggcaactcattatttacatgaatggtcccctcagtatcctgtatcttcattcattgatctgctcatcttcagtgacatt

SEQ ID NO: 265832 - DNA, 201 bp, Homo sapiens
ggtgttgttctcggttgtacacagcttctgtagctatcatcatatcaatagaaggagtaattacctataaagtatgcttaactgtacactcatgctaagtrtagcatactgggtataaatcaacaacagctaacttcaaactttattttccaaagcaaacgtctaggctgtaattttgccattcttccttctgatccaaaa

SEQ ID NO: 265833 - DNA, 201 bp, Homo sapiens
tgagtcaccaaacagaaatacttacaagagtgccttgtacgttgtaacaccccatgatgtcagttgctggcattgtgattttaacatcatcatcatcatcrtcgtcgtcgtcgtcgtcatcgtcatcatcatcaaagtgctgcatccaggaggcactgtctgctcccctaggctgagtcagtaaggcctctaagctgagga

SEQ ID NO: 265834 - DNA, 201 bp, Homo sapiens
ttttataggcagtatctactacactgcaggctctgcgtcacagggagaagcaacggtttgcagaatagataagcttcttcccctcaaggagcttgcaattyagtgggggtttcagatatttatgaaaaaccatgcagctatataattacagattagataagagatggaagaaacggaggaagtgaggcaggacaggggaag

SEQ ID NO: 265835 - DNA, 201 bp, Homo sapiens
cgcagtggctcacgcctgtaatcccagcaccttgggaggctgaggtgggcagatcacgaggtcaggagttcgagaccagcctggccaacatagtgaaaccycatctctactaaaaatacaaaaattagctgggagtggtggtgtgcacctgtagtcccacctacttgggaggctgaggcaggagaatcgcttgaatccagg

SEQ ID NO: 265836 - DNA, 201 bp, Homo sapiens
gaggctgaggcaggagaatcgcttgaatccaggaggcagaggttgtggtgagccaagatcgtgccactgcactctagcctgggcaacaaagcgagactccrtctcaaaacaaacaaacaaacaaacaaaatattttactctttcttaagggaaaaagtgaactatctgggaaccagaatgtcctgaggttttttgtgaagc

SEQ ID NO: 265837 - DNA, 201 bp, Homo sapiens
aaaaatcgctgcacagagactcatcccgcaattgttactgagcacattttcaatataacatttgttattgaggtgttcgggatgtcttctgagaagcaatwtcctaaatgaagctggatgtaggatccccctgttgtataatggagttttgtatccagcttcagcttatctcaaatctatttaaacagatattcattgcac

SEQ ID NO: 265838 - DNA, 201 bp, Homo sapiens
ccactgcgcctggccattctgtccgttttcttggcaactcattatttacatgaatggtcccctcagtatcctgtatcttcattcattgatctgctcatctkcagtgacattttcttctactctattctcatcgaacactctcagtgtaacagagtcgaactagatgttacttcacctccaaaataacaaaatgaagcattc

SEQ ID NO: 265839 - DNA, 201 bp, Homo sapiens
tgatgtatgtctgtatcatttgacatgaaatgatgcccattcctattattaggtggaaaaaacaagttacagaatgtcatgcatagtatgatgcaacatcyttaatatcctatgtgtattgatgtaagggcatgcaatgagttatctaggagatgattcataaaaaaatactggtgactgtctctgggtggtaaaattgct

SEQ ID NO: 265840 - DNA, 201 bp, Homo sapiens
ccctggaggatgcagtcctggaagtcagatgctggaagcttcatataagagaagtggcatgatcagatctgcatttttaaaagaatactcctgctggaggraggaaaatggttgcaaaggggcaagaggagaggtgaaagaccaaattcagtgggactcgtgatgggcctcgtgtggaggaagggcaggcaggcgttgaag

SEQ ID NO: 265841 - DNA, 201 bp, Homo sapiens
ttcatataagagaagtggcatgatcagatctgcatttttaaaagaatactcctgctggagggaggaaaatggttgcaaaggggcaagaggagaggtgaaaraccaaattcagtgggactcgtgatgggcctcgtgtggaggaagggcaggcaggcgttgaaggtaatgcttaggtttctcgattcagctcaggacgggtag

SEQ ID NO: 265842 - DNA, 201 bp, Homo sapiens
cttacgcagcctctctccagcactgggcactgtggaccaccccctctggttgaaactctgctttcgtggcttctgagacctggtttttctcctacatctaygattctttctgcttagcgttttgagccttttctggcttgaacctgaacaacttctgaaggttgaaggtcctcagagcttggccccacgtcctctctatct

SEQ ID NO: 265843 - DNA, 201 bp, Homo sapiens
aaaaggacactgcagactaaccaaagagcagggagagaacagagtgaattacttaattcccaagaatagtgatgttggggagggaagacctaaattggggmttagctcaagagggtttttagcttcacctaggaaagaattcaagaacaagctgacagtagaggaaaaccactttattgaagcagcagtgttatagctccg

SEQ ID NO: 265844 - DNA, 201 bp, Homo sapiens
gtcctcagtagtctctcagtatttcatgttctctccattttttgtctacttaaatgttattggtatacatttgtataattgtctcagatcctttctagaaygttacaggaaaggaaagataattgaaaacttcaacttgaaaatggcaatagaatttcttggtgccagtatatttgagagcaatggtggcctagaatgtag

SEQ ID NO: 265845 - DNA, 201 bp, Homo sapiens
tgctgtactgctcagaaactttaccaagtagctgtagagcccagcctcgcctggtgacttacatacccctaggagagtctttaaccaaagactgacaaggwtgggggtgtttacttcagctcctccttctcccaactctcatcatctgcccatcccccaaacgggacaactctgagaagtgtctctagagttctcttgtag

SEQ ID NO: 265846 - DNA, 201 bp, Homo sapiens
gagcccagcctcgcctggtgacttacatacccctaggagagtctttaaccaaagactgacaaggttgggggtgtttacttcagctcctccttctcccaacyctcatcatctgcccatcccccaaacgggacaactctgagaagtgtctctagagttctcttgtagcaatgagccaaaataacccttcataagaatttacct

SEQ ID NO: 265847 - DNA, 201 bp, Homo sapiens
ctgaaatatatattcacttatttatgactaaatcctgtggaataaaaccaaggactttatgaagctaagaaatattaaatctcctgcctcttctaatctayacagtgagtcataaagggaatttacctgatcgagtatgatttgtctttcaaagctgtgctttatttcctcctacaaatctgtatttttaaccatcataaa

SEQ ID NO: 265848 - DNA, 201 bp, Homo sapiens
actgtgtggctttttctttttgttttacattaatccctattaaagagattattggctgggtgcggtggctcacgcctgcaatcccagcactttgggaggcygaggcagatgatcacctgagggcaggagttggagacagcctggccaacatggtgaaacctcgtctctactaaaagtacaaaaattagccaggcatggtgt

SEQ ID NO: 265849 - DNA, 201 bp, Homo sapiens
ggtgtcctcacactgaggaaggaggcagagctagcttctgggatctctaatcccactcatgagggttctacccttgtgccctaataaccctccgaatgccytacctcctaataccatcatcttgggggggcaggatttcaacatataaatgtgaggggaagattgagtccataacagcctcagatggaacgatatgatggg

SEQ ID NO: 265850 - DNA, 201 bp, Homo sapiens
ttatgtgtagaattttattccttttccttaggcatttcatagctctatagtacactgaatgcattgtgtgccaaacttcacatgtggccaccggtttttgwagttatttaaatctaaatttatatagattatatgaaattaaatttcagtttctcatgattacaaaacaatgtaaatacgttcagtggatacaatattagt

SEQ ID NO: 265851 - DNA, 201 bp, Homo sapiens
tcccactcatgagggttctacccttgtgccctaataaccctccgaatgccctacctcctaataccatcatcttgggggggcaggatttcaacatataaatktgaggggaagattgagtccataacagcctcagatggaacgatatgatgggaaatccctttacctcaaaggaccaagaattcccacctcctgtggaggata

SEQ ID NO: 265852 - DNA, 201 bp, Homo sapiens
tgtggccaccggtttttgaagttatttaaatctaaatttatatagattatatgaaattaaatttcagtttctcatgattacaaaacaatgtaaatacgttyagtggatacaatattagttcaggcatagagtatttccaccgtcatagaaatgtccattgcacagcctgacatcaagtagtctttaatttgttcattaata

SEQ ID NO: 265853 - DNA, 201 bp, Homo sapiens
cgtcatagaaatgtccattgcacagcctgacatcaagtagtctttaatttgttcattaatagcttgaaagtaacttctgcattaaaagaccctgacttaamccttctgggtctttttcaatcacgtttctagtgcatctgtctttttggtttgctttctgttctaacttggtcactattagcattcagactttattctact

SEQ ID NO: 265854 - DNA, 201 bp, Homo sapiens
tttgttttatttgtgtcttatgttttaaaatattatctacttgaaagtgaggcttgaatataatggtgccttttccaatattaatcacattgtggctgctstgaaaacaataataaggacaattcggaaaacagtttatattaaatatctccttttgtgcagtgttaaaaaattattttggacacagtggtcagaaaatga

SEQ ID NO: 265855 - DNA, 201 bp, Homo sapiens
gctgtccattcgctcactgtcttatgctaattgagattccatttttaccacaacagtgttctggtccagcctactgtggcttcgtattttttcttactgtygcctcacatcagcctagttttctttcttggctacctaaattcctctcattaactcccagagcacgacttcatgtgtgcctgttgttttttcagccctcac

SEQ ID NO: 265856 - DNA, 201 bp, Homo sapiens
tcagaaatgacagaaagacctattatgcttgcttcttaaataagattatctgtactcctacctctggaaacattaaaaaagctctcaaaactattattttytagtgctttcatacaatgcaaattacagatgttaattggaatgcagttctccttcttcagacttatttcccaagtggacagattgaagctcacctgggct

SEQ ID NO: 265857 - DNA, 201 bp, Homo sapiens
ttcagcatggggtctgtgccgggccttgcagggaatgtggccctgtttaagacctggagttgaaagagcactacagggtatcctggaaaccctcctccaamcctttgtcaagctatcacattccttaagccccccattgcagagtttcagggacagtatcttgaaattatatcaaaaaacagattatgggcaatacagaac

SEQ ID NO: 265858 - DNA, 201 bp, Homo sapiens
agggaatgtggccctgtttaagacctggagttgaaagagcactacagggtatcctggaaaccctcctccaaacctttgtcaagctatcacattccttaagmcccccattgcagagtttcagggacagtatcttgaaattatatcaaaaaacagattatgggcaatacagaacatggtgagagaaggtgagataaagtccaa

SEQ ID NO: 265859 - DNA, 201 bp, Homo sapiens
acttctattttccctgcagccagattcctcaggctgattcctcaggctggtccctcaggctgattcctcaggctgatccctcaggctgcttcctcaggctsatccctcaggctgcttcctcaggctgcttcctcaggctgcttcctcaggctgcttcctcaaggctgatccctcaggctgcttcctcaggctgcttcctca

SEQ ID NO: 265860 - DNA, 201 bp, Homo sapiens
cttctattttccctgcagccagattcctcaggctgattcctcaggctggtccctcaggctgattcctcaggctgatccctcaggctgcttcctcaggctgmtccctcaggctgcttcctcaggctgcttcctcaggctgcttcctcaggctgcttcctcaaggctgatccctcaggctgcttcctcaggctgcttcctcaa

SEQ ID NO: 265861 - DNA, 201 bp, Homo sapiens
gaaaccccatctctactaaaaatacaaaattagccaggcgtggtggtgcacacctgtaatcccagctactcaggaggctgaggcaggacaatcgcttgaamccaggaggcagaggttgcagtcaaccgagatcgcaccattgcactccagcctgggcaacaagagcgaaactccatctcaaaaaaaaaaaaaaaaaaaaaa

SEQ ID NO: 265862 - DNA, 201 bp, Homo sapiens
tctattttccctgcagccagattcctcaggctgattcctcaggctggtccctcaggctgattcctcaggctgatccctcaggctgcttcctcaggctgatycctcaggctgcttcctcaggctgcttcctcaggctgcttcctcaggctgcttcctcaaggctgatccctcaggctgcttcctcaggctgcttcctcaagg

SEQ ID NO: 265863 - DNA, 201 bp, Homo sapiens
cctcaggctgattcctcaggctggtccctcaggctgattcctcaggctgatccctcaggctgcttcctcaggctgatccctcaggctgcttcctcaggctscttcctcaggctgcttcctcaggctgcttcctcaaggctgatccctcaggctgcttcctcaggctgcttcctcaaggctgatccctcaggctgcatcctc

SEQ ID NO: 265864 - DNA, 201 bp, Homo sapiens
tgattcctcaggctggtccctcaggctgattcctcaggctgatccctcaggctgcttcctcaggctgatccctcaggctgcttcctcaggctgcttcctcaggctgcttcctcaggctgcttcctcaaggctgatccctcaggctgcttcctcaggctgcttcctcaaggctgatccctcaggctgcatcctcaggccaat

SEQ ID NO: 265865 - DNA, 201 bp, Homo sapiens
tgacatcatatcaccagaaagaaaaaaagtaaggcatgaaagtcaaacagaaaaacattttaggctttttggtaatgctctatagttcatcatcaaaaaaytaaccagtaaatcatggatctattttggtttatggttttcaagatcttacaaaatgtgtgtgtgtgtgtgtgtgtgtgtgtgtgtgtgtgtgtgtgtgtg

SEQ ID NO: 265866 - DNA, 201 bp, Homo sapiens
aaaaatgagaagtgtttttcatcttttgttactgcatgttctaccttgtcctctgtctcaaacctcccaaatgaccacagaaaatctattgcagagcagcrctgattagatctagtgcaggaagtgacaccatcgtgtggacagtcatggaggtgtcacaggaaagagaggtcaggggagggtgttcatagagcctgggga

SEQ ID NO: 265867 - DNA, 201 bp, Homo sapiens
ccaggtttttgtattgggtgtttgttatctgtatttcatggcagccttttgtacacgggtatgaacatgtgacgtctatacaaagggtgaccatttgaagkggattatttaaatgctgtgttgtgctcagtgaggcgtgtcataatttaaatagatatgctaagtaaataattcagggtgctaaatattatatatatgtac

SEQ ID NO: 265868 - DNA, 201 bp, Homo sapiens
accatcatcttgggggggcaggatttcaacatataaatgtgaggggaagattgagtccataacagcctcagatggaacgatatgatgggaaatccctttayctcaaaggaccaagaattcccacctcctgtggaggataccctttaccttccttagtcagcaggaagataaggggagtgagcggaccagtgaaaaaagcac

SEQ ID NO: 265869 - DNA, 201 bp, Homo sapiens
gatggaacgatatgatgggaaatccctttacctcaaaggaccaagaattcccacctcctgtggaggataccctttaccttccttagtcagcaggaagatamggggagtgagcggaccagtgaaaaaagcacccgagagttatttacccaatgccatttctaaaatgtcacgttatttaacttgagatgattgccacaggaa

SEQ ID NO: 265870 - DNA, 201 bp, Homo sapiens
atgggaaatccctttacctcaaaggaccaagaattcccacctcctgtggaggataccctttaccttccttagtcagcaggaagataaggggagtgagcggrccagtgaaaaaagcacccgagagttatttacccaatgccatttctaaaatgtcacgttatttaacttgagatgattgccacaggaaataatccatgaaat

SEQ ID NO: 265871 - DNA, 201 bp, Homo sapiens
ttcagttgtatcacaaagcttcttttacctcagtgagctatcagtatgtcagctcattggtcagacttcagaaaactgaacccagttttatgttcaggtgkacatatttctaaatctggggaaccctaaaacccacttgaaacaccagatatatactctgcaatgtggtgaccattggctgtacaacctgtgacagaaata

SEQ ID NO: 265872 - DNA, 201 bp, Homo sapiens
gattgccacaggaaataatccatgaaatagctcttggtctttttgaaattttgtgtcattattagactcgttcatcaagaaatttgcacctgagctcattrcagctcaagctcaaatggctttcaaatgaaaatgtcttttagcttaaataggaaggatagccatccttccaaaggaaatggacaattgtattaatgtctc

SEQ ID NO: 265873 - DNA, 201 bp, Homo sapiens
ggatgtgaggttcaaggcaacttcttatcggatcttggccctgttaataactgttggccaggcacggtggctcatgcctataatcccagcagtttgggagrctaaagtggatgtatctcctgaggtcaggagttcaagaccaccctggccaacatgttgaaacccccgtctctactaaaaatacaaaaattagcccattgt

SEQ ID NO: 265874 - DNA, 201 bp, Homo sapiens
aaaactgaacccagttttatgttcaggtgtacatatttctaaatctggggaaccctaaaacccacttgaaacaccagatatatactctgcaatgtggtgaycattggctgtacaacctgtgacagaaataaggttgtggaagccagacaatgggaaaactgcgtggaaggatctagcaattaagtgaaatgtatgtgagtc

SEQ ID NO: 265875 - DNA, 201 bp, Homo sapiens
taataataactaactgtgacattgggagcgctgcttaatttatctgggcttcatttatctcctctattaagtgggagaaagaattgctgcctacttcaatygacgggtttttgtaaatatccaattaggtaaaagttctgaaagtcctttgaaataaataatacaaagaactatatggatgtaaaatattgttattttcaa

SEQ ID NO: 265876 - DNA, 201 bp, Homo sapiens
atagaataaaaaagaagttggaaatggctgccactctgataggtgccgaaaatctgtcatgccattcagctttattggaatgattaacatcttagaacagaatactgaagacacaaagaatcctggtttttacaagtcaaaatgggacataattgttccattagtctttcatttttaatggctttttggtactttctgaag

SEQ ID NO: 265877 - DNA, 201 bp, Homo sapiens
catttatctcctctattaagtgggagaaagaattgctgcctacttcaatcgacgggtttttgtaaatatccaattaggtaaaagttctgaaagtcctttgmaataaataatacaaagaactatatggatgtaaaatattgttattttcaactttgataaaatttggctgtaacatgagaaacaagacttagtaaatcttgc

SEQ ID NO: 265878 - DNA, 201 bp, Homo sapiens
cttttttaaaaagtgttaatgtgaccatttagttaccataactggaaactagatagcattaggggccatttgtatatgtaaaaatatcaggaagtataccsgcaaattatatctttgggttgtgggatgttttcttttattatgattgtgtttttcagatcttcagcgttaagcgtataatgttttggaaatactgaaaag

SEQ ID NO: 265879 - DNA, 201 bp, Homo sapiens
tagaataaaaaagaagttggaaatggctgccactctgataggtgccgaaaatctgtcatgccattcagctttattggaatgattaacatcttagaacagaatactgaagacacaaagaatcctggtttttacaagtcaaaatgggacataattgttccattagtctttcatttttaatggctttttggtactttctgaagc

SEQ ID NO: 265880 - DNA, 201 bp, Homo sapiens
agaattgctgcctacttcaatcgacgggtttttgtaaatatccaattaggtaaaagttctgaaagtcctttgaaataaataatacaaagaactatatggawgtaaaatattgttattttcaactttgataaaatttggctgtaacatgagaaacaagacttagtaaatcttgccatgccctcagtaaatgctgctagtgta

SEQ ID NO: 265881 - DNA, 201 bp, Homo sapiens
actctgataggtgccgaaaatctgtcatgccattcagctttattggaatgattaacatcttagaacagaatactgaagacacaaagaatcctggtttttasaagtcaaaatgggacataattgttccattagtctttcatttttaatggctttttggtactttctgaagcattcagaaaaacacctttaaatttacagtga

SEQ ID NO: 265882 - DNA, 201 bp, Homo sapiens
atgtgagaaaaaaagtcagaatcaagggaaaagtgctgttttcctgatcagtgccttggttgtttggtggtggttgtttcagtctgacacactgactgtctttcaattaggcgtgtattttgcttctgttaggtgaaaggagacatcaagttaatgtaagaaatagtgtgtgttgggccaggcgcggtggctcacgcctgt

SEQ ID NO: 265883 - DNA, 201 bp, Homo sapiens
gcctattgtgaggtcacttaaaggtaatgcagtagtgttacacatgaggagtctgtgtgtgtgtgtgtgtgtgtgcgcgtgtgtgtgtgcgtgcgcgcgcrcgcaggcgggtagggtgtatggactagttgatgaagctagccaaggacataactcacttttcaaggtagttttctcaggtggcaaaagaaggtgtgaata

SEQ ID NO: 265884 - DNA, 201 bp, Homo sapiens
tttcatttttaatggctttttggtactttctgaagcattcagaaaaacacctttaaatttacagtgactggccaacctttccaatccaatgcattctaccractgacctaggaagcccctagatcctagttactgagggggaagatgcaggcgtgccatgaactcatacattaaaatgcttgccatcctgattacacaact

SEQ ID NO: 265885 - DNA, 201 bp, Homo sapiens
tcacgcctgtaatcccagtattttgggaggccgaggagggtggatcacctgaggtcaggagttcgagaccatcctggccagcatggtgaaaccccatctcwactaaaaatacaaaaattagccgggcgtggtggcacactcctgtaatcccagctacttgggaagatgaggcaggagaatagcttgaacccaagaggggga

SEQ ID NO: 265886 - DNA, 201 bp, Homo sapiens
gccatgaactcatacattaaaatgcttgccatcctgattacacaacttgaaggaattttgatgtctttgaaatgagagattatctcttgttttaattttgttttttttttttttaaacagtctcactctgtcgccaggctggaatgcagtggtgcaatctcagctcactgcaacctctgcctctggagttcaagctattct

SEQ ID NO: 265887 - DNA, 201 bp, Homo sapiens
tgcaagtctttgtacatgtagatatgtttctttttatcttgtgtaaatacctagaagtggggtgactaaatcatattttagagtttctttttaaggaactkccaaactactttccgtggtggttgtaccatttccattttacatgcccacccagaatgtacgagagttctagttgctccagttcctactcaacacttggta

SEQ ID NO: 265888 - DNA, 201 bp, Homo sapiens
ggagtctgtgtgtgtgtgtgtgtgtgtgcgcgtgtgtgtgtgcgtgcgcgcgcgcgcaggcgggtagggtgtatggactagttgatgaagctagccaaggrcataactcacttttcaaggtagttttctcaggtggcaaaagaaggtgtgaatattctcctggactcccatagtgcattgcagctgggtaatttgatatgt

SEQ ID NO: 265889 - DNA, 201 bp, Homo sapiens
agagagagagagagagagatggagttttgctctattgcccaggctggagtgcaatggtgcaatctcagcaaactgcaacctctgcatcccgggttcaagcrattctcttgcctcagccccccgagtagctgggattacaggcacacgccaccatgcccagctaatttttgtatttttagtagagatgggattttgccatgt

SEQ ID NO: 265890 - DNA, 201 bp, Homo sapiens
ttttttaaatagatgaatgcagaatttggtttttaaagaagaaaacatttattttttgctgaaaaaagaaaatgttaaattcggcaaatatttattgacaycttaaattataggatttatgataggcactaggcgtgcgtatctaaatgaggaagtcacagttagtgaagatgctgtgtacacatggaaagtaaccattga

SEQ ID NO: 265891 - DNA, 201 bp, Homo sapiens
ccaacatgctgggattacaggattgagtcacggcatttgtctggcctttttctttctactgataaaattaaacaaaacatagtgctacacaatatggtggrggcagaagattcaaatatacctggattctctgtttccaatcaaggtgaataccctgtctgccctgtatacttttagaaaaccagacgatcggtgcctgca

SEQ ID NO: 265892 - DNA, 201 bp, Homo sapiens
tcacaacccagtctcaacctccttgccatttgcatccttctctggcacttgtgttcccattaccaggagagaattggccttgctccaagccgagccccccygcccccattgggcttgggctcccccactcggggttggctcttgagtcatctgcactctaggtttcatgggccctccctccctgcttcatctcctacatcc

SEQ ID NO: 265893 - DNA, 201 bp, Homo sapiens
ccgcctcctgggtttaagcaattctcctgcctcagcctgctgagtagctgggactacaggcatgcgccaccacgcccagctatttttttttgtatttttartagagacagggtttcaccatgttggccaggatggtctcgatctttgaccttgtgatccacccacctcggcctcccaaagtgctgggattacaggcataag

SEQ ID NO: 265894 - DNA, 201 bp, Homo sapiens
tgttgcccaggctggagtgcagtggcccaatcacagcttactacagccttgacctcctgggctcaatggatcctcccacctcagcctcccaactagcttgractacaggcatgtgccaccatgcccggctaatatttgtaatttttgtagaatcggctctcactttgttgcccaagctagttttgaattcctgggcccaag

SEQ ID NO: 265895 - DNA, 201 bp, Homo sapiens
tcctcagcccctggttagacaaaggccccgtgacgcaaagcaaagaaggaagtctgatttttttcacaattgttctaaagatgttcttttgtgttaaagaytggcttaaacttgaacgtttttcttgtaaatcaggggtagttttgagatatttgcgtctgtttacggtaagcaagcacacctccagcagggccaccacat

SEQ ID NO: 265896 - DNA, 201 bp, Homo sapiens
tgttttgttgttgtttttgagaagattcagtctcactctgttgccaggctggagtgcagtggcgtgatctcggctcactgcaacctccgcctcctgggttyaagcaattctcctgcctcagcctgctgagtagctgggactacaggcatgcgccaccacgcccagctatttttttttgtatttttagtagagacagggttt

SEQ ID NO: 265897 - DNA, 201 bp, Homo sapiens
cacaattgttctaaagatgttcttttgtgttaaagattggcttaaacttgaacgtttttcttgtaaatcaggggtagttttgagatatttgcgtctgtttrcggtaagcaagcacacctccagcagggccaccacataattaagtcacgggacatgccgacagcctcacttacccatgaggatgcagagtggtgtgaataa

SEQ ID NO: 265898 - DNA, 201 bp, Homo sapiens
ttagaggcatggagctctatttcgaatgtgaatggttttcctttccgtgaacttgttaaagttgttctgtgctgccacagtattgccttgtgcaaatcttytgatttgtgcaaagtcccagaagaaatgacgatagactgctgctctcctcctaagtaaaatgaagaagtatctaagagaaacagatgattcaaaatgctt

SEQ ID NO: 265899 - DNA, 201 bp, Homo sapiens
gcccctcacattgcctttttgcccttctgggctagtcagtcaagactggagtgcatacaacatcgtgacacttgtgtcctgagtaacacaggaaatgactytagttcagtccccaggacaaggtcagacatatgccaggggaaggtattggttagaggcatggagctctatttcgaatgtgaatggttttcctttccgtga

SEQ ID NO: 265900 - DNA, 201 bp, Homo sapiens
ccaggcccatgctaatgacgctgagagcatgggtgggcccaggaatgcctctgtaactgggcaccttgctggtgatgaggggccaggcccatgctaatgaygctgagagcctgggtgggcccaggaatgcctctgtaactgggcaccttgctggtgatgaggggccaggcccatgctaatgacgctgagagcctgggtggg

SEQ ID NO: 265901 - DNA, 201 bp, Homo sapiens
attcttttgattaaagtaatctcagaaagaaattgcatttctgaaaaaaaaatacaatttaatatatacatgccatagtaaattctgttgctttttgttgrtggagcttatcatgcaaggtaaatggaaataagaaaactctacaatgtggctgaaatttgtgtgacatccttttaaaatgtgagtagtttcaactggcac

SEQ ID NO: 265902 - DNA, 201 bp, Homo sapiens
aggctgcttcctcaggctgcttcctcaggctgcttcctcaaggctgatccctcaggctgcttcctcaggctgcttcctcaaggctgatccctcaggctgcrtcctcaggccaatccctcaggctgcttcctcaggctgcttcctcaggctgatccctcaggctgatccttcaggctgattcctcaggctgcttcctcaagg

SEQ ID NO: 265903 - DNA, 201 bp, Homo sapiens
tgaaatatttggtgattattcttaatgattgtatatctataccccctgctcaagggtaatgtgtcagcccatgaagtttgctgaagggtaaatttgatctrcaaataaggagggattcttattcttctgaattcctatctatatcttttaaagtatgaagagtgggcagtggccctgtaaattgtgaggcggctttttata

SEQ ID NO: 265904 - DNA, 201 bp, Homo sapiens
ctttttatagagacgggaagtaaaacatctctggattcccagtggaaaaaagatgctgtggagagtgtattttaaactctaaaataaatggataactcagrtcaatctttttagctagtgctattgatgtatgcagtaccaaaggatatttggtcctagcaagattactctactgccagttacagctgggaagtagggagt

SEQ ID NO: 265905 - DNA, 201 bp, Homo sapiens
aaagagatgtcattgtggattcttttttaatgcccatgaatggtttctagtgacattgtatggggacaaaacatacacagcagatcttgccaccaacagcwttcccacaactgttttcttcctgcagatcctacttgcattccacacatgtccactcccggtatcagcctcgccgaccccctgacccatggcacaggctca

SEQ ID NO: 265906 - DNA, 201 bp, Homo sapiens
gtaatcccagtattttgggaggccgaggagggtggatcacctgaggtcaggagttcgagaccatcctggccagcatggtgaaaccccatctcaactaaaamtacaaaaattagccgggcgtggtggcacactcctgtaatcccagctacttgggaagatgaggcaggagaatagcttgaacccaagagggggaggttgcag

SEQ ID NO: 265907 - DNA, 201 bp, Homo sapiens
gcatttctctaacgccatgtttaatgatgaccatttgtcagggtgtgccatgacttatgtaaatgtgtatcttgcggaatgatgataattttcccacggcygaatttttcctgtgttcctgacttttctctaaaaagaaaaattcctagaagaggaagttagagagtcaaagcatgtgcatgtttttaaagcttttgtcaa

SEQ ID NO: 265908 - DNA, 201 bp, Homo sapiens
aaaaaaaaaaaaaaatcaacaataaagtaaataaaaaataaaataaatgtgagatcgcataggagagaacattctgtgcatacatttaaagtgagaagatraaaatgcaagatcactgattatctggcaaagtaaataaatgacactgagatggatgaaattttaatacctacaactgcttctgtggtcactaaaagtctg

SEQ ID NO: 265909 - DNA, 201 bp, Homo sapiens
gagaacattctgtgcatacatttaaagtgagaagataaaaatgcaagatcactgattatctggcaaagtaaataaatgacactgagatggatgaaattttratacctacaactgcttctgtggtcactaaaagtctgcaacgtcaaataaagcttttctagtctcctgtgctgtataattaactttcattgtcacttaaat

SEQ ID NO: 265910 - DNA, 201 bp, Homo sapiens
ttttcctggctgccccctcacatgacttagaatctctatttaattctgtgctatgagcattcctctgttgctgtgtaacatgattttgcagccaggtttgstcgtgtgggagtgctaaagactattagactcagtgcagtgatgttacctggcatctctgtgtgtcctcagggttgtgttattttatgagcatcttatatg

SEQ ID NO: 265911 - DNA, 201 bp, Homo sapiens
tatgtaaaaagaaaaaagaatgggtttacaggccttgcaagttaggaggcaaaacaattttgtactaatttatatatgtgtgtgtgtgtgtgtgtgtgtgtatatatatatatatatatatatatatatatatgtcctatgtgtgctatatccattaatatcctatgaattgaaaatatccagtcaagtggtattgcttca

SEQ ID NO: 265912 - DNA, 201 bp, Homo sapiens
tcgtgtgggagtgctaaagactattagactcagtgcagtgatgttacctggcatctctgtgtgtcctcagggttgtgttattttatgagcatcttatatgsttatgtatccattatgtactgcctgttttatatgcatctatgtatttatccatgcaacaaaagttttccttggttagtttcttctcaacatttttgtcca

SEQ ID NO: 265913 - DNA, 201 bp, Homo sapiens
atgtaaaaagaaaaaagaatgggtttacaggccttgcaagttaggaggcaaaacaattttgtactaatttatatatgtgtgtgtgtgtgtgtgtgtgtgtatatatatatatatatatatatatatatatatgtcctatgtgtgctatatccattaatatcctatgaattgaaaatatccagtcaagtggtattgcttcaa

SEQ ID NO: 265914 - DNA, 201 bp, Homo sapiens
gcagtgatgttacctggcatctctgtgtgtcctcagggttgtgttattttatgagcatcttatatgcttatgtatccattatgtactgcctgttttatatkcatctatgtatttatccatgcaacaaaagttttccttggttagtttcttctcaacatttttgtccatgatcctcataaagtcataccacattcatagaag

SEQ ID NO: 265915 - DNA, 201 bp, Homo sapiens
tgtaaaaagaaaaaagaatgggtttacaggccttgcaagttaggaggcaaaacaattttgtactaatttatatatgtgtgtgtgtgtgtgtgtgtgtgtatatatatatatatatatatatatatatatatgtcctatgtgtgctatatccattaatatcctatgaattgaaaatatccagtcaagtggtattgcttcaac

SEQ ID NO: 265916 - DNA, 201 bp, Homo sapiens
atcagttacatgaggcacagcttcttctcatccttttataggaggatgtcagatcatttgtccacaatttctgtaggatttgtgtaacatgaacttgaagmctgttttcatgaaagcctgcttccattttcatgaaaatgaaagtattgcattggttttaaacgatgaaatcggtgaatcagttctctgagaggcagatat

SEQ ID NO: 265917 - DNA, 201 bp, Homo sapiens
ttcactgtgttagccaggatggtcttgatcttctgacctcgtgatccgcccgcctcggtctcccaaagtgctgggattacaggcgtgagcctggccaaagrgacctaattttataaataccagtttcttgccattcttccacctccttgaaggtaggttttttgtttatttgactgattgattctactttttgaaatcaag

SEQ ID NO: 265918 - DNA, 201 bp, Homo sapiens
tatatgcatctatgtatttatccatgcaacaaaagttttccttggttagtttcttctcaacatttttgtccatgatcctcataaagtcataccacattcayagaaggtacaaatccgaaaaggagagctagtagagtacaagagataacagaagcaaaaatgaaatgattgcaataagctgcaagaagaattttgattttg

SEQ ID NO: 265919 - DNA, 201 bp, Homo sapiens
gtaaaaagaaaaaagaatgggtttacaggccttgcaagttaggaggcaaaacaattttgtactaatttatatatgtgtgtgtgtgtgtgtgtgtgtgtatatatatatatatatatatatatatatatatgtcctatgtgtgctatatccattaatatcctatgaattgaaaatatccagtcaagtggtattgcttcaact

SEQ ID NO: 265920 - DNA, 201 bp, Homo sapiens
aaaagtatattgcccatgtctagtagcacttcttattcactttctttcacatctcaaatcacccttccgttcaaactataatattacagcatctcatatayttagtatttctcctccacactctagtgtggtgaagtggtggtaatagtgccccttcagaggggttttactctggaggaaccggaactgaagtgagtaacc

SEQ ID NO: 265921 - DNA, 201 bp, Homo sapiens
tggaggtgagagaaaatgtctgagtacctgacagccctgcccagccttcaaggcaaaacacaggttggcagcttattcacagtcctttccctgatcatccmgaggccccttgatttaaagccctgtagactttgtgccaattgcaggattaccgagcacttcctgcagtgctttggaacaaagtctgtcatattttctcat

SEQ ID NO: 265922 - DNA, 201 bp, Homo sapiens
ttctcattggcccctttgctgggcctgcaccttgccatgtttttttgtttgtttagctttccaaaacatgactgtatgcaataacaggattgaggctatcyattggcctgggcaggagttaagatgatgaaagctctaggactcagggttgaccacaagctcagggtcagccagcggtatgaagtacaggtataataatgg

SEQ ID NO: 265923 - DNA, 201 bp, Homo sapiens
atagaaggaggaggtgattttctgagccaaaatcaaagcgcgggtgggagttctgccaatattttctttagattagtttcatgctttctactctgggagcwtagggcagtttatagtctgagtttcatttttaggtacacatttgtggtacacagacaaaaaaaaaacgtaagagagtgattcgggatcagcaaaaaggag

SEQ ID NO: 265924 - DNA, 201 bp, Homo sapiens
cctttgctgggcctgcaccttgccatgtttttttgtttgtttagctttccaaaacatgactgtatgcaataacaggattgaggctatccattggcctgggsaggagttaagatgatgaaagctctaggactcagggttgaccacaagctcagggtcagccagcggtatgaagtacaggtataataatggtcttaggctgag

SEQ ID NO: 265925 - DNA, 201 bp, Homo sapiens
aagacaagtctgctacctaatatgatctgcgcaagaaagtttgcaatgacttgcccctcttgggtctcattgtcaatgataatagctgtttcagaaagcarccctcatgcctaatggagagacattctgtggcctactttcccccatatagagagcacaggccactctagtttggaatttgttgctacacttgattggaat

SEQ ID NO: 265926 - DNA, 201 bp, Homo sapiens
aatattttctttagattagtttcatgctttctactctgggagcttagggcagtttatagtctgagtttcatttttaggtacacatttgtggtacacagacaaaaaaaaaacgtaagagagtgattcgggatcagcaaaaaggagaaagaaaaaaaaaagacgtgtctccttcactcacctgataaatcttttatatttact

SEQ ID NO: 265927 - DNA, 201 bp, Homo sapiens
tgcagatatcttcacactggagactcagttttgaggattcagtaagaacaatttgttttcagccttctaatcccattctttccaagccccttaccttccawccagacccctaatgatcaccaaataatcactgtttcctatacttctgtctcaatcttgaccaagtaaataaccacatgctgcatcaaccagtgttttagt

SEQ ID NO: 265928 - DNA, 201 bp, Homo sapiens
ggactcagggttgaccacaagctcagggtcagccagcggtatgaagtacaggtataataatggtcttaggctgagttacttaaagtgtgacagggtctgartaattacaagtattacagaactctctcctcctctacctaataaggagagctggtttgggggaaggtccttttgttttgccgagctgactggctgactggg

SEQ ID NO: 265929 - DNA, 201 bp, Homo sapiens
acagttcatgagtcaactctgaagtcaatacatttccttcatctcatcctctctctctctttctctgcaatttgtttaaaataatcagttttctgatgagaaaaaaaaaaaagagaaacatatcacttccattaccttggtttatgtgaattcaggacaatttctctttagtttctctttaggcaagtaggttgatatcta

SEQ ID NO: 265930 - DNA, 201 bp, Homo sapiens
atcatccatatctaatagatctgacgatcttcgtagcaggtaatatctctgacagttctctacccgttttaaatacagcaattcaccctccaactgtaacrgagtcacaaacctagacaagacatgtcttagccatcaaacagccatttacaccttcattcaacaaatacttattgagtacctgccatgtatcatctttaa

SEQ ID NO: 265931 - DNA, 201 bp, Homo sapiens
gccaaggtgggcagatcacttgaggccaggagtgtgagaccaacttggccaacatggtgaagccctgtctctactaaaaatacaaatattagccaggtatsgtggcttatgcctataatcccagcactttgggaagccaaggcaaggtggatcacttgaggccaggagtttgatcgagaccagcttggccaacatggtgaa

SEQ ID NO: 265932 - DNA, 201 bp, Homo sapiens
atttattagaagagaaaagatgaaagttattttttggagacagacttgtagtttaaaaatataagcacttacacattctgtgtcattcactttggaatacwtatatatatatatatatatatacatatatatatatattttttttttttttcaccccctgggaattttcaacaatactaagcagggatattaaatgatcca

SEQ ID NO: 265933 - DNA, 201 bp, Homo sapiens
agaagtgaggacaggctgcagagtggtagattcctgtatttgggggccagaaagatcattcttcgtttggtagggtctgtacaataagatggagccttgtkttggagagctgttttgttctttattatttttccaaagctaattgagaagcaagcttcattctctactcctcaattctaaagcctctgagactgtaaggct

SEQ ID NO: 265934 - DNA, 201 bp, Homo sapiens
agacagacttgtagtttaaaaatataagcacttacacattctgtgtcattcactttggaatacatatatatatatatatatatatacatatatatatatattttttttttttttcaccccctgggaattttcaacaatactaagcagggatattaaatgatccactgaccccaagtcactatttttggaaagaaatggtca

SEQ ID NO: 265935 - DNA, 201 bp, Homo sapiens
ttgtttctctatttttctagctgcttatagtgtgagagaaattagcaaagcagataacccttaaagtgaagaactaggtgtctcaggtagttttaggtacytcacctgcttcctgtaatctctacagacatttgcttaaatatatactaatattgcctccattttataaataaggacactgaccccaagaaagtttgagta

SEQ ID NO: 265936 - DNA, 201 bp, Homo sapiens
agctttgatgttcttttcacctgagacgaatcctgccaggggctctgtgctctagagcagccctgcggtaacaaagccttgtgtgcgggagcagaggaagwttctgccctcaagaaatcatttgtaccctcatgctctggagacagcatataaatcaggagcagaaacagagaaggcccccaaactcagacattttaaatt

SEQ ID NO: 265937 - DNA, 201 bp, Homo sapiens
gacagacttgtagtttaaaaatataagcacttacacattctgtgtcattcactttggaatacatatatatatatatatatatatacatatatatatatatwttttttttttttcaccccctgggaattttcaacaatactaagcagggatattaaatgatccactgaccccaagtcactatttttggaaagaaatggtcag

SEQ ID NO: 265938 - DNA, 201 bp, Homo sapiens
ggatcttatgggcctgtggttcaccaaaaaaaaaaaaaaaaaaaaaaaaaaaaaaaagtgattcagtattgttattaccataaaatctcagataaattgtrttctaagcccaaataaatgtcttttatttcttgactcttactttaaagagtaagagtattttaaaaacaaaataccattcaaaatagagcttttctactt

SEQ ID NO: 265939 - DNA, 201 bp, Homo sapiens
catctggtttcctcttttcacagaccagaactcctaagtgagctttgtgactgaagctggctgagttccatgcagtgcgcctgttggccctaagcaagacragcacaatctgtttcttctatttctaatagaggaaaagagttccttcatttgcctctttaattcattgcttgaattttatgtccttctttctcacaatgg

SEQ ID NO: 265940 - DNA, 201 bp, Homo sapiens
ccgtggtagatttttttctggaagactgtgtgtttggaaaaggaaaattttcttgtaattctgaaaatagtctcaggcatcaaaatatcacattataaatygtcactaactcagttttcttgtggctgctcagtttcctcatgagagatttctataggctagataagaagaggaaaagatgactattcaactaaacatttt

SEQ ID NO: 265941 - DNA, 201 bp, Homo sapiens
gtaaccattgaaatgaagtatttctggatcaatacttccaaagacaatcaggagaaaaaaaaaaaagatttacttggactctttaaaaagagttgcaattrgaaaaaggtaaaaatgataacttaagttatttttcctgatcaagtattttctagagatcatgagaagaaattccaaataatatttagttgctgacaaaag

SEQ ID NO: 265942 - DNA, 201 bp, Homo sapiens
ttttatctttataactttttcacataccctgtctctctttctttttcttaaagtgggactggcaagacgtgaatcagccagtgttcattggttatggtccrtggtagatttttttctggaagactgtgtgtttggaaaaggaaaattttcttgtaattctgaaaatagtctcaggcatcaaaatatcacattataaattgt

SEQ ID NO: 265943 - DNA, 201 bp, Homo sapiens
tccctggccaagaaaatcatttgattctttctgtcttgcagagcagataagaatcttgtaaactttatgagctattaaatgcattattttaatttctagtkttcttgtggaaccaggtttcaagaggtcttcatgcagtgtttgatgtctttccatgactgatggctgtcctccaaatctcattatttttaggaagagctc

SEQ ID NO: 265944 - DNA, 201 bp, Homo sapiens
attatgaatccagttacgtaaaaatcaatgcacacaaaaatattatgatatttgtatgctgggggcattatggggatttgtgctttcctgcttttcccccygaattttctatatactcagaaaatagttttttggtttggttgtggtttgtgtgcatgttgggagcagaggcaggtgttaaggtgtttaactcaagcctaa

SEQ ID NO: 265945 - DNA, 201 bp, Homo sapiens
aggttggtcaatcagttatggcaggagctggctgtttcacttcttttgtggtttttctttggctgcttcagacttcttggctcctgcaggccatctggacrtatatgtgcaggtcacaggggttataatggctgagcttcgactcagaggcctgacagctttgcatccaacacttatcctcaactctaagaagtacctttt

SEQ ID NO: 265946 - DNA, 201 bp, Homo sapiens
cttcatcaggcaccaagtaatgtagttcttacttttatttgtcctgagtctactgccttcaatcaatttatgatctagtgaactggtctgaggttaccctrcccattgtctttataattccagagacctggtttgttgaattatttaaatgtttgcattaaacaaaatttttaatcatttgaacatttatccaccgtgtta

SEQ ID NO: 265947 - DNA, 201 bp, Homo sapiens
catccaacacttatcctcaactctaagaagtacctttttgtgtattttaacatttctgaaatcaggatattgtaaattgatgtggatgtttacaatggtastatgatggagcttttctttctttggtcaagccactattaaattgaaggtgctttttaccattaatgtcatcttagaatggaggcatttcagtcctgttaa

SEQ ID NO: 265948 - DNA, 201 bp, Homo sapiens
taccattaatgtcatcttagaatggaggcatttcagtcctgttaaattacctcccagcaaacaattgtgccagtgtgcagagcctcccaccgagtgcagcygcccccttccccagcccctcccttttcagctttgccaaatgagaagcaatattgtttcttatttatcaagtcagtgcgtttctatatttatgactcactc

SEQ ID NO: 265949 - DNA, 201 bp, Homo sapiens
ttctgtgatgtgggcagagcccctgccgcacagtgcccttcctcatgtaacagaagcgtccttacttcttcaaagccttcccctcctgggcagcagggtcycggacccgccggccgcccctccctctaacaccctgcagctgtcccagcgccatgcctacacagctctgtgttagcccgtgccgaggtctgagtcatcaga

SEQ ID NO: 265950 - DNA, 201 bp, Homo sapiens
aaacgaaattggcttcacccagtgaccagccctaggcaaagcttgtctgtggtgcccccaccactgtcagggataccacccatgtgccctgcccatttcayggggtcctattttggatgtttggtaacccctgaaagtttagtggtaacccctgaaagtttggtaacccctgaaatttggtaacccctgaaagtttagtgc

SEQ ID NO: 265951 - DNA, 201 bp, Homo sapiens
ggtatgaagtacaggtataataatggtcttaggctgagttacttaaagtgtgacagggtctgaataattacaagtattacagaactctctcctcctctacytaataaggagagctggtttgggggaaggtccttttgttttgccgagctgactggctgactggggaggcgaggaacttagaacacacttatacaaatttag

SEQ ID NO: 265952 - DNA, 201 bp, Homo sapiens
tacaagtattacagaactctctcctcctctacctaataaggagagctggtttgggggaaggtccttttgttttgccgagctgactggctgactggggaggygaggaacttagaacacacttatacaaatttagaacaaaggctacctgggtttaggattgggctgggaagaggagattcctgaagagatgaaacagaggct

SEQ ID NO: 265953 - DNA, 201 bp, Homo sapiens
tttgcaatacatgacatatgaccatccaatatacaggctagggtatgagatggtacacatatcattctgtacattaagtctttgtggaggtcaattctttycatattttttgcataatacctgtgtaagtcctaatattacccccataaaccagtgaaccatttttcacaaatcctgggttatatacggcacctcagaaaa

SEQ ID NO: 265954 - DNA, 201 bp, Homo sapiens
ctacctgggtttaggattgggctgggaagaggagattcctgaagagatgaaacagaggctgagggagggcctcggagggaaaaaagggaggaggaaagatktgagcagctgctgtgaggggtggaactgggaggagaagtgggcgggaattttttgccgatgtgactgctctgggccaaggcgctaagattagccaagaag

SEQ ID NO: 265955 - DNA, 201 bp, Homo sapiens
ttgagagtgctactgtagaatgatggctactatgcaaaatgcacttacttcttgtcctttataagccctggtagcacagatttttctgttgctctaggggmtgaggaagtagtttcccaccttccctatgaaatgccatcagcctcaccattagtaccattcaagtccatcggttatgtttttgccttttgttttttgttt

SEQ ID NO: 265956 - DNA, 201 bp, Homo sapiens
ttcttctgtatatctatagcctgttatcccagcaccatttattgaatagggagtcttttccccattgctgatgaaacaattttaatatatgagaggatatwcacagattataggcaaataccacaccatgttatataaaggtgttgagcactgttggattttgctgtccataggaggtcttggagccaatcctttatgtat

SEQ ID NO: 265957 - DNA, 201 bp, Homo sapiens
tgcttccaagtcagtagggaaggaattagtatctatgctatgtgctatatgccccatgcattgcacttattttctcacttaaatttctgagagacataatrttctctatgaatgaaggtttgggggctcaggcctattaagtcatttgctattcagtggtcaaatgatttgagccccagatctgttttgctccaaaactag

SEQ ID NO: 265958 - DNA, 201 bp, Homo sapiens
ctgaaatttgcagtcagtttgaaagctcaatctgctttttgggttttgcagtacaaccggtaccagcagtatggtgcagaggagtgtgtcctgcagatggrgggcgtgttatgcccccgccctggctgtggagcggggctgctgccggagcctgaccagaggaaagtcacctgcgaagggggcaatggcctgggctgtggg

SEQ ID NO: 265959 - DNA, 201 bp, Homo sapiens
atagagaggcaagatttgctagctaaagaagacactattattggtttcattttgagaatcactcattttctgtgattaaaatttctataggtgtggaatgtttttttttttctcacattttggtaggagaaaaacaatcattctcctagctccacctgctgagaactgagagaactttaaacagatagacatcttttcaaa

SEQ ID NO: 265960 - DNA, 201 bp, Homo sapiens
ggcctccagccaacaggcagcagaaagccgaggcccttgtaatgacagctgcaaggaagttaattctgccaacagcctgagagagcttagaagctagtttygctgtaatggagtctccagggaagagagcagcccagccgacatcttgactgggcctcatgggactctgagcagaagtcacaccaggcctgccccacagaa

SEQ ID NO: 265961 - DNA, 201 bp, Homo sapiens
gccccagatctgttttgctccaaaactagtgttcctcatgcatcacgctgtctctgataattaaccagcatctcaatattaagctctcttgtggaaatgcygtatgtaaaacatttatggcaagtatgtttcttatagatttaaggagcagtatattttagtggttaagacatgggtgttggattaatcagacataggtta

SEQ ID NO: 265962 - DNA, 201 bp, Homo sapiens
tggagtagaactgattgagaacaacatttgctaatttgtaaggtcaagatatctttatttgcaggatgaatgaagaaatatacaggacttaaaaatagttaaaaaaaaaaaaatagttttaaaagtacctatgagaatatactaacttcttgtagaattttctattttgaaagcaaagtgcattttcattgatgacagata

SEQ ID NO: 265963 - DNA, 201 bp, Homo sapiens
caccttctccccatattttcacatggcctttcgtctgtttttaaggacatcagtcatattggattgggactcaccctaatgacctcattttaacttaattwcctctgtcaagacctatctccaaatgcattcacattctgaggaactgggggttagtacttaaacataaattttgaggggatgcagttcagcccataaccc

SEQ ID NO: 265964 - DNA, 201 bp, Homo sapiens
aatcttgtaaactttatgagctattaaatgcattattttaatttctagtgttcttgtggaaccaggtttcaagaggtcttcatgcagtgtttgatgtcttyccatgactgatggctgtcctccaaatctcattatttttaggaagagctcaaaaaagccagttccttgactggtatcgtttgcttaatgggacatctagat

SEQ ID NO: 265965 - DNA, 201 bp, Homo sapiens
gtggctgagtgggcctggtgagcttgaggtaggctattcaggaagggtgtcatggagaacagtagttccactggttctagaagcttgaggtgactttggaygaaaattaggaaggatttggaaaatttgggagacacacattgtgaaatactaggaaacgatgtgagccaatcacaataagaccttacttaatcaatgaaa

SEQ ID NO: 265966 - DNA, 201 bp, Homo sapiens
ttaacccatacagtagttacctcacagggctattttaggattaaataaaataatgtagagagaatgcacctgatgtcagttgttttcattgctgcaatatytaatacctatctagacatcaaaggaaaagagatgaaatactaagtaatatccctaaaagaagcacttgaactgaaaatatttaggatcattggactactt

SEQ ID NO: 265967 - DNA, 201 bp, Homo sapiens
tttccaggtaggtagaatcagaatcgagttgaattataggatacccagttggtgtccactggagaactgcttggtatatgtggcaagtcccccccaccacyatctggtcatagaagtgttctgtgttgagtgtctgagtgcaaggacaaaaacagtttgtttttgtttttgtttttgttttccttattccagaacagatat

SEQ ID NO: 265968 - DNA, 201 bp, Homo sapiens
tcaggcaggaacacattgttcctgaacgaggatgcggaggcgcgtgcacagcagccctaagaccatctctgatgtgcactcccgagggtgtacctgcggcrgaaagtcccccacgctggctttgctcatgaggcccgttagcctgtgaagttccgggtgacaaatgaagcttcttcacacattgcactcaccgggcatctc

SEQ ID NO: 265969 - DNA, 201 bp, Homo sapiens
ggtatctgtaatatcacttctgcagtcaatatttgacttgaccttcaccttaacaaactcaccaaacacaacagccttgcgttttagtcaacccaagggcrcaggaatcattagtcaaatcaatgaccaggatagtcataggacgcccatactcatagaattcaaccatttgtcagttacaagccaatcactgaatgtcag

SEQ ID NO: 265970 - DNA, 201 bp, Homo sapiens
atattaagtaaaaattgattcatttaattttttgcctaaataactttaaaaactggctttcggtattcctttatggttaaatcaatccccttagatatcartcaaccatgtacatgcagtggagcctttctctgacactgattcattaggagagctcatttaaggagttaaacatctctcacttgtcaacactgaggtaat

SEQ ID NO: 265971 - DNA, 201 bp, Homo sapiens
aatttcaatgaccttgattgaggagatagggcttacctatagagaaatgatagcgggccagttagatggaagttatgatgtggctgagtgggcctggtgarcttgaggtaggctattcaggaagggtgtcatggagaacagtagttccactggttctagaagcttgaggtgactttggacgaaaattaggaaggatttgga

SEQ ID NO: 265972 - DNA, 201 bp, Homo sapiens
aaagatgaaggctggaagactcagccagtctgctctttccatcttctgctgctgccttattctagctgtgctggcagctgattagatggtgcccacccagrttgagggtgtctgcttctcccagctcactgactcaaatgttaatctcctttggcaacaccctcacagaaacacccaggaaaaatactttgcatccttcaa

SEQ ID NO: 265973 - DNA, 201 bp, Homo sapiens
ttgtcaacactgaggtaattatgcactattaattctcttgtcatttcaaaaagtgctattttaaaactattcatttcatcaatcctgagaagtaggataargtagacagcctgctgtaaaccaatttaagatgtgattacattgctttattcctgcaatgcacgaatcagaaagttgatttaatgtgaatacagcttttga

SEQ ID NO: 265974 - DNA, 201 bp, Homo sapiens
agtaaacgggacagctctgtcacaggtcctgtgaaggggtcaagaaaatatcctgcatcaatactattttctagccttgaacacttgtgatcatattaacrttttaaaagccctggtaattcaggcatttaaaatatctgtttaatttggtttaatctactatttttgaacatcatcgactttggagcccttttctgcagg

SEQ ID NO: 265975 - DNA, 201 bp, Homo sapiens
gttacaagccaatcactgaatgtcagcaaagctcagaagatattggggccagactctcttgctagacaaaaactaagtggcttcgtttttaactcttatayttagggtattccttcttatcatctctctcctagttgtttaacgctaaacggctgcaaaatgatggctgcttgttgtagagggcagctgaccaaaaataag

SEQ ID NO: 265976 - DNA, 201 bp, Homo sapiens
tgcaagcacaggttccaatgctgcttttctctccttgtctttcgtttatcgattccttcctgcgtgccagttgcatcctagaacagatgagtaaggcaccmttgctgctgtcaagaagcaaatgacagtgaagcaaagcttgacagtgtgtccgagatgcattttgagaggcgtgaacccggggtgttatgggagcacctt

SEQ ID NO: 265977 - DNA, 201 bp, Homo sapiens
agccaatcactgaatgtcagcaaagctcagaagatattggggccagactctcttgctagacaaaaactaagtggcttcgtttttaactcttatacttaggrtattccttcttatcatctctctcctagttgtttaacgctaaacggctgcaaaatgatggctgcttgttgtagagggcagctgaccaaaaataaggaaata

SEQ ID NO: 265978 - DNA, 201 bp, Homo sapiens
gcatcctagaacagatgagtaaggcacccttgctgctgtcaagaagcaaatgacagtgaagcaaagcttgacagtgtgtccgagatgcattttgagaggcrtgaacccggggtgttatgggagcaccttggtgggcacaagacccactgaggccagtcagcgacagtttccttcagaaaggtgactcctgagctaggtcct

SEQ ID NO: 265979 - DNA, 201 bp, Homo sapiens
ttcatataaaaaataaaaatcatggcttcctattaagaaagagtacatgagttcataaagaaaatattatgaattgttttgattatttttactacctgatkctcttttactttctgatgcttaaataacaaattatctaccttgtatttcatataacaattattttagactgtctaaatttaatggtagtgactagtacca

SEQ ID NO: 265980 - DNA, 201 bp, Homo sapiens
aaaaaaaatccatagtgacctttgcccaaataaagaggggtagggttatttcatagcagttataaattgcacactgtgtgcctaattgcttaaaaaaaaamcccaaagggtatttacgttatgtatattgtaccacaattcaaaatttaaaaggacaacattatgtgaagtgcatctgattggtattttactgttttgatt

SEQ ID NO: 265981 - DNA, 201 bp, Homo sapiens
attggaaatgagtttttgaagttatacttttgctaatactgaaagattagtgatgatgacataattgacatgttgaatgttgagtctagttgtacactgaygtcaaaaaaaaaagagagtgaagaaagctccaatcttggaagcttgttgacccttagctttacaggttgtcttactacattgtctcaagccctaggtatt

SEQ ID NO: 265982 - DNA, 201 bp, Homo sapiens
acaattcaaaatttaaaaggacaacattatgtgaagtgcatctgattggtattttactgttttgatttttttctagtcagactcagtatacagttgatccmctatgatgggttacatcatagtccatggtcaaaatctttttttcttattattattactattaacaatctctaattcagtgctgtaaactatggatggaag

SEQ ID NO: 265983 - DNA, 201 bp, Homo sapiens
gaaatgagtttttgaagttatacttttgctaatactgaaagattagtgatgatgacataattgacatgttgaatgttgagtctagttgtacactgatgtcaaaaaaaaaagagagtgaagaaagctccaatcttggaagcttgttgacccttagctttacaggttgtcttactacattgtctcaagccctaggtattttga

SEQ ID NO: 265984 - DNA, 201 bp, Homo sapiens
atgaagaaataactagaaatgaaagattgatgtataaaggtattcataaaatgtgatttgcaatggggaaatgcttgagatgacctgagtgcctaacgtcraggggatgcttagacaaatcaggctcccagatagggccacatggtctggagtctttacaaaccccaaatgggtgatgtccatctctgttccacctgtgtg

SEQ ID NO: 265985 - DNA, 201 bp, Homo sapiens
aagaaagatgttaacacttaatacctattattggttaggtgttttaactgaatcatgtcactgaattctcaaaatgtattcctgtagtttgatattgtgawcccaattttgcagtcttgggagctagatctcatagtcttgctgaaggccaactaagaagtgggtggagttgagatgtgaatgttgaagtgtttgtgttat

SEQ ID NO: 265986 - DNA, 201 bp, Homo sapiens
attaaaatgtatcaagaggattaaaaatattcctgttaactcagttctttattccacttcttccatgaagaaataactagaaatgaaagattgatgtatamaggtattcataaaatgtgatttgcaatggggaaatgcttgagatgacctgagtgcctaacgtcgaggggatgcttagacaaatcaggctcccagataggg

SEQ ID NO: 265987 - DNA, 201 bp, Homo sapiens
tgaccaccatacccagccatgatttttaatacataaagttatctagcatatgtgcaatcacagattaaaggctcgttgtagtctgttgtgctaacaaagcrtggaccaaggactccccaagtgttctttggcatgccagatcttaaaagctccagaagcactcttcagctgggtcctgtcactgctcagcagattaattac

SEQ ID NO: 265988 - DNA, 201 bp, Homo sapiens
agtgggtatatctgtttcattctgaggcaaaatattcatcagcccttttgaccacaaatccaaagcactgtgttttgtaggttttgttaggaataaaataygagctcatgtcctctgtctttccctgtatttctgactctaaattggttggcaacccaacaaataatatttgatgttcattcaccctaaaaacaacaattt

SEQ ID NO: 265989 - DNA, 201 bp, Homo sapiens
ggccgaggtgggcagatcacttgaggacaggagtttgagaccagcctggccaacatggcgaaactcagtctctactcaaattacaaaaattaggcgtggtsgcaggctcctgtaatcccagctacttgggaggctaaggcaggagattcacttgaacccaagaggcggagggttgcagtgagctgagatggtaccactgca

SEQ ID NO: 265990 - DNA, 201 bp, Homo sapiens
cgcctttcctctttgtttccccaggcctacagagtcgatgaaagagccgccgagcaggctcgttgggaagcagcctccaaagaaaccatcaagaaaaccamcaagccctgtccccgctgccatgtaccagtggaaaaaaatggtgagtctgtgctgagcagagaatgaggatgtcgtgtgctctttgggggagaatcatac

SEQ ID NO: 265991 - DNA, 201 bp, Homo sapiens
ccatcccatgccatttcatatgtaaaacatgtttgtaccttcaaatctattgtataatctattagcttattcaaacctccacttatgttggatatgagaarcacctagctaaaaagaaataagaaaaaatataaataccacaaacccatctcactaaagtttgtcattatattcctccctgaaaactctgtggtaatcaca

SEQ ID NO: 265992 - DNA, 201 bp, Homo sapiens
ttgaattttatcaaaggccttttctgcatctgttgagataatcatgtggttttagcaattgcaacaaaagccagattgacaaatgggatctaattaaactraagagcttctgcacagcaaaagaaactatcatcagagtgcacaggcaacctagagaatgggagaaaatttttgcagtatacccatctgacaaagtctaat

SEQ ID NO: 265993 - DNA, 201 bp, Homo sapiens
gtagtaaatccaaagtaacattgattaagcaaattgtcatgaacacagagtagttcttatgatcatacataattccaagcttcagtgtggaagtggagagrtacagcacccgtttggtgtcccatacactggttctacctgcacattttggtcagatttaggtgagccttaaggattttactttctcacagtctttttcct

SEQ ID NO: 265994 - DNA, 201 bp, Homo sapiens
tatcatcagagtgcacaggcaacctagagaatgggagaaaatttttgcagtatacccatctgacaaagtctaatatacagaatttacaaggaacttaaacrtatttacaagaaaaaaaaacagcatcaaaaagtgggcaaaggatatgaacagacacttctcaaaagttttcacagccaacaaacatatgaaaaaaatctc

SEQ ID NO: 265995 - DNA, 201 bp, Homo sapiens
ttctcactggcctctttgctggcccctggccctgtgcccctgcctttgccctccctgtctggatggctctccccagttatctgcatgatgcatgcctcaamttttaggccttcctgaaatgtcaccttatcttgaggccttcctgatcaccctatatgaaatgatgcaccacgcactcatcaccatcctaacagattgtgt

SEQ ID NO: 265996 - DNA, 201 bp, Homo sapiens
aacttttaggccttcctgaaatgtcaccttatcttgaggccttcctgatcaccctatatgaaatgatgcaccacgcactcatcaccatcctaacagattgygtggcttactcagcctcgtgtctgtctccccacatgagggcaagggttttggcagctttatacaccattgtactgcctgagcccagaacaacctctggca

SEQ ID NO: 265997 - DNA, 201 bp, Homo sapiens
ttgaggccttcctgatcaccctatatgaaatgatgcaccacgcactcatcaccatcctaacagattgtgtggcttactcagcctcgtgtctgtctccccayatgagggcaagggttttggcagctttatacaccattgtactgcctgagcccagaacaacctctggcacctaggagggactccgtgtttgaaaaccctaag

SEQ ID NO: 265998 - DNA, 201 bp, Homo sapiens
ttatttaaattcatggccgggcatggtggcttaggaggctgaggcaggagaattgcttgaacccgtgaggcagagattgcagcgagctgagatcacaccaytgcacttcagcctgggtgacagagcaagactctatctcaaaaaataaaaaataaaaaataaaataaattcagctgggtgcagtggctcacgcctgtaatc

SEQ ID NO: 265999 - DNA, 201 bp, Homo sapiens
ggtggctcaaacctgtaatcccagcactttgagaggctgaggcaggcggatcatcaggtctagcagttcgagaccagcctggccaatatggtgacaccccbtctctattaaaaatacaaaaattagccgggcgtggtggttcgcgcctgcagtcccagctactcaggaagctgaggcagaaaaattgcttgaacccaggag

SEQ ID NO: 266000 - DNA, 201 bp, Homo sapiens
tgacctgaactcaggaacttcaaagctgatctcaaacttcttatgctctcaaatttactattttctacaaaatcatgaccagtcaacaatttacccactcttttttttttttttttgctgttttctactttttactttttatgagtgtgcagtatttttgtcattaaatttaaaaacattgtaaaataatgcttatattta

SEQ ID NO: 266001 - DNA, 201 bp, Homo sapiens
agagaaggcaagcccttgaataaatcccacaatgaacctgatgacttgtgttttcaccaacacaagtcttcctataaatattaaagcatcccacatacacrtaagtgacaagggccttgggaagggaacagttgacatggagatggacactgctggtggagagaacaggagatgggaaagaggaaacatctacaggaagct

SEQ ID NO: 266002 - DNA, 201 bp, Homo sapiens
tgtatgtaagttctgctccctgcggttaagctactgggtgttcctaagacacgccttgtcctccagccttcccaaaagcccttccccatgctccatgtggkctggtttcctgagcttcaacgcagtgtccctggggaatgcagggctctttctgccaattttctgatttgaaaatctagactcactagcagacgtttcagg

SEQ ID NO: 266003 - DNA, 201 bp, Homo sapiens
gctccccaggtgactgtgatgtgcagccagggctagaaactgctgtcatctcagccttctctgtacctagttcaggcaactggagtttgaagccagccttstaagccttctctgggagatttatgagaatcttttcgaagtaaatttttaaaagttataaaatatctaatataattgttagaaaactctttaaaaacatac

SEQ ID NO: 266004 - DNA, 201 bp, Homo sapiens
cttctaagccttctctgggagatttatgagaatcttttcgaagtaaatttttaaaagttataaaatatctaatataattgttagaaaactctttaaaaacrtacaattggtcaacaaccatctatttcttaaactttggtgtacatatatatgtatgcatatatgtatagacttacatatgttacatgtgatttggagaaa

SEQ ID NO: 266005 - DNA, 201 bp, Homo sapiens
acattaagaagaccagccagatgagagcatgaggcagccatgactaatgacagtttctgagatctttccagtaactggggccgttttacattcagagtacmtctaattcccagcagtgatttcatcagtggagatgggcagataacggggagctgcagtaacatgggaggcaacatcatttgtcaaggagtgggaagaaag

SEQ ID NO: 266006 - DNA, 201 bp, Homo sapiens
aaggcccaattatttttgctcagatttggaaattatttcttaaattacaaaagactattgcagaggctccctgaacttgtacattcttctacttaagtgtwcatacagtatgggtagatagtcaagaaatatccatttccaaaggtcagaaatagtgttgaacagtaaagtataaagagttttttaaaaatgaatgatgga

SEQ ID NO: 266007 - DNA, 201 bp, Homo sapiens
gctgagcttgagcttttctgctcaggtagcagagaccttcatcattaaggaaactcactgacagcaaggcctagccataaagaagtttgccggtatcacascatcgatgcaatgagaggagtaggtaggtaggtgagatagcacagtggaatccctacagacaagcagggaagatggctcgaaggagatgcagcaagaaac

SEQ ID NO: 266008 - DNA, 201 bp, Homo sapiens
ggaaaacctgagaaaaacctttcctttattgccaaaagcagagctgacaacatgcttctttgattcttacacctttataatgaatgtttgggtaggtcacratcccatctctactgaggatgcagcattagtggccaatgttgtgaggtgatagatgggacaagataggttagaaaggcaggatggctacttcaggcacga

SEQ ID NO: 266009 - DNA, 201 bp, Homo sapiens
tgtttgtttgtttgtttttgagacagagtctcgctctgttgctaggctggagtgcagtggcattatttcagctcactgcaagctctgcctcccgggttcaygccattctcctgcctcagcctcccgagtagctgggacaacaggcacccgccaccacgcccggctaattttttgtattttttagtagagacggggtttcac

SEQ ID NO: 266010 - DNA, 201 bp, Homo sapiens
atttctttgttctctcattcttccttccccatttactcctttcgtggctcctccagaattagggtggaggggctggagtgagctgaggagaggtaatgatsaggaacagtattcatagactgcactcttgaagaatctgctcttgatagagatgtttcgttaattctccaggagggtgtccatcacctgtacatccacaaa

SEQ ID NO: 266011 - DNA, 201 bp, Homo sapiens
tctgtcttgtaggtgtggaacacctacgtgggtaactttagttactcagtctgcagcccctcctgtagtcaaacttctgatacagtgtgacctagggcccygggtgaactagaacgggtgtttgccataaatcacattgttagcataaaactgtctagtgtggcccaaggccccaggtagaaaagcaaactcttactaggc

SEQ ID NO: 266012 - DNA, 201 bp, Homo sapiens
gagcgtgtgttgtttttatgctcataatgagatctgtacccagtttcatggaactctagtttttggccatgacattcaagatgccaattgtactgaagcctttttttttttttctttatatgaaaaacctgtttcttctttttttttttaatgggagttttttctgggctaaaggtctctaacagaaaaatagaatcatat

SEQ ID NO: 266013 - DNA, 201 bp, Homo sapiens
agtgaaactctgtctcaaaaaaaaaaaaaaagaaaaagaggctcttttaactctaatcatagatcagaagaattaatattgttaaaacgaccatcctgccraaagcagtgtacagattcaatgcaattcctatcaaaataccaacatcatttttcacagaattagaaaaaacagtcctaaaattcatatggaaccaaaaaa

SEQ ID NO: 266014 - DNA, 201 bp, Homo sapiens
tgaaggtatcaatgaatgtcttccataaaaagagatgtttcagaagggtgaaagccagtcatatttctgtaatgtaaacacattgtcctagaccctgatayactcgaatatgatccatggtcagcacttgtaaagagctgtgaaaagtgatggaggcgagatcattcataacatgtgagacagctgagagaggagccagtg

SEQ ID NO: 266015 - DNA, 201 bp, Homo sapiens
ttatagacaagccagcatataggctttgacatatataagctgtcatgaataactttgttctattaaatgactagtcacaatttaatattttaccctaggattttttcccatctggctctagtattaggctgtattttaaaggataccggttctaagaagttgccgtaactataaataaagtgacagttactcgaacagata

SEQ ID NO: 266016 - DNA, 201 bp, Homo sapiens
agcgaactaaacctcttttcttttaaattacccagcctcggatatgcctttatagcaatgcaaaaggactaagacattaacattttgttacctccatatgyaagctctcggctgttattcctcatggaccagcaatttgaagctatgaaatcataattccgtgataaaaggttaacattccatatgggctatatttttcct

SEQ ID NO: 266017 - DNA, 201 bp, Homo sapiens
gcaagcgatttacccagcttgacttcccaaagtggtaggattacaggcacgagccatcatgcctagctaggctaccttttaaatatatatcatggccaatwtttgtttattctgattatttattagttcctttttgatgtctggaagaacttattttctagccagacagactcttatatcaaatatcaaatttccagcctt

SEQ ID NO: 266018 - DNA, 201 bp, Homo sapiens
tctgtattaccttcctaaaatctgaaaagctctgaaaccttgggtttcagatacaggttaggaacccacattcatattctcatattacagagaaggaaacaaagacacaaagtggtcagagactttgctaaagttggaggtctggtggcagagctaggatttcactccccagaagctgctgcacttgccactgccacgtgc

SEQ ID NO: 266019 - DNA, 201 bp, Homo sapiens
tgtggataaatttaacaccatggtgggagagagagtaacacagctctctgtggagttgagggctcctgcagtacaagcttaggaaggacgcgtccgattcrtaccaccagtgagcccacgacatcaggagagagtcactcggcaactggaggatatcaacaactggtcgtgttttaggacattaagaaatttaactatcaa

SEQ ID NO: 266020 - DNA, 201 bp, Homo sapiens
gttgctgtagccaccacatccctaacccagacagtgcttaaaaggcttgaaaggagtcctatctgtttaataatttgtgcgctctcccttcagaatggacrttcgctataaacaggcttgcttaccctctattgcatgcaaagcagaggttcctgtgtttataatattgaatgcacacgttaatgatgggcgaagagagac

SEQ ID NO: 266021 - DNA, 201 bp, Homo sapiens
ctgtattaccttcctaaaatctgaaaagctctgaaaccttgggtttcagatacaggttaggaacccacattcatattctcatattacagagaaggaaacaaagacacaaagtggtcagagactttgctaaagttggaggtctggtggcagagctaggatttcactccccagaagctgctgcacttgccactgccacgtgcc

SEQ ID NO: 266022 - DNA, 201 bp, Homo sapiens
tctgtggggttaaaattgcagtgggaattaaattttgtgttttctagctagatttggattctatgacaataatcttgatctcatgacctgtatgtgtgtayatatatatagtatatatgttttttaatttgtttctcaaatattaaatatatatatacacacacatacagtacatataaatatatctgtattttcttcctc

SEQ ID NO: 266023 - DNA, 201 bp, Homo sapiens
atctgtatatacacacatacatgtacatagtacatataaacatatatttcttttcttcctcaaatattatttagtatatatatgcttaattaagtatataytaagtgtatatgtatctatacttaataatatttgaggaagaaaagaaaatgtgttatatgtatttaataattttgggaaaacagaaaataacattttaat

SEQ ID NO: 266024 - DNA, 201 bp, Homo sapiens
atgtgagcagaaaaacatcgaaagtaaaagaatggaaagtaataatccaggcaagtattaactcaagaatgctgttgataccattttaattgcacataaartagattttcaggagagggtggaaacattactaaaaaaggagacatgcgaggttttgaggaaaaatatgttcagcatcccaggaaaaggagacttttgagg

SEQ ID NO: 266025 - DNA, 201 bp, Homo sapiens
acagttaattgtttcaattaatatttggctgcactacagaatttcatgcagtttcttatactatgacagttcatgagtcaactctgaagtcaatacatttycttcatctcatcctctctctctctttctctgcaatttgtttaaaataatcagttttctgatgagaaaaaaaaaaaagagaaacatatcacttccattacc

SEQ ID NO: 266026 - DNA, 201 bp, Homo sapiens
atcctctgccctactttttctctcccccaggcaggactgatttatcctgcagtttaactacatactggagacatgcttttcctcgcactcagtacactacrtctcttccttgggccatcgatccaaactgcttttttacttttcttattaaatttattgattattggctggacgcggtggctcacacctgtaatcccagca

SEQ ID NO: 266027 - DNA, 201 bp, Homo sapiens
agtacaacacctctgccttcacagaacctgtactttggtagtgaaaatggacaagaaattaataagcaaatatacagaaatgagacagcacttgctacagaaaaaaaaaaaatggaagcaggtgacagaggctggggcaggtagtggtggggaagggagttcctgcggtctaggaggtggtcagggaaggcctctgtggta

SEQ ID NO: 266028 - DNA, 201 bp, Homo sapiens
ggattctacttttgtgtcaaattatgtcagataaattttcaatggtagcatactatgctcatgttctggtcataaaagtagtgttttcaggaaaacaaacrttagaaccataatttcactttctttaatattatacactatcggggcatggccagattactgtattagtttttgtgtagttcctgttgttgctgtaacgaa

SEQ ID NO: 266029 - DNA, 201 bp, Homo sapiens
gccattctcctccctcagcctcccgagtagctgggactacaggcgcccgccaccatacccggctaattttttgtatttttagtagagacggggtttcaccrtgttagccaggatggtctcgatctcctgacctcgtgatctgcccgcctcagcctcccaaaatgctgggattacaggcgtgagccaccgcgcccggccttg

SEQ ID NO: 266030 - DNA, 201 bp, Homo sapiens
gtacaacacctctgccttcacagaacctgtactttggtagtgaaaatggacaagaaattaataagcaaatatacagaaatgagacagcacttgctacagaaaaaaaaaaaatggaagcaggtgacagaggctggggcaggtagtggtggggaagggagttcctgcggtctaggaggtggtcagggaaggcctctgtggtac

SEQ ID NO: 266031 - DNA, 201 bp, Homo sapiens
ttagtttagttctttttctgcctcgatttcgccatctttaaaatggggataaaaatagtacctgccttatagggttgtcatgagtagtaaatgaattacaygcataacactgtgaagagtgttttgttcctactaagcatcatagaagtattagcttttctttttaacaattattgtaatacactttaagacagatttgaa

SEQ ID NO: 266032 - DNA, 201 bp, Homo sapiens
tttttaaaagtggttactctatgcagcaggtttagggtgtaaattacgtagatgctttgtctcttttccacctttagcttttaactttacaacaaatgcasttttgcttcattggggtctgtatttacttgtttccctaatgcagcttttctccatgaaatgctctcagtagaaacatatgctcaaagcttcagagtaatt

SEQ ID NO: 266033 - DNA, 201 bp, Homo sapiens
gtgaaattcaacatatcatgcatttttagtgtcatctacactgtgcaaggctcaaatgagtcctcaaagaggtagccactggactcctatattaagaaaakaattatatataattaattttgaacaattgtgacacagcgtatatgctctatgtgcccaggatacatttacatctcaatgccctggaatactaagtgtcac

SEQ ID NO: 266034 - DNA, 201 bp, Homo sapiens
tttccttccttggtattgatactgaagtaaagtattcgcccttttgagaaggggttattatcaacataatatcagggaacatttggcctacattgtctccmagaatagttgagatgctgatgctgcaacttcattaataggtgtggttacttacttctgtcagtaatatgtcagttaagacatatttagaaaaaatgtcct

SEQ ID NO: 266035 - DNA, 201 bp, Homo sapiens
tcaaaacagtaaagaacatagaaattgaaatcatcaaggatagagtataaggatgcttaatatgtttaaaaaataaaagattaaaaaaacaaaacaaaacrattggaaatatccagtcaaattaaacaagcacacacacacctgaaattctagaattatatataaattataataattgacacaaagtttactaaatgggct

SEQ ID NO: 266036 - DNA, 201 bp, Homo sapiens
tccatgattccctccagtagtaaacattcactagaatccacaacttccttacttctgactttgtgataactgaacactttcttttgtatttctgttactartgtcttcctctctaagtatgaaaagcttagacgacctccatcatccttaacacaactcagaagaaaaagctttctcatcatgttgcttctctaaaagatt

SEQ ID NO: 266037 - DNA, 201 bp, Homo sapiens
cagttgctttctgatttataccatacacgtgaatcaaagaatgtgactgaaatatttatgcatatgaccgtgtgtgtgtgtgtgtgtgtgtgtgtgtgtgtatgtgtgtgtgtgtgtgtgcatgtgtgttgatatgcctgtgtggtgagtttgaactggaaatcaataatcaacatgtgtcaactcattttattttctgta

SEQ ID NO: 266038 - DNA, 201 bp, Homo sapiens
tgagcttctgtgtcttagttccatctttctgttgaatatcatcacctccttgttttccagagctacctcaaattcaatctatttaaaaatgggctgggtgyggtggtttatgcctgtaatcccggcactttgggaggccgaggcgggggggatcatgaggtcaagagatcgagaccattctggccaacgttgtgaaaccct

SEQ ID NO: 266039 - DNA, 201 bp, Homo sapiens
agttgctttctgatttataccatacacgtgaatcaaagaatgtgactgaaatatttatgcatatgaccgtgtgtgtgtgtgtgtgtgtgtgtgtgtgtgtatgtgtgtgtgtgtgtgtgcatgtgtgttgatatgcctgtgtggtgagtttgaactggaaatcaataatcaacatgtgtcaactcattttattttctgtaa

SEQ ID NO: 266040 - DNA, 201 bp, Homo sapiens
aatgggctgggtgtggtggtttatgcctgtaatcccggcactttgggaggccgaggcgggggggatcatgaggtcaagagatcgagaccattctggccaaygttgtgaaaccctatctctactaaaaatacaaaaattagccaggcgtgtggtggtgcgtgcctgtaatcccagctactctggaggctgaggcaggagaat

SEQ ID NO: 266041 - DNA, 201 bp, Homo sapiens
atcgttttatataattattggccacttatacgtcttgttttgtgaatagcctgttcaaggtttttgcttatatttaactggtgtgtttatgtctgtattaytaatgtgtcctttatattagctctttataagctctgagattacttattttacaattatatgtattactaatattttcccaagtctgtggcttgcatagtc

SEQ ID NO: 266042 - DNA, 201 bp, Homo sapiens
ttttatatttccaccaatgatatatgagagcgtttgttaatctttatcctcaccgacatttagtattatcatagtggctaaaatgtgaaatcaagtgaaaktgtatcttgtgattttaacttgtattttccctgttattaatgatgttgaccatcgttttatataattattggccacttatacgtcttgttttgtgaatag

SEQ ID NO: 266043 - DNA, 201 bp, Homo sapiens
gggaacattgagtacatctctattctatgcatgtcacctgagtcactgttatatgttggtatttctgttcttccatttccatgttaggcttttgaagacawtggtggggcttcatccaaccaagttttaaaataaatatttagtctcaataaatattgaatctatgaaataaatgcagcttggaagaactgaatggtatct

SEQ ID NO: 266044 - DNA, 201 bp, Homo sapiens
tcaaagaatgtgactgaaatatttatgcatatgaccgtgtgtgtgtgtgtgtgtgtgtgtgtgtgtgtatgtgtgtgtgtgtgtgtgcatgtgtgttgatrtgcctgtgtggtgagtttgaactggaaatcaataatcaacatgtgtcaactcattttattttctgtaacttttctttgacaagctgccaatttctctcag

SEQ ID NO: 266045 - DNA, 201 bp, Homo sapiens
gtgggcctgcaagttatacccactctgccttgtgtgctcgggggatcggaagtcagagaaaattggtattttgaaaagtaattatttctcttcttttgctrtaactttaatctttcttcctggacagaacaaagcatattaatataaatttgcaattttccagtttgtaattcctctccagtaatgtgctattgacaggca

SEQ ID NO: 266046 - DNA, 201 bp, Homo sapiens
ttaaaagtttgggttttatggtcaacttctgtaattgtaaaaactcatgaacttataaataaggtcttattccctgatgtattataagtaatattttactkttgtcttccaaaagacttatttatcttcctatgtcaacatcctcatgtatgtaaaagaaaattcttgttggtttcttagatcatagaatattgctactgt

SEQ ID NO: 266047 - DNA, 201 bp, Homo sapiens
gtgcacggattggctggtgtcaatctcagaaccctatggtgatgctctcataagagctccattctgtatgggaggaaaaggaggcccagaaaaagtcattratttctccagagtcctacagtgctaacaactggtgaaatcaggctttgactcctgctggcttgatctgaagttttacattttaaacactgccgccttccg

SEQ ID NO: 266048 - DNA, 201 bp, Homo sapiens
attttctgtaacttttctttgacaagctgccaatttctctcagcagcaggagaactaaatttagtccaacctagtaaaatcagtgtaatcattttttagcyacttctggtttaaaacctagactctttttgacagtatccagttgattccagtattgtcgttattgtggacattgttcacagtttaaagcctttctctctc

SEQ ID NO: 266049 - DNA, 201 bp, Homo sapiens
ggtgtcaatctcagaaccctatggtgatgctctcataagagctccattctgtatgggaggaaaaggaggcccagaaaaagtcattgatttctccagagtcstacagtgctaacaactggtgaaatcaggctttgactcctgctggcttgatctgaagttttacattttaaacactgccgccttccgccacacttgcagtcc

SEQ ID NO: 266050 - DNA, 201 bp, Homo sapiens
gcctttctctctcggtttggcaaagcttagccccagatggagtggactgtctgcagaggggtctcttccctgttctcttcttccatgtgctgacggaggtragaggctgggtgggcccaggaacgcctctgtgacagtgcaccttggtggtgatgaggggccaggcccgtgccaatggtggtgagagcctgggtgggccca

SEQ ID NO: 266051 - DNA, 201 bp, Homo sapiens
ttctgtatgggaggaaaaggaggcccagaaaaagtcattgatttctccagagtcctacagtgctaacaactggtgaaatcaggctttgactcctgctggcktgatctgaagttttacattttaaacactgccgccttccgccacacttgcagtcctgctgtagcctttcttgacagaaagtttgaacgtatgattgagtgt

SEQ ID NO: 266052 - DNA, 201 bp, Homo sapiens
tcatcaaaatgatcaatgcttttttaaaagtttgggttttatggtcaacttctgtaattgtaaaaactcatgaacttataaataaggtcttattccctgawgtattataagtaatattttacttttgtcttccaaaagacttatttatcttcctatgtcaacatcctcatgtatgtaaaagaaaattcttgttggtttctt

SEQ ID NO: 266053 - DNA, 201 bp, Homo sapiens
tggtgatgaggggccaggcccatgctaatgacgctgagagcatgggtgggcccaggaatgcctctgtaactgggcaccttgctggtgatgaggggccaggyccatgctaatgatgctgagagcctgggtgggcccaggaatgcctctgtaactgggcaccttgctggtgatgaggggccaggcccatgctaatgacgctga

SEQ ID NO: 266054 - DNA, 201 bp, Homo sapiens
acacttgcagtcctgctgtagcctttcttgacagaaagtttgaacgtatgattgagtgttggcatgagctcaggttcctgattctgttattttccatcttmctctgtatggtttggatgttttggttttttctcttactttgatttacatttaaaaaaaatctaggctgggcgtgttggctcacgcctgtaatcccagcac

SEQ ID NO: 266055 - DNA, 201 bp, Homo sapiens
atagaacacatttggtaaagattttcatcaaaatgatcaatgcttttttaaaagtttgggttttatggtcaacttctgtaattgtaaaaactcatgaactyataaataaggtcttattccctgatgtattataagtaatattttacttttgtcttccaaaagacttatttatcttcctatgtcaacatcctcatgtatgta

SEQ ID NO: 266056 - DNA, 201 bp, Homo sapiens
ggccccactctctgtcttcactttacttcatgggcaccactgctctgccaggcccatcctccccgcagcacctcccagcactcacagtctgcagccctggygtctgcctccgtcacctgtcttcctccctgtccctcatccaacctacctcccctctctcctcctctcagcacctgcctgatttccatttattctttgact

SEQ ID NO: 266057 - DNA, 201 bp, Homo sapiens
gaggtggaacagttttatcctgaaactatcccactgggtccctggaaaaactgtcttccgtcaaacctgtgcatgttgacaatgacagacaactaaaaagrttgggggccactgctctagggcacccccttgttaagaagaactaagaacaccagcccactgacctcagcttatattcagcatccactcggccatgcaaaa

SEQ ID NO: 266058 - DNA, 201 bp, Homo sapiens
tttgaaagctcaatctgctttttgggttttgcagtacaaccggtaccagcagtatggtgcagaggagtgtgtcctgcagatggggggcgtgttatgccccygccctggctgtggagcggggctgctgccggagcctgaccagaggaaagtcacctgcgaagggggcaatggcctgggctgtggggtgagtactgcccacac

SEQ ID NO: 266059 - DNA, 201 bp, Homo sapiens
atttttttcacaattgttctaaagatgttcttttgtgttaaagattggcttaaacttgaacgtttttcttgtaaatcaggggtagttttgagatatttgcstctgtttacggtaagcaagcacacctccagcagggccaccacataattaagtcacgggacatgccgacagcctcacttacccatgaggatgcagagtggt

SEQ ID NO: 266060 - DNA, 201 bp, Homo sapiens
tggtttttttttttttttttaaatagcagttttgaccaacagcttgattccagttggtctcatcagagaataagcacttactgcaggcatctgtatcagtracactcagaccaatcagcagccaagatttgttttcaaaatgtgtagtcctacagaggggctctttaatctgccagtctgtagtcttccaaatggcaaagc

SEQ ID NO: 266061 - DNA, 201 bp, Homo sapiens
ctgctctgccaggcccatcctccccgcagcacctcccagcactcacagtctgcagccctggcgtctgcctccgtcacctgtcttcctccctgtccctcatscaacctacctcccctctctcctcctctcagcacctgcctgatttccatttattctttgactgtacaatttgacatctgattatttttaatattttaatat

SEQ ID NO: 266062 - DNA, 201 bp, Homo sapiens
gccatggctgctctggcaagcaacttacttgcaccacctaaaatcctggtatgttttatttgccttttccgggaagtggagcaaatttctgtgtaattctrgcagttcacagaaatcaagactggtatctcttcttgacaacttaagcctgatactggatggaataccaggacaattcagatattttttaaatttttttat

SEQ ID NO: 266063 - DNA, 201 bp, Homo sapiens
gtctgcctccgtcacctgtcttcctccctgtccctcatccaacctacctcccctctctcctcctctcagcacctgcctgatttccatttattctttgactrtacaatttgacatctgattatttttaatattttaatatttttgtttttatatttaatattttattttatttaatagttttatattcaatattttaatatt

SEQ ID NO: 266064 - DNA, 201 bp, Homo sapiens
aagcagtatagtgaaaagaatgttagacgggattgtagtcctgcttcttccattaactggttttctggtgttacatatagagcttgatttccttttttctstaaatagataagattatacttggttattcctagtattccttctgttgcttcaaaatgccattttatatattccagagtgtatataatgtcttcaacaatc

SEQ ID NO: 266065 - DNA, 201 bp, Homo sapiens
atccctcaatcctataatctcttacaagattggaaatttgtaagagattatggaattccagtccttggaatatttaggattctaactttgtagtgccaacygagggccaaataccagaggaatagctgcaaattagctcatgtcagttattcttaaatcgatagtgcactcctaatttaatagtctaggatgattcatgtt

SEQ ID NO: 266066 - DNA, 201 bp, Homo sapiens
aactctattgtgaactgtgcatgcgggggatctaggttgcacgctccttatgagaatctaatgcttgatgatgtgaggtggaacagttttatcctgaaacyatcccactgggtccctggaaaaactgtcttccgtcaaacctgtgcatgttgacaatgacagacaactaaaaagtttgggggccactgctctagggcaccc

SEQ ID NO: 266067 - DNA, 201 bp, Homo sapiens
gtaggcgagcgagcattacagcccgagctccacctcctgtcaaatcagtggcagcatgagattctcctaggagcaagaactctattgtgaactgtgcatgygggggatctaggttgcacgctccttatgagaatctaatgcttgatgatgtgaggtggaacagttttatcctgaaactatcccactgggtccctggaaaaa

SEQ ID NO: 266068 - DNA, 201 bp, Homo sapiens
ataacaaccctaagagataagtactaatattaaccccatcttatagatgaagaaactgaggctctaagaagttaaataatttgcctatttttactcagctstaagtggtgaatcgagattccaatccagatattcaagctccagtatccatgttctttactatgccctgtgtatgctatatttttctgttagaaaagtgag

SEQ ID NO: 266069 - DNA, 201 bp, Homo sapiens
cacctactgtgccctagggcagcggtgcccaagccctgggccagcaggggtggcctgttaggaaccaggccactcagcaggagataagcagtaggcgagcragcattacagcccgagctccacctcctgtcaaatcagtggcagcatgagattctcctaggagcaagaactctattgtgaactgtgcatgcgggggatcta

SEQ ID NO: 266070 - DNA, 201 bp, Homo sapiens
cctccaggtccctctattttacttgcactaatttttctccatcaacaaaataaacagccataaagtggcaaacgtgcatggggcagtagaagtgcagtcaygcattgctgaactgtggtgggataggttctaacaatgtgttgttaggtgattttgtcattgtgcgaacatcatagcatgtgtttagacacagctagatgc

SEQ ID NO: 266071 - DNA, 201 bp, Homo sapiens
ggttgaaccttgtctgaagtataatcttatttttcaccgactaaatccttagagtggagtgaggtgagggctttacgggagaaaggaattaaaatacgggygtctcaggtgtgacccaccctgtggtgtgcagacctgcagtggaccctgaagcacaggcgctctcagcagcggggcgtctctgcgcgtcctccttaccct

SEQ ID NO: 266072 - DNA, 201 bp, Homo sapiens
agattttcttctagggtttttatggtttgaggttttaaatttaagtaagtctttaatcaatcgaattaatttttgtataagatgtgtaaggaagggatccmgtttcagttttccgcatatgtcgagccagttttccagcaccatttactgaataggagatccttttcccattgcttgtttttgtcaggtttgttgaagatc

SEQ ID NO: 266073 - DNA, 201 bp, Homo sapiens
cattgatgtcactcaggtcactaagtagttaagttttttttttttttttaatggaactactggtttttaaaatacaacatcctttgtccatctttttggayttcccccaaatttcaatagaggaacacaaccttagtgttttctgtccagaaggcatgcacgttttctgtatggacactagggatggtgagaatgcatttg

SEQ ID NO: 266074 - DNA, 201 bp, Homo sapiens
tccaaatagattgcttcatttccttgagatctcagactacaaattcgtgttccgctacaccttccacttgaccttgttctcatagaatgatgctgtcaggkgctgtggagctgtgaacagcgatttccatccagcttctgaaaaggctcgagtgctgagctttgggaatttcatgttaacttttctacctccttcatgact

SEQ ID NO: 266075 - DNA, 201 bp, Homo sapiens
ggtttgaggttttaaatttaagtaagtctttaatcaatcgaattaatttttgtataagatgtgtaaggaagggatccagtttcagttttccgcatatgtcsagccagttttccagcaccatttactgaataggagatccttttcccattgcttgtttttgtcaggtttgttgaagatcagatggttatagatgtgtggtgt

SEQ ID NO: 266076 - DNA, 201 bp, Homo sapiens
tttccttataggtgtgcctgtggatttctatgtagagggtgacaataaggtgggtggagagaggtggggaaggagggaagtgggcagatgagaaaagactycctgagctgtgttagggaccagggagcataaactgtcctgaaataagggggaaccatgagaggggtttaaacaggggatgggcagggttttgtttttctt

SEQ ID NO: 266077 - DNA, 201 bp, Homo sapiens
gttgctataatagaataccacagtctggataatctgttaataaaataagtttattgggctcatgcttctagaagctggaaagtccaagagcatgccaccgrcatctggtgagggccttcttgctgcctcacatggttagaggacaagagcatgcatgtccattcgtatctccttctcttcctatgaaaccaccagtcctat

SEQ ID NO: 266078 - DNA, 201 bp, Homo sapiens
cgcataactctatgtttccttataggtgtgcctgtggatttctatgtagagggtgacaataaggtgggtggagagaggtggggaaggagggaagtgggcasatgagaaaagacttcctgagctgtgttagggaccagggagcataaactgtcctgaaataagggggaaccatgagaggggtttaaacaggggatgggcagg

SEQ ID NO: 266079 - DNA, 201 bp, Homo sapiens
tatgtgtggcaagtaacacaattcagtgttttctatttacattaatggtatgatatttattttggaataattttaattaaattaagaaaacaagccgggcrtggtggctcacgcctgtaatcccagcactttgggaggccagggtgggcagatcacgaggtcaggaggtcgagaccatcctggctaacacagtgaaaccct

SEQ ID NO: 266080 - DNA, 201 bp, Homo sapiens
tccccgccactccatctccccacaggaggctttccagaactaaggcctctgaactctccgggcaaaggaaaccaccaccctgcaaggctgtcgatagggargggaagggaagggaagggaagggaagggaaaccccttgtattctttgctggcggccaatagcaggaaagtgggcccagctcatcactctgtgcagtcacc

SEQ ID NO: 266081 - DNA, 201 bp, Homo sapiens
caccaccaccacacccagctaattttgtatttttagtagagatggggtttttccatgttggtcaggctggcctcgaactcccgacctcaggtgatccaccygccttggcctcccaaagtgctggtattacaagcatgagccaccgcgcccggcctcgctccctgattctaatccctactcattttcttcacctcgagcagg

SEQ ID NO: 266082 - DNA, 201 bp, Homo sapiens
gcccctgggatgccttggcagcagaacctgtatcagcaggagcagctctgggaactgcggggaagaactggagctctcaggaccccagatcctcagatcctttttttttttttttttttttttttaagagacagagtcttgctctgttgcccaggctggagtgcagtggcatgatctcagctcactgcaacctccacctcc

SEQ ID NO: 266083 - DNA, 201 bp, Homo sapiens
cccctgggatgccttggcagcagaacctgtatcagcaggagcagctctgggaactgcggggaagaactggagctctcaggaccccagatcctcagatcctttttttttttttttttttttttttaagagacagagtcttgctctgttgcccaggctggagtgcagtggcatgatctcagctcactgcaacctccacctccc

SEQ ID NO: 266084 - DNA, 201 bp, Homo sapiens
cgagagcatacagcactcccaccccagcttcccctgtcctctggcagactgctgcagtcaggtcacctggcaagcgtcactgagagccaagtctgcaaagmtgaggctcacgacacagccacaagtgagggaagctgccgttcccccattcactgtttctttctctctaacctggacctctaatttgttggctgtctgtgt

SEQ ID NO: 266085 - DNA, 201 bp, Homo sapiens
catgacacaaatgccagagctggggaccttggaagataaggactgtccccataggaattgttttcagaaatggttacagtaaagagaaagtaagaaaagargcgggggattagggaccgagagcatacagcactcccaccccagcttcccctgtcctctggcagactgctgcagtcaggtcacctggcaagcgtcactgag

SEQ ID NO: 266086 - DNA, 201 bp, Homo sapiens
gtatgagaggaacagattctagtcttcataaagcataaagggattggatgaccttgaatttgtactgaccaattatttgaaagcctttgttaaaaagcatyagatttttagtcatttgtttaagtgtggttttatatgatagtttaattatgttttcttatcaattaagtacattatatatatatttgatgtatatagatg

SEQ ID NO: 266087 - DNA, 201 bp, Homo sapiens
attgcacaacttggtcatgcccaaggcattgaaatgaagttatatatctatcaaatgtgatcctatcatgtctacctgaggttataccctggtctcttagrtttctaagtacatatttttcaagtcaacatcagtgacatatttacaaatgattttatctgatggtttatttttctgtagttttcctctaaaagagacgaa

SEQ ID NO: 266088 - DNA, 201 bp, Homo sapiens
ggatctcttctatgggacccttaagacttacacaagaatactcaattcaacccatgattgtgcattgtatcatggagtacacaattgtccttcagctcttytatgctttataaacatccaccttagctgtaagctacttgactccagcacctggattgccacaaagagacactgatcacctactatgttctagcacctgga

SEQ ID NO: 266089 - DNA, 201 bp, Homo sapiens
tcctttctataaagccccccaaataagtatatttcatcatttttcttgatagttgatacactctgcttttggaatttttcccacaatcacaaaccccattrttaaattctcagtctcattttagaacatttctgtggtgacctggccttggctgggtctttcgccttctctggaggccgtcccaatgtacgcctggctccg

SEQ ID NO: 266090 - DNA, 201 bp, Homo sapiens
gagaccaccatcggcttttagcttcatcaaactgtcagtgaaccaggccatccgtgatgggaacctctgagagccttcttgaaccagcagctctgtttccrgtagtggagtgggggatatggttcctccaaagaagtagctgccattattttcatttaatactgggtgatgctagggctggatgcactgtgcccttgaata

SEQ ID NO: 266091 - DNA, 201 bp, Homo sapiens
cattaaagcattcattagaccttatatataagaatacacttatggttgagctagtgcttgaaaataatgcaatcattccaggttaactttttgttattatwcaataattaccatgcactctgaatattttttttcttgtcttatctgccaagaatcactttctcattcaatatgggagctctgccattttcactacttgat

SEQ ID NO: 266092 - DNA, 201 bp, Homo sapiens
ttgacatggagatggacactgctggtggagagaacaggagatgggaaagaggaaacatctacaggaagctgatgtagaaatagggacaggacaagattgcrggagtcatctatttcacacattctgtctgattctgtttgcctgcaatatagggtcccagaaaggggaacatggagacagaagtacagagacagggagatc

SEQ ID NO: 266093 - DNA, 201 bp, Homo sapiens
atcatttcctgactatggattagggatactgatacctacttattggtaatatttagctaatttaggaaatgcatctgaaagtgtacagcaaaacatctggyacacattgaatgctcaaaaaagggtggcctcctttcttcatctccgaggttatttctgtcttactttgcctcacaattatagcttctatcattgatttct

SEQ ID NO: 266094 - DNA, 201 bp, Homo sapiens
gcctagccataaagaagtttgccggtatcacagcatcgatgcaatgagaggagtaggtaggtaggtgagatagcacagtggaatccctacagacaagcagrgaagatggctcgaaggagatgcagcaagaaacttcactttctctactgagttccatgtgttgtctttattttttttaaagcaggtgaccttaatacataa

SEQ ID NO: 266095 - DNA, 201 bp, Homo sapiens
tgggatcatagttcactgtaacctcaaacttcaggactcatagaatcaatctgactgcctcagccttgccaccgtgccccatcttctaggttattttactyccttttcatatcaactctttgcatttaattagtaatgtcttagcttccagacagtatcttttctgtggtgttgcgtacatgatactttaaatttacacta

SEQ ID NO: 266096 - DNA, 201 bp, Homo sapiens
tgagaaaacctttttcagaacatggaaaggttataaaatacatcctgattgtagtggtgcatatattgccaaaactcatcaaagtatacaattaaaactgrcatatttcatattatataaatgatatatagatgaagtttctttaaaaaagaaaatctgagattcaaagtttccaggaatgaaatgtgacttccataggaa

SEQ ID NO: 266097 - DNA, 201 bp, Homo sapiens
aaggacctagaaccataaatactatttaacccagcaatcccattactgggtatatacccaaaggaatataaatcattctgctataaagacatatgtacacrtatgtttattgcggcactgttcacaatagcaaagacatggaaccaacccaaatacctatcagtgatagactggataaagaaaatgcggtacgtatacacc

SEQ ID NO: 266098 - DNA, 201 bp, Homo sapiens
attgtcctttttggagatttctgtaagaactaaaaatagaactatcattcgatccagcaatcccattactggatatgtacccaaagggaaagaaattattaaaaaaaaaaagataccttcattcatatgtttattgcagatatatataagcttgcatgttctcacagatgggggctaaacatgtacacatggacatagtgg

SEQ ID NO: 266099 - DNA, 201 bp, Homo sapiens
gcctggaccttaagatatatgtgcttgtagtaggcaatagcacagagcaggtgaggaatatttgagaaagttgagaattcatttttccaataaacataacytaaatgcagcattatactaactgtaaatgcattactctcattaaacattcctgagaccttctgattgaaagaccctagaaagtaaaaaaattttctaagc

SEQ ID NO: 266100 - DNA, 201 bp, Homo sapiens
ccccaccctgcctaataaggccaccgccaggtctcccaaaccaacccctactaacctcattgtccgtgggaactgtatgtctttgcaccttgtatatcctyattactacttgtctttatagttttgctttaacctgattttaatctctgtatcttcctgctgcattttaggcattagaatttttacagaaattacattaga

SEQ ID NO: 266101 - DNA, 201 bp, Homo sapiens
tggagataaatgctactaaggagaagtatttgaagagctgctagcattctcccagatgtgtctgtgaaggtgtccttttcaacctgctcaaccacattttyctctaatgttgtacagcctctccttgagatgctaatctttgtccagggatttagttttaatctccagtacctgatttgggctggctgtgggtttatctgt

SEQ ID NO: 266102 - DNA, 201 bp, Homo sapiens
acccagcccaggaacttgaactctcctacacaagttgaatacagtagaaagattagataggcatttctaaataattggcaagtccctactttggggctgayggttttaagatcaatgaacagaccatgtggacagcaatcactcatcccatctctttactttgttgaatgtcttaggtaccgaatcttgagggttactagt

SEQ ID NO: 266103 - DNA, 201 bp, Homo sapiens
aggtaccgaatcttgagggttactagtgatagaaggaccaatgagttctacctccaggagcctcctactcttgtaggaaggacaaacaagtagataaatarttagaatgcaaattgaacactgtctcagaggtctgcataaatagctatggaatcatagggaaggaagcagttatccaagggggtcatagaagactctacg

SEQ ID NO: 266104 - DNA, 201 bp, Homo sapiens
ttatctaataaaactttcatggttctatcattttacgaaagtatattacttttcattttccatgatgaaaatataataatgtaattttttatgaaatgtayctgtgggaaatgtataatagaacagagtttggtttcatttcttttttttctgatgtagaacttcagagacagaataattttctttttggcacctaatggg

SEQ ID NO: 266105 - DNA, 201 bp, Homo sapiens
ttgaatttccttcatgtataattaattcttcagcaatttcattccacaaatacgaactgtgagcctgcatggcagtagactagtcactggaattcagacaraaaaggtctgttctctcaaggaacttacattctaaccagagagaaaaatgtcctataattaatgcatcagtgatgtagttaagatggagataaatgctac

SEQ ID NO: 266106 - DNA, 201 bp, Homo sapiens
tatttctgtaatgaaaatatgtacaaagcctttaatttttaatttctagaattaaaaacgaggttctgaggttaacattttttcctacttgagttattaaaattaattattagtagtaaacagttaatccaaacaacaaaaatacattataagttttgttgactacttgttaaacaaaaagtgaaatggtaatgggaacat

SEQ ID NO: 266107 - DNA, 201 bp, Homo sapiens
tggcctcatagaaggccacttaactcccagggtcttggctccttttccagaaacaaggaatactaacgtcttccttgggtttttattttaagaattatgtrtgtaagttgctttgtctaggcttgatcagaattagagcttatgtcttcattacaagctattaacatatttatgtatagtcacgtgtcacttaatgacaac

SEQ ID NO: 266108 - DNA, 201 bp, Homo sapiens
atttctgtaatgaaaatatgtacaaagcctttaatttttaatttctagaattaaaaacgaggttctgaggttaacattttttcctacttgagttattaaaattaattattagtagtaaacagttaatccaaacaacaaaaatacattataagttttgttgactacttgttaaacaaaaagtgaaatggtaatgggaacatc

SEQ ID NO: 266109 - DNA, 201 bp, Homo sapiens
attttttttttaagtaaatgatatggtttggctgtgtcccgaaccaaatctcatcttgaattgtagttcccataatccttatggttttatagggggatttccccccccacttcactctgcacttctccttgctgtgccgccttgtttagaaagaagtgtttgcttccccttccgccatgattgtaagtttcctgaggcctc

SEQ ID NO: 266110 - DNA, 201 bp, Homo sapiens
tttcagagtctactctgagtcttctttctgtttctctaaaccagaaaaacaacagaatattctaggtcacaaccaatgcagcagaatgaataaaagggtgractttggggtcagccaggtagtgggtcctggcccagtcatctggcctcatagaaggccacttaactcccagggtcttggctccttttccagaaacaagga

SEQ ID NO: 266111 - DNA, 201 bp, Homo sapiens
tttctgtaatgaaaatatgtacaaagcctttaatttttaatttctagaattaaaaacgaggttctgaggttaacattttttcctacttgagttattaaaattaattattagtagtaaacagttaatccaaacaacaaaaatacattataagttttgttgactacttgttaaacaaaaagtgaaatggtaatgggaacatcc

SEQ ID NO: 266112 - DNA, 201 bp, Homo sapiens
ctgcctgtatgtgtataaatggttattcattgaaattgttttataaatactaagataaaaaaggggccatgctcaacactgaggaataatacactgtaatycttaatctgttttaattactatgaagaatatttagatactgttggcaaccagttagaatactgtggctttatattttagaaggtaatttttataaacatt

SEQ ID NO: 266113 - DNA, 201 bp, Homo sapiens
ttctgtaatgaaaatatgtacaaagcctttaatttttaatttctagaattaaaaacgaggttctgaggttaacattttttcctacttgagttattaaaattaattattagtagtaaacagttaatccaaacaacaaaaatacattataagttttgttgactacttgttaaacaaaaagtgaaatggtaatgggaacatcca

SEQ ID NO: 266114 - DNA, 201 bp, Homo sapiens
ggcatctgtgaataattaagtaagagtcatgtaataaagagaaataactttattcatgatcaaacattgtcaagaaagtgaaaagcttaaacgtagatatrgctatagatagaaaatattattgccggatgcagtggctcacgcctgtaatcccatcactttgggaggctaaggcgggtgtggattgcctgaggtcaggag

SEQ ID NO: 266115 - DNA, 201 bp, Homo sapiens
gtctcgaacttctgacctcaggtgatccgcctgccttgacctcccaaagtgctgggattacaggcatgagccaccgcacctggccagcattcagtatttcttttttttttttttttttttttgagacggagtctggctgtgttgcccaggctggagtgcagtggcgcaatcttggctcactgcaagctccgcctcccaggt

SEQ ID NO: 266116 - DNA, 201 bp, Homo sapiens
tttttttttttttttttgagacggagtctggctgtgttgcccaggctggagtgcagtggcgcaatcttggctcactgcaagctccgcctcccaggttcacrccattctcctgcctcagcctcccgagtagctgggactacaggcgcccgccactatgccgggctaattttttgtatttttagtagagacagggtttcactg

SEQ ID NO: 266117 - DNA, 201 bp, Homo sapiens
cgcaatcttggctcactgcaagctccgcctcccaggttcacaccattctcctgcctcagcctcccgagtagctgggactacaggcgcccgccactatgccrggctaattttttgtatttttagtagagacagggtttcactgtgttagccaggatggtcttgatctcctgacctcgtgatccacccgcctcggccccccaa

SEQ ID NO: 266118 - DNA, 201 bp, Homo sapiens
tatcattctgctgtggtttcactgttctctccaaaactcatgttgaacttcaattgtcagtgtaatagtgttaagaggtgggacctttaggcagtgattargtcctaaggactctaccctcatggatggattaatgccctgtgtttcataacatagttacaataataatcgtacagtgaacagccttggaagatagagata

SEQ ID NO: 266119 - DNA, 201 bp, Homo sapiens
gagtgttgtggtgcatatcagtagtcccagctaccagggaggctgaggtgggaggattgcttgaactggagaggtggaggctgcagtgagctatgatcacrccactgcactcccacatggtggaccagagtaaaaccctgtctcaaaaatataagtaagtaggccaggagtagtggctcacgcctgtaatcccagcacttt

SEQ ID NO: 266120 - DNA, 201 bp, Homo sapiens
atttcacttgtatgtggaatctaaaaatgctgaaatcatagaagcagaggctggagtggaaggaaatagggagatgttggtcaaagggtacaaagttctagctagctagacagaaggaataattgcatgggatgctgatcatagttaataatgtattatatggccaggcatggtgactcatgcctgtaatcccagcactgt

SEQ ID NO: 266121 - DNA, 201 bp, Homo sapiens
aatttttaaaaattatatgaacagttatcctcattttttcttatgatatcccaatgacttaattcagagaatgttgttctacaggagggctcagacattcyttttttttttttttgagacagagtctcgctctgtcacccaggctggagtgcagtggtgcaatcttggcccactgcaagctccgcctcccgggttcacgcc

SEQ ID NO: 266122 - DNA, 201 bp, Homo sapiens
ttatgccttgtcctttcatcatcatcctggaagaacttatgctgttgatgtgtatgcttcagtttaaggcaacgttttggtttggttttgttttttgctgtttttttttttttttttttgagatggagtttcactcttgttgctcaggctggagtgcaatggcgcgatctcggctcactgcatctggtccctaggaccaaa

SEQ ID NO: 266123 - DNA, 201 bp, Homo sapiens
tggcgcgatctcagctcactgcaagctccgcctcccgggttcacgccattctcctgcctcagcctcccgagtagctgggactacaggcgcccgccaccacrcccagctaatttttttttttttcgtatttttagtagagacggggtttcaccgtgttagccaggatgatctcgatctcctgaccttatgatacgcccgcct

SEQ ID NO: 266124 - DNA, 201 bp, Homo sapiens
ttctgaccacccacacatgttttgcatgatttttctactgagacttccactccataaccagcatgcctccctatgttcttaacttcctctcttattcttarctggatcctggctcacatctgaggtttcccatttcctggaagtgtcccttcaagtcatgaatgtttacattctcatccaactaacccagggccaagaatt

SEQ ID NO: 266125 - DNA, 201 bp, Homo sapiens
ggagtaagagaagccttaaacaaatattacatactttatacttttatacatatgaatttctaaaacaaaacccatttaccgtggtttgaatgtgtccccchaaagttcatgttttggaaaccaaatccccaaattcatatattgactgtaggtgggacctttgggagggtaattaggattagataaggtcatcggggtggg

SEQ ID NO: 266126 - DNA, 201 bp, Homo sapiens
tcattacacattcaatgcacgtaacaacatatcacatgggcaccataaatatgtacaactattatgtatccgtgaaaaattttttaaatttaatttaaaamaattaagaagaggatactcagcacttagcaaagcagaacacgacatgtggccagtttagatgatactaacaaaaatgtacctataaagaaaaacaaagtt

SEQ ID NO: 266127 - DNA, 201 bp, Homo sapiens
aatgttgctgttatgagtatctgggaaggcttagagccacattcattattattcggttacaccatgaaaagatgtgttttgaatgcgttgcaaataatctgaaacacagaaaaaacacatattaaattttaaaagttaaatttaaagttaaatgtttaaaaagggaagacaaaaaaaaagtgtacttatgagtacagctgt

SEQ ID NO: 266128 - DNA, 201 bp, Homo sapiens
tattaactaatctcttggtcaccagtctccctcgcctccaactccagttaccttccttaaataaagaaaaagaaattgatcctaccagtctcctgtttacragccactgataactcctcattacctataaaataaactccaaagtaggcagcgtagagctcttcacaatctggggaaataatttctatacaaaatcatttc

SEQ ID NO: 266129 - DNA, 201 bp, Homo sapiens
gcactttgggaggctgaggcaggtggatcacgaggtcaggagatcgagaccatcctggctaacacggtgaaacccagtctctactaaaaatacaaaaaatkacccgggcgtggtggcgggcgcctgtagtcccagctactcgggaggctgaggcaagagaatggtgtgaacctgggaggtggaggttgcagtgagccgaga

SEQ ID NO: 266130 - DNA, 201 bp, Homo sapiens
agtactgatatttataccacttaatctttacaacctctagtgacactattgtggtccccatgttacccaggaggaaactgaagcaccaagaggtcagatcrcttgtccaaggttagagtgaggatatgagtccaggaagcttatgcacttggacgacatggccgcccagccttttgcactgcgcttgcttttatttcccca

SEQ ID NO: 266131 - DNA, 201 bp, Homo sapiens
cttgttttctctcttagaaaagctcaagcctcacacaggttattttcccctggtacttgatggtctacacagtttcatttcatcatgtcatacttagggartgacccatctttcaatgtgtcttaaagggctaacctaggaattattagccacgtgccatacatcaacaaggtacactttgatagactttttattgcttaa

SEQ ID NO: 266132 - DNA, 201 bp, Homo sapiens
ttttttaaccttcaggtaaatttgaaactacataataaatgcttttcagtacaaggacaccacaatgaaataacattaaaagttgcattttaaaaccatarcaagagattgtgagctgtgtgactcccgttgattagcaggggctggcggaggtgtctgagaaagccgtgtttctgctgccctattctctacctgctctct

SEQ ID NO: 266133 - DNA, 201 bp, Homo sapiens
tgaaaccccagctttacaagaaatataaaaattagctgggtgtggttttgcacgtgtagtacgaagctgagaggtgggagaatcacctgagcctgggaggkcagggctgcagtgggccgtgattgcaccattgcactccagcctgggcaatggagtgagaccctgtctccaaagaataataataaattaacaatttaaaaa

SEQ ID NO: 266134 - DNA, 201 bp, Homo sapiens
aaatggttattcattgaaattgttttataaatactaagataaaaaaggggccatgctcaacactgaggaataatacactgtaattcttaatctgttttaaytactatgaagaatatttagatactgttggcaaccagttagaatactgtggctttatattttagaaggtaatttttataaacatttcctctgctattctca

SEQ ID NO: 266135 - DNA, 201 bp, Homo sapiens
gttttataaatactaagataaaaaaggggccatgctcaacactgaggaataatacactgtaattcttaatctgttttaattactatgaagaatatttagawactgttggcaaccagttagaatactgtggctttatattttagaaggtaatttttataaacatttcctctgctattctcacagtagcactgtgaagtagat

SEQ ID NO: 266136 - DNA, 201 bp, Homo sapiens
ataaggaactaattgaacatatttaaaggaatttatatatgaaatgatagagactatggtactgagaaattggaaacaattgttaactgatacaacacttrtgacacaacctgttaatgaggcacagtgcagcagttaagaacacactgaaagtatgtacataatgagctgagaagatcgctatgacatatcagtcagctg

SEQ ID NO: 266137 - DNA, 201 bp, Homo sapiens
gctaaatactaattagcgagttccttttcggccattgttaaataacattacatttctacttcatttgacttaacatttcaacagctggtattccacacttsagcaaatgcctcctctgtctctagaggggcaggcttcctcaacctcacaaaacctattcatctttaaatgtcctttcacataaatcatctccgccctcat

SEQ ID NO: 266138 - DNA, 201 bp, Homo sapiens
gcccaggcattgtgacgtagtgttaggtcagaaggaggattatctgcctcaggtgattctggatcatccagccgtgagcatgttcaagtttcaatgtcagragcagacaatgtcaatgaacaatggcaggctgcagaaacagggtggatacgctggacaaagatgattcccatcataggcaggacagagcaaggtggcgtg

SEQ ID NO: 266139 - DNA, 201 bp, Homo sapiens
ctcttccaagactagtggggtcaaagtagttatatgagcctctcaggatgcagtttcctcctatgttaaagtaagtgtgtgtgagagagaggagacagagaaaagagagtcatgcctaactcagcacataggcactcaataaacattgggttctccacaccaattcacagaaacagaagacacctgtaggcatcacttact

SEQ ID NO: 266140 - DNA, 201 bp, Homo sapiens
ttgccatgtggaggaccccattcatagcatatgcttttagctctgatgagaacagtgctgttcttcagatcctacaagtctgcaagattggctgataaatgtttttttttttttaaggaaccaacagctctttgggtaataggcatcattacatgacataattatctcacaaacatgtctaattattctattgttttcaag

SEQ ID NO: 266141 - DNA, 201 bp, Homo sapiens
ttgcctgttttttattgggtagcttaatttcttattattgagttttgaaaagtatttatagagtctagatgcaagttcttcatcagatttataattttcaratatgttctcttagtctgtgcatgcttgtctttgcattccctaaacatgtctttcaaagagcagaagttttaaattttgataaagtccaatttatacaat

SEQ ID NO: 266142 - DNA, 201 bp, Homo sapiens
ctttttaaaaaatactttttaaactcttcatgtgatttcttctgtgtagaccctgcacaaaagttcttcttatgctaactttatactatccttaacttttyccctaaatatctaatgtagtctctttagaataatatacaacagccagggttggaaacagttcaaggggtaaacgtctctatctgaacaaactcttcctgt

SEQ ID NO: 266143 - DNA, 201 bp, Homo sapiens
tctttagccaaatttgtgtttcccttgactctttttttttttttcttaactgaaagtttctgagcactgagccagtgtcaagatttacagaatgtggcttwtatgatggacttcaaaagtggctccttagaattggatgaaggcaagtttttctgggcattgagattaatagtcaacattttaattctttgagaccattct

SEQ ID NO: 266144 - DNA, 201 bp, Homo sapiens
agtggaaaaatgaaagagtttttattattacaaaagtaatacatactcattagacaatgtcagtaaattgtaccaaaaaaaaaaaaaaaaggaaaacctasaaaacaaacataatcccacgtggctggacatgggatttttgactcattgctgtagagctttctagatacgttttacatgtatacgcaaacccacatgtcc

SEQ ID NO: 266145 - DNA, 201 bp, Homo sapiens
aagtggctccttagaattggatgaaggcaagtttttctgggcattgagattaatagtcaacattttaattctttgagaccattctgttctgttcttttccrcttgatggactttactatgaatgttctgagatcacttttataaaactatgatattatgcttgctgtctctgacgctgaaattcagtgttagttctgtctg

SEQ ID NO: 266146 - DNA, 201 bp, Homo sapiens
tttttgactcattgctgtagagctttctagatacgttttacatgtatacgcaaacccacatgtccgcaattttaacagagacgagtttatgctgatgggctttttttttttttttttttaccagtttttcacccttaattgtgtgtcacaaacatctttgcatttctctaacgccatgtttaatgatgaccatttgtcagg

SEQ ID NO: 266147 - DNA, 201 bp, Homo sapiens
ttttgactcattgctgtagagctttctagatacgttttacatgtatacgcaaacccacatgtccgcaattttaacagagacgagtttatgctgatgggctttttttttttttttttttaccagtttttcacccttaattgtgtgtcacaaacatctttgcatttctctaacgccatgtttaatgatgaccatttgtcaggg

SEQ ID NO: 266148 - DNA, 201 bp, Homo sapiens
tttgactcattgctgtagagctttctagatacgttttacatgtatacgcaaacccacatgtccgcaattttaacagagacgagtttatgctgatgggctttttttttttttttttttaccagtttttcacccttaattgtgtgtcacaaacatctttgcatttctctaacgccatgtttaatgatgaccatttgtcagggt

SEQ ID NO: 266149 - DNA, 201 bp, Homo sapiens
agcctgcctggctgtgagcactcatggaccctcagtttcccttccctttctcctggaagctggcccaaaatgctgattatggtggacccaaatttatttayttatttatttatttatttatttatttatttatttttaatttttattttattttattttttagacagggtcttgctttgtcacccaggctggagtggggtg

SEQ ID NO: 266150 - DNA, 201 bp, Homo sapiens
aatacataagagttggatttaatatctttctctagctaaatatgtcatagtagaatcttaaaatgaaactaagctgcaaaatgaaattcagctcatagcartggtctgctgtgtattgtcataggccttgaaacttcattttcattctatataaactgatagacctacttaaatggttgaattagttgacacgacacatct

SEQ ID NO: 266151 - DNA, 201 bp, Homo sapiens
gcctgcctggctgtgagcactcatggaccctcagtttcccttccctttctcctggaagctggcccaaaatgctgattatggtggacccaaatttatttatttatttatttatttatttatttatttatttatttttaatttttattttattttattttttagacagggtcttgctttgtcacccaggctggagtggggtgc

SEQ ID NO: 266152 - DNA, 201 bp, Homo sapiens
cctgcctggctgtgagcactcatggaccctcagtttcccttccctttctcctggaagctggcccaaaatgctgattatggtggacccaaatttatttatttatttatttatttatttatttatttatttatttttaatttttattttattttattttttagacagggtcttgctttgtcacccaggctggagtggggtgca

SEQ ID NO: 266153 - DNA, 201 bp, Homo sapiens
attcttacacacattatcaaatgcaagcttttgattgtgtcctaagaatttgaggccgggcgcagtggctcacgcctgtaatcccagcactttgggaggcyaaggcgggcggatcacgaggtcaggagatcgagaccatccaggctaacatggtgaaaccccgtctctactaaaaacacaaaaaattagccgagcatggtg

SEQ ID NO: 266154 - DNA, 201 bp, Homo sapiens
cgaggcaggagaacagcgtgaacccaggaggctgagcttgcagtgagctgagatcgcgccactgcactccagcctgggtgacacaacgaggctctgtctcaaaaaaaaaaaaaaaaatgcaaatatgtttccatatttgcattatcagcctttagtcttgcttaaaatagtcatgatgtaggccatgaaatggcaaaattt

SEQ ID NO: 266155 - DNA, 201 bp, Homo sapiens
ctttttaggggcaaggcaggaattctaatttttctgaatgtacagagtgttcctctcagcaattgactttgtttattgactaatgacagattttccctcaygttggttaagaataactttaaaggtatatcagataatgttttgtgtacagtgttctatgttctctgtccaggcatatgtaaatatagtcagtgttttttt

SEQ ID NO: 266156 - DNA, 201 bp, Homo sapiens
gttactttcaaagcaccatctgataccatggttccttgtcaccgaaagtccagtgtcttgtgtcatatgaactccaaactcttcagcccacttcacatctrtgggactggatcttaaaaggagttgtattatactgagaaaataatctaaaataatgataacgttcatgataggtcatgtttaatcaattcagcaaactct

SEQ ID NO: 266157 - DNA, 201 bp, Homo sapiens
cctctgatactcctgccttctgagagtctttcactacctgggaatgtaagtctcaggtcctacagtgttgagtgaaggtcaaagtcatgggttacataacrgcacccatggaacatctggtaacatcctgcatggccccagtacttatgagtgggatgccagtgaggggaggatcataggacatgagttcgaggtcaagat

SEQ ID NO: 266158 - DNA, 201 bp, Homo sapiens
tgatctcaaacccctggtctcgagtaatccttctctcttggcttcccaaagtgctgggattataggtgagccactgtgcctggcccatttttgccaattawattttattttattttattttatttatttattttgagacagagtcttgctctgttgcctaggctggagtgccatggtgtgatctccgcttactgcaccccc

SEQ ID NO: 266159 - DNA, 201 bp, Homo sapiens
agaacacagtaggtagttctgtttctaccagaagacatcgctttctccaagactgacagaagatgaagatagatgcagatccaggtgcatggcctggaatytgagggacgtcgagcctcattttctccatggcatagaagaggccttctgaaggaggagaggagacctagtagccattaccaagaacactgatgagtttga

SEQ ID NO: 266160 - DNA, 201 bp, Homo sapiens
cactatgttggctaggctggccttgaactcctgacctcaggtgatccacctgcctcagcctcctaaagtactagcattataggcatgagccactgtgcccrgccatgagatattttgatacaggcatgcaatgtgaaataatcacaacatggaaaatggagtatccatcccctcaagcatttatcctttgagttacaaaca

SEQ ID NO: 266161 - DNA, 201 bp, Homo sapiens
agctccttgtatattctgattattaatcccctggcagggtttgcaaatatgttctcccattattttggttgtctcttcactttgttgattgtatccttttwctgtgcagaagcctttttttcagggctagctgaggttttattttggggggaaaaaaataaaagcaattgagttgttttgtagctgaaggcatgggcaagg

SEQ ID NO: 266162 - DNA, 201 bp, Homo sapiens
ggttgtctcttcactttgttgattgtatcctttttctgtgcagaagcctttttttcagggctagctgaggttttattttggggggaaaaaaataaaagcarttgagttgttttgtagctgaaggcatgggcaaggtggtccccaggcagtaaactcccccgtgggtgggctgagggctagggctgagcctcaggtgggtct

SEQ ID NO: 266163 - DNA, 201 bp, Homo sapiens
gctctagctaggacttccagtactatgttgaataacagtggtgacatcaggcatccttgtcatgttcccgatcttagaagaaaggctttcagtttttcccmatgtagtatgatactacctgtgggtctgtcatttatggcttttaataaaagccatatgttgagatgtgttccttttatccccagtattttgagaattttt

SEQ ID NO: 266164 - DNA, 201 bp, Homo sapiens
aaaccccagctttacaagaaatataaaaattagctgggtgtggttttgcacgtgtagtacgaagctgagaggtgggagaatcacctgagcctgggaggtcrgggctgcagtgggccgtgattgcaccattgcactccagcctgggcaatggagtgagaccctgtctccaaagaataataataaattaacaatttaaaaata

SEQ ID NO: 266165 - DNA, 201 bp, Homo sapiens
ctctagctaggacttccagtactatgttgaataacagtggtgacatcaggcatccttgtcatgttcccgatcttagaagaaaggctttcagtttttccccrtgtagtatgatactacctgtgggtctgtcatttatggcttttaataaaagccatatgttgagatgtgttccttttatccccagtattttgagaattttta

SEQ ID NO: 266166 - DNA, 201 bp, Homo sapiens
gtgggagaatcacctgagcctgggaggtcagggctgcagtgggccgtgattgcaccattgcactccagcctgggcaatggagtgagaccctgtctccaaaraataataataaattaacaatttaaaaataaatagtgaatcatatgttttacagcttagcgatttaaccgatgacatctcattcatttgacaaccttgtgg

SEQ ID NO: 266167 - DNA, 201 bp, Homo sapiens
ggcaacatataaatgagtcttgtttttttcatccattcacccagtctgtgtctttttgttgcagagtttagtccctttacattcattatatgtatgtatgdatgtatgtatgtatgtatgtatgtatgtatttattttgagactgagtttcactcttgtcacccaggctggagtgcaatggcacgatctcagctcactgca

SEQ ID NO: 266168 - DNA, 201 bp, Homo sapiens
gggtcagagtggtcttggtggagggagttcctcagggtcacagagctagaaaggggcagagctaggactaagcaggactaactggcgcttggagcccaggygtgggctggggcctcccactcaggtgtcatccttgatcgaagtagttgacattttatttctcactttgctcatcttcctgtctttggagagtaggaaagc

SEQ ID NO: 266169 - DNA, 201 bp, Homo sapiens
atttgcccttgacttacttgattatttaaattagttttcacttgattagctttttgtaattaaaatagcaatatggcaaaatatcagatatgtgctgactragaactgtgtagatgcagaagaaagtattaagagaatggtaagccactgccagggattaaccaaatgctgcattttgttcatctcctaatgggaagtaat

SEQ ID NO: 266170 - DNA, 201 bp, Homo sapiens
ggtaacaaagccttgtgtgcgggagcagaggaagattctgccctcaagaaatcatttgtaccctcatgctctggagacagcatataaatcaggagcagaawcagagaaggcccccaaactcagacattttaaattcacatcagaaacattttgccactatcttcttaggatacatatgtccattacagattagcccacact

SEQ ID NO: 266171 - DNA, 201 bp, Homo sapiens
  misc_feature (1)...(201): n = A,T,C or G
agaggaagattctgccctcaagaaatcatttgtaccctcatgctctggagacagcatataaatcaggagcagaaacagagaaggcccccaaactcagacantttaaattcacatcagaaacattttgccactatcttcttaggatacatatgtccattacagattagcccacacttaagttattgctgtgaccgatccttt

SEQ ID NO: 266172 - DNA, 201 bp, Homo sapiens
ctcagacattttaaattcacatcagaaacattttgccactatcttcttaggatacatatgtccattacagattagcccacacttaagttattgctgtgacygatccttttcactgttgttgtccgtcaggtatttttaaaatatccatctgtttctgtatttactcacatatttattttcttaaaaagacacggcgatggt

SEQ ID NO: 266173 - DNA, 201 bp, Homo sapiens
aatctccatgacttaatcttgatagtttagttttctcactggtgacagaatggtccccatgttctaaagtcttttttttttcaagctcttaggcgtggaarcccaaacgctggtgaattcagaagtcatcagcctttgcagagctgaatcacgagggtcaaactcatcagataactctgtttaaaaggtggaatactggtt

SEQ ID NO: 266174 - DNA, 201 bp, Homo sapiens
cttttctcctgggcaatctcattataccctgtgctatttattacctaatatgtgcaatgctttattgcatttaattatttgcattcttattttcttcaaawgtatcttgtttgcccttgatgttcagttcatatggctgctcatatcagcatgaattgtattcacctgctaggaacaaagtccaaaaattccagtgatttt

SEQ ID NO: 266175 - DNA, 201 bp, Homo sapiens
ttttaacttctataatctagctgttttttcctcagtgtaaacactctacaggggaaaatttgtttctcagatgttgtaaaaatagttttggacttactgtrtatatttactctataatttaagaagtaggccattatatatcatttcaaataatatttataaaacattataaataaccttatgcagttctgtgaatcagtc

SEQ ID NO: 266176 - DNA, 201 bp, Homo sapiens
gaggaagggacttcaaaatgttcatggaaacgaaattaaaagattattttaaaaaagagcttaaggaaaaaaaaaaaaatatatatatatatatattcccygtaatgccgggacatcaaaaagtatgagaggaacagattctagtcttcataaagcataaagggattggatgaccttgaatttgtactgaccaattatttg

SEQ ID NO: 266177 - DNA, 201 bp, Homo sapiens
acacaccacagttacactgttataatattctaggttttcctgtgtacttactattaccagtgagttttgtaccttcaggtgattatttattgctcattaatttttttttttttttttctgattgaagtactccttttagcatttcctgtaggacaggtctgctattggtgaaattctccagcttttgtttgtctgggaaag

SEQ ID NO: 266178 - DNA, 201 bp, Homo sapiens
tctcttgctttctctttttttgtttttttttttttgttttttgttttttaagatggagtctcgctctgtcgccgaagctggagtgcagtggcgcgatctcrgctcactgcaagctccgcctcctgggttcacgccattctcctgcctcagcctcccgagtagctgggactacaggcgcccaccactacgtctggctaattt

SEQ ID NO: 266179 - DNA, 201 bp, Homo sapiens
cctcctgggttcacgccattctcctgcctcagcctcccgagtagctgggactacaggcgcccaccactacgtctggctaatttttttgtattccttagtaragacagggtttcactgctttagccaagatggtcttgatctcctgacttcatgatccgcccgcctcggcctcccagagtgctgggattacaggcgtgagcc

SEQ ID NO: 266180 - DNA, 201 bp, Homo sapiens
tttacaaatagtcgtagttttcattctctctatagtgaatttcctggtaacacaaaaatgtttgagtttcaaaatgttcatacaacttaccaattgcctttttttttttttttttttgagacggaatcttgctctgtcgcccaggcaggagtgcagtggcacgatcttggctcactacaagctccgcctcctgggttcacg

SEQ ID NO: 266181 - DNA, 201 bp, Homo sapiens
caggcagatcacctgaaatcgggagttcaagaccagcctgaccaacatggagaaaccccatctctactaaaaatacaaaattagccaggtgtggtggcgcrtgcctgtaatcccagctacctgggaggctgaggcaggagaatcgcttgaacccaggaggcggaggttgcagtgagccgagatggcgccattgcactccag

SEQ ID NO: 266182 - DNA, 201 bp, Homo sapiens
agatcacctgaaatcgggagttcaagaccagcctgaccaacatggagaaaccccatctctactaaaaatacaaaattagccaggtgtggtggcgcatgccwgtaatcccagctacctgggaggctgaggcaggagaatcgcttgaacccaggaggcggaggttgcagtgagccgagatggcgccattgcactccagcctgg

SEQ ID NO: 266183 - DNA, 201 bp, Homo sapiens
accccatctctactaaaaatacaaaattagccaggtgtggtggcgcatgcctgtaatcccagctacctgggaggctgaggcaggagaatcgcttgaacccrggaggcggaggttgcagtgagccgagatggcgccattgcactccagcctgggcaagaagagcgaaactccgtctcagaaaaaaaaaaaaaaaaagggaaa

SEQ ID NO: 266184 - DNA, 201 bp, Homo sapiens
ttttaacctccattttgaagaatcagtgatatttcacatggaaaagtgtacatggggccagtatacatcacatagttttgacttcagtcttataaccttgrgagagtttggaacacaagaattctttttagaggacacaaaaaccttcataaaatgattatactgtctgcttaaaagagaagttctactaaaaatttggaa

SEQ ID NO: 266185 - DNA, 201 bp, Homo sapiens
ataacatgaatgccactttctttgagattcctgataatatacttgttagtaaagatgatggcataatagtcaccataaagaaaagtgattttttttatcakcaaatcaccaaataaaacctttgtcataaggagcagccatctaaagagtatatttaaaaggagagatatagatacttgtgtgtagatattaatatatagg

SEQ ID NO: 266186 - DNA, 201 bp, Homo sapiens
taaagaagttctgaaactaaatggtaaaaagcaagtttctcattcatctaatgatccaaatttacaaggatttggtaaaattattgttttaattaagatayaattttaatttaattgtattttatgatagtcagagttaatagggaaaagagaatacagaagtcaaatatgaggtcaaagtttttacttcttcctgatttc

SEQ ID NO: 266187 - DNA, 201 bp, Homo sapiens
ttccaaactcaaacgcaagatctaataggtcttcacaaagcctcttgacaaaaccaggcaaggtactaaccgccagctgagccccccaaagaatggatgtstagctacccgacctttgctcttacctctcaatgagcaggcccctggccttgatggtgagcaaacaggacatgatgaataagtcagagcctgtggtcacca

SEQ ID NO: 266188 - DNA, 201 bp, Homo sapiens
gaggctgaggcataagaattacttgaacctgggaagtggaggttgtagtgagatcatgccactgcattccagcctgggagacagagcaagactctatctcaaaaaaacaaacaaacagaaaacagaaaacaaaaaaacaccaccatcattcagtgccttttatggtcaacgcctgaagagctggtgctgattacagattgg

SEQ ID NO: 266189 - DNA, 201 bp, Homo sapiens
catctatatgctaatgactcccaaatttatatctccagctcggctctcctctcagcactcccgtctcatttatccaaattacttacctgacaactccacgyggatgtttctcaaacatctgaaatgtaatatgttcaaaactaaactcttgctttttttcatggaaacttatttctccatgaatcttctccatctcagtga

SEQ ID NO: 266190 - DNA, 201 bp, Homo sapiens
  misc_feature (1)...(201): n = A,T,C or G
gcctcaagttacacatgtcattgccacccacatttcattggccaaacaaggcatttgacgacatctaactgggttaggacagcacacccttcccacaagcnctcagggagaagggagctgaagaccctgtgagcagtgtgaatggctggcacggcggggtcatgtggtgtgttgggaggaggcttgaattccaaaccagag

SEQ ID NO: 266191 - DNA, 201 bp, Homo sapiens
tctgccatctgcaagctggaaaaccaggaaagcctttggtctaactcagtctgtgtctgaaggcctgacaactaggggcagcaggtttgggagtcgtgtaygtcttgcagtcagaaggcctgagaaccaggaaatctgatctttaaggctctagaagagaaagagcattcaccgttctctgccttcttgttctgtgcaggc

SEQ ID NO: 266192 - DNA, 201 bp, Homo sapiens
aggacgtttactgggggaagggctcacacaattatggcggccaagcagtcccgcaatctgccatctgcaagctggaaaaccaggaaagcctttggtctaaytcagtctgtgtctgaaggcctgacaactaggggcagcaggtttgggagtcgtgtatgtcttgcagtcagaaggcctgagaaccaggaaatctgatcttta

SEQ ID NO: 266193 - DNA, 201 bp, Homo sapiens
aggctgaggcataagaattacttgaacctgggaagtggaggttgtagtgagatcatgccactgcattccagcctgggagacagagcaagactctatctcaaaaaaacaaacaaacagaaaacagaaaacaaaaaaacaccaccatcattcagtgccttttatggtcaacgcctgaagagctggtgctgattacagattggg

SEQ ID NO: 266194 - DNA, 201 bp, Homo sapiens
agaaacaggacctttctgtctataggatctataaagagaaagagacaagaggacgtttactgggggaagggctcacacaattatggcggccaagcagtccygcaatctgccatctgcaagctggaaaaccaggaaagcctttggtctaactcagtctgtgtctgaaggcctgacaactaggggcagcaggtttgggagtcg

SEQ ID NO: 266195 - DNA, 201 bp, Homo sapiens
atcatagtgaaaatgcctaagtggctaaagaatagtatttctcaagctatattttccagtgagattacttggtcttcttggtaaaatgcagaccctctgcycccaccctcagggacttattcaggaggaacatacaggttgacagcacctggcccatacttgaagaaaccatattagagacttaaagacatggtccgtggt

SEQ ID NO: 266196 - DNA, 201 bp, Homo sapiens
ataagaaatgaacacttacttttacgttagccaaccctgccctttatactgttgtattttctcttttccacacagtgctaatgaccatccaaaatgttacwtcatttacctacttattagtttatttttattgtctctcgcccctttagaatgcaagctccaatgagggatttttgtctgttttaatttttcacggctgcg

SEQ ID NO: 266197 - DNA, 201 bp, Homo sapiens
gctcatcagagtccgcatttctatttgtgatatcatacagtgtcatgtgacatcatgtgataccatgcaaggcatcagtgagtaactgcatctctcgcaaygccacttcccccatcttcacccccctcaccaaacacttctccaaggctaagatttcattgtagagaactattgattctcttctatatcactcctactttt

SEQ ID NO: 266198 - DNA, 201 bp, Homo sapiens
tgctaccatgccaggctaattttttgtatttttagtagagatggggtttcaccatgttggccaggctggtctcaaagtcctgacttcaggtgatccacccrcctcgtccacccaaactgctgggattataggcatgagccaccgcacccggcctatcccatgtctttaaaacaaaataacatattactttttaaaattctg

SEQ ID NO: 266199 - DNA, 201 bp, Homo sapiens
gtgttacttccaggaaccccatttccatggactgatggaatctgcccctgattctgctgtcggaggcgaaccagaccctatagaaggaggaggtgattttytgagccaaaatcaaagcgcgggtgggagttctgccaatattttctttagattagtttcatgctttctactctgggagcttagggcagtttatagtctgag

SEQ ID NO: 266200 - DNA, 201 bp, Homo sapiens
gaaaccctattctgtctcttaaatgaaggagagaaggatacatttggataccctaatatttataggtttaagagccatgagttaggaggttcctgggtgayagctcatggttttgaatatacgggtatagaattgttttacttccaaattggcaataatacataatgtttatgagagcatcttcttggtttaggactaaag

SEQ ID NO: 266201 - DNA, 201 bp, Homo sapiens
gtgaaaccccatctctactaaaactacaaaacaattagccaggcgaggtggcaggcgcctgtagtcccagctgcttgggaggctgaggcaggagaatggcktgaacctgggaggcggagcttgcagtgagcctagatcgcgccactgcactccagcctaggcgacagagcgagactctgtctcaaaaataataataataat

SEQ ID NO: 266202 - DNA, 201 bp, Homo sapiens
aggtatattaatgatgatgaagtacttaatataaagctacccagtaaattctgataaaatctgatcaggaatttttgctcttgagaatttttgtagcctgyggtttcacattcattaggatcataaaaccctttgatcagtccctatatgatgttatcctttagatgattctcaaaatgttggttgagtgtacattttaaa

SEQ ID NO: 266203 - DNA, 201 bp, Homo sapiens
gacaacttttcttatcaggatacttgtagtataaatgcactactgaaaagataatgtggacttgctttctctcctatagtaaggtgtgagattgtacagtyggctggtgctatggcttacagatgctgtctacgtttggcctctttcccatctctctcactttttgccacatactatgatctagatgttgttcttctacca

SEQ ID NO: 266204 - DNA, 201 bp, Homo sapiens
caggttgagcacagtagctcacacctgtaatcccagtgctgtgggaggctgaggtgggaggatcacttgaagccaggagttctagatcagcttaggcaacrtagcaaaatcctgtctctatataaaaaatttaaaacttagctaggcatggtggcagatacctgcagtcctagctactctggaggctgaagctggagggag

SEQ ID NO: 266205 - DNA, 201 bp, Homo sapiens
ccctgggttttctgggtttattttacctagttgatattgataaaatttcactgctgttggactctgtggttaaaataactcttaggcaagtaacattgtcrgtaatttgaataaattttctcttgggttttggggtaagggaattaatatgggaatcaatgtgggagaccaaaaatatattgagaagtaggatgaaagtag

SEQ ID NO: 266206 - DNA, 201 bp, Homo sapiens
ctgttgctgcttctggaacaagttagcctaaaacaggaaaacttatttctctttctttttaattttattgttctttaatttcccgcctcaaccttactgcraataatattctgccactttatttaaatcctggcttagtttaaggagaaacgtaaagatgggtttcctggtagaataggagtaaacaggactgactgtgac

SEQ ID NO: 266207 - DNA, 201 bp, Homo sapiens
gtgtcacattcccacaggacagctggcaggttggaaggtggcatttgagagaattcctcactttctataataatcgtacttgatgccggcagagcttcctrtgcaagcatttggcaccactgaccctgacttcctctccaggctcccactttctaagacttccctgacttctttgacacttgactgagggatttcattcct

SEQ ID NO: 266208 - DNA, 201 bp, Homo sapiens
gcttgagcctcagaaattttgaccaacctaggcaacatagtgaaaccccagctttacaagaaatataaaaattagctgggtgtggttttgcacgtgtagtmcgaagctgagaggtgggagaatcacctgagcctgggaggtcagggctgcagtgggccgtgattgcaccattgcactccagcctgggcaatggagtgagac

SEQ ID NO: 266209 - DNA, 201 bp, Homo sapiens
tatttttattgaattacggagacaagtgaatgtgaaatttctgaagcaatgtgaattttcttaatttttagcacagtttgttttaatcatatacattacaragcagtcattttagaatatttactgatttgcctttgatatctgctcagctagaggtctggatataatgctgagttattttaataattagcttctataatt

SEQ ID NO: 266210 - DNA, 201 bp, Homo sapiens
ctttgacacttgactgagggatttcattccttcttagtcattcttccatgactaaccctgattaattgttctggctgacttgccatgctcctcagcaccckaaacatggatggtcccgaaggttacttcttggcgtctgccttttccttctcaaaactctcctatccagctgtcttatactccctcagagtgaaatagact

SEQ ID NO: 266211 - DNA, 201 bp, Homo sapiens
atgaaaatattttttagagagacactaaaatggcatgtaaagcagacaatgtggccctttgcctgattttgcacttacaggtttatggcacaaaacttccycctcatgacttacccttctcatttatgccattgccaccgccatctcctgagtccctagaggcactcaggtaactcacctagtaactaactgggtgattta

SEQ ID NO: 266212 - DNA, 201 bp, Homo sapiens
aaagagcaggagagttgacatcacccagagaaaagtgcaggtgctatgtggacccgaccaagcaaaagcaaatggcttttggtgatccttgaaagttgctrtgaattaatttgcctgatcaaaaggtgtaaactgccagatgccaggagctgtgtttatttgttccagtgaaaatatcatatctggaagagcagctgcaat

SEQ ID NO: 266213 - DNA, 201 bp, Homo sapiens
atgctttgggaggatgaagcaggagaattgcttgagcccaggagttccataccagccttagcaacagggtgaaaccttgtctctgcaaaaaaatataaaarttagctgggtgtgcttgtggtcccagttactcgtcgatgtgggaggatcactggagcctgagaagttgaggctgcagtgagccacagtctcgccactgag

SEQ ID NO: 266214 - DNA, 201 bp, Homo sapiens
taacaacaagaacaacaacaacaaaacagagaacttctattttggcctgaagaactaaaaagataatgataactttctcccctcttagtcatagggctgasttgcagaaaataacatccaaaatgttacagaattacaattaagttcaagaaccttcaaacagccttgtgtgtgaaagtcagagtgattggcaagatattg

SEQ ID NO: 266215 - DNA, 201 bp, Homo sapiens
aagttcccttgcctcttctcctgcattgtgaattcctgcctcctgttgacagctcaccaaatccagctggcaaaacattttgggaaaagtagttggcacakttgtgtctatagcatccagagcagagtgtggaagagtttggaggtgagagaaaatgtctgagtacctgacagccctgcccagccttcaaggcaaaacaca

SEQ ID NO: 266216 - DNA, 201 bp, Homo sapiens
gggcgtggtccctggctacggctccacccccatggacctaggtgaagacaggtagtcctgctttcgggcccaaatgttgcattttctaagaccaccctggyccgccacacccccatcctgggtctgtaaaaacccgataccctagcaggcagacacacagacggccagacatggagaggagcacatcggcggaagaagatg

SEQ ID NO: 266217 - DNA, 201 bp, Homo sapiens
atttataagactgctttctctttgtttttgcaaatacttcaggtcttcgatgaactcaaaattcattcttaggtgtaaaagttagatctttgtttgggacygcaccaaggtcactagagttcagaactgaagcatctatgtggttttagaagttcctgagtctaaaaattgttcactatagtgacaacaattcgctttaca

SEQ ID NO: 266218 - DNA, 201 bp, Homo sapiens
cttggaaaggtgtgtgcagaaagaagccaaaggctttctcaccattcctagatcactctagaattgtccttctcaggccttggaggacatccgagctggayatctcagctgcattgtttattttccattatcaaaatgtcaagttggccaacatcaaagtgttacttatgtaatgtcaacttcttcctctctcaccactca

SEQ ID NO: 266219 - DNA, 201 bp, Homo sapiens
ttataaatttcttaaccttcataaagatttactatgatgtgaccttggacctggccatagatctcatgagaacagtatggggaagtagtactcatgctgtkatattaggaagataacttgtgaacacagactgaagccaacatctgggaggcctgggttattgttttatttttgttttggctttattgttttaagacagct

SEQ ID NO: 266220 - DNA, 201 bp, Homo sapiens
gtatcactttgcctgtactagacttggctagccttgaaactgtttttgtgtgtgaaatgctacttttctccagtgcctgtttctacacatagatgtacctycctgagtctctgcagagtgaaactgacatattatccgtttgagcactgaggagctttatcaagacttgtggaagtaaaaactacatctgtagggcagtgg

SEQ ID NO: 266221 - DNA, 201 bp, Homo sapiens
ggctgaggcataagaattacttgaacctgggaagtggaggttgtagtgagatcatgccactgcattccagcctgggagacagagcaagactctatctcaaaaaaacaaacaaacagaaaacagaaaacaaaaaaacaccaccatcattcagtgccttttatggtcaacgcctgaagagctggtgctgattacagattgggg

SEQ ID NO: 266222 - DNA, 201 bp, Homo sapiens
aggcataagaattacttgaacctgggaagtggaggttgtagtgagatcatgccactgcattccagcctgggagacagagcaagactctatctcaaaaaaacaaacaaacagaaaacagaaaacaaaaaaacaccaccatcattcagtgccttttatggtcaacgcctgaagagctggtgctgattacagattggggttcag

SEQ ID NO: 266223 - DNA, 201 bp, Homo sapiens
tatggtcaacgcctgaagagctggtgctgattacagattggggttcagggcaagaccacgtgggcacacccagtgaggccacagcaaagtgccctgggggkaatggtgttgggactaggctcagggaagctggtggcatgaggaaggactctggcctctgactccagcgtgtttgttcgactaccaagcagcaatgactgt

SEQ ID NO: 266224 - DNA, 201 bp, Homo sapiens
attatcatgattgttaacatctattatattactctagacatgattttaaattcctccttctatatattcctctttgtataaatgcctccatatataatatmtatagccattattgacttttgccagtcatttaccatgtgtttgcattggggtatcacatactgacctgtgcaccaacctatgggcccttcctacttggtt

SEQ ID NO: 266225 - DNA, 201 bp, Homo sapiens
aggacactgtaagttcacatcagcagatggctcttccctccttgtcagtacccggtttcctgaggtatgagctcccactctctacagcaccccccctatayctatcccttgcttctaataagacctcccactcctcccaccctcccctgcctctttctttccggctgctcactttgccttatatgttactgcaatttaaga

SEQ ID NO: 266226 - DNA, 201 bp, Homo sapiens
aatgactttagagattgttttctgtatagtgagaatgacacgtgacagatacttggacagatatgtccagaaattctaaggtctttagtatcatttttaatttttttttttttttttgagccagagtttcactcttgtcacccaggctggagtgcaatggcgcaatctcggctcactgcaacctctgcctcctgggttcaa

SEQ ID NO: 266227 - DNA, 201 bp, Homo sapiens
caggagaattgcttgaacccgtgaggcagagattgcagcgagctgagatcacaccattgcacttcagcctgggtgacagagcaagactctatctcaaaaartaaaaaataaaaaataaaataaattcagctgggtgcagtggctcacgcctgtaatcccagcactttgggaggccaaggcgggtggatcacctgaggtcag

SEQ ID NO: 266228 - DNA, 201 bp, Homo sapiens
cacttaaatttctgagagacataatgttctctatgaatgaaggtttgggggctcaggcctattaagtcatttgctattcagtggtcaaatgatttgagccycagatctgttttgctccaaaactagtgttcctcatgcatcacgctgtctctgataattaaccagcatctcaatattaagctctcttgtggaaatgccgta

SEQ ID NO: 266229 - DNA, 201 bp, Homo sapiens
ctgtgccatcatgtcagctaatttttgtatttttggtagagcaggttttcaccatgttggccaggctggtctgaaactcctgacctcaagtgatccacccrccttggcctctcaaagtgctgggattacaggcgtgagccaccgcacccgccgaggtatttgggtatttccaactttgacttttgaaattatattttgctc

SEQ ID NO: 266230 - DNA, 201 bp, Homo sapiens
aaaataaataagtaaaaagctgagaaagctgagtatggtgctgttactctcttctaggtttttgttttgttttgttttaattagagacaggatctcactcygtcatccaggctggagttcagtggcgctgtgggatcatagttcactgtaacctcaaacttcaggactcatagaatcaatctgactgcctcagccttgcca

SEQ ID NO: 266231 - DNA, 201 bp, Homo sapiens
acggagtcttgctctgtcacccaggctggagtgcagtagaatggtcttggctcactgcaacctctgcctccagggttcaagtgattctcctgcctcagccyctcaagtagctgggattacaggcatgcgccaccataccctgctgggtttttgttttttgttttttttttttagtagagatggggtttcactatgttggcc

SEQ ID NO: 266232 - DNA, 201 bp, Homo sapiens
attctccgccccatcccacttccatttccaggcaaatccatcttggatgctaatcatgttaactaataattaactcctgggaatgcctctacttttttactttttttttttttttttattgagactgagttagtttcgctcttgttgcccaggctggagtgcaatggcgtgatcttggctcactgcaacctccacctccca

SEQ ID NO: 266233 - DNA, 201 bp, Homo sapiens
gtcagttctttttttgtttgtttttttgagacggagtcttgctctgtcacccaggctggagtgcagtagaatggtcttggctcactgcaacctctgcctcsagggttcaagtgattctcctgcctcagcctctcaagtagctgggattacaggcatgcgccaccataccctgctgggtttttgttttttgttttttttttt

SEQ ID NO: 266234 - DNA, 201 bp, Homo sapiens
acatgtagttacattttcaaatataaaaaaaccagtgtttttagttgttcaagttattcagtcaacttgaaatttcataacttctatgtaaaaatatttayatattttaactgtgtaagtgttatactagaaacaacttaactggtgatgtcataaatcaaatatgtgaccctgtaatgagaggctcatgtcatgagataa

SEQ ID NO: 266235 - DNA, 201 bp, Homo sapiens
ggtttttactccagcctctcattgctaagaaggcaaattaaaattcttaagattcagaatgcttaaatgcagaatgaatgcttaatgtgaccaagcccgtrtgttaagtagataactcacggtgatctctctctttcatttgcaggtcttttctctctcttataattaacatttggatgtacaaaattatgttccatgcta

SEQ ID NO: 266236 - DNA, 201 bp, Homo sapiens
agccaggcgtggtggcgggcacctgtaatcccagctactcgggaggctgaggcaggagaatggcgtgaacctgggaggcggagcttgcagtgagccgagaycgcgccactgcactccagcctgggctacagagcgaaactccgtccaaaaaaaaaaaaaaaatccactatattagacatttctatacatttccatcaaaga

SEQ ID NO: 266237 - DNA, 201 bp, Homo sapiens
gaattcttaaataattgtcatttattccactagtcctgctaacctcaggacttttctcttctttttgtttcttcatattagctgtatatttcctggaaccytctcagtgattgcaacagtacctgttcttttaagatcttgacctttttggtagtgactcttcaagctaagcaatacacatttatttctgagataatgact

SEQ ID NO: 266238 - DNA, 201 bp, Homo sapiens
ctcagtgattgcaacagtacctgttcttttaagatcttgacctttttggtagtgactcttcaagctaagcaatacacatttatttctgagataatgactgyattagttatatggtgtttttatttttgttactcctatttcttaaatcttcatgcttggtcatcttgcgtttcagtctgtaaggcattttatcagccattc

SEQ ID NO: 266239 - DNA, 201 bp, Homo sapiens
accgcagcataattcttgcctggggtgggcgtttcaggtgggtggtggttatcttctgaggggcatttgtatcttttgcctttattatcccactgggcctkgtccatatctccatggtcaagcttaatccccacatccaagatccggctggcagaggggaatgaaattataaactaggcatgcatctttcatataatccca

SEQ ID NO: 266240 - DNA, 201 bp, Homo sapiens
cgtaactctggggacactgtaaccattttatgccttgtcctttcatcatcatcctggaagaacttatgctgttgatgtgtatgcttcagtttaaggcaacrttttggtttggttttgttttttgctgtttttttttttttttttttgagatggagtttcactcttgttgctcaggctggagtgcaatggcgcgatctcggc

SEQ ID NO: 266241 - DNA, 201 bp, Homo sapiens
atcatttcagctcgctgcaacctccacctcccaggctcaagtgattctcttgcctcagcctcctgcgtagctggaattacaggtatgtgccagctcacccrgctcttttttgtatttttggtagagacagggtttcgccatgttagcaaggctggtctcgaactcctgttctcaagtgatccgcccaccttggcctcccaa

SEQ ID NO: 266242 - DNA, 201 bp, Homo sapiens
tcttacatgacattctctgggaagtcatgtcttaggaatcttgggttctgtttactaacagattattcctagctggatgtcctgctaaggacttcagagayaaggcttcttccttccaacaatcctggttgacaaggagattagaccaggtctcagcctccttttctttgccctggggatggcccccggtaaggggaggga

SEQ ID NO: 266243 - DNA, 201 bp, Homo sapiens
agacatcaaagctctgcctgaagaagtgtgcattcatgctggaggagagaggcaggagagtgtatgggactgtatccttactgtgggaagtgatcacagckatggtagaaacagcagaacagggagcttcctagcagctgtggtttgagtcctcagggtgtgccttggagaaagcactgggattacaggtgtgagctacca

SEQ ID NO: 266244 - DNA, 201 bp, Homo sapiens
atttaaacacatttgttcagtctgccacatggaactggaacacttgtttttcttttttcagttactgtcaccaccatccctactggtcaaaattggaaacyctgaagtcatcccagactccttcttttaccacatctaggtagtcaccaactcctctcaatgctacctactagttagctcttaaatgtgtctcccagcctc

SEQ ID NO: 266245 - DNA, 201 bp, Homo sapiens
ctaaggacttcagagacaaggcttcttccttccaacaatcctggttgacaaggagattagaccaggtctcagcctccttttctttgccctggggatggccyccggtaaggggagggagtgaatggcaggctggttgcaactccctcttctcagacatgtgttgtcacagtgtttatccagggcttccacaaccgattagcc

SEQ ID NO: 266246 - DNA, 201 bp, Homo sapiens
agaaacgtggtactgctgagggaccctgaacaaccctctttatagctgagcagatgtgaagtatgatggaggaggaagcatagatcattgcaacgtttgarccctgggtgatgggaagaatcatttggatacagagaaagggatacagtcgggaagtcagaccagaggactggtcagaaatgaccggatgaggcacttttg

SEQ ID NO: 266247 - DNA, 201 bp, Homo sapiens
aagtaacatatggaaactccctcatcttcctgataccaagcaaataaacctacctaaacccatccaagcttccttgcatcctaaggcaaatctcccactgrtgctttgctttgtatcccatcacttctagtttattaagaaagttaactctattgattatcctcccttttcttttatattcagcctcatcttatcagtggg

SEQ ID NO: 266248 - DNA, 201 bp, Homo sapiens
tttagttttaaattaatttatttaaattataccaaggaattgataccctgggttttctgggtttattttacctagttgatattgataaaatttcactgctrttggactctgtggttaaaataactcttaggcaagtaacattgtcggtaatttgaataaattttctcttgggttttggggtaagggaattaatatgggaat

SEQ ID NO: 266249 - DNA, 201 bp, Homo sapiens
agcagttctcctccctcagcctcccgagtagctggaattacaggcacacgctaccatgcccagctaatttttgtatttttagtagagacggggtttcaccrtgttggccaggctggtcttgaactcctggcttcaagtgatccacccacctcaaccttccaaagtgctgggattagaggagtgagccaccatgcctggcct

SEQ ID NO: 266250 - DNA, 201 bp, Homo sapiens
cgagaccagcctggccaatatggcgaaaccctgtctctactaaaaatacaaaaattagctgggtgtgatagcgcatacctgcaatcccagctactcagacrttgaggcatgagaactgctttaatctgggaggcggaggttgcagtgagccgagatcgtgctactgcactccagcctgggcgacagagcaagactgttcta

SEQ ID NO: 266251 - DNA, 201 bp, Homo sapiens
aactggcaaagttcaaggtcaagatgtgagatgaaataacacaatatggccgggtgcggtggctcacgcctgtaatcccagcactttgggagaccgaggcrggtggatcacctgaggttaggagtttgagaccagcctgaccaacatggagaaacctggtctctactaaaaatacaaaattagctgggcatggttgcacat

SEQ ID NO: 266252 - DNA, 201 bp, Homo sapiens
caagggttccagctgattcctcagcaccgggggctttcatgaactcttagtacatttgcaccgctggaaacctcttttctgcatctctcctgcctcccaawgatgcctctctattcagccgggttgcatggccccttctgatctctcctgctgccctaaagacttgactttggcttcttgtttccagggtcctgccaccct

SEQ ID NO: 266253 - DNA, 201 bp, Homo sapiens
taaaagtttcttacagtaagtataagaaattatttcttatagtttgtttcttatgaccatttcatatattcttgtatgaaaccatttcttgtcatacatgytgaaaatatgtttaccagtaagtaatttaattttcaggtctttttaaggcgtttcaaaattatttcagatggccaggcgtggtggctcacgcctgtaatc

SEQ ID NO: 266254 - DNA, 201 bp, Homo sapiens
tttaatttagggaattaaaaaaatatattggccgggcgcagtcgctcacgcctgtaatcccagcactttgggaggccgaagtgggcagatcacaaggtcargagatcgagaccatcctggctaacgtggtgaaaccccgtctctactaaaaatacaaaaaaaaaaacaaattagtcgggcctggtggcgggtgcctgtagt

SEQ ID NO: 266255 - DNA, 201 bp, Homo sapiens
tttatttgtttaataactccatgaacagaaaagaacatttagacataattagagatgggggataggaagagaaagctgattcaagtaaaaaaaaaaatttraataagtaaaaccagaatctacaatgtacccgataaccaactcatttcaaagactgttgcttttcttaacattgaagttagaaattagttttaccaatac

SEQ ID NO: 266256 - DNA, 201 bp, Homo sapiens
aattagctgggcgtggtagtgcatgcttgtaatcccaggtactcaggaggctgagacaggagaatcactttaacctgggaggtggaggttgcagtgatccragattacaccattgcactccagtctgggtgacaagagtgaaactccatctcaaaaaaaaaaaaaaagtaaaaatagttgtcaaaggcctcctaaatagga

SEQ ID NO: 266257 - DNA, 201 bp, Homo sapiens
cttggcttcccgcccatggtatgcctttttccttccttctttctctgtctctctcttccttctctttctctctctctttccttctttctctctttctttccctcttttcttttcttttcttttcttcagaatctcactctgttgcccaggctggagtgcagtggtgttagctcactgcaacctctccctcctgggttcaag

SEQ ID NO: 266258 - DNA, 201 bp, Homo sapiens
ttggcttcccgcccatggtatgcctttttccttccttctttctctgtctctctcttccttctctttctctctctctttccttctttctctctttctttccctcttttcttttcttttcttttcttcagaatctcactctgttgcccaggctggagtgcagtggtgttagctcactgcaacctctccctcctgggttcaagt

SEQ ID NO: 266259 - DNA, 201 bp, Homo sapiens
gagggtagatgtccacacctgcagatgcattccaaccctggagaacagccaaagcccaggtatggagaggtgaatgcacaggctgttctgggaactttggyttttttgtttcaggggagtcactattttaaagaaatggcatccccactggagcccttttgtaaaatgctggttagttttgttgacacaagaccgtgtggt

SEQ ID NO: 266260 - DNA, 201 bp, Homo sapiens
taattaatagattttatgtactcaattattcattgggattaactgagttgtaaaaccagaaaaaaaccacagtggcccctatatttggatggctttagacrtgagaacaaggcttcaagctcctgtttcagggcatcgatagttttcagctgcaaatcagatcctatccccgccctcaaaatgctccagtaactgcccttt

SEQ ID NO: 266261 - DNA, 201 bp, Homo sapiens
gacatttctctaccacatgatcctttccattgtaaaactctcttgacttcagtagaaattcttttgcttccttttttcttcctacctctaaaggcattcctttttttttttttttttttttgcttcctctttattttcccaagggttctgttgtcagtgatattttcatcttgccttaccaccatttgctgtctctattat

SEQ ID NO: 266262 - DNA, 201 bp, Homo sapiens
acatttctctaccacatgatcctttccattgtaaaactctcttgacttcagtagaaattcttttgcttccttttttcttcctacctctaaaggcattcctttttttttttttttttttttgcttcctctttattttcccaagggttctgttgtcagtgatattttcatcttgccttaccaccatttgctgtctctattatc

SEQ ID NO: 266263 - DNA, 201 bp, Homo sapiens
gtgcctgtgctgtaagagagaagtaagttctagacccacagattttgggtgaagctcaagctcgccctgcatatacgcacatagactcacattatttccaygcctggtggttccattgatcatctttccatcacatcttttttaacagccctaattaatagattttatgtactcaattattcattgggattaactgagttg

SEQ ID NO: 266264 - DNA, 201 bp, Homo sapiens
catttctctaccacatgatcctttccattgtaaaactctcttgacttcagtagaaattcttttgcttccttttttcttcctacctctaaaggcattcctttttttttttttttttttttgcttcctctttattttcccaagggttctgttgtcagtgatattttcatcttgccttaccaccatttgctgtctctattatca

SEQ ID NO: 266265 - DNA, 201 bp, Homo sapiens
acaatggaatgtgatgtgtgaatttgtcacttggtaacatactaggagtgagtgtgggtggcctatgttgtagagcacgtctccttcctccttgattcacrtcctttctcatttatgggtgaccagcaaggttaactagatcagtagctttaaagttctttcctatgaaccaaaatgtgcggctgtaatggttaattttag

SEQ ID NO: 266266 - DNA, 201 bp, Homo sapiens
attcaatacctcaaggtgaaccccctcccacccattgtattgattgtggaaaaaaaagcttatatattaggtgatatttggtattaaaattttcagagtamacagaagagatgaacatgagtccatttaaatgttccttttagtcatttttttcttcacaagaataatcttacaattgcatcgtttaagaatacttgatgt

SEQ ID NO: 266267 - DNA, 201 bp, Homo sapiens
agtattgaaacttaacactatttaatattttaaatgaaaaaatattttcacaagggattgtactgaacaaatcctttgaatttcagctttgcttatgtttkccagcaggaaaatgattataaaatatacttgtaatggagaagttagcctgattattttgtattatattagaattaccaattacatttgtatctaaggaca

SEQ ID NO: 266268 - DNA, 201 bp, Homo sapiens
cccttgatgtattgtccaacacagttcatggaccttctcacatccagatgaatttcataaaatattttcttgcctgttcctgacacttgctggggggcatygtacagatttttttttttttctctgtttgccattgttatcctcctaatacaggtccctgtcaccccatgctagattggtcacacctaaattgctcccaat

SEQ ID NO: 266269 - DNA, 201 bp, Homo sapiens
attataaaatatacttgtaatggagaagttagcctgattattttgtattatattagaattaccaattacatttgtatctaaggacatttgctatattattrtaacaaactggatttttgtcttgggcatatttttctgtatcatttcaagttttatttttgtcttttctacctacttctgtttcttattacagttacacaa

SEQ ID NO: 266270 - DNA, 201 bp, Homo sapiens
ctagctggaacgttgtcacaacgaggaggtttcaaaggatggaagaactcgaaggtgttatgatcctcaggaaggggaccaatatctatgcatgggagcaytgaaagtctgcagacgacagagagccagaaagatctccaaatcagctcctgggcctgcctgtgcacgagaggcagtgtcctccttggggagcttgcatga

SEQ ID NO: 266271 - DNA, 201 bp, Homo sapiens
tctccgcaacctggagacctcagctttatcttcatcactccatgcgcttgggactgcagcatctcacaccagactgactgtagttggacacgctccatggrtttctccccgtcgccctgctcctttgatcgcctaggctgcaaatcgtctttccttcctcagtcccatctggtcaaatactcctcagttacggctcaactc

SEQ ID NO: 266272 - DNA, 201 bp, Homo sapiens
cttgaatattcattcaatattcattttgggatgaagttcatcagggttctaggtgtggtgtttaattttcagtctcttcctctaggatatgagttttaatyttctcttgttaatgaaattcactgaagagatcaaaggtaacgtacttctctttggtgggtctggtttctaggtagacaagagaacttcagagaacagcct

SEQ ID NO: 266273 - DNA, 201 bp, Homo sapiens
aatatttgaatatgtaatgattcagatacctattttataggtttctgtgaaaattaaatgagaggattattaaagtgccccactgaggtttggcacacagmagacggtcagtgaatgctagagccgttcacgtcctcgtgcctgtggtgtgtcccatatgcaaatatacacgggagttttatagcacagatatgttaagta

SEQ ID NO: 266274 - DNA, 201 bp, Homo sapiens
tctgcttctggcatcctctgcttccgtcaccatggcacctgctaggacttcggccctctggctatggtggggaactggcctggtagaggcagggcatccarggaagaagctattatggtattacagatgttgagaggccacctggcctggacatgagacggtggatcagacagctgcagttttggttgacatgtgacatga

SEQ ID NO: 266275 - DNA, 201 bp, Homo sapiens
attcagatacctattttataggtttctgtgaaaattaaatgagaggattattaaagtgccccactgaggtttggcacacagaagacggtcagtgaatgctrgagccgttcacgtcctcgtgcctgtggtgtgtcccatatgcaaatatacacgggagttttatagcacagatatgttaagtattctgaacacagactacac

SEQ ID NO: 266276 - DNA, 201 bp, Homo sapiens
aacaacatctatttctcacagttctgggtgctgggaaggtgctgggaagtccaagatcaagacgctggcagatttggtgtaggatgagggcccacttcctygtttgtaaaggattgtgtctttttgctgtgacttcccatagtgaaagtggcagatgagctctctcaggcctcttctataagggcactaatcccattgatg

SEQ ID NO: 266277 - DNA, 201 bp, Homo sapiens
gaactggtcaaggaaaagccaaatgacagtcctaaggccataaaatgaaacagtggcagaggggtgggataaaggtaaaattcttaagattgaacctgctstggcaggggagcaatactaagagaaaagacccatttgttatcttaaataattgacatctcctctgtttctttatctgccaatgagttccaagcagttatt

SEQ ID NO: 266278 - DNA, 201 bp, Homo sapiens
aaagtgattcctctgacggatctgggcaaaatacattgaaaaccttttggaggccgggcacgatggttcacgcctgtaatcccagcactttgtgaggccarggcaggcggatcacaaggtcaggagtttgagaccactctggccaacatagtgaaaccccgtctctactaaaaatacgaaaaaattagccaggtgtggtgg

SEQ ID NO: 266279 - DNA, 201 bp, Homo sapiens
atagctgcacattttggaatcttctttggctgccccttttcttcactcccagcaccaaatggaggatcaagtcctagaaaactgagacctcagttaaagcycccttcctttgctgggtaactgaagcaatataggaacttgttgcccctgcctcccatctctcctgccttacaccttcccttacaatgtggttatcctaca

SEQ ID NO: 266280 - DNA, 201 bp, Homo sapiens
tgtgccagtatgcttgtgaaatattcaaaactaactgaaaaatgcagagaataatctagcagacacctctatacttatcacgctgatgtgacaaatactcacagttttccagatctgcttcatatcattttgtcaagtaaatcacatattatgggtacatttgaaatcctctcccttctatttctattaccccttcatccc

SEQ ID NO: 266281 - DNA, 201 bp, Homo sapiens
cggagtcagctggtgttctcaccactccgggttggccttccctctgcctttccaacccctggagtttcccgtcagcctgccttcctctctgcctttgtgatctctctctctctctctgtgtcctctctgtctctctttccagtagttctgcctggagcaggaagaagagcccttctcaattcagtcagctgtgttgccaag

SEQ ID NO: 266282 - DNA, 201 bp, Homo sapiens
ggagtcagctggtgttctcaccactccgggttggccttccctctgcctttccaacccctggagtttcccgtcagcctgccttcctctctgcctttgtgatctctctctctctctctgtgtcctctctgtctctctttccagtagttctgcctggagcaggaagaagagcccttctcaattcagtcagctgtgttgccaaga

SEQ ID NO: 266283 - DNA, 201 bp, Homo sapiens
gagtcagctggtgttctcaccactccgggttggccttccctctgcctttccaacccctggagtttcccgtcagcctgccttcctctctgcctttgtgatctctctctctctctctgtgtcctctctgtctctctttccagtagttctgcctggagcaggaagaagagcccttctcaattcagtcagctgtgttgccaagaa

SEQ ID NO: 266284 - DNA, 201 bp, Homo sapiens
agtcagctggtgttctcaccactccgggttggccttccctctgcctttccaacccctggagtttcccgtcagcctgccttcctctctgcctttgtgatctctctctctctctctgtgtcctctctgtctctctttccagtagttctgcctggagcaggaagaagagcccttctcaattcagtcagctgtgttgccaagaag

SEQ ID NO: 266285 - DNA, 201 bp, Homo sapiens
agaagagattacatgtcttctgcatgagcaccatcctcctcccttgggtgtgggagggggcaggaagcacaagtgtgcatgagacatgttcttctgcttctttttttttttttttttttttgtttgagacaaagtctcgctctgttgcccaggctggagtgcagtggcgggatctcagctcactacaacctccgcctcccg

SEQ ID NO: 266286 - DNA, 201 bp, Homo sapiens
gaagagattacatgtcttctgcatgagcaccatcctcctcccttgggtgtgggagggggcaggaagcacaagtgtgcatgagacatgttcttctgcttctttttttttttttttttttttgtttgagacaaagtctcgctctgttgcccaggctggagtgcagtggcgggatctcagctcactacaacctccgcctcccgg

SEQ ID NO: 266287 - DNA, 201 bp, Homo sapiens
gcgttcaccctgcctaactgccccattttacccttcatcatctctcacctcagtcattatagttgcttattaactaatctcttggtcaccagtctccctcrcctccaactccagttaccttccttaaataaagaaaaagaaattgatcctaccagtctcctgtttacaagccactgataactcctcattacctataaaata

SEQ ID NO: 266288 - DNA, 201 bp, Homo sapiens
acttagataattttttattcaacctttgtaactattttattttgtggaaaaaaaaatcctcgaatgtacttattttggattttcctgttggtgaaaacggkttttgcataccttcgaagactgttatgtgcgaatttaaaatgcagattagctctatcatacactcactgtaactatgcgtcttgcttgtcggtcttgctc

SEQ ID NO: 266289 - DNA, 201 bp, Homo sapiens
taaatcctgtttatttgtgttgtgggctttgtttttatttttttatcttgttttctctcttagaaaagctcaagcctcacacaggttattttcccctggtrcttgatggtctacacagtttcatttcatcatgtcatacttagggaatgacccatctttcaatgtgtcttaaagggctaacctaggaattattagccacgt

SEQ ID NO: 266290 - DNA, 201 bp, Homo sapiens
tgctagcctttcattgcttctttaatagagatccctctgtaatgataactgttttttgtttgtttggtaatgattttactcactactctttaagaaaaagrgagacagaaaaagaagtcggtcttgcagacgcaagttccccaagtgtacctttagaatgctcaaaagctcagcatcatgaggaccctggagagatgggaa

SEQ ID NO: 266291 - DNA, 201 bp, Homo sapiens
tttaatatatgatgtttgaatgaaaaatttaaaaagaacctggcaaacaatgggtcatagattaaaacccatattcttgattatatctcacatagtaagcytaagctcttttgatttccagtgaactgtatatgcttttcatgtttcacagcttaccagatgttatctattcagagcttcagcatatctaggaggagtgga

SEQ ID NO: 266292 - DNA, 201 bp, Homo sapiens
cctacgaaagaaactaaaagaccctgattttttactgaacaccacagacctttctcagcattgcatatattaaatccttcattgaatccttcaactcttaytgtagatacgagtattttcccggtttgacagaggaggaatctgaaacggagcggtgaagaaacttgcttagggccactccatcagccaaatcatcagaaa

SEQ ID NO: 266293 - DNA, 201 bp, Homo sapiens
gctgtcacatctgctgagatcttcaggcaggaggagatccatcctttgtacattagcataggcttttagttaacatatgtaggagtaaatatgttaagtcyccaaggagtctcctctaattgctgtttgtaagggaaacaggcaaggcagcttagtgtggtgtatattctgtcatttctgtattctccatacctcctgagg

SEQ ID NO: 266294 - DNA, 201 bp, Homo sapiens
aattggtaagatttagggaaaattttttgcattcttgcttgttttgtgtatttttactatttgcatatgagttagaaaagtcttatgaaggtattatattktaaattatgtttatcatttaattagtgaatttttccatacagttttctcttgttaatcaaagtttcttggttacagtagttccctcttgtcaatgggaga

SEQ ID NO: 266295 - DNA, 201 bp, Homo sapiens
tattgtgccctctctaaaggtcctcattgatgtgggacagggttagaaattggagcctgtactggattgcatcccttgcatcccctaatttgtctatctcyttctatctttgcattctgatgactctctctcaagccagaggagcgttagtgctcctgcgtttaggaagctggaatgtccacgctgtgcatactctatttg

SEQ ID NO: 266296 - DNA, 201 bp, Homo sapiens
aaaagaaatgccaagtataatgtctcatatgatttctgagataaatgaagtaatgtacctggaaaaacctgtcgataataaagactttaaaagaaaaacamctacaaaactcaggaaataactaaatgaaaagcaggttatcagcaaagaggccaaaggagtataaagatattgacatatattctaaaaatgtatgtccgt

SEQ ID NO: 266297 - DNA, 201 bp, Homo sapiens
actcaccgggcatctctccagtgtgagcattcgggatgcttaaggcctgagtgtggctgaagaatctcgcatagacggcctctcctgggtgtgaattctcygtgctgagtgagtgggaactttctcagcctggcttccccaacaaatcccttctgcagtgtggactttggaattctgaaggaggcgacagctttggctcca

SEQ ID NO: 266298 - DNA, 201 bp, Homo sapiens
taagacatcttggaaagcacttcaaacatgcagctttctttgttttgtcatatttatctctcgttggattgcatgtgggagcattgggttcatttcaatgraagagtgatgaggataccactgtaagtgtggtttctcattctgccacacatcagagatgagtcattgtctcatggggctttctgtaactttcaagatctt

SEQ ID NO: 266299 - DNA, 201 bp, Homo sapiens
atgcatgttgcttcaaaggacatgatttcattcttttttatggctgcataatattccatagtatgtgccacattttctttatccaggctaccattgatggrcatctaggttgattccatgtctttgctattgtgaagggtgctacgatgaacctatgagtgcctgtgtctttatggtaggacaatttatattcctttggga

SEQ ID NO: 266300 - DNA, 201 bp, Homo sapiens
gcaggctggtctcaaactcgtgacctcaggtgacccgcccgcctcggcctcccaaagtgctgagattacaggcatgagccaccacgcctggccagttgggycattttttaaaattcatttagccatttattatcttttatgggggaaattaatccatttacatttgaagttattattaatgagtaaagacttatttccatc

SEQ ID NO: 266301 - DNA, 201 bp, Homo sapiens
atgttattcttctgtctcaaaaattgaatgttctttagagataaatgcattatagagaagaatatcccaaaacagaataatggcaagaaacagttttcacsttgtaatctcaagcctctctttcaattgaggttttgcttattttgagacattttgttgttcatatgaacacaaaagcagcttgattcttcttgatcttta

SEQ ID NO: 266302 - DNA, 201 bp, Homo sapiens
tgctgagagctctcttctgggttgcagaccactttctccttatgtccttacatagcagaaggcaactttcataaagacactaatcccaatcatgaaggttstatcctcatgacctaatcaccttccaaaggccccgtctcccaggggtaccatcatagtaggtgtatttcctaatatgaatttggggaaggaacaaatatt

SEQ ID NO: 266303 - DNA, 201 bp, Homo sapiens
tctttatgtttaggtgaaaatcagttcatcctggataataattttaagaatttgagaagatctgattgtctgacatgtgtcaccatcttaggactgttgcmatatgatcatggtgtcttgtacctctgacatcatagtctttctcttaaaaaaacaaaccaaacaggaaatagcttttacttctgaccacttcagagatag

SEQ ID NO: 266304 - DNA, 201 bp, Homo sapiens
gtttcaccatgttggccaggctggtctcaaagtcctgacttcaggtgatccacccgcctcgtccacccaaactgctgggattataggcatgagccaccgcrcccggcctatcccatgtctttaaaacaaaataacatattactttttaaaattctgagggttatgaatttggaaagggccccatgaggacagtgtggtgct

SEQ ID NO: 266305 - DNA, 201 bp, Homo sapiens
ttaggtgaaaatcagttcatcctggataataattttaagaatttgagaagatctgattgtctgacatgtgtcaccatcttaggactgttgcaatatgatcrtggtgtcttgtacctctgacatcatagtctttctcttaaaaaaacaaaccaaacaggaaatagcttttacttctgaccacttcagagatagacgggtctt

SEQ ID NO: 266306 - DNA, 201 bp, Homo sapiens
gatatacatttacttgagacagggaaataggtgaatgggatgtatctcgaccatcctttgccttcttttcaatgctctaccctcaggagccatcacatgtyaaagttgaaataggacactatccttcaggcagactactttcagtgattgtgctctttgtagagagaatccccacgtttctccccaatcgagtgagtgtgt

SEQ ID NO: 266307 - DNA, 201 bp, Homo sapiens
ctgacatcatagtctttctcttaaaaaaacaaaccaaacaggaaatagcttttacttctgaccacttcagagatagacgggtcttcgttgcttctgtgtgrcttggactccttcttacctctgaatggcttggactccttctcgcctctgaatggaagggaagctgccaccagcctttgattctaagggacaaacctccca

SEQ ID NO: 266308 - DNA, 201 bp, Homo sapiens
aaatagcttttacttctgaccacttcagagatagacgggtcttcgttgcttctgtgtgacttggactccttcttacctctgaatggcttggactccttctygcctctgaatggaagggaagctgccaccagcctttgattctaagggacaaacctcccatttgtagctggacctcacagccatggtggttcattcctctct

SEQ ID NO: 266309 - DNA, 201 bp, Homo sapiens
tattcacttattcattcatttatttctgtatttaaccttccattatgttaagctcagccaatgcagaggtgaataaagttgcagtaggaaggaaaactgcyttcaccaccagccttactctctctgctcccacttagagttgccaaggctagaacaatttagggaatttcctattcgagtaatccccgacaagcctgactc

SEQ ID NO: 266310 - DNA, 201 bp, Homo sapiens
tttattagagacaggatttcaccgtgttagtcaggatggtctcgatctcctgacctcgtgatccacccgcctcagcctcccaaagcgttgagattacaggygtgagccactgcgcctggccaggggaaacaatttttatagaatagtgttttttattgtgaaggataactttttgtgaaataaagtttttttctgggctag

SEQ ID NO: 266311 - DNA, 201 bp, Homo sapiens
ttgggaaaattaaaaatttctggagttggatggtggtgttggttggacaacaatgtgaatatgcttaatgtagctgaactgtgcaactacaaatgactaamaaggtagattatatatatattttaccatgttaaaaaaacttcagaaccaatacctgtatctatattcaattactgaactgaatgtagccagccacctcac

SEQ ID NO: 266312 - DNA, 201 bp, Homo sapiens
tgaaagaggcaaagaatatattctcccatagactcttcagagcaagcacagtcgtgttagacttctggcctccccttgataggagataaatttctgttatrttaaggcagcaagtttgtgatcattagttgaggaagtgacaggaaacaaatctagtcacccagcttcaatatcagctcaagtggaagttcttagaatatt

SEQ ID NO: 266313 - DNA, 201 bp, Homo sapiens
ccttgcagcagatcaagaagtgggtattaagacattttgggaaatactggtttagctgcctcaaatgcaggaaataagatcacttataaccatgtttatgtttttttttttttaattttaaaaggtatatttagttatagcaaagaaaaaggaatacttaactcatggttttgttctgttttgagaaaatactgaggagat

SEQ ID NO: 266314 - DNA, 201 bp, Homo sapiens
aacaaatctagtcacccagcttcaatatcagctcaagtggaagttcttagaatatttttcaattactatcaggtttttgaaagatacctcacatttatatyttagttgaatggaaaaaacagattgtgagacatttcaagggacagttggtaggatttggggattatctgcatatgagggagaagaaaaaggggtgcaact

SEQ ID NO: 266315 - DNA, 201 bp, Homo sapiens
gttcctatggggctgatgggctggggaattgggagagatgatttaggaaacaagtaaacagatatgtgaagaaagtgatttcatatatatatatatatatattttttttttttttttttttgccacagtgtgtcactgtgtcacccaggatggtgtgcagtagcacaatctcggctcactgcaacctccacctcccaggtt

SEQ ID NO: 266316 - DNA, 201 bp, Homo sapiens
tcctatggggctgatgggctggggaattgggagagatgatttaggaaacaagtaaacagatatgtgaagaaagtgatttcatatatatatatatatatatwttttttttttttttttttgccacagtgtgtcactgtgtcacccaggatggtgtgcagtagcacaatctcggctcactgcaacctccacctcccaggttca

SEQ ID NO: 266317 - DNA, 201 bp, Homo sapiens
tttttttttttttttttttttgtttgagacaaagtctcgctctgttgcccaggctggagtgcagtggcgggatctcagctcactacaacctccgcctcccrggttcaagcaattctcctgccttagcctcctgggtagctgggactacaggcatgtgtcaccacacctggctaatttttttgtattttttagtagagacag

SEQ ID NO: 266318 - DNA, 201 bp, Homo sapiens
ctatggggctgatgggctggggaattgggagagatgatttaggaaacaagtaaacagatatgtgaagaaagtgatttcatatatatatatatatatatttwttttttttttttttttgccacagtgtgtcactgtgtcacccaggatggtgtgcagtagcacaatctcggctcactgcaacctccacctcccaggttcaaa

SEQ ID NO: 266319 - DNA, 201 bp, Homo sapiens
cttgatgtctgtttctcagagaggacccagactcgaatatcgtgagactgggttttgtgcatatggcagataaattatccttgggataggggttcacattrtgtttgtcttctggtgatgtgactttttacactttgagtagcatatatttatggaggctgtagtaattataatgaggtataatcatatagtcattataat

SEQ ID NO: 266320 - DNA, 201 bp, Homo sapiens
cctggctaatttttgtatttttagtagagatggtttcaccatattggccaggctggtcttgaactcctgacctcaagtgatccacccacctcagcctcacaaaagtgctaggattacaggcgtgagccaccgtgccaggccagtcattcctttttaattttctgctaaagtttgtgtagattcatgtaatttttaccctaa

SEQ ID NO: 266321 - DNA, 201 bp, Homo sapiens
catatagtcattataatcatagtataatcatagagtcatttctgggtcttaatgtcttcaagtcttacacatccgtcaaaagttgggctgtaacaaatagagctagctgtccaacaatggaatcagtgcataccctcaggccggagtgtttctgctggactgcgtcagtttggtattaggtatgatggataataaatttcc

SEQ ID NO: 266322 - DNA, 201 bp, Homo sapiens
ccatattgaaaattaagaaaacctcttaagtaactaatggatcaaagaagaaatcataaaggaaattagatggtattattaatgtagaaaaatacaaaataaaaaaaaattctatatactaaaaattgatccttttacatgtgtggctataatggctcttcaaggaaaattggtgagctttatttttttttcatcagaaag

SEQ ID NO: 266323 - DNA, 201 bp, Homo sapiens
atatagtcattataatcatagtataatcatagagtcatttctgggtcttaatgtcttcaagtcttacacatccgtcaaaagttgggctgtaacaaatagagctagctgtccaacaatggaatcagtgcataccctcaggccggagtgtttctgctggactgcgtcagtttggtattaggtatgatggataataaatttcca

SEQ ID NO: 266324 - DNA, 201 bp, Homo sapiens
ttcatagaatcacatctgttaaaagtaaatttacattaggaattaaaataatgcctccaaatcaccacagtgtgatagtttgctaagtgaaaattgacttataaaaggaaggtaaaacagggaatctctgattgcagagtctctgtagacgatttgagattgcacattgaagaccatatgtttctatgcgaatgtgacatg

SEQ ID NO: 266325 - DNA, 201 bp, Homo sapiens
tatagtcattataatcatagtataatcatagagtcatttctgggtcttaatgtcttcaagtcttacacatccgtcaaaagttgggctgtaacaaatagagctagctgtccaacaatggaatcagtgcataccctcaggccggagtgtttctgctggactgcgtcagtttggtattaggtatgatggataataaatttccac

SEQ ID NO: 266326 - DNA, 201 bp, Homo sapiens
tcatagaatcacatctgttaaaagtaaatttacattaggaattaaaataatgcctccaaatcaccacagtgtgatagtttgctaagtgaaaattgacttataaaaggaaggtaaaacagggaatctctgattgcagagtctctgtagacgatttgagattgcacattgaagaccatatgtttctatgcgaatgtgacatgt

SEQ ID NO: 266327 - DNA, 201 bp, Homo sapiens
atagtcattataatcatagtataatcatagagtcatttctgggtcttaatgtcttcaagtcttacacatccgtcaaaagttgggctgtaacaaatagagctagctgtccaacaatggaatcagtgcataccctcaggccggagtgtttctgctggactgcgtcagtttggtattaggtatgatggataataaatttccacg

SEQ ID NO: 266328 - DNA, 201 bp, Homo sapiens
catagaatcacatctgttaaaagtaaatttacattaggaattaaaataatgcctccaaatcaccacagtgtgatagtttgctaagtgaaaattgacttataaaaggaaggtaaaacagggaatctctgattgcagagtctctgtagacgatttgagattgcacattgaagaccatatgtttctatgcgaatgtgacatgta

SEQ ID NO: 266329 - DNA, 201 bp, Homo sapiens
taatcccagcactttgagaggctgaggtaggcagatcacttgaggtcaggagtttgggacaagctggccaacatggcaaaactctgtctttactaaaaatacacacacacacacacacacaaaaattagctgggcttggtggtgcacacctgtagtgccaggtactcaggaggctgaggcgggagaatcacttgaacccag

SEQ ID NO: 266330 - DNA, 201 bp, Homo sapiens
aatcccagcactttgagaggctgaggtaggcagatcacttgaggtcaggagtttgggacaagctggccaacatggcaaaactctgtctttactaaaaatacacacacacacacacacacaaaaattagctgggcttggtggtgcacacctgtagtgccaggtactcaggaggctgaggcgggagaatcacttgaacccagg

SEQ ID NO: 266331 - DNA, 201 bp, Homo sapiens
aatcacttgaacccaggaggcggagggtgcagtgaggtgagatcgtgccactgcgctccaggctgggtgacagagcaagactctgtcttaaaaaaaaagaraatcagttaaaatacactgtctccttccatactatctaacaaaagggtaatgattgggtttgacttcttctttatgacttggtggcctcatcatttatgg

SEQ ID NO: 266332 - DNA, 201 bp, Homo sapiens
tgtaaaagtccagcacatacaattatgtatagtacgtgattagaaaaatgaccatattactggtttgtgtatttatagttattttatagaacttatactattttttttttttttgagacaaaatcttgctctctcacccaggctggagtgcagtggcacaatcttggcccactgcaacctccacctcccgggtttaagcga

SEQ ID NO: 266333 - DNA, 201 bp, Homo sapiens
ccacctttggttcatttttaagcttttgactgttttctgatttttttttttttttacttctaatgataccaagtattttgtagtagttgtttttttttttyccttagccttgtggaggttctgcattatagttcttataactaatttctatttaattatttttaccttgactccgatagtttgtcatctacattttatttc

SEQ ID NO: 266334 - DNA, 201 bp, Homo sapiens
attagccaagaagcctgggattatcaaggtgagttttctagattagcctatgtaatagtccaatcatattcttggcttaatatgtcaatctcaatttttgkccctggtcctggcattaaaggacacagaaaaactagagttttcccagcagaggaaaattaggatactgtgttgttcggaaattgtgatcagagggacttc

SEQ ID NO: 266335 - DNA, 201 bp, Homo sapiens
aataataaattaacaatttaaaaataaatagtgaatcatatgttttacagcttagcgatttaaccgatgacatctcattcatttgacaaccttgtggagargagtcattcatttatttattccacagatttttttaagcattactacatgccagacactatactggatcctaaaaatatgaagtgaacaaaattggccgaa

SEQ ID NO: 266336 - DNA, 201 bp, Homo sapiens
ttctgctgacgacagtgctttttgaaatcttttctcacctctttacaagagagccatgtgcatactctgtagatcggttgatctcaagttaaataggctgrcttcccacacgcggtcgttgcctcagagattctgtctggatttaatattttcagctatgagaaaatacaaaaacatggaatcagtctgggcaggactgac

SEQ ID NO: 266337 - DNA, 201 bp, Homo sapiens
catacttatcatcttcatggttacttttttcatacgtatacagtaatagcacctaaaatctacttttttgcaaattttcattatacaatattataattatagtcctctagtacatttctagaatatttgtcctacctgtaactttgtatgctttgacccatatctccccattttctgccacaattccccccaccacttccg

SEQ ID NO: 266338 - DNA, 201 bp, Homo sapiens
atgcagattagctctatcatacactcactgtaactatgcgtcttgcttgtcggtcttgctctgagctgtggatactcagttatgttttatcccggtttcakatcagaaacagtgctcatccttgctagaaactgccctctgaagcaaagttcaagttctcagggagagagccaatcaccctggctcctcctaccttcgatt

SEQ ID NO: 266339 - DNA, 201 bp, Homo sapiens
gtcttggtggagggagttcctcagggtcacagagctagaaaggggcagagctaggactaagcaggactaactggcgcttggagcccaggtgtgggctgggkcctcccactcaggtgtcatccttgatcgaagtagttgacattttatttctcactttgctcatcttcctgtctttggagagtaggaaagcatatttgtttc

SEQ ID NO: 266340 - DNA, 201 bp, Homo sapiens
actttttaaaaaaattttacttttaagttctgggatacatgtgcagaacgtgcaggtttgttacataggtatacatttgccatggtggtttgctgcacccmtcaacccatcatctaggttataagccccacatgcattacgtatttgttctaatgctctccctgcctttaccccccattgcccaacaggccctggtgtgtg

SEQ ID NO: 266341 - DNA, 201 bp, Homo sapiens
gtgttactgaccgaaagagggagttctgctttagggctgtgatgaggcaacggtgtccattgagttgttttagaaaaagtgagtgcgagatggcaaatatkgtaaaatctgatgttgaaaaagaagatttaagtgggatattaatttccttttcaagtcctttatcaccaagtgtcctagactctacaattgcatgcatac

SEQ ID NO: 266342 - DNA, 201 bp, Homo sapiens
atagaatcacatctgttaaaagtaaatttacattaggaattaaaataatgcctccaaatcaccacagtgtgatagtttgctaagtgaaaattgacttataaaaggaaggtaaaacagggaatctctgattgcagagtctctgtagacgatttgagattgcacattgaagaccatatgtttctatgcgaatgtgacatgtat

SEQ ID NO: 266343 - DNA, 201 bp, Homo sapiens
tagaatcacatctgttaaaagtaaatttacattaggaattaaaataatgcctccaaatcaccacagtgtgatagtttgctaagtgaaaattgacttataaaaggaaggtaaaacagggaatctctgattgcagagtctctgtagacgatttgagattgcacattgaagaccatatgtttctatgcgaatgtgacatgtatc

SEQ ID NO: 266344 - DNA, 201 bp, Homo sapiens
tgagccacgtttatacactgcagtttgtggattgtatgcacatgggaatggcacctcaaaacaaactttccttttagactgttaactccatttgtgagccracagcagatggctgaactggcacagaaattcttttccgcatagctctgtcatcactgtggtaaaggtgccagagagggagtgaccacagaccacgtttct

SEQ ID NO: 266345 - DNA, 201 bp, Homo sapiens
ggctggagtacactggcatgatctcaactcactgaaacctccaactccctgattcaagcaattcttctgccacatcctcccgagtagctgagattacaggyatacaggcatgcgccaccatgcccagcttatttttgtatttttagtagagatggagtttcagcatgttggccaggatggtctcgatctcctgaccttgtg

SEQ ID NO: 266346 - DNA, 201 bp, Homo sapiens
taaaattttaactgtttaaattttgcatatcttgcattattattttacttctataatccctgtcttctacacttgtgagcatgcttgcacacatacacatmcacacacacaccccttccatgaaaatgaatgtacagaaacaacttgtgccttatacttactaaatgcatattcagaaagttaaatgttgtttgatcctat

SEQ ID NO: 266347 - DNA, 201 bp, Homo sapiens
gtaaaagtccagcacatacaattatgtatagtacgtgattagaaaaatgaccatattactggtttgtgtatttatagttattttatagaacttatactattttttttttttttgagacaaaatcttgctctctcacccaggctggagtgcagtggcacaatcttggcccactgcaacctccacctcccgggtttaagcgat

SEQ ID NO: 266348 - DNA, 201 bp, Homo sapiens
agcattcacaacttgactaacttgttggtacagccaacctggtgcaaagcctgtcttggctttcaacgtgccttcctcactgagctttatcatttctagctttgatttaaagtgagagacatgcaactctgcctttcgcttgaacatttagatgccgtcgtagcattattaattggtctaatacagtatagttgcgtctca

SEQ ID NO: 266349 - DNA, 201 bp, Homo sapiens
taaaagtccagcacatacaattatgtatagtacgtgattagaaaaatgaccatattactggtttgtgtatttatagttattttatagaacttatactattttttttttttttgagacaaaatcttgctctctcacccaggctggagtgcagtggcacaatcttggcccactgcaacctccacctcccgggtttaagcgatt

SEQ ID NO: 266350 - DNA, 201 bp, Homo sapiens
tgtaattcccattgctggaggaggggcctggttgggagcgattgaattatggcggggcacagatcatccttgtgcttcttgtgatagaattctcctggcattttttttttttttttaatagagatggggtttcaccacgttggccaggctggccttgaattccagacctcaagtgatcggcctgccttggcctcccaaagt

SEQ ID NO: 266351 - DNA, 201 bp, Homo sapiens
aatttatcacagaggaaaggaaatgtttttttctaactttagcgtagcctgagtgtgcagtgttggtgaagtctgtggtaatggacagtcatgtcctaggycttcccattcactcgccactcgctccctgatcacccagagcaacttccagttctgcaaactccatgtttcctagacgagtgtcccattttttacctttta

SEQ ID NO: 266352 - DNA, 201 bp, Homo sapiens
ggattatgtctgtgcaattatttagttattttgtctacaataaaagagttagccattatatttaggaagttaaaaactggcagattttatagaagtacccraacacatacagatacgcacttatatatataaatgagggaatgccattttaccaaatattggcattttggttcaggaccttaatattcttggtcctaacac

SEQ ID NO: 266353 - DNA, 201 bp, Homo sapiens
ctaaaaatacataaataaataaataaaaataagtagggcgtggtggcacatgcctgtaatcccagctactcgggaggctgaggcaggagaatcgtttgaamccgagaggcggaggttgcagtgagctgagatcgtgccattgcactccaacctgggaaacaagagtgaaactccgtctcaaaaaaaaaaaaaaaaagagtg

SEQ ID NO: 266354 - DNA, 201 bp, Homo sapiens
ggtggcccacgcctgtaattccagcactttgggaggctgaggtaggcagattacctgaggtcgggagtataagaccagcctgaccaacatggagaaacccygtctctactaaaaatacaaaattagctggacgtggtggtacatgcctgtaatcccagctactaaggaggctgagacaggagaatctcttgaacccaggag

SEQ ID NO: 266355 - DNA, 201 bp, Homo sapiens
cacaacagtccccagagtgtgatattcccctgcctgtgtccatgtgatctcattgttcaattcccacctatgagtgagaatatgcggtgtttggtttttcrttcttgtgatagtttactgagaatgatgatttccaatttcatccatgtccctacaaaggacatgaactcatcattttttatggctgcatagtattccatg

SEQ ID NO: 266356 - DNA, 201 bp, Homo sapiens
ctcagacctattaagccagtttagaacaaaaaaatcatggattatttaaagtatgccaattttgggatgaaagtgtattctgtgtgtttttattgctaccrttctccagagaaacagggtgatattttccagctacagaatgttttagcagcaattcccaacgaattcagcttatttttcagcaagttaacctctgttaat

SEQ ID NO: 266357 - DNA, 201 bp, Homo sapiens
cacactcacatgcatacacatgcacacacatgcatacatgcatgtacctgcgcggttcttacgtctctatcttctcactgcattttttgtcttctccagtaacaacatgtctgctgtttatttgttcctcctccaagtttctctttcttttctcttcctctgttatttctctcgttctttccaagattggaactattaggc

SEQ ID NO: 266358 - DNA, 201 bp, Homo sapiens
ttaggtctttcttctttaatatcactcagcaatgttttatacttttcagtgtacaattcacacaaactgtttgtaaatttatttttgcgtattttatatgttgatctattgtaaatggtgtttcttaattccaattttagatattttgtatattgactttataaccgagataattgttaagtttacttattagttttaatg

SEQ ID NO: 266359 - DNA, 201 bp, Homo sapiens
acactcacatgcatacacatgcacacacatgcatacatgcatgtacctgcgcggttcttacgtctctatcttctcactgcattttttgtcttctccagtaacaacatgtctgctgtttatttgttcctcctccaagtttctctttcttttctcttcctctgttatttctctcgttctttccaagattggaactattaggct

SEQ ID NO: 266360 - DNA, 201 bp, Homo sapiens
ataattgttaagtttacttattagttttaatgacattttttagattctatagaaatttctatggaggcaatcaagtcatttgagaataggaattttctaatttttttctaatcttatgcattttatttttcttgacttattgcactggctatcagctccagtataatgttgagtggaagttgtaagacttaacattaaggc

SEQ ID NO: 266361 - DNA, 201 bp, Homo sapiens
cactcacatgcatacacatgcacacacatgcatacatgcatgtacctgcgcggttcttacgtctctatcttctcactgcattttttgtcttctccagtaacaacatgtctgctgtttatttgttcctcctccaagtttctctttcttttctcttcctctgttatttctctcgttctttccaagattggaactattaggctg

SEQ ID NO: 266362 - DNA, 201 bp, Homo sapiens
tatttcccccattttgtaaatatgtagttggtattttggattcattggtaggacctcatatctgcactaaatttaatttaaagaattcattccagcctttkagatacctatcatctcttggatcctgatttattatttcttctgttttttcccctaaaattctcatatgattttgatagaagtacattctgtatatatcca

SEQ ID NO: 266363 - DNA, 201 bp, Homo sapiens
ccttaaactcccaacacgttctgcaagtaagacttgctctcttctaaaggcatccattctattttcaaacagttctgatttttacaacgtttttctttatrtctagctaaaatcaacctccctctgttgtcctggggtacttggaagccttagtccttctgtgaagggcttatccttcagtcattaaagcaggccatgaag

SEQ ID NO: 266364 - DNA, 201 bp, Homo sapiens
acacctgtagtcccagtactttgggaagccaaggcaggcagatcatgaggtcaggtgatcaagaccatcctggccaacatggtgaaaccccgtctctgctaaaaaaaaaaaagaaagaaaaattagctgggcgtggtggtgcgtacctgtagtcccagctacttgggaggccgaggcaggagaattgcttgaaccagggag

SEQ ID NO: 266365 - DNA, 201 bp, Homo sapiens
gctgatgctgcaacttcattaataggtgtggttacttacttctgtcagtaatatgtcagttaagacatatttagaaaaaatgtcctttttcaaacaatagrcttaaatgttaaaactataagacttccaaatgacaatcttcatgaccttgaaatagtcaaagatttcttagatataataccaagagcaggattcataaat

SEQ ID NO: 266366 - DNA, 201 bp, Homo sapiens
gaagagtcattcatttatttattccacagatttttttaagcattactacatgccagacactatactggatcctaaaaatatgaagtgaacaaaattggccraaatctctgactcgtggggctgcatttaattaaggaaggaagagaacacacagtcgttaaatagtgtattggccataagtgctaaggagaaatgtaaggc

SEQ ID NO: 266367 - DNA, 201 bp, Homo sapiens
aatgtaaggcagaatgggaaattggaattgtgggagggagtcgaggagatggagccaatttctgactttagatgaggccacgcctcacggggcaggtgggrtttggatcaagcctggcctctctgagggagtgagcgatgtggccagcctgggcccagcatttcagggggaggaaagaagtacagaggcccttcaggctca

SEQ ID NO: 266368 - DNA, 201 bp, Homo sapiens
gaatgaaaagacaagtcaggacttggagaaacatatttgcaaattacatatctgataaaaggagttatatttagactatttaaagaactctcaaaactcartaaatactaaaacaacccaataaaacatagacaatagatctgaacagttacttccccaaagatagtatacagatgacaagtaaacacatgcaaagatacc

SEQ ID NO: 266369 - DNA, 201 bp, Homo sapiens
agttgggaatgggtgatgtgggggaatatttaggaacttttctagtactcaacaaattttgccccgtagacttttttttttttttttttttttttttttgyactgtggacatatagagatggttctaggacctagcactgggagctctaacatgatcttatatagctagaaagaaagtacttcttcattgtttgcaataga

SEQ ID NO: 266370 - DNA, 201 bp, Homo sapiens
ccaaaagtatattacagttttttattagaattttattaaatctacagattaattagagaattgatgactacacaaattattcttcccatccagacacatartatctctctacatttattaaagtgtttctctctatcttttagtgtaggttgtagttgttttaagtcctgcatactggttattttagatatcatacttttt

SEQ ID NO: 266371 - DNA, 201 bp, Homo sapiens
aagtctgtttatgcatgcagagtgcttagaatagtacttggcacctagtaagtgctcagtaaattttatgttactgtttttagctaaagcgaggttactckttactgatattcagaaatcagaggcttaatttgtattcgagtacattctaaataatggagtacattctaaataatggagtacattctaataacaatatat

SEQ ID NO: 266372 - DNA, 201 bp, Homo sapiens
taaggaagggatccagtttcagttttccgcatatgtcgagccagttttccagcaccatttactgaataggagatccttttcccattgcttgtttttgtcargtttgttgaagatcagatggttatagatgtgtggtgttatttctgaggtctctgttctgctccattagtctgtatgtctattttggtaccagtaccgtgc

SEQ ID NO: 266373 - DNA, 201 bp, Homo sapiens
ctcccagcaccagccagcccttttggatatgagactattatattcacaggtggagttttgtttgtttatcgaaggaaaagtgactccaggaatgaaaaagycatgattcacaaagaatttctcgcagtgtttctgtcctagctggtcacttcagaagctaactctaaaccctatacctctttctagcctttgccacataga

SEQ ID NO: 266374 - DNA, 201 bp, Homo sapiens
ctgttcatcacatccttttgtgtcaacgcttgagttctttaggaacttcttgagtggctgtttgtcactgtgttggtctgaccgtggatggttctgctgcrcccccatacacagccacttatggtgctccctcccctctccttcaagtgctggcccagcacctctgtcctcatcgtctcatctcttaccctgtcagttttt

SEQ ID NO: 266375 - DNA, 201 bp, Homo sapiens
acagaatgtgggaagggggtttaagctttgttgaaaacagtaaaagtgtgacctcatgaggctgaatgactaaattcatctgtattatatttggtgggctsaactgtaagtcattccaccagcctgtcacaaaggggagcgactgtgacaattgtgccagctgtgtgtatatgagtgaccagagtgaccacttcctctttg

SEQ ID NO: 266376 - DNA, 201 bp, Homo sapiens
gcggatcgcttgagcctcagaaattttgaccaacctaggcaacatagtgaaaccccagctttacaagaaatataaaaattagctgggtgtggttttgcacstgtagtacgaagctgagaggtgggagaatcacctgagcctgggaggtcagggctgcagtgggccgtgattgcaccattgcactccagcctgggcaatgga

SEQ ID NO: 266377 - DNA, 201 bp, Homo sapiens
ttggtgcttgtgctaggcctggaaccctcatgtccctactatattctgacaccagaccatactgaaatggcagcagtcatgagtcatgacaggggtgttcrcatctgactacaatatggagggtcttccactaattttcagtgtggatttccatgagaaagatttattacaggtgttttctttcagccatttgaatttacc

SEQ ID NO: 266378 - DNA, 201 bp, Homo sapiens
cttgagcctcagaaattttgaccaacctaggcaacatagtgaaaccccagctttacaagaaatataaaaattagctgggtgtggttttgcacgtgtagtaygaagctgagaggtgggagaatcacctgagcctgggaggtcagggctgcagtgggccgtgattgcaccattgcactccagcctgggcaatggagtgagacc

SEQ ID NO: 266379 - DNA, 201 bp, Homo sapiens
ctaagattttctatgagaagattatttgcaacatcctattaaattatgagttgatttttaaaaaattattatgaaaaatccttaaaatatttcaaagaacrtgcttatacacacagagacacacacacagacacgcacacaaacacacacacacacaaacacaaactcccattctgaattaatcagtcttcatgtcttgac

SEQ ID NO: 266380 - DNA, 201 bp, Homo sapiens
ttcttggtttcttttatactatttctactttccatcgcttccattgagactttcagctcgtcacatctaatatctaaacaacaagccatgaactcatctcsttgtccttggtctcccttgactcccactgtcctgtgaattcccactctcctgtgaattcccactgcctcatctgtaatttcgtcatcaagagtcattcct

SEQ ID NO: 266381 - DNA, 201 bp, Homo sapiens
atatcatgtctcatgtgataatagtatctgaataggttatccttatggattcttagcaaatcattgaagcaaaagaaagctgtaactaaaatctcttactygtgatcagttttcaaaaggaatcaactaccctggcaagcactttattatttttgttccattattagtacctgctttatgcattccttttgggaaacttag

SEQ ID NO: 266382 - DNA, 201 bp, Homo sapiens
ctggagaattattgaggcagagagacagagaccctgtgcttggactcatgctttcctagcatctaagtagcatgaaaagtttctcctctagtctgttaacytgatgaactacatacatagattttctgatgttaaactattcttaaatccttgggatgaaccctgcttgattctgcttttttaactgtacactttcttatg

SEQ ID NO: 266383 - DNA, 201 bp, Homo sapiens
atagattttctgatgttaaactattcttaaatccttgggatgaaccctgcttgattctgcttttttaactgtacactttcttatgttagataatatttacraaggatttttatatctatagccttatgtaaaattggcctgtaattttcttttcttacattgttcttatccagttgggtaacaagatattagtctcataaa

SEQ ID NO: 266384 - DNA, 201 bp, Homo sapiens
ttatttgaagcaacaggtataaggattatctgtcaaatattattttaatggaaaaaatacaataaagaacagcgtaaagaaagaaaattaaatttgagctkaccctatagcataacattgttgtcagtatgaaagtgaacaatagtaatgttttaaagacccaatcaacagatgaggatttagcagcctgtgtttggagta

SEQ ID NO: 266385 - DNA, 201 bp, Homo sapiens
ctgagatggagatttgagaataaaagaaataagggtaggttagatgtctgatatatgaggtttcatatgtgtctccttgttaaccagtgtttcttaactgrcagcatgttagaatcacttgatgcagatcttacaaatatcagtgcccaaaaccccaccctgatcatcgcagaaagaggttctgggggtggtgagcaagca

SEQ ID NO: 266386 - DNA, 201 bp, Homo sapiens
aagggaaatccttgaatcttctgaaattttatgcaaaatgctgtggcatgtgtgtgtgcacagcttttcgaaaagataatccatagcttttatccgatccrcaaaggctttatgacctctacaagatcaggatcaagaaccacttatgtaaatgaacttccacagaagcccatgagatgcttgcttcgatgtctgggaatg

SEQ ID NO: 266387 - DNA, 201 bp, Homo sapiens
gacagtgtttcactgtgttggccaggcttgtcttgaactcctaacctcatgatccacccgcctcggcctcccagactgctgggattacaggcatgagccaycgcgcccggccgagaaccacttttctagatctagcagtaagacatgcgagtttttcactggtttcaagagaatcaagtatgtgaggaccaagagaacacc

SEQ ID NO: 266388 - DNA, 201 bp, Homo sapiens
ccttgaatcttctgaaattttatgcaaaatgctgtggcatgtgtgtgtgcacagcttttcgaaaagataatccatagcttttatccgatccacaaaggctytatgacctctacaagatcaggatcaagaaccacttatgtaaatgaacttccacagaagcccatgagatgcttgcttcgatgtctgggaatgttagaggtg

SEQ ID NO: 266389 - DNA, 201 bp, Homo sapiens
atgtaattgtctaaacttattctttggcttcttacagtctttcaaaacttatcttccaatgttattggactgtttattgaaactgtagccgcactagtccrtagctatctatccgtaagcagtcatttgaataaaataaattgtattcagaaaactacatcccctaaaacaatattcacataaaaccagggtcaaatcact

SEQ ID NO: 266390 - DNA, 201 bp, Homo sapiens
tgtaaaatatgtatctaaaacagatatagatactatagataggtgtatctatatgataaatgtatatatggttttagatatagaattttcagtatacttasaaatagttccaaaatcatatatattgtgacagataataatactttaaaatacaccaaaataatacttattcagcaatcaaatgctagtgacacagagaca

SEQ ID NO: 266391 - DNA, 201 bp, Homo sapiens
aataaaataaattgtattcagaaaactacatcccctaaaacaatattcacataaaaccagggtcaaatcactgagatacatataagaaagtaaaaacagtyttcagtaaaagatcacattctatcagagcccataaatctcactccatattgccatattaatatcaaatttataacctccacctgctgtcttccaactttc

SEQ ID NO: 266392 - DNA, 201 bp, Homo sapiens
gaagctcgttcaagaattatactctgacccagcaagaagtaaaaacaactggacattgagaaaagatcagaaacattatatgaaacatactcacaactttaaaaaaaaagcaatgataatttttttaaaaaattagaggtagaatggggaaatcacattataaacatgtcatgtttatcttcatctttctggatgtatcat

SEQ ID NO: 266393 - DNA, 201 bp, Homo sapiens
gtaaaaccaagctaagtttcagtgaatagtggcctggcacttccgtttacaaagacactgagggcataattagccatgacatattggcaaacttttttttyccttttattttctatactctaagatgtagtgttttccttctaaattcagttcaagtcttccttctgcagcactttccacttctgctcccagttttatttc

SEQ ID NO: 266394 - DNA, 201 bp, Homo sapiens
actaaatttattgaaatttcatggttttttttggtaatttattcaaattttttttttttttttttttttttttttggagatggagtcttactctgtcgccyaggctggagtgcaatagcatgatcttggctcactgcaacctctgcctcccaggttcaagtgattctcctgcctcagcctctcaagtcgctgggatttcag

SEQ ID NO: 266395 - DNA, 201 bp, Homo sapiens
tttttcctaaccagatttgttaattttttcgacctatttttcttttagaagttggggataaaactgggagatgacttaccagctgcttatttattgaaacraggtaaccagtgtatataatatatccataaacgtgctcttagttaccttacttagcagtgatgaattacccaaatccacctagcctttaataaatgggta

SEQ ID NO: 266396 - DNA, 201 bp, Homo sapiens
agttccccaagtcgttaaaagaggatcatatataagtgtgggggaagtatagatagatagacaggtagatggatagatagataaatggacagatggataaatagatagatagatagatagatagatagatagatagatagatagatagatagatagaactggatgagtcaagcattacattttagttatatggaaagtttt

SEQ ID NO: 266397 - DNA, 201 bp, Homo sapiens
attataagataaaaggaggccaggctcaataccattatacccagagcacagtcacgcagtgatttatttctgtgtaagagattggtcatgtaaatgagatsctcattcactacaggactgatacaagcatcttctctctgaaggtttgccttgcaaatggaacttactgctggcctcctttatttaggcaaatgtacatat

SEQ ID NO: 266398 - DNA, 201 bp, Homo sapiens
cataattcagaactctcagaaatgttatttttctttgaaaggaagccttgacatttctgtgcccatgtggacttacaaaacatctctgaggattgccatcrataagcatagacttgaagaaaaaaaaaaagctaagattcttatagcttataagatgctgaagatatatagtctgtggattcatttaataggctctcatct

SEQ ID NO: 266399 - DNA, 201 bp, Homo sapiens
gttccccaagtcgttaaaagaggatcatatataagtgtgggggaagtatagatagatagacaggtagatggatagatagataaatggacagatggataaatagatagatagatagatagatagatagatagatagatagatagatagatagatagaactggatgagtcaagcattacattttagttatatggaaagttttt

SEQ ID NO: 266400 - DNA, 201 bp, Homo sapiens
ataaatgacagagaagagatgccatactgaaactgtgttactgttcactgaagtcctagtttcagatattctgttgtctccattattggactaagattccrtcatccaattgacctgatgttatctgagattttgcttaatacagtcatcatcctttagggaagaatttaagaaatgagaggttgtgtctatacacccaaa

SEQ ID NO: 266401 - DNA, 201 bp, Homo sapiens
ccctgagcacatcacagccatgagatcgccatggctgttgattttcttaaagtgtttttagtggaggagcaaatgcattaatatttattaagaaggaggaggggggctcttaaaacttgtatttatacacaaatttctttctttttctttttttcttcttcttttttttttgagacggaatctcactctgttgcccaggct

SEQ ID NO: 266402 - DNA, 201 bp, Homo sapiens
ttccccaagtcgttaaaagaggatcatatataagtgtgggggaagtatagatagatagacaggtagatggatagatagataaatggacagatggataaatagatagatagatagatagatagatagatagatagatagatagatagatagatagaactggatgagtcaagcattacattttagttatatggaaagtttttg

SEQ ID NO: 266403 - DNA, 201 bp, Homo sapiens
cagtcatcatcctttagggaagaatttaagaaatgagaggttgtgtctatacacccaaaagctctgaacccaaagatgattcactgaaattccatctttayttttttccctttttactaagtcattgtaacaagcctgagatgactgtcaaggaacaataagattgtatatgagaaacttctttgaagcttatataccaaa

SEQ ID NO: 266404 - DNA, 201 bp, Homo sapiens
agacctgagacctgaagagacaggtttggtgtacatcatattggagatataatcgaagcattgagaataaatatgcctttcagggaaagtgaattctgcaccccccccccgccccggccaatttatttgctgaagtttaacctccccagtgaggctgtatttagagatagggtctttaccaaggcaattcatgttaaacta

SEQ ID NO: 266405 - DNA, 201 bp, Homo sapiens
atataattcacatactataaaattcacccatttaaagtctaaaattcattgtttgttagtatattcacagagttttgtaaccatcaccacagtcaattttkattttcatcactcccaaaagaaacccacttccctttagcagtaactcctgtttctccccaaacactgtccaccaccaccttaggcaatcactaatgcact

SEQ ID NO: 266406 - DNA, 201 bp, Homo sapiens
ctgagacctgaagagacaggtttggtgtacatcatattggagatataatcgaagcattgagaataaatatgcctttcagggaaagtgaattctgcaccccscccccgccccggccaatttatttgctgaagtttaacctccccagtgaggctgtatttagagatagggtctttaccaaggcaattcatgttaaactaggct

SEQ ID NO: 266407 - DNA, 201 bp, Homo sapiens
ggttttgtcatgttggccagactggctgtaattcctcacctcaagtgatctgcccacctcggcctcccaaagtgctgggattacagatgagagccaccacrcccggccacaaacctctttttgattgaagcaactgagaaatataaaattgtttgaaaattgtctatataaaaatgagcaaagcagtatttataaaaaaat

SEQ ID NO: 266408 - DNA, 201 bp, Homo sapiens
atataaaaattttattataggtttaagtagttgcagtatggtcagattataaatattaaggttaaattatacagcaattgcatcattttaaaaatgttttkgggggatattaaaactgatgatttacccttcagtatcatcttgctaataatacatgtaaaagatgatttttaatagtctgaaatttgatattgtttcttt

SEQ ID NO: 266409 - DNA, 201 bp, Homo sapiens
ttttggtgctttttattggtgatttcattgttcgaaatggccccaagcatagtactgaagtactggctagtgttcctgagtttaagtaggtggtgatgtcygttgtggagaaatacacattatagaaacctagttaaggcattagttatagtgatattggctatgagtgcaatgttaatgaatcaataaaatgtaataaac

SEQ ID NO: 266410 - DNA, 201 bp, Homo sapiens
ttttgttttttcaaaatagttttgcctttgaatctattttttgtgatattaataatattgtcatccctgccttcttatgattacattttacttggcgtatyttttattcatttattttgaaaccatttgtgtctttatatctaaaatgcagccctgtagacagagtatagctggacccacttccctctgtccacgtagtcc

SEQ ID NO: 266411 - DNA, 201 bp, Homo sapiens
ttagttgttacgatgtccaaaatgaaagggaagagaacctctcttttgcttcctggcagaggctctcggtaagctgttcgtctccacggctgcattctagyaacttcgttgaaaagcattcatgggtgttggtgtgtaagcggggccccgaaggaacagctaaattccaagccaccttcagctgggagtccagcccgtcca

SEQ ID NO: 266412 - DNA, 201 bp, Homo sapiens
tcagatgcgcagtaagcaataaaaaaaaatctagcttccttgtttcaccaaaggtacacttctagctctttggcacaaaccggtttagttcagtgtagatrgaatcgctcggagatctggcttcatcacgggagagaggacatttcacttctggtggtatctctcttgtacccgttgagagctgctcccacgcagttaatg

SEQ ID NO: 266413 - DNA, 201 bp, Homo sapiens
ttgttgattattatattgacggagatttagtatgtgtatccgtcaaggttctccagagaaagaaatgtttatatacatatatgttaaggaattggctcatkgttgtggcggctggcaaggctgaaatttgtgcggcaggctggcagactggaagctcagacagggttcctgtgttgcagtcttgaggcacaattccttctc

SEQ ID NO: 266414 - DNA, 201 bp, Homo sapiens
atggggatgctatttgagatgaagttcctagaagtaataagattttttttgtcttaaaacagtgatgataggatgattaagtgatctaagatggacaaatmtgtgtgagttcttaataattgggaaagatcttttttaaaaagtgttaatgtgaccatttagttaccataactggaaactagatagcattaggggccattt

SEQ ID NO: 266415 - DNA, 201 bp, Homo sapiens
ggatgttttcttttattatgattgtgtttttcagatcttcagcgttaagcgtataatgttttggaaatactgaaaagcaatgtgttataaacacaatcttsaggacaaatgcattgtggtaatacatttaaaacggattctacttttgtgtcaaattatgtcagataaattttcaatggtagcatactatgctcatgttct

SEQ ID NO: 266416 - DNA, 201 bp, Homo sapiens
ctgaagtgggaggatccctggagcccagggtgtcaaggccacagtgagctatgattacaccactgcactctagcctgggcagaagagagagactctgtctmtgaaaaaataaaaaaaaaaactttgtattttaattttaaaaaccttttatttattttatatgtttggtttctttgtgtgattttacctgggaaaactgga

SEQ ID NO: 266417 - DNA, 201 bp, Homo sapiens
gttttcccagcaatataataaagtgattttgctactgaaatggacagcacttttccatcaaatatatattgttttaggaaaatcccagtgtctcttaaaaytgacataaaacataaaaacaggccatggtgtgtgtgtcatctggtcccagctgtctctttcctgaggcactttgtagctcatctcatttctctggcctcc

SEQ ID NO: 266418 - DNA, 201 bp, Homo sapiens
ctaatcacctcttaaaggtcccatctctcaacattgttgcatcagggattaagtgtccaacttaggaactttggaggacacgttaaatccatggcaataawgtatcgttatttgtaagtactggggcattggaagatcacatgtattttcctacgatttcacagacaatccaaggcataaactcagttacctttaacatcc

SEQ ID NO: 266419 - DNA, 201 bp, Homo sapiens
ataaagtatcgttatttgtaagtactggggcattggaagatcacatgtattttcctacgatttcacagacaatccaaggcataaactcagttacctttaamatccccagtatttaaaggagattggaaactgggataggcaagtggttatagcattggaagcactgagagtttctcattccaccccacattagtatgactg

SEQ ID NO: 266420 - DNA, 201 bp, Homo sapiens
aagtactggggcattggaagatcacatgtattttcctacgatttcacagacaatccaaggcataaactcagttacctttaacatccccagtatttaaaggmgattggaaactgggataggcaagtggttatagcattggaagcactgagagtttctcattccaccccacattagtatgactgttactgatggggagcattg

SEQ ID NO: 266421 - DNA, 201 bp, Homo sapiens
agtcattgtaacaagcctgagatgactgtcaaggaacaataagattgtatatgagaaacttctttgaagcttatataccaaactcacttatgatgaatacrtatgggagtatgtgtgctccttcattttctatttatatatgggcttgggtcatagctttaattaataagttaccattagtaaatatttattccagcattg

SEQ ID NO: 266422 - DNA, 201 bp, Homo sapiens; identical to SEQ ID NO: 52808

SEQ ID NO: 266423 - DNA, 201 bp, Homo sapiens
cctgaagagacaggtttggtgtacatcatattggagatataatcgaagcattgagaataaatatgcctttcagggaaagtgaattctgcaccccccccccgccccggccaatttatttgctgaagtttaacctccccagtgaggctgtatttagagatagggtctttaccaaggcaattcatgttaaactaggctgtaagt

SEQ ID NO: 266424 - DNA, 201 bp, Homo sapiens
atatttctcctattttgtagagttttttttttttttttttttgagacgtagtctcgctctgtcaccaggctggagtgcagtggtgcaatctcagctcactkcaacctctgcctcccgggttcaagcgattctcctgcctcagcctcccaagtagccgggactacagccgcgccaccacacccagctaatttttgtattttt

SEQ ID NO: 266425 - DNA, 201 bp, Homo sapiens
tgatgaatacatatgggagtatgtgtgctccttcattttctatttatatatgggcttgggtcatagctttaattaataagttaccattagtaaatatttaytccagcattgatcttccttagatataagttaaatggcagatgaagttaaatgtgtgggatgtgatcctttatgttataatagtttatgttaaagtataac

SEQ ID NO: 266426 - DNA, 201 bp, Homo sapiens
ctcagatttgtctttttcaaatcaagttgctctccgttttttcctattctttcttaaattataagactaaatgtgaacccaaaattcgaattgaattctgktcactgttaaagacaaaatacagcagacgactgaagagtttttatttgggttgtgatcatggcgaggacattcattacaaagaaaaatctcaaaaggaag

SEQ ID NO: 266427 - DNA, 201 bp, Homo sapiens
attgataaaaataaaattatcataaacaatttagcagcagaagttaaattaactgaaattcacattggacaagtgaagattgccatagtagcctttgtaargcacagaaggatgggctgaaagatctttctttggccatgtgctaaatcagaggatgcacagactcatttgaatggaggcagaacatcaagtatttactga

SEQ ID NO: 266428 - DNA, 201 bp, Homo sapiens
acatctggtggatggtaaatcctagagggttgcagtccccaccggaaccagagatttcaagcaagcagggccaggaaggatggagggaagccccagtcaatttctctctctctctctctctctctcccctccgtctgtacccattgacctcctggtacctccccttgtcaaaacccaactggaggttgcaggacaagggag

SEQ ID NO: 266429 - DNA, 201 bp, Homo sapiens
gtctagcacctcatctggaactgcctcgagggctaacagtcactgaggagtcattttcctttgggaactgggacacactttcctcagaaaccagtccctgyctgttaaaaatatccgtagtcaccaaggaccaccagaaaagcaggctcctgggtcttgtccatgcccaaaccagctccagaaagtgtaccaaatgcaaaa

SEQ ID NO: 266430 - DNA, 201 bp, Homo sapiens
gtgctaaatcagaggatgcacagactcatttgaatggaggcagaacatcaagtatttactgaattgttgggcaagcccatgatttataaagttggtgtcartatagtgttctagtatcaattgtttttggatttttaaaaaatgttttagccttttgtacatatatgtcttcacacagagaagcatacattcatttgggga

SEQ ID NO: 266431 - DNA, 201 bp, Homo sapiens
tctggtggatggtaaatcctagagggttgcagtccccaccggaaccagagatttcaagcaagcagggccaggaaggatggagggaagccccagtcaatttctctctctctctctctctctctcccctccgtctgtacccattgacctcctggtacctccccttgtcaaaacccaactggaggttgcaggacaagggagccc

SEQ ID NO: 266432 - DNA, 201 bp, Homo sapiens
ttactgaattgttgggcaagcccatgatttataaagttggtgtcagtatagtgttctagtatcaattgtttttggatttttaaaaaatgttttagcctttkgtacatatatgtcttcacacagagaagcatacattcatttggggaatgcatttcctgggaaaaattataatttttgtgggtgtacttgtgtaaactgcat

SEQ ID NO: 266433 - DNA, 201 bp, Homo sapiens
gggcgtttacattcacaggggatttactgtcacaggggcattatacttcacctccttgagcacatccttcctttagctgagcaactttgagtctgataacrcaccttcatcattcaggggttagccagagacgtggatagatagaaatttgggtttctctttctgactcattttcttctgtgtctcctcggaggcaggtgt

SEQ ID NO: 266434 - DNA, 201 bp, Homo sapiens
gcaggttttgccaaggatattttctgctcatttttataggcttacatatttcaaagggaattgggtctgtgtgtttgcattccatctatgcgtaattcatyaaaaacattgttcagaaaacagaggaaataaacacaaacatttgtttaagatagttctagtgttatttaaaccttggacactaagaacttcagaacctgc

SEQ ID NO: 266435 - DNA, 201 bp, Homo sapiens
aataaatcttgtgtaacagacattggtgttgcatcccttataccgatttattagatcaggaagctaacagtcaaggtggccaggtaacttgtcataaaatyagcaagcgttacaaccagcattcaaatttctctttatgtagctctaaagacgttctgccttctgtgactttaaagaggtagtaggtggggagaactgggt

SEQ ID NO: 266436 - DNA, 201 bp, Homo sapiens
caaggatattttctgctcatttttataggcttacatatttcaaagggaattgggtctgtgtgtttgcattccatctatgcgtaattcatcaaaaacattgytcagaaaacagaggaaataaacacaaacatttgtttaagatagttctagtgttatttaaaccttggacactaagaacttcagaacctgctaaagtagtta

SEQ ID NO: 266437 - DNA, 201 bp, Homo sapiens
ttgtatttcttgctcatttcaagccacaggttcttctctgcctgacattgacattgaggaagaggtttaattagagtctctgcttctctctctctctctgkctctctcctctctctctgttcacctccttctctctctcaggccaagctctgaagaagtttgaggaagcttgaaagggtgtaggaaggaggagaatggggc

SEQ ID NO: 266438 - DNA, 201 bp, Homo sapiens
attgttcagaaaacagaggaaataaacacaaacatttgtttaagatagttctagtgttatttaaaccttggacactaagaacttcagaacctgctaaagtrgttaattaacatctgcttcctcagtttacctgttttgtaccttggagtcaattcttctcattttgaggaacattgagatacatgctgttcttgtaggagc

SEQ ID NO: 266439 - DNA, 201 bp, Homo sapiens
caggtgcagtgagaagacggcatgcagacagacagactagaggatgcagcctgggtctcacggggaacagtggcttcaataagacaaatggtgtcactagygtctctgccccctccctgccaaaaagagggcaaataattgtcttcatagacccagtggagcattttggccaggaccacccaagtctagggctctgagcca

SEQ ID NO: 266440 - DNA, 201 bp, Homo sapiens
cagctggctatctgccctccagtaaggtacctagtccttggatgctctctccttcctcttttatgggcgttatggagtgaattgtgttcttcaaaaaatctttttttttttttgagacagtgtctcgctctgttggctgaggctagagttatctcggctcactgcaacctccatctcccaggttcaagtaattctcctgcc

SEQ ID NO: 266441 - DNA, 201 bp, Homo sapiens
taagatagttctagtgttatttaaaccttggacactaagaacttcagaacctgctaaagtagttaattaacatctgcttcctcagtttacctgttttgtaycttggagtcaattcttctcattttgaggaacattgagatacatgctgttcttgtaggagcctaaaactttttatatgtttttttcattccaagggagttt

SEQ ID NO: 266442 - DNA, 201 bp, Homo sapiens
catagacccagtggagcattttggccaggaccacccaagtctagggctctgagccatagccccgagtgggtcttcactctggtctatagagcagcttagattttttccattgctataccttgagtgctaacacatcgcctcctatttttatttagagggtcactgtggagggagtgtgagtgtgtacatgctgtcagagct

SEQ ID NO: 266443 - DNA, 201 bp, Homo sapiens
gaacagctcctgcattcattgattttttggaagggtttttcatgtctctgtctccttcagttctgctctgatcttagttagttcttgtcgtcttctagccttttttttttttttttttttttttgagatggagtctcactctgtagcccaggctggaatacagtggcgtcatctccactcactgtaacctctaccttccag

SEQ ID NO: 266444 - DNA, 201 bp, Homo sapiens
gccatagccccgagtgggtcttcactctggtctatagagcagcttagattttttccattgctataccttgagtgctaacacatcgcctcctatttttattwagagggtcactgtggagggagtgtgagtgtgtacatgctgtcagagctgagtcttttcaataaactcatgggactctttcaattccaatcaagcaagtgt

SEQ ID NO: 266445 - DNA, 201 bp, Homo sapiens
aacagctcctgcattcattgattttttggaagggtttttcatgtctctgtctccttcagttctgctctgatcttagttagttcttgtcgtcttctagccttttttttttttttttttttttttgagatggagtctcactctgtagcccaggctggaatacagtggcgtcatctccactcactgtaacctctaccttccagg

SEQ ID NO: 266446 - DNA, 201 bp, Homo sapiens
ttccattgctataccttgagtgctaacacatcgcctcctatttttatttagagggtcactgtggagggagtgtgagtgtgtacatgctgtcagagctgagycttttcaataaactcatgggactctttcaattccaatcaagcaagtgtcctgctcaagtctctctgtttcccaggatggatgtcaaagggagaatgcaat

SEQ ID NO: 266447 - DNA, 201 bp, Homo sapiens
acctcacctcgccaacatttctgattttcagtggttactttccatttagtgactgagtatgaagatattttaggagattcaaacctttaaaaaattttttwaaaaaatctatttatagcaaatatctgtacaacctttctccagagtccccaactgttaacactttgccacatttgctttatctttctttgtctccctcac

SEQ ID NO: 266448 - DNA, 201 bp, Homo sapiens
atggtgttgaggcacatactcgttgtgcacaaactgctggcctctgctttcaggcaatttggttttataagggaagtgcatgtgctaaaaagggttttgattttttttttttctatttcagtcaactaaaaagattttcactgtatctgccaacctctaaatccaaggatgtttccttcacaaataaataattttaaaaca

SEQ ID NO: 266449 - DNA, 201 bp, Homo sapiens
catatccacaggccacttagagaagcactgttagagtatagttattttcattacacactcatctgttcagttttgttattggcaagactttaagaactttaaaaaattaaaggaaaatggaaaaaatatagacattgaaaacgaatgatctggcacagattttgcttctgggaagctggagtaggcatacttttccctctt

SEQ ID NO: 266450 - DNA, 201 bp, Homo sapiens
catggagttaggggtgccaaccgctatgtagacaaaactcatgtatacttttatctcccctcacactttaccagtagtctgctattgacgggaagccttaytgataccatgaacagttgattaatacatatttttcatatgtaatatgtactgtatgcttataataaaaaaactagagaaaacattaacagcattacaaaa

SEQ ID NO: 266451 - DNA, 201 bp, Homo sapiens
tttcttgagttttctttttgctacgttacctcagatgtggaactgaagaagctggcaaccaggaaatgtcaacatatatagacaaaaagaaaagagaagaraaaagaagcagagaggaagggaggggcagagagagagagagagagagagagaagggaggggtaaaggaagggggaagggaagggaaaaggaagaaaggaa

SEQ ID NO: 266452 - DNA, 201 bp, Homo sapiens
aatctataggatttccaaaccatattctttgcagtataccgtattgctttcagatttttaaatacacacatacagaataaatctctgaaatttatttttcrtaaatggcatcaggttagcattgcctagtggtacttagctagctacaagtttactaagaaaattggggctctataattagggccagctaggggatacacc

SEQ ID NO: 266453 - DNA, 201 bp, Homo sapiens
tacaatttgaacgctatttaattgacaatcactatttaacttaattgttagatacacaaaatttgagatgtgaatatagcagactctatttggcgtttagwatagtcttgggttttaatttctctttggtatgacatatctatctgcaaaagagggcttctgttttctaagagctcatctactaatactgattatttgaca

SEQ ID NO: 266454 - DNA, 201 bp, Homo sapiens
ttcaacctacttggagtcagagaggaggtagagctgggcttgggagaatttccgtctgtgcttggccccaaagctgctgtttagcaagacatgaaacagtrtctaagaaagattaaatgtatgttttctatatatggttttacttaataatctgctgcagacagtgttgctgactacaatttgaaaaattatggaagtcca

SEQ ID NO: 266455 - DNA, 201 bp, Homo sapiens
gagataattggagtaaatatctatggaataaatgaatggagccagagaattttccagaatataggaattgggtgcagttagaagaactaaatgcagccaaygggtaacgggacaaatgtggtgtgtaagggaagttagtttgctgtcggaggacatggcccccataaccactcatttttagatatgcttaaatgtttactg

SEQ ID NO: 266456 - DNA, 201 bp, Homo sapiens
ctactaaaaaagaaacaatttaagacttcacatgaggtgaatttttgattagattggtttaatcatttttcttaagaaaaaagttatataacttttctatkatatttcaattttaagtataatatactatattatattcttcataagatttaaatttttctcatgaagcaactacttagtctgagttttcgacactactat

SEQ ID NO: 266457 - DNA, 201 bp, Homo sapiens
cgacactactatacttatattggtttgctaaccaaaaagataatattacttctaaataatgtttgagattatgaaatgttttcaaatatattgaattacarttttgaccaatgattttataacagtgattatgttttatagaatgttagcttaaacataatttcaaggcccagagtaacttcaaaatttggattaaaatta

SEQ ID NO: 266458 - DNA, 201 bp, Homo sapiens
  misc_feature (1)...(201): n = A,T,C or G
ccaggcaacatagtatcccccgttttttcttgttacttcagtgtttaaggaactcaaaatgggcaagtaccagtctcaacttttttttttttttttaactntttttgtttctcctggtggaaaccttgccctcttgggtacgaagacatttaaaccagcagagcccagagctgagaagacacgaatgaaacattctgtgaa

SEQ ID NO: 266459 - DNA, 201 bp, Homo sapiens
ttacttcagtgtttaaggaactcaaaatgggcaagtaccagtctcaacttttttttttttttttaactatttttgtttctcctggtggaaaccttgccctyttgggtacgaagacatttaaaccagcagagcccagagctgagaagacacgaatgaaacattctgtgaatgggttattagatatagtagtgaaagcagcca

SEQ ID NO: 266460 - DNA, 201 bp, Homo sapiens
cctctggtaggaaggtcatattttagaagcctcctggctctggtttaatatcgctcacaccagggggcagagagacatgcaggaattctgccagttgctgmaaatgtctgttctaattacatattcaggaactagaaaaataaccaagtgatgcatttctgaaccttctgcaatctccgtaaaatagacgtgggcctcatc

SEQ ID NO: 266461 - DNA, 201 bp, Homo sapiens
ctcgaatgaaagggagtgtgagacattggaagaaatatgtttctatattagaacccgcattagatatcatttcacagttacaaaacttctcttcacatggratagatatcaagaaaatgagggataagtcctccctcatgttaactctcagcataacagccttggagcctatttttatcttttgttagatgagggaagttg

SEQ ID NO: 266462 - DNA, 201 bp, Homo sapiens
agatgcaacaaaagacttttaaaatccactattgagcaatctctccccgttttcctcttttccctccaattgatattaataacctaaaatggagttggcasacggtgtccattaaactcatggaacacctcttcgtgtcggattgacaggtgctgcccaagccttcaccaggttgatgtggcgacagactcagtgaatacc

SEQ ID NO: 266463 - DNA, 201 bp, Homo sapiens
attccacagaacacatacgccaactccacggctgacatcagcattgcacaccaggaggcaggcaggcctgaagcgaagcgtgtgattctgcttccggggtrggggtggagggtctgtcctgctgccttatacccccttctgttttgcattgacatttcctcaacctctgaccttgtgaacaagaatcggggaaaggtggag

SEQ ID NO: 266464 - DNA, 201 bp, Homo sapiens
aaattcaataaaacaaaaactcagttcctcagttgtggttcaacagccacatgcagccagtagccaggatatggacagagtagatacagaacattgccacsacagcagaaagtccaaccgtccagctccgtagagagaccctgaccatggcctttcaggcttagagtcttcacccaaaacccgaccacagggttcaatgtt

SEQ ID NO: 266465 - DNA, 201 bp, Homo sapiens
tttctgcttttgatgcgactttgtaattttttttcagctaggtaacaaagggaaagggtcattgccaccattataagcgaggaatatattttgaaagatcktttagtctttaaaagtttaatattctttttgttcattttgcttcatgcttattaaaggtgatggggcaaaaattgcagactgagcactccacttttatgt

SEQ ID NO: 266466 - DNA, 201 bp, Homo sapiens
agcaatttttctacctcagcctcctaagtagctgggattacaggtgcccgccaccatgcctatctaattcctttttgtatttttagtagagatggggtttyaccatgttggccagattggtctcaaactcctgaccttaagtaatctcccctccttggcctctcaaagtgctgggattataggcgtgagccactgcgccca

SEQ ID NO: 266467 - DNA, 201 bp, Homo sapiens
tggacactaagaacttcagaacctgctaaagtagttaattaacatctgcttcctcagtttacctgttttgtaccttggagtcaattcttctcattttgagraacattgagatacatgctgttcttgtaggagcctaaaactttttatatgtttttttcattccaagggagttttatgatgccatcctacacatgtgcttat

SEQ ID NO: 266468 - DNA, 201 bp, Homo sapiens
taaggaaatgtgtatatactactgtagaattaattgtaggggaaattaagcgaaaaaagtatataacatgctatcaattatctaagagaggtgcttaaatmcacacacacacacacacacagacacacacacacacaccagcttctgttagaggtaaagcagaaatctaaaaacaaacaaaaagatagtgaatatattaaa

SEQ ID NO: 266469 - DNA, 201 bp, Homo sapiens
tgaggcacaagaatagcttgaacctgggtagtggagtttactgtgagcagagattacgccagtgcactccagcctgggcaacagagtgagaccctgtctcaaaaaaaaaaaaaaggaaaaagaaagcctaaaagtcatggcagataggaagaggattcagaagagcctgactaacgttgggtcaaggagagactctgtcat

SEQ ID NO: 266470 - DNA, 201 bp, Homo sapiens
tagatatgaatcactctaaagtcagactctctgggaaggacaagtcatttaagctctccagtctttatttttctgatctatatgaagtgtagatagtaatmatgcctatattttatatgtttgttttgagtgttatatgaaattttacctacaaaggactgacacataagcaaattttaacatgttattagtttaatttga

SEQ ID NO: 266471 - DNA, 201 bp, Homo sapiens
ctgtagaattaattgtaggggaaattaagcgaaaaaagtatataacatgctatcaattatctaagagaggtgcttaaatacacacacacacacacacacasacacacacacacacaccagcttctgttagaggtaaagcagaaatctaaaaacaaacaaaaagatagtgaatatattaaacagacaaaagtagaagtgaga

SEQ ID NO: 266472 - DNA, 201 bp, Homo sapiens
ccaggctgaggcctgaacacttttaatgtgttatctcatttaagccccatgacaatcctgccagatgggaatgatgctaacccattttacagacttggaasctgaggctcggaaggctgaagtgacctgcccaaaggcatgcagcctgcagtgatggaggggggacttgcagctaagtctggcttgacttcaaagctgatt

SEQ ID NO: 266473 - DNA, 201 bp, Homo sapiens
atactaatctttttgtgtttgtatttattttaaaggtcggtttctgtttgtttgtttgtttgtttgttttagacggtgtctcgctttgttgccaggttggrgtgcagtggtgtgaactcagctcactgcagtctccacctcttggattcaagcgattctcctgcctcagccccgctagtagctgggattacagctgcgtgc

SEQ ID NO: 266474 - DNA, 201 bp, Homo sapiens
tagaattaattgtaggggaaattaagcgaaaaaagtatataacatgctatcaattatctaagagaggtgcttaaatacacacacacacacacacacagacrcacacacacacaccagcttctgttagaggtaaagcagaaatctaaaaacaaacaaaaagatagtgaatatattaaacagacaaaagtagaagtgagacat

SEQ ID NO: 266475 - DNA, 201 bp, Homo sapiens
accccaactctgtttttacaagatatatatatatatatgtaagccagtttccccattctgtatttatacaactgattgttttaaaatctgttcactcaacrgtcttttattgggcacccattatgtatcataaggtatgagccctgctcccaacaatctttcaggtcacagtgtacaaatatgtccacaagtcatagtgca

SEQ ID NO: 266476 - DNA, 201 bp, Homo sapiens
atagtgcttccttcttgaagaacaaagcagcacccttacaggaatcccagcaaaacatattaagcctaaacctagtcaagcctgtagaatcaaatataacttttttttttttttttttttttgagacagagtcttgctctgtcgcccagactggagtgcagtggtgcaatctccactcactgcaagctccacctcccaggt

SEQ ID NO: 266477 - DNA, 201 bp, Homo sapiens
ctggcactactttagaattacaattatttgctgtgactaaacaaatggcaaaagtgagaatgaggaaggtgataccgggaagaggatgagccgggtcaaaygcagaggggctttgcacataatcttcgggaatttagatgcttccttggattctgttaataaatacttgccaagtgtctcctccacagcaagcactcctgg

SEQ ID NO: 266478 - DNA, 201 bp, Homo sapiens
tgcgaggtgtgttaccagctcacctataccatcttcttttcactttccatactctcactgattcctctgcaacccacttgttcttactttcatcctttttktttgttttgttttgtttcctctttaaaatcacactggactaatctttactttgctacctcctatacagccccgtcccagatcctgtcttctcatgttttt

SEQ ID NO: 266479 - DNA, 201 bp, Homo sapiens
tacaagtcaaagatgaatgaattatatataaaccattgtataaactttgtagggagatacatatttgtaattgttattgcaaaaccccagggatggaaaasaatatgggaattatatgacaaatactagtgggcccaccattcaacttaagaaaaatattacaactaaaactgaagcgatggatgtactgctctctgattg

SEQ ID NO: 266480 - DNA, 201 bp, Homo sapiens
acctataccatcttcttttcactttccatactctcactgattcctctgcaacccacttgttcttactttcatcctttttgtttgttttgttttgtttcctytttaaaatcacactggactaatctttactttgctacctcctatacagccccgtcccagatcctgtcttctcatgtttttaacatttcagctatctggctc

SEQ ID NO: 266481 - DNA, 201 bp, Homo sapiens
cttaagaaaaatattacaactaaaactgaagcgatggatgtactgctctctgattgtgttccatttcttccttctctacagaggtaactattatcctgaayttgggatttgtcattatcaactatgtttttatactttaaaaaatacatttattaccccgtctcaactaaaaaaaatgcaaaacattagctgggcgtggtc

SEQ ID NO: 266482 - DNA, 201 bp, Homo sapiens
gctctaaccactgcaataagaagagcacagtaagcaaagatttttagattcagatgagggagaaaggtgttacttttctctaggaggatcacaggaagtamctgagtcctgaacatggaaaggtagggaaaaaatgtggatagaaacctcaagataggctagggtgctaattctccacttttccttctgtggcaaagctca

SEQ ID NO: 266483 - DNA, 201 bp, Homo sapiens
aagataattctatattgagattattcttttgcagtcctttgaagacatagcgtatagcttttatctttgctactggtaagtatgctatgagtctacttgcrgtatttttggaggtaatctgtttctctcttgcagctttagaaatcatttcaaatctttgtggttagtcgctatcacatccatgcgttcagctttggcttt

SEQ ID NO: 266484 - DNA, 201 bp, Homo sapiens
atgtaccacagtttatttatctgttcaccctatgaggacacgctggttgcttccaaactttggcaattatgaacaaagctactataaacatctgtgtgtargtttttgtgtggaaataaatgttcagttcaattcatcacttttagaatggcataagcatcacccttgtcattaggcattcatctaaacactcagggtggt

SEQ ID NO: 266485 - DNA, 201 bp, Homo sapiens
aagaagaaatgttatgtcccagtaaaatatggacatcttcagtgacaagcaacagcagtcatttagtgggttgtatgattgctgcttattatggagaaacdgattagattagattagattagattagattagattagatttgttgcctgttgtcaccagcatgcctgtttcgttaacagagccatccactatttttcatac

SEQ ID NO: 266486 - DNA, 201 bp, Homo sapiens
ccagaatataggaattgggtgcagttagaagaactaaatgcagccaatgggtaacgggacaaatgtggtgtgtaagggaagttagtttgctgtcggaggamatggcccccataaccactcatttttagatatgcttaaatgtttactgtgatttgatattaattttattttagagttaaaagtacttacgataaaaatgaa

SEQ ID NO: 266487 - DNA, 201 bp, Homo sapiens
ttgaattggtcttgaaaagttaatttgaagaactttgacaatatttctgaaaatccatttataggatatgcccacaattcattgtatggctggcttttttyccttaatttagagagctggaaaatcatgatatacaagcataaattaatgaattttttgcttgtgattcaccttctgactcctggatctaggagcaagggg

SEQ ID NO: 266488 - DNA, 201 bp, Homo sapiens
agattattctttcactttataagtaaaagaatactagaaataattgggtttgtttcatgggttccatatgtcttaattacctcaaactattgtgagaactrtatgaagatagttgtcaaatcaggaaagatgcttaaccttcactaggttaaatttgtataagtaaaatgttattcatttttttaaatattttatagagtg

SEQ ID NO: 266489 - DNA, 201 bp, Homo sapiens
ttatcattagaacaaattgcatgctgaaaaggaacttcacatttcagcatttcttttatttttttaaaaaatgaaactatgaaagaaactatataaaggartctgagaatgtcatctgccttcgttatattgtaggattgacagttgagggcttttagagatgctttcttcaaggagcttcaatcattcattggcgttcaa

SEQ ID NO: 266490 - DNA, 201 bp, Homo sapiens
cacctggccctttgcagacaatgtttgctggcccctgggttagacagggaggcctgtgagggtagatgtccacacctgcagatgcattccaaccctggagracagccaaagcccaggtatggagaggtgaatgcacaggctgttctgggaactttggcttttttgtttcaggggagtcactattttaaagaaatggcatcc

SEQ ID NO: 266491 - DNA, 201 bp, Homo sapiens
agacagagtttcactcttgttgcccaggctggagtgcagtggcgtgatcttggctcactgcaccctctgcctcctgggttcaagtgattctcctgcctcarcctcaagtagctgggattacagtcgcctgtcactacgcctggttaatttttgtatttttagtagagacgggattttgccatgttggccaggctggtcccg

SEQ ID NO: 266492 - DNA, 201 bp, Homo sapiens
cctcaggtgatccgcccgcctttccctcccaaagtgccgggattacaggcgtgagccaccgcacctggcctaagttaaatatttgtctttgtatatgaagwtctacaaattctttatgtaagtcattccatgggaaaattagaaattggtttccttttcttgttagaccatgacactggtgagctaggaatttaatattca

SEQ ID NO: 266493 - DNA, 201 bp, Homo sapiens
cacatatccatcaatttaattcatgctatctaaagcttaaaagagatgtgtgtgattatgtccatagtgaatccaaatcacttgatcaaacttagaagctrtttgtactaaagctcattgtatgtctcctaatgctatacctaatgttaaatgatgagttaatgggtgcagcacaccaacatggcacatgtatacatatgt

SEQ ID NO: 266494 - DNA, 201 bp, Homo sapiens
tgttgacacaagaccgtgtggtatatttttcatgtacttagcagtctctgtaactgtctcatttctcctttactgttttccacttctaattatttagaagygattaatgtttaaacattatttaaattccctcacacctagaatgtctagggcaatgttgaaaaatagttttccagtcgttagtctcttgtttagctcatc

SEQ ID NO: 266495 - DNA, 201 bp, Homo sapiens
aagtgctgggattacaggcacgagccaccgtgcctggcccatttttgccagttttagaattcaaactgttatcttattcttttccatgtgatttgattgatttttttcctattattgatcatctttttttaagttatctgtttatatctttgcttatttattgggggtatttatctttttcatatttatcagagcttttta

SEQ ID NO: 266496 - DNA, 201 bp, Homo sapiens
catcactttcaagaaaaccatggaactcacattaagatacgtttgttaactacgtgctcataggagtcattggagaattctaccaaattccattaaattcyggtactctgctcagtaaatagccacgaaaacaccaaggtgcttagagcaaatcctcaatcccctgctaacaccttatattacaaccgtctaattaccatg

SEQ ID NO: 266497 - DNA, 201 bp, Homo sapiens
gcacgttgtgcgcttgtaccctaaaacttaaagtataaaaaaaagataaagctcattgtaaatatttttttaaaaatcagctaaattaaacatgataaagrcagctaccataaatttgattaagtaacttaccaaacatgttataataatcaggcagtcaatgaaaatgctctgtagtactggtattatccattgggtagc

SEQ ID NO: 266498 - DNA, 201 bp, Homo sapiens
agggaaaaattcccagattttcagacaacaccattttccaccagtttctcgggaaagctgaaggatgcttaaagagaggtgtgactgagcattgatgaggsgggaggaggctacaggacattttcttccatctggtgtcacaggcagagcgtcccctatgctgaaaaattaacagcaccatgctgcctcttttatttagtg

SEQ ID NO: 266499 - DNA, 201 bp, Homo sapiens
cgtaggaaacaaataacctgtcaacctctggtttgtctccttaactttgatgctgttattggatgtataagatttcccacattaatgtggaaaacttactycatctttgtttatgatttgtatcttctgtgtctaatgtgaaagttttcatatgttgtggccttgaatatttttaaagaatatttttgtatacattttaaa

SEQ ID NO: 266500 - DNA, 201 bp, Homo sapiens
tctgcgtgaatctgttttccaattttccctgccccaggaagccccccttccttctcaccatacgctcaagtcagttcccttttgccccatggattggtgayagtcacagcatcccatcctgtgggttaaataagccaggtctttaatttatttgaaaatactaaataaaaatgattcccccttttccttagagcatattta

SEQ ID NO: 266501 - DNA, 201 bp, Homo sapiens
ccggcttgttcctaatgagcgtgttccccaggtagaagaataattataaagtatcttacctcattgatggtgttattcaaacggagcatcagtttattacmatttcccaaacaagttatggataagaactggtaaataataacaatgcctagttaccgcaggctattttgaaactgtggagaccagggctgtgtactctag

SEQ ID NO: 266502 - DNA, 201 bp, Homo sapiens
acatgtataatctaaatagttctaggtaagatctagtaggaaaccgaaaggctccttcaggacccatgggataggaacagagctggagtgctgcttcccayataccctttctccacctctgtgtccactgtcgtgggtgctagcctcggacacaacaacttacttatccatacagtgaggcagaagctgcagactcatctc

SEQ ID NO: 266503 - DNA, 201 bp, Homo sapiens
gatttagagtacacaggaggatgtgcttaggttatatgcaaatactacaccatgttatatcagggacttgagcatctgcagattttgctgtctgcaggggrtttctggaaccagtccctcctggatactgagggatgatcatatgtataaagcacacatgtctacgcccatcgatatatattttacataagtaggatggct

SEQ ID NO: 266504 - DNA, 201 bp, Homo sapiens
cgtgctggtgcacaagtgtagtcccagctactctggaggatgaggcaggagaattgcttaaacccgggaggcggagattgcagtgagccaagtttgtgcckctgctctccagcctgggcgacagagtgggattccatctcaaaaacaaaccaaaagaaaaaaaaaaaaaaccacaagcaaacaaacaaacaaaaagctttg

SEQ ID NO: 266505 - DNA, 201 bp, Homo sapiens
caaccccgatctgctcactccatccccacctgcccacccggacatccgaggggagtctgtgggagacggctgctgtgagggagagctcaggtattgttcgmaccaatgaagagagataaggaagtgtcaagactgaggcagcccagggaaaaaaaaatgctaatggtcctagaacagcatcaggttatagctagagacatt

SEQ ID NO: 266506 - DNA, 201 bp, Homo sapiens
ttacattttattttcttcttttcctaatgaggaaataaagtaaatatatagaatgtgagaaagtattaaattgtgttaagcacttgcctttgcccagtttrtcttgagtggaatgtttatgatggcttgtgctgcctgcaataaagaagacacgaataaaaagaagctttaaattctacttgctaaagaaacaaggacttt

SEQ ID NO: 266507 - DNA, 201 bp, Homo sapiens
aatctgccttttgagatgttcatttaaattacattaaaactatagatctgtttggggagatctgaacaatattgaattttcagatacttgtaaaagacatrcttaccattttatttaggactttctgaaaatttctctcagcagtgctttctagttttcagtctataggtcttgtccctaagtagatcagattttgattgt

SEQ ID NO: 266508 - DNA, 201 bp, Homo sapiens
tattaaaatgagcctttcagaagacattaagcaagaggattaggaaatcgctcaggcctccgggcaagcacttcagtgacgagaagtcatttggccacccrgagactgtatctggcggtgccccattccagggatcacggcttcttaggctgccctggctttataagacattttctgtgctaccagctcaatcagaaaagg

SEQ ID NO: 266509 - DNA, 201 bp, Homo sapiens
ctcagccgccctgggacacagtcacttgctctttagctgtcatttaattagtttgctttctatgtccttagcaaagcaataaaattgagagagaaaaagaraacttaggcaggggaagagtcttataagtctgggttttattttataatttcataagacactgcaaggtgtgcatgttgctgggagatagcatttttcagg

SEQ ID NO: 266510 - DNA, 201 bp, Homo sapiens
atcaatttaattgatccagagccacttgttgaaaatattgtccattctccactgaattacacttacattttgccaaaaattagcagattagtatttgtctrtttctgcactgtttgtcctgttccattgatctcttcctctgtcctgatgctaataccacactttcttgatgactgtaacttataataaaactcaaagaaa

SEQ ID NO: 266511 - DNA, 201 bp, Homo sapiens
cctggctttataagacattttctgtgctaccagctcaatcagaaaagggggctcttagagtgggcaccatctcttagagcgggctccgtctccttcctccyggttgttccatagcacacagtagacgttgcattgtctacagtgaactaattgtatgtgaccttgggcaagtatgtgtgtctcatgaggcttcctattgac

SEQ ID NO: 266512 - DNA, 201 bp, Homo sapiens
cctgttctgctcagggctgctcggagacaacttttattacctgagagattgtttatctacataataagacaacctttattcaccatacaattcctctcctygccctcctctaacctcctccccctcacaagaatccccaagcccctgttcttttctgtatctaggatatagttctgtaggcttccatgatctaacccttct

SEQ ID NO: 266513 - DNA, 201 bp, Homo sapiens
aggcaccggacataattgaggactagctaaaacagggacaggatcaaggaaggcctccagggttgaagatagatacactgaggccgaaagacatctagggmtttgaaaggcaaaatgagtggacaaagcagaggaagaagacagatcctgctgagctcaaaccacaagcaaggggccagagtgaaggggggaagtccagcc

SEQ ID NO: 266514 - DNA, 201 bp, Homo sapiens
gtgtgataaggcaatcatgaataaaatctcacacaatgaagctgaagattgtccctgagttatatagcacctaaactttgtctagatgtcttacaaaggawataaaaaatgaaagaggaaaagggaaggaaggagggaaggtggaagggagggaggaaggccaactgtatttctaggattggggaatttcctagtataatt

SEQ ID NO: 266515 - DNA, 201 bp, Homo sapiens
attgccatgtggaggaccccattcatagcatatgcttttagctctgatgagaacagtgctgttcttcagatcctacaagtctgcaagattggctgataaatgtttttttttttttaaggaaccaacagctctttgggtaataggcatcattacatgacataattatctcacaaacatgtctaattattctattgttttcaa

SEQ ID NO: 266516 - DNA, 201 bp, Homo sapiens
caacagtaaagggccctttatgagctattagccttttgaaaatttggttctcatcacagagatgggatttcaaagaataaggagttagatcattgttattwtcaaaacaatctggcttttttgtgcttttttagtgtttgccatgatctatgtcgttaggcaatttttaaaaatatagaatattaggtcccaatattatta

SEQ ID NO: 266517 - DNA, 201 bp, Homo sapiens
ttttgtattttagtagagacagggtttcaccatgttgcctgggctggtctcgaactcctgagctcaggcaatccgcccgcctcagcctcccagagtgctakgattacaggcgtgagccactgcacccagcctccttcttatgactcttaatgtcctataagccatttttaaaagtagcagatacctgagccctctcaatta

SEQ ID NO: 266518 - DNA, 201 bp, Homo sapiens
tgccatgtggaggaccccattcatagcatatgcttttagctctgatgagaacagtgctgttcttcagatcctacaagtctgcaagattggctgataaatgtttttttttttttaaggaaccaacagctctttgggtaataggcatcattacatgacataattatctcacaaacatgtctaattattctattgttttcaagg

SEQ ID NO: 266519 - DNA, 201 bp, Homo sapiens
tttgtattttagtagagacagggtttcaccatgttgcctgggctggtctcgaactcctgagctcaggcaatccgcccgcctcagcctcccagagtgctagkattacaggcgtgagccactgcacccagcctccttcttatgactcttaatgtcctataagccatttttaaaagtagcagatacctgagccctctcaattat

SEQ ID NO: 266520 - DNA, 201 bp, Homo sapiens
aggaccccattcatagcatatgcttttagctctgatgagaacagtgctgttcttcagatcctacaagtctgcaagattggctgataaatgttttttttttyttaaggaaccaacagctctttgggtaataggcatcattacatgacataattatctcacaaacatgtctaattattctattgttttcaaggctctttcatg

SEQ ID NO: 266521 - DNA, 201 bp, Homo sapiens
ctatcaatgatgcatcactggcttgacagcaatgttactgttgtatactaggggcaggtaaatttttctagcagaaatggtatttggaccagaagtttttrtatgaagaatttgattaaagaaatattattaagtagcccttctttctaaatatactttcatgctaaaacaaaataactcagaaaatatgaaaacagaact

SEQ ID NO: 266522 - DNA, 201 bp, Homo sapiens
gaccccattcatagcatatgcttttagctctgatgagaacagtgctgttcttcagatcctacaagtctgcaagattggctgataaatgttttttttttttwaaggaaccaacagctctttgggtaataggcatcattacatgacataattatctcacaaacatgtctaattattctattgttttcaaggctctttcatgta

SEQ ID NO: 266523 - DNA, 201 bp, Homo sapiens
caagactaaagaattcccagtggcaaaccatgatctgctgctcagctcaaattgtgggtcccagagcagccatatgtgatagttacttgtaattaaggacytcatctaaacttgaagataagctttccttgctgaaattagatattacttcctatttaacttatttagataaattatttttattttataaatagaatacat

SEQ ID NO: 266524 - DNA, 201 bp, Homo sapiens
aatactgtttgcgttagcagttatatattgtatccttaagatttggtgctatttacttacaataacattctttcacaaatctaaataatgtagaaaacctyttaaggaaatcaaaatccagttatattttcctacatgatagactaaaataataatgatgatgataacagtaattgtaaaggcatcataaaagacattaga

SEQ ID NO: 266525 - DNA, 201 bp, Homo sapiens
cttcatctaaacttgaagataagctttccttgctgaaattagatattacttcctatttaacttatttagataaattatttttattttataaatagaatacrtactttaatagtttagtagaatatctcttaattttgtagctccttcagtcaatacctttgcattcctattttatattgcattatattaatagttactggt

SEQ ID NO: 266526 - DNA, 201 bp, Homo sapiens
tctttctttctttctttctttctttctttctttctttctttctttctttctttcttcctttcttccttccttccttccttccttccttccttccttccttscttccttcctttccttctttctttctttctctctctttctttccgtctttttctttctttcctccctcctttcctccctccctctctctctctttctttc

SEQ ID NO: 266527 - DNA, 201 bp, Homo sapiens
tgcattcctattttatattgcattatattaatagttactggtcaacattatgtaatgatgttcctgagtcctttagtgtctttgccttacttacttgattstccttgtttgcagtagactgttgctgttttcctgtaatgcgttgttcttctcctgtttatttatactatctagcaaggccatggaggaatttggtagaca

SEQ ID NO: 266528 - DNA, 201 bp, Homo sapiens
tagttgttcattagtgctcatggtgatatttgtgcaaaataaataaacacacttttatgctggtgtgtatttcctcttttactcaattatttaccatgacttttttttttacccaaacataagttttaaatattgatctctgttaatgagctgcatcagaaattctccaatctgtattaattaatatcctctaaagcctgt

SEQ ID NO: 266529 - DNA, 201 bp, Homo sapiens
ttatattaatagttactggtcaacattatgtaatgatgttcctgagtcctttagtgtctttgccttacttacttgattctccttgtttgcagtagactgtygctgttttcctgtaatgcgttgttcttctcctgtttatttatactatctagcaaggccatggaggaatttggtagacatttgttaatgagtagctagcca

SEQ ID NO: 266530 - DNA, 201 bp, Homo sapiens
attgagagagtctcttacatttaaactataattggatatgttttgggttttcaaaaaccatgattttcaggaactgtgttctaatggatatagatataaakggtagagagagaaaaaaaaagtagctaaattattccagataatgaaaagcaagataaaatttgcagtggtttggtttattacattaaggtgggggaaaaa

SEQ ID NO: 266531 - DNA, 201 bp, Homo sapiens
gtcaacattatgtaatgatgttcctgagtcctttagtgtctttgccttacttacttgattctccttgtttgcagtagactgttgctgttttcctgtaatgygttgttcttctcctgtttatttatactatctagcaaggccatggaggaatttggtagacatttgttaatgagtagctagccatcctgagttaatagacaa

SEQ ID NO: 266532 - DNA, 201 bp, Homo sapiens
gaaggaggagccctagggcccctatccacagcacccaggaaggggtgcagcgcagccttggaggggagcactctctcctttctggtgcctgcgtgtctctstctctctctctgtatctgtctctgcctctgtcttgtctgcctgtctgtctcaaagcgcatagccctgattcttatttttctgcttttctcagtctctctt

SEQ ID NO: 266533 - DNA, 201 bp, Homo sapiens
tctctcctttctggtgcctgcgtgtctctctctctctctctgtatctgtctctgcctctgtcttgtctgcctgtctgtctcaaagcgcatagccctgattyttatttttctgcttttctcagtctctctttttttatgagtcttttctttcttagggtaagcactgactctttctccttaagttctttctaacctgcccag

SEQ ID NO: 266534 - DNA, 201 bp, Homo sapiens
tttttttttgagacagaatctccctctgtctcccagaccagagtgcagtggtatgatctcggctcactgcaaccactgtctcctgggttcaagtgattctyctgccatggcctcccaagtagctgggattacaggcacccaccatcatgcctagctaatttttgtatttttagtagagacagggttttgccatgttggcca

SEQ ID NO: 266535 - DNA, 201 bp, Homo sapiens
tcaaatgatccacccaccttggcctccgaaagtgctgggattacagacatgagccaccatggctggcctcaaatcaactctttaatattaatatgcctcartttatcttcaacactacatgccgtactccagtctcaataccagccttgtgctttgacattgaccttcattggccagtgcttttcttgtctgtagacttta

SEQ ID NO: 266536 - DNA, 201 bp, Homo sapiens
tcattcatgatttcctgattgattttactgaaagagctagtgagattcctttaatgctttctttcaatagaattgataatatttttctttccctggtaggrcattttgtagtaaagtaaggacactctgaaaggaatatttcagtgccccaaatactgtaaaatgatattgcccccatgaagacgttttgctctctctagt

SEQ ID NO: 266537 - DNA, 201 bp, Homo sapiens
cgcaaaatagggtctctgaaacatgtcaccaaatgtattgagcagccaatgcaaatcagtgatgttttaattaaattacacaaaatgtttaaatagtttaratagttcttacgttataggaaaacgtatcccaatgcaactttgcacatatctgtattctagcaatcaacttcctacaggggattttagtgttgtttttgt

SEQ ID NO: 266538 - DNA, 201 bp, Homo sapiens
aatctccagactgctttccacagtggctggactaatttacattcccaccaacagtgtgtaagtgtataagcgtttccttttgtttgcagccttgccacatyttttttttttttttttactttttaataatagccattctgactggtataagatggtatcttattgtggttttgatttgcatttatctgttgattaactggc

SEQ ID NO: 266539 - DNA, 201 bp, Homo sapiens
ttcttgtgtctctccacctatttgtttcgccacaccattgtgtatggtgataatttcttcacctgcgttcaccctgcctaactgccccattttacccttcwtcatctctcacctcagtcattatagttgcttattaactaatctcttggtcaccagtctccctcgcctccaactccagttaccttccttaaataaagaaaa

SEQ ID NO: 266540 - DNA, 201 bp, Homo sapiens
acaaaaggaaatattccatgttaacaaccagatattttaacatcttatttatctgagcacaaaagctggaaagcttggcctaaacatgcaactagcaaatrttttgggtgccgttatgttcttgaagctgacatattatgagagcatgtgaaacctttagcttctaaaggagagaaagaacagctagaataataaatgttc

SEQ ID NO: 266541 - DNA, 201 bp, Homo sapiens
gagaaatgcaggggaagctggtaccacaccagagccactagtccaaaacctaaggaaagaaaaaaacatggttgctgtgttgtgtgtaatcccgatccagwttcccctgagatggccattcctgcccaggaatgagtcagaggtcagggagggctgcttcatctggccagcagggtcctcctgctcactctcagggaggct

SEQ ID NO: 266542 - DNA, 201 bp, Homo sapiens
ggtatatatatcaaagcaccatgttgtataccatgaatatatacaatttttatgtttcaatttaaaaaggaaaatctaataaatgtaaaaaatgccttgcrccaagtagcagtgacccagtgacaccttgttattagtaaaacaaaggcgggccgggtgcgggggctcacgcctgttatcccagcactttgggaggccgag

SEQ ID NO: 266543 - DNA, 201 bp, Homo sapiens
aaagataataaaggaaaatccttgttttgcagtctgacagataatatggaaatcagtcttggaagtgcctatgggcactgctaaattaaagaatgaaaaamacagccagggattagggtggctcacacctgtagtcccagcactttgagaggcaggtggatcacctgaggtcaggagttcgagaccatcctggccaacatg

SEQ ID NO: 266544 - DNA, 201 bp, Homo sapiens
tgttatgttgcgttgataaaatgcctacctgattggattgagcaaggtgaacggcccaggcattgtgacgtagtgttaggtcagaaggaggattatctgcstcaggtgattctggatcatccagccgtgagcatgttcaagtttcaatgtcaggagcagacaatgtcaatgaacaatggcaggctgcagaaacagggtgga

SEQ ID NO: 266545 - DNA, 201 bp, Homo sapiens
tctgacagccctgttggacggaactttgctttatagaggcatcacactgctttatgggactgctcagggcagtgcaatgtgttgtgatccttttctagatmattgttctgcttaaaactattttttagaagaatgatttctggctgttctcatacagtcactggaattgttgtgcttctttttcatcactcatcgctggaa

SEQ ID NO: 266546 - DNA, 201 bp, Homo sapiens
ggaggtgaataagagagatggtagtagggacaaaggggccagtgtagccgaagcagggcaccaacatgaatatgacccagctcccggccaagctacggacwtggcgagaggcagatccctagctctgcaaacttgttcacttgctacatatgttatattcccatccttggttcttgtattggcattttttttttttttttt

SEQ ID NO: 266547 - DNA, 201 bp, Homo sapiens
agtgtcctagtaaacttggtagaaaattttagatttagagatgattaagcttggtgagatcattttaatttaaaaaataaaagaaaattttagatggcacrtaggcttctgatattgttctgtaactcactagcctttctgctatacttcattataataaatatttcaatataaatacaattactggattccaaatggtag

SEQ ID NO: 266548 - DNA, 201 bp, Homo sapiens
ttcccgaagctctggtgccttcagagcacatgttcaccaggctctgggagtggaggagctgggctgcagcttccctttgctttctttgctctccggggcawcctgcaggggcgtctgtccacaaagctttctgcggaggcctttgcggggcctacccagaggctgcatcctgagagtggcttcctgagcgttagtatccac

SEQ ID NO: 266549 - DNA, 201 bp, Homo sapiens
gttgtatttttagtagagatggggttttgtcattttggacaggctggattcgaactcctgacctcaggtgatccgcccacctcagcctcccagagtgctgrgagacagagtgcctggcctgttctgcatattctttagtgccctctctcaacacagcacagtgagaggcagccagtgagaaacagaggggcgggaagcaga

SEQ ID NO: 266550 - DNA, 201 bp, Homo sapiens
agaggccaaaatatcaaagggaaagttgaaagtcacaaggaaccaccctgggtcttagctccatcaactgtgtctcatgggatggcaggtaaattagttawtgttcttaacagcctagattctttacttgagaagacagggataataaaaatcaggataacatctgatcttcagggcgctgtgagggtaaataaaataatg

SEQ ID NO: 266551 - DNA, 201 bp, Homo sapiens
cttccaactctttccatttgtatatacatatggtttcctaaacatatatgtttaggaaataaaataataaaataatagaagtataaatatataacaaaagwatatatatatatatatatacagccctacattaacagcagtcattttctgtagccagcagtttacattagttaataactatttcccaggtaaatccacatt

SEQ ID NO: 266552 - DNA, 201 bp, Homo sapiens
gatttttctactttttacatgaatttcattcatttctctaattccttgtattgaatttcagagcagtgacccaaggtcatccgtactgacatgttttggtwtgaatcttcgtggtaatgataatagctacagtaatgagggctcctacctgctagattgccaggctttttaatttctgttagatggtttgcattttagcca

SEQ ID NO: 266553 - DNA, 201 bp, Homo sapiens
ctgcctgttgcttccttcctgatggagggttattgataaacatcgtgcataataagatttccaagtaagcctgtttcctctcaattattaatgattacctrgaggtctgttaaggagaatcagagatctctggacatgagtttgggtcataagaaagcggtggtgagctgtggctggcaagcctgtgctcacagggaggat

SEQ ID NO: 266554 - DNA, 201 bp, Homo sapiens
aggatatacacagattataggcaaataccacaccatgttatataaaggtgttgagcactgttggattttgctgtccataggaggtcttggagccaatcctytatgtatacaagggagcaactgtacatgcctggcaagggtattttattttatttactattctccaacatcattaaaggcaaatactattagccctatttc

SEQ ID NO: 266555 - DNA, 201 bp, Homo sapiens
gctacagtaatgagggctcctacctgctagattgccaggctttttaatttctgttagatggtttgcattttagccagggtcctctagagagcagagcttgrggcaagagtgagagctgacactttctttggaaggtggaagcccgggatggctagggtgaaaaatagaggggaataaaggcaaggaaacatgagaagcaac

SEQ ID NO: 266556 - DNA, 201 bp, Homo sapiens
ctgttgcttccttcctgatggagggttattgataaacatcgtgcataataagatttccaagtaagcctgtttcctctcaattattaatgattacctagagktctgttaaggagaatcagagatctctggacatgagtttgggtcataagaaagcggtggtgagctgtggctggcaagcctgtgctcacagggaggatgtgt

SEQ ID NO: 266557 - DNA, 201 bp, Homo sapiens
gggtcctgaggaggtgcttaactaagcagagacaagttcagattttgtggggatcttaaattacaccatttgggagaccttctttaagaaacagaatgcaraagtattactataattgataataagaaaattacaacagattataaattttaaaaattcagtagataccaggaaaatcatacttttagaaaaataacatat

SEQ ID NO: 266558 - DNA, 201 bp, Homo sapiens
ctgtggctggcaagcctgtgctcacagggaggatgtgtgagttcaatgctagcttctcttggggcagacgtaaggcatttgagctcagtctttctttgagytcgactgtatcacttgatttaggtttgctgttctggtttttaaaatttagtaatagagaagagagtacataagtagaagaccaaaactgtattgttacca

SEQ ID NO: 266559 - DNA, 201 bp, Homo sapiens
gatagaacacaggatcatgggaaagtgaagctagaataattccagaataggacatcaaagaactttcaatataagactctattacttcttactattcatatgtgtgtgtgtgtgtgtgtgtgtgtgtgtgtgtgtgtgtgtgtgtgtgtgtgtatggtttttttttggaaatatttttactatagtaataattctacaaaa

SEQ ID NO: 266560 - DNA, 201 bp, Homo sapiens
agcctgtgctcacagggaggatgtgtgagttcaatgctagcttctcttggggcagacgtaaggcatttgagctcagtctttctttgagttcgactgtatcrcttgatttaggtttgctgttctggtttttaaaatttagtaatagagaagagagtacataagtagaagaccaaaactgtattgttaccagagttccaagcg

SEQ ID NO: 266561 - DNA, 201 bp, Homo sapiens
atagaacacaggatcatgggaaagtgaagctagaataattccagaataggacatcaaagaactttcaatataagactctattacttcttactattcatatgtgtgtgtgtgtgtgtgtgtgtgtgtgtgtgtgtgtgtgtgtgtgtgtgtgtatggtttttttttggaaatatttttactatagtaataattctacaaaat

SEQ ID NO: 266562 - DNA, 201 bp, Homo sapiens
taatttaatgtagtatttatgggtgttagcttttaaaaataataccatattactcctcagaacatttgccatgggctgtctgtatccgaatctcctagaawggagatgggaaggttgttataaatgcagttttaagagttccactgggcaggggctcccctgaaatctccctgactctgctggctggatgcaggcaatctg

SEQ ID NO: 266563 - DNA, 201 bp, Homo sapiens
atctgcactgttagcagctctccagggcactgttatgcatgctcagatgtgaaaccctcggatctagattttccaacttgcactcattccaagatggcagyaggacaaccttttaactaatagaagacaaaggattcaatgtgattaaatttgtgcctaaaattttgatctcaggctatggtattttaaacataatgcttt

SEQ ID NO: 266564 - DNA, 201 bp, Homo sapiens
caacataccagtttgatacatatacatatgccatgttggtttgctgcacccatcaactcatcatttacattaggtatttctcctaatgctatccctccccsctctccccaccccacaacaggccccagtgtgtgatgttccccgccctgcatccaagtgttctcattgttcaattcccacctatgagtgagaacatgcagt

SEQ ID NO: 266565 - DNA, 201 bp, Homo sapiens
tgtgcctaaaattttgatctcaggctatggtattttaaacataatgctttacaccaggagtcccccctccccgccattgtgaaatgtacatgtgaagaatstaggttgcacgctccttatgagaatctaatgcctgatgatctgtcactgttgcccatcactcccaatgagaccatctagttgcaggaaaacaagctcaca

SEQ ID NO: 266566 - DNA, 201 bp, Homo sapiens
aattgaaactactttaaattaataaaactcagagagtaattcctcactaagtttcaagttctccataggtagttgtagctaatggctacatatgctatgtaacgtgtgtgtgtgtgtctgtgtgtgtatatattaatatgagatagtgcaaatggagaacattttcatcattgcagagagttctcttgggtgacattgttc

SEQ ID NO: 266567 - DNA, 201 bp, Homo sapiens
aagaggaggaagttgcagtgagccgagattgtaccattccactccagtctgggcaacacagcgagactccatctcaaaaaagaaaaaagaaaaaaaaaaargaagaagaagatggacttcttaggctaaggaatggtagaaagccagtggacctctgaatggccacggtgactcacgctttaaaagggccctgaactcagt

SEQ ID NO: 266568 - DNA, 201 bp, Homo sapiens
tatcacacttatctgtaaagaattaaatgtgtaataaatcaatattactcttttactgttagcattattgagcactggctgtgtgcctctcaataagcccrgttaggtccccacagccgcctgccactcctgggccccacccacctgcatcgtcctcctttctgcacttgtctcactcgcctgtgaccctttttgaccagc

SEQ ID NO: 266569 - DNA, 201 bp, Homo sapiens
gccagtggacctctgaatggccacggtgactcacgctttaaaagggccctgaactcagtacacttttctttttaacttctctgcaggaaaaaaaaaaaaamaaaacttctgaataaaattaacatactttatttgcaaaatcattacataagtagacttaacctcctggcacatgacaaagtaattatatgagttcgttga

SEQ ID NO: 266570 - DNA, 201 bp, Homo sapiens
agaattaaatgtgtaataaatcaatattactcttttactgttagcattattgagcactggctgtgtgcctctcaataagcccggttaggtccccacagccrcctgccactcctgggccccacccacctgcatcgtcctcctttctgcacttgtctcactcgcctgtgaccctttttgaccagcccagagcagtcattcaat

SEQ ID NO: 266571 - DNA, 201 bp, Homo sapiens
ttaaggcatttgcccaagaaaagaggaacttatgagtgtggacttggaggttgaacctggactgtctaatctaaacatttaactcctttagcttttcagcttttttttttttaacacacagatataattacgatagatgtcacatactcatatgtccacagtgatcactcaggtgatgagaagttaggttagatgtgggca

SEQ ID NO: 266572 - DNA, 201 bp, Homo sapiens
cattcaattccgtcagttgaactacctggtgtgggccctgttttcctaactataccctgagccatgcaaatagctatgcagttacgtgttaagtacaaacyctataccctttgcaaccttgttagtggaaagtgtgtgtccccattactttatcaagagaaggatagtttttttttcttttgggaaatattaactaagaag

SEQ ID NO: 266573 - DNA, 201 bp, Homo sapiens
gcttccaggaataccacagtccagttgacatcttcctgctcttctcccctggtccccctttgatttgtatgggtctgatgtgatttggagggtcaggcttygacagtgaggaggagagggcaagtgagttatgatgaaagagaagaatggaaggaagggatcacagccttgtccagagaaatggtaaaagcatgagtagcc

SEQ ID NO: 266574 - DNA, 201 bp, Homo sapiens
tcacagccttgtccagagaaatggtaaaagcatgagtagcctttctaagaacttgaggaatacaactttgttgggttttccatttaatactaatgaagtgraaaacggtccgggcgcagtggctcttgcctgttttcccagcactttgaaaggctgaggtgggtggatcacttgaggtcaggaactcgagaccagcctggc

SEQ ID NO: 266575 - DNA, 201 bp, Homo sapiens
gtcaaatcaggaaaacatttaaatctttttttcaatgtggccctatgattatttctcttagttaattagcaaatacttgaatggcctgttcattgctacaygcagttcattattagtagataaatgtagcaatttagtcactggaatatagcacttgcttctgcaggcattttgttaggatgtggcaatttgtgtactatt

SEQ ID NO: 266576 - DNA, 201 bp, Homo sapiens
tctcttagttaattagcaaatacttgaatggcctgttcattgctacacgcagttcattattagtagataaatgtagcaatttagtcactggaatatagcayttgcttctgcaggcattttgttaggatgtggcaatttgtgtactattttcatctggagcccagatttctttggtttgagatgtttccgatacagtaagac

SEQ ID NO: 266577 - DNA, 201 bp, Homo sapiens
cacactcaccccatctcactcttcaacatgaccatctctgcttttattatgtataggtgttccaaagcatatttcacttgaaaaatagaatgtagccgctmgaattcccaaagaatatcctggatgtattagtcagcacagactaaagtctgttgcagtaacaaacaacttcaacatttcagtggtttgaaacaacaaagg

SEQ ID NO: 266578 - DNA, 201 bp, Homo sapiens
gttcattattagtagataaatgtagcaatttagtcactggaatatagcacttgcttctgcaggcattttgttaggatgtggcaatttgtgtactattttcrtctggagcccagatttctttggtttgagatgtttccgatacagtaagacatgatctagtacattagggtgtataaatcacgcaacttcataactgccata

SEQ ID NO: 266579 - DNA, 201 bp, Homo sapiens
ccagaattcaaacactcatcctacctccagcactaccttcccggttcaagccagtgccatcttttgcatagatgttgacataagctcctagcttacgtcayagatgttgacataagcttctctgcttcctgcctacaccctggccctccagagggtattccgaacatagcagccaggtggatgtctttaaaatattagtca

SEQ ID NO: 266580 - DNA, 201 bp, Homo sapiens
aaagcgtacatgattcatttgtgtttatgcacaaggccttatcaagtatattcttggccaaaatgaacttctgtttgacaaggtgttgatgagaatcgcaycttgcacttatgacttggcacatctaatgattgaaagaattatccacagacaggcttctggctccctaaacttcaaacctgcttcctttttctccatcca

SEQ ID NO: 266581 - DNA, 201 bp, Homo sapiens
agttaaaacacacttaacacataatatgtttaagtttatgagtttataaatgttcattgaaaaaaaagattcaaatattttatcctgcctttcctattcawacaataccactggataaccaaaaaatagaagtattctaactaataaatgaaggaatgtttgaattaaaatatcatttttcaatcccaataaattaatcta

SEQ ID NO: 266582 - DNA, 201 bp, Homo sapiens
ccttcctcagtgcacggggtttgcacaccaagggagtgtgcacctaaatatttgcatctgcagtcatgaaacctgacttgccaaatgtggctttaatgggwtaccctaacattttaaaagatgagattttgagattattttctcttaaagcaaatctgtaataccatcctttcggccaatgaaagaagcaagaagttaggt

SEQ ID NO: 266583 - DNA, 201 bp, Homo sapiens
cagaatgagactgcatctcaaaaaaaaaaaaaaaaaagaacaccagtggaaatattttccaaaagtgaagcagaaagaaaatactcagtcaaggctgtagrgatgtaagttctctcctgtactattttggggatataaagtggtagggataattaggaggaaaatttgccattgtctgtgaaaatgaatgtgtgatcactt

SEQ ID NO: 266584 - DNA, 201 bp, Homo sapiens
tacaatatttcattttaccatgtaaggatgtttaaaaacacagtaacaaaagtatctagtctcaacatcacttaataaaagggaatcattttaacaggaartctgggaaatatatagtttcaaataaaggactttcttctaattggaaaatttgtccttgtcactagttggtggtgacaaacatatactaggtctaaatcc

SEQ ID NO: 266585 - DNA, 201 bp, Homo sapiens
tctgtcacccaagctggagtgcagtggcgtgatctcggctcactgcaacctccaactcctggggtgtgaacacattcttcttgtggcctccctccagctgyattgtgagaagacagccacatatgaaaatctttggttaaacaagccactgtattcttaaaccttttttctgtgcatgaaatttttcactgaggtataagt

SEQ ID NO: 266586 - DNA, 201 bp, Homo sapiens
agctattcaggaggctgagacatgagatttgcttgaaactgggaggcgtaggttgcagtaagccaagatcgtgccactgcattccagcctgggttacaggrggagaccgtgtctcaaaaaaataaataaagttgaaaacgcttatggcatttaacagtgtcacaatataaagccaagcacattttctaaagccttattttt

SEQ ID NO: 266587 - DNA, 201 bp, Homo sapiens
ataatcattgcttttcacaaaactgttttcattgttaaagagcttgagagaaagttatctgacctaaatgtttccacccattcttctagttttgttatttaaaaaaaaaaaaaaaaacgaaatctaaggaatgttccacctgtaggctcttcaaatgtttaaagcagctacaatgatttacttcctagggctttccttctg

SEQ ID NO: 266588 - DNA, 201 bp, Homo sapiens
tatcataataaaggtattttgaagattcatctgtagattcatgagcctactttcaaatatgttattcaagtcaccaattaaataagacccaggactcaaayttttgggaatctttagctgtatcctctttgttgatatttagctattaactactaacctttggatatggtcagatttttttttcctcctcctagaatattt

SEQ ID NO: 266589 - DNA, 201 bp, Homo sapiens
gaggctgaggtgggcagatcacctgaggtcgggagttcgagaccagcctgaccaacatggagaaaccctgtctctactaaaaatacaaaattagctgggcrtggtggcacatgcctgtaatctcagctacttgggaggctgaggcaggagaattgcttgaacccgggaggcggaggttgcggtgagccaagattgggccat

SEQ ID NO: 266590 - DNA, 201 bp, Homo sapiens
tgtccagagtgaggaggaggtgctacgcacttttaaacaaacggatcttgtgaaagctcactcaccatcccaagaacagcaccagagggatggcgctaagccactcatgagaaactgctcccaggatccaaccacctcccaccatgccccacctccaacactggagattacaattgaacatgagatttgggtggggacaca

SEQ ID NO: 266591 - DNA, 201 bp, Homo sapiens
ctccaacaaaccaatctataaatatgatgttcatgagatgtttcaaaatagcccatgtttggaagaaaaggatgtactttctgcttgatttggctttgagcctaaaactgctaaaaaaaaaaaaagtctgttaaaaaaattatgtcagtgatgtttagatttgtaaattcacataggcaatcagcacctcttttggtttat

SEQ ID NO: 266592 - DNA, 201 bp, Homo sapiens
aatctataaatatgatgttcatgagatgtttcaaaatagcccatgtttggaagaaaaggatgtactttctgcttgatttggctttgagcctaaaactgctaaaaaaaaaaaaagtctgttaaaaaaattatgtcagtgatgtttagatttgtaaattcacataggcaatcagcacctcttttggtttatagtatctcttgt

SEQ ID NO: 266593 - DNA, 201 bp, Homo sapiens
taatacagcaaataacagctccaacccctgtctttgtccagggtagaaactggtggatgcaaagtaagtgtgtaaaaagaacacactttgcatgcagttcctttctttctctacacattatttgtgagattgcaatacaaaagaaaatacgccaggaactcagatcactgagaatgtttgtacgtattctgggataatgag

SEQ ID NO: 266594 - DNA, 201 bp, Homo sapiens
aatacagcaaataacagctccaacccctgtctttgtccagggtagaaactggtggatgcaaagtaagtgtgtaaaaagaacacactttgcatgcagttcctttctttctctacacattatttgtgagattgcaatacaaaagaaaatacgccaggaactcagatcactgagaatgtttgtacgtattctgggataatgagt

SEQ ID NO: 266595 - DNA, 201 bp, Homo sapiens
atacagcaaataacagctccaacccctgtctttgtccagggtagaaactggtggatgcaaagtaagtgtgtaaaaagaacacactttgcatgcagttcctttctttctctacacattatttgtgagattgcaatacaaaagaaaatacgccaggaactcagatcactgagaatgtttgtacgtattctgggataatgagtc

SEQ ID NO: 266596 - DNA, 201 bp, Homo sapiens
tacagcaaataacagctccaacccctgtctttgtccagggtagaaactggtggatgcaaagtaagtgtgtaaaaagaacacactttgcatgcagttcctttctttctctacacattatttgtgagattgcaatacaaaagaaaatacgccaggaactcagatcactgagaatgtttgtacgtattctgggataatgagtca

SEQ ID NO: 266597 - DNA, 201 bp, Homo sapiens
actgcataatattctatgctctgctgcaatggctttgatttaaacatttgcctattgatttgttactgatatttctagattttggtgtgagtgcctgtgcrtgtgtgtgtgtgactatatacagcaatccagtgaataggggtatacatatttatatgcatttatttatttttttgtgtgtgagtaaaatatatgtcctta

SEQ ID NO: 266598 - DNA, 201 bp, Homo sapiens
gtagtgcattttaatgaaaaggacaccagaagggtgttatgacattagttcaaatttatgtttttactatatgggatgtattaaaaatcacttcatttctkaagtgtattaaaaataacttgatttttccatgtttacacttgtaaaatataagacattgatccaggcaacacttagaagatgcatttggcctctgcatgt

SEQ ID NO: 266599 - DNA, 201 bp, Homo sapiens
atgcagttgttacttttttatttggatgactatgatacatttgttgaaaatcaaatgaccatgtcatgtatgtgtaggtctatttctgagccctaaattcmaaataagcctgtttctatataaagacagagtaaagataccattagtagcaatacccacttaggtttagacatggtacatttggcagattttctaggtttt

SEQ ID NO: 266600 - DNA, 201 bp, Homo sapiens
atgagaagtctttctgaatgtgtctcgggttggttttgcattatagtcccagaaatatctagtaaaactgcggtagagcattttgaaattaatatagtccrccatctgcattttatcattagcagattataaattatcctgaaagagtataattgaggccatttaagatgtcttttgaatttcccctgtattaattgcatt

SEQ ID NO: 266601 - DNA, 201 bp, Homo sapiens
ataataaaggtattttgaagattcatctgtagattcatgagcctactttcaaatatgttattcaagtcaccaattaaataagacccaggactcaaattttwgggaatctttagctgtatcctctttgttgatatttagctattaactactaacctttggatatggtcagatttttttttcctcctcctagaatatttcaaa

SEQ ID NO: 266602 - DNA, 201 bp, Homo sapiens
tagaaagcagtgtagccagtgttgctcactacaactagagactggcagtttgtgctccttggatgtttgctcctggagaggaaaaaacgtcgcatcaccaragatgctaccttctgtcagcaaggccctgagcataagataaaaggatcctcttttatttggatatatttgccccacctctgtccattttacctgttttag

SEQ ID NO: 266603 - DNA, 201 bp, Homo sapiens
atagctcctggttaggtgggggaatctttctgtagctgatttatctgtgaactaccatttgtaagaggtggggtgggccgctctgagactcagtttacccrccgtaaaggattctgttccagccacactagaattgacagctgggcttcctgatgaagaggacactgcccggctgctcccccagaatactctgcttcccta

SEQ ID NO: 266604 - DNA, 201 bp, Homo sapiens
gtgtcaatgattttatatagtgacagatggaaatcaacattgcactagcaggatctgagtcacaagaatatatccattgtcacccattgtattagtttccyagggctgccaaaaaacaatctgccacaagcttggatggcttaaaacaacaggaacttactgtctcattgtcctgggagcctgaagtctgcaatcaagttg

SEQ ID NO: 266605 - DNA, 201 bp, Homo sapiens
tattttagtaggtgcatgataatatcttacattgttttaatttgcatttccctgttgtgtaatgatctgcaccatcttttcatgtgcacatttgacattcygctatcttctttactgtggcatctattcaaatttttctccatttttaattgggttgttggttgcttggttgttttcttaatactaaactgtaagtttttt

SEQ ID NO: 266606 - DNA, 201 bp, Homo sapiens
ataaaataaaatacaataaaataaaatacaataaaataactgcaaattagcctgcaagaaaaggtgttattattgagaagcaattctccatgggtctgtcrtttgtccgctcatctctgagggagacaccaacttgttctgacccatcttttcaaggaagttttagagcaaatgaccttgaaagtagagaagatagggccg

SEQ ID NO: 266607 - DNA, 201 bp, Homo sapiens
aaatttgcagatatgatggtcttttactaataaatactttagtgttcagttaagcaacttatattctcttacattaagacagtacagttattcaagtcaayttaacattgatacagtgcttttatctaagttaccagctgttttccaattttgtcagctgacccaatgatgtcctttgcagaataaaaataatattttaaa

SEQ ID NO: 266608 - DNA, 201 bp, Homo sapiens
atgggtgcaccaaaatcccacatatcaccactaaagaacttactcatgtaaccagatactacctgtttcccaaaaacttatagaaataaaagttttttttwaaaaaaaaagcaggaatgaaactcatctttaaatagccttcattttaccataagaatgatcaaacttatttcatcattcttaacctcaggatagcattaa

SEQ ID NO: 266609 - DNA, 201 bp, Homo sapiens
agaagattgagtagtcttagaagattattatgtgttaaataatgaaaatatgaggggtctgtgatgaaaatattaataatcttcctgtcttcatcatttayactagtcctgcctgagctatgcaatggtaaaagttaggggtaccttattctgtatcttagaaatgaatagattaagtcaattactctggaaaattcaaga

SEQ ID NO: 266610 - DNA, 201 bp, Homo sapiens
gaaatctccgtatggtttagtaactgaaggatttatagcaacagaatattgctcgttctcatatcctcaatgtaacacttggctaattaaacataaacctmacaaaattgtactgagaaaaacatgaaatcatttttagtacctttagactatttttaaagtttaacacttacagcgcaaatcaaaggaatgaagacaacc

SEQ ID NO: 266611 - DNA, 201 bp, Homo sapiens
tcgctcctccagaatcagagctcggtggagagctgcctccttctccagcctcctcgagggatgacctggtgaggtgcttcatagccacatagggtctgaastctctcttgttgaagaaacaagagagactgggcaagtctggcttgtaagtctgactggggaagttttgctgctaaggagggaacctgtccatgcagagtt

SEQ ID NO: 266612 - DNA, 201 bp, Homo sapiens
ggagttcagaggcagatggcagaggcagatttcagatgtccttgcaggatccagagctgaaggccaccagccttgccttcctcctacatcgaggcacgttkgtggagctgccccaaagattctgttctgaaacctaaaaacagctggcagcatctgagcacctgcctatcagtgtccacactgctcatcaccagagcctca

SEQ ID NO: 266613 - DNA, 201 bp, Homo sapiens
ctctggttaatgagtctctgaatcttgacaattttagttcctaaatatctgacacctcccacttttgtcccccagtgccgtcactcccctgttgaagataycagctatggtcccccaacagcctcacggggcttcataggccagacactgcccacaacaggtcatcagtgggagcagagcccatgcatcccatgcccactg

SEQ ID NO: 266614 - DNA, 201 bp, Homo sapiens
tgtgtgtgagtaaaatatatgtccttatacttatttccttaatttcaggctgtaataattcacacttttgctttcattttatgaaaggactccttttcccaaaaaaaaaaaaaaaaggaatttcactgtgttcagagtctgattagccaaaacaaaatattcttgtaacttaaattttgtttcatctgtttattgagcatt

SEQ ID NO: 266615 - DNA, 201 bp, Homo sapiens
ataaaactttattggcaaaagcagtctgagggccaaatcccagttttctggcctctagtctggcgagaacatagacattgaagccagtgggtgagtacccyggggacctgtgatgaaaagggtgagggcagtgtgtgggggagccccgagcacagtggaggggcgcctgacccagggaggcccaggctgacccagggagcc

SEQ ID NO: 266616 - DNA, 201 bp, Homo sapiens
gtgtgtgagtaaaatatatgtccttatacttatttccttaatttcaggctgtaataattcacacttttgctttcattttatgaaaggactccttttcccaaaaaaaaaaaaaaaaggaatttcactgtgttcagagtctgattagccaaaacaaaatattcttgtaacttaaattttgtttcatctgtttattgagcattt

SEQ ID NO: 266617 - DNA, 201 bp, Homo sapiens
atgctaatcagctaaaacttgtctatgaggtagtgaaatagaatatttgcacatttatggtttgtctaagtatttcagaagtcttatttttttacataacatgtgataaatttttaagaaaattaatatgtgcccttgtaaagtggtagtaacttgaattgtttgacaaacgcaaacttactggtgatttatttatgattt

SEQ ID NO: 266618 - DNA, 201 bp, Homo sapiens
tgctaatcagctaaaacttgtctatgaggtagtgaaatagaatatttgcacatttatggtttgtctaagtatttcagaagtcttatttttttacataacatgtgataaatttttaagaaaattaatatgtgcccttgtaaagtggtagtaacttgaattgtttgacaaacgcaaacttactggtgatttatttatgattta

SEQ ID NO: 266619 - DNA, 201 bp, Homo sapiens
tggtcaaatttttcccatccctgaggaacaatggctcccatacatttttcattactttgtgaagtacgtcatcttatttgtcctaaatttacttgttttgaaaaaaaaaaaaaaatccctgttatttcagaattgacaaataatccaaagctcgctttagccaagttactgactgtttcgtggaaattaattacttttctc

SEQ ID NO: 266620 - DNA, 201 bp, Homo sapiens
agatctcttacctctatcgcaacagatatttcagagccttcattttatatattcaattatttaaaattctcaaaattgtacaccttgcatttgacaatgcraaaatggaattctacattttaaatttcctagaacatcactgtagatccactcatcagcttggctcctcatttctgacacagttggacatatgcatgctat

SEQ ID NO: 266621 - DNA, 201 bp, Homo sapiens
ttctcctgtttcagcctcctgagtagctgagactacaggtgcccgccaccacacccggctaatttttgtattttagtagagaaggggtttcaccatgttgsccaggctggtcttgaactcctgacctaaggggatccgcctgcctcggcctcccaaagtgctgagattacaggcatgagccaccacactcggcctcacttc

SEQ ID NO: 266622 - DNA, 201 bp, Homo sapiens
gtttctccatgttggtaaggatggtcttgaactcccgacctcgggtgatctgcctgcctcggcctcccaaagtgctgggattacaggcatgagccaccacrcccagcttaagatttttactttatctactgttgctataaatcctggccttaggtcaaaacaaccttgaccataaaccctgcccttacataggttgatgta

SEQ ID NO: 266623 - DNA, 201 bp, Homo sapiens
ccatgttggtaaggatggtcttgaactcccgacctcgggtgatctgcctgcctcggcctcccaaagtgctgggattacaggcatgagccaccacgcccagyttaagatttttactttatctactgttgctataaatcctggccttaggtcaaaacaaccttgaccataaaccctgcccttacataggttgatgtagcattc

SEQ ID NO: 266624 - DNA, 201 bp, Homo sapiens
tctgtccgtaagtccctattaaatgtttcttttcgagagactggatgggtcagctcagcttcctcgaacttggcgggtgggttgcatagacctgcctgctstagaacacagaggtgtttgggccatctttctataccttttaagaaactcagaatgaatgaatattaagaactatcatagtatatcgtctttataattttc

SEQ ID NO: 266625 - DNA, 201 bp, Homo sapiens
gtggggggagggtgaccatgttaattatccacaagtgtgttgactcaaagcctttgtcattaaatttgtgctgaataaatgcctgcggcaccagccagccrtggctgctgactctttacagtaccctccttggggtctgtaagcggcccggttccctaacccactctttcactagatatctgtgtctgagtgcatttgttc

SEQ ID NO: 266626 - DNA, 201 bp, Homo sapiens
gaatgagaagtctttctgaatgtgtctcgggttggttttgcattatagtcccagaaatatctagtaaaactgcggtagagcattttgaaattaatatagtycaccatctgcattttatcattagcagattataaattatcctgaaagagtataattgaggccatttaagatgtcttttgaatttcccctgtattaattgca

SEQ ID NO: 266627 - DNA, 201 bp, Homo sapiens
tacttaaagaagatttgagtttcctaagttcagagttctcatttgtgatgcaaaaccactgcacctgtagaatctgacttagcctatctacttcaaccctsagagagacgtgtggaggggaactggtgtaatatgatgctcatgcttctttctccctgtgctctgagttctgcagtcctttgtctctgatccaggagtctc

SEQ ID NO: 266628 - DNA, 201 bp, Homo sapiens
aacattaaaacctgagatccacagtatgcatgcctaacaagagtaaggaattcaacttggctgtagttggagggaatgagaagtctttctgaatgtgtctygggttggttttgcattatagtcccagaaatatctagtaaaactgcggtagagcattttgaaattaatatagtccaccatctgcattttatcattagcaga

SEQ ID NO: 266629 - DNA, 201 bp, Homo sapiens
aacatcacctggcaagttgttagaaatgcgaatcttgatgccatcccagaaatcacaaaaatcccagggtgggttcagcgatctctggtttagcaagtccrtgccccctcccacccgagtgattctgatgcacactacagcttcagaccaagggctgttgctcatggtgtcacatgtcagaggaggatgaggttagtaaat

SEQ ID NO: 266630 - DNA, 201 bp, Homo sapiens
aaaccttcctaatggtattcctttttaaaattttcattatttaacagccttgtattatatttcctatcagttacatagaaaatatgccaaacatttatcgyaccctgacaattatactctatttcatgagttaccttctgataggtggctgaaaacagcagactcccagcaaaaaaataatctcaaagaaacatagaaggc

SEQ ID NO: 266631 - DNA, 201 bp, Homo sapiens
ttcagaccaagggctgttgctcatggtgtcacatgtcagaggaggatgaggttagtaaattataaacaggaaaagaagaaatcaaatgttgctgtcaaacrtataaggggataacatatagcatttattaaataaatgataaataacattgattaaatagcgttgattaatctattgtttttcacttaagaagtatatgtc

SEQ ID NO: 266632 - DNA, 201 bp, Homo sapiens
gccccagaacctggcctttaatcgtctgcgagcaggactgctctgggtggtggggggagggtgaccatgttaattatccacaagtgtgttgactcaaagcstttgtcattaaatttgtgctgaataaatgcctgcggcaccagccagccgtggctgctgactctttacagtaccctccttggggtctgtaagcggcccggt

SEQ ID NO: 266633 - DNA, 201 bp, Homo sapiens
ttgcagtttaataaaaagtccaagttgttaaatacattaacctgacagataaagtctaatatttctgactcatctggagacaaaacttgcctgacatgcaytcttggtggcaaatcctggcatgaactgcagtgaggctgtttatatccttgatttatcccactaagtatgaatattcatatatttcaccacagttgtatc

SEQ ID NO: 266634 - DNA, 201 bp, Homo sapiens
cttcaaatctctgcacctcaggttcctagggaagaataaatactgataatgattattcttgtgttactggggctgctctgagttttaaatgcactaatacrttgaaaccccttaggaaagtgcctgaatatagtaagtgctcaataaactttaagtagtattagtactcctggtagtactattacttgttagttattacta

SEQ ID NO: 266635 - DNA, 201 bp, Homo sapiens
aggacattatgagcgcctgcacggacactccgtgcagtttggtgatcattgtggggtttttcctgataatgctttctttttaaatttagaaataattcacrataaactataaaaagcattagaagtggccagacacggtggctcacgcctgtaatcccaccactttgggaggccgaggcaggtggatcacctgaggtcaga

SEQ ID NO: 266636 - DNA, 201 bp, Homo sapiens
aaacagaaaaccttcctaatggtattcctttttaaaattttcattatttaacagccttgtattatatttcctatcagttacatagaaaatatgccaaacayttatcgtaccctgacaattatactctatttcatgagttaccttctgataggtggctgaaaacagcagactcccagcaaaaaaataatctcaaagaaacat

SEQ ID NO: 266637 - DNA, 201 bp, Homo sapiens
gaggccaaagcaggcagatcacttgaggtcgggagttcaagaccagcctggccaacatggtgaaaccctgtctctaccaaaaatacaaaaattagccaggygtgctggcaggtgcctgtaatcccagctacttgggcggctgaggtgggagaatagcttgaacctgggaagtgtttgttgcagtgagcccagatcacacca

SEQ ID NO: 266638 - DNA, 201 bp, Homo sapiens
ctagagcagtggggttggtttaattagaggataaggcctgtagctgcagagcaggtgaacgtggagcctaattcctggttgtgggtgcaggaggagacgtgcgctgggcaccatgagagatgtggggatcattgcagcatggatataaatgtgcaaggcgctccctccctttcactcatgttcccctctgacagccctgtt

SEQ ID NO: 266639 - DNA, 201 bp, Homo sapiens
ttcaggctgggtgacagagtgtgactccgtctcaaaaaataatattaatcataatgtattatatatttctaaactgctaaaagaatagattttaaatattctcacaacaaaaaatggtaagtagggtgaggtgatgcatatgctaattagcttgatttaatctttctacaatgtatacatatatcaaaatatcacattgta

SEQ ID NO: 266640 - DNA, 201 bp, Homo sapiens
tagagcagtggggttggtttaattagaggataaggcctgtagctgcagagcaggtgaacgtggagcctaattcctggttgtgggtgcaggaggagacgtgcgctgggcaccatgagagatgtggggatcattgcagcatggatataaatgtgcaaggcgctccctccctttcactcatgttcccctctgacagccctgttg

SEQ ID NO: 266641 - DNA, 201 bp, Homo sapiens
aagatctaacttaaaatgccatgacattaaataataatttttaagaaatcattcttactgcttaacaatgcaagtgttacctgatcactgcagttgatcartttcagaaaacatgtaatatttattcctgtggaataaatactttgtttttaagtgtgagaattctgtcttcctaggagcttcatttaaaagtcttattcc

SEQ ID NO: 266642 - DNA, 201 bp, Homo sapiens
cctcaccgataccaaaatctgctgatgctcaagttcctgatgtaaattggtacagtatttttacataacctacgcatatccttccgtatattttacatcawctctggattacctaatacaatttaaatgctatgtaaggtcaggtgcggtgaaattagccaggtatggtggcatgtgcctgtaatcccagctagtcaggag

SEQ ID NO: 266643 - DNA, 201 bp, Homo sapiens
gtgagtgaatgaacaaaactttttacccacatgtcccctgacaagtagggttttgcaagtcgttcttcgtccctctcttctatcctgtcctgattttacaytgtatttttcagttcctgtaaagcagatctcaatgctggcacatttgataattaattaatggtggaataagaggaggtgttagctattaatactgtcctt

SEQ ID NO: 266644 - DNA, 201 bp, Homo sapiens
ttcaaaatataaacagtagcaaaaccaactaaactgtgtatatggctctttctatgctagttatctttcagtttcttttttaaaaaaatacagacttgagwtttcatcaattagagttcacaaatctggaaaatagataagttgtttttgtagattcaaaacttcataggcaaagctcagatacgtgttgtggcctagtag

SEQ ID NO: 266645 - DNA, 201 bp, Homo sapiens
cctatattagatttggggactgaattgaaatgaattttccattccttataacatgaaaccaaattttcaggcattttcttattatttttttctcccagatrttttcagtgtttttcttgcttactgagcactcccctgtaatctagaatggactttgctgtgcagggcggtcatatgtcagaggggaaatcagacaggaaa

SEQ ID NO: 266646 - DNA, 201 bp, Homo sapiens
gctttacagtcagggttagcaacccaagcaagctgtttgctttttgctcatgccaagctaaaaattggtgcaattctcagcagtcaattagaactaccaaragttcctgaaatcaactatgtaagctgtcattatgccccctctgcagtggtgaagctacaaccaaaggttgacctgggggtgggcctgtgaccataggtc

SEQ ID NO: 266647 - DNA, 201 bp, Homo sapiens
aaaaattcatgtacatatttgacatttatatatttgaggtgtaatgcaaatttaaaggcacacattaaatatattcagggttctagagcttttgaaatttkatgcacaaatatattgaagtgtatgtataagttaacatatataaattattttacaagggcaatgaaaatattttttagagagacactaaaatggcatgta

SEQ ID NO: 266648 - DNA, 201 bp, Homo sapiens
agtcattggtgacattaagtttccaaaaatataatggactttcctatatttggacatttgtactaagtagcatttattcagtatcctggcaggttcataatttttttttttttttgagatggagtctcgctctgtcaggttcataatgtttaaaacaactcaaagtaggcttgcaggcaggcaccttctgttcgttggagt

SEQ ID NO: 266649 - DNA, 201 bp, Homo sapiens
agtggaaataataatgatagtatctccctcataggcaacatgtcaggattaattggtatgtcttgttggtattaattttagtcttttaaaccaatatttgrtagtaacaaaatttcagggttagtggaaattttaaacattttacttccaaggggttataggttggtgggaagagactagttgcaaacctacaattgaatg

SEQ ID NO: 266650 - DNA, 201 bp, Homo sapiens
aatggcccatctctgggtatcaaggaaggactgaaggcatcgatcatgtcttccatcattcttagcccccactcttgctttctcttagttaccttccaacttctaaaaattctcaagctttgctttatctccccttgttatttccttgcttggatgggcagcaccaatttctcctgtgttggaccacttggtattgcttca

SEQ ID NO: 266651 - DNA, 201 bp, Homo sapiens
atgggttctcttgctatttcttcacattcactgcctttttcccttctgcattatctaatcaattgttaatctctctagtgtatctttattgaaaatatggyatttttttctctccatatattacatttgagactttcaacactcacttttctcctcatcatgatcctctttccctctacttccttggacatatggagcatg

SEQ ID NO: 266652 - DNA, 201 bp, Homo sapiens
attgatccgctgaagtaatgagtacataaatgactcagacttttccactcaagtttcctgtagttaaagtgaaaatcagcaattcagctgatcacagtgaygatgctgaaaacaaaggctaccatttaatgaacacttgccaaatatcatcccatgtcattttctcaacaatccaaggaggcatagaccccattttaagaa

SEQ ID NO: 266653 - DNA, 201 bp, Homo sapiens
taaaatgtcggtttccctcctgacggccatctccccctttctcttgctaacagaacagattttttttttttttcaagtgtggaccagtttgggaaatgacstcattttccgggtcagtagtgagttctgagtagtctaaaccagtcttgctaatcccttgacccttactagtgatcaggtttcagaagatccaggcccttc

SEQ ID NO: 266654 - DNA, 201 bp, Homo sapiens
agaaacttttacttttaccccttatcaatttcaactgtcaccataatcttggtcttgtccaagaccataggccataatcttggtcttgtcctaccaggagwcccaccccgggcctgtgccatccatctgacaagaatagcttctacatctttaaatcattggcaaagttactgaggagagtagcatcaaggatgaagcaat

SEQ ID NO: 266655 - DNA, 201 bp, Homo sapiens
ctagaggaaacatcttcctttctctctgcaggagccccgtcctggttttccagtgcaactcccgccacgtgatttgcttagactgtttccacttatactgwgtgacaagactcaatgatcggcagtttgttcacgaccctcaacttggctactccctgccttgtgtgggtaagtctagcatgttttctctccatctctaat

SEQ ID NO: 266656 - DNA, 201 bp, Homo sapiens
ccaaaacagcattagctgaccatcaactaaaacccccaggaacttttcacgttgactgcttccaagctgggtctcctcccaggagttcttaatgcacctcmtttttgaacataaaagaaacttttacttttaccccttatcaatttcaactgtcaccataatcttggtcttgtccaagaccataggccataatcttggtct

SEQ ID NO: 266657 - DNA, 201 bp, Homo sapiens
tgtgtgtttttcaggtacacgtctgtgtcctcccaaaaggcaacactggcagttgatagtcataactgtgtgtaagaacatataaccacacagagtgaaartgacgtttttgtgattaattcttctttccaacagctggctgtcccaactccttgattaaagagctccatcacttcaggattctgggagaagagcaggtga

SEQ ID NO: 266658 - DNA, 201 bp, Homo sapiens
cagtttcactttccatgctagcaagaagcatgtataatccttgttttagatggcaacttcaaacatttaaaggtccttcacccaccgtattttcaaaacastgacttgccaaggttctttctacctaatataataaggccctcctaatatgtggtgtctagaacaaagtacaaaatttcaactatcttatgattagagatg

SEQ ID NO: 266659 - DNA, 201 bp, Homo sapiens
ccaactccttgattaaagagctccatcacttcaggattctgggagaagagcaggtgagtgagcatctcaaaggctgcatcagactgtcatgaaagatagaygctaatgagacagtttgggctccccagggaggccgagtatgtctcctgaccctgggtgccctgaaatggggaagaaaaccatgctggagatatgtgtgag

SEQ ID NO: 266660 - DNA, 201 bp, Homo sapiens
aagatctacttccaaggtagctcattcacatgactgttggcaaaaaaagtcctcagttcctcactggctgttgtcagaaggccacagttcctcaccacatrgcccttgtcttaggctgtttgtccccatgatggcagctggctttccccagagcaagttgtccaaaagagagaacagagagaagctacagtgccttgtagg

SEQ ID NO: 266661 - DNA, 201 bp, Homo sapiens
ctgtccgtaagtccctattaaatgtttcttttcgagagactggatgggtcagctcagcttcctcgaacttggcgggtgggttgcatagacctgcctgctcyagaacacagaggtgtttgggccatctttctataccttttaagaaactcagaatgaatgaatattaagaactatcatagtatatcgtctttataattttcc

SEQ ID NO: 266662 - DNA, 201 bp, Homo sapiens
tcaggagccaaattgcattattttttagtgcttgagggaaaaaaacaaacatgaagaaaacacacgaaaaaacacttcatttcctgttatgggtcgaattwtgtcccccaaaaagataatgttgaagtgctaatccccaacacccatgaatgtgcctttatttggaaatagagtctgtgcaggtgtaatcagggtaagata

SEQ ID NO: 266663 - DNA, 201 bp, Homo sapiens
gagactggatgggtcagctcagcttcctcgaacttggcgggtgggttgcatagacctgcctgctctagaacacagaggtgtttgggccatctttctatacmttttaagaaactcagaatgaatgaatattaagaactatcatagtatatcgtctttataattttccattgtaatatcaatattctgtcttggcaggggaat

SEQ ID NO: 266664 - DNA, 201 bp, Homo sapiens
gctggacgcggtggcttacacctgtaatcccagccctttggaaggccaaggtgggcggatcatttcaggccaggagttcaagaccagactggccaacatgrtgaaaccccgtctctactaaaaataaaaaattagccaggcgtgctggtgcacaagtgtagtcccagctactctggaggatgaggcaggagaattgcttaa

SEQ ID NO: 266665 - DNA, 201 bp, Homo sapiens
cgggtgggttgcatagacctgcctgctctagaacacagaggtgtttgggccatctttctataccttttaagaaactcagaatgaatgaatattaagaactwtcatagtatatcgtctttataattttccattgtaatatcaatattctgtcttggcaggggaatttggagagtgtggaggagaaaaagaaatttagaatat

SEQ ID NO: 266666 - DNA, 201 bp, Homo sapiens
ccattctggggaggccatctgcttttctcaactcaaatgctaatccagaaacaccctcacggacacaaccagaaataatgtttagccagatatctgggcaycccatgattttgtcaagtggatgtataaaattaaccatcacaggaagttaacagtgagtcaggttagaaggctctttaagtccaagccattccagcatct

SEQ ID NO: 266667 - DNA, 201 bp, Homo sapiens
tatacaggacttaaaaatagttaaaaaaaaaaaaatagttttaaaagtacctatgagaatatactaacttcttgtagaattttctattttgaaagcaaagkgcattttcattgatgacagatatttttcttaatcatcctggttaggaaactgtacatttaaaccttcaatattattgatgaagacagttgcacattgtct

SEQ ID NO: 266668 - DNA, 201 bp, Homo sapiens
caggtaaaagagccctgcagtcccagtgaaacaggtagggcaagtagcagtaacgagctgtggaaatggggtccaggcctcaggaaatgcaggggtgaacytttgtgtacgtagttgatatagacgaggacaataacatccttaggttcaaagggacaaagtgcgtatgcatagctcccattcgaggatccataaaattaa

SEQ ID NO: 266669 - DNA, 201 bp, Homo sapiens
atagagctttaacatgggcgcactagctacaggggtggaatatggactagagactgctcatacgagactcgtttgaagactataatagtcccaagtaacayggaccacaaaccgtgttggatgaaggcgggaggaggaaagaaaggaataggaagaaggcagaagaggaacaagcagctggacgcggtggcttacacctgt

SEQ ID NO: 266670 - DNA, 201 bp, Homo sapiens
cccatgtttgagagggctccctcctgcctctctttcagcataatttttgtctttgcctatttgataaaggagattttttattattttgttatttatgaatwcaagaatttctcactggcttatttgcatttttattgtgagagaacaatgtgaaactttctccatatgaaagctatacaaaaagtctacaaaacagatctg

SEQ ID NO: 266671 - DNA, 201 bp, Homo sapiens
gggagtaatgtgaacactatagagctttaacatgggcgcactagctacaggggtggaatatggactagagactgctcatacgagactcgtttgaagactayaatagtcccaagtaacatggaccacaaaccgtgttggatgaaggcgggaggaggaaagaaaggaataggaagaaggcagaagaggaacaagcagctggac

SEQ ID NO: 266672 - DNA, 201 bp, Homo sapiens
caaacccatcttactttgttgctatggttactattataccacaagaaatccttcatttgtgtataaatggttttatagtttaacgttacttgttaatattrtacaatatgtgagcctggtgaggaatcgtagcaggacatggttgcttccatgttggaatagtgacctctaacagcgtagcagcacattcgttataaactt

SEQ ID NO: 266673 - DNA, 201 bp, Homo sapiens
tgtgtgaccttggatgatttacataccctctctgggtctcagttttgtcgtcactaaatggggacaacagtgcttagcacacagggttgttgtgaagaagrgttgagttcatatttgcagagcatttataacagtacctgacagagtacatgctatgtaaatatgagctttgttgttgttgtaagagcgttctttctctta

SEQ ID NO: 266674 - DNA, 201 bp, Homo sapiens
cctcctcagcctcctgtgaggctgctcctggctccgtggcagccttgcccaaatgggttacagtttgttaatgtctcacagaaggtggttccccaaattgwctttttggtactgcagaccaatggcccagtttacaactgagcaagctttttggggcagccatatcacacttatctgtaaagaattaaatgtgtaataaat

SEQ ID NO: 266675 - DNA, 201 bp, Homo sapiens
agagtacatgctatgtaaatatgagctttgttgttgttgtaagagcgttctttctcttacatttcatccatctcaaatgatttcaaaacatacatgaaatkgtaagaattttcaaagtatcactatggaaaatgcaatttaaattacttttgttccaaaacgtatccatgtaattaatgtataatcgccctaatgttgttt

SEQ ID NO: 266676 - DNA, 201 bp, Homo sapiens
cagtctaaggcgaggtcaggaagagatggaatatcagaaacctttgtggtctgggtaccaaaagacttgagctcaagttagtcctgcccctttcctaaatkcatgaccctgagaaggtcagttaagctccctgggcctgcactttatcttctgtacatgaaaggggtttgatgaggttgcctttatgtttctttctagctt

SEQ ID NO: 266677 - DNA, 201 bp, Homo sapiens
cataaccagcatgcctccctatgttcttaacttcctctcttattcttagctggatcctggctcacatctgaggtttcccatttcctggaagtgtcccttcragtcatgaatgtttacattctcatccaactaacccagggccaagaattgggattggtgacatttttactctgaatttctgcttcttgactatttgtcctt

SEQ ID NO: 266678 - DNA, 201 bp, Homo sapiens
cagcatgcctccctatgttcttaacttcctctcttattcttagctggatcctggctcacatctgaggtttcccatttcctggaagtgtcccttcaagtcaygaatgtttacattctcatccaactaacccagggccaagaattgggattggtgacatttttactctgaatttctgcttcttgactatttgtcctttaacct

SEQ ID NO: 266679 - DNA, 201 bp, Homo sapiens
taacaccattgtttatgctctgtgttagagtaggcctagaatctacctttgcttttcaatctttgcattgctgtcttctgtaaaaacacaaaacttggaakaacccaactatttggcctttcaacctgtgcagccacaagatgttggagaaagacgcccaagaggacaaattggctctatgttaatgtttgaacaccagct

SEQ ID NO: 266680 - DNA, 201 bp, Homo sapiens
attcccatggctctagtaaaagcccctgatcttcatgccattgcgctgcgctgtgctccccccaccccgtgttgccactgtcatctgttaacctcctgccycccgccacctcactgaggatgtttatctgtcctgtctgccacccccagttctccaaattctgtccgttttcttttcttttttatttatttatttagagat

SEQ ID NO: 266681 - DNA, 201 bp, Homo sapiens
ccattgcgctgcgctgtgctccccccaccccgtgttgccactgtcatctgttaacctcctgccccccgccacctcactgaggatgtttatctgtcctgtcygccacccccagttctccaaattctgtccgttttcttttcttttttatttatttatttagagatggagttttgctcttgctgcccaggctggaatgcaatg

SEQ ID NO: 266682 - DNA, 201 bp, Homo sapiens
ctgccacccccagttctccaaattctgtccgttttcttttcttttttatttatttatttagagatggagttttgctcttgctgcccaggctggaatgcaayggggcgatctcggctcactgcaaactctgcctcctgagttcaagtgattctcctgcctcagcctcccaagtagctgggattacaggcattaccaccacgc

SEQ ID NO: 266683 - DNA, 201 bp, Homo sapiens
attagacataattaaccacataatagatgaaaatcggaggatagtattaatttatctgtaaatatagtttctgcgtactccttatactgagaaataaaaayaaaattgtaagcctccaactgactgaacagaatccctccttgtcaaggggaccgtggagacaccttggaagctgagttccagccatgatggggtgggagg

SEQ ID NO: 266684 - DNA, 201 bp, Homo sapiens
agagataggcaaggcaaaggcctaaaggtaagcaaatcacctggtgtttttgacacagagcctggttcagaggggctctaagggtgagtgtgggaggacartaggaggtacaaacacaagtaaatgggctctgactaggcttagggttagcgttatgtggatggccctgaatgccaaggtggagatgggatttaatatggt

SEQ ID NO: 266685 - DNA, 201 bp, Homo sapiens
catctttctataccttttaagaaactcagaatgaatgaatattaagaactatcatagtatatcgtctttataattttccattgtaatatcaatattctgtyttggcaggggaatttggagagtgtggaggagaaaaagaaatttagaatatataggcatgcttttctagttcccttcaggtgtaaggatattttaaatgta

SEQ ID NO: 266686 - DNA, 201 bp, Homo sapiens
tcctgtgaggctgctcctggctccgtggcagccttgcccaaatgggttacagtttgttaatgtctcacagaaggtggttccccaaattgtctttttggtastgcagaccaatggcccagtttacaactgagcaagctttttggggcagccatatcacacttatctgtaaagaattaaatgtgtaataaatcaatattactc

SEQ ID NO: 266687 - DNA, 201 bp, Homo sapiens
ctggctccgtggcagccttgcccaaatgggttacagtttgttaatgtctcacagaaggtggttccccaaattgtctttttggtactgcagaccaatggccyagtttacaactgagcaagctttttggggcagccatatcacacttatctgtaaagaattaaatgtgtaataaatcaatattactcttttactgttagcatt

SEQ ID NO: 266688 - DNA, 201 bp, Homo sapiens
aagcctccaactgactgaacagaatccctccttgtcaaggggaccgtggagacaccttggaagctgagttccagccatgatggggtgggaggtcagacagkcctgtcatgtccccaccctcactaaccacctctaggcttccttccctaagggctaaacagaaaccaggccttcgaaaagactctacactgaggctgggca

SEQ ID NO: 266689 - DNA, 201 bp, Homo sapiens
aattcagtgagaggcaaaagatgatagagtggttaatctacgaatttgtttgttcacatctattttgcttcttcttcaaacattctgttcattgtaggcamattgatctttttaaatgcaaatctaatcttggatgaaaggttttgctgtatggccttggaatctaagattaacaataaactttgaatctctgcatttgaa

SEQ ID NO: 266690 - DNA, 201 bp, Homo sapiens
gcttcatgctgtcttagccctggaaggcaaactgagtgggggaagctacaggggaaagcaaggtatttgacttggatggttttcattcagcacaggctgcraaacaaataaggattaccacaggtgcctcagagaatacccaaggggatcagtgctgagaccctttaaaacggtgctcagtgattctttttgaggtggaaa

SEQ ID NO: 266691 - DNA, 201 bp, Homo sapiens
tgattccaaatcacacatttgggctgccccaactcctcagtggctctttggagccttcacaacaaactcttaattctccaaaaccacatgcaagacacagygttctggcttcacccacctctgtggcctcccctcattaccctcaccttcaatgctgctctccactcctactgacttgatgcctccccttgcttcccagct

SEQ ID NO: 266692 - DNA, 201 bp, Homo sapiens
tctggctaaagcctttaggacccagggtgctcccagaggttgtttctccctggattcttttctgactctttgggactacgcggaggtgctctctcctgcasgctccctgggcaccatgcggggatacccgtcctagcatttatgacatggggatgtatgtgactgcctgctgtattagctgtaccacaccctctgctcttc

SEQ ID NO: 266693 - DNA, 201 bp, Homo sapiens
tgggcaccatgcggggatacccgtcctagcatttatgacatggggatgtatgtgactgcctgctgtattagctgtaccacaccctctgctcttcaactacrgagtgaatagtttgtgtgttcctgtactcccaatccttggcacaaaatagatgtttgataaatatttgttgaataaatgagtcttcaggtgagaaaacac

SEQ ID NO: 266694 - DNA, 201 bp, Homo sapiens
tcttgacatgtgtgcccttcaccatcttatgatgcagcaaaaaggccctcaccaggtgccgttgccttgttcttggacttctcagcttctagaactgggakcccaataaacttctgtaatttataatttacccagtctgcggtattgtgttatggcaacagaaaatgtactaagatactagctatgttatccattcttacg

SEQ ID NO: 266695 - DNA, 201 bp, Homo sapiens
aacttctgtaatttataatttacccagtctgcggtattgtgttatggcaacagaaaatgtactaagatactagctatgttatccattcttacgctactatraagaaatgtctgatactgggtaatttataaagaaaagaagtttaattggcttatggttctgcaagttgtacaggaagcatagaggcttctctttcttggg

SEQ ID NO: 266696 - DNA, 201 bp, Homo sapiens
tgttactgcaatttaagaaggtgacaccaagagcactcactttcttgtcttccatttcttgagaaaaagcgtcctttctcctcttagatgcaaaggcctcyacttgtgctggacacccacctctgcctcatcaaagaggttgttcctttggctggtcccctctctcctttattgtcttctctcatttccccaatgcacatc

SEQ ID NO: 266697 - DNA, 201 bp, Homo sapiens
acaattctctaagaacaaaagaaatctctgaataactgtatatttagagaaaaggagttattctcattatttgtttatgatattcttttgtagctcttatrttgtaagtttataacactttaacgaacctccttaaattccatttaacttgttatggactggaaattgggtatagttttcagacgttggtctggtgggtga

SEQ ID NO: 266698 - DNA, 201 bp, Homo sapiens
atggactggaaattgggtatagttttcagacgttggtctggtgggtgagatttatacctggtggaattagtacatagttttgggatttgtatgcccaagtrcgtgttctctatcaaatttgctacttgggctgtttcactggcagacctgttaatagaatctcgtttgtatgtgtgtctcacagactactttgaagtgagg

SEQ ID NO: 266699 - DNA, 201 bp, Homo sapiens
aagataaatcagtccttcaccctccctgagacagctgtttcctctattctgattttctttaaatgttcaccttatcttatgtaaaatgtaggtttactggscactatctaaaggctcacaagtatataatcatcacaagtatgtctcattgcctcccccttttaaggaaaatgcataaatgctaaatctcctgagaacctc

SEQ ID NO: 266700 - DNA, 201 bp, Homo sapiens
atttagaactttcttgtcaatttctacaaagaaatctgccttttgagatgttcatttaaattacattaaaactatagatctgtttggggagatctgaacamtattgaattttcagatacttgtaaaagacatgcttaccattttatttaggactttctgaaaatttctctcagcagtgctttctagttttcagtctatagg

SEQ ID NO: 266701 - DNA, 201 bp, Homo sapiens
tctcctgagaacctcttagggaaaaagcagccacaaaggtagctgtgacttgggtttttcccaggcatgctctcaagctggaataatagaccttgatgacrgagccttctgcctcagtcactcatttcggttgtcagtactaatgaaagtaagaattttatgtttttgtgctttacaaatatacttctatatagtaagaga

SEQ ID NO: 266702 - DNA, 201 bp, Homo sapiens
tgattctggatcatccagccgtgagcatgttcaagtttcaatgtcaggagcagacaatgtcaatgaacaatggcaggctgcagaaacagggtggatacgcyggacaaagatgattcccatcataggcaggacagagcaaggtggcgtgagatttcatcatgctactcagagtgctgcacacttccaaacttatgtattgct

SEQ ID NO: 266703 - DNA, 201 bp, Homo sapiens
tagctgccttgtttagtctttccaatagaagttacaacagaaggttcaggacttttttgggtgcctaagtcatataaaaatggcacaggtaagccaaaggkataccggaattctttccctagccagcatgtgtgtcttggggctcaccctctgtcagtgtctcccaaacgaaattgatatttctgctccttcaatctccct

SEQ ID NO: 266704 - DNA, 201 bp, Homo sapiens
ggttacagtttgttaatgtctcacagaaggtggttccccaaattgtctttttggtactgcagaccaatggcccagtttacaactgagcaagctttttgggrcagccatatcacacttatctgtaaagaattaaatgtgtaataaatcaatattactcttttactgttagcattattgagcactggctgtgtgcctctcaat

SEQ ID NO: 266705 - DNA, 201 bp, Homo sapiens
ccaaattgtctttttggtactgcagaccaatggcccagtttacaactgagcaagctttttggggcagccatatcacacttatctgtaaagaattaaatgtrtaataaatcaatattactcttttactgttagcattattgagcactggctgtgtgcctctcaataagcccggttaggtccccacagccgcctgccactcct

SEQ ID NO: 266706 - DNA, 201 bp, Homo sapiens
gggctcaccctctgtcagtgtctcccaaacgaaattgatatttctgctccttcaatctccctttacagtgccagttttctaaattttttaaagggtaaaawttgaaaacatacaaaatagaaaaatccttatcaagatattgaggactaaactctgattttttttatcatacccaaatttctatctaaggagtctggggag

SEQ ID NO: 266707 - DNA, 201 bp, Homo sapiens
tgggatctgacttagtactcttacgtatacacttaagagatgtaagtatgtatgtccacaaaaagacttgtacaaaaatgttcacatcttctttattcatmatagccccaaattggaaacatctcatatgtccattaacaaaagaaagaataaacaatttgtggcacaatcaaatcatgggttattagtctgtaattaaaa

SEQ ID NO: 266708 - DNA, 201 bp, Homo sapiens
aagaataaacaatttgtggcacaatcaaatcatgggttattagtctgtaattaaaaaataaactactgatatgtacaataatatggttgaactcaaaaccytatgctggttgaaaggaactgaacacgagtataccacgtgatggcatgaagttaaggaataggccacaccacgttttggtgatagaagtcaggaaagggg

SEQ ID NO: 266709 - DNA, 201 bp, Homo sapiens
attgacatcttcgggaagaatggccacgtgtgctgtcgtgtaccctgacgttttcacttgtgagcccatcttcacctgggctctgtcactgaataacccaygcagcctgccttgacaggatctttctccagcatgctttcgagtttgcctctgccgggcgtattatttggttgagactgctttttgttgttgttgttgttg

SEQ ID NO: 266710 - DNA, 201 bp, Homo sapiens
ccattgtcttatgatttcaaaaatttcacgggaagggggcagataataagtggttttatgcctataagttatttagaattccacatatttttaaaaggggrttttaatatgttgttatttgacctgctttgagatgtctacagtcttgacttcttgatatctttgtatcttgttacagtcttattattacaagcagtgtta

SEQ ID NO: 266711 - DNA, 201 bp, Homo sapiens
cactaaagatatttaaaaaaaaacaataactgtaattgttagagccaaacctcaagaaaaatcaggaacaagccaggcgcagtggctcacgcctgtaatcycagcactttgggaggctgcggcaggtggatcacctgaggtcaagggttcaagaccagcttggccaacatggagaaaacccgtctctactaaaaatacaaa

SEQ ID NO: 266712 - DNA, 201 bp, Homo sapiens
ttacaataaaatccaatagaagtagacttcaaacagaaaagaggaaggggaaggctgtaaaatgtccagacttttaaaaggaacttgttcatgtatttttraaattaataatagtggatatcatatcatgaattgagatccattggatatatttaggagattctaaaatgtttatttagaatttgcagtctttacatctaa

SEQ ID NO: 266713 - DNA, 201 bp, Homo sapiens
ttgttcatgtatttttaaaattaataatagtggatatcatatcatgaattgagatccattggatatatttaggagattctaaaatgtttatttagaatttkcagtctttacatctaaactacatttttgtaattatttatatgtaagataaaatactgttaattgtacttaaagtatgcgaagggcatgtgattttctcag

SEQ ID NO: 266714 - DNA, 201 bp, Homo sapiens
taaaatgtttatttagaatttgcagtctttacatctaaactacatttttgtaattatttatatgtaagataaaatactgttaattgtacttaaagtatgcraagggcatgtgattttctcagaattgtttcatgaagaatttgagcaaaaaggtttaagactactcttccaaaggggtagttttttttttgtttgtttttg

SEQ ID NO: 266715 - DNA, 201 bp, Homo sapiens
tgctaaaagctgttcctgtccctgccctatcctgactctcctttgggtgtgactgcccttgagtttgagccagttgcccttcctctgggcccgctggctcmtggtacacaccctttcatagcctcattatcttcatacatctagcccccagcaagcaacttgaaggcaagagatctggtccagaaacaaaataggcccttt

SEQ ID NO: 266716 - DNA, 201 bp, Homo sapiens
gaaataatacatgattacatgtgtctttcaaaaaactaaatttcaaaagtttgtgttcaccaaaaataagcttaatttattaaaaataaatagtttatctrtttctaaaaaatgggtttctggacaatattttctttgctaaaaagtaaacatctcttctacataatcttaagggaccttagaactttcacagtccataaa

SEQ ID NO: 266717 - DNA, 201 bp, Homo sapiens
gtttgccacacttatctgggtatatcagtgtttgcttgatctaggcaacgtaatgaaatatagaaagaacgaaataatacatgattacatgtgtctttcamaaaactaaatttcaaaagtttgtgttcaccaaaaataagcttaatttattaaaaataaatagtttatctatttctaaaaaatgggtttctggacaatatt

SEQ ID NO: 266718 - DNA, 201 bp, Homo sapiens
ttgatgttgaggcatgattttctctcaggaaatataggcagaaacctaagtatgcattcacatttttctgaatgtttaaaaaactatcagagagaggaccrggcacggtggctcacgcctgtaatttcagcgctttgggaggctgaggcaggcggatcatgaggtcaagagattgagatcatcctggccaacatggtgaaa

SEQ ID NO: 266719 - DNA, 201 bp, Homo sapiens
tttaatgtcagccagtgaccttcatttctcccgtggtgaacctgtgggcttcagatgtgagcagctgcgtcagcagagcttcctagagatgtcacaggtgmttgtgcatgaaattcttatgccttaccttttcatttaactgtcaccgcaggtgcgcagcaacccccgctgggaagagcagggcaatattgcaaatcctgg

SEQ ID NO: 266720 - DNA, 201 bp, Homo sapiens
caaaatgaataaataaataaaatgcaaatagtttttatactgtgttggttcttcaacttgtagttttcaattgttttattacttttttatcattttggttyttttggttgaatctgtggatacagagcacaaactgtactgttttttcctatacatgcatacctatgacaaagcttaatttatgaattaggcacggtaaga

SEQ ID NO: 266721 - DNA, 201 bp, Homo sapiens
tacccacagtgtttaaataacttttttttttaaagaaaactattgcattacttgtgcatttatttctaatggcaattttatccttataattagcaatttgytataaactaggtgaggggaagaagttacttttcattgcaaataatgtttgtgccagttcatatcttcagatagaaattttaaactgctgggacacttttt

SEQ ID NO: 266722 - DNA, 201 bp, Homo sapiens
tctcaaaatgaataaataaataaaatgcaaatagtttttatactgtgttggttcttcaacttgtagttttcaattgttttattacttttttatcattttgktttttttggttgaatctgtggatacagagcacaaactgtactgttttttcctatacatgcatacctatgacaaagcttaatttatgaattaggcacggta

SEQ ID NO: 266723 - DNA, 201 bp, Homo sapiens
ataacctattctatacagaaactagcgtggcatatacaggaagttagagacactggcatcactgtcttagaagtctaggcattcatagcactttaagaaaytgttaagaaggtattcagcttgcaaaatgatagattataaatgaatagtaatatcccaggggaactgtagtcctatgagaaatttttctttttatttatt

SEQ ID NO: 266724 - DNA, 201 bp, Homo sapiens
gcatattaccctggaaatgaccagaccgtgaccacaaagtcaaacttgaacacctgttgctatcattgcaggtctccacattagattccttctctgagccrgaacaaaagtgactttgtggtgttccagactgcacaggactgttttcttgtgcgctcagtccagacacatgtgtacgtcaggataatgtgacatcagtat

SEQ ID NO: 266725 - DNA, 201 bp, Homo sapiens
gggaaagataagacttctctaaaaggattgctttggaaatgttagtagagtttaacctcttatatgtggctgctgcagaggctgtggcaggagactgttawgggcggacttctccagaggcagaaattgaggcagaagttggtgtgagtttatcttatccgtcggaaccgaggcctgcaaagggaaaaccgctagatcccc

SEQ ID NO: 266726 - DNA, 201 bp, Homo sapiens
gcattttgttgtcaactagactttcttaacttgaatctgtttttatgcccctttttaaagggtattacatttatttaatgattatttctaagattaatctsaaatgatttctgtgattagcactcattgactaggttttaaagtactcctctacaagagagatggttaaattgatccgcgtagttaatgaaagccttgacc

SEQ ID NO: 266727 - DNA, 201 bp, Homo sapiens
  misc_feature (1)...(201): n = A,T,C or G
gtgcagtagagcatcctgaaacaaaccccatcaacgccctctcacgctccctgtgtggttcacagagcaatcgagaaagccttggggaaatgaatgagtangatccttcttccttcaggcatcaccctgcccatcagcccagccacctacccaactgtccatacgaagttttctaagagaaccaaatcatttcaaaagatc

SEQ ID NO: 266728 - DNA, 201 bp, Homo sapiens
agaccagctggctaacatggtgaaacctcgtctctactgcaaatacaaaattacccgggcgtggtgatgagtgtctgtaatcccagctattcgggaggccraggcaggagaatctcttgaacccgggaggtggaggttgcagtgagccaggatggtgccattgcactctagcctgagagacagggtgagacaacatctcaa

SEQ ID NO: 266729 - DNA, 201 bp, Homo sapiens
cttacaattgcatcgtttaagaatacttgatgtgatagatgtcctaaataccctgacttcatcattacacattcaatgcacgtaacaacatatcacatggrcaccataaatatgtacaactattatgtatccgtgaaaaattttttaaatttaatttaaaaaaattaagaagaggatactcagcacttagcaaagcagaac

SEQ ID NO: 266730 - DNA, 201 bp, Homo sapiens
ctcagcacttagcaaagcagaacacgacatgtggccagtttagatgatactaacaaaaatgtacctataaagaaaaacaaagttctgatgtgacacttacaaaaaaaaaagaaagtatcattctgcctgtgtattcctagctgtgtttgcctacctctgtcccttgcctctatccttaaatttggagccatttgtaatggt

SEQ ID NO: 266731 - DNA, 201 bp, Homo sapiens
gaaatatgttgtactagccacttgttttctgctttattggttcactatcttaataaaaaaaagaaagatggctaactttgcagatagattaaggttgatayaaagttggaattaaggtcattacttttgcttttcgtttagtatgtttatcagcaggtatttaaaatttttctctcagatactttcttttcatttggaaaa

SEQ ID NO: 266732 - DNA, 201 bp, Homo sapiens
gcacttttggagataagctcacatgtgtttacatgcacacacacacatcttacgtgaaaattatatcaagtcagaaagtgactaatacatttacttggtgyctcattcacaaattatttaatttccaacgagttagcccttttattgaaatcccttaagtgagttcagtttttaaagtgcttacttaatgcctactgtgtg

SEQ ID NO: 266733 - DNA, 201 bp, Homo sapiens
gttaagtcactttcccgtacaaagttccaggagcaaatgaaatggctgggatttgaacttctctacatgccactctgaaatgtgtgtctttacctaatacsccagcactgaaaggtgcagagagtggatttgcccaaatcacaagctttgtaagttgtttctccaagattccaactcacattatactcttagactccctct

SEQ ID NO: 266734 - DNA, 201 bp, Homo sapiens
gagttagcccttttattgaaatcccttaagtgagttcagtttttaaagtgcttacttaatgcctactgtgtgcacaatactgtgccagatgctgttggagrtacaaatgtcaagtacagtattaccatgacagaaacaaaaacataaagcaatatgtgaatatatgtttataatggccagggaggttttaaagtgagaaaa

SEQ ID NO: 266735 - DNA, 201 bp, Homo sapiens
agttgcaagaccagatttctagtaatggtcgaaagtattgagaatacaaatgcaaatatcaacaataagcctaagtgtatctctacttttaatataaatgktgctgttatgagtatctgggaaggcttagagccacattcattattattcggttacaccatgaaaagatgtgttttgaatgcgttgcaaataatctgaaac

SEQ ID NO: 266736 - DNA, 201 bp, Homo sapiens
aaatgttgctgttatgagtatctgggaaggcttagagccacattcattattattcggttacaccatgaaaagatgtgttttgaatgcgttgcaaataatcygaaacacagaaaaaacacatattaaattttaaaagttaaatttaaagttaaatgtttaaaaagggaagacaaaaaaaaagtgtacttatgagtacagctg

SEQ ID NO: 266737 - DNA, 201 bp, Homo sapiens
aaatagcttttctgcctcaatcctgttatcacagagcatcatcttcctgatgacctctcatcttacgggaaggagagcctgaagtcttcagcacagctcartttggacacttgagtgtttggaatcctcttacatatctcactagtgcagcaggatataaaatttaggaatctggccggccagcaaagaaccttccaagaa

SEQ ID NO: 266738 - DNA, 201 bp, Homo sapiens
agttaagtcactttcccgtacaaagttccaggagcaaatgaaatggctgggatttgaacttctctacatgccactctgaaatgtgtgtctttacctaataycccagcactgaaaggtgcagagagtggatttgcccaaatcacaagctttgtaagttgtttctccaagattccaactcacattatactcttagactccctc

SEQ ID NO: 266739 - DNA, 201 bp, Homo sapiens
gggaggccgagatgggtggatcacctgaggtcaggagttcgagaccagcctggccaacatggtgaaaccccatctctactaaaaaatacaaaaattagtcrggcatggtggcaggcacctgtaatcccagctactcaggaggctcaggcaggagaattgcttgaacctgggaggcagaggttccagtgagccaagatcgcg

SEQ ID NO: 266740 - DNA, 201 bp, Homo sapiens
ctcggtgggggtaatcaggagagttagagagcaagaggagaagggcatgaaggcattacatgtgaaaatgaaacaaagccaggagctagcatggaagggcraagtgccatcctgtcttttctgtgcaggaagggttcttggagctggagcacagggtacaggggtgtggtggggaagaggcagaggagaagagaatagact

SEQ ID NO: 266741 - DNA, 201 bp, Homo sapiens
gcatgaacagaacacttagtaaccttgatgaggaagtgagccattctcggtgggggtaatcaggagagttagagagcaagaggagaagggcatgaaggcaytacatgtgaaaatgaaacaaagccaggagctagcatggaagggcgaagtgccatcctgtcttttctgtgcaggaagggttcttggagctggagcacaggg

SEQ ID NO: 266742 - DNA, 201 bp, Homo sapiens
gcatttcctttagattgccttttatgtgcagaagcattttctaagctctggtcttgcagtaccagttgcatttttgtcagtacttttagagaccatctttyagctggagcagctttttggcaaatttatatttctagaaaatgtaaattgtgcttgctacaaatgaggcatgaacagaacacttagtaaccttgatgagga

SEQ ID NO: 266743 - DNA, 201 bp, Homo sapiens
acaggggagtaatgtgaacactatagagctttaacatgggcgcactagctacaggggtggaatatggactagagactgctcatacgagactcgtttgaagmctataatagtcccaagtaacatggaccacaaaccgtgttggatgaaggcgggaggaggaaagaaaggaataggaagaaggcagaagaggaacaagcagct

SEQ ID NO: 266744 - DNA, 201 bp, Homo sapiens
tttacgataagaagatcagcagaatttaatagatagagataggcaaggcaaaggcctaaaggtaagcaaatcacctggtgtttttgacacagagcctggtycagaggggctctaagggtgagtgtgggaggacaataggaggtacaaacacaagtaaatgggctctgactaggcttagggttagcgttatgtggatggccc

SEQ ID NO: 266745 - DNA, 201 bp, Homo sapiens
gttctgttgcatcctagaaaagcaatgctcacgtatgagtatctgtgtgattctcatagataattagtcaatagaaaacagtatttacgataagaagatcrgcagaatttaatagatagagataggcaaggcaaaggcctaaaggtaagcaaatcacctggtgtttttgacacagagcctggttcagaggggctctaaggg

SEQ ID NO: 266746 - DNA, 201 bp, Homo sapiens
ggcgctccctccctttcactcatgttcccctctgacagccctgttggacggaactttgctttatagaggcatcacactgctttatgggactgctcagggcrgtgcaatgtgttgtgatccttttctagatcattgttctgcttaaaactattttttagaagaatgatttctggctgttctcatacagtcactggaattgtt

SEQ ID NO: 266747 - DNA, 201 bp, Homo sapiens
atctgtttatggatggtaggagctatcagtgttattttttttaaatttcttgtaacatttttgtatttttgagagagagagagagattgaagatatttacratgaaacaaaggagaaaaaggcaaaaaagtctagtggtggtatttttaaaatctgcgtaggtatgaccccatgtgaactatctcaagggtatgtgtttgt

SEQ ID NO: 266748 - DNA, 201 bp, Homo sapiens
atttttgagagagagagagagattgaagatatttacaatgaaacaaaggagaaaaaggcaaaaaagtctagtggtggtatttttaaaatctgcgtaggtaygaccccatgtgaactatctcaagggtatgtgtttgtgttgctttatggcataagggactatgtaaagaacactaaaatttgtaataagataaaacatcac

SEQ ID NO: 266749 - DNA, 201 bp, Homo sapiens
agggggaggagagctggtgggagtggaagagagtgagaggatggtgacctcagctttcatccggtccacactcatagtgacagtaatgacagctgcaactyactgcgcacccaccgtgtgccaggtgccacccagaagctttctttatggcactgtacgttaatggtgatgaaaaatgagctctgggccgggcgcggtggc

SEQ ID NO: 266750 - DNA, 201 bp, Homo sapiens
ctgggccgggcgcggtggctcacgcctgtaatcccagcactttgggaggctgaggcaggtggatcacgaggtcaggagatcgagaccatcctggctaacayggtgaaacccagtctctactaaaaatacaaaaaattacccgggcgtggtggcgggcgcctgtagtcccagctactcgggaggctgaggcaagagaatggt

SEQ ID NO: 266751 - DNA, 201 bp, Homo sapiens
cccaacaatcctatgaggaaggtaatgttttgacccttgtttagaaaggataaaaaacaaggttaaagaagttaagtcataggccgggcacggtggctcaygcctgtaatcccagcattttgggaggccgagatgggtggatcacctgaggtcaggagttcgagaccagcctggccaacatggtgaaaccccatctctact

SEQ ID NO: 266752 - DNA, 201 bp, Homo sapiens
atgagtaaagctttcattttgctagtcaagattactttctttctgtgcttctttatgaggaaagtcattttgtaatcatcaaggaggtttattttgatatkcttaaaggtaaatcactgcaacctaactgatagtctattatgcttatatttaatcacatattatgcatgtataatcatcagattaacctattctttgcat

SEQ ID NO: 266753 - DNA, 201 bp, Homo sapiens
cattttgctagtcaagattactttctttctgtgcttctttatgaggaaagtcattttgtaatcatcaaggaggtttattttgatattcttaaaggtaaatyactgcaacctaactgatagtctattatgcttatatttaatcacatattatgcatgtataatcatcagattaacctattctttgcataacaacacagtaat

SEQ ID NO: 266754 - DNA, 201 bp, Homo sapiens
tgggcaccatgagagatgtggggatcattgcagcatggatataaatgtgcaaggcgctccctccctttcactcatgttcccctctgacagccctgttggayggaactttgctttatagaggcatcacactgctttatgggactgctcagggcagtgcaatgtgttgtgatccttttctagatcattgttctgcttaaaact

SEQ ID NO: 266755 - DNA, 201 bp, Homo sapiens
gtgagatcattttaatttaaaaaataaaagaaaattttagatggcacataggcttctgatattgttctgtaactcactagcctttctgctatacttcattrtaataaatatttcaatataaatacaattactggattccaaatggtagcagttcttagaagtttcttttgttatataggaaaattccacagtaacatatag

SEQ ID NO: 266756 - DNA, 201 bp, Homo sapiens
gaaggactaccatttgttcccgagactctatgttttatttttgatagttgctaccaggtcaagaagtgagactagtctttatgtcagtgacaactgtaacyccaggttttaataaatgctactgtgggctgggcgtggtggctcacacctgtaatcccagtgctttgggaggcctaggtgggcagatcacctggggttggg

SEQ ID NO: 266757 - DNA, 201 bp, Homo sapiens
agctggatgtggtggtgcatgcctgtaatcccagctacttgggaggctgaggcaggagaattgcctgaacccaggaggcagaggttgaatgagccgagatygcgccactgtactccagcgtgggtaacagagtgagactccatctcaaaaaagcaaaaataagaataaatgctactgtgtgcttatgttatgttcttataa

SEQ ID NO: 266758 - DNA, 201 bp, Homo sapiens
tacttgggaggctgaggcaggagaattgcctgaacccaggaggcagaggttgaatgagccgagattgcgccactgtactccagcgtgggtaacagagtgaractccatctcaaaaaagcaaaaataagaataaatgctactgtgtgcttatgttatgttcttataaaaacattttaattaaatgtttgttaaaatgtagtt

SEQ ID NO: 266759 - DNA, 201 bp, Homo sapiens
aaaaataagaataaatgctactgtgtgcttatgttatgttcttataaaaacattttaattaaatgtttgttaaaatgtagttctttattaaaatagcgagrtgaataagtcacagccttcttccacttggatctggtgattttaactatatagcttacctttcacatgaccattggactaatagagcactgatgcctgcat

SEQ ID NO: 266760 - DNA, 201 bp, Homo sapiens
taaataatcaagaacaagtgtcttaattgcaagctttaacagttcatatatcttttggcctaatttattctgtctctctctctctttttctgtgtccttcaaacacatgtttacagaacttctttttctgtttcaagggaaaaagtcatccatttacttgattagaaatactgtttggctcttgatattagatttaatatg

SEQ ID NO: 266761 - DNA, 201 bp, Homo sapiens
gtgtcttaattgcaagctttaacagttcatatatcttttggcctaatttattctgtctctctctctctttttctgtgtccttcaaacacatgtttacagarcttctttttctgtttcaagggaaaaagtcatccatttacttgattagaaatactgtttggctcttgatattagatttaatatgcagcagctgtcaaatta

SEQ ID NO: 266762 - DNA, 201 bp, Homo sapiens
tcatatatcttttggcctaatttattctgtctctctctctctttttctgtgtccttcaaacacatgtttacagaacttctttttctgtttcaagggaaaawgtcatccatttacttgattagaaatactgtttggctcttgatattagatttaatatgcagcagctgtcaaattacgaaccggcttatagcccctcgtggt

SEQ ID NO: 266763 - DNA, 201 bp, Homo sapiens
ctttttctgtttcaagggaaaaagtcatccatttacttgattagaaatactgtttggctcttgatattagatttaatatgcagcagctgtcaaattacgamccggcttatagcccctcgtggtagatttcaagtcctgattgctatgaccttaactcatagtcatattggagaggatggcacaggacctctttctcttctg

SEQ ID NO: 266764 - DNA, 201 bp, Homo sapiens
atagtgtacctttgccctctccatgaacatataaagacatatttctgacaatcatagcagaacattttagtggtttctcacagatagcattagcagagtayattttagtttcgaattaatgctaactattgaaacacaataacttcggagatgccaatatcaggatattatcaaatctagatacttataatgctttatcac

SEQ ID NO: 266765 - DNA, 201 bp, Homo sapiens
tcgtttacatctcaggtgccagatccagtcacatgggaccctgagtgcaggagaggccaggaaatgtagtctgtacctggcagacacgtgcccagtgaagscttcttatactgcagacgggaggagaagatacacatcgggaggagaagatacacatcaggaggacaactatgagccatagcatgttgtctgacacgttaa

SEQ ID NO: 266766 - DNA, 201 bp, Homo sapiens
tgcattctgatccttgctctgccagcctgtgactcagcaccagtgacttatctgctccgagcctctgttaactcacctcttatgtgagaagctgtattcayaccactgcttgtcagaacacgttcctaaaatccttatggttctatgcatgaaatctgacttcaaatttcatttttaaatatatcatagactatttagaaa

SEQ ID NO: 266767 - DNA, 201 bp, Homo sapiens
gactatttagaaacaaaaacaacatatacatactcttagcagaaactgaaaattcattattttgtgcagccttgagctaaagtttctgtttaataaagtgmattacaaaattgtaaaatgaggtgtttaaaaaaaaacacataactgtttgccacacttatctgggtatatcagtgtttgcttgatctaggcaacgtaatg

SEQ ID NO: 266768 - DNA, 201 bp, Homo sapiens
acgctgagagcctgggtgggcccaggaatgcctctgtgacggtgcaccttggtggtgatgagggactgggcccatgctgacacctcgtctggctctgactscagctgtcctcaccctgtcagctctcagaccagagcttctacccttgttcctttggagctgagtggcacaccatagtcacaccaccctgtcttccaggat

SEQ ID NO: 266769 - DNA, 201 bp, Homo sapiens
ctgtcagctctcagaccagagcttctacccttgttcctttggagctgagtggcacaccatagtcacaccaccctgtcttccaggatctgggcaaggctgcwctcctagagtgggccatccacccttgtctcttctgaaagggtccctcccagggggcgtggtaagctggttatgcccctgtggcctttgctggcctccttc

SEQ ID NO: 266770 - DNA, 201 bp, Homo sapiens
aaaaccaatgtgattttaattggtagagccctttctaaaaaaatcttgatacggtttgaatagcttttaaggaatatgtagaaaacagttctatggtggcrtgtaatattttcagttcaaaacactgcccttgactggaatatgccaatgttctttgtggcatctgaagtcaggggcagtgcctgcccacttccacgtgct

SEQ ID NO: 266771 - DNA, 201 bp, Homo sapiens
cacacctgcgctcctagctactcaggaggctgaggccagaggatcacttgtggccaagagtcgagaccagcctcaacaacatggcaagatccccatctttaaaaaaaaaatgcattttattcagttatctaaataacattagagactatcagatcccaaatgtttaatagagttctgttttgtgctaggcaatgtgacccc

SEQ ID NO: 266772 - DNA, 201 bp, Homo sapiens
tgtcctgcagtggaattgctgggctgacagatagttgtgcattaacatttataacaacattgatagcaaaaggtcaaacctctgactcttcatgagcattmcggtggctccgccgcctcggatgctgtcaggctttcattctggtgcctgtgcactggcattccattcagactcactgacaatgttatgtgctttcttacg

SEQ ID NO: 266773 - DNA, 201 bp, Homo sapiens
ctcatatgtgaaataagagaattaagattcttttccaggattgttgtgatggtggaataggaaaatagggccagcttggagtgtgcgacctgtacagtcayacagggccccatactcacagggccccatactcacagggccccatactcacagggccccccagagtttgaggctctactgctaatatcttgaaatgctaaa

SEQ ID NO: 266774 - DNA, 201 bp, Homo sapiens
aactaaagtgctgcactatgaaaccttaccagtcattcagattgattatgccgaaagaacaagttgacactaggtaggataataagatgagggatgaaaayaatttgtaaattggttggaaaaacttgcagagtgtcatgaattctgtacttcagaaacatcaaaatgttcaaatgctcagtgatgaatgtttttctgtat

SEQ ID NO: 266775 - DNA, 201 bp, Homo sapiens
tggcctggtctaacttcaaaggagatgggaagtgcatttccaccttgcacctggaaagcagaggctagggaagttggagaccagccccacactgtcacaayacagggagggggtgccccagtgaccccggctttgtgcaagccacccttcagagggctacattgtaagattccagttttctcctaaaacaaagccaagcca

SEQ ID NO: 266776 - DNA, 201 bp, Homo sapiens
ttttattccagcaaatctcataccgtactaaatttctcagaagcacgaaaatatctaggcctttattgctcactttaactgggctctttgcatgctcttattttgttttaataaattatctgaaaggattaaaattaaaacatgattcttttcctaatgctaaaagcacttctgtgacacaatatgcttaacactgaagaa

SEQ ID NO: 266777 - DNA, 201 bp, Homo sapiens
tttattccagcaaatctcataccgtactaaatttctcagaagcacgaaaatatctaggcctttattgctcactttaactgggctctttgcatgctcttattttgttttaataaattatctgaaaggattaaaattaaaacatgattcttttcctaatgctaaaagcacttctgtgacacaatatgcttaacactgaagaaa

SEQ ID NO: 266778 - DNA, 201 bp, Homo sapiens
ttattccagcaaatctcataccgtactaaatttctcagaagcacgaaaatatctaggcctttattgctcactttaactgggctctttgcatgctcttattttgttttaataaattatctgaaaggattaaaattaaaacatgattcttttcctaatgctaaaagcacttctgtgacacaatatgcttaacactgaagaaac

SEQ ID NO: 266779 - DNA, 201 bp, Homo sapiens
attccagcaaatctcataccgtactaaatttctcagaagcacgaaaatatctaggcctttattgctcactttaactgggctctttgcatgctcttattttgttttaataaattatctgaaaggattaaaattaaaacatgattcttttcctaatgctaaaagcacttctgtgacacaatatgcttaacactgaagaaactc

SEQ ID NO: 266780 - DNA, 201 bp, Homo sapiens
catctaacataatataaattgaatgaaactgcaaaatagttgaatgggaataaaaccaaatcaatcaaactgctttataggattatgctctataaaaaatyttagtaagaattttcattttataaacgtttaagttgaatgttttgaaatgattgctataatgactacagtgattttcaggaatttggaaattcagtaatg

SEQ ID NO: 266781 - DNA, 201 bp, Homo sapiens
aatgattgctataatgactacagtgattttcaggaatttggaaattcagtaatgttatcatttatcccaatgattaaatgagaccaataattccaactgayttccatgagtttacctgaacatacctttgtcaagtgcgtttcagatcatggttgacaagttgaatggtatctgtggtttaagttaagcatctacatcccc

SEQ ID NO: 266782 - DNA, 201 bp, Homo sapiens
tatcgtgtgtattttcatcagggcatgctaatcagctaaaacttgtctatgaggtagtgaaatagaatatttgcacatttatggtttgtctaagtatttcrgaagtcttatttttttacataacatgtgataaatttttaagaaaattaatatgtgcccttgtaaagtggtagtaacttgaattgtttgacaaacgcaaac

SEQ ID NO: 266783 - DNA, 201 bp, Homo sapiens
gaagaaaaatgctgctcaagtgaacttcctgctttttaattagtgcctgtgggaagaagcttttccggagcaatcccatttgtacacgggatcttaaaacrttgatgtgtgaattgctctcacattttccacaatcttctttcccagagcagatataaataaataactaatgaaagagttaggcaacagaccctcatccct

SEQ ID NO: 266784 - DNA, 201 bp, Homo sapiens
accgcagtatcccagtggttctgacatcctcaactcttgcaggaaacatacttagtatatcatgaaaatctccagtatctaggacagaatcactcatagtrtatgttcaataatttattagtttgttaatagaatgaatggatagttattttcatatgtaattcttactgtgattgtttttatttacctttcttattaaat

SEQ ID NO: 266785 - DNA, 201 bp, Homo sapiens
cagtaagacagcagagatttccaaaggtttcagaggatagtggtgggttatatttttgtatggcttttctgagggttgttttattttcatttgaaaatttyttctttataggatcatttgctatttggtaatttttttcatttgaatggtggaagtccttaaatatgctcatgtagagtttatgagtctcgctacttgcag

SEQ ID NO: 266786 - DNA, 201 bp, Homo sapiens
ggttgttttattttcatttgaaaattttttctttataggatcatttgctatttggtaatttttttcatttgaatggtggaagtccttaaatatgctcatgkagagtttatgagtctcgctacttgcagagagggataactctttagaatggctgccctctgggagaggaaaagcataaacagagagatgctgagtgataga

SEQ ID NO: 266787 - DNA, 201 bp, Homo sapiens
tttcatttgaaaattttttctttataggatcatttgctatttggtaatttttttcatttgaatggtggaagtccttaaatatgctcatgtagagtttatgwgtctcgctacttgcagagagggataactctttagaatggctgccctctgggagaggaaaagcataaacagagagatgctgagtgatagagcattgctaaa

SEQ ID NO: 266788 - DNA, 201 bp, Homo sapiens
ctgctataacagaatatcacagactaggtaatgtgcaaagaacagaaatgtattgacccactcttctggaggctgggaagtctaaggtcaaggtgccagcrggttttgtgtctggtaaggtcgttctcttcttccaaggtggcaccttgtatgccgtcctgtcctcctgagcgaggggatcaaagaggcttcaaatggcag

SEQ ID NO: 266789 - DNA, 201 bp, Homo sapiens
gctgggaagtctaaggtcaaggtgccagcaggttttgtgtctggtaaggtcgttctcttcttccaaggtggcaccttgtatgccgtcctgtcctcctgagygaggggatcaaagaggcttcaaatggcaggggcaaaggggccaagagataaaaaggcacacaacttacccttttataatggtattaatcccatccgcttg

SEQ ID NO: 266790 - DNA, 201 bp, Homo sapiens
tgtggtttctcattctgccacacatcagagatgagtcattgtctcatggggctttctgtaactttcaagatcttctagccatgctttctctgaaaaaggarccaagagcagtgaccgttagctatactgcagaaccttggcattttactttaacctctctcagcttcgcttttttcatcgatatgaagcgataatcatgca

SEQ ID NO: 266791 - DNA, 201 bp, Homo sapiens
tatgccgtcctgtcctcctgagcgaggggatcaaagaggcttcaaatggcaggggcaaaggggccaagagataaaaaggcacacaacttacccttttatamtggtattaatcccatccgcttggggattatcgccctatctcctcctaaaagtcctacctcctatcactgtcacaatggcagccaaatttcaagatgagtt

SEQ ID NO: 266792 - DNA, 201 bp, Homo sapiens
ttcaagatgagttttgaaggggacagacatgtaagccatagcaatcacattttcataaacactgtctttccatatagcaaggaagcatagcaaagtaagarcttaaaggcttattttccttgctgctgaatttaatatcatgtgttataattcagagacatgtaaggtacaatttaaaaacagccaataagttttttagag

SEQ ID NO: 266793 - DNA, 201 bp, Homo sapiens
gcatcagacttggactctgttcattaaaatgcaaagagagctgagtttaagagcttggtaacttgggttttaagaggaataaagcactgcagatattatcrtgcaaatttgaacttgaatttggtcctagaaataaatttctattcgtaactccatcttttctttcagagacccttaggctatctatatgacaggataact

SEQ ID NO: 266794 - DNA, 201 bp, Homo sapiens
gcctggtctaacttcaaaggagatgggaagtgcatttccaccttgcacctggaaagcagaggctagggaagttggagaccagccccacactgtcacaatayagggagggggtgccccagtgaccccggctttgtgcaagccacccttcagagggctacattgtaagattccagttttctcctaaaacaaagccaagccaaa

SEQ ID NO: 266795 - DNA, 201 bp, Homo sapiens
gaggactttgggtgatgatgtgtcaatgtacattttgcatttataacaaatgtaccactcttgtgaggaacactgatagtgggggaggctgtgcatgtatrggggagaggggagaggggagctctctgtactctgctcaattttgccgtgaaattaaactgtctttaaaaataatctctattgaaaaatgaaaaattctaa

SEQ ID NO: 266796 - DNA, 201 bp, Homo sapiens
aaagttaatgttgcagcgtcaggattaaatcctttccagccaaactgagacactgaaaccagcattgctggttccctcattacacttcctcaagatggaartggcattgctgcttgcgttctgattatacaatataaatgtattattataacacattcaagcaaaatgaaaaagtagaaagttaacataaaaagcaaaaac

SEQ ID NO: 266797 - DNA, 201 bp, Homo sapiens
caaaggtatatattgatagaatgtattatttcttctttttactactaaaaaatcggtaagacgtggacttgttttaaatgtcataacattttaaaatacaygcacccatttaaaaatccttcttaaatatctttaaaatatagtttgtcttgagttgtacttgcaattcacatgacttatatgatattggcattgtaagta

SEQ ID NO: 266798 - DNA, 201 bp, Homo sapiens
gaagtacagcaccaggagtgaacctcatgtaaactgaggactttgggtgatgatgtgtcaatgtacattttgcatttataacaaatgtaccactcttgtgrggaacactgatagtgggggaggctgtgcatgtatgggggagaggggagaggggagctctctgtactctgctcaattttgccgtgaaattaaactgtcttt

SEQ ID NO: 266799 - DNA, 201 bp, Homo sapiens
atgcgccaccacgcctggctaattttgtatttttagtagagacggggtttctccgtgttggtcaggctggtctcaaactcccgacctcaggtgatccgccygcctgggcctcccaaagtgctgggattacaggcgtgagccaccgcgcctggccaagtcccattatttttttccatcaccaatacaagctgctgatcgcct

SEQ ID NO: 266800 - DNA, 201 bp, Homo sapiens
cgcctggccaagtcccattatttttttccatcaccaatacaagctgctgatcgcctgcaagaagagtcacttcatgtttttaatacttttaaagccaaatrtcttttcaaaatgctgggtaggaaactacacaggaacagcattctctgataattaaccacactggtgagttaagtgctgttggcttttcctcaggatacc

SEQ ID NO: 266801 - DNA, 201 bp, Homo sapiens
caacagtctggttagtttgggtcagggaatttgggttttccaaattttaagcctcctaattagctgactccaagcatccctcattgctcacagccaagagttagaacccctctcaaaaagactatgctttttccctctgagattggaggtgagccaccttggaggaaagattctccttcctgcgggaccctaccagttgtc

SEQ ID NO: 266802 - DNA, 201 bp, Homo sapiens
aatatgatgcaaaatatcagatgaagagtttgagttcctcatcctatactgcccaatgggttctccttgcccattgcctagacagagccgatttatcaagrctggggaatcgcaatagagaaagagtttcattcacacagatctggctgtacgggagaccagagttttattattactctgtcagtctcccagaaaactcgg

SEQ ID NO: 266803 - DNA, 201 bp, Homo sapiens
aaaatatcagatgaagagtttgagttcctcatcctatactgcccaatgggttctccttgcccattgcctagacagagccgatttatcaagactggggaatygcaatagagaaagagtttcattcacacagatctggctgtacgggagaccagagttttattattactctgtcagtctcccagaaaactcggggatgggact

SEQ ID NO: 266804 - DNA, 201 bp, Homo sapiens
ttttaggttttacaataatgatgttatacccaggagcaatttcagaaggttgagaattttgcagcctccagctgcatgactcctaaaccatcatttctaaycttgtagctaatttattgtgtcccgcaaaagcagtctagtccctaggcaggaagggggtttgttttggaaaagggctgttaccgtctttgtttcaaagtt

SEQ ID NO: 266805 - DNA, 201 bp, Homo sapiens
tatacccaggagcaatttcagaaggttgagaattttgcagcctccagctgcatgactcctaaaccatcatttctaatcttgtagctaatttattgtgtccygcaaaagcagtctagtccctaggcaggaagggggtttgttttggaaaagggctgttaccgtctttgtttcaaagttattttatcaactaagtttctccca

SEQ ID NO: 266806 - DNA, 201 bp, Homo sapiens
ggcaggaagggggtttgttttggaaaagggctgttaccgtctttgtttcaaagttattttatcaactaagtttctcccaaagtcagtttgtcctatgcccrggaatgaacaatgatagcttggagatgagaaggaagatggagttggtttggtcagatctctttcactataataattttctcagttatactttcgcaaagg

SEQ ID NO: 266807 - DNA, 201 bp, Homo sapiens
tagggttttcaaatcacagtgtaagccgtatttatggcagatagtaaccttttctctactgtgggagtcgcatgtatattgttctagtctatcagtttccrctgtctgctgttttttatttatggtatcatcatatacaaatattttcatgtagtcacctgtcgattatcaaggtctccgagcctctagatgtcagatata

SEQ ID NO: 266808 - DNA, 201 bp, Homo sapiens
agggctgagcattaccaccaggtttagctcccaaatttcaaacactcctttttcctttcctggggaagagggagtgaggagtacaggcgaggccaggagtrtttctgctacctggtgaccctccatggggaaagatgaagccagaaaagagagtgtgccgacgttgcgctaacaattgcttttcaagatgtgaacgtactc

SEQ ID NO: 266809 - DNA, 201 bp, Homo sapiens
cttgcttgtttgccccataaagccaacttgaaagctaattaggctatgtatatattggttaactcagttcccctgccatgaaattttgaaaactacctgaytggaacaaaaggaaccgacaacatatcattcagtcaatgtggggaagggagaaatatgaaaaaggaggagaaaagattcgtttgggattgtcacattatc

SEQ ID NO: 266810 - DNA, 201 bp, Homo sapiens
tgagcggggctcagcatggcgctcacatcaaccaccactcccagatacactggaggaggacacagcaggccaccagctctgggacaagggctaccagctgrgacatgctcgtactctcactcatgttcactctcattcagattcctggccacccacctgccccaggccccctgccacaacttatgcaatccttccccatcc

SEQ ID NO: 266811 - DNA, 201 bp, Homo sapiens
tctacgtgtaatataaaattctattatattttataagtctgtcttcaatatctctgaatacagcatttctcctcaagtttacacccattctaaatgtaaaygcagattgaatcatgattttaagtgtagcgtttgatctccaggcaacatctgtgtttaatgactagagtgtagtgtatttggaaccatcaagaagggact

SEQ ID NO: 266812 - DNA, 201 bp, Homo sapiens
aaatgtgcaggatcactgtcatccttttcttctaagatgttcttatatttttctttgatttatgttttgaaggctccatctttgttgaggccatggatgcygctgacacatcctttggtaaatgtcatgttatagatgttccagccatctattaaattccatctcatggtatcaggataagaagagctgaaaattagctga

SEQ ID NO: 266813 - DNA, 201 bp, Homo sapiens
cctagatatgagatttgccgaaattcctcattggccgtattacaaaattgaaaggccgagtaccaaaagaggttaagtaaagtgatgtggatgtttacagrataaatcaatctctctcggtctccatttctctctgcctctctctccctgtctctgtttgtcttctctctctctctctttctctttctctcaatctctctc

SEQ ID NO: 266814 - DNA, 201 bp, Homo sapiens
atccttaactcctgaaactgaaataactggatgatacagaacatttattcagctttcatatgtgcaaagtcacatggataaacattctcattccagtgtawtttgttttccattttaaaaatacttaatgcttgtttttatacattttaggatctataaatcagtgagaactgaaggaggacaggatttcctcctgcaagg

SEQ ID NO: 266815 - DNA, 201 bp, Homo sapiens
cctttgcatacataatattggacttctctgcttcagtgctgtcttctcagatggatatgtaatgtgtgaaatgcttaataatgtcatcaaagagatttatrtgttcatgttttgcagataagagacttaaccacagggaatttaaatgacttgactatagtggttagcactctgcatttggaaataattcaaatttttatc

SEQ ID NO: 266816 - DNA, 201 bp, Homo sapiens
ccctgttgggtttttggggtctacctttgtgtcttggttttgaccagccttctcataactatattccaaagataaattaggggaaaatgtgcagatagttyagttaagtaatttactttacctaactctattagttgagaaaaactcttaaaatctaagttaagtatatatatattttgagacagagtttcactcttgttg

SEQ ID NO: 266817 - DNA, 201 bp, Homo sapiens
agggttttcaggaccatgaaactcttttgtataatactgcagaggtggataaatgttatacatttgtccaaacccataggaagtacagcaccaggagtgarcctcatgtaaactgaggactttgggtgatgatgtgtcaatgtacattttgcatttataacaaatgtaccactcttgtgaggaacactgatagtgggggag

SEQ ID NO: 266818 - DNA, 201 bp, Homo sapiens
tccaaagataaattaggggaaaatgtgcagatagttcagttaagtaatttactttacctaactctattagttgagaaaaactcttaaaatctaagttaagwatatatatattttgagacagagtttcactcttgttgcccaggctggagtgcagtggcgtgatcttggctcactgcaccctctgcctcctgggttcaagtg

SEQ ID NO: 266819 - DNA, 201 bp, Homo sapiens
aaactcttaaaatctaagttaagtatatatatattttgagacagagtttcactcttgttgcccaggctggagtgcagtggcgtgatcttggctcactgcaycctctgcctcctgggttcaagtgattctcctgcctcagcctcaagtagctgggattacagtcgcctgtcactacgcctggttaatttttgtatttttagt

SEQ ID NO: 266820 - DNA, 201 bp, Homo sapiens
cagtgagccaagattgcgccattgcactccagcctgggcgacagagggagacttggtctcaaaaaaaaaaaaaaaaagaaaaaaaaaaactaaactaaacrtacgcttaccatatgatctagcaaacatgcttcttggtatttacttgaattagttgaaaacttatgtatacaactaaaccttcatacagatattgacagc

SEQ ID NO: 266821 - DNA, 201 bp, Homo sapiens
ttatcaaaatgtcaagttggccaacatcaaagtgttacttatgtaatgtcaacttcttcctctctcaccactcagtcttatcttagaggaggaaatgcgcyatagtttctttttaatttctttgttctctcattcttccttccccatttactcctttcgtggctcctccagaattagggtggaggggctggagtgagctga

SEQ ID NO: 266822 - DNA, 201 bp, Homo sapiens
gtaaaggcgaggtaggactccatggcatgcttgggcttgagaccgaagacaaccttcaggctctcaccatatataaattgtgatctcagggttgttactaytgagtgaccagtggggatgggtcagccacgaggagagtgttccagggtaacttgcatggatctaataccctacttctagttggccctgctagcaatagac

SEQ ID NO: 266823 - DNA, 201 bp, Homo sapiens
gtatttttagtacatgccactgaatgatgtctgtcttacactttggggcgaggggaggaatctctgaagaagtggcaaaggcgttatatactcagcaagcsctcaggattctacagcagagggagcactgatggagcctcagattgatcagcctgctgagaacctgtgcccagctccttgctgtttgtgtgcttccacata

SEQ ID NO: 266824 - DNA, 201 bp, Homo sapiens
attctaagtagaggaatcagcatgtttaatgtcatattcttgaaactaagtgacagatagattcaatggactgggagtcgcaggattggaggagaggggcrcatggcaatgacaggctttgatttctttttccaggaaaaggctcaacattcatttgctatgtcaaagaagaatatgtaacataagattttaaaagatagg

SEQ ID NO: 266825 - DNA, 201 bp, Homo sapiens
tctgctctaggagggattgagggagaagcccagggagggagtccccgaagtgcttttggctgagatgtaacaaaagctataatttatggagtggtgtgggraagcaaaggagacccaagagctgtacctgagtgcccccaaaaggatactctgggaaacactatgacagcacaaaatcaacctccttagcttggaggacct

SEQ ID NO: 266826 - DNA, 201 bp, Homo sapiens
tacttatcatcttcatggttacttttttcatacgtatacagtaatagcacctaaaatctacttttttgcaaattttcattatacaatattataattatagwcctctagtacatttctagaatatttgtcctacctgtaactttgtatgctttgacccatatctccccattttctgccacaattccccccaccacttccggt

SEQ ID NO: 266827 - DNA, 201 bp, Homo sapiens
ctctagtacatttctagaatatttgtcctacctgtaactttgtatgctttgacccatatctccccattttctgccacaattccccccaccacttccggtawccaccattttattctgtctctatatatttgacattttttttttaagattccacatgtaagtaagatcatgcagtactttttcctgtgtctggctcagttc

SEQ ID NO: 266828 - DNA, 201 bp, Homo sapiens
gtaactttgtatgctttgacccatatctccccattttctgccacaattccccccaccacttccggtaaccaccattttattctgtctctatatatttgacwttttttttttaagattccacatgtaagtaagatcatgcagtactttttcctgtgtctggctcagttcacttagcataatgtcctccaggttaatacatgt

SEQ ID NO: 266829 - DNA, 201 bp, Homo sapiens
tggttttcaaatattttcttccaatctgtaagctgccttttgattctgttcgttgcttcctttgctgtgcagaagctttttagtttggtgtagtccagttgtttattttcacttttgttgcctgagctttggtgtggtatccaaaaagttattgccaaggcgatggggtttccctgtgttttctactaggaatgttatgat

SEQ ID NO: 266830 - DNA, 201 bp, Homo sapiens
gctgaattctcttaagagcttaggttaggtaacaaggggatgtaaagaaactgatctagataagtgagtttacttaggccccagaacctggcctttaatcrtctgcgagcaggactgctctgggtggtggggggagggtgaccatgttaattatccacaagtgtgttgactcaaagcctttgtcattaaatttgtgctgaa

SEQ ID NO: 266831 - DNA, 201 bp, Homo sapiens
ttctgatccgttgagaattactcttgagtgttcataatgggagttccttctacctagaggaaaacctcaggtcttccaccactcccagctccagcagaagrgtgatgagcactgggtagagccgttgaagaggggaatgaagatttagatgagtgactacattaaataataccctaatgggcctatgacagcaaaggtagt

SEQ ID NO: 266832 - DNA, 201 bp, Homo sapiens
ccatcccccaaccagccccgatgtgtgatgttccccttcctctgtccatatgttctcattgttcaactcccacctatgagtgagaacacatggtgtttggttttctgtccttgtgatagtttgctgagaatgatggtttccagcttcatccatgtcccagcaaaggacatgaactcatccttttttatggctgcatagtat

SEQ ID NO: 266833 - DNA, 201 bp, Homo sapiens
gcaaaggtagtaatataactaaagcatataatcaaacacaaaaattatgtggcatagactgtacaccattattttagtgtaggttacaaggctcagactgyctaggtttagaccctagccagagttcacttcctagctatgcaattttgagcaaattaacttctctgtggctcactttcctcttctattaaatgggtgttt

SEQ ID NO: 266834 - DNA, 201 bp, Homo sapiens
aaggatctagaaccagaaataccatttgacccagcaatctcattactgggtatatacccaaatgattataaatcattttactgtaaagacacatgcacacatatgtttactacagcactgttcacaatagcaaagacttggaaccaacccaaatgcccatcaatgatagactggataaagcaaatgtgacacatatacacc

SEQ ID NO: 266835 - DNA, 201 bp, Homo sapiens
aaaaaacattttccaaatcattttctttgtttgttggtttaccaaaaatatgtttcttttaatcagcttttaggatcttctgtattttatattgaatttcmaggacttttcaggttataggtgaacacctcttctcttcctaggagcattttagggatgttcattgtttatgcccctgctcccttctgcaacagctccagg

SEQ ID NO: 266836 - DNA, 201 bp, Homo sapiens
gctagggaggcctcaggaaacttacatcatggcggaaggcacctcttcacagggtggcaggagagagaatgggtgcccagtgaagggggaagcctcttataaaaaaagtcagatcttctgagaactcactcactatcacaagaacagcctgggggataccacccccatgattcatttatctccacctggtcccatccttga

SEQ ID NO: 266837 - DNA, 201 bp, Homo sapiens
aggatctagaaccagaaataccatttgacccagcaatctcattactgggtatatacccaaatgattataaatcattttactgtaaagacacatgcacacatatgtttactacagcactgttcacaatagcaaagacttggaaccaacccaaatgcccatcaatgatagactggataaagcaaatgtgacacatatacacca

SEQ ID NO: 266838 - DNA, 201 bp, Homo sapiens
aggttataaaatacatcctgattgtagtggtgcatatattgccaaaactcatcaaagtatacaattaaaactgacatatttcatattatataaatgatatmtagatgaagtttctttaaaaaagaaaatctgagattcaaagtttccaggaatgaaatgtgacttccataggaattggccaactccatcagttttcccaat

SEQ ID NO: 266839 - DNA, 201 bp, Homo sapiens
tccattgatcatctttccatcacatcttttttaacagccctaattaatagattttatgtactcaattattcattgggattaactgagttgtaaaaccagamaaaaaccacagtggcccctatatttggatggctttagacatgagaacaaggcttcaagctcctgtttcagggcatcgatagttttcagctgcaaatcaga

SEQ ID NO: 266840 - DNA, 201 bp, Homo sapiens
gtgcctcctcaagaaagcaaagcccctgggataggaagtaactgactagtctttggaacagaaaattggcttaaaatatagtaaggctttttatagagtgraatacttgattgactttaataataattagaagatagaattgacatagaagtgagctgagagcacatacagcatctggtcttgaaatattttcctgggagc

SEQ ID NO: 266841 - DNA, 201 bp, Homo sapiens
ctgaggcaggagaatcacttgaacctgggaggcagagattgcagtgagccaagatcacgccactgcactccagcctgggtgacagagagagactctgtctaaaaaaaaaaaaattaaatatagtatgactatccagctatttttttcttactttaattttaactactatctgctaaattctagctatgaaagatcaatgaa

SEQ ID NO: 266842 - DNA, 201 bp, Homo sapiens
tgagaatgcagaaatattagatgttgaggaactcaaatatgtttctctaaaatatagaataaaatagaatataaatttaaatctgtattttattctaattkatgttattttttaatcaaagagaaaaaagctaatctaagattttcagtaacaagtaaatccctttatggtgtctcttaagaatgtgtcagatttctctct

SEQ ID NO: 266843 - DNA, 201 bp, Homo sapiens
gatagctaaacaaatgataatccaatatgtctgcaaaagctctttttgtaaattcgggaaatgaagctgcaaaggactttagaatctcatttttttcattrtttttgttctagttgtttttaatagatcatatgcatttgtgaggctgaagattttcattccaaatgttaaaaaaaaatatattatctctagatgcctctg

SEQ ID NO: 266844 - DNA, 201 bp, Homo sapiens
aatggtctggattgtctctgtgttttgaaggtgctttttttaatttacaagaacttgtttagtttcaaatagttgacctctttttaaggttcaaccctggaaaaaaaagaaaagcattgatctctatattaacgtagcttatcatgtgggcttaaaagtctcctgtcttagtccatctgggctgctataatgagatcccat

SEQ ID NO: 266845 - DNA, 201 bp, Homo sapiens
agaaaacaaattatcccagcaattaaattctcagtgacaactagtgatggaaacttctcaggttaatgaaaagtttccattagaatcagaacgactcttcytaagtatcctgtcttcaacccttaagcctattatctaaaatacataaaagaaaaatgataactgtaaagattatactggtttctaaaaaatcccaagcaa

SEQ ID NO: 266846 - DNA, 201 bp, Homo sapiens
gagagatacattgaatggttggttgattagattgattgattggataaaatagattacatagataagataggtaggtaaatcgataggcaaattagatagadagatagatagatagatagatagatagataatctcccctaaatatacttagataaaaatatggttattagataacagctttagtcaaccactgaaagatgg

SEQ ID NO: 266847 - DNA, 201 bp, Homo sapiens
cagtggtgtttgtgactgctggcctgggtccataattgccgatctgtgtgtaagtgccactttgcaagagccatggaatcagtcccctacagtattttgtraagtccaccgtctgactcaaggttattatcatgtggttaaaaggaaagcttgtgctttctaatgaggaaggcttacctgtaaatctctgatgaccccgag

SEQ ID NO: 266848 - DNA, 201 bp, Homo sapiens
ttcatgcctgtaatcccagcactttgggaggccaaggtgggcagatcacttgaggccaggagtgtgagaccaacttggccaacatggtgaagccctgtctstactaaaaatacaaatattagccaggtatcgtggcttatgcctataatcccagcactttgggaagccaaggcaaggtggatcacttgaggccaggagttt

SEQ ID NO: 266849 - DNA, 201 bp, Homo sapiens
tctactaaaaatacaaaaaattagccaggcgtggtggcgggcacctgtaatcccagctactcgggaggctgaggcaggagaatggcgtgaacctgggaggyggagcttgcagtgagccgagatcgcgccactgcactccagcctgggctacagagcgaaactccgtccaaaaaaaaaaaaaaaatccactatattagacat

SEQ ID NO: 266850 - DNA, 201 bp, Homo sapiens
gcatgatgacatcaccatgtgtttctaacttatcagtatgttactagagaaaaatatgtcttctcctcttttaagaggtagtagagattttatgaatctcmatcaccaccaaaagcttttggaaatcaatactagaaatgatccaaattttttaacattgaatgttttgtcttatttgttacaggtgaaataagatgctta

SEQ ID NO: 266851 - DNA, 201 bp, Homo sapiens
aggagtgtttagggtaggagagaggcggcccctgagtgaggtcttagatggattcctggaaaccttttgactgagatactcatgatatagaaagactttcrtggtcccacagtaccagtgaagagtgtttcagctggagttattccagtgcagacttttagaacaatatgtaattcatagtcttatcagtcttgattaaag

SEQ ID NO: 266852 - DNA, 201 bp, Homo sapiens
ctgcagcattctcaaagcccgatgtttttcttctttaggcagagacaatatcaaaagtaaacagaaacattactgtaatctgtagcacaggccgagcaacyttcctgtgtttttaaaatgttgagtttaagcgagctttcttaatctcaccaatttcttaattacttgatcattcacagggtttaatgtcttcctgggaca

SEQ ID NO: 266853 - DNA, 201 bp, Homo sapiens
tgtgtgtgtgatgttaagcttggaacaatattcccctttttctcttttgttaactaggagagcatgctgaagagctgtcattgataagtccttgaatgtamtttgatggcttcttattaacccttggagtctgtgactgctatacaacttcttagttctaaatgcaaaaatttatatcccctcatgaccttccagcaacag

SEQ ID NO: 266854 - DNA, 201 bp, Homo sapiens
tattgtattgaaaccatttgaaaagtatattctaaatgatgaacaaatagagtgtgtgatcaggttttataatttaacactgacttccctcttttccatgmttgtactcctttcctgttctatatacaattttcctaaatacattgtcctcaaaacagacatttaaaatagtattgctgttttattataagaaatatttat

SEQ ID NO: 266855 - DNA, 201 bp, Homo sapiens
gttttagtggagacagatcctcactatgttactgaggctgatctcaaacccctggtctcgagtaatccttctctcttggcttcccaaagtgctgggattayaggtgagccactgtgcctggcccatttttgccaattatattttattttattttattttatttatttattttgagacagagtcttgctctgttgcctaggc

SEQ ID NO: 266856 - DNA, 201 bp, Homo sapiens
ctccacctactcacttatcttttaatttgcatatgtgtgtttttgtgtatgttttggcatacagacattttaaagatttagttcgtcaaatctgtcatcawtttttatgttttatctttatggtcgtgtttagaaatgaaaggcattatttttgccatttttcatttacctgaaagaaactgagcccaccctgatggtaaa

SEQ ID NO: 266857 - DNA, 201 bp, Homo sapiens
gacctcaaatactccacccaccttggcctcccaaagtgctggaattacaggcgtgagccactgcaccaagccagtagtacctttttaaagggaagaagtgkttttttaggaaagcctgtgagattccaaagtcaatctgaatgttcaacactgggtaatttcatttctgtgtctattgcccaccccttgttcaagttagtg

SEQ ID NO: 266858 - DNA, 201 bp, Homo sapiens
gccactgcaccaagccagtagtacctttttaaagggaagaagtgtttttttaggaaagcctgtgagattccaaagtcaatctgaatgttcaacactgggtratttcatttctgtgtctattgcccaccccttgttcaagttagtggtaatgcagcgttgatttcatcttcctaatatgaaattttcttgtttacatttagt

SEQ ID NO: 266859 - DNA, 201 bp, Homo sapiens
acaaatcctatggtgtttatttataatacaaatagtgttgaggagtccatggagacagtgagacctatagcctgtgtgactgggatgtagccctggccatycttttagacaccaaatatctgatggtgatgacaggctcagttgtggatgtgtagtctgtataaaaatgggtctggagctgagaaatctgggaatgtgcta

SEQ ID NO: 266860 - DNA, 201 bp, Homo sapiens
ggtctggagctgagaaatctgggaatgtgctagagaggcaagcatggaggtcaagtctgcatgtatcagcatagagactaaactgtaagtcctgggagctmgggggtcaaccagtaagactgcattaaatgaaaaaagaccaagggaaaatacggaggaaaagcggcatgtgctctcaggaagctgagatacaattgctgg

SEQ ID NO: 266861 - DNA, 201 bp, Homo sapiens
gagaaatctgggaatgtgctagagaggcaagcatggaggtcaagtctgcatgtatcagcatagagactaaactgtaagtcctgggagctagggggtcaacmagtaagactgcattaaatgaaaaaagaccaagggaaaatacggaggaaaagcggcatgtgctctcaggaagctgagatacaattgctggagggagaggag

SEQ ID NO: 266862 - DNA, 201 bp, Homo sapiens
atttctatcatattgtttccctataattttattatattgtctgttatgcaccagagcctccctttttggccaagtgtgtttccacttccatttgattttcagggggggtcatttccttagagttgttttaaaccatttttctgagcttgggatgtgctgttttatcatatttgcagcagtcagaggctttagagcattttt

SEQ ID NO: 266863 - DNA, 201 bp, Homo sapiens
gtatttactgacatcagaatttgcattgcagacaccaagaaaacacttctgttatatattgtagtaaagaatagtaatgctcttttagttcctcatctcaytaaataaaaaataagatactaatctttccctctgaagaattcaactaccaactggtacattactgatttttctatgtgaataatgtgtatagtaacaact

SEQ ID NO: 266864 - DNA, 201 bp, Homo sapiens
cgttaagattatcaagggcaatcccactgattgtagattttaaccccatctacaacataccttcaccacaacacccagagtaatgtttggttaaaaaaccrggtactagagacaagccaaggtgatagaaaacacacgttgtttatctacacaggcaagagtctgagaagtatctgaaggatttaataacacatgcacaca

SEQ ID NO: 266865 - DNA, 201 bp, Homo sapiens
tgagacaggttactctggccattcaaggatgggtggtgcctcagctttgggactgggtaggtccctctgggagcagaggctgtgggcagcaggttccctcrggtgggccgtgggcaggtggtatcctgaggctgcgttgcctcctgttgatggagtctgttgatggaagtgtagtgacaggcacaaggaaggcttctcagt

SEQ ID NO: 266866 - DNA, 201 bp, Homo sapiens
aactggccaactatatgttacttgtgtctaaaatataaatccactataagtttttataacattagggtaacaatgtattaaaagtatgtgaagcctaacaygacttctctagacatacatccttccttataatgatctgatacacacacacacacctgtacacagacacacacacacacacaaatactgcgtggttcctca

SEQ ID NO: 266867 - DNA, 201 bp, Homo sapiens
atgtgtggcaagtaacacaattcagtgttttctatttacattaatggtatgatatttattttggaataattttaattaaattaagaaaacaagccgggcayggtggctcacgcctgtaatcccagcactttgggaggccagggtgggcagatcacgaggtcaggaggtcgagaccatcctggctaacacagtgaaaccctg

SEQ ID NO: 266868 - DNA, 201 bp, Homo sapiens
taagaaaaatgcacacacagaattgtgcatgcatttaagtaggtacatgaactaccctaactgtgtgtacgcacacatgtgtgtatgtgggtttagaatatgtgtgtgtgtgtgtgtgtgtgtgcgcacgctggatcagaggacagaccttttatttactcacagaacatcatagcagcaccagtacctcatgcactaatc

SEQ ID NO: 266869 - DNA, 201 bp, Homo sapiens
tcagttcagattatattctgccttttttggcttcatattttgtctgaaacatcgtcctacatcattgcaaagttatcacggctctttagtcaaaatatccyggtgtattgcaattagacacttgtatatttgatgtcgttgtgtagctagagcttttgtaattttccatatgtaaaaaagaaagaaaatcactagaccata

SEQ ID NO: 266870 - DNA, 201 bp, Homo sapiens
tgtgtggcaagtaacacaattcagtgttttctatttacattaatggtatgatatttattttggaataattttaattaaattaagaaaacaagccgggcatrgtggctcacgcctgtaatcccagcactttgggaggccagggtgggcagatcacgaggtcaggaggtcgagaccatcctggctaacacagtgaaaccctgt

SEQ ID NO: 266871 - DNA, 201 bp, Homo sapiens
aagaaaaatgcacacacagaattgtgcatgcatttaagtaggtacatgaactaccctaactgtgtgtacgcacacatgtgtgtatgtgggtttagaatatgtgtgtgtgtgtgtgtgtgtgtgcgcacgctggatcagaggacagaccttttatttactcacagaacatcatagcagcaccagtacctcatgcactaatct

SEQ ID NO: 266872 - DNA, 201 bp, Homo sapiens
aaccaaagtaatgggctaaattgtataattgggtctgtatctttcttagagagagaggggcagacaggttagtgcgggagaattttactggcaaggtgttmaagagaaaagatatgagtgtgcctctattaccagtaatacacggagatctgcaaattggttaataactacaggagaagaaagtgcaggaactgccgcctc

SEQ ID NO: 266873 - DNA, 201 bp, Homo sapiens
cctccagggttcaagtgattctcctgcctcagcctctcaagtagctgggattacaggcatgcgccaccataccctgctgggtttttgttttttgttttttktttttagtagagatggggtttcactatgttggccaggctggtctcaaactcctgacctcgtgatctgcccacctcagcctcccaaagtgctgggattaca

SEQ ID NO: 266874 - DNA, 201 bp, Homo sapiens
gaatgtgcccagccctagaccacaacctggcttcttactcatcacctccctgggaattccatcaaaatgcaatcagtgatccattcaaaatggcctcttgmatttaaggtacactgatgttgtagaatgttaatattcgtaaccacttagctgctgaaccagacaaaacagaatgacaaatctagcaatgcagttactgtt

SEQ ID NO: 266875 - DNA, 201 bp, Homo sapiens
cttcactcctctctctgatcttaggagagactcgaaaaggtataaaggaacaccaagaggccttcttaagctcaaggaatcaacagtttgtttattttcakttccccatgtattttgaggctggaggataatgcaggcagccagactacctgtaccttacctcttgggagccaaagctatgaggcagctgtagggagaatg

SEQ ID NO: 266876 - DNA, 201 bp, Homo sapiens
catttcttcataattggttgttgttgctctggattcagaatcagtcccttggcactttgcagaatggccaactgttgtaattcttcaggaactttttgtakaaagcactattaagatgaacttagatgtaaattggggagttatatttctctgttataaaacataatgaggaagatggcttccgttctttaatatctcata

SEQ ID NO: 266877 - DNA, 201 bp, Homo sapiens
agtaaatcatggatctattttggtttatggttttcaagatcttacaaaatgtgtgtgtgtgtgtgtgtgtgtgtgtgtgtgtgtgtgtgtgtgtgtgtgtgttggaataggccatctcactggaaagatgctggttggaatttagtcactggcacaagggctcccatagtctttttcctatgtcaggcctatgctgggatc

SEQ ID NO: 266878 - DNA, 201 bp, Homo sapiens
attacagatatgtagacgcaaagccatgtagagaatttatagcttcagtcctacaacttcagtcatgcgtcaaaagaagatagagaatcacaaaaatgtaytagtccagacctcaaagagctgttttcctccccagtgggcatatgatttttaattgatctgaggtcaccaagagataagtaaacacaagtgacttacaca

SEQ ID NO: 266879 - DNA, 201 bp, Homo sapiens
gtaaatcatggatctattttggtttatggttttcaagatcttacaaaatgtgtgtgtgtgtgtgtgtgtgtgtgtgtgtgtgtgtgtgtgtgtgtgtgtgttggaataggccatctcactggaaagatgctggttggaatttagtcactggcacaagggctcccatagtctttttcctatgtcaggcctatgctgggatca

SEQ ID NO: 266880 - DNA, 201 bp, Homo sapiens
taggcatgtctctttggtgtacagatggccgtcttctccgtttcctctcacggggtttcctctacataccctcttgtctggtgtgtaaatttcctcttccyataaggacagtagtcagattgcatgagggctcacccgaaagacctcattataattaatcaaatacagttggattaggaggtgctgggggttagagcttca

SEQ ID NO: 266881 - DNA, 201 bp, Homo sapiens
ggcaggagaatggcttgaacctgggaggcggagcttgcagtgagcctagatcgcgccactgcactccagcctaggcgacagagcgagactctgtctcaaaaataataataataataataataataataatagtctgcagatgcagtctttcctagttcagattatatctgctgcgcccaacattgtaatgtatagatcttc

SEQ ID NO: 266882 - DNA, 201 bp, Homo sapiens
gcaggagaatggcttgaacctgggaggcggagcttgcagtgagcctagatcgcgccactgcactccagcctaggcgacagagcgagactctgtctcaaaaataataataataataataataataataatagtctgcagatgcagtctttcctagttcagattatatctgctgcgcccaacattgtaatgtatagatcttca

SEQ ID NO: 266883 - DNA, 201 bp, Homo sapiens
taacagatttagaaggaactgaaaatgaatgaatgatactgaagatattgaagacagccctacctactttacagaccatagacagtggtacagtaagtatrccaatgagtatagactgatcagtatgctgataaaagcacactggctgggcacttctgccaacatgtctacttatgtcgtgagcacagagaggtggacaat

SEQ ID NO: 266884 - DNA, 201 bp, Homo sapiens
caggagaatggcttgaacctgggaggcggagcttgcagtgagcctagatcgcgccactgcactccagcctaggcgacagagcgagactctgtctcaaaaataataataataataataataataataatagtctgcagatgcagtctttcctagttcagattatatctgctgcgcccaacattgtaatgtatagatcttcaa

SEQ ID NO: 266885 - DNA, 201 bp, Homo sapiens
tcccctgagccctggaagccgagactgcaatgagccctgatcatgcctgcactccagcctgagtgacagagggagacctggtctcacaaaataaataaatwaataaatacattaataaattaataaattaattaattaaattacaagaagatataatatacattccttccagtcccaaaatatggacttgtttggatctcg

SEQ ID NO: 266886 - DNA, 201 bp, Homo sapiens
tgattgtgtcctaagaatttgaggccgggcgcagtggctcacgcctgtaatcccagcactttgggaggctaaggcgggcggatcacgaggtcaggagatcragaccatccaggctaacatggtgaaaccccgtctctactaaaaacacaaaaaattagccgagcatggtggcgggtgcctgtagtcccagctactccggag

SEQ ID NO: 266887 - DNA, 201 bp, Homo sapiens
tgctttatctttctttgtctccctcactcacaccttcccctccttcctttcctctgtctctcaagaagctaaacataattgcagatagactgacattttgktcctaaacacttcagcctatatctacaaaggcaaagggcaatcttctgtgtagccgctgtaatgtgtgatgtaaatttcaaggaatttaacatcgataca

SEQ ID NO: 266888 - DNA, 201 bp, Homo sapiens
acaagcctagaaagtgttcaagacatttgggggatttatttcagcttctgtcattagtgtgtgcttaacttcaagggtgaaatccagatcagtactctaattttttttttttggtggggagtggggacagaatcttgctcttgtcgcccaagatggagtgcagtggcacaatctcggctcactgcagcctccgcctcctgg

SEQ ID NO: 266889 - DNA, 201 bp, Homo sapiens
ccgtttcatggagctcacttacacacttctttttagtagttcaggcccgccggggataatctcccttttgctgaacaagccagccgattacagacttgacrtatatctgaaaacccccctctccttggccctatagtgtaacctaatcacacgggtggcattcttcatagtcacagatgctgctcatagaaggcagataca

SEQ ID NO: 266890 - DNA, 201 bp, Homo sapiens
tgtataagagggtttcatattgaaaagtcccgcaagtgacaagatttgtagatttataagaggctttctaccagtatttgagaagtggtggcaggtataargggtggacagtgacagccacccttcttgactcagatatcccagcatccacgtgcatgcaccagtgaacatgaaaaagtgaaagacaggaaagaccttctg

SEQ ID NO: 266891 - DNA, 201 bp, Homo sapiens
tttggctaggaacacaactctgtggtgacaaaacatgtataaagaaggtcttagcaaaagtgctgggatgtatttgatattcttttaaagcagcttgacaraggcggtggttgagaccacagcgtgttggggaagcagcttccacccaccttgctgctaagcctgtgactgacaaggctcgcgaaagcaatcaaaatggaa

SEQ ID NO: 266892 - DNA, 201 bp, Homo sapiens
gttttttcctcaactcatttattcaaaaatacaaacaaaagcaagtaaaaaaaccccacaaagctaatttataacaaccctagatattttcaatgtctctrgaacatttaacattagtacactgggaatcacagcctactctggaagagatagagtatggagtaaactcctgagtagggagctgggtccagactcagacac

SEQ ID NO: 266893 - DNA, 201 bp, Homo sapiens
tattagttgcaagacaaaaatatgacttcaatgttaagaatagtttagctattatgcaatagaaaaaaattggcttattgaatttagcctctattaaatctttttttttttattctatacctccttttaggcatttaggataagctgatgactagaattaagttaaaagtgtggcaccaagctctcaagcttgaaaacata

SEQ ID NO: 266894 - DNA, 201 bp, Homo sapiens
tctcttcttcctcagggaaggctcagttatgctcttaggcctttccacagattgaatcagcccccttcaggttatctaggataatctctcttacttaaaayaaactgattatagatcctagtcacatctacaagaaagcttcacagaaacaccaagattagtgtctgcttgagtaactgaggaccatagcctagccaagtt

SEQ ID NO: 266895 - DNA, 201 bp, Homo sapiens
ggctttcatttgatatgctcttccctttctcttatttctcaatagtccattctttgtagtactggtgtgaaagggaatttaatgtctttgtgtcaggaaargcctatttattctgacaaactgatcagcctccagggtgttcctctaccatgaaactgattttatatctcatccacgagctaataagatgtgaacggtttt

SEQ ID NO: 266896 - DNA, 201 bp, Homo sapiens
ggtgaggaaactccttcctatgaaatggagtaggggcaaaatagtccctgttgttcttatctccttaaagtttagaacacattgtatgctgtgattgtagycactcagcatgtgctatctcactacctctcccaggggtcatatgagaaagctatcgctgttatcctagcatttccaaggtggaaaccaaggcacagaaac

SEQ ID NO: 266897 - DNA, 201 bp, Homo sapiens
gggtgattttagtcaagttattcaatggcttatggctcatcttctcaccttttcgaatctgtgcaggagacatctcctgaccttattctgaaaaataggacccccactcagctgctgcgtcctcccactgacgttctctgtccccaatcctgctgtgtagttcctcatgcacttacccttccatagcatcttatcgcactt

SEQ ID NO: 266898 - DNA, 201 bp, Homo sapiens
ccagttagttttacacaaatcccagtctctaggcaaatttttctgcaagaagcatcttgtacttatagacacatagatagattatatatatatatatatakagagagagagagagagagagagagtgcaagacagagataggatggatagattgattgatttttaatagaactaatcatagtgaaaattttaaattgaaat

SEQ ID NO: 266899 - DNA, 201 bp, Homo sapiens
cgatggcgggtagagggcattggttccttgggcgtcttcagtcccatggtgaatgctgctcatcatctctcagtccgtgtgtctctgtcctaatctcctcrtcttgtaaggacaccagtcagattgaagaaggcctcccctaacaacctcatcttccctttaccactttaaaggccctgtctccaaatacagttactttct

SEQ ID NO: 266900 - DNA, 201 bp, Homo sapiens
gagtgcaagacagagataggatggatagattgattgatttttaatagaactaatcatagtgaaaattttaaattgaaattagttttttgtttcagggaagrgtaggatggtgaagatttgcaaatttttaccccaaactccttctttattaaatgcttttggcatctatctaatttccttgtagtgcctgtatctctggta

SEQ ID NO: 266901 - DNA, 201 bp, Homo sapiens
cagaagatgggtcagagttggtcaggacagcaggatggtgtggtaaaggacattccagcagagggtgccacatgggcaaagttgcagaagccagaacctcytcaaccagactgtgtcctctgttcccctgtgtctccaggcccaagatgacatctgctgcacagacatttaatagatggtttgttgagtgatggcagcatc

SEQ ID NO: 266902 - DNA, 201 bp, Homo sapiens
gtatctctggtatttgcaaagactttttctatgtatccctaaaagtgggatccattgtaacagttccaaaacattcctcaaagctgttcttttataatctmatccttctcatccctgagcacctccatttcccaagcctggataatagacgcaggtaatccacccgcatgtctgatattcaggtttacaattcccttgctg

SEQ ID NO: 266903 - DNA, 201 bp, Homo sapiens
agaagaggacattcccagtctctttaaaggtcaaatctggaagtagcacacaacatcgtactcgtactccgacagagaaaagttacttgtgaggctacatggccagcccccaaagcagttgggaaatatctgtattcggggtgcgatgtgcccagctagaaactgttcctatgaagaaaagggcaaatggatgatgagcgg

SEQ ID NO: 266904 - DNA, 201 bp, Homo sapiens
cacttggacacagttgagaaagaccctgccactctgctgtgatttctaggatcttttctcaatgggagttctccaagttcctgtcttatttcccattttcrctggggtgctggtggatattattgagggcttcaagactgctcacctctccaaaagggttaaggcatcacctttccttcatggaaggggtggaggaacagc

SEQ ID NO: 266905 - DNA, 201 bp, Homo sapiens
aacagtgacattttatgcatatattatatctatggaaattcttctgtcccacaaatatatgttaagtattttgaaggaagaaaagatttctatcttttctrtcttttcaatctcagattaggggaatttattcaagttaactctaagtctctggggactaagtggggggaaagaaatgtttaaaagcagtgctgtgttaaa

SEQ ID NO: 266906 - DNA, 201 bp, Homo sapiens
cagattttttggcattaaattaattcttttcatgtttgtcagtcctgagcagattgataatttaaaaacgtatacacaacaacacagaatgttttttccctttttttttttaataaatccaaggaacatggttttccttttttacaaagtcaagggaatgacaaacagaaaaggagaggtctgtgtcaaagtggcattttc

SEQ ID NO: 266907 - DNA, 201 bp, Homo sapiens
ccaccaggaagggatttagtaggctttttttgtgtgtgctaaatgttcctaggggtttcttgtcgatatcgctgggaccactggtgggtgaaaggcaaggyagacatgaatggaggctgagaagtgggagacaagttgaggaataaagggaaaaaatagcaaaccaaagttggaaaacaatgtcagaaaaagaaaaacata

SEQ ID NO: 266908 - DNA, 201 bp, Homo sapiens
tcattataaactagaaagtatggctggttacggaagtctagtcagtgcctcactgtcgctgactcagtccaacacccaccatctctggtgggacaagtctscactttggttctgatttcctctttgaggtctagatgccagttttcagcaactaccaaacagtttttcttggctgagcctcttcaacacgtgcacttatgg

SEQ ID NO: 266909 - DNA, 201 bp, Homo sapiens
catatgtgtatgtacacatacgtgtatatgcatgtgtatatgtccatctaaaataatcaaaatgcttaggatccagttaagtaattcattcaagggctgcrtgggagtggccattcagagatacgcagacaccaaagaatgatgaatttctgatattccaagaatccagtgaaatattacggtgtggggaaaagtgaagat

SEQ ID NO: 266910 - DNA, 201 bp, Homo sapiens
atgtgtatgtacacatacgtgtatatgcatgtgtatatgtccatctaaaataatcaaaatgcttaggatccagttaagtaattcattcaagggctgcatgrgagtggccattcagagatacgcagacaccaaagaatgatgaatttctgatattccaagaatccagtgaaatattacggtgtggggaaaagtgaagatctt

SEQ ID NO: 266911 - DNA, 201 bp, Homo sapiens
gccacggtggctcatacctgtaatcccagcacattgggaggccgaggcgggctgatcatgaggtcaggagatcgagaccatcctagcttacacggtgaaaygctgtgtctactaaaaatacaaaaaattagccaggcatggtggtgcatgcctgtagtcccagctactcgggaggctgaggcaggagcatcgcttgaaccc

SEQ ID NO: 266912 - DNA, 201 bp, Homo sapiens
ggcatggtggtgcatgcctgtagtcccagctactcgggaggctgaggcaggagcatcgcttgaacccgggaggcggaggttgcagtgagctgagatcactycactgcactccagcctgggcgacagagagagactccatctcaaggaaaggaaggaaagaaaggatggcagaggaatatgggagattattctccaacttgt

SEQ ID NO: 266913 - DNA, 201 bp, Homo sapiens
agttatcttaaaacaaatgcctattcctatatattcataaatattttaaattagtgaaagttctcatgccaggtttctaataataaaagtgagacagcacygaaccaattacttggaaaatttggcaggaaaaatcaattaacaagataattggtaagagtgagtaatggagcaccttcaacgctaggtgggattcaagca

SEQ ID NO: 266914 - DNA, 201 bp, Homo sapiens
tactccttttatgcttctacacaaagtcagatctggctcagacgccaggcttcagggcaccagagtctgcatctggtagcggggagggcctttcccctccyacagctgcataggtcccaagccaggcccctttgggtcgcagtgtctgctggcatctcccagttcctctaagtcacacttggacctcgaaacctccccaaa

SEQ ID NO: 266915 - DNA, 201 bp, Homo sapiens
ttccagttttgttatttttaagccccatcttcacactgagtttatatctggccatttcccacactagtgtccctgtgatgagcacagtttgcagatagccrtccacggtcttctgaaatatcttgccgccttccagctcttctcatctaagtctatgctgtgtctagtcttgtttgttgtttttttgaacctaccaggtgt

SEQ ID NO: 266916 - DNA, 201 bp, Homo sapiens
cagacgccaggcttcagggcaccagagtctgcatctggtagcggggagggcctttcccctcccacagctgcataggtcccaagccaggcccctttgggtckcagtgtctgctggcatctcccagttcctctaagtcacacttggacctcgaaacctccccaaaggcctacaagcatggtgctccctgctcagccccaggca

SEQ ID NO: 266917 - DNA, 201 bp, Homo sapiens
cttgtaaagaaacaaaaaattctccaaaacacccaaggttgaatgaagttttatatatatatatatatatatatatatatatatatatatatatatataattttttttttttttttttttttgagacggagtctcgctctgtcgcccaggctggaacgcagtggcgccatctcggctcactgcaagctccgcctgccgggt

SEQ ID NO: 266918 - DNA, 201 bp, Homo sapiens
tttattttacatagaatatttattatatatgttatattattatatataaatatatatatttaggccaatatttatattaattatataattctataaaattrtatatttacatatataatttatatatgtgagttatataaaaatatatataactcatatctgtacattaaatataattatataatattttatacatacgta

SEQ ID NO: 266919 - DNA, 201 bp, Homo sapiens
agaacttacgatgacttgcttcttcaagcctagcaggaacgtgaagtctctgtcacttcatgtctctgaacttgagaccccgtttcatggagctcacttayacacttctttttagtagttcaggcccgccggggataatctcccttttgctgaacaagccagccgattacagacttgacgtatatctgaaaacccccctct

SEQ ID NO: 266920 - DNA, 201 bp, Homo sapiens
gcccctcatgagcccccagcaactgcattccagcccaagtggccctcctcccctgggtcagtgccgagcaccagcaggtcacatgcggtctatgttttacrgtcctgtctttgtggtcaggcagcctctaagtggccgtcagaaagttgagccccctctccccgttcctgtctgactgctgtacactcgtgcagggggagc

SEQ ID NO: 266921 - DNA, 201 bp, Homo sapiens
atataactcatatctgtacattaaatataattatataatattttatacatacgtattttaattgtgtgtgtatgtgtgcatatatatatatatatatatatttttttttttttttttttttttacctatttacttactttgttttacaactgaagaaggaaaaggtgaaagtctgaaggagcttggattgattgggtggaa

SEQ ID NO: 266922 - DNA, 201 bp, Homo sapiens
atctattaaactgataacaaatacctctggccaaaaccacgggaaggcttttttcaaagcatttgaaatgcaaaataaacgacatgtaaagattctgtccrtacagcatgtcaagagtgccgtttcattcatcaaggggaacaaatgtttccaccgccacgcggtagcgctcgtgcaaagctcgctgttactcaggagccc

SEQ ID NO: 266923 - DNA, 201 bp, Homo sapiens
ataactcatatctgtacattaaatataattatataatattttatacatacgtattttaattgtgtgtgtatgtgtgcatatatatatatatatatatattwttttttttttttttttttttacctatttacttactttgttttacaactgaagaaggaaaaggtgaaagtctgaaggagcttggattgattgggtggaacg

SEQ ID NO: 266924 - DNA, 201 bp, Homo sapiens
atcaggtttttttgtgtgctgtaggagatcccagaaagaattagggcattccattggttgctttactttcacctaatcaaagagatctgggggtttttatwtccccctccccatctccatcactaccgaaagaactgatcctggtgggtctaaggaaggcagtggtgctgcttctcacccagctgctctcatccagacccc

SEQ ID NO: 266925 - DNA, 201 bp, Homo sapiens
aaatataattatataatattttatacatacgtattttaattgtgtgtgtatgtgtgcatatatatatatatatatatattttttttttttttttttttttwacctatttacttactttgttttacaactgaagaaggaaaaggtgaaagtctgaaggagcttggattgattgggtggaacgagaaagtgataggcaccaga

SEQ ID NO: 266926 - DNA, 201 bp, Homo sapiens
atcttataaattaaaacttgggcccctttgagaaatactctttcccattcgggttctttccctcttcttatcctttcatccttttcctggggatgatcagsccatagggcctcaccactgttctgcctgaagaagggaagtctaatttcctgttggcttctgtcttattggcctctactgaagtgaaactggggatgttgt

SEQ ID NO: 266927 - DNA, 201 bp, Homo sapiens
ggcagatgagcaaacaaataaatgcagagatgaattatgcctgagggatcgatggtcatagacattcctaagttgctgtctgtgggtgaatgtgtgagcattttttttttttttaccaggtttttgtattgggtgtttgttatctgtatttcatggcagccttttgtacacgggtatgaacatgtgacgtctatacaaagg

SEQ ID NO: 266928 - DNA, 201 bp, Homo sapiens
tgattgccagtgaggttcccacaactcctgtagtggggccaggtaatacttccgttttatactttgaattttgctgaaattattggacaattagttaatgrcattagtcctaataggagatctaaagtcagaataagttccatttggaggggagacgcatgtgtgtgaataaattcgatctcagctggcgagggatgctgt

SEQ ID NO: 266929 - DNA, 201 bp, Homo sapiens
gaagatgagatgctttttggcattgggtcacctgaaatatctggaaaaaaaaaaaccaaaaacttcttaaactgtgcttccggatatgatctgttgcttgtttttttttgtttactggtttttttttttttttttttaggtcttgtttgatgttgcctctttgcatttgatttcagccatcttgatagttttttctatgca

SEQ ID NO: 266930 - DNA, 201 bp, Homo sapiens
ttgctttgcttttcatttgctcttcattttttgtttgtgaaggtggaatgtgaagacaattggaaacttttttctgtttagtcccaaaaaattttctttgyatattgctttagctgcatcccctaaattttgttatgttatgtcttcattttcattcacttttgaattttattaatttccattttcatttcttcttttacc

SEQ ID NO: 266931 - DNA, 201 bp, Homo sapiens
ggcattgggtcacctgaaatatctggaaaaaaaaaaaccaaaaacttcttaaactgtgcttccggatatgatctgttgcttgtttttttttgtttactggtttttttttttttttttttaggtcttgtttgatgttgcctctttgcatttgatttcagccatcttgatagttttttctatgcaattaacaaggtccagccc

SEQ ID NO: 266932 - DNA, 201 bp, Homo sapiens
tcttctcttgatgtgtttgtaagtgaaggacccctggggtctgtattgcagtcactcacctgcctcccacccactcagtggctttaggtgggctgttgaaygcctccacaacacgagttcctgatgtgtcaagtgggatcaacacccttgcttaggctgtgaaggtgagtgtgtcagtgaagcagctggcactttcacaca

SEQ ID NO: 266933 - DNA, 201 bp, Homo sapiens
gcattgggtcacctgaaatatctggaaaaaaaaaaaccaaaaacttcttaaactgtgcttccggatatgatctgttgcttgtttttttttgtttactggtttttttttttttttttttaggtcttgtttgatgttgcctctttgcatttgatttcagccatcttgatagttttttctatgcaattaacaaggtccagccct

SEQ ID NO: 266934 - DNA, 201 bp, Homo sapiens
tgtacattctgatacattcgtcacttgaaatatcgtttctctgtatcttcacaaaaagtctgggctttgttttgtttgtttgtttgtttgtttttgttttkattttttttttttttttttttttttgagatggagtctcgctctttcacccaggccggactacaatggcgctatcttggctcactgcaagctctgcctccc

SEQ ID NO: 266935 - DNA, 201 bp, Homo sapiens
ttcaaatgttttgcaaaagaagaagaaaaacagtaacaggagggagaagaggaggaacagagaaagataaaaggataccattttaagataaatacttactytccatgaaattgatttataaaacaatgtcacctcatcaaacacacatgagataggggaaagacctttttcatcatacagtaaatgttagcaatagggact

SEQ ID NO: 266936 - DNA, 201 bp, Homo sapiens
gtacattctgatacattcgtcacttgaaatatcgtttctctgtatcttcacaaaaagtctgggctttgttttgtttgtttgtttgtttgtttttgttttgwttttttttttttttttttttttttgagatggagtctcgctctttcacccaggccggactacaatggcgctatcttggctcactgcaagctctgcctcccg

SEQ ID NO: 266937 - DNA, 201 bp, Homo sapiens
taccaaaacataatgcatttagagtttttttttaaaaagcaagaatatatttttcttgcatacaggctagtgttaggaggtggaaatttaaagggcttccrtttattttgtcttgcatagcatcaaagatagataagtaagtttgaacatgcaaacgtgaagttacctcttactttgaccttcctcaaacataggtataca

SEQ ID NO: 266938 - DNA, 201 bp, Homo sapiens
ccttttatcattactcaaataccattcacttgtgtgcagtctcagagtttcatattttcatgcaggaaaagaaaaaagtcttctggcatgaaactacttcttttttatttctaacagaattgagtatttccttggttatctttttttgtaacaatatatatttttcactttccgtattcccaggcatgagaaattagacct

SEQ ID NO: 266939 - DNA, 201 bp, Homo sapiens
tcaaagatagataagtaagtttgaacatgcaaacgtgaagttacctcttactttgaccttcctcaaacataggtatacaacatctgtcatctaatgttacytatttctttattgatacgatgtcactgggctttttgtttgtgtctttgtgatgggattgaggtagaagggaagtaccctacacaggacctccgttcacta

SEQ ID NO: 266940 - DNA, 201 bp, Homo sapiens
cagggtaaactatatgtagctcatgctgccacagctggtcttgaagttgcagctgactcccattgacttccttctctcctactcattctagattcccctcrcccttagagaagacctctaggtggcttacctggtggggtgacacagacatcatccctgatgggtccaggctcctgggtgccattctaaagccatgactac

SEQ ID NO: 266941 - DNA, 201 bp, Homo sapiens
tgaaccaagcttggatccctcagtgtgtcataaggaatctccccagcccggccactaccaccgtggggccatggttgtgagcccaaggagaggcagtcatsccacggtgtggatggcacgggggtctgaggacctgcttgtgcagctcgctcacgccccgtgggcctgcttgggcctgggcctagatgccccacttctgtc

SEQ ID NO: 266942 - DNA, 201 bp, Homo sapiens
tcaaacataggtatacaacatctgtcatctaatgttacttatttctttattgatacgatgtcactgggctttttgtttgtgtctttgtgatgggattgagrtagaagggaagtaccctacacaggacctccgttcactacggaagggaaagacacatgaattgaaactgatgttcacagataggacaatgctgctgtcatc

SEQ ID NO: 266943 - DNA, 201 bp, Homo sapiens
cccaggatttccaggctagagtgagctatgatcttgccacagcactccagcctgggcaacagagtgagaccctgtctcaaaaaaaaaaaaaaaaaaaaaawagggtctctctgtctttgttgaccacagtgtatgtagaccttctgcgagcagtagttctccgaagctctgcaggctagcgacatcggcatcacctaggaa

SEQ ID NO: 266944 - DNA, 201 bp, Homo sapiens
gctgtcatctttgcattacattttctattatccttggtctgactgtttactagaaacaccagctttctctagcctcaagacagtgagaatgtcttctgtcrtgtacttctcgaagctgttgcagtgccctgtagggcattctagctgttgtcctaaattgagatgacagtgttgctcatattaaattgccttcttgcttgg

SEQ ID NO: 266945 - DNA, 201 bp, Homo sapiens
agctcggctcggtgcaatctccaccttctggattcaagtgattctcatgcctcaacctcctgagtagctgggactatatgtgtgcgccaccaggcccagcwtatatatatatatatatatatatatcaagactgaggttgctatatatatacacaaatatatatacaaatatatatacaaatatatataaatatatataca

SEQ ID NO: 266946 - DNA, 201 bp, Homo sapiens
ccacatccgttctgccacccctcccagccccaacagagctttctctggaatgaaactaacaaaattcaagatcctcagtttgcatctctgttctgatggaktacatgtctgataatcaaccagaatgtcaagtcaagaacaatgattgagtatcaagtgcatgttcactgggcatcaagtgcatattcattgcatgcaagg

SEQ ID NO: 266947 - DNA, 201 bp, Homo sapiens
cccaccaccgcgcccagctaatttttgtatttttagtagagacggggtttcaccatgttggtcaggacggtctcaaactcctgacttggtgatctgcctgycttggcctcccacatccatgtttgtttgtttgttttcttttcttttttttttttttttttgagacggagtctccctctgctgcccaggctggagtgcagt

SEQ ID NO: 266948 - DNA, 201 bp, Homo sapiens
aatacgttgctcatatatggtcactgtttgcactctcttattcttcattttcttgagaactagaagtctcctgcttcatcaacccaacctaagactcaccyccaactctgacactgtctaataattgtcaatctttgtagctctcttatgactttgagatcctgctgaggacaaactcatttaagacccgggattaataag

SEQ ID NO: 266949 - DNA, 201 bp, Homo sapiens
tgaggcaggagaatggtgtgaacccgggaggcagagcttgcagtgagccgagattgcaccactgcactccagcctgggcgacagagtgagactccatctcaaaaaaaaaaaaaaaaaaaaaaaagagcagaaggcactgatgggatggaaggaaagagcttctctagtctccaccaccactgggtgcactgggaagtggga

SEQ ID NO: 266950 - DNA, 201 bp, Homo sapiens
ctatgcggagtttcttgtgtctttatgtaaaatgtcttcactacattttgatttggaagaacagctttctcatcataagtcaagcctactcatcagcattrgatttctcttttatcataataaaggtattttgaagattcatctgtagattcatgagcctactttcaaatatgttattcaagtcaccaattaaataagacc

SEQ ID NO: 266951 - DNA, 201 bp, Homo sapiens
cgccccttaccaccctgccaaagacccctgccctcctgttggggggcactgtcaacaccatcccatctctcgagggggaggcactgccattccctctgcagggggcctgcctgtggatggccttgagccctctgggaaatcacctctgccaagacaattagttctggctccctccccttccccggagagctcatgtcccat

SEQ ID NO: 266952 - DNA, 201 bp, Homo sapiens
attaatacacttcctccctttagaaagaaattagatcagcttaggtgatttttctctttcaccttctaattgttaccaaaccctgcttctttgaggtggtwtcagactgaatgacaatgtgttcttcttctggtcctgggtgtgggcaggagaataagatggaggaatgcgctgaaggccaccactctatttcctctagat

SEQ ID NO: 266953 - DNA, 201 bp, Homo sapiens
aattgtaaagaaatacgtaacagataagctcatatctttttgcttgtttatatctcttccctttcatggtacccttgtaagttctccatcacacctgcctrttcctgatctccagcccacattctccttgggctcagcccatccagatctgatcatgctgaatccacctgtctttcactatatccctcccctctgagctct

SEQ ID NO: 266954 - DNA, 201 bp, Homo sapiens
tgaggcaggagaatcacttgaacccggcgggcggaggttgcagtgagtcaagatggcaccactgcactccagcttgggaaacagagcaagactccatcttaaaaaaataaaaaaagaaagaacaccaaggatttaattacctcagaggagttgcatatagaaagaatgctgccatgctttaaacacatagtgaccattgga

SEQ ID NO: 266955 - DNA, 201 bp, Homo sapiens
gcaaaataaacgacatgtaaagattctgtccgtacagcatgtcaagagtgccgtttcattcatcaaggggaacaaatgtttccaccgccacgcggtagcgmtcgtgcaaagctcgctgttactcaggagccctcgctacccgcagacaggctgagcacagtgaattagcctctcaggaggaactcagcttttcagagcaca

SEQ ID NO: 266956 - DNA, 201 bp, Homo sapiens
tcgtgcaaagctcgctgttactcaggagccctcgctacccgcagacaggctgagcacagtgaattagcctctcaggaggaactcagcttttcagagcacarcctcaccacgtcaattaatatttgctgactgaatgcctgctctgcgtctcccactaaccaggggctgcagggacttcttggagcatggcaagcaccccaa

SEQ ID NO: 266957 - DNA, 201 bp, Homo sapiens
atcgtttgctaaataggaaagacaagttgacagatgattgggagcctcttccaggcaagaggatttccttaggaagctcactcagccaggcccatcccatkaagctgccctgggatgggtcctggagaagtggtatctgcagctcccacccgctgggcctggcctggccgattcccagtcccccagtccaggagccagaag

SEQ ID NO: 266958 - DNA, 201 bp, Homo sapiens
taaataattcagagccagcttggcacatgtatgtttattaaagtagggatgaaaataaaactcactcgtgtggctgcattagcccactgaacagtatttcrtcttacatcgtctctataacttctgaagtgaaaaccagaaactcattggcgatgtcctccctgcttgctgggctgattggcatgaggcagggccagcttt

SEQ ID NO: 266959 - DNA, 201 bp, Homo sapiens
ttcgaaagtgagattgactttccttctgtttctgaaagaaatgcgacttaaaatttgagtctgtagcaatcagcttgagatagcctactctgaaactgctraaagaacagtttccatttaagaatttagctgcagtgctgagaacatacaacccctacctttttaagcctctcatgtgcttatatttcttaaacaaaatgg

SEQ ID NO: 266960 - DNA, 201 bp, Homo sapiens
atttttgaacactgcctaaaacaccagaacagaaaagtctacagtttttctgaatcctacctctttgtaaaatttcaggagaactaatttcatgtaaaactgagcaacagcaaaggaacaaggtaaaactctaacagaaaagaagcaaggttcagtcccgtacagggctattaaaatgatgcagcgaatgtagaacaaaat

SEQ ID NO: 266961 - DNA, 201 bp, Homo sapiens
gcatactcgtcagtttaataaaatgtatgttaattttcctaagccaatttacaagcagcattggtcaaatagctacatgcgggatgatcacccgaatatcwaataatgatagagcacttaacggtttactaattccttaacaacatccatcatctatttttcgattttcttctctctctcggtttccacatgacccatgca

SEQ ID NO: 266962 - DNA, 201 bp, Homo sapiens
tttttgaacactgcctaaaacaccagaacagaaaagtctacagtttttctgaatcctacctctttgtaaaatttcaggagaactaatttcatgtaaaactgagcaacagcaaaggaacaaggtaaaactctaacagaaaagaagcaaggttcagtcccgtacagggctattaaaatgatgcagcgaatgtagaacaaaata

SEQ ID NO: 266963 - DNA, 201 bp, Homo sapiens
tactcgtcagtttaataaaatgtatgttaattttcctaagccaatttacaagcagcattggtcaaatagctacatgcgggatgatcacccgaatatctaataatgatagagcacttaacggtttactaattccttaacaacatccatcatctatttttcgattttcttctctctctcggtttccacatgacccatgcattg

SEQ ID NO: 266964 - DNA, 201 bp, Homo sapiens
taatattttataccagaagaacatgaagtaagagatttcagatactcaagggggaagtatgtataaatataagtgtgtatgtatatatatatatatatatmcacacacacacacacacacacaatccctgtatgtatatcaggattgtatattccttatatgtatactgtaagaaactataattccatatattctttttat

SEQ ID NO: 266965 - DNA, 201 bp, Homo sapiens
ttactaattccttaacaacatccatcatctatttttcgattttcttctctctctcggtttccacatgacccatgcattgaaagatttagatttcctatttygccgaattgtactgttttcccttcccctctgagtgaaagtaagaaaacctatgagtttaaagtatgtcttctgccctacatgctgtatgtaaaatttaac

SEQ ID NO: 266966 - DNA, 201 bp, Homo sapiens
aatattttataccagaagaacatgaagtaagagatttcagatactcaagggggaagtatgtataaatataagtgtgtatgtatatatatatatatatatayacacacacacacacacacacaatccctgtatgtatatcaggattgtatattccttatatgtatactgtaagaaactataattccatatattctttttatg

SEQ ID NO: 266967 - DNA, 201 bp, Homo sapiens
ttataaatgaaagcaaatattaaatactcttttggttgtggttggttatttggctgtaaaagagcacatgttaatgttgctgactttattaactcatcatygggcatttcaaggttaggacttcaggccttttgcttggcattgactgagcagccacagcttcatgtatacctgccatgtgtttgtaaaaatgaagcaaat

SEQ ID NO: 266968 - DNA, 201 bp, Homo sapiens
gacctcaagtgatcggcctgccttggcctcccaaagtgctgggattacaggtgtgagccagtgtgccctgcctaaaattatttctaaaatcataatagagygatggaaaacctgaaacgatatatctgggcatcaacactgtgtcttctcttgatgtgtttgtaagtgaaggacccctggggtctgtattgcagtcactca

SEQ ID NO: 266969 - DNA, 201 bp, Homo sapiens
tctatttttcgattttcttctctctctcggtttccacatgacccatgcattgaaagatttagatttcctattttgccgaattgtactgttttcccttcccytctgagtgaaagtaagaaaacctatgagtttaaagtatgtcttctgccctacatgctgtatgtaaaatttaacagaattcagccgggcgcagtggctgat

SEQ ID NO: 266970 - DNA, 201 bp, Homo sapiens
tattttataccagaagaacatgaagtaagagatttcagatactcaagggggaagtatgtataaatataagtgtgtatgtatatatatatatatatatacayacacacacacacacacacaatccctgtatgtatatcaggattgtatattccttatatgtatactgtaagaaactataattccatatattctttttatgta

SEQ ID NO: 266971 - DNA, 201 bp, Homo sapiens
ctctaagctgaaatgtttacttctttttaatgtgatcatactctttttttttttgagatggagtctcgctctgtagcccaggctggagtgcagtggcgcgwtctcggctcactgcaagctccacctcccggcttcacaaccattctcctgtctcagcctcccaagtagctgggacaactggcgctggccaccacgcctggc

SEQ ID NO: 266972 - DNA, 201 bp, Homo sapiens
ggtgagctttatttttttttcatcagaaaggaacagaggctgaaaattagtgaactaagcatccaacataagatgtcagaaaaaagacaacagaaagaacytaaagaaaatggataaataaaataataaaaataattccagacatcaacaaagaaaaaaataaaataaatataataaatataatagtttgctctttaaaaa

SEQ ID NO: 266973 - DNA, 201 bp, Homo sapiens
caaccatcaacataagtactgatggttgtgcctgcatgcgtgtgtgtgtgtgtgtgtgtgtgtgtgtgtgtatagaagtaagataacatgaaggttaagasaaagacagcatagttcgaaatggccgcatgtgttaacagtgtggatacagtataattattttaaaaattttgtgggagaatgagtagagcatatgaaaac

SEQ ID NO: 266974 - DNA, 201 bp, Homo sapiens
acctcatgatccacccgcctcggcctcccaaagtgctggcattacaggcgtgagccactgcgcccggcccaatcatactcatttttaaaatttgaaatgtwaatgaaaatgtttcactcttgtcgcccagactggagtgcaacagcgtgatcttggctcactgcaagctctgtctcccaggttcaagcaattctcctgcct

SEQ ID NO: 266975 - DNA, 201 bp, Homo sapiens
aacacttggtttggtctaccttttaattaaaaggtattcaatttgacaggtgtgtagtagtatctcattgtggtcttaatttgcattttcctaatagaaartaatgctgggcatcttctcaggtacttatttgccatctatatgtcttctttgctgcagtgtccattcaaatcttttgcccatttttttattgggttgttt

SEQ ID NO: 266976 - DNA, 201 bp, Homo sapiens
tgcagggaaagggccacagcgtgggatctgtgattaagcctcccctaggcttaggcccttcggcgaaagcctacgcctagtagactgcaagcatatgtcaractgcttgggtatctcatcctgaacatgactcccacttggaatcacatacctttctctagaattgtctgatgcaaaaccatttacgtgccagcataacaa

SEQ ID NO: 266977 - DNA, 201 bp, Homo sapiens
aaaggaggacagagagatagagggagggaccaaaaaaggaggaagggatgagaatgaaggaggaaggaaaaaaggaggaaaagagagggggtagggagagaggaaagaaggaaggaaagaagctgaattaaatgaagcctatagaccaattatcaatttataggaaaaaaattatcaaggtgcattataaactgcaacatt

SEQ ID NO: 266978 - DNA, 201 bp, Homo sapiens
gattatcagattggattctagctgattgaaaagggcgtgacaaaaagtccgtgaggccagggctcagccatcttctttctcttatacacatctttatgatrtcgtccctttcctagagagctgtttcatgccagaatcataatgcagaaattgatcagcaattgagacccaaatctgccgctaagccagtgggacactcaa

SEQ ID NO: 266979 - DNA, 201 bp, Homo sapiens
gaaccttctttgatgtttgaagccccttttcttctgacctcccacttgccaagtagatactttctttctttcttttattttatttattttatgtttttatwtgggggacattttactcccagggtagttatagtcaaaaggaagaaaagtttggaatttcttctgtttgaacaccactgtgtaattggaaggcgcaagtct

SEQ ID NO: 266980 - DNA, 201 bp, Homo sapiens
ggaggacagagagatagagggagggaccaaaaaaggaggaagggatgagaatgaaggaggaaggaaaaaaggaggaaaagagagggggtagggagagaggaaagaaggaaggaaagaagctgaattaaatgaagcctatagaccaattatcaatttataggaaaaaaattatcaaggtgcattataaactgcaacattgga

SEQ ID NO: 266981 - DNA, 201 bp, Homo sapiens
gaggacagagagatagagggagggaccaaaaaaggaggaagggatgagaatgaaggaggaaggaaaaaaggaggaaaagagagggggtagggagagaggaaagaaggaaggaaagaagctgaattaaatgaagcctatagaccaattatcaatttataggaaaaaaattatcaaggtgcattataaactgcaacattggat

SEQ ID NO: 266982 - DNA, 201 bp, Homo sapiens
aaacaccaaaaacaatggcaacaaaagccaaaattgacaaatgggatctaattgactttttaataactactacgctgtcctggggtaactaccgatcctgrgataatttagagtccaaaattttaagcaaaaggagtaagtatttgactttcagacataagtgaaagatcagtaatgaaaattgtgtacatgtatacatat

SEQ ID NO: 266983 - DNA, 201 bp, Homo sapiens
tagatcgggtcttttctaattgtagcctctgctcagcaaagacatgatatttcatatggcttaatacatagaaatgatcagttacatgaggcacagcttcwtctcatccttttataggaggatgtcagatcatttgtccacaatttctgtaggatttgtgtaacatgaacttgaagcctgttttcatgaaagcctgcttcc

SEQ ID NO: 266984 - DNA, 201 bp, Homo sapiens
gacagagagatagagggagggaccaaaaaaggaggaagggatgagaatgaaggaggaaggaaaaaaggaggaaaagagagggggtagggagagaggaaagaaggaaggaaagaagctgaattaaatgaagcctatagaccaattatcaatttataggaaaaaaattatcaaggtgcattataaactgcaacattggataca

SEQ ID NO: 266985 - DNA, 201 bp, Homo sapiens
gccccttaccaccctgccaaagacccctgccctcctgttggggggcactgtcaacaccatcccatctctcgagggggaggcactgccattccctctgcagggggcctgcctgtggatggccttgagccctctgggaaatcacctctgccaagacaattagttctggctccctccccttccccggagagctcatgtcccatg

SEQ ID NO: 266986 - DNA, 201 bp, Homo sapiens
ctcagcttttttttttttaattttgtaaagatgggggtctcactatgtttctgaagctgatcttgaactccggggctcaagtgatcctcctgtcttagctsaagtgatcctcctgtcttagactcccaaagtgctgggattatacacatgagccactgcgcccggcctaggacattatctaaagtgtgatggaagacctaa

SEQ ID NO: 266987 - DNA, 201 bp, Homo sapiens
aggctgggcttgtgctgctagggggaggccgtggcattaacattgaaccaataatgctctttgccagaaggtggtggaacccagcaagggcagatgtgagyctcggttcacctctcacccagagccctgggattgcacagccaggggcagcgcccagtgccacagcagcctgcacttgaccttgctgcccaggctgctgcc

SEQ ID NO: 266988 - DNA, 201 bp, Homo sapiens
ttatatatattttaaatataaatatataaaaatatatttatatatattttaaatataaatatataaaaatatatttatatatattttaaatataaatataaaaaatatatttatatatattttaaatataaatatataaaatatatttatatatattttaaatataaatatataaaatatatttatatatattttaaatat

SEQ ID NO: 266989 - DNA, 201 bp, Homo sapiens
gtcacaccaacaatttaatgacctttttaatattacatatatggtagttagagaactttagaattcagtctaattatctatttgaaatactctgcgatttsagttcctgctatgtttcagcttttgttgttgttttcatggtggttggtaggaaacactgacatttcgtaaaatgtgcgatttgctaaggaaagggtttct

SEQ ID NO: 266990 - DNA, 201 bp, Homo sapiens
gtaaccatggcttagctgataaaaaagaaattcctattgatgttatctttttaatcacaaggtaattgtgctgacagctaagagaactaggccaatattayaagtagcctaagtgagcagcagagacacaggtttggctctctgtaattgtgaaaaaacacttggttgttggcatcacaaattatgctatatcaattagag

SEQ ID NO: 266991 - DNA, 201 bp, Homo sapiens
tgtgctgctagggggaggccgtggcattaacattgaaccaataatgctctttgccagaaggtggtggaacccagcaagggcagatgtgagtctcggttcasctctcacccagagccctgggattgcacagccaggggcagcgcccagtgccacagcagcctgcacttgaccttgctgcccaggctgctgcccagcctccca

SEQ ID NO: 266992 - DNA, 201 bp, Homo sapiens
ataaatatataaaatatatttatatatattttaaatataaatatataaaatatatttatatatattttaaatataaatatataaaatatatttatatatattttaaatataaatatataaaatatatttatatatattttaaatataaatatataaaaatatatatattttaaatataaatatataaaaatatatatattt

SEQ ID NO: 266993 - DNA, 201 bp, Homo sapiens
atattttaaatataaatatataaaaatatatatattttaaatataaatatataaaaatatatatattttaaatataaatatataaaaatatatatattttaaatataaatatataaaaatatatatattttaaatataaatatataaaaatatatatattttaaatataaatatataaaaatatatttatatattttaaat

SEQ ID NO: 266994 - DNA, 201 bp, Homo sapiens
aatatataaaaatatatatattttaaatataaatatataaaaatatatatattttaaatataaatatataaaaatatatatattttaaatataaatatataaaaatatatttatatattttaaatataaatatattaatatttgaatatatttaaatgaggaattgacccctatctatgaaacatgaagtgtttgtctcta

SEQ ID NO: 266995 - DNA, 201 bp, Homo sapiens
ataaaaatatatatattttaaatataaatatataaaaatatatatattttaaatataaatatataaaaatatatatattttaaatataaatatataaaaatatatttatatattttaaatataaatatattaatatttgaatatatttaaatgaggaattgacccctatctatgaaacatgaagtgtttgtctctaaatcc

SEQ ID NO: 266996 - DNA, 201 bp, Homo sapiens
tccataaagattggtcaacacgaatgaacctaaaaagataggtcagtcacacggaaccctgccccagccaaacaaactcacacttgtcaatcatgaactcrtgattgaaaatgtgcttcccagataaaagaagtcatctactcattttgcttccatgttgctgatagaattactttttctgttctggctttcccaaggcaa

SEQ ID NO: 266997 - DNA, 201 bp, Homo sapiens
aaatatatatattttaaatataaatatataaaaatatatatattttaaatataaatatataaaaatatatatattttaaatataaatatataaaaatatatttatatattttaaatataaatatattaatatttgaatatatttaaatgaggaattgacccctatctatgaaacatgaagtgtttgtctctaaatcccctt

SEQ ID NO: 266998 - DNA, 201 bp, Homo sapiens
ccgccctcatgcctggctaatttttgtatttttagtagagactgggtttcaccgtgttgaccaggctggtcttgaactcctgacctcaggtgatctgcccrcctcggcctcccaaagtgctgggtttacaggcgtgagccaccgcacctagcagatctttgatcgtaatctggagaattattgaggcagagagacagagac

SEQ ID NO: 266999 - DNA, 201 bp, Homo sapiens
gctgggattacaggcgtgagccactgcgcctggcccacttttcttcttaaagtaacactttggaaacactaggaatgaactggctctgttttaaggttatrtagaaaaaagtaatggagttgggcattgtattagcagtaccataatgaagcttcttaaaagccagcttgatggttatttttaacaattataggcactact

SEQ ID NO: 267000 - DNA, 201 bp, Homo sapiens
aatatatatattttaaatataaatatataaaaatatatatattttaaatataaatatataaaaatatatatattttaaatataaatatataaaaatatatttatatattttaaatataaatatattaatatttgaatatatttaaatgaggaattgacccctatctatgaaacatgaagtgtttgtctctaaatccccttt

SEQ ID NO: 267001 - DNA, 201 bp, Homo sapiens
tctgttttaaggttatatagaaaaaagtaatggagttgggcattgtattagcagtaccataatgaagcttcttaaaagccagcttgatggttatttttaayaattataggcactacttacaggtcactgagataaatcacataatgttgaactttgcagtcttataaggaaaaaaaattttctcctttgccagaaattatc

SEQ ID NO: 267002 - DNA, 201 bp, Homo sapiens
aaaagccattagcttctcttttttttcttttctttaaatatccagctatactaggtgactgtgctcaaatggtggtgattgccatggactaaaatcccatmagaagaaccttgagacctgtcgaggtgaaagctaacccactggaaagtggatgccatcagatttgtagtagttgataagtgtgtagaagtcaagaagcac

SEQ ID NO: 267003 - DNA, 201 bp, Homo sapiens
atggagatcagtatgggatgtcatcatgcaaacaataagagaagggtgggaggctgctttaggatgctgaactcagccccaaatggcaagattgagccagrtgtgcaaaggaccagggggcagagctctctcggctaatgagacagctagtgcaaggcatcgtaagcagagaaagagcttggcctatctgaagagctgaaa

SEQ ID NO: 267004 - DNA, 201 bp, Homo sapiens
gctaacccactggaaagtggatgccatcagatttgtagtagttgataagtgtgtagaagtcaagaagcactgaaaatggcagtgtactcaattttaacttyatttattcaatgcttaaatcagtcctaaggaggatttgctgtagttatcatagtagcataatgatatactgtttcaaatgaaacacatgtgaagtaacac

SEQ ID NO: 267005 - DNA, 201 bp, Homo sapiens
gccatacaatgtgcctggcgctcttctaagttctagagtacagttgtaaaaaggagggggccactggacttatggagcttatattctggggttcattgggsgcagtatgtcaagagaaataaatttcttagttaatactaggtaccaataagtgccatgatggagatcagtatgggatgtcatcatgcaaacaataagaga

SEQ ID NO: 267006 - DNA, 201 bp, Homo sapiens
agaagcactgaaaatggcagtgtactcaattttaacttcatttattcaatgcttaaatcagtcctaaggaggatttgctgtagttatcatagtagcataaygatatactgtttcaaatgaaacacatgtgaagtaacacaattgactcctcattttaaatgatcctgctttaaatgttgagatccagcttctcatagccta

SEQ ID NO: 267007 - DNA, 201 bp, Homo sapiens
tttactgttagcattattgagcactggctgtgtgcctctcaataagcccggttaggtccccacagccgcctgccactcctgggccccacccacctgcatcrtcctcctttctgcacttgtctcactcgcctgtgaccctttttgaccagcccagagcagtcattcaatcagcatttgttgatgaattcattaaataggcaa

SEQ ID NO: 267008 - DNA, 201 bp, Homo sapiens
cttggccaacatggtgaaaccccatctctactaaaaatacaaaaaatagctgggcgtggtggtgtgtgcctgtagttctagctcctcaggaggctgaggcrggagaatcacttgaacccaggaggcggaggttgcagtgagtcgagatcacgccattgcaatccagcctggagacagagcaagactctgtctcaaaaaaaa

SEQ ID NO: 267009 - DNA, 201 bp, Homo sapiens
gccaacatggtgaaaccccatctctactaaaaatacaaaaaatagctgggcgtggtggtgtgtgcctgtagttctagctcctcaggaggctgaggcaggakaatcacttgaacccaggaggcggaggttgcagtgagtcgagatcacgccattgcaatccagcctggagacagagcaagactctgtctcaaaaaaaaaaaa

SEQ ID NO: 267010 - DNA, 201 bp, Homo sapiens
atcagtgaccttgagctggcccctgacacctctgaaattccatttctgcaatggtaaaacggggatagcaatgacacctacattattatatttaaaatgarcacattttatttttttaatgcgccaatatttgtaaatattcataaagctcatatgaatatttgtaaagctctctgcacaaagtagaagctcagtgcttct

SEQ ID NO: 267011 - DNA, 201 bp, Homo sapiens
cttttttctggcaaatctttgaattccacccaatttaccttcattatatccagctgcacaaaagcccatgtgttatttcttcccatgctgtctcaccagayctgtctgttcacattaacctagttaccagtggaacaaaaatgcaattggccaaaggttacatttctttgtcatgagcacaagagagcaagatcatgccgg

SEQ ID NO: 267012 - DNA, 201 bp, Homo sapiens
tcccctctccttcctcccagaaacacacatgctacgttacccttggtgtttttccgcgccaaacttgtggtctttttttgttttatttttaaagatgaatrtattacagaaaggaatgatactgaatttccttcagcatgccccccaattttaggaccttgaagattttcatgtttcaaattgcattaaacttttcaaaga

SEQ ID NO: 267013 - DNA, 201 bp, Homo sapiens
cagagagatagagggagggaccaaaaaaggaggaagggatgagaatgaaggaggaaggaaaaaaggaggaaaagagagggggtagggagagaggaaagaaggaaggaaagaagctgaattaaatgaagcctatagaccaattatcaatttataggaaaaaaattatcaaggtgcattataaactgcaacattggatacaat

SEQ ID NO: 267014 - DNA, 201 bp, Homo sapiens
ctcccagaaacacacatgctacgttacccttggtgtttttccgcgccaaacttgtggtctttttttgttttatttttaaagatgaatatattacagaaagraatgatactgaatttccttcagcatgccccccaattttaggaccttgaagattttcatgtttcaaattgcattaaacttttcaaagagctttctttccct

SEQ ID NO: 267015 - DNA, 201 bp, Homo sapiens
gagagatagagggagggaccaaaaaaggaggaagggatgagaatgaaggaggaaggaaaaaaggaggaaaagagagggggtagggagagaggaaagaaggaaggaaagaagctgaattaaatgaagcctatagaccaattatcaatttataggaaaaaaattatcaaggtgcattataaactgcaacattggatacaatca

SEQ ID NO: 267016 - DNA, 201 bp, Homo sapiens
atttttaaagatgaatatattacagaaaggaatgatactgaatttccttcagcatgccccccaattttaggaccttgaagattttcatgtttcaaattgcrttaaacttttcaaagagctttctttccctacttcagctataatcctgaagagacaggtgaaagatgctttgtaaatcctcattttacaaatgagaaaatt

SEQ ID NO: 267017 - DNA, 201 bp, Homo sapiens
cagcgcacaccccagccttggagaggatgttgttctgaggaatcggagtccagttcctgaagcttgggcggctctggcttcatgaagacggagtctgggtrcaaagcagaaacttagggaaattccccaacagccggcaggcagatgccaccctccctcaccctgcaccgtagacgttagcctgggataatggcagaggaa

SEQ ID NO: 267018 - DNA, 201 bp, Homo sapiens
ttcctttccgtgaacttgttaaagttgttctgtgctgccacagtattgccttgtgcaaatcttctgatttgtgcaaagtcccagaagaaatgacgatagamtgctgctctcctcctaagtaaaatgaagaagtatctaagagaaacagatgattcaaaatgcttttaaaaatagatattaatgaagttgaaatgtttaggt

SEQ ID NO: 267019 - DNA, 201 bp, Homo sapiens
gaaattccccaacagccggcaggcagatgccaccctccctcaccctgcaccgtagacgttagcctgggataatggcagaggaaaaaagcacacagaaaactaagcagacacagaaataagtaatcattttccctatgatctatggcaatgttgaactcttccaagagcatactggcaaaatctcttgagtaaaatagcaag

SEQ ID NO: 267020 - DNA, 201 bp, Homo sapiens
ctgagaagcaccggttctttgatttcttcttctttcatgtaccttccattaaacagtcctattaatatgattagttgttgtctttgtgcatcttggcattyctttttcatgttatttacttacctccaaaatcagatgattcctgcttgtttattaatatgtgtggccaaacaatatgttaattagtattggaaggttaca

SEQ ID NO: 267021 - DNA, 201 bp, Homo sapiens
aaattaaagtttgtatgctgtttttatatacataatgctattatacgcttaatagactacagcattgtataaatgtaacatttctattcactaggaaaccmcaaaacttgtatgcctccctgtattgctatattcactttacacagtggtcagaaactgaacccttagtatctctgaggtatgcctgtacatgttcctcaa

SEQ ID NO: 267022 - DNA, 201 bp, Homo sapiens
ccaattgtgtagaagaatgtcttgtttttaggaaatacacagtaaagttttcagggatgatggagcatcatggcagcaacttactcccaaaagtagttatktaaataaagctggaggcatcacactacctgccttaaaatatataccacatagttagagtatctctagagatatagagagttatagtatctctagatctca

SEQ ID NO: 267023 - DNA, 201 bp, Homo sapiens
atagttagagtatctctagagatatagagagttatagtatctctagatctcagatataaatccacacatatacagtcaattggtttttttttttagagacrgagtctcgctctgttgcctaggctggagtgcagtggcacgatctcggctcactgcaagctccacctcccgggtttacgccattctcctgcctcagcctcc

SEQ ID NO: 267024 - DNA, 201 bp, Homo sapiens
acttacaatgaatttatggtgatataaacctattgtaagtcaaggagtatctgcataggtttttttttttcccagtgaagaactagctttttagtttattygatgtttctgctctttttgcccattttctgattcagcaatttctatttttttcttaatattctttttttctgacttttatggttatgttgtttatatata

SEQ ID NO: 267025 - DNA, 201 bp, Homo sapiens
ccactcccagttgcctgaatatttctgatggtcacaggtaacatttgggaaaagcggacattcctgtgtgccagcattgatttgtctcctgtagcacatarcagtgttttgcagttgacatgatcctcgtttaaactaaagcaactcttacaaaatgaaatagtattgaagactatactaaggcacttcaccagccacgtt

SEQ ID NO: 267026 - DNA, 201 bp, Homo sapiens
cactcccagttgcctgaatatttctgatggtcacaggtaacatttgggaaaagcggacattcctgtgtgccagcattgatttgtctcctgtagcacatagyagtgttttgcagttgacatgatcctcgtttaaactaaagcaactcttacaaaatgaaatagtattgaagactatactaaggcacttcaccagccacgtta

SEQ ID NO: 267027 - DNA, 201 bp, Homo sapiens
attaagattcatctctaaaggcagtgtagtcatataagaataagctccacaaaattacatttactatgagtacaatattacaaaaatatatgtacatggakaaaaactcacaagaaatccagaatccagaaaacttaaccaggttaatacggtgttattattggtcacttttgctgttttcattttaaattatctaacgct

SEQ ID NO: 267028 - DNA, 201 bp, Homo sapiens
cattctcctccctcagcctcccgagtagctgggactacaggcgcccgccaccatacccggctaattttttgtatttttagtagagacggggtttcaccatrttagccaggatggtctcgatctcctgacctcgtgatctgcccgcctcagcctcccaaaatgctgggattacaggcgtgagccaccgcgcccggccttgca

SEQ ID NO: 267029 - DNA, 201 bp, Homo sapiens
tagcagtgttttgcagttgacatgatcctcgtttaaactaaagcaactcttacaaaatgaaatagtattgaagactatactaaggcacttcaccagccacrttaacaagcaaaaaaagaaaagaaaaagatggttttatcagatctgacaagagttaagcactatttgaaataagaattcatatccaccactattaaccat

SEQ ID NO: 267030 - DNA, 201 bp, Homo sapiens
agaatccagaaaacttaaccaggttaatacggtgttattattggtcacttttgctgttttcattttaaattatctaacgctgttctgtgttttcagataasaggaagggggaaaacagttggatgctgatttctcgttggtaccatgcatataatagatgttcagtagatgcagttggaggaaggtgtaacaataaaagca

SEQ ID NO: 267031 - DNA, 201 bp, Homo sapiens
gtcacttttgctgttttcattttaaattatctaacgctgttctgtgttttcagataagaggaagggggaaaacagttggatgctgatttctcgttggtacyatgcatataatagatgttcagtagatgcagttggaggaaggtgtaacaataaaagcaggacatgtcagtagtgtgaatgtgccctttcatggcacaattt

SEQ ID NO: 267032 - DNA, 201 bp, Homo sapiens
ggcccatctttaactaacaattgggcctctcaactgccacctcaaagttcagtgctgcttgagaccaggggacacccttggcttcaggggagaggaacccrgaggactccgtagtaggcaccatgacggcagcactaaggagcttgccgctctggacttcctagtgcagttttcaaggggtgggttcctggcctccccgca

SEQ ID NO: 267033 - DNA, 201 bp, Homo sapiens
gttttctttcagcccctagtcactgggtcccctttccctggacctagtctctttacaatgaggtcccagataccagcctctaatcatcaggacaaacggcyatcccccaactccagtttcctccccacccatcacctccctcctaagccagcgtgagtcacagacgcagatccttaaccctctctcgctttttgtcacctt

SEQ ID NO: 267034 - DNA, 201 bp, Homo sapiens
atcaggacaaacggccatcccccaactccagtttcctccccacccatcacctccctcctaagccagcgtgagtcacagacgcagatccttaaccctctctygctttttgtcaccttgtccctcgcgttcagatctgttcaagctcatcctcaaaatagctggccttggttttattctgttttaaaaccttgccttcttcac

SEQ ID NO: 267035 - DNA, 201 bp, Homo sapiens
caagcgattctcctgccttggcttcctgggtagctgggattacaggtgcctgccactatgcctggctaatttttttttttttttttttttttatgtagaarcagggtttcaccatgatggccaggctggtttcgaactcctgacctcaagtgatccacctgccttggtctcccgaagtgttgggattacaggcatgagcca

SEQ ID NO: 267036 - DNA, 201 bp, Homo sapiens
agataacctgtcctttgttatagtttgagtccattaccctaagagattacttcattttctatagcaaacaaaagatcagtggcctctttaaaaatagcatyttccatattggaagaagaaaatcatgtctggactggcttcttttgatataacaaaaactatttcccttatccacgctcaatacggtcaacaccctctcct

SEQ ID NO: 267037 - DNA, 201 bp, Homo sapiens
ctactattatgtattgagcacctattataaacctggacctatgttttgcactgagcatacaaagatggaaaagtaagtcaacgagcttacttgggtggtcrgggagtgattcaggctggacgtgaaaacccgttatgaaaatatagtttactgaatgtttaaggaggttgcagtgagggtaggaaaatatgaaataccacc

SEQ ID NO: 267038 - DNA, 201 bp, Homo sapiens
ggtcttcaaactgttttcctaataatatattccccacatacaaaattttgaaaacaatgtacctcctcacaagtgtttaagtccatcataaaattttaccyaggcttaagtagtagcaaaaagtgaaactcctggagtgttataaaaactgacaattttttttttaatggagtttcgctcttgtcacccaggctggaatgc

SEQ ID NO: 267039 - DNA, 201 bp, Homo sapiens
gggagtttatatcgggcctcatactcctagtagtccatttcacttctcttattctctaacatgtgtttatatttgaaaatattttattggtcatccagtayatatttctgtaatgaaaatatgtacaaagcctttaatttttaatttctagaattaaaaacgaggttctgaggttaacattttttcctacttgagttatta

SEQ ID NO: 267040 - DNA, 201 bp, Homo sapiens
ctgcttacagctggaatcagacagccctcaatatgaatttcttccatttttcattttaattaatgtaagcactaaataactttgttcatataaataggtasattgcaatggaagaagtcttttagcagtatcattctattttttaaaagtcatttgcagttatatgccaaaatcacatgatagtctatcatcaaaacatat

SEQ ID NO: 267041 - DNA, 201 bp, Homo sapiens
gaaccactggagattttaggcagagaagtgaaatggttagcctagaggtgaaggaatgaacattacaactattcagcaggcaaaatttatttccttaaccrccattacggaaattctccaagttgcattgactcacatttgaatcctgtctccaccacttgctgtgtatgtatttgggaaaattacctcaactttctaagc

SEQ ID NO: 267042 - DNA, 201 bp, Homo sapiens
cttctttccttgtgaagtttgggcaagccacttttattctttgtgcatctgtttctttattttaaaaataggaatagtaaatggtctcccaattatctttyagtgctattgtgaagattaactgagataatgtctgtaaaagcactttgaaaattgagagctctatttaaacagaagatatcactatcagtatactaacga

SEQ ID NO: 267043 - DNA, 201 bp, Homo sapiens
gccaaggcgggcagatcacgaggtcaggagttcaagaccagcctgaccaacatggtgaaactctgtctctactaaaaacacaaataattagctgggcctgrtggcatgtgcctgtaatcccagctactcaggaggctgagggaggctgaggcaggagaatggcttgaacccgggaggcagaggttgcactgagccgagatc

SEQ ID NO: 267044 - DNA, 201 bp, Homo sapiens
gccactggcttaaatctctgctgcgaagttaaaaatacgctcgtaaatgtaattttgtatttaaagattaaggataaaattgtattgtgaattttgatctrtgggccaaagacttccttttactgaccatctaactgacaatttcattaaatattaattaataatttttgctaagttaatataagatataaggtggtaatt

SEQ ID NO: 267045 - DNA, 201 bp, Homo sapiens
tcctgaaatcatgagagcctttgaaaagaaatgcaaaatgagtaaatacagatatttaggcaggtatcagaaacattgcacaggattgtgagttattctgmagatgtaaaaatataaaattcattacattattacttaaattaataggtcagcgatcgtaactgctgaaatctcagcaatttttacataaaaataaaataa

SEQ ID NO: 267046 - DNA, 201 bp, Homo sapiens
tagtctggcttgagagcctctgtatttgccactggcttaaatctctgctgcgaagttaaaaatacgctcgtaaatgtaattttgtatttaaagattaaggrtaaaattgtattgtgaattttgatctatgggccaaagacttccttttactgaccatctaactgacaatttcattaaatattaattaataatttttgctaa

SEQ ID NO: 267047 - DNA, 201 bp, Homo sapiens
aaagataagagtttaagtctggctggaattagaagcgacagaattagctagaacgcaagcctgaaaaccttttggttcaaattgtgaaatgcctctgggtrgcagttccaatctgtcctgatggagcttcggctctgagagctaagcgtgaggcagacatcagtaacatcgaggacgtttctgcagtgtgcacaggaaatc

SEQ ID NO: 267048 - DNA, 201 bp, Homo sapiens
tttggttcaaattgtgaaatgcctctgggtagcagttccaatctgtcctgatggagcttcggctctgagagctaagcgtgaggcagacatcagtaacatcraggacgtttctgcagtgtgcacaggaaatccagccctggatgatgcagtttatacttttcatccatcttaagtctccatcataatatgtctccagaagac

SEQ ID NO: 267049 - DNA, 201 bp, Homo sapiens
gccctggatgatgcagtttatacttttcatccatcttaagtctccatcataatatgtctccagaagactaattttctacttcgtcagcatccgaatgtttrttttttaaaaagaacccataaacatgtttgaaaggccagtgattttagaatctatgaggtagctttgtatagaacttgctcgtttatatcactttgaaat

SEQ ID NO: 267050 - DNA, 201 bp, Homo sapiens
attctctgtttccaatcaaggtgaataccctgtctgccctgtatacttttagaaaaccagacgatcggtgcctgcagagagttcacctgtccttgtgatgktcatttacatgaaaaaatagttcagtaagaattgcaaaggatttctagtaggtcgtaggtccctgcataatgggatcgcaatcctagacatatccacact

SEQ ID NO: 267051 - DNA, 201 bp, Homo sapiens
aaaataaaataaagactggtattttgatttcagtttaagctttatttttatctttaaaatgtgcttattaagtccccaaaaacaacaacaaaataacagcytcagagagtaagaatgtaatgcctaagtcaaggaaatgatagacagtgtcaggaactgtgaagtatctgagactttatccctcttgcaggctgctcacag

SEQ ID NO: 267052 - DNA, 201 bp, Homo sapiens
gtatacttttagaaaaccagacgatcggtgcctgcagagagttcacctgtccttgtgatggtcatttacatgaaaaaatagttcagtaagaattgcaaagsatttctagtaggtcgtaggtccctgcataatgggatcgcaatcctagacatatccacactttctacattttaataattctgtgttgatggtgatgtttgt

SEQ ID NO: 267053 - DNA, 201 bp, Homo sapiens
tgggatcgcaatcctagacatatccacactttctacattttaataattctgtgttgatggtgatgtttgtaagtctgattttcatagtaaatctcagcttragtgtttaaaagcctctttaaaccaaatgggagaagtataagctctattagtaaactgtatttattccatcttcttccatttttcagctcatttctgtct

SEQ ID NO: 267054 - DNA, 201 bp, Homo sapiens
aatctgtaacaaaatgggatggtatttctactaatatgaatgatatttcaagaggtcccaagggagctagcaaggctatttaaagtgaagccacatggttrctaattaagaatcttgtattatactggcaagtgtaaatagctggaaagcaatgaggggtgcacttttgtggccacgaattaccaaatagaactcagactg

SEQ ID NO: 267055 - DNA, 201 bp, Homo sapiens
aaagtaagtcaacgagcttacttgggtggtcggggagtgattcaggctggacgtgaaaacccgttatgaaaatatagtttactgaatgtttaaggaggttkcagtgagggtaggaaaatatgaaataccaccgaaaatgggattaaattgacagaaaatatcaactgtgcatggtaccatcaggagcagagagaagagtca

SEQ ID NO: 267056 - DNA, 201 bp, Homo sapiens
aagactcggagctttcttgcatgctggtattgacattaccagagcagatgggctaatgtgtgactcgcctcactaagcctgtgaacttggtgcttactgcggccccaggtgaggcagctggagggacacagccgtcagccacaaccaggtgtcaacatcatccccatcattgtcttctcaccttccctaaggcatccactt

SEQ ID NO: 267057 - DNA, 201 bp, Homo sapiens
aagtaagtcaacgagcttacttgggtggtcggggagtgattcaggctggacgtgaaaacccgttatgaaaatatagtttactgaatgtttaaggaggttgyagtgagggtaggaaaatatgaaataccaccgaaaatgggattaaattgacagaaaatatcaactgtgcatggtaccatcaggagcagagagaagagtcaa

SEQ ID NO: 267058 - DNA, 201 bp, Homo sapiens
tggagtctatgtttaacaagtgagggaggtgaataattccaaaataagttccaagataagggacttttcctcttatgctgaaaataacctgttctgtgaawgacaggacattggaatcacacagaccttggtgagatcattgtcttcaccatttaaaagtgcttcaccttggggaaattctatagcagagtgatgctctta

SEQ ID NO: 267059 - DNA, 201 bp, Homo sapiens
gggagtgattcaggctggacgtgaaaacccgttatgaaaatatagtttactgaatgtttaaggaggttgcagtgagggtaggaaaatatgaaataccacckaaaatgggattaaattgacagaaaatatcaactgtgcatggtaccatcaggagcagagagaagagtcaagatatagaggaggcagagaatggagggtagg

SEQ ID NO: 267060 - DNA, 201 bp, Homo sapiens
tcagttcccccacagcgactgaagcagggctgtgtgcactccagaaactcatggagtctatgtttaacaagtgagggaggtgaataattccaaaataagtyccaagataagggacttttcctcttatgctgaaaataacctgttctgtgaatgacaggacattggaatcacacagaccttggtgagatcattgtcttcacc

SEQ ID NO: 267061 - DNA, 201 bp, Homo sapiens
tgatttaataatctgcccaagtcattgtgtcaaaactgagaactgatgccccaaattcacttgataggaaatggatcattccatttcatagagatgagcartgttacaaatgccacactgaaaagatactttgacaaaaagtcactcgtcttcttagccccacagaatcttaggctgaaaaggaacttaaagcctagtcac

SEQ ID NO: 267062 - DNA, 201 bp, Homo sapiens
aaaactgagaactgatgccccaaattcacttgataggaaatggatcattccatttcatagagatgagcagtgttacaaatgccacactgaaaagatacttwgacaaaaagtcactcgtcttcttagccccacagaatcttaggctgaaaaggaacttaaagcctagtcaccaaacctctttcccactactggaatgggttc

SEQ ID NO: 267063 - DNA, 201 bp, Homo sapiens
acacctgaggtttccgacccgccctgcctgaaaccctgctcggacgctcagggttgggaaaaggctatgcctggcagggagtggtccccatggcaatcccyaccggctcttcctcagggagtcagaccttgcccagctctgaggtgcagataacgctgtgttcatgcctttaagtcaccctcattagatttcttgtggttc

SEQ ID NO: 267064 - DNA, 201 bp, Homo sapiens
cacctgaggtttccgacccgccctgcctgaaaccctgctcggacgctcagggttgggaaaaggctatgcctggcagggagtggtccccatggcaatccccrccggctcttcctcagggagtcagaccttgcccagctctgaggtgcagataacgctgtgttcatgcctttaagtcaccctcattagatttcttgtggttcg

SEQ ID NO: 267065 - DNA, 201 bp, Homo sapiens
atttcttgtggttcggttcagcccatccttccagccttggagaccctttgggatctttcttcaagcctctaagttattgaatatcttatggctttttgacmtctaactgtaagaagtcacatcttctgtctctttacccatgtcatcggtatagctttttaaatatattaatacctttcctcatgtaacaaggacagacct

SEQ ID NO: 267066 - DNA, 201 bp, Homo sapiens
aaaattagccaggcatggtggtgggagcctgtggtcccagctgctcaggaggctgaggcacgtacgagaatcacttgagcccatcaggccgagattgcagygagctgagatcacgccactgcattccagcctggacaacagagtgagactctgtctcaaaaaaaaaacaaacaaaacacattatttgtgcataatataaga

SEQ ID NO: 267067 - DNA, 201 bp, Homo sapiens
tggttcggttcagcccatccttccagccttggagaccctttgggatctttcttcaagcctctaagttattgaatatcttatggctttttgacatctaactrtaagaagtcacatcttctgtctctttacccatgtcatcggtatagctttttaaatatattaatacctttcctcatgtaacaaggacagacctaacactat

SEQ ID NO: 267068 - DNA, 201 bp, Homo sapiens
tatacagagatttggttggttttattttagggagggacagcggaggagatacagttttactaagatataattcacatactataaaattcacccatttaaaktctaaaattcattgtttgttagtatattcacagagttttgtaaccatcaccacagtcaattttgattttcatcactcccaaaagaaacccacttcccttt

SEQ ID NO: 267069 - DNA, 201 bp, Homo sapiens
gccttggagaccctttgggatctttcttcaagcctctaagttattgaatatcttatggctttttgacatctaactgtaagaagtcacatcttctgtctctwtacccatgtcatcggtatagctttttaaatatattaatacctttcctcatgtaacaaggacagacctaacactatcataataaactagaagtcaaggctg

SEQ ID NO: 267070 - DNA, 201 bp, Homo sapiens
tgccctctttgaggtctatgtagtgtcatgtttttcatattttggtgctttttattggtgatttcattgttcgaaatggccccaagcatagtactgaagtrctggctagtgttcctgagtttaagtaggtggtgatgtccgttgtggagaaatacacattatagaaacctagttaaggcattagttatagtgatattggct

SEQ ID NO: 267071 - DNA, 201 bp, Homo sapiens
aaggcattagttatagtgatattggctatgagtgcaatgttaatgaatcaataaaatgtaataaacaagctgtctttaaacagaaacacacataaaacaakgttatgtattgactggtggatgaaaatgttgtaaccagaggctcaaaggaacctaaccctgtatttttcccctaggaacaatgctttagtattcagcagt

SEQ ID NO: 267072 - DNA, 201 bp, Homo sapiens
tgcatggtaacctgtctgtggatgaatcttacttattgctggaatgaaatggattcagcatcattttgttcttccttttcattgttatgggtgtaagcccrtgttctaactaataagtttattggaatagaagagattttattatagcaacttcattcttttaatgtcttcaaaattgtaacaaaaatttattagtaatat

SEQ ID NO: 267073 - DNA, 201 bp, Homo sapiens
ggggcaatatactatatcatatagcctaggtgtgtaataggctatataatctaggtttgcataaatacactccatgatgtttgcacaatgatgaaattgcstaaggatgcatttctcaaaacgcataactatactacagaggagtaggtggatggatgggtggatggctggctatgtggatgtgtggatgaatgggcagat

SEQ ID NO: 267074 - DNA, 201 bp, Homo sapiens
aaatggtacattaatagtaggtacttaccagagcctgacatgtcgtaatcctcaggaacagtaaggcttggctgagaggtgatgacctgtgagcctaagaratgctcacagcctcttgatgcagagcagtagaggtaggggtggttttacttctctgaaatcagttagccagagccagtctgccccattagaatcctgact

SEQ ID NO: 267075 - DNA, 201 bp, Homo sapiens
ttcctaacattaaattgaccatctttacgtgtacagtttagtagtatattcatagagttgtgtaatcatcaacaccatcaaattttagaacactgccatarttcccaaaaggaaagcctgtacacagtagcagtcacaccccatgcccctgctcacttccctcttccccgagtacctggctaccacaaattgactttgtct

SEQ ID NO: 267076 - DNA, 201 bp, Homo sapiens
atgcaattatcttaaggattagaaagatataacaagtagcttagaaaattgacaaaatatccagtaaattttaaaactagctatctgttattcatttactrttttccagtgattgagaaaaacaattttttctagctccccattaactcggtaactgctgagagataataaggataatgaggtcacgtgatgaccctagct

SEQ ID NO: 267077 - DNA, 201 bp, Homo sapiens
atcttaaggattagaaagatataacaagtagcttagaaaattgacaaaatatccagtaaattttaaaactagctatctgttattcatttactgttttccartgattgagaaaaacaattttttctagctccccattaactcggtaactgctgagagataataaggataatgaggtcacgtgatgaccctagctctcacccc

SEQ ID NO: 267078 - DNA, 201 bp, Homo sapiens
aaaatgctgtcaattcatatatgggttacagatatctgtctgcaggtatttttagttgagtgtcagaatttctttaacctgaaatgtaaatcatttctaargtaaaagagaatgaagggtactgtgttttgtcaaaatccttctggcatcaagttattaactgtgtaatgataagtggattgtgactatttttaattccta

SEQ ID NO: 267079 - DNA, 201 bp, Homo sapiens
cctaatcttttttaaagtattaatttattaattattaagtattaattattaagtattaataatcttgcttagtaaccctattcttttcatttaatggctcygagttgtgatgtccctatcttattcacaccaggagaacagaaagcctttacaagtttatggtttgtggcacacatatttattcccaatacattatttata

SEQ ID NO: 267080 - DNA, 201 bp, Homo sapiens
tgtatccatgcactaaagtcatgagaagttaaaaccgtgaaaaatgagagaacgttgaatttcttcagatgctgagaacccatgatctgttggctgatacsatacatttttttaatgaagccagtttgagctgttaacataaaagacccaaaggtttatggaatatcaaatttcaacttatcccatatgctataatcagtt

SEQ ID NO: 267081 - DNA, 201 bp, Homo sapiens
ttatttcccattttcgctggggtgctggtggatattattgagggcttcaagactgctcacctctccaaaagggttaaggcatcacctttccttcatggaaggggtggaggaacagctcctggagtgtatgagaggccacattgcgttcccacagctgtgcacccactacagctatggaagactctgtttctttaacatatc

SEQ ID NO: 267082 - DNA, 201 bp, Homo sapiens
agctctactgtgagttaacgggttgggttaaaagaggctccccgttcccagttgttcaaggcatgctcctttaacaccctgtggtggtgcaccagagccascgtgggggagattgagtgtattcctttgttttgtgaagtgggagaatgttgatttcgaagggaagctgggacaaaatgatccatcatgaaacagccataa

SEQ ID NO: 267083 - DNA, 201 bp, Homo sapiens
ttgtgaagtgggagaatgttgatttcgaagggaagctgggacaaaatgatccatcatgaaacagccataaatgtgtttccagacatatctgtttgaaggarcggtgtgtgaggaataggagaactttccattggcacgtcccatataccctcagggtaacatacagtccagtgtgaaagccactgacacagaggagggagt

SEQ ID NO: 267084 - DNA, 201 bp, Homo sapiens
ggagaactttccattggcacgtcccatataccctcagggtaacatacagtccagtgtgaaagccactgacacagaggagggagtttaggacccaagattcwttttcctgcttctttccttgtgaagtttgggcaagccacttttattctttgtgcatctgtttctttattttaaaaataggaatagtaaatggtctcccaa

SEQ ID NO: 267085 - DNA, 201 bp, Homo sapiens
ttgaaaattgagagctctatttaaacagaagatatcactatcagtatactaacgacactttagaccaattacaatttactataaagtgtagtggaatagarctccattgggaacacttttcttatttaaagaaaataaatggtacatttttaaaaccaaacattaatatggcacaactgacgtgataattacaataatttt

SEQ ID NO: 267086 - DNA, 201 bp, Homo sapiens
cagggtctcttactccctgaggagggtaggaagtcctcattctgtttccagccggggaacctggaagtggcaggagaccttgacattcccagtctggcccratgcagtaccgggcacctcttccacctcaaggagggaaggagtgggaaggcttgggctatgattcttgagccttgcgatccaccttttcaagtggtggca

SEQ ID NO: 267087 - DNA, 201 bp, Homo sapiens
tactccctgaggagggtaggaagtcctcattctgtttccagccggggaacctggaagtggcaggagaccttgacattcccagtctggcccgatgcagtacygggcacctcttccacctcaaggagggaaggagtgggaaggcttgggctatgattcttgagccttgcgatccaccttttcaagtggtggcagcatagtctt

SEQ ID NO: 267088 - DNA, 201 bp, Homo sapiens
tggtcctggcatggattcatgatgttgtgtgaaggcagctcgtctgcagttctctccccctttgcttcatagtcaggtccacgttgcagccactgcagccrtcagctccccattgcatgcaggaggagagggaggcaaaagcttccttaggaactcactgcagattctgccctgtggcattgccacggttgtatcacatga

SEQ ID NO: 267089 - DNA, 201 bp, Homo sapiens
ggcattatacttcacctccttgagcacatccttcctttagctgagcaactttgagtctgataacgcaccttcatcattcaggggttagccagagacgtggrtagatagaaatttgggtttctctttctgactcattttcttctgtgtctcctcggaggcaggtgtcccagtcttggtgttttgcttcttcagccagaaaaa

SEQ ID NO: 267090 - DNA, 201 bp, Homo sapiens
gaaggcagctcgtctgcagttctctccccctttgcttcatagtcaggtccacgttgcagccactgcagccatcagctccccattgcatgcaggaggagagkgaggcaaaagcttccttaggaactcactgcagattctgccctgtggcattgccacggttgtatcacatgaccccctttatggaaagagagcaaggcatgg

SEQ ID NO: 267091 - DNA, 201 bp, Homo sapiens
tctgactcattttcttctgtgtctcctcggaggcaggtgtcccagtcttggtgttttgcttcttcagccagaaaaactgtggctttgcaaccaaagtgccygctggcccacatgccatgtgcacggactgcacctggcttcaagcctaaagctgtgagaatgggcactccctttacgtaactgtacttctcctgatgtgga

SEQ ID NO: 267092 - DNA, 201 bp, Homo sapiens
cgttacaaccagcattcaaatttctctttatgtagctctaaagacgttctgccttctgtgactttaaagaggtagtaggtggggagaactgggtacttccytccactcctgttttggaaatcatggctggagttcaggggctggtacagatgggacatgacatgtttcccacatatgtcagaaaaaggttgagacccactc

SEQ ID NO: 267093 - DNA, 201 bp, Homo sapiens
ttaagatgttttttcttattcatgcgaatgttttagttggtcaaatattatgtatttggtttatctttccattttaaatttatattgtatgttagatttaytgttaaaaatattcatatccgtagtatttatgatttatctaaatactgtaactttaaatctgtaacttttctattatagaaaaaacttgtatatacttag

SEQ ID NO: 267094 - DNA, 201 bp, Homo sapiens
acttggctggtagtggccattagattcgaaacccagtcattctgataccaaagcacaaaaccactgtttatcatcttgacatcctcattgctttgaaatcrggaacttgtgtacattacagttacatgtatattacaattgaattgtgttatcaagactagtggtatggatggagatatttaggaaattgcacgaataaaa

SEQ ID NO: 267095 - DNA, 201 bp, Homo sapiens
gggtattgatccattcatgcaggtggagcccttgtgacttaaacgctttccattaggcccccctcctaacactgttgcattaggaactcagtttccaacayatgaattttaggggacatatctagaccatagcaaagagcataatatatgtgttctaatgaacatatatgttagccacagctaatatgtgtttccttaaaa

SEQ ID NO: 267096 - DNA, 201 bp, Homo sapiens
ttcaaggcatgtctgtgagggtgttgccagaggatattgaaattcgagtcagtggactgggtgaagaagacccatcctcaatgtgggtaggcaccatccartctgctgcccccatggctagaacaaagcaaaccaaagaaattgggataaactggcttgctgagtcttctggcttccatctttctttcatgctggatgttt

SEQ ID NO: 267097 - DNA, 201 bp, Homo sapiens
tacgggaggccaaggcaggcggatcttttgaggtcaggagttgcagaccagcctggccaacatggtgagactctgtctctactaaaaattcaaaaattagscgggtgtggtggcaaatgcctgtaatcctagctacttggaaggctgaagcaggagtatcacttgaacctgggaggcagagtttgcagtgagcggagatcg

SEQ ID NO: 267098 - DNA, 201 bp, Homo sapiens
agatcaacgtgtgtcagcaggcttggtgttttccaaggcccctgtccttggcttgcagatggtcaccttctccccatattttcacatggcctttcgtctgyttttaaggacatcagtcatattggattgggactcaccctaatgacctcattttaacttaattacctctgtcaagacctatctccaaatgcattcacattc

SEQ ID NO: 267099 - DNA, 201 bp, Homo sapiens
ttattttaagcatcaatgcatatactcacatatgatgagcagattatagcatttatttagataactcaagaaaaatagttattttgttttgtcagtctggrctgtgtctgaataatatttggatatgaaatagtcagttacatacttcaattttccacttttctgggcattgaaagacatagccaaaatggctttcagatt

SEQ ID NO: 267100 - DNA, 201 bp, Homo sapiens
aattttaaaacccacatgttacagattttatcaatgctttccctctgtggggtcatttttctgtatttctgatttacatgcatcatatagacgtgtttagrtaatatttgcttcacgcttttctatagacagtaacattagtcaggaccagtcctcaaatgccatctctagttgtcattttccacttactgatgcaaacaa

SEQ ID NO: 267101 - DNA, 201 bp, Homo sapiens
ttctgaaacttgagcccacttcttcttgatcagccttatgtaactagccagaaatcgcatcctgccctgaacagcgattgctttttgagtgccatctcgcyctggcttctgtgtttcctgccatgtttatggagtcatctggtatggtcatggctttgttctaggcagttttgctttacagtccaaggccctgccactcag

SEQ ID NO: 267102 - DNA, 201 bp, Homo sapiens
ttccaacaatcctggttgacaaggagattagaccaggtctcagcctccttttctttgccctggggatggcccccggtaaggggagggagtgaatggcaggytggttgcaactccctcttctcagacatgtgttgtcacagtgtttatccagggcttccacaaccgattagccactgaacaactgcagtcctaagtatgtgt

SEQ ID NO: 267103 - DNA, 201 bp, Homo sapiens
caaacacacacacacacatgcagacatacacacacttccttctttctttcagctgatacttactgagtacctactatgtgctatataccatcctaggttayagggatagaggagtgaaaaatctccatattctacttagagaaaaccatattatatacacataaacacatttagtgtatattatgttagatggctatcatt

SEQ ID NO: 267104 - DNA, 201 bp, Homo sapiens
ttattataattatgatgaggtgggtcatctcacattggtattgagaaataattagctatagtactacatttaaaggaaacacagcagtaaataaacaatarcacttgcccttgaggagtttgttatcttttaaagaaggcaaaatgtatatcaaaaacagctaaatgtccattatttttaaatgttacaagacgatagttt

SEQ ID NO: 267105 - DNA, 201 bp, Homo sapiens
cctagcatcctaagccaattaaaggagtctgtggggatttttcataggtcttcctaatgcttcaggatgttcttttaacccgtgtgctatcctgcttccaygaggaatgtggtgaatattaaaagacatatatagtaaatgccactggtgccctgaataaggaagatcaggcttttgcagtagctgatagccagaagcttc

SEQ ID NO: 267106 - DNA, 201 bp, Homo sapiens
gtggggatttttcataggtcttcctaatgcttcaggatgttcttttaacccgtgtgctatcctgcttccatgaggaatgtggtgaatattaaaagacatayatagtaaatgccactggtgccctgaataaggaagatcaggcttttgcagtagctgatagccagaagcttcttgggggaggtcacatttgaagtgggccat

SEQ ID NO: 267107 - DNA, 201 bp, Homo sapiens
aatgtggtgaatattaaaagacatatatagtaaatgccactggtgccctgaataaggaagatcaggcttttgcagtagctgatagccagaagcttcttggrggaggtcacatttgaagtgggccatggaggtaggcaggatttcaataggaagaggagaaggagggaggtcatgaataaaagcaagaagttgtgtgcagca

SEQ ID NO: 267108 - DNA, 201 bp, Homo sapiens
gtgatggcgtggatcaagactccagttgggggctattatgagactctagaaaagatgtgatgagagcgtgacttcaagcagtgagagaaagaatggaaagkaaagggcagtgagagacgctgaagaggtgggacagcaggtgcagtgagaagacggcatgcagacagacagactagaggatgcagcctgggtctcacgggg

SEQ ID NO: 267109 - DNA, 201 bp, Homo sapiens
gggggactggtgaggtgactgataataccaccatcacctagaactagagacccgtcctttgttggggaaactcgcaaatacaactcaacatttgttgacgytattctttgtgaatgcaagaaagacgaaacgctttctgggaatggtccctgtgactgtgaaggaccctgcagatgtatgttccccttttcttaaccagca

SEQ ID NO: 267110 - DNA, 201 bp, Homo sapiens
ttttttttttctatttcagtcaactaaaaagattttcactgtatctgccaacctctaaatccaaggatgtttccttcacaaataaataattttaaaacagytccttgaatcaaaacattttatattgccaaaaccttcaggttctaaactgccatttgtgctgattcataaaacaattagcgatttcatatgtagttagac

SEQ ID NO: 267111 - DNA, 201 bp, Homo sapiens
ttggtggggaactagagaaaaatggcatgccatagaaggaaatgggaagtctgaagacccggtttggttgggggaaggatgctgcattgttccaacatgaygggagttgatgccagctgagtacgtgtgtttggagatgcctagctggctgttgagaacttgtgtctgaggacactgaaaaagaaaggttcatacttatgg

SEQ ID NO: 267112 - DNA, 201 bp, Homo sapiens
aaaacaattacatgatctcagtagatgctgaaaaagtattttaaaaaatttctcatgcagtcatggttaaaaacgtatcaaactagaaatagaggactttytttttcttgtttttgggtgtgggggtatgggggcaaggtctcactctgtcacccaggctagagtacagtggcacaattgcagcacactgcagcctcggcc

SEQ ID NO: 267113 - DNA, 201 bp, Homo sapiens
cagtagatgctgaaaaagtattttaaaaaatttctcatgcagtcatggttaaaaacgtatcaaactagaaatagaggactttttttttcttgtttttgggkgtgggggtatgggggcaaggtctcactctgtcacccaggctagagtacagtggcacaattgcagcacactgcagcctcggcctcctgggctcctgtgatc

SEQ ID NO: 267114 - DNA, 201 bp, Homo sapiens
cattatgagggccccactctgatggccttatctaatcttaattacctcccaaaggccccacctccaaataccatcaacatacgaatttggggattaagttwccaacatatgaaatttgagggacacattcaaaacatagcaagtttcaaggttggaaagtaagaacctatcattattcatagctaatgtgactacaaagct

SEQ ID NO: 267115 - DNA, 201 bp, Homo sapiens
ggccctggggcctggggatgaactcaggggagtaagagagcacagaaagaggtttctgaacagcttccttggttgtttgtggagctgcggtcttgtcctargaaaattctttaccttttggtgcacactttgtttctgtatagtgattatacagtatacaggactgattaccatggaagcattttgttaaagcacagtgaa

SEQ ID NO: 267116 - DNA, 201 bp, Homo sapiens
tctgagtatctcggtgggcagaggggcatcataaagacgccatttttctctcaaccttcagaatggacaagggccaggccagacctccctgacccagctgygagggcagtgatgggggtgaccttggtttggctcagttgctctagtttccagcacgtaacaccccttggcatcatttcagctaataactaatatcatatg

SEQ ID NO: 267117 - DNA, 201 bp, Homo sapiens
agctgcgagggcagtgatgggggtgaccttggtttggctcagttgctctagtttccagcacgtaacaccccttggcatcatttcagctaataactaatatsatatgctgctatatgattcatagaatcacatctgttaaaagtaaatttacattaggaattaaaataatgcctccaaatcaccacagtgtgatagtttgct

SEQ ID NO: 267118 - DNA, 201 bp, Homo sapiens
gggcagtgatgggggtgaccttggtttggctcagttgctctagtttccagcacgtaacaccccttggcatcatttcagctaataactaatatcatatgctkctatatgattcatagaatcacatctgttaaaagtaaatttacattaggaattaaaataatgcctccaaatcaccacagtgtgatagtttgctaagtgaaa

SEQ ID NO: 267119 - DNA, 201 bp, Homo sapiens
atagcaattgctcaataaactatgactattactatattctaagagctatgctaagttctctatatgcatcttattaatcatgaaaataacttgactgtttyttctaagccttacttagataagcttttggtagttttccaataacatacagctatttagtgtcagtgcagggacttcaaccaaatctataggatttccaaa

SEQ ID NO: 267120 - DNA, 201 bp, Homo sapiens
cacgtgtaaaaaagggaggttcataaagcatttcacgtgtaaaataaaacttgtctgtcttggcaggcatgggtgtcaccagcctgcctgcctgcttttcygctcatgaaacccacagaatgttctgagtgttgacatgtctttcattccaggaagaagccttttgggatcatgtatttcacagtgcagatgaaacaatat

SEQ ID NO: 267121 - DNA, 201 bp, Homo sapiens
tgatatttaaataggttaattacattcaccaaaattccaacctgtgcccctgcctttcagggtcactttcctagtgacttaatcatttggggggaccgtgyggaaatgtgccaatttaaactcattgcaaagttatatccatagaaggaaaaggagaggtgagaaaaggagagccagtgcagagcctccaaaagaaaaatt

SEQ ID NO: 267122 - DNA, 201 bp, Homo sapiens
gaacccgggaagggctcttccaaagctaggcacaaattggggccattgctgctctcaatttaccataggcatcaatagacagatgtaaaagtctggcaagygggctggatcaaagctggatatgtggagatatcttgatgaaatttcaaaataaagaagatgccacaagcttccaatgagactaaaatagattgtctgcaa

SEQ ID NO: 267123 - DNA, 201 bp, Homo sapiens
ttatatataaattataataattgacacaaagtttactaaatgggctgaacagcagataagacataggtaaaaagagaaaatagaacttagatctgaaattygacctgaaaaaaattatcctaaatgcagccagaacataatagatttaaaaaataaaagagaacttaaaaaacatggaggatagagtttgataatacagtc

SEQ ID NO: 267124 - DNA, 201 bp, Homo sapiens
agtttaaaatggtatgatcttagtaacacggattcaaaatgtactaaggaaacattgtcagaattaacaaaatatgtggataaatttaacaccatggtggkagagagagtaacacagctctctgtggagttgagggctcctgcagtacaagcttaggaaggacgcgtccgattcataccaccagtgagcccacgacatcag

SEQ ID NO: 267125 - DNA, 201 bp, Homo sapiens
ggattcaaaatgtactaaggaaacattgtcagaattaacaaaatatgtggataaatttaacaccatggtgggagagagagtaacacagctctctgtggagytgagggctcctgcagtacaagcttaggaaggacgcgtccgattcataccaccagtgagcccacgacatcaggagagagtcactcggcaactggaggatat

SEQ ID NO: 267126 - DNA, 201 bp, Homo sapiens
gtcgatcttcattttataatttacctatgataccttaaaccaagcttgttcaacccacggcaccgtatgcagcccaggatagctttgaatgtggcccaacrcaaatttgtaaactctcttatgagatttttttttttttttttagttcatcagctatttttagtgctagtgtattatatgtgtggcccaagacaattattc

SEQ ID NO: 267127 - DNA, 201 bp, Homo sapiens
actgggggatgtgtgtttctcttacttgggcacacataggctaaggaaaaccctgaagtcctagtgcctgagcattatttctgagttccgaatcctaactsgtaacactgaggtccactgtcatccaacgctcccctccgagacctgtggtttcagtggtgcttttctggtaatgaggtgccccttagccaactgcaagaa

SEQ ID NO: 267128 - DNA, 201 bp, Homo sapiens
ttcttgttttttttttttaattgttaaggttaaaattagaagatagatttttattacagaattagcttaaattttgcaaatttgaatcaaaatttcgtttrtatatgaaaacgcattagtttcccatggaaaaaagtgtcaatgatggtatgaaccctaagcttaatttaattctcctttttctgtgagataaccatgaca

SEQ ID NO: 267129 - DNA, 201 bp, Homo sapiens
atgccacgccagtcagaatggcaattattaaaaagtcaggaaacaatagatgctggccaggccatggagaaataggaacacttttacactggtggtaggawtgtaaattagttcgaccgttgtggaagacagtatggtgattcctcaaggacctagaaccataaatactatttaacccagcaatcccattactgggtatat

SEQ ID NO: 267130 - DNA, 201 bp, Homo sapiens
agtaggctaaagaggaagaggaagagggggagttagtctcactgtctcaggggtggcagaggcagaagaaaatctgcatataaatggacccatgcagtttmaacccatgttattcaagggtccgctgtacaagcttaggaagattctgaaagtagtgagaagaatgtggacagagtagggattttagaacccaaggaagaa

SEQ ID NO: 267131 - DNA, 201 bp, Homo sapiens
catttagacaataaccagtctactccagccaaatgcaacagaaaaactgcggccctatccttgtccccaccaacactagtaaaggctgagtggagagcctyttgtttgaaatttctgaaataaaacactcactgatgggtttgacataagaatggaaggaacagagaaaagagtcagtgaactggaagttggaacatagaa

SEQ ID NO: 267132 - DNA, 201 bp, Homo sapiens
tccagccaaatgcaacagaaaaactgcggccctatccttgtccccaccaacactagtaaaggctgagtggagagcctcttgtttgaaatttctgaaataawacactcactgatgggtttgacataagaatggaaggaacagagaaaagagtcagtgaactggaagttggaacatagaaatgacacggtccaaatggcaaag

SEQ ID NO: 267133 - DNA, 201 bp, Homo sapiens
tttgacataagaatggaaggaacagagaaaagagtcagtgaactggaagttggaacatagaaatgacacggtccaaatggcaaagaaaaggtaggctggaraaagaaaaaaggaatagagcctcagagacctgtggttctccaacagagcatttaaagtttgtgtcaggggattcctggaaggagaagataatggtgggca

SEQ ID NO: 267134 - DNA, 201 bp, Homo sapiens
ccaaagatcgtacactgaataattttatttatataacattctcaaaacgacaaaatgatagaaatggagggcagattcatgcttcccagcagttctgaagsgggtggaagcaggtgagaggagggtacgactgtgaaagggtaacagaagggaccctttggtgacggccgtcctctgtgctgactgtaacaatgcttatag

SEQ ID NO: 267135 - DNA, 201 bp, Homo sapiens
ggagaccctgcagggcacaggcgccgccacaaagctttctccagacagaccgtagagaatggggagggtgagatgccctgctccaggatggcgcatgtcaytgtgtcacactgtgtggctgtaagacaccatggaggccttagggatcggcctgtattacagttccgcgggtatacactgatattgatctttttttttttt

SEQ ID NO: 267136 - DNA, 201 bp, Homo sapiens
gccacaaagctttctccagacagaccgtagagaatggggagggtgagatgccctgctccaggatggcgcatgtcattgtgtcacactgtgtggctgtaagrcaccatggaggccttagggatcggcctgtattacagttccgcgggtatacactgatattgatctttttttttttttttttttttgagatggaatctcact

SEQ ID NO: 267137 - DNA, 201 bp, Homo sapiens
ttatttaaacttctcatttattgcatcttttttcaagttgatgtcaggaataaagcatactaatcaggaagacaaaaatgtaataagcagatatttcttcwgatgagaaatatttatttagcattgcagacagtatataacaggttttcctattgtttttctaaaacaaactcgacttctacttgtcaacattaagctctt

SEQ ID NO: 267138 - DNA, 201 bp, Homo sapiens
aggaatttagtatccctgagattaggccaaccacctcaagccttttgtagatgtagtaaagtctaatgaactttatggaaagtattctgatgtggagattmatttgtctttgtgttgttgagaataagtgttgagctagttaggcaacctgcagcacctgcgtcccgctcacatgcaatctcaaatcatcaatcgaaatcg

SEQ ID NO: 267139 - DNA, 201 bp, Homo sapiens
cgtctcaggctatagggaggcacacctgaggagaaagacagagacagtgtctaacaggcagttggcgtatcagtcggaacacatgtaacatttataagttygctgttttatataggcatggttggtggtgccccaaaactagacgatatttatgtcagtgatcgtggatcatacatcacaataacagatataatgatagtg

SEQ ID NO: 267140 - DNA, 201 bp, Homo sapiens
ttttagaaggaaaaaatttcatagaaataatagttggaaggaaaaaacctccccttggcataatggccttcatgaagctgtgtgtggggcagtggaagtgktggtggtggtgctattggatggaactgtagtaggtgacaagcaggtgtgggttgggggctgtcgtggatgttggtgctgtctgggccctgcctgccagtg

SEQ ID NO: 267141 - DNA, 201 bp, Homo sapiens
tggcagattttatagaagtacccgaacacatacagatacgcacttatatatataaatgagggaatgccattttaccaaatattggcattttggttcaggamcttaatattcttggtcctaacacctggaggcaatgtgatttgttgtgtttagaacatggaatgaactagagaagaagagaaactccagccatgtagcagg

SEQ ID NO: 267142 - DNA, 201 bp, Homo sapiens
gggtgtggtggcaggcgcctgtaatcccagctactcgggaggctgagccaggagaatctcttgaacccgggaggcggaggttgcagtgagccaagatcgcrccattgcactccagcctgggcaatggagcaagactccatctcaaaaaaaaagaaaaagaaaaagaaaagaaaagaaagaaagaaagaaaagaaaatattc

SEQ ID NO: 267143 - DNA, 201 bp, Homo sapiens
gaatgattcaaaagccaaacgtgtcagtccgaggctgtgttgatggttgcattgcaggtttagacaaaggccctgaaaacaaagaaacaacaaagcacttwatcacaattactcagaaagaggtgtgcttctagaccactaggttttagattaggagagagtacatatcgatctactggaaaagatagtaatagatacaaa

SEQ ID NO: 267144 - DNA, 201 bp, Homo sapiens
aaagtcataattttcctttttaatgcgaatcattagttaagaggctgtctacatattttccatttaaaccagctctttggagaatgagatccccatgctaytgtacactagctaaagtagtaaacgcatagttttccagcactttgggaggccgaggcgggcggattgcgaggtcaagagatggagaccgtcctagccaac

SEQ ID NO: 267145 - DNA, 201 bp, Homo sapiens
gttcttaaagagacgaactcatgagctatctaatacacagtagactatgaaccatgatgttcatttattggtttatactctgggaacagctccaattccayggtattcatttttattttttatttttttgagacagagtctcactctgtcacctaggctggagggcagtggtgcgatctcagctggtcgcaacccctgcct

SEQ ID NO: 267146 - DNA, 201 bp, Homo sapiens
tctgggcagaggtcccatggggaaaggggaaacaagagagagagaaggaggtgccaggctcctttcaacaaccagttctcaggagaaccaacaatgagaartcattcactcccttgagaatggcactaagccattcatgagggagctgccctcaggatccaaacacgtcccaccagaccccacctccaacaatggggatct

SEQ ID NO: 267147 - DNA, 201 bp, Homo sapiens
aagagacgaagcttagtatgtagcctagtagacaatagctcagacagtagagaaacttgatttgaacttttgttatgatacttacaggctggtggccccaratgaaacctttgcaaccctaggagcttccatattttgatacagatgtataggtgactattatacacagctgttttaagcattatctgataaagggtataa

SEQ ID NO: 267148 - DNA, 201 bp, Homo sapiens
aagcaggtgctggtgacatgcttcttgtacagccttcagaaccgtgagcgaactaaacctcttttcttttaaattacccagcctcggatatgcctttatarcaatgcaaaaggactaagacattaacattttgttacctccatatgtaagctctcggctgttattcctcatggaccagcaatttgaagctatgaaatcata

SEQ ID NO: 267149 - DNA, 201 bp, Homo sapiens
ggtgccatcgaggaaactgggatgagcaaataggccatttcagcagcacaagtacgcatttcatttccccacacattacctcctgtgggaaatacaaggakgtgaaagccacatcccttaacttcaggaacttgccttactaatgattgagagacataaaatacaaccttgaagaaaggtccttcatggtaaatatttgat

SEQ ID NO: 267150 - DNA, 201 bp, Homo sapiens
tgaggcaggagaattacttgaactcaggaggcagaggttgcagtgagctgagatcacgccattgtactccagcctggacgacagagcaagactctttctcaaaaaaaaaaaaaaaaaaatgcatagagagatttgagcatagagagaagccaagaaagtgaagaaagctcaggagagtttcaacccatcatgtacccatca

SEQ ID NO: 267151 - DNA, 201 bp, Homo sapiens
caatatccacttccaggttagtagctcccaatattcccaagccaatgcctgtgggtgcccagacatgctgggctctgtgtggctttggacagcgtccttcmctccattcactgctccattttgtagccagctccctaaagcaataatgcttgtgcccgtagctcctcagagtctctcaaaggaagcagcttcttccatctc

SEQ ID NO: 267152 - DNA, 201 bp, Homo sapiens
agatgaggaagggaaatgggccctttatgcaggcctgccagaggtatttaaaggtgagcaggattcagaggggaaccttgaacagcaccatccacacaaacctcctctctcctccctacttccccagcttggaaaggcagaccccctccctacttggtattaaacattccacttttttcactaacagtgcaatctccctca

SEQ ID NO: 267153 - DNA, 201 bp, Homo sapiens
cttcccaattttatctagagtcaatgcaatcacaataaaaagtccagcatgttaacttgtgaatatcaacaaactgattcaaaagtttatatgaagaggcmaaagacccagactagccattgcagtattgaaatagaagtataaagtcagaggactgacactatccaattttaaggcttaactatacaaaactacagtaat

SEQ ID NO: 267154 - DNA, 201 bp, Homo sapiens
ccctgcctcgccccaaacctctccgtttcagagcacagactttgctttcactttgtgttaactaaaatgtccatttagatggttcactgaaaacattgacrtacttgttccaaaggggaatttaagcctccacattatagaagatagaaaactgatggcaatgtttaaatggcagctgttctagcttctacctatcaggtt

SEQ ID NO: 267155 - DNA, 201 bp, Homo sapiens
gatgaggaagggaaatgggccctttatgcaggcctgccagaggtatttaaaggtgagcaggattcagaggggaaccttgaacagcaccatccacacaaacctcctctctcctccctacttccccagcttggaaaggcagaccccctccctacttggtattaaacattccacttttttcactaacagtgcaatctccctcaa

SEQ ID NO: 267156 - DNA, 201 bp, Homo sapiens
atgaggaagggaaatgggccctttatgcaggcctgccagaggtatttaaaggtgagcaggattcagaggggaaccttgaacagcaccatccacacaaacctcctctctcctccctacttccccagcttggaaaggcagaccccctccctacttggtattaaacattccacttttttcactaacagtgcaatctccctcaat

SEQ ID NO: 267157 - DNA, 201 bp, Homo sapiens
gtgagatgccctgctccaggatggcgcatgtcattgtgtcacactgtgtggctgtaagacaccatggaggccttagggatcggcctgtattacagttccgygggtatacactgatattgatctttttttttttttttttttttgagatggaatctcactctgttgcccaggctggagtgcagcggcatgatctcacctcac

SEQ ID NO: 267158 - DNA, 201 bp, Homo sapiens
tggtctcgatctcctgacctcagaatctgcccacctcggactcccaaagtgctgagattacaggcgtgagagccaccccacccggccgatattgatgtttrccatctgaaaaacaacgctattattctcatgaccatacttctattcaagaaagtactaagatattttcaaaatacgtggttctatgggtccccataaagc

SEQ ID NO: 267159 - DNA, 201 bp, Homo sapiens
aacacacttatatgtcttgccagttgaatttggtagactttttctgcattgaaccatattcgtcctcccctatcaaccccgtggccctctccctccccctmcacacacacacacacacacacatgcattattttactgaaactggttaagcaagaaatcccatgcactgtagctcctaaccctttggctgaaatttgcagt

SEQ ID NO: 267160 - DNA, 201 bp, Homo sapiens
cctcagatgtggaactgaagaagctggcaaccaggaaatgtcaacatatatagacaaaaagaaaagagaagaaaaaagaagcagagaggaagggaggggcagagagagagagagagagagagagaagggaggggtaaaggaagggggaagggaagggaaaaggaagaaaggaaggaaggaagaaatccccaacaatggcct

SEQ ID NO: 267161 - DNA, 201 bp, Homo sapiens
aaaaagtaaaatcaagggccgggtgtgctggctcacgcttgtaatcccagaactttgggaggccaaggtgggtggatcacctaaggtcaggagttcaagascagactggccaacatagtgaaacctcatctctattaaaaatacaaaaattagcccggtgtggtggcacacacctgtagtcccagctactcaggaggctga

SEQ ID NO: 267162 - DNA, 201 bp, Homo sapiens
ctcagatgtggaactgaagaagctggcaaccaggaaatgtcaacatatatagacaaaaagaaaagagaagaaaaaagaagcagagaggaagggaggggcagagagagagagagagagagagagaagggaggggtaaaggaagggggaagggaagggaaaaggaagaaaggaaggaaggaagaaatccccaacaatggcctg

SEQ ID NO: 267163 - DNA, 201 bp, Homo sapiens
tgggaggccaaggtgggtggatcacctaaggtcaggagttcaagagcagactggccaacatagtgaaacctcatctctattaaaaatacaaaaattagccmggtgtggtggcacacacctgtagtcccagctactcaggaggctgaggcacaagaattgcttgaaccagaggcagaggtttcagggagccgagatcacgcc

SEQ ID NO: 267164 - DNA, 201 bp, Homo sapiens
tcagatgtggaactgaagaagctggcaaccaggaaatgtcaacatatatagacaaaaagaaaagagaagaaaaaagaagcagagaggaagggaggggcagagagagagagagagagagagagaagggaggggtaaaggaagggggaagggaagggaaaaggaagaaaggaaggaaggaagaaatccccaacaatggcctgt

SEQ ID NO: 267165 - DNA, 201 bp, Homo sapiens
cagatgtggaactgaagaagctggcaaccaggaaatgtcaacatatatagacaaaaagaaaagagaagaaaaaagaagcagagaggaagggaggggcagagagagagagagagagagagagaagggaggggtaaaggaagggggaagggaagggaaaaggaagaaaggaaggaaggaagaaatccccaacaatggcctgtt

SEQ ID NO: 267166 - DNA, 201 bp, Homo sapiens
ggcggtatttcctgttagatgagcattgtttaaatcctggagtttgttaggtcataaaataatagaatgctttaaacatggaaatattattcatagcagayaaatagtattgaaaagaatgcaaggaaaagaatctgtgataatagggtagagttagagaaaaattttgatgtaaattattctttaaaaaaatgtaggaat

SEQ ID NO: 267167 - DNA, 201 bp, Homo sapiens
gaaaaataatttaattgattagcagacacatttaaagacttgttcatactaagagtacagggtgagtaaaacttatagagacattaatgcctctttcttgaagcctttttttatttatttatttatttttttttgagacagagtctcgctctgtcgcccaggctggagtgcaatggcacaatccctgctcactgcaagctc

SEQ ID NO: 267168 - DNA, 201 bp, Homo sapiens
tttgatgtaaattattctttaaaaaaatgtaggaattgtgtagtcacatgattttaaaccataactcctctctttacttaggatgatattcattgtcagtkgttgttttcataaaccccaagcaagtcagtacattgattcattgcatattgcatagaaaactatttaaatctatgctagtgttattttcttcctaagttc

SEQ ID NO: 267169 - DNA, 201 bp, Homo sapiens
acacatttaaagacttgttcatactaagagtacagggtgagtaaaacttatagagacattaatgcctctttcttgaagcctttttttatttatttatttatttttttttgagacagagtctcgctctgtcgcccaggctggagtgcaatggcacaatccctgctcactgcaagctccgcctcccgggttcaagcgattctc

SEQ ID NO: 267170 - DNA, 201 bp, Homo sapiens
aggatgatattcattgtcagttgttgttttcataaaccccaagcaagtcagtacattgattcattgcatattgcatagaaaactatttaaatctatgctartgttattttcttcctaagttcagtaaattagtgttgtgacagatatgtggcactgtagctttttcaattctgagattggtttttaatctatgatgcaaac

SEQ ID NO: 267171 - DNA, 201 bp, Homo sapiens
gaatttctgacagaagaacattatggcctttcatttgttatgctgtagctaaagctctgtcagcatttttattataaacctaggggattatcagtctgcartaaaactctttttggactgaggcttatttagattcagagcgtactcacgaagaaaacctttactttcctgaacacgggatagatttgtttctgcttgcct

SEQ ID NO: 267172 - DNA, 201 bp, Homo sapiens
agtgttatttaaaccttggacactaagaacttcagaacctgctaaagtagttaattaacatctgcttcctcagtttacctgttttgtaccttggagtcaattcttctcattttgaggaacattgagatacatgctgttcttgtaggagcctaaaactttttatatgtttttttcattccaagggagttttatgatgccatc

SEQ ID NO: 267173 - DNA, 201 bp, Homo sapiens
tatagtaaattgaggctgtttccgtcgagatgagttgaaaaatggtacaaagagttttaaattttacccaagactaagaaaagaagtgcagaggaaacgargatagtcaatagcacagagctcttaagaaagcatttggcaaccctaaatcccagaatcgataacttgtgttaaccagccaaatggagtgttacagaagaa

SEQ ID NO: 267174 - DNA, 201 bp, Homo sapiens
attgaaaccccttaggaaagtgcctgaatatagtaagtgctcaataaactttaagtagtattagtactcctggtagtactattacttgttagttattactrtggttttatatttcatcataggaccataacaaaaaaaaattatttttcagataaaaattatactaagtgaaataagtcaggcacagaaagacagataact

SEQ ID NO: 267175 - DNA, 201 bp, Homo sapiens
gtgttatttaaaccttggacactaagaacttcagaacctgctaaagtagttaattaacatctgcttcctcagtttacctgttttgtaccttggagtcaattcttctcattttgaggaacattgagatacatgctgttcttgtaggagcctaaaactttttatatgtttttttcattccaagggagttttatgatgccatcc

SEQ ID NO: 267176 - DNA, 201 bp, Homo sapiens
gaaacgaggatagtcaatagcacagagctcttaagaaagcatttggcaaccctaaatcccagaatcgataacttgtgttaaccagccaaatggagtgttasagaagaaaagctgtttgtctggctctctttacattcaaagagcttaaattgagagcctgaagtcttccaggagctgtggcatgagggctctagcactaat

SEQ ID NO: 267177 - DNA, 201 bp, Homo sapiens
tgttatttaaaccttggacactaagaacttcagaacctgctaaagtagttaattaacatctgcttcctcagtttacctgttttgtaccttggagtcaattcttctcattttgaggaacattgagatacatgctgttcttgtaggagcctaaaactttttatatgtttttttcattccaagggagttttatgatgccatcct

SEQ ID NO: 267178 - DNA, 201 bp, Homo sapiens
cagtgcttagcaaagcattactgatactgttcaagatttccagtatctccttgtctacctgtattctaatgcatttactttacccctacaaataattttgkgttaatttgggtttcttttcatgtggatttattgaggcataatcaacatacaataaactgcatgtatctggcatataaatgtttgtgaattttagtgtct

SEQ ID NO: 267179 - DNA, 201 bp, Homo sapiens
aatgagtcaccaaacagaaatacttacaagagtgccttgtacgttgtaacaccccatgatgtcagttgctggcattgtgattttaacatcatcatcatcatcgtcgtcgtcgtcgtcgtcatcgtcatcatcatcaaagtgctgcatccaggaggcactgtctgctcccctaggctgagtcagtaaggcctctaagctgag

SEQ ID NO: 267180 - DNA, 201 bp, Homo sapiens
caaagcattactgatactgttcaagatttccagtatctccttgtctacctgtattctaatgcatttactttacccctacaaataattttgggttaatttgsgtttcttttcatgtggatttattgaggcataatcaacatacaataaactgcatgtatctggcatataaatgtttgtgaattttagtgtctttgtatacct

SEQ ID NO: 267181 - DNA, 201 bp, Homo sapiens
aagttctctgtgctgctttgcggcaccttccccactctttcccagcctcaagaagctgctaatctgcttcctgccactctagattagtttgcattgtctakaatgtacttacatggaataatatagaatgcactccttactctggcctgttttattaaacataattattttaaaattttttcatgttgctggtatatttaa

SEQ ID NO: 267182 - DNA, 201 bp, Homo sapiens
tcaatactttgcatccttcagtccaatcaagttgacactcagtattaaccatcacaatagcatagaatcatatccctgaggtacttcagcacgcccctttrggtattcaggggcagtgggacatctcattttctctcttgctttttacaaatctccgtttttctctcttcctctttttgttttcctttaaatttgtcaccc

SEQ ID NO: 267183 - DNA, 201 bp, Homo sapiens
gtggggggaaaaaaaagcaaagcagataagtacatattaagatgcctttagggagctccactttccctactaaaagcatttttctaagtaatatagcttcrgaacatcttgactgaaatagctttagaatatttacagcaaaagcatctcttttaggaaagttgaggtggctgaaagtgaatgtgtcttaatgcatgaaga

SEQ ID NO: 267184 - DNA, 201 bp, Homo sapiens
tttagaatatttacagcaaaagcatctcttttaggaaagttgaggtggctgaaagtgaatgtgtcttaatgcatgaagagcttacaggtccacaagattgyaggacatacgtgttcatgaagccaatgaaaactcagtaggttacaggacctacattctggttctttccaggagagttgacgtagagctggagtggcttca

SEQ ID NO: 267185 - DNA, 201 bp, Homo sapiens
cagagaactaaaaatagaactcccattcaaccctgcaatcccagtgctaggtaactacccaaaggaaaagaaatcattctatcaaaaactcatatgtttaytgcaacattattcacaatagcaaagtaatgaaatcaacttaaatgcccatcaatggtagattggataaagaaaatgtggtacatatacaccatagaatac

SEQ ID NO: 267186 - DNA, 201 bp, Homo sapiens
ccatagtgcaatcactcctcacctcttgccaccttcttggctcgggcattgtgctttatttcgtgtgactcttggacctcgcacattgcttagcacatagraaatgcaaaatgaatgccattgcataaatggatgtgccatgaaatatttgctcatgcatagatggggattcactgcttgtgctttcaccttttcactaca

SEQ ID NO: 267187 - DNA, 201 bp, Homo sapiens
ctcggcctcccaaagtgttgagattgcaggcgtgagccaccatacctagcccacttttcttctttttcttcttcttcttcttctttcttctttcttcttcyttttttttttttttttttttttttagaaggagcctcactctgccacccaggctggagtgcacagtggtgcaatcttggctcactgcaacctctgtctcct

SEQ ID NO: 267188 - DNA, 201 bp, Homo sapiens
ctgtagtcccagctactcaggaggctgaggcacaagaattgcttgaaccagaggcagaggtttcagggagccgagatcacgccactgcactccagcctggrtgacagattgagactctgtctcaaaaaaaaaaaaaaaaaagtaaaatcaattgaggtgaatacaaggtagagccctaatttctagtctaaaatgattata

SEQ ID NO: 267189 - DNA, 201 bp, Homo sapiens
ccttgagacctgtcgaggtgaaagctaacccactggaaagtggatgccatcagatttgtagtagttgataagtgtgtagaagtcaagaagcactgaaaatsgcagtgtactcaattttaacttcatttattcaatgcttaaatcagtcctaaggaggatttgctgtagttatcatagtagcataatgatatactgtttcaa

SEQ ID NO: 267190 - DNA, 201 bp, Homo sapiens
ccagctactcaggaggctgaggcacaagaattgcttgaaccagaggcagaggtttcagggagccgagatcacgccactgcactccagcctgggtgacagaktgagactctgtctcaaaaaaaaaaaaaaaaaagtaaaatcaattgaggtgaatacaaggtagagccctaatttctagtctaaaatgattatattttttaa

SEQ ID NO: 267191 - DNA, 201 bp, Homo sapiens
gaagttatgggttaaagcctctgccagattcaatctttgttttggcatgattcaaaaatgtgtattgtggccatctgtctagaactgactgggtggaacarggaagcttgtcctgcgtctgagatgggttggtcacctccttccataggagaaaaatggcaatggataaaacacgggtgcagacgtccacaaatagaactt

SEQ ID NO: 267192 - DNA, 201 bp, Homo sapiens
atgagtcaccaaacagaaatacttacaagagtgccttgtacgttgtaacaccccatgatgtcagttgctggcattgtgattttaacatcatcatcatcatcgtcgtcgtcgtcgtcgtcatcgtcatcatcatcaaagtgctgcatccaggaggcactgtctgctcccctaggctgagtcagtaaggcctctaagctgagg

SEQ ID NO: 267193 - DNA, 201 bp, Homo sapiens
gggtaagacagacaaggtcccttttcttgtggagcctgcattccatgtgcaagaaggttattaatgcttttagtcagagtgccatgaagataaaagccacrtgctaaaaggacagggcagaaggatagaagaaacttgggttgctgagggcatcagggagcccccagccagttctagatggcttttgtttagacttcttgt

SEQ ID NO: 267194 - DNA, 201 bp, Homo sapiens
catttctatcaatgatgcatcactggcttgacagcaatgttactgttgtatactaggggcaggtaaatttttctagcagaaatggtatttggaccagaagtttttatatgaagaatttgattaaagaaatattattaagtagcccttctttctaaatatactttcatgctaaaacaaaataactcagaaaatatgaaaaca

SEQ ID NO: 267195 - DNA, 201 bp, Homo sapiens
tctatcaccatcttctaagattttgattgacaatctgtagattactttggggaataatgacattttaataatgttacgtcttccaattccagagcaaataytgctccatttatttaggtctttcttctttaatatcactcagcaatgttttatacttttcagtgtacaattcacacaaactgtttgtaaatttatttttgc

SEQ ID NO: 267196 - DNA, 201 bp, Homo sapiens
cagctcccactgactctacattatggtgagctgtataattattccattatatattacaatgtacaaataatagaaataaggtgcacaataaatgtaatgcrcttgaatcatcctgaaaccatctccctgctccagtctgtggagaaactgtctcccacgaaaccagtccctgatgccaaaaaggttgggggctgctgcttt

SEQ ID NO: 267197 - DNA, 201 bp, Homo sapiens
aggagatacttgggcatgggaggttgaggcagcagtgagctgtgatcgcaccactgcactccagcctgggtgacagagtgagaccccatctctaaaaattaaaaaaaaaaaaaattaaaacaagtgaatcagatgtccagtctttccactttgttttgaacttcttgacctcaggatagtaggactgagtctcacaaggac

SEQ ID NO: 267198 - DNA, 201 bp, Homo sapiens
gtgcaggaaccgtgcacaccatcagccactgggtccatctgccctcctaatgggtgttttccacaggttccagccatcccccccctcaacacacacgcatmcacacacacacacacacacacacacacacacacactgtctgtccctctctcttcatcactttttcgtggagcctacatctgaagctccaggaacactcca

SEQ ID NO: 267199 - DNA, 201 bp, Homo sapiens
tgcaggaaccgtgcacaccatcagccactgggtccatctgccctcctaatgggtgttttccacaggttccagccatcccccccctcaacacacacgcatacacacacacacacacacacacacacacacacacactgtctgtccctctctcttcatcactttttcgtggagcctacatctgaagctccaggaacactccaa

SEQ ID NO: 267200 - DNA, 201 bp, Homo sapiens
gtggaagttgtaagacttaacattaaggcctcaatctcagagggaaagtagacaatctttcatcattaaatgtaatgttaactgtagattttcatagatgrtctttatcaggttgagaaagttctctatttttcctaatttgctgtgggactgtataagacagacttcagatttttgtcagatgcttttattttaaacctt

SEQ ID NO: 267201 - DNA, 201 bp, Homo sapiens
cattgctaagtctatttattcagcaaggattgattgacttaatattgtgtgccaaggtgtgttagatgctagagatagaaataagaataaagtaggcaagytcccttgtccccagcgggcttactatcaagcaaataaatactctaccatgaactactatgggataatgcacaaagtcttcagaaggcagtggggtcaggg

SEQ ID NO: 267202 - DNA, 201 bp, Homo sapiens
ataagttaacatatataaattattttacaagggcaatgaaaatattttttagagagacactaaaatggcatgtaaagcagacaatgtggccctttgcctgrttttgcacttacaggtttatggcacaaaacttccccctcatgacttacccttctcatttatgccattgccaccgccatctcctgagtccctagaggcact

SEQ ID NO: 267203 - DNA, 201 bp, Homo sapiens
ttcataatagcaaagatatggaatcaacctaagtgtccatcaatgaatgattggataaagaaactggcagatatacacaataaaattatatttaaccataraaaacatggaatcatgtactttgcagcaacatgaatggaacgggaggccattatcttaagtgaaacaagtcagatagagaaagacaaatagctcattttt

SEQ ID NO: 267204 - DNA, 201 bp, Homo sapiens
accaaaaagataatattacttctaaataatgtttgagattatgaaatgttttcaaatatattgaattacagttttgaccaatgattttataacagtgattrtgttttatagaatgttagcttaaacataatttcaaggcccagagtaacttcaaaatttggattaaaattaaattgagctaattaatcagtattattttag

SEQ ID NO: 267205 - DNA, 201 bp, Homo sapiens
tccttttaaaacaaatatgtttgtttcttatttcgtaattacacactattataaaaaaatcaatttgtgacttaatcaggaaatatttcttgagtgccaakgatgaagactgtgtaaagaataaaacaaagcttacttatgaaacacacttaaaaataaccaccttaaacattttggtgtattacctaccagtcttcctac

SEQ ID NO: 267206 - DNA, 201 bp, Homo sapiens
gtttgtgttttttcaattcgtttttgctttcacaaatgttatatctttggcctgcctggattgatgctatgtttataaaatgtaactttcaaatcttcatratcacgccaataagctcagtaaaagacactcaacatcactaattattagggaaatgctggtcaaaaccacagtgaagtaccacatccattaggataacta

SEQ ID NO: 267207 - DNA, 201 bp, Homo sapiens
gtccatcaatgaataagtggataaataaaatgtggtatgtatgtatataacatggaggccctttgttggcttcacatctatttggcttactttttgctgcygtaggcatttttcatcttctgatattattattcaccgttaaaaaggaataaaattttgatacatgctatgacatggaagaactcggaaaatattcgaagt

SEQ ID NO: 267208 - DNA, 201 bp, Homo sapiens
agatgtttggcagctcctaggtgaagggagctggaccctaggggcggggcgggaagagggcaggaccttggctagagctgcaacaagcttccaaaggtaarcctcccggttgctaagcgactggtcaacacggcgggcgcatagccccgccccccggtgacgtaagattgctgggcctgaagccggaaagggcggcggtgg

SEQ ID NO: 267209 - DNA, 201 bp, Homo sapiens
gccctttatgcaggcctgccagaggtatttaaaggtgagcaggattcagaggggaaccttgaacagcaccatccacacaaacctcctctctcctccctacktccccagcttggaaaggcagaccccctccctacttggtattaaacattccacttttttcactaacagtgcaatctccctcaattagcctatactcccaaa

SEQ ID NO: 267210 - DNA, 201 bp, Homo sapiens
taaaagccttcctctttgccccttctgtggagccatgaaccacttgtgatccagagctggcccacccatgattgctgtttgctcaaatcaaaatcaattcttttttttttttttttttgagacagaatctccctctgtctcccagaccagagtgcagtggtatgatctcggctcactgcaaccactgtctcctgggttcaa

SEQ ID NO: 267211 - DNA, 201 bp, Homo sapiens
ttcttggctcgggcattgtgctttatttcgtgtgactcttggacctcgcacattgcttagcacataggaaatgcaaaatgaatgccattgcataaatggaygtgccatgaaatatttgctcatgcatagatggggattcactgcttgtgctttcaccttttcactacaagacacgtttttatttttcaggaattgtggagc

SEQ ID NO: 267212 - DNA, 201 bp, Homo sapiens
tggggattagcaaagatttatctcaaagtccatttgtactttctccaggtgttcctgggggagaatgacttaaagataatttgactggattttggtatgcwttcattcattcattgaacaaagagagatagggaatggagatcttagttacaattccctttgaatgcatttgttatgtcttaagcttcttttgtcaattca

SEQ ID NO: 267213 - DNA, 201 bp, Homo sapiens
gtggataaataaaatgtggtatgtatgtatataacatggaggccctttgttggcttcacatctatttggcttactttttgctgctgtaggcatttttcatmttctgatattattattcaccgttaaaaaggaataaaattttgatacatgctatgacatggaagaactcggaaaatattcgaagtgaaataagcagtcaca

SEQ ID NO: 267214 - DNA, 201 bp, Homo sapiens
ttttgatacatgctatgacatggaagaactcggaaaatattcgaagtgaaataagcagtcacacagaaatatcgtatgattccacttttatgagatactcragtagtcaaattcctagagacagaaaatagaatagcagttaccagggcctggagaggggtaggaatcaggaagtgagtgtttaatgggtatggagtttta

SEQ ID NO: 267215 - DNA, 201 bp, Homo sapiens
aggtgaatgggatgtatctcgaccatcctttgccttcttttcaatgctctaccctcaggagccatcacatgtcaaagttgaaataggacactatccttcargcagactactttcagtgattgtgctctttgtagagagaatccccacgtttctccccaatcgagtgagtgtgtgagtttctgatacatctgttcccaagac

SEQ ID NO: 267216 - DNA, 201 bp, Homo sapiens
tcgaccatcctttgccttcttttcaatgctctaccctcaggagccatcacatgtcaaagttgaaataggacactatccttcaggcagactactttcagtgrttgtgctctttgtagagagaatccccacgtttctccccaatcgagtgagtgtgtgagtttctgatacatctgttcccaagacatagggaaaacaaacaca

SEQ ID NO: 267217 - DNA, 201 bp, Homo sapiens
ctgaggacaaactcatttaagacccgggattaataagaaatccctcttcacatacgggagaagaggccagtaaacatgagtttattcgtaataatgaccartgatcttgttatatgtttaattaagctctgtagctttgtgtctaactgaaccctgatttcaagaagcatttatgggtattgaccctatgtcagatactag

SEQ ID NO: 267218 - DNA, 201 bp, Homo sapiens
agaatccccacgtttctccccaatcgagtgagtgtgtgagtttctgatacatctgttcccaagacatagggaaaacaaacacagtacaaacttaatttctwctagcatacctcattacctgtattagtgtgttttcatgctgctaataaagacttacccaagactgggtaatttataaagcaaagaggtttaattgactca

SEQ ID NO: 267219 - DNA, 201 bp, Homo sapiens
gcactccagactgggtgacagaacgagactctgtctcaaaaaaatccaaatatatatatatatataaggtgtgtgtgtgtgtgtgtgtgtgtgtgtgtgtrtatatatatatatatatatataccttagcagtataatcaccatgtggcattcccctccaaaaagtcagaatcattggaaagatttctttaaaaaactaaa

SEQ ID NO: 267220 - DNA, 201 bp, Homo sapiens
aaaacttccccctcatgacttacccttctcatttatgccattgccaccgccatctcctgagtccctagaggcactcaggtaactcacctagtaactaactrggtgatttaattaattaaaaagttcagatatctcttacatgtttaggaggtgttagtttatgattaaaatattactataggagaagacaaaagtaatatt

SEQ ID NO: 267221 - DNA, 201 bp, Homo sapiens
ggaggtaatttgtcaagcgggcctattgctgcacttccaaaaagcaattttcttcctcctttctgtagaagaaggccaagaatgcctgtttctttatccartcaaagttgcctgttactctccttcagacagaaataatattgttcctgacacacatcacatttttcttcacaaagctgtgttggttattgaccagagttc

SEQ ID NO: 267222 - DNA, 201 bp, Homo sapiens
taaaacagtcgtatctcttgagacttattcactaccatgggaacagtatcggggaaagtgcccccatgattcaattatgtccagctggccctgcccttgaygtgagaggattattacaattcaaggtgagatttggatggggacacagccaaaccatatcattacctatatatgaaatatggaagaagtaaatggttgagg

SEQ ID NO: 267223 - DNA, 201 bp, Homo sapiens
tgtgtaattaataaaggaaagaggtttaattgactcacagttctgcatggctggagaggcctcagtgaacttacaatcatggtggaaggggaagcaaacaygtccttcatcacatgatggcagcaaggagaactgccgagcaaaaggggaaaaagtccctgataaaaccatcagctcccctgagaactcattcacatcatg

SEQ ID NO: 267224 - DNA, 201 bp, Homo sapiens
caatggcgcgatctcggctcactgcatctggtccctaggaccaaacagagcctcagcaagtcagcatcttaacttgtcgagagaaatctggttcaataccrcgatgtctctgcccctggtttccactgcgctagaaagctattttccccagtgttaacatgtctaaaccttcgtccggcctgatcccttccaagatgagga

SEQ ID NO: 267225 - DNA, 201 bp, Homo sapiens
atagagttgctagataaaacacaagacaaccagttaaatttgaattgcagatgaacaacaaatttgaaatgcaaatttcactgagtgctttgtatcctaasttgcctaccctggcaaccctgcttttgaggcagttggtcatagcttggttattagtactttcctacaggcggccttacaataactccttaaactttctga

SEQ ID NO: 267226 - DNA, 201 bp, Homo sapiens
ccactcccaagctgggtcttcttccagtgtttttgtttcaataaataaccgggctgggcaccatggctcacacctataatctcagcactttggtaggccarggtaggtgaatcacttgaggccaggagtttgagaccagcctggcctatatggtgaaaacctggctctactaaaaatacaaaaaatagccagccgtgatga

SEQ ID NO: 267227 - DNA, 201 bp, Homo sapiens
gacaaccagttaaatttgaattgcagatgaacaacaaatttgaaatgcaaatttcactgagtgctttgtatcctaagttgcctaccctggcaaccctgctyttgaggcagttggtcatagcttggttattagtactttcctacaggcggccttacaataactccttaaactttctgaatcattagcacttttcactgaatt

SEQ ID NO: 267228 - DNA, 201 bp, Homo sapiens
cgccaccacacccagctaatttttttatttttagtagataggaggtttcaccatgttggccaggcttatctccaactcctgacttcaagtgatccacccgmcttggcctcccaaagtgctgggattacaggcgtgagctgctctgcctggcctaaacaaggtgatttctgatagtgagcactactttggagaaaaaaatct

SEQ ID NO: 267229 - DNA, 201 bp, Homo sapiens
ggctgtttgctttcgtttcgtttgtgtgttcactggagtagcacttttcattgccttcatgaagttttcttagcattcacaacttgactaacttgttggtrcagccaacctggtgcaaagcctgtcttggctttcaacgtgccttcctcactgagctttatcatttctagctttgatttaaagtgagagacatgcaactct

SEQ ID NO: 267230 - DNA, 201 bp, Homo sapiens
cctgggttcaagtgattctcctgccatggcctcccaagtagctgggattacaggcacccaccatcatgcctagctaatttttgtatttttagtagagacasggttttgccatgttggccaggctggccttgaactcctggactcaaatgatccacccaccttggcctccgaaagtgctgggattacagacatgagccacca

SEQ ID NO: 267231 - DNA, 201 bp, Homo sapiens
taaagtgagagacatgcaactctgcctttcgcttgaacatttagatgccgtcgtagcattattaattggtctaatacagtatagttgcgtctcaggctatmgggaggcacacctgaggagaaagacagagacagtgtctaacaggcagttggcgtatcagtcggaacacatgtaacatttataagttcgctgttttatata

SEQ ID NO: 267232 - DNA, 201 bp, Homo sapiens
cagcttgtctcatattttggtccacatgctgtgagtgatgtggcagtcgatgtcagccctagaaaagggctgctgttggcgtctcgatcattggcatcatycccgtttatttattgaagtctggaatgcaaggtcagggcactgggaaattaccagcctagaagaagtagctttgaaaatatgtcatttgcctctggggca

SEQ ID NO: 267233 - DNA, 201 bp, Homo sapiens
gcagaggctgcttcaaacacgttatctgtctaactcattacatattaatacttccaaagtaaatctctccattctgtaactttatttaaatatttttattratatacagtaatacttttccagatggccttatcagaagttttagtgagaataagcagctgaaaacacaacagctgctctgctggcagcctgagagccctg

SEQ ID NO: 267234 - DNA, 201 bp, Homo sapiens
ttcgtggagcctacatctgaagctccaggaacactccaattcttgttctgcaatctctttgagtgctggcctcaactttgttgatatgcagtccacatgcyatgcacttcacccatttaagcataccattctatggtttttagtatcttgggagcgttttcactccaccaccacaatcaatttcagaacactttcatcaac

SEQ ID NO: 267235 - DNA, 201 bp, Homo sapiens
attaatttactttctgtggatttgtctattgtggacatttcatataaatggaattacacaatatatatctttttgtgattgccttctttcacttagtacartgttttcaagtttcatctatgtcatagcatgaatctgcacttcatttttattgccaaataatattccattgtatgtatgtaccatattttatttatccac

SEQ ID NO: 267236 - DNA, 201 bp, Homo sapiens
aagagttcatggagtattgaaaagtctactatgaaggtgaagaggtggaagaaatgtgatgatcacgttcacacttaggtcttggaaaacctgccacgtgracactaactcttgatttctcagcagaagacccgtaaacacgttcatgaactgagctagaaaccgaaagccataaacgttaacggacattatctgggagaa

SEQ ID NO: 267237 - DNA, 201 bp, Homo sapiens
agtctactatgaaggtgaagaggtggaagaaatgtgatgatcacgttcacacttaggtcttggaaaacctgccacgtgaacactaactcttgatttctcarcagaagacccgtaaacacgttcatgaactgagctagaaaccgaaagccataaacgttaacggacattatctgggagaagtgttgttacacagtcgggcac

SEQ ID NO: 267238 - DNA, 201 bp, Homo sapiens
catgaactgagctagaaaccgaaagccataaacgttaacggacattatctgggagaagtgttgttacacagtcgggcacagggaggttccctgctatgttscatttgagagcgctttaatttcaaagggtaccatctggccctcagtgcttgaactacttgtggctttaaatgcaggtttttgctcattaaagcaggtcac

SEQ ID NO: 267239 - DNA, 201 bp, Homo sapiens
tacaggcggccttacaataactccttaaactttctgaatcattagcacttttcactgaattaaccgaataaagccattgactcattaggtgtttccttgcyaaattaagccacttcaataactagttgcttatattgaaaaattgtaatgcagttagatcaattaccacttttagcacataggaagtcggtcgttagagtt

SEQ ID NO: 267240 - DNA, 201 bp, Homo sapiens
ttacctcttaatcacatatcactaagtgttgaacagctactcttaaagtaggaagctttcaccataaagatatttagatacatgagtgatactcttcacaygatctgtttctaccttttgaagatttggcaatttcagctgcctttattgaattcattatctgccctgtgatacttgattgcctccacacaattgctgcat

SEQ ID NO: 267241 - DNA, 201 bp, Homo sapiens
aatgcagttagatcaattaccacttttagcacataggaagtcggtcgttagagttcatggctataagatgcaaaccataacaacagagaacaattatacayacttcatttgtttgtttttaaggaaggagaggcatataaggaaggaaaggattctttctaaacagatataaaaatttaacttttaaagtctgaaaaaaca

SEQ ID NO: 267242 - DNA, 201 bp, Homo sapiens
gtagtgttgtcacttctcttgtttctgacattggtaatttgtatcctttctctttatttcctgatcagcctgacaagacagtataatttttattgatcaayaaaaagaacaaagttgtggtttcatggtctttttcctattgttctgttttctcaaccagtgatttttcaccttgatcgttattgttttcttttttcttct

SEQ ID NO: 267243 - DNA, 201 bp, Homo sapiens
tctgccctgtgatacttgattgcctccacacaattgctgcatttcggtgccacattgtgtcttctgtttgaacacatttaaacaaagtggtgtgacactcrtgttaaaatttaaatagtttctagtgttaccagtccaaataactttccccagttggctatttttgcgtaggcacaaccaattgtagctacgctaagtcta

SEQ ID NO: 267244 - DNA, 201 bp, Homo sapiens
ctggtgatctactgtgaagacagcacaaagatcatttcgaaaaaccaattatataaatataggatgctggggaccttccttggcagtagttcctgtgaaamgcatacagattttacttgatcccatgttcagtataagacaacagtgtggcaagagtagaaaaatgtgcctgtgactttccctgcattaatcaaagcattg

SEQ ID NO: 267245 - DNA, 201 bp, Homo sapiens
gtttattgggagaaaatagactaatatcaaaacagaaagaacagaagcagaaataatgaatttgcctgcatcaatctcttctttcatgacctcatcatgcyggagataccgatcaatttcactacaagcaataaatattaaaatgaaattcttgagtgtcttatctaaagcttcctgacatcaattgttttcccagttttt

SEQ ID NO: 267246 - DNA, 201 bp, Homo sapiens
tagttatgtcttaataaaaaaacattgaacgccaggcacagtagctcaggcctgtaatcccaacactttggaaggctgaggcaggcagatcacttgagccyagaagtttgagaccagcctggtcaacatggcaaaaccctgtctgtatggcatatacaaaaaattagctggatgtagtggcacattccagttgtcccagct

SEQ ID NO: 267247 - DNA, 201 bp, Homo sapiens
agtcattgtgagctaatgattatgagttgccaggtacaaaccatctcccaggaagcatctttcacagctatttttctttgctacaacaaatattttaacamatctattcttatagcaagtgttttaaatctcaaagttataaatcagcaatctttcaaaccactataacaaaacttcaactgttacaggaaagttagttgc

SEQ ID NO: 267248 - DNA, 201 bp, Homo sapiens
tttcacagctatttttctttgctacaacaaatattttaacaaatctattcttatagcaagtgttttaaatctcaaagttataaatcagcaatctttcaaamcactataacaaaacttcaactgttacaggaaagttagttgcccttgttagcagagactatgaccttgttatttctttccagtcagggctttgttggaaaa

SEQ ID NO: 267249 - DNA, 201 bp, Homo sapiens
ctccagggcttggggcctctctcagcaggaacacaggctgcacacaggagttctccacccctgctgagccaccaccatcattcctgctgcccagtgtcctyccccagaggggcttccgcagggagcggcctggtcagcaccgccttctggaaagcacctccatcacgctgctccccagcaagtgctcccagagactctaaa

SEQ ID NO: 267250 - DNA, 201 bp, Homo sapiens
tacctttgagcttaaaagttaaaaaaaatctaatctaacaattacaatgtgataatattaaaaataatttcaacagtacaactttttccatacagcttacrcacagtgtaagtagaaagatttttgctgatctgcagtgcacaatcgaaatcagctccatgtgcttattcggcaagacagctgagataaagatcccttcac

SEQ ID NO: 267251 - DNA, 201 bp, Homo sapiens
atgtttgaagagactgtaaacacatatgtttatagtatattcgagacctctgatgactttcttttttcatttgtaatttttgtgggtacataggaggtgtwcatatttctgtggtacatgatgtgttttgattcaggcatgcaatgtgaaataagcacaggatgcagaatgaggtatccatcccctcaagcattttttctt

SEQ ID NO: 267252 - DNA, 201 bp, Homo sapiens
tcaggccatctctgaccattgtacatcttttgttatgtagactagggttcatttagggttacttcttgtagaattctttttctgacccatctttaattgtrtaagaatatttacaatatactatttgggagaaagggaacttatgaagattattttccatatatttaaaaaataatagaaataacccaattgtgtaataag

SEQ ID NO: 267253 - DNA, 201 bp, Homo sapiens
tcttcttgtattttgttcactttcaaattaggttcattaggaaatgtatatattgttctggaagctttgatctatttattacatatcagtactttatcagrtgtatgttttggaactattttcttatagtctggagtttggtaattcattttcttcatattttttatgaacagatgttttaatttctaagtttattacttt

SEQ ID NO: 267254 - DNA, 201 bp, Homo sapiens
gaaaattccacagtaacatatagattagggcattcccatttgtaacagtcacactctacacacaaaaagtccacagattaggccaggcatggtggctcacrcctgtaatcttagcactttgggaggccaaggtgggaggtttgcctgaggtcggcagttcgagaccaacctgggcaacatggtgaaacacaccgtcgctac

SEQ ID NO: 267255 - DNA, 201 bp, Homo sapiens
atagccagccgtgatgacatatgcaatcccagctacttgggaggctgaggcaggagaatcacttgaacccaggaggcagaggttgcagtgaagcaaggttrcaccactgcaccccagccttggtgacagagtgagactgtctcaaaaaataataaataactatactgctcaactgttcacctgggaatctgccttgcaact

SEQ ID NO: 267256 - DNA, 201 bp, Homo sapiens
cccatttgtaacagtcacactctacacacaaaaagtccacagattaggccaggcatggtggctcacgcctgtaatcttagcactttgggaggccaaggtgrgaggtttgcctgaggtcggcagttcgagaccaacctgggcaacatggtgaaacacaccgtcgctactaaaatacaaaaaaattagccgggcatggtagcg

SEQ ID NO: 267257 - DNA, 201 bp, Homo sapiens
gaagcaggtgcatcttaaatggccatagcaggaggaagagtgagaagggggaggggctacacacttttaaacaatgagatctcacgataactcactcactrtcatgagaacaacactgagaggatggtgctaaaccattagaaactgcccccatgatctatgcacctcccatctggccccacttccaaaattggggattac

SEQ ID NO: 267258 - DNA, 201 bp, Homo sapiens
tcaggcagttagatctgaggtacaaacatggtttagaaggaattcttacaatggtgctaaagctctagaagcaaatactatgtgggaggccatagaaagartgaattgttgttcacacttcagctttgatttggagacacctgtgaaagaaaataatctttttcccagtacttactggttattttatttccagaaaacatg

SEQ ID NO: 267259 - DNA, 201 bp, Homo sapiens
tcacgcctgtaatcttagcactttgggaggccaaggtgggaggtttgcctgaggtcggcagttcgagaccaacctgggcaacatggtgaaacacaccgtcrctactaaaatacaaaaaaattagccgggcatggtagcgcagacctgtagtcccagctactcaggaggctgaggcaggagatggagatgggggttgcagag

SEQ ID NO: 267260 - DNA, 201 bp, Homo sapiens
caaaccacatcaccatctgtgattaaaataaatcagaacagcgttttggggtatgggatctgacttagtactcttacgtatacacttaagagatgtaagtrtgtatgtccacaaaaagacttgtacaaaaatgttcacatcttctttattcataatagccccaaattggaaacatctcatatgtccattaacaaaagaaag

SEQ ID NO: 267261 - DNA, 201 bp, Homo sapiens
ctcatagtgagtgggtcagtgcagactgcacaactgaaagatgggatggttacgtgcacgcgcatgatgatagatgttggtgtaagaaaaggggattttcrgggatcttttcagagcttgcaagaatggaaattaaaccaaagaaagtaaggacctgttcaaagagcaaacctaaaacaaaaataagcctagggctgcagg

SEQ ID NO: 267262 - DNA, 201 bp, Homo sapiens
acggttcagcccatagccacccatttctttttccataataggcttttaatacgaaagtaagtccactgacatgggcatataaatcttctgtgaatgcaaayaaatattgaatgtaaacaaatattaaagggaatgtcttgaatgaagttttttccttacattctaataccaattaaactttgctgtgggtatttatttgca

SEQ ID NO: 267263 - DNA, 201 bp, Homo sapiens
ccaatggcccagtttacaactgagcaagctttttggggcagccatatcacacttatctgtaaagaattaaatgtgtaataaatcaatattactcttttacygttagcattattgagcactggctgtgtgcctctcaataagcccggttaggtccccacagccgcctgccactcctgggccccacccacctgcatcgtcctc

SEQ ID NO: 267264 - DNA, 201 bp, Homo sapiens
tttcctaaagccaacagctctgtatctgaaatcttttttgttgttattgttgagacagagtctcaccctgtggcccaggctggagtgcagtggcatgattycagctcactgcagtctccacctcccaggttcgggcaattctcctgcttcagcctcccgagtagctggcattataggtgcctgccactacacctggctgat

SEQ ID NO: 267265 - DNA, 201 bp, Homo sapiens
gttagctgtttttcagtggcacattttttggatatgcttttaggtctgtttctggattcagctttgaaaactatccaatgggggcaaactctggtcagggyggggaactgaggatctcttccccccatgggggcaaagaatacttcctgggggccagagcagtcctcaaaccaattgatctccagctggaaaaaaaaaaag

SEQ ID NO: 267266 - DNA, 201 bp, Homo sapiens
ggatctttaccaaaaaagaaactttccacccctaagcatgtttgccaaagtgcctaggactttatagtcaactctgtatgtgtaaattgcttccacaagamcttatttctcactatctctttagtgtaagttagtggtacgtttgcaaattatggatagaatatagtggtttaaaggccttgaatgacctagcaatttgaa

SEQ ID NO: 267267 - DNA, 201 bp, Homo sapiens
attggcaaacttttttttcccttttattttctatactctaagatgtagtgttttccttctaaattcagttcaagtcttccttctgcagcactttccacttstgctcccagttttatttctcccttgtgtgcaaatcttgtttgtaatacataacttggtgcttaggtatctctagttggctttgttgttccatatctgagg

SEQ ID NO: 267268 - DNA, 201 bp, Homo sapiens
aactttgacagacattcttctggaagtcttattttcacctaagcagtcacttaagcttttgttttgttttttttttctgaatatagttgggaaattttagrggagacttgcatattacctttttctgataattgctgcaactttatgtaagtaccccgactagtagcagatatgtttctaatgggatattatatttatttt

SEQ ID NO: 267269 - DNA, 201 bp, Homo sapiens
ctggcattatttagctgaagcttcagttacctcttaacagctctacttcaatcaggtcaacatctagcacctttgtattagataaaagtattttaagtgartgagggcaagagcagtgagggaatagagtagtcccaaagtctaggttgctttggaagtgggcaagggaaagtctgcctgggaatataaatgggggtattt

SEQ ID NO: 267270 - DNA, 201 bp, Homo sapiens
cgggaggaggaaagaaaggaataggaagaaggcagaagaggaacaagcagctggacgcggtggcttacacctgtaatcccagccctttggaaggccaaggygggcggatcatttcaggccaggagttcaagaccagactggccaacatgatgaaaccccgtctctactaaaaataaaaaattagccaggcgtgctggtgca

SEQ ID NO: 267271 - DNA, 201 bp, Homo sapiens
cctagtgcttggtttcatttctattttgtgtatatagagatctatgaaggaaggcaagcgttggattctatgctgctaaaagtatttccttacttggtgtrtggctctatgttcactttttaaaaaatcagaagtggccggtcgcagtagctcacgcctgtaatcccagcactttgggaggccgaggcgggcagatcacct

SEQ ID NO: 267272 - DNA, 201 bp, Homo sapiens
ttacaaaccccaaatgggtgatgtccatctctgttccacctgtgtgcaaagggggagaacattgtctgctaatcaagggtgatggttaatattgagtgtcracttaactggattgaaggatgcaaagtattgttcctgggtgtgtctgtgagggggttgccaaaagagattaacttttgagtcagtggactaggagaggta

SEQ ID NO: 267273 - DNA, 201 bp, Homo sapiens
gtgatggttaatattgagtgtcaacttaactggattgaaggatgcaaagtattgttcctgggtgtgtctgtgagggggttgccaaaagagattaacttttragtcagtggactaggagaggtagactcaccctcaatctgggtgggcacaatctaatcagctgccaatgtggccataataaagcagcagcagaaaatgaaa

SEQ ID NO: 267274 - DNA, 201 bp, Homo sapiens
tatttgctgaagtttaacctccccagtgaggctgtatttagagatagggtctttaccaaggcaattcatgttaaactaggctgtaagtattgggccctaakgtaataggtctggcatgcttttaagaaaaggcagaaataccatgagagcacaaacacagagaaaaggctatgtgaggacacagcaagacaatggatatct

SEQ ID NO: 267275 - DNA, 201 bp, Homo sapiens
tggactaggagaggtagactcaccctcaatctgggtgggcacaatctaatcagctgccaatgtggccataataaagcagcagcagaaaatgaaagagcagrcttgctgagtcttccggcctccgtctttctcccgtgctggatgcttcctgcccttgaacatcagactccaagttcttcaacttttggactcttacatctg

SEQ ID NO: 267276 - DNA, 201 bp, Homo sapiens
aagtcgggagctcacagtgagccgtgtcatgggcagcgtcccaccatccagcacagtgtctctgtctgcccgaaggggctgagatgcctgatgcgtcttcrctgttaaggttggcatctgagatgtgttccagcagctctgcctccagttcacacctccttgcagctttccccaagagcaaccctttgccctgaccctgtg

SEQ ID NO: 267277 - DNA, 201 bp, Homo sapiens
cctcaatctgggtgggcacaatctaatcagctgccaatgtggccataataaagcagcagcagaaaatgaaagagcagacttgctgagtcttccggcctccrtctttctcccgtgctggatgcttcctgcccttgaacatcagactccaagttcttcaacttttggactcttacatctgtgatttgccaggggctcttgggc

SEQ ID NO: 267278 - DNA, 201 bp, Homo sapiens
agttcagattccagaagaaaacagtaccctcagataggaggctgaagaaaacagttttaaaaaaaacaaagaaggatgtcaagacacctgaactattcatrgtgcgaagctgttactattgttaggtctttagggacaagaggaataaatgctgttcccagagctaatgagaattggagccctagcagaagggacatctgg

SEQ ID NO: 267279 - DNA, 201 bp, Homo sapiens
acttttgaggttttaggagtcagactgacttccttgctcctcagcttgcagatggcctattgtgggatttcaccttgtgatcgtgtgagtcagttctcctrataagctccccttcatatatacatcaatcctattagttctgtcccttcagggaaccctgactaacacatcaagtaatgttacttttggacgattagatac

SEQ ID NO: 267280 - DNA, 201 bp, Homo sapiens
aactatggtgccctgatgtagctgactgagacaggtcattatagggtcctccatgctggttgtcgacttggggctgaggacatctctgggtaattttttcrcatagaaatattgcgtaatttttgtctccttggaattctcttttatgctgttcatgactgtctacattacttctttattgataagttatttctgtggaca

SEQ ID NO: 267281 - DNA, 201 bp, Homo sapiens
ctgagacagagtcttcctctgtcacccagggttgaatacagtggcacaatcttggctcactgcagcctccacctcccaggttcaaatgattctcccacctyagcctccctagtagttgggactacaggcatatgccaccacgccagtgggtaatttttgtgtttttagtagagatgaggtttcaccatattggccagcctt

SEQ ID NO: 267282 - DNA, 201 bp, Homo sapiens
catagtattccatggtgtatatgtgccacatttccttaatccagtctatcattgttggacatttgggttggttccaagtttttgctattgtgaataatgcsgcaataaacatacgtgtgcatgtgtctttatagcagcatgatttatagtcctttgggtatatacccagtaatgggatgcctgggtcaaatggtatttcta

SEQ ID NO: 267283 - DNA, 201 bp, Homo sapiens
ggctaccacaaattgactttgtctctatgaatttgcctaattgggagatttatttaaatggaaacatgtaatacgtggtcttctgtgactgcctgctttcrcttatgacgtttaaaagttcatccatatttgcgacttgtggtacctcattcctttttattgccaaataatattccattgtatgaatatactgcattttgt

SEQ ID NO: 267284 - DNA, 201 bp, Homo sapiens
ggccctggtttgttattatggagtttaacattgccacatattactgaatagtgatcaagattgtgcagagtaaaattgtatatgataaaagttcaatctakgtctgttgggagtaagaatcaagattggagggtgcatttcaaaacagataaatagcgtgtcagaaacattaggcatgaaacaattagacaaaactgtatt

SEQ ID NO: 267285 - DNA, 201 bp, Homo sapiens
caaaggtggggtgctttgcagggggaggagagctggtgggagtggaagagagtgagaggatggtgacctcagctttcatccggtccacactcatagtgacrgtaatgacagctgcaacttactgcgcacccaccgtgtgccaggtgccacccagaagctttctttatggcactgtacgttaatggtgatgaaaaatgagct

SEQ ID NO: 267286 - DNA, 201 bp, Homo sapiens
tgtatatatatatatagctttaaactattatccaggtacacatttcctttcctaaatgaataatgaatacttgctgttctctatgatgataccaacacccrtgtattcagaactctgtgttcctttgagaaatctcttctgtaaactgatgacatgtcacattataatgctatcactatacttgatttcaaatttacttgc

SEQ ID NO: 267287 - DNA, 201 bp, Homo sapiens
ttaacttttccttttttgggggtcagcctaaagtcttataccccgagacaatgaattaagctaagagccctcaagagtgagacttctgcatttgttttacmgtgagggagtaggggggcaactgtgagtgggaagtggaaagtgtgggaacggccttgtgttccgatagattccttttggagaaaagtacatatggctatt

SEQ ID NO: 267288 - DNA, 201 bp, Homo sapiens
tttattataaaaataggctttttcttagatgattttgcccagctgtaggctaatgtaagtgttctgaacacatttaaagtaggctacagtaagctatgatwtgccatagttaaatgtattaaatgcattttcagattatggtattttcaacttacaatgaatttatggtgatataaacctattgtaagtcaaggagtatct

SEQ ID NO: 267289 - DNA, 201 bp, Homo sapiens
gtcattttccttttattacaaagtgttatttccatatgtagattcaaatcttctttgttttttttttttgttgttgtttgtttgtttttttcttgagacaragtcttgctctgtcacccaggctggagtgcagtggcacaatctcaggtcactgcaacttccacctcccaggttcaagcaattctcctgcctcagcctccc

SEQ ID NO: 267290 - DNA, 201 bp, Homo sapiens
gctgatcatagttaataatgtattatatggccaggcatggtgactcatgcctgtaatcccagcactgtgggaggccaaagcaggcagatcacttgaggtcrggagttcaagaccagcctggccaacatggtgaaaccctgtctctaccaaaaatacaaaaattagccaggcgtgctggcaggtgcctgtaatcccagctac

SEQ ID NO: 267291 - DNA, 201 bp, Homo sapiens
atgcatacatgcatgtgtgtgtgtgtatgtgttattcaacattgaatacttgggtttcatggacatgtattgtggaggggtgtcctgtatgtggtggggcrtagagcagtagtccacctgctattctagtattgctcactttcttactctctgcctcatggatacagactgcttcttccaaccgtggccttgctgtgtgat

SEQ ID NO: 267292 - DNA, 201 bp, Homo sapiens
acatgcatgtgtgtgtgtgtatgtgttattcaacattgaatacttgggtttcatggacatgtattgtggaggggtgtcctgtatgtggtggggcgtagagyagtagtccacctgctattctagtattgctcactttcttactctctgcctcatggatacagactgcttcttccaaccgtggccttgctgtgtgattattaa

SEQ ID NO: 267293 - DNA, 201 bp, Homo sapiens
caggtaactgaagatgaggtgaaaatagcaagaacagtagaattagaagtggaggctgaagacatgactcaatttctgcaatctcataataaaatatgaayggatgaggagttgcttcttatggaagaacaaagtggtttcttaagatgaaacctactcctgatgaaagtgctgtgaacattgttgaaatgataacacagg

SEQ ID NO: 267294 - DNA, 201 bp, Homo sapiens
tttcaccaacaagatgaaaaaaaatggggaggggattgttccttggtgagagaaaatgctgtttttccgtcccctcttgttgatggaagtttccctaggaraatttttattgtcccatttttcatagtcccatttttcataatacttcctgataatcatgtttatgttttaagtcatgtgaagaaggtattttgctgaagt

SEQ ID NO: 267295 - DNA, 201 bp, Homo sapiens
tgtgaacattgttgaaatgataacacaggatttcagacatgaaataaacttagatgatcaagcagccacagggtttgagaggactgactccagttttgaargttctgctgctgtcagacagaatgacatgctacagagaaatcttttatgaaatgaagagtccatcagtgcggcaaacttcattgttgtcttattttaaga

SEQ ID NO: 267296 - DNA, 201 bp, Homo sapiens
cagactggagtgcagtggcacaatctcggctcactgccacctctgcctcctgcattcaagcgattctcctaccttggcctcctgagtagttgtgattacargcgcgtgccaccacacccagctaatttttgtatttttagtacagacagggtttcgccatgttagtcagactggtcttgaactcctgacctcaggtgatcc

SEQ ID NO: 267297 - DNA, 201 bp, Homo sapiens
gagatcctggtgccaaatggggggaattttggatgctttcttgtcattgcagcacttgtaggacgtgtgtggttcctcacactcctaacacatatgggacytgcctcatgaattttctggcagtaaataatggctgctgcttctccaggcctttccgaacaccatgtgtttataggttcagagctgggcctccctgtcttg

SEQ ID NO: 267298 - DNA, 201 bp, Homo sapiens
accttatttggagagatcaggtctttacagtggtaatcaagtgaaagtgtggtcattaggctgggccttaatccaatatgataagtgtccttagaaaaagrggaaaaaaagtgagacagacaagcacagaggcaggacgatgtgcaggcacaaggggaaggtggatatctacaaggaaggagagcaccctggagcaggtcc

SEQ ID NO: 267299 - DNA, 201 bp, Homo sapiens
tggtgccaaatggggggaattttggatgctttcttgtcattgcagcacttgtaggacgtgtgtggttcctcacactcctaacacatatgggacctgcctcrtgaattttctggcagtaaataatggctgctgcttctccaggcctttccgaacaccatgtgtttataggttcagagctgggcctccctgtcttggctggat

SEQ ID NO: 267300 - DNA, 201 bp, Homo sapiens
tagaacttacgatgacttgcttcttcaagcctagcaggaacgtgaagtctctgtcacttcatgtctctgaacttgagaccccgtttcatggagctcacttrcacacttctttttagtagttcaggcccgccggggataatctcccttttgctgaacaagccagccgattacagacttgacgtatatctgaaaacccccctc

SEQ ID NO: 267301 - DNA, 201 bp, Homo sapiens
gttgttttcagcaagctctgaggtgctaaatatataaagtaactaatatagtacctgacatgtagtagacactctctctctctctctctctctctctctcmatatatatatatatatatatatgtatgtgtacacacacacacacacacaattgaatgaccctgtgagcgaggccaattttgtgtatagcttttaaaaatg

SEQ ID NO: 267302 - DNA, 201 bp, Homo sapiens
ttcatggagctcacttacacacttctttttagtagttcaggcccgccggggataatctcccttttgctgaacaagccagccgattacagacttgacgtatrtctgaaaacccccctctccttggccctatagtgtaacctaatcacacgggtggcattcttcatagtcacagatgctgctcatagaaggcagatacacaga

SEQ ID NO: 267303 - DNA, 201 bp, Homo sapiens
tggcattcttcatagtcacagatgctgctcatagaaggcagatacacagatcagggagtgagacactcaagagctaccttagaccgctgcctactaccagyagccaaaaccagaatggatgtttttcctcttgttggctacatttaagatgaggatgaggataggatgtgggcagaagagtggctctggaccacctggctt

SEQ ID NO: 267304 - DNA, 201 bp, Homo sapiens
ggaggccgaggcggtcggatcacaaggtcagaagatcgagaccacggtgaaaccccgtctctactaaaaatacaaaaaattagccaggcgtggtggcaggygcctgtagtcccagctactcgggaggctgaggcaggagaatggcgtggacccaggaggtggagcttgcagtgagccgagattgcgccactgcactccagg

SEQ ID NO: 267305 - DNA, 201 bp, Homo sapiens
acccccatggacctaggtgaagacaggtagtcctgctttcgggcccaaatgttgcattttctaagaccaccctggcccgccacacccccatcctgggtctstaaaaacccgataccctagcaggcagacacacagacggccagacatggagaggagcacatcggcggaagaagatgcaagccgctagtcgtggagagggcg

SEQ ID NO: 267306 - DNA, 201 bp, Homo sapiens
gccaacgtgtgatctgattcttctggtacaccaaggcaagaaactggggacacagaaagccctctgtccttgtaacaaggtagacgctctaattgagttgrttaacacaaggtgcccgtaggcaaactaagagaacaccctgtaacacacgcccactggggctttaggagctgtaaacagtcaccccgagacactgctgtg

SEQ ID NO: 267307 - DNA, 201 bp, Homo sapiens
tgagttaatgggtgcagcacaccaacatggcacatgtatacatatgtaactaacctgcacgttgtgcgcttgtaccctaaaacttaaagtataaaaaaaarataaagctcattgtaaatatttttttaaaaatcagctaaattaaacatgataaagacagctaccataaatttgattaagtaacttaccaaacatgttata

SEQ ID NO: 267308 - DNA, 201 bp, Homo sapiens
gtgagccaagatagtgccactgcactctagcttgggtgacagattgagactccatctaaaaaaaaaaaaaaaactcaaaaactcacttagttcaagtatgkttatgttgatatgtaacttttttcccaaagaaaatatgaaaatttctagttatttgtattattgagagccaagttatgaaagatgtataatctccttgca

SEQ ID NO: 267309 - DNA, 201 bp, Homo sapiens
atgttttctgtgcctttaatcgcggtgttttagctagtcctggtggctcaaacctgtaatctcagcactttgggaggctgagacaggaagatctcttgagcctaggggttagagactacagtgagctatgatcaggccactgcactccagcctgggagacaggggaagacccagtctgtaaaagccaaacaacaacaacaa

SEQ ID NO: 267310 - DNA, 201 bp, Homo sapiens
tttttcatagtcccatttttcataatacttcctgataatcatgtttatgttttaagtcatgtgaagaaggtattttgctgaagtaaaaatttacatcttcmgtttctttttcttgagtctgtatggtaaattactggatcaatattaaagattgcccattagaaaatagccctcttaaatagaatatctggagaaattagt

SEQ ID NO: 267311 - DNA, 201 bp, Homo sapiens
taagcttcaggcttacattctatcagttagcaagcctagtgggaagagaaggcctctttcttaatagttccagcaaaagtcataggagtgacccttattgsgctgtcctcggttgcatactatctccaacaccactatggccatgggaactaaacaggtggataggcccaccctagtcaaaccctatgcctgtgtgtatat

SEQ ID NO: 267312 - DNA, 201 bp, Homo sapiens
taaaacaagatatttctatttaagaagcagtatcaagacaaaaaaggatttctgaggtgagaggcatttgtgggcattcgaaaggtgtttgtggggcagtrgggcagaagagaagtgaggacaggctgcagagtggtagattcctgtatttgggggccagaaagatcattcttcgtttggtagggtctgtacaataagatg

SEQ ID NO: 267313 - DNA, 201 bp, Homo sapiens
tagaaattgtgaccagcatcccaggcaacatagtatcccccgttttttcttgttacttcagtgtttaaggaactcaaaatgggcaagtaccagtctcaacttttttttttttttttaactatttttgtttctcctggtggaaaccttgccctcttgggtacgaagacatttaaaccagcagagcccagagctgagaagaca

SEQ ID NO: 267314 - DNA, 201 bp, Homo sapiens
gcattatctttcatggtttgcgtaggtctggaattgtggagagactgctgggcgattcttgatttgggtatctcatgcaatggcagttagatgtcagtgarctacattcatctgaagacttaactgatgatagaagattcacttccaatgtggttggcactgtggcaaactgaagtgcatgtggcaaattgatgctggctg

SEQ ID NO: 267315 - DNA, 201 bp, Homo sapiens
ctgcatcaaccagtgttttagtgacagtatattgtactgctcatctgtaaataaggcctgaggtttttcattcctatgtgatttggtcaaaattctctctcctaggagtccacaggtatgagctgagccagcagagatgcagcaggccagctctcatccccttcatcatggccaccccacatggtttctttatgttcatag

SEQ ID NO: 267316 - DNA, 201 bp, Homo sapiens
catgcaatggcagttagatgtcagtgagctacattcatctgaagacttaactgatgatagaagattcacttccaatgtggttggcactgtggcaaactgawgtgcatgtggcaaattgatgctggctgttggccaagggccttcagttcttctctgtttggacctttctgcaggacagtgtctgtgttcccatggcaggac

SEQ ID NO: 267317 - DNA, 201 bp, Homo sapiens
tctgatttggacgaagctcatgacaaacaccgcttgctttccttctctcaaagtgatctctcagataacacttgggaaatattttaaaatctcatttgactttttttttttttctttggaaacatgtcaaatttttatttatttatttattttaatgtatttatttattattattatactttaagttttagggtacatgtg

SEQ ID NO: 267318 - DNA, 201 bp, Homo sapiens
gaggactatatcaggaggccctctggcctgagcagaccttatgctgttgttgcctttgaagaccaacaataatgagagaaaatactgtatcacacaaagamtgcaagcagcagatgcaagaaagcttttttttttgtaaaagattttgggcatattgcttttcttctactggattagcaatgaaaacagggtgtacaacca

SEQ ID NO: 267319 - DNA, 201 bp, Homo sapiens
gaagctcatgacaaacaccgcttgctttccttctctcaaagtgatctctcagataacacttgggaaatattttaaaatctcatttgacttttttttttttyctttggaaacatgtcaaatttttatttatttatttattttaatgtatttatttattattattatactttaagttttagggtacatgtgcacaatgtgcag

SEQ ID NO: 267320 - DNA, 201 bp, Homo sapiens
tttttttttaattttactttatgttctgggctacatgtgctgaacgtgtaggtttgttacataggtaaacatgtgccatggtggtttgctgcacccgtcarctcatcatttacattaggtatttctcctaatgctatcccttccctagccccccaccccctgacaggccccagtctgtgatgttcccctccctgtgtccat

SEQ ID NO: 267321 - DNA, 201 bp, Homo sapiens
atatcataaagatatacagactacctaaaatccataatcttagccaagtgcactatttaaatcctggagttgtcaatatttattctcaggaaaaatgtaaygcgttggccttttagaaacaatgcactaatcttaggttagcactaacctaagattttttgcaagtatgttaaaaaagtgtgaaacttgctatatgacata

SEQ ID NO: 267322 - DNA, 201 bp, Homo sapiens
gtgtatatgtgccacatttccttaatccagtctatcattgttggacatttgggttggttccaagtttttgctattgtgaataatgccgcaataaacatacrtgtgcatgtgtctttatagcagcatgatttatagtcctttgggtatatacccagtaatgggatgcctgggtcaaatggtatttctagttctagatccctg

SEQ ID NO: 267323 - DNA, 201 bp, Homo sapiens
gcctgtggtccttatcaaatatttgacttacgttaagaataatctatactctattatttcttcttccccagaagatttcttcttatttaacttctgttttyatagatttatatttattacactttaattttttgtaccatctctaccctaaaaagtgttaagttttactcctattatgttaacaaatagtcaaataatact

SEQ ID NO: 267324 - DNA, 201 bp, Homo sapiens
tgatttgcatttctctgatggccagtgatggtgagcattttttcatgtgttttttggctgcataaatgtcttcttttgagaagtgtctgttcatgtccttygcccactttttgatagggttgtttgtttttttcttgtaaatttgtttgagttcattgtagattctggatattagccctttttcagacgagtaggttgtga

SEQ ID NO: 267325 - DNA, 201 bp, Homo sapiens
ctattcttgcaagcattggcaatctccagagataaacctaagaaaaaacaaaaatactgtctcaccttgagcctgcactaagtgagaatcttatgcaactrgccaaaattagacaggcaaaggccaaatgccagtgcagagaaactctgcaataaagccagccatggggttgttaccctagtgcaaagagtatgtaggaag

SEQ ID NO: 267326 - DNA, 201 bp, Homo sapiens
tgatggccagtgatggtgagcattttttcatgtgttttttggctgcataaatgtcttcttttgagaagtgtctgttcatgtccttcgcccactttttgatrgggttgtttgtttttttcttgtaaatttgtttgagttcattgtagattctggatattagccctttttcagacgagtaggttgtgaaaatattcaggatac

SEQ ID NO: 267327 - DNA, 201 bp, Homo sapiens
acccaggcaggagtgcgattgtgtggtcttggttcactgcaacctctgcttcccaggttcaagcaattctcctgcctcagcctcccaagtagctgggattrcaggcatccgccaccacgcctggctaatttttgtatttttagtagagacagggtttcaccatgttggccaggtgggtctcaaactccttatctcaagtga

SEQ ID NO: 267328 - DNA, 201 bp, Homo sapiens
atatagcaaggaagcatagcaaagtaagaacttaaaggcttattttccttgctgctgaatttaatatcatgtgttataattcagagacatgtaaggtacartttaaaaacagccaataagttttttagagacccactgagtacctagcactgtggtaggtcttatgcgggattcaaaagcttaaaataaaaacaaaccatt

SEQ ID NO: 267329 - DNA, 201 bp, Homo sapiens
tgtatttttagtagagacagggtttcaccatgttggccaggtgggtctcaaactccttatctcaagtgatccacctgctttggcctctcaaagtgctgggrttacaggcatgagcctcgcacccggccttttctataattttttaataatgcttttaaaaattgcatttttattcattgctagagtcaacttattttgaaa

SEQ ID NO: 267330 - DNA, 201 bp, Homo sapiens
taatccatcttgaattgatttttgtataaggtgtaaggaagggatccagtttcagctttctacatatggctagccagttttcccagcaccatttattaaayagggaatcctttccccattgcttgtttttctcaggtttgtcaaagatcagatagttgtagatatgcggcattatttctgagggctctgttctgttccatt

SEQ ID NO: 267331 - DNA, 201 bp, Homo sapiens
caggatggtctcgatctcctgaccttgtgatccgcctgcctcggcctcccaaagcgctgggattacaggcgtgagccactgtgcctggccacaaatataamattttctataataaggacaatgaagaaacttgttcagtaataccacccatatgcaactggcaaaatttagattatgagaaattctacaatggattaaccc

SEQ ID NO: 267332 - DNA, 201 bp, Homo sapiens
gcttatggcatttaacagtgtcacaatataaagccaagcacattttctaaagccttatttttttcaagtataaaatcatttaggctatcatttggaaaaamaaaaacaaaaaactggccatttgctgttatagattttagctctcttcgctaattaaggtttcccagaagtgactattggtatacaaatgatgtgagtaag

SEQ ID NO: 267333 - DNA, 201 bp, Homo sapiens
cttgtgatccgcctgcctcggcctcccaaagcgctgggattacaggcgtgagccactgtgcctggccacaaatataaaattttctataataaggacaatgwagaaacttgttcagtaataccacccatatgcaactggcaaaatttagattatgagaaattctacaatggattaacccatttttcttcaaatttaattgta

SEQ ID NO: 267334 - DNA, 201 bp, Homo sapiens
cccgggaggtggagcttgcaatgagccaagatcgtgccactgcgctccagcctgggcgacagaaaagactctgtcttaaaaaaaaaaaaaaaaaaaaaaamcaaaaaaacagaaagtagagaagataatgtttctctccagatcaaaaggcagatttgcttattatgcagtataataaagacaatgtttcccttcaggatg

SEQ ID NO: 267335 - DNA, 201 bp, Homo sapiens
tgtattccttttctagatagaaaatgtagtctattaaaaatccaaataaaaatcagaaatgttcagtctttaaaatgtaaagttattacacattagaaagkttgacagccttccactgaaatgatttttttcccataagttattggggtacagatggtatttgtttacgtaagttagttagtggtgatttgtgagatcctg

SEQ ID NO: 267336 - DNA, 201 bp, Homo sapiens
gcaggtggatcacctgaggtcagaagttcgagaccagcctggccaacatggtgaaaccctgtttctactaaaaatagaaaaattagccaggcgtagtggcrcatgcctgtagtcccagctactcgggaggctgaggcaaaagaatcactcgaatccgggaggtggaggttgcagtgagccaagattgtaccactgcgctcc

SEQ ID NO: 267337 - DNA, 201 bp, Homo sapiens
gtattccttttctagatagaaaatgtagtctattaaaaatccaaataaaaatcagaaatgttcagtctttaaaatgtaaagttattacacattagaaagtwtgacagccttccactgaaatgatttttttcccataagttattggggtacagatggtatttgtttacgtaagttagttagtggtgatttgtgagatcctgg

SEQ ID NO: 267338 - DNA, 201 bp, Homo sapiens
cccaccctcactaaccacctctaggcttccttccctaagggctaaacagaaaccaggccttcgaaaagactctacactgaggctgggcatggtgagtcacrcctgtaatcccagcactttgggaggctgaggtgtgcagatcacttgaggccaggagtttgagagcagccatggccaacatggggaaatcccatctctact

SEQ ID NO: 267339 - DNA, 201 bp, Homo sapiens
ctaagggctaaacagaaaccaggccttcgaaaagactctacactgaggctgggcatggtgagtcacgcctgtaatcccagcactttgggaggctgaggtgygcagatcacttgaggccaggagtttgagagcagccatggccaacatggggaaatcccatctctactaataatacaaaaaaaaaaaaaaaaaaaaaattag

SEQ ID NO: 267340 - DNA, 201 bp, Homo sapiens
aaaaataaataaataaatttgggccaggcacagtggctcacgcctgtaatcccaacattttgggaggccgaggcaggtggatcacccaggtcaggagttcraaatcagcctggccatcatggtgaaaccccgtctttattaaaattaaaaaattagctgggcatggtggcacacacctgtggtcctagctacttggcaggc

SEQ ID NO: 267341 - DNA, 201 bp, Homo sapiens
agtgtctgttcatgtccttcgcccactttttgatagggttgtttgtttttttcttgtaaatttgtttgagttcattgtagattctggatattagccctttktcagacgagtaggttgtgaaaatattcaggatacaaaatcaatgtacaaaaatcacaagcattcttatacaccaacaacagacaaacagagagccaaatc

SEQ ID NO: 267342 - DNA, 201 bp, Homo sapiens
tcactgacaaccacacgagtttacctcagttctctgctttgcagagaatatttttgtgttgttggctctgccttccccacgagaccgtgtgttttacaagkaccttgtctgtcacgttcactgttgtgttccccagcactcagaggaattccgccatggagttagcacagacagcgctggttggaggaatgagtgagtgca

SEQ ID NO: 267343 - DNA, 201 bp, Homo sapiens
accagaaccactcaagaatgaagatgaatgcgaagtcagcttggcagctccatggcgccctttgtggtttcttgacctggtggctaaaatccttcctccartgaaaaacatttttagtatctttaattacacttagtgaaagtaagacacgagtgcggttttaatcttctagatggtcttttggattaaaattagatttat

SEQ ID NO: 267344 - DNA, 201 bp, Homo sapiens
ggctgaagcaggagtatcacttgaacctgggaggcagagtttgcagtgagcggagatcgcaccactgcactccagcctgagcgaccgagtgaaactctgtwtcaaaaaaaaaaagaaagaaattccaaaaccgttttcaaagtggttgttttatatttccaccaatgatatatgagagcgtttgttaatctttatcctcac

SEQ ID NO: 267345 - DNA, 201 bp, Homo sapiens
ttgaaatgtttaggttatttcaactgcttggttgtattaccatttaaaatatctttaattatggatgtaatacatgctttcctgctttcttcataaaatgaaaaaaaaaaaaaaaggaattcactctctcatgtcctcagttctgttccccagagttagccacttgtacgtgtttctccacttagttcttttggggattat

SEQ ID NO: 267346 - DNA, 201 bp, Homo sapiens
gtgttccccagcactcagaggaattccgccatggagttagcacagacagcgctggttggaggaatgagtgagtgcatctactcagccagaggccaccttgwttcattgcttgtcctcccatgcagatttccacctgacgcattcttctgtgcttttcctggcaataaggtgaagaaaaggcagcattcgaaggatgtttag

SEQ ID NO: 267347 - DNA, 201 bp, Homo sapiens
acgtggaccagcaacaattggtgttacacggtgggcttgttgagaaatgctgaatcccagagtccacgcctggcctgctgatgcaggctgcatttcattcwtatttatttattaataacaaatctcctggtaatccacttgcacgtcagagtctgagaagcaccggttctttgatttcttcttctttcatgtaccttccat

SEQ ID NO: 267348 - DNA, 201 bp, Homo sapiens
ttgcttattttttcttagtgtgtaattactggattttcaattcttgttgcctttatgaaccttctaaaatgtttcattcattttattcacatcattgcttyaaaaattctattagcatattttgtagtgtgcaccctagtatagtaatacttttgtgtaacttaaaaataaataaataaatgaatctatatttggggtccc

SEQ ID NO: 267349 - DNA, 201 bp, Homo sapiens
gacttacaataggatgggaactcaattgtgaatgatttaaaacaaaattttttataataatcaccgactataaatgttacttcgtcaaaacaaaatttatygcttcaactgttagtggtaaacttttttttcatttttttattttttattttttcattagactcactctgtcacccacgctggagcgcaatgacgcaatat

SEQ ID NO: 267350 - DNA, 201 bp, Homo sapiens
attatactgagcttgtcattctcaataggacaagaggacctattttacttattttgacatagatgaaatttgaagttactttttgaaaaactttggaatckgaaacttttttttttagggaaaaaaccgaactgaataacattcaagttggtttttaaaagattgaaattaatttccttttgttcagaaaacaatatatca

SEQ ID NO: 267351 - DNA, 201 bp, Homo sapiens
ctataaatgttacttcgtcaaaacaaaatttattgcttcaactgttagtggtaaacttttttttcatttttttattttttattttttcattagactcactstgtcacccacgctggagcgcaatgacgcaatatcagctcactgcaacttccgcctcccaggttcagtgattctcctgcctcagcctcccgagtagctggg

SEQ ID NO: 267352 - DNA, 201 bp, Homo sapiens
tatatcatttttattttcccaaagaaatctgtgaaggaccaaaaagtcagggatggattcaagcagaatgaaggtaataaactttccctcccactccatcrtgtctgcatgaaactcagtaatgagcacaggaaggcctctgcctgtggtcagccttgtgaagatgagaaaggagagcgggaagggacctgctgaaatagc

SEQ ID NO: 267353 - DNA, 201 bp, Homo sapiens
acaaaatttattgcttcaactgttagtggtaaacttttttttcatttttttattttttattttttcattagactcactctgtcacccacgctggagcgcartgacgcaatatcagctcactgcaacttccgcctcccaggttcagtgattctcctgcctcagcctcccgagtagctgggactataggcgctcgccaacatg

SEQ ID NO: 267354 - DNA, 201 bp, Homo sapiens
ttccctcccactccatcatgtctgcatgaaactcagtaatgagcacaggaaggcctctgcctgtggtcagccttgtgaagatgagaaaggagagcgggaarggacctgctgaaatagcgcgcagtcaagttatttaaacaccacggtgtcacatttgatgtttgggatgagttagatctaacagatgttatcctcctcagg

SEQ ID NO: 267355 - DNA, 201 bp, Homo sapiens
gttaaaacttagtttattactcaattccttgagggaatggggacatactccctatttcactttcatgtgagttccataagtatcttgatggtattttcagkttttttaaaaagataattaatatgattctgtatgtctttgttaaagaaatagaataggctgcaggagttaaatttcatgaggggggaaatactatgtcta

SEQ ID NO: 267356 - DNA, 201 bp, Homo sapiens
gtagctgggactataggcgctcgccaacatgccaggctaatttttggtatttttagtagagccggggtttcgccatgttggcaatctggtctcaaactccygacctcaggtgatctgcccgcctcggcctcccaaagtgctggattacaggagtgagccactgcacctggcctattagtggtaaacttgtatgaccttttt

SEQ ID NO: 267357 - DNA, 201 bp, Homo sapiens
tggtatttgtttacgtaagttagttagtggtgatttgtgagatcctggtgcacccaacactcaagcagtacctactgcaccatatatgttgtattttatcmctcactcccctcccaccctttcccctacgtccctgaagtccattgtatcatgcttatgtctttgtgtcctcatagcttagctctcatctatcagtaagaa

SEQ ID NO: 267358 - DNA, 201 bp, Homo sapiens
ttgaaaactaggcctcttgtgccaaagagccaatttgtgaatgcaaaggaaaaattcttgagggaagtgctactccagtgaacacataaataatatgaatktgagacagtctcattgctgatgtggagaacattttagtggtctgaatagaagttcaagccagttacaacattccattgagccaagacctgattcagacaa

SEQ ID NO: 267359 - DNA, 201 bp, Homo sapiens
aacatgccaggctaatttttggtatttttagtagagccggggtttcgccatgttggcaatctggtctcaaactcccgacctcaggtgatctgcccgcctckgcctcccaaagtgctggattacaggagtgagccactgcacctggcctattagtggtaaacttgtatgacctttttcttttctttgagacagaatctcttt

SEQ ID NO: 267360 - DNA, 201 bp, Homo sapiens
tttttggtagagatggggttttgccatgttggccaggctggtctcgaactcctgagctcaaatgatctgcccaccttggcttcccaaagtgctgggattasaggcatgagccacggcgcctggccgactattgtaattttaaataaagtttgaaatatgtttgataaagcctctcttcactgaccatctttttcacaacat

SEQ ID NO: 267361 - DNA, 201 bp, Homo sapiens
aatcagtgcagcaaacttcactgttgtctttttataagaaattgccacagtcatcccaacttctagcaaccaccatcctagtcagtcagcagtcatcaatrtcaaagcaagaccttccatgagcaaaaagattacagttgttgaaggctcgggtaattgttagcattttttagcaataacgtatttttaaattaaagtttg

SEQ ID NO: 267362 - DNA, 201 bp, Homo sapiens
tgcccattttttaattgggttatttgtcttctccttgttaagttgtaaatgttctttatatattctggacagaggttttttatgacatatgtgatttgcayttatttccttccttttggtgggttgtcattttactgtagtgatgatgttctttgaagaacaaaagttgtagttcagtgtgtatatgttgtctttgttcgc

SEQ ID NO: 267363 - DNA, 201 bp, Homo sapiens
acttctagcaaccaccatcctagtcagtcagcagtcatcaatgtcaaagcaagaccttccatgagcaaaaagattacagttgttgaaggctcgggtaattkttagcattttttagcaataacgtatttttaaattaaagtttgtatgctgtttttatatacataatgctattatacgcttaatagactacagcattgtata

SEQ ID NO: 267364 - DNA, 201 bp, Homo sapiens
ttaaacatctgcctcccaggttcaagtgagtctcctgcctcagcctcccaagtagctgggatacaggtgcttaccaccacgcctggctaatttttgtattktttgtagagacaggatttcgtcttattggccaggctggtcttgaactcctgacctcaggagatctgcccacctcggcctcccaaagtgctgggattacag

SEQ ID NO: 267365 - DNA, 201 bp, Homo sapiens
tgacatatgtgatttgcatttatttccttccttttggtgggttgtcattttactgtagtgatgatgttctttgaagaacaaaagttgtagttcagtgtgtmtatgttgtctttgttcgctcatgtttttggtgccagatctaagtaccttttccaaacccaaggtcacaaaggtttactcctaaattttcttctgagactg

SEQ ID NO: 267366 - DNA, 201 bp, Homo sapiens
ttccctcatcagagtgtgagaataataaataatttattatgtctcaaaacctgtaatggtctgcaatatacggctaagtatattctatatgttttttattwttaacataactattttcataactcctgaaaacaatgtattaataatgtggtattgttaacaattttagaatctcattattaatcattttagagatgatat

SEQ ID NO: 267367 - DNA, 201 bp, Homo sapiens
tctatcacttagtcatcagggagtcattggagtgtttgtttgtttgtttgtttttaagacagagtcttgctctgttgcccaggctggagtgcagtggcgcraactcggctcaccgcaacctccacctcctgggttcaagggattctcctgccacagcctcccgagtagctgggactacaggcgcctgccacaatgcccggc

SEQ ID NO: 267368 - DNA, 201 bp, Homo sapiens
tattaacataactattttcataactcctgaaaacaatgtattaataatgtggtattgttaacaattttagaatctcattattaatcattttagagatgatmtttgtaactctttattaagtgcttggaagaatctgaaatatttggatcttaactatgtgccgttgaaggaacttctttttggaaaaagaaaaatacatca

SEQ ID NO: 267369 - DNA, 201 bp, Homo sapiens
gccacagcctcccgagtagctgggactacaggcgcctgccacaatgcccggctaatttttgtgtttttagtagagatggggtttcaccatgttggccaggytggtctcgaactctgacctcaggtgatccacccgcctcggcctcccaaagtgctgggattactggcgtgagccaccactcccagcctggagtttttaagt

SEQ ID NO: 267370 - DNA, 201 bp, Homo sapiens
tggggtttcaccatgttggccaggctggtctcgaactctgacctcaggtgatccacccgcctcggcctcccaaagtgctgggattactggcgtgagccacyactcccagcctggagtttttaagtcaggagaacagagtgaccagtttatgctttaggaagatacttctggtggctctgggcagggaacaggacttcatag

SEQ ID NO: 267371 - DNA, 201 bp, Homo sapiens
aaatattttatagagtgtacacattttgagaagaccctggaaattgtcagtgcctctgctatccatcatatgtcttctctctcaggggaaacccttatgamatagttatgtcctctatcccaaaaaagaaatttactcttgcctgctgtgataatactgttcctggaatatgaccttcgccatgagtcttaccatcaagca

SEQ ID NO: 267372 - DNA, 201 bp, Homo sapiens
agcttctgcttattctgccttctctgtatattttccaaacagaagtgtgcagctaaacagaattctgacaccttattcatgtacaagattagggacccatsctctttagttttctgaaactcataaatggtaacaatactaccaacgatgtatcattgcggatcgggatctgagctctttacatttccttaaatcttcaaa

SEQ ID NO: 267373 - DNA, 201 bp, Homo sapiens
gggaggatcacctgaggtcaggagttcaagaccagcctggccaacatggtgaaatcccctctctactaaaaaatacagaaattagtcaggcatgatggcaygtgcctgtaatcccagctacttgggaggctgaggcaggagaagcgcttgaacctgggaggtggaggttgcagtgagccaagatcacaccattgcactcca

SEQ ID NO: 267374 - DNA, 201 bp, Homo sapiens
cataattggaaacatcaattgtgcaagcaatatcgcatttgagaatgattctcatttaatcagctgtgaaaagccccctattaaagagcaagttcttagtkggaagcctgttctcaagactagttatgtatggattcagtgcctacagagtctcccaagaaccctggcttggcacttggtacttggcttacagagcatcag

SEQ ID NO: 267375 - DNA, 201 bp, Homo sapiens
gtgcagctaaacagaattctgacaccttattcatgtacaagattagggacccatcctctttagttttctgaaactcataaatggtaacaatactaccaacratgtatcattgcggatcgggatctgagctctttacatttccttaaatcttcaaaacagccttcaaagttgatatattattgtcaatggcagaaagctggg

SEQ ID NO: 267376 - DNA, 201 bp, Homo sapiens
aggcaggagaagcgcttgaacctgggaggtggaggttgcagtgagccaagatcacaccattgcactccagcctgggcaacagagcaagactctgtctcaaraaaaagaagaagaagaagaaaagaaagaaattgcatctcaagatacataataagaaaatgcaaaatagatattctcagcctgaaatatgctttcagagga

SEQ ID NO: 267377 - DNA, 201 bp, Homo sapiens
tcctgggtttaagtgattctcctgcctcagcctcttgagtagctgggattacaggcacgcaccaccatgcccggctaatttttatctttttagtacagacrgggtttcaccgtgttggccaggctggccttgaactcctgacctcaagtgatccgcccaccccagtctcccaaagtgcttggattataggggtgagctact

SEQ ID NO: 267378 - DNA, 201 bp, Homo sapiens
ctgaaatgcatgcatttgaggattctatggattcaagacagggttagcgctgtctcttttgtattgagagagagagagagagagagagagagagagagagwgtgtgtgtgtgtgtgtgtgtgtgtgtgtgatgtgcatgcaatttggtaaagaaccgtatttattttcatctttatttctcctaaagattctaagccaagt

SEQ ID NO: 267379 - DNA, 201 bp, Homo sapiens
gctgttggtgtgttcctgtagacatccagcccccggtgtgttcctctgctgatgtgctcctctcaacgtccagccgcctgtgtctgcctgctaggctctcrgggtttttataggcacaggatggggatgtggaaggccagggtggtcttgggaaatgccaacattggggcaggaaaatgaaaataattgtccacacctagg

SEQ ID NO: 267380 - DNA, 201 bp, Homo sapiens
tgcaccaccacatccggccattttttgtacttttagtagagacagggtttcaccatgttggccatgctggtctggaattactggcctcaggtgatcctccygcctcagcctcccaaaatgctgggattacaggcattagccactgtgcctggcctcattattttttctatccagcttctgagcagtcctggattgaagttg

SEQ ID NO: 267381 - DNA, 201 bp, Homo sapiens
ccccctacacacagacctgtgggttcaattccgcaagtctgctgagctcccgctggggtctccctccctgaaccagggcctggccactctctgaaggcagsaggctggagtgattgcaggactcagcacgcttgcttcctgtctctcacggacctttgtcccacattgtctcatgtcactgtcttgaaaaccattgtttca

SEQ ID NO: 267382 - DNA, 201 bp, Homo sapiens
tagggttttttaaaaagcctatctcgtatgtcccatttgggtttttcctcttaagacatctgtttccctatttccactgtctcactgcatgaggagtgagtctctctctttgtgtgtgtgtttgtggtaggacactgatcaactagtctgtatcaatatagcaatgagtgataatggaataacatgtcactttaacctttt

SEQ ID NO: 267383 - DNA, 201 bp, Homo sapiens
agggttttttaaaaagcctatctcgtatgtcccatttgggtttttcctcttaagacatctgtttccctatttccactgtctcactgcatgaggagtgagtctctctctttgtgtgtgtgtttgtggtaggacactgatcaactagtctgtatcaatatagcaatgagtgataatggaataacatgtcactttaaccttttt

SEQ ID NO: 267384 - DNA, 201 bp, Homo sapiens
tttaaaaagcctatctcgtatgtcccatttgggtttttcctcttaagacatctgtttccctatttccactgtctcactgcatgaggagtgagtctctctctttgtgtgtgtgtttgtggtaggacactgatcaactagtctgtatcaatatagcaatgagtgataatggaataacatgtcactttaaccttttttgtttga

SEQ ID NO: 267385 - DNA, 201 bp, Homo sapiens
tggaggataatatgtgacgtccccaggagacgccaaggaaacctgcctagctctgtccacatgcatgctctcaggacctttggcttcaccagccagaggcrggtccatgcgggaaaggcattgaggctcagtttgggaggtgtcggatgggatcagaatgatactggagaggagagttaaggggattagcctgaccctgaa

SEQ ID NO: 267386 - DNA, 201 bp, Homo sapiens
ttaaaaagcctatctcgtatgtcccatttgggtttttcctcttaagacatctgtttccctatttccactgtctcactgcatgaggagtgagtctctctctttgtgtgtgtgtttgtggtaggacactgatcaactagtctgtatcaatatagcaatgagtgataatggaataacatgtcactttaaccttttttgtttgaa

SEQ ID NO: 267387 - DNA, 201 bp, Homo sapiens
tactggagaggagagttaaggggattagcctgaccctgaatgggagatttatttagaaacttgaagtagtaagatagttgagttagtatttatttagtctkgaggggtagagaaagaagtatgtcaaatatctttctcttaccccttctaatctcctcaaagcccacaaaaagtagaaaatgtaactgctgaatacaagta

SEQ ID NO: 267388 - DNA, 201 bp, Homo sapiens
aaagtagaaaatgtaactgctgaatacaagtaatctcccaattcatagatctgggcctttcagaaggacaatgaattgaggactcctactcccagcccatrggaaccatgtgagaaatgggaatttatcactcatggagtgatgagacctttgtaaatgctggtatccagccatcttcccagcttccctggcaatggcact

SEQ ID NO: 267389 - DNA, 201 bp, Homo sapiens
gaaatttgagtcacgtaagactttgtgattttgtgtgaagacagactgtaaaggagggtctgatctattaaattaaatcttacctaatcttttttaaagtattaatttattaattattaagtattaattattaagtattaataatcttgcttagtaaccctattcttttcatttaatggctccgagttgtgatgtccctat

SEQ ID NO: 267390 - DNA, 201 bp, Homo sapiens
ttgagactgccaggtagaacaaaggccatttgaattctgtgcataggcacttgataactagcctcaccagtcttattatcctgaaaatacaagactaactrtagcagacgaaagcttgaataatcatgccttaaaataaattggattaataaaagtgggaaattgcttttgctgatgacgttgctcttcttacatagaaac

SEQ ID NO: 267391 - DNA, 201 bp, Homo sapiens
aaatttgagtcacgtaagactttgtgattttgtgtgaagacagactgtaaaggagggtctgatctattaaattaaatcttacctaatcttttttaaagtattaatttattaattattaagtattaattattaagtattaataatcttgcttagtaaccctattcttttcatttaatggctccgagttgtgatgtccctatc

SEQ ID NO: 267392 - DNA, 201 bp, Homo sapiens
gcataggcacttgataactagcctcaccagtcttattatcctgaaaatacaagactaactgtagcagacgaaagcttgaataatcatgccttaaaataaaytggattaataaaagtgggaaattgcttttgctgatgacgttgctcttcttacatagaaacatccgttggcctgtgggtgttcaggcccccaggggcccac

SEQ ID NO: 267393 - DNA, 201 bp, Homo sapiens
aatttgagtcacgtaagactttgtgattttgtgtgaagacagactgtaaaggagggtctgatctattaaattaaatcttacctaatcttttttaaagtattaatttattaattattaagtattaattattaagtattaataatcttgcttagtaaccctattcttttcatttaatggctccgagttgtgatgtccctatct

SEQ ID NO: 267394 - DNA, 201 bp, Homo sapiens
gtgttattacaagtgtcagagttttaaaaattaagaagtgtataaagtcagaaagttacagtaagccaaggtcagtttattattgaggaactttgttgtayacatttagtgtaacctagatgtacagtgttcataacgtctacagtggtatacaataatgtcctaggccttcacattcactcactcactgaatcaggagag

SEQ ID NO: 267395 - DNA, 201 bp, Homo sapiens
catgccttaaaataaattggattaataaaagtgggaaattgcttttgctgatgacgttgctcttcttacatagaaacatccgttggcctgtgggtgttcakgcccccaggggcccacctcattgaaaacacattaaactgtacttttggtagccgctgctaagtggaatccagttttctctctgataattgttttgtcatc

SEQ ID NO: 267396 - DNA, 201 bp, Homo sapiens
atttgagtcacgtaagactttgtgattttgtgtgaagacagactgtaaaggagggtctgatctattaaattaaatcttacctaatcttttttaaagtattaatttattaattattaagtattaattattaagtattaataatcttgcttagtaaccctattcttttcatttaatggctccgagttgtgatgtccctatctt

SEQ ID NO: 267397 - DNA, 201 bp, Homo sapiens
gatatgtgtaaaactggtaatataatacaatttgccactctagtgttcttttttcttcttctgagtatctttttcaacttcttttatggctaaattcagcrtattctaggatgggtaaagtaatcaggagtaacaaaattcccttattcacacaagggtgcggtctgtgttctttggaggcaaatcctgttgtcactgcct

SEQ ID NO: 267398 - DNA, 201 bp, Homo sapiens
accctattcttttcatttaatggctccgagttgtgatgtccctatcttattcacaccaggagaacagaaagcctttacaagtttatggtttgtggcacacrtatttattcccaatacattatttatagttttcttgataaatacccaatacagctctcctttgcttagtcattttgaggtaacagggaatcaaaatgaggc

SEQ ID NO: 267399 - DNA, 201 bp, Homo sapiens
tttgttgtatacatttagtgtaacctagatgtacagtgttcataacgtctacagtggtatacaataatgtcctaggccttcacattcactcactcactgamtcaggagagcaacttggagtactgtaagctccattcacagtaagtgtcctattcaggggtacgtttctttttttttttttttagacagtctcactctgtt

SEQ ID NO: 267400 - DNA, 201 bp, Homo sapiens
acccaggaggtggaggttgcagtgagctgagatcgtgccactgcactccagcctgggcaacagagccagactctgtctcaaaaaaaaaaaaaaaaaaaaamaaccccacaaattcgaaaacaagccaacacaccttgccccctcaaaaaaggtctggctatttttttccccccaaactgtgggcgtgctggctcagcatcc

SEQ ID NO: 267401 - DNA, 201 bp, Homo sapiens
ggagtgcagtggtgtgatcttggctcactgcagccactgcctcctgagttccagcaattctcctgcctcagcctcatgagtagctgggattacaggtgcamgccaccacgctcaactgatttttgtacttttagcagacatggggtttcgtcatgttggccaggctggtctttaactcctgacctcaggtgatccacccgc

SEQ ID NO: 267402 - DNA, 201 bp, Homo sapiens
agttatccaagttgtgaatgcaaagtgaaagctcttgaaggaaattaaaagtgctactccagtgaacacgtgaatgttaagaaagtgaaacagccttatcrctgatatggaaaaactctggtctggatagatcaaaccagccacaacactcccttaagccaaaacctaatccagagcaaggccctaactctcttcaattct

SEQ ID NO: 267403 - DNA, 201 bp, Homo sapiens
gaaaaactctggtctggatagatcaaaccagccacaacactcccttaagccaaaacctaatccagagcaaggccctaactctcttcaattctgtgaaggcygagagaggtgagaaagttgcatgagaaaagtttgaagttagcagaggttggttcatgagatttaaggaaagaagccgtctacatcgtatgaaagttcaag

SEQ ID NO: 267404 - DNA, 201 bp, Homo sapiens
gtattccatggtgtatatgtgccacattttctttaaccagtctatcattgatgggcatttgggatggttctttgctattgtaaatactgctgcaataaacrtacgtgtgcatgtgtctttatagtagaatgatttataatcctttgggcatatacccagtaatgggattaccaggtcaaatggtatttctggttctagatg

SEQ ID NO: 267405 - DNA, 201 bp, Homo sapiens
atcgccacactgtcttccacaatggctgaactaatttacactcccaccaacagtgtaagagcattcctttttctccacagctttgccagcatctgttgttycctgactttttaataatcgccattctgactggtgtaagatggtatctcattgtggttttgatttgcatttctctaatgaccagtgatgatgagcttttgt

SEQ ID NO: 267406 - DNA, 201 bp, Homo sapiens
ggaggtgattttctgagccaaaatcaaagcgcgggtgggagttctgccaatattttctttagattagtttcatgctttctactctgggagcttagggcagkttatagtctgagtttcatttttaggtacacatttgtggtacacagacaaaaaaaaaacgtaagagagtgattcgggatcagcaaaaaggagaaagaaaaa

SEQ ID NO: 267407 - DNA, 201 bp, Homo sapiens
gtgtgcacctgtaatctcagctactcaggaggctgaggtaggaaaatcgcttgaacccgggaggtggaggttggagtgagtagaaatcgtgccactgcacwccagcctgcaggacagagcaagactccgtctcaaaaaaaagaaaagaaacaagaaaaaaaattgttacatgtgtctttgagttaaaaaaagacagaggta

SEQ ID NO: 267408 - DNA, 201 bp, Homo sapiens
actaaaagtgttgctgcaaagttttgcttagattcttcactttcttgaggacagagactgggttttcttcacctgggatttccagcttccctcgttgcatygggcaacattattcgtagccatgtgggctctagaaaccagctccactgcttacaggcaacctggggcacgtcgctgcatcgttctaggcttgattttctc

SEQ ID NO: 267409 - DNA, 201 bp, Homo sapiens
gtgagtttatttggtatcatctcccagaaggcagggatcgtgtaatctggctcacagctgaattctccatgcttgtcacagtgtcctcagccacagagtargagcacaacaattatcacttggattatgtaagacaagaatttggactttagtatttatgctgccgtaatttttaacttactttatgattgtgtaatttta

SEQ ID NO: 267410 - DNA, 201 bp, Homo sapiens
ccctattcttttcatttaatggctccgagttgtgatgtccctatcttattcacaccaggagaacagaaagcctttacaagtttatggtttgtggcacacayatttattcccaatacattatttatagttttcttgataaatacccaatacagctctcctttgcttagtcattttgaggtaacagggaatcaaaatgaggcc

SEQ ID NO: 267411 - DNA, 201 bp, Homo sapiens
cccaactaagaaaacactatgatatctgctaagtattagaatgaagagctgaagaggatgttcttgtttctcaagagttggattcctcaatcctctagcakggaagcttcccagggaggatggtgattaactggagttttgaagagtgtgtacacattcccagatgcacagggcacagacaggggactcagacctagtagc

SEQ ID NO: 267412 - DNA, 201 bp, Homo sapiens
ttcttgataaatacccaatacagctctcctttgcttagtcattttgaggtaacagggaatcaaaatgaggccctgcaaaattgcccagaaaagtggctttwttatcaaacttaaaaatgtttgacactaagttctaattaaaatataactgttttcttggccttaggtaagagaatggtagatgtcatctaaattagctaa

SEQ ID NO: 267413 - DNA, 201 bp, Homo sapiens
cactcttctcaggatacatgacttattaggtctctttttccatagtttaaaataaatgggacagtcattataaatgcatccctcataatagactccataasaaattctactacaaagactattgttacacaaaagactaaattctgttactaaaattgttcctaataataaaatcacactagattatccattgactacaca

SEQ ID NO: 267414 - DNA, 201 bp, Homo sapiens
tcatgagaagttaaaaccgtgaaaaatgagagaacgttgaatttcttcagatgctgagaacccatgatctgttggctgataccatacatttttttaatgargccagtttgagctgttaacataaaagacccaaaggtttatggaatatcaaatttcaacttatcccatatgctataatcagttgaaatgtaggtgtatgct

SEQ ID NO: 267415 - DNA, 201 bp, Homo sapiens
aaaagacccaaaggtttatggaatatcaaatttcaacttatcccatatgctataatcagttgaaatgtaggtgtatgctagtactgtgaataaaaaataatttttttttttttttttttagagagagagtctctctctgttgcccaggctggtgtgcagtggtgtgatcttggctcactgcaacctccgcctcctgagttc

SEQ ID NO: 267416 - DNA, 201 bp, Homo sapiens
ccataaagagagaattgttaaagcaaatttagcctaagctgcctccttgcgtattttaagtctggcctaaagttttccctgtacagagtaaactgtgtaawcaggctataacctcctcttgttccaatcacgaagatcaccaagttttggcctctgaaaggtgacaaattcttcaaagcagttcaaatagacaccaaggtg

SEQ ID NO: 267417 - DNA, 201 bp, Homo sapiens
ccttataaatacatggtagcatcattagctctcagatgattggaagcctgctcgttacatacgtgtttaatgtttcactggggggcctaagttctgttgcyctttaggacccttgaaaagcacttttccttatagtccttgctaagtccttatctagccagcttcttacttcagtgatacatgcctttctcacctccacca

SEQ ID NO: 267418 - DNA, 201 bp, Homo sapiens
tactttctcctcactgtcttagtctctcaaagagatctattaattatttttagtgctagggaagggaattgacctgaaaaagtactcctgataaaggtgcrtggtctacatccacataaaattgcctactcctccggtagttgacaccgtgataaacaaaatcaacacatctagagaatcttccattctacatactcagtc

SEQ ID NO: 267419 - DNA, 201 bp, Homo sapiens
attgactgtgtcaaaacccagcggagctgcattttcgtggaggacgagtcacttcacttacactaatgagaattattcttaagaaatgtgacttttttttwtatatactttaagttttagggtacatgtgcacattgtgcaggttagttacatacgtatacatgtgccatgctggtgtgctgcacccactaactcgtcatc

SEQ ID NO: 267420 - DNA, 201 bp, Homo sapiens
caaatcattctgcaacgcaagtagtgagcatagcaccgaatagttagtttttcaaccctccctcctccctcactcccctctctagtagtccccagtgtctsttgttgacatatttatgtccgtgtttacccattgcttaaccctcttggaagttatttttcttctgataaaatggagatgctaataccatcttacagggct

SEQ ID NO: 267421 - DNA, 201 bp, Homo sapiens
attacctccttctaggtgcctcccacaacacgtgggaattctgggagatacaattcaagttgagatttgggtggggacacagccaaaccatatcatctccmaagctataaaatgacttatttgaaattttaaaaggagaactccaaggaagtgttcaaatattcacgtacctaaactgaaacatgtgtttatatttttgaa

SEQ ID NO: 267422 - DNA, 201 bp, Homo sapiens
ttctgcaacgcaagtagtgagcatagcaccgaatagttagtttttcaaccctccctcctccctcactcccctctctagtagtccccagtgtctgttgttgmcatatttatgtccgtgtttacccattgcttaaccctcttggaagttatttttcttctgataaaatggagatgctaataccatcttacagggctgtcgtga

SEQ ID NO: 267423 - DNA, 201 bp, Homo sapiens
acatgctcatgtgaaattgctttctctaaccaagaaaatacagcaaaagtgatttgatttccctgaccgtgccaattatgttatctaagacttcccctgaygatattacttatgatggattcagtggagactggagcagaccctctccttgttgatttgatgaagtgaactgccaaggtgaggaagctcacatggcaagga

SEQ ID NO: 267424 - DNA, 201 bp, Homo sapiens
gtttttcaaccctccctcctccctcactcccctctctagtagtccccagtgtctgttgttgacatatttatgtccgtgtttacccattgcttaaccctctyggaagttatttttcttctgataaaatggagatgctaataccatcttacagggctgtcgtgaggatcgcatgtgtagcacgtgtgagtaaactcagcgccg

SEQ ID NO: 267425 - DNA, 201 bp, Homo sapiens
ttgtcaacattaaaccctcaaagttagaggtgaacctacattgtctagtataaccattcaagggatagaactgaaatacaaaatgccaaattgagagatgaaaaaaaaaagagagggggtgaaatataggaaaatgggacaacttaagtagtgcacacaaaaatggcacaagtaaaacctcatgtaacagaaatgaaaaga

SEQ ID NO: 267426 - DNA, 201 bp, Homo sapiens
tctgataaaatggagatgctaataccatcttacagggctgtcgtgaggatcgcatgtgtagcacgtgtgagtaaactcagcgccgtgaatggagcacagcrtgtaaatgagagtgtcccagagtctccagggacaagtttctgggatgtttacttctgcctctggcctggaggtttgcatgcaaatagaccattagaaata

SEQ ID NO: 267427 - DNA, 201 bp, Homo sapiens
gttttttctgagacagagtctcgctctgttgcccaggctggagtacaatggagcaatctcggctcaccacaacctctgcctcccgggttcaagcaattctyctgcctcagcctcccgagtagctgggactacaggcgccctccatcacacccagctaatttttgtatttttagtagagatggagtttcaccatgttggcca

SEQ ID NO: 267428 - DNA, 201 bp, Homo sapiens
cctgaactataataaataatgtaactattaaactcagtataataaatagagtgttttcatcttactcaacatgcaatctatttttcacactttccccctcttaggctcagtatatgccaactggaacgttagtttgaatgaaagttaatattcatggtctgcacctctgatttcatgttgttgagagatgttgactgaaac

SEQ ID NO: 267429 - DNA, 201 bp, Homo sapiens
ggctggataatttataaagaaaaagaagtttaatggactgacagttccacatggctggggaggcctcacaatcatggcagaaggggaaggaggagcaaagrcatatctttcatggtgacaggcaagagagcgtgtgcaggggaactgccctttatagaaccatcagatctcatgagacttattcactcccacgagaacagc

SEQ ID NO: 267430 - DNA, 201 bp, Homo sapiens
accagcctggcctggccaacatggtgaaatcccatctctactaaaaatacaaaattagccaggtgtggtggcacctgtatgtaatcccagctacttgggcrgttgaggtaggagaatcacttgaacctgggaggcagaggttgcagtgagccaagatcgcgccactgtactccagcctgggcaaaaacagcaaaactcttg

SEQ ID NO: 267431 - DNA, 201 bp, Homo sapiens
agtaccaaaagaggttaagtaaagtgatgtggatgtttacaggataaatcaatctctctcggtctccatttctctctgcctctctctccctgtctctgttwgtcttctctctctctctctttctctttctctcaatctctctctttgcagatgtcacttacaatttctggtgacacaagtttgtacatatgttcgttgtag

SEQ ID NO: 267432 - DNA, 201 bp, Homo sapiens
tgaagccctgggctcctcctttcggcatgtgttcatcaccccatgcccacaggtgctgcagctcaagataacatctcatcaccctggaatccaaacaggargaaaagcgtgaggcccaaagcctcttgttcttttgaatttctctctaggtatcaggaagtgatagactccccagaagcccccagcagtcttcccggtact

SEQ ID NO: 267433 - DNA, 201 bp, Homo sapiens
gagatgaatacacatacaaccaaggaggggagggttgtgtctctaatactctgggaaactgggggacattggcctcactgtgattggtggtgttaagtttstagacaaattctgaagagtgttttggcaggaatgatggaaatgttaaatggaacgatactttaacccggtggtagtcgcactttggggagtgtgtccaat

SEQ ID NO: 267434 - DNA, 201 bp, Homo sapiens
atatgtacacacatatatagtatggaatgcttaaaaatacgtttcttgatccctatatggaactacaaactctgtattagtatgttaaatctaggtgtcargttatccttaaaatacactaaagagttggcaaaaggctgattgacctaacttccagtgttatttattttattttatttattttttgagaaggagtcttgc

SEQ ID NO: 267435 - DNA, 201 bp, Homo sapiens
aggcaggcggatcacttgaggtcaagagttcgagaccagcctggccaacatggtaaaaccctgtttctactaaaaatacaaatttagctgggcctggtggygcacgcctataatgccaggtacttgggagactggggcaggagcatcgcttgaacccaggaaacagaggttgcagtgagctgagatcacgccactgcactc

SEQ ID NO: 267436 - DNA, 201 bp, Homo sapiens
tcagacagcagggaacattcaaaatataaaacatttctaatttgtacccccagaaagttgtatatcttacatgacattctctgggaagtcatgtcttaggratcttgggttctgtttactaacagattattcctagctggatgtcctgctaaggacttcagagacaaggcttcttccttccaacaatcctggttgacaagg

SEQ ID NO: 267437 - DNA, 201 bp, Homo sapiens
ttttaaggattttttaaaaaattcacaagcttctaaaaacatagtgtttcaatgccgtatgcacaatttcatattctggtcttctcactaaacttagtatycactaattctatcattataattttttatattattgagaagaatcatattcatagttagaatcagacacttaattccagatgctaggtatgattctagaca

SEQ ID NO: 267438 - DNA, 201 bp, Homo sapiens
tagaatgatctttttcatcttcattaaaatagagtctgcttacctttcaaaacaggtaatatatttacatgattcaaatttcaaaattttccactaggatktacagtgggacatttcccaccaacttctcttgcccaaacagccagttcctttatattaagaggcatctgatgctatcgttgctttcttcttttttagaca

SEQ ID NO: 267439 - DNA, 201 bp, Homo sapiens
ttcattttgaattttattttgacatttgtagaaataatgacagtgtcagcatgtttttgtctcttcatctttttccttcattccttttgctacatcggacytctggtatcaggcctgcctataccccaaagcctaggtccagaccagcacaggaaataggctattttcagtagccttatctctgctttggtttctgatcac

SEQ ID NO: 267440 - DNA, 201 bp, Homo sapiens
tgtagatcaaatcagcattcagtttcttccctgccattgtcacttgacattatttctataattaaactaacattaacacttcctattctttcttgaaattkctaaagaaattacatttggctaagtaatacctccagaaaagaattattttgcattttgatgtctttggaacagctagatcatttgtttaatctgcttctt

SEQ ID NO: 267441 - DNA, 201 bp, Homo sapiens
ttcacgtttcaagtgctcagttgtcataggtggctagtggctgtcatgctgtacagcacagatgtgtaacctttccttcactaaaagtgttgctgcaaagytttgcttagattcttcactttcttgaggacagagactgggttttcttcacctgggatttccagcttccctcgttgcattgggcaacattattcgtagcca

SEQ ID NO: 267442 - DNA, 201 bp, Homo sapiens
caggtggagccgaacatcccacggagcttaggaaaccctctcatgaggaagaattgcctgccttcagtgcactgagtccatttttgtgctcatgttaatgktctatcttgggctgtgattttctttgggtctctcagcaaaactgtctgaggcatcacatgatgttatttgccatctaaaaggacttcaccgaacctttga

SEQ ID NO: 267443 - DNA, 201 bp, Homo sapiens
ttggctaattcaaataatgaactcatacgacccacgtgggctgaaatgctctctctggcattgttgtgggcaggcgctgtgccggttacttctttgtcagktgtgcactttggcaattagtatgtaattttgccaaatatagatcaaattaaaatgcatttggtctctgagatttcagtcatttatttcttgtttataagc

SEQ ID NO: 267444 - DNA, 201 bp, Homo sapiens
tcaaccctgatccctggccagaatctcctctgttctcaactcttttcatcttgtcccccaccattttcctgatacatctttttgatcagcccacctgattkctcttctgttccaagcatacttgcatgtctgtgattccttcctgcttagaaacaacatttctttccagtgaccaaacatcaatcctcccgtttctttaaa

SEQ ID NO: 267445 - DNA, 201 bp, Homo sapiens
ctgaactataataaataatgtaactattaaactcagtataataaatagagtgttttcatcttactcaacatgcaatctatttttcacactttccccctcttaggctcagtatatgccaactggaacgttagtttgaatgaaagttaatattcatggtctgcacctctgatttcatgttgttgagagatgttgactgaaaca

SEQ ID NO: 267446 - DNA, 201 bp, Homo sapiens
ataaataataatcgctaagttttatcgaatggttattatataccagataacaccttaattgtgttattttatttggtcctcacagcaaccagtggagtagrtaatgttattctcatgtttataaatgaggaaactgagtccagagaaatgaaataacttgtatttagggtcaccccagtagaaagtgagaaagccgggttt

SEQ ID NO: 267447 - DNA, 201 bp, Homo sapiens
ccgtctttataacattatctgtgtatgtgcgtgtgtgtgtataaaggcagcatatatacttttctatatcttcatctgtgtatcttagcacatacattcawatattgatatctgtatctatcatttatctatatctgtatataggtatatatccaagttgactgtgtatgtatagtaatagacaatcagaattcctgaatg

SEQ ID NO: 267448 - DNA, 201 bp, Homo sapiens
aaccccaccattttgggaggccaaggcagtagtattgtttgagcccaggagtttgagaccagcctaggcaacattatgagaccccatctctatgaaaaataaaaaaaaaaaattagctgggtacatgcctgtaatctcagctatttgggaggctgaggtgggaggattgctttagccccggaggtggagtttgcagtgggc

SEQ ID NO: 267449 - DNA, 201 bp, Homo sapiens
catcccagaattcagctgaaataatacttaggaagagtcctgtgtgtgttggcagtcagaactcgcaaagctgcatgagggcggctgtgagtcaccaagaractctgatgattagcaacacctggtcaccacactgctttctaaagaagacagttcctattacctgcagggtgctgctttgttgcctgaggatttgggtcg

SEQ ID NO: 267450 - DNA, 201 bp, Homo sapiens
gaggcacaagaatcgcttgaacctgagaggcagaggtggcagtgagccaagaccgtgccattgcactccagcctggacaacaagaaagaaactccatttcaaaaaaaaaaaaaaaagtggttctaatttccctccccacagacctaggtcagacttagtgacttgtttctaagaacagaaaacagtagaacttatgctgtt

SEQ ID NO: 267451 - DNA, 201 bp, Homo sapiens
ctaatctgtccccaggaagcatcccgcctctcctgggagcaaatgttgaacaaatggattgaaaggataccaaataattatcttgccctaagcatgaatcrcttcgccttcccacgatggccttctgtcttcgtctggctttgacttgggtcaggatgtttgataaccagtgatggccattgggctaatagcagtagcatt

SEQ ID NO: 267452 - DNA, 201 bp, Homo sapiens
tagttgtctgcattgaggtattgctttggcctaaatcctttgcctttctttcctagatgttctatacattcagtgagaagtcagcctgtgtttgcataagyatttctgtcactgccaacccagctctgatgacagagtgtgagcttctgtgctgctggtacctttgggattcgtgctgactcgtgacaagccacagaaaga

SEQ ID NO: 267453 - DNA, 201 bp, Homo sapiens
ccctttgtgaatggcttggtgcctcctcaaggtaatgagtgaattctcacttgatgagttcttgcaagaactgattgttaaaaagagcctagcctctctctatatatatatatatctctctctggcctgggcccctttcctctctttctctctgtctgtctttctcttcctgccatgtggtctctatatgtagactcccct

SEQ ID NO: 267454 - DNA, 201 bp, Homo sapiens
cctttgtgaatggcttggtgcctcctcaaggtaatgagtgaattctcacttgatgagttcttgcaagaactgattgttaaaaagagcctagcctctctctatatatatatatatctctctctggcctgggcccctttcctctctttctctctgtctgtctttctcttcctgccatgtggtctctatatgtagactcccctt

SEQ ID NO: 267455 - DNA, 201 bp, Homo sapiens
ggttgttttcagcaagctctgaggtgctaaatatataaagtaactaatatagtacctgacatgtagtagacactctctctctctctctctctctctctctmtatatatatatatatatatatatgtatgtgtacacacacacacacacacaattgaatgaccctgtgagcgaggccaattttgtgtatagcttttaaaaat

SEQ ID NO: 267456 - DNA, 201 bp, Homo sapiens
acaggatagatgcccagagggaccacaaacatggttactttatgaggatggtgcaaaacatcaacttagggtgttctgtgattataacattgaaacatgtsaagattaatatcatggttaaacatacagaggaggatatccaaaaacataggaatcataagatgaattcctatgaagtatggagactaaaaatacagtcaa

SEQ ID NO: 267457 - DNA, 201 bp, Homo sapiens
gaatgccatttgtggggggaaaaaaaagcaaagcagataagtacatattaagatgcctttagggagctccactttccctactaaaagcatttttctaagtwatatagcttcagaacatcttgactgaaatagctttagaatatttacagcaaaagcatctcttttaggaaagttgaggtggctgaaagtgaatgtgtctta

SEQ ID NO: 267458 - DNA, 201 bp, Homo sapiens
cttacaatcatggtggaaggggaagcaaacacgtccttcatcacatgatggcagcaaggagaactgccgagcaaaaggggaaaaagtccctgataaaaccrtcagctcccctgagaactcattcacatcatgagaacagcaggcatgggggtaactggcctcaggattcaactacctcccaccgggtccctcccgtaacac

SEQ ID NO: 267459 - DNA, 201 bp, Homo sapiens
ggttttatatgatagtttaattatgttttcttatcaattaagtacattatatatatatttgatgtatatagatgttatatattatatatattatatatatataatatatatacacatatatattttatatatatatatatatatgtttttgtttttttttttttgagacagagtctcgttctgtcacccaggctggagtgc

SEQ ID NO: 267460 - DNA, 201 bp, Homo sapiens
ctattctcctgtctcagcctcccaagtagctgggattatgtaccaccacacccagctaattttgtattttttatagaggcggggtttctccatgttggtcrggctggtctcgaactcccgacctcaggtgatccacccacctcggcctcccaaagtgctgggattacaggcatgacccatcgtgcctggccgggaataaac

SEQ ID NO: 267461 - DNA, 201 bp, Homo sapiens
tatgatagtttaattatgttttcttatcaattaagtacattatatatatatttgatgtatatagatgttatatattatatatattatatatatataatatmtatacacatatatattttatatatatatatatatatgtttttgtttttttttttttgagacagagtctcgttctgtcacccaggctggagtgcagtggta

SEQ ID NO: 267462 - DNA, 201 bp, Homo sapiens
aagagcagtcagtttgctcagtgttgcctcagagaagcagtcctggggggagtcgaccattgggtcagtaggaggaagaaccctcagaggggctggaggtrtccatcagtggttagggcactcggcggagcagtgagccccccgctacagaagcccaagcccaaccgagatgaccctctaccctctgttgggggtttgcgc

SEQ ID NO: 267463 - DNA, 201 bp, Homo sapiens
tctatatcttcatctgtgtatcttagcacatacattcatatattgatatctgtatctatcatttatctatatctgtatataggtatatatccaagttgacygtgtatgtatagtaatagacaatcagaattcctgaatgactcatttatcatttttgactccctgtaacttgtaaatttctttcttttccgaagaggacat

SEQ ID NO: 267464 - DNA, 201 bp, Homo sapiens
agcctggtgcaacacagggagaccccttttctacaaaaaatttaaaaattaggtcagtgtgttggggcatatctacagtctcagctacttgggaagctgargtgggaggattgcttgagcttgggaggctgaggttgcagtgagccatgattgtgccatttcactccagcctgagtgactgagtgagaccctgtcttaaaa

SEQ ID NO: 267465 - DNA, 201 bp, Homo sapiens
taatcatcttatgcttaatagaatgcaagttatacaggtaaagtcagtcagagaggggatggggatgctatttgagatgaagttcctagaagtaataagattttttttgtcttaaaacagtgatgataggatgattaagtgatctaagatggacaaatatgtgtgagttcttaataattgggaaagatcttttttaaaaag

SEQ ID NO: 267466 - DNA, 201 bp, Homo sapiens
aaaccctgagagcaacaaaattcaaagctgagaaaagtggggattgcttgtatgtctacacacctaaaagggaaattgaaggttatttttacccatcatcrtcagaagagttcaatttccgtaataaattgcgttgaagtgaataccttgactacaggaagtcatcagggatttttcctctttggaaatttaatctgtgat

SEQ ID NO: 267467 - DNA, 201 bp, Homo sapiens
ggtggcatgtgcattgcatcagagaccttctgtgctccttccagtcactctgcatctgtgagtgcctgccaagggtgtacataggtctgtgtgcaggtctaaaaaaaaaatccatctcatggaaattgaggaagttaaatttgagatggtatcttgaactacatagcaggtatactgctgagtatatagctgaaattttgg

SEQ ID NO: 267468 - DNA, 201 bp, Homo sapiens
ttgtaaacacacttgaacctgcaattgtctaaaaaagaatgtcaatttttgtcttgtcagaaagtataaaaggaggctttattataacttttctttccctytcaatttctacccatccttgaactttttgtcttgtatctgagaacttcctaatttcctgactgctggcccatctcagaattctactgcccaaagctcttt

SEQ ID NO: 267469 - DNA, 201 bp, Homo sapiens
ctgttgtttgtaatggattgctgctaatttaagggtacataaagcattataattatttgattttttttgctaaataatgtttttcacaagcactttctatrtttgtgttttagtaaaataatcagtgtaaattaattatcctgtaactctgggcagtttatgtctcttacacttttcaccttatagaaaagatttcttacc

SEQ ID NO: 267470 - DNA, 201 bp, Homo sapiens
tccagttattgtggactaaactgccaacagttacagtaaagccaacaatgtaatcagtggctcacacacaaccgcagcataattcttgcctggggtgggcrtttcaggtgggtggtggttatcttctgaggggcatttgtatcttttgcctttattatcccactgggccttgtccatatctccatggtcaagcttaatccc

SEQ ID NO: 267471 - DNA, 201 bp, Homo sapiens
tcacatacaaaggcactactaaaccatgtagaaccacatgtaccacagactaaagcttttggagttacaaattgaatgtggtatttcacgtagcacttgargtaatatcagcttctgatttacatttctaacagaagtcctaggagttttagcttttattcttctaccgcaatcactagaaatcacgctgtttttagcaac

SEQ ID NO: 267472 - DNA, 201 bp, Homo sapiens
tattttattttatgttattatttcatgcctccctgattagatcagaaactcttttaagggaagaaccagatctaatgtaacttctatattataggtaatgkcttcatagtcctgtaagttttaaaatcagagctcagcattaaaaatctgagctctagagtaaaactgcctacgttccaatcctgctccattgcttacagc

SEQ ID NO: 267473 - DNA, 201 bp, Homo sapiens
tagtttaattatgttttcttatcaattaagtacattatatatatatttgatgtatatagatgttatatattatatatattatatatatataatatatatayacatatatattttatatatatatatatatatgtttttgtttttttttttttgagacagagtctcgttctgtcacccaggctggagtgcagtggtatgatc

SEQ ID NO: 267474 - DNA, 201 bp, Homo sapiens
cccgacctcaggtgatccacccacctcggcctcccaaagtgctgggattacaggcatgacccatcgtgcctggccgggaataaacatttttataaacaccrctttataggtatgatcaaagaaacatttctattaacacacctttacagggaatgcagtggaaagaaatcaggcaagtttctattggggtgatttttattt

SEQ ID NO: 267475 - DNA, 201 bp, Homo sapiens
tgattcgggatcagcaaaaaggagaaagaaaaaaaaaagacgtgtctccttcactcacctgataaatcttttatatttactgacatttttgaataagtacrttgtgcccatcactaaatgtataatatttctttcattgtgcatgcatgggttgtagaagcatcctcaaagctgagaaaaacgtatgcagcgatgtcccaa

SEQ ID NO: 267476 - DNA, 201 bp, Homo sapiens
agtttaattatgttttcttatcaattaagtacattatatatatatttgatgtatatagatgttatatattatatatattatatatatataatatatatacwcatatatattttatatatatatatatatatgtttttgtttttttttttttgagacagagtctcgttctgtcacccaggctggagtgcagtggtatgatct

SEQ ID NO: 267477 - DNA, 201 bp, Homo sapiens
ctattaacacacctttacagggaatgcagtggaaagaaatcaggcaagtttctattggggtgatttttattttcttttctgtgtttatttttgaaaatttraagaaatgtccaccatgactattttttaataagcaaaagacaattaatacattttaaaagaataatagttcttattatgccacatataataataaatccc

SEQ ID NO: 267478 - DNA, 201 bp, Homo sapiens
cctaccttataaaacaggaatcgctgtttatcttttctcttcctactagtgaagcagcatcgtagtctagggtaaatccccagggttccttatctcacgcyaagaaaattaagtacacagacacgtgggtgggttaaggagtggaaagtttaacaggcggaagaaaggagagaggagggcagctccttgcaagagagagag

SEQ ID NO: 267479 - DNA, 201 bp, Homo sapiens
attctttagaacaaggtgatttttaatttacaaaaaaattattataacctgtcaaattggcattataaaactgcatttgtgggaaaagggccgttgccatratattggtgacaatataaattgccattaaagcttttttgcagtacccatggcaagtacccatcaatattttgtgtgtacaaatctttgggcagtaatttt

SEQ ID NO: 267480 - DNA, 201 bp, Homo sapiens
ctggacacgtggctggcaaaaagagaagatggagccgccattttgaacatggctagtcccaggtagtatattcctacgggcacaactgccagcatgtaccygtgcaagcttccagcatgcttgtttgtgtctgcaggtcgattttacaggctgctctttgttggaaaagaaaatgatttgggggctgcttttcattaagaa

SEQ ID NO: 267481 - DNA, 201 bp, Homo sapiens
gtttaattatgttttcttatcaattaagtacattatatatatatttgatgtatatagatgttatatattatatatattatatatatataatatatatacayatatatattttatatatatatatatatatgtttttgtttttttttttttgagacagagtctcgttctgtcacccaggctggagtgcagtggtatgatctc

SEQ ID NO: 267482 - DNA, 201 bp, Homo sapiens
tagccaaagaaaatcccacactacatattggcaaaaaaaaaaaaaaaaaagagagagagagagagggagaagagagatttctattctaaaaaatgccttarggcttgtagtttcttataacttctgtgactacctatggcatataagtattagattgtattctacaaattgacagcccaggatcatattcctggttgcttt

SEQ ID NO: 267483 - DNA, 201 bp, Homo sapiens
catggctagtcccaggtagtatattcctacgggcacaactgccagcatgtacctgtgcaagcttccagcatgcttgtttgtgtctgcaggtcgattttacrggctgctctttgttggaaaagaaaatgatttgggggctgcttttcattaagaagaaaaccttactgaggacttccataccctcactgcccaagtaatttc

SEQ ID NO: 267484 - DNA, 201 bp, Homo sapiens
cattatatatatatttgatgtatatagatgttatatattatatatattatatatatataatatatatacacatatatattttatatatatatatatatatrtttttgtttttttttttttgagacagagtctcgttctgtcacccaggctggagtgcagtggtatgatctcgactcactgcaacttccacctcccggattc

SEQ ID NO: 267485 - DNA, 201 bp, Homo sapiens
gggtttgattttacccctcttacaaatcagtgagcctgctactgtatcaggctgctggtggaagacgtgagtcttggggccaaaggcaaagggctttattwcacagtgctcagcagtgcagcagcttgtgtgcagggaatgaagcaattggctcagagggaacttactcatgggtggatttgcatcacagccggtgaatac

SEQ ID NO: 267486 - DNA, 201 bp, Homo sapiens
gagtgcagtggtatgatctcgactcactgcaacttccacctcccggattcaagcaattctcctgcctcagcctcctgagtagctgggattacaggtgcgcrccaccatgcccggctaatttttgtattttttgtagagatgaggtttcaccatgttggccaggctgatctcgaagtcctgacttcacagtctgcccgcctt

SEQ ID NO: 267487 - DNA, 201 bp, Homo sapiens
caggctgctggtggaagacgtgagtcttggggccaaaggcaaagggctttattacacagtgctcagcagtgcagcagcttgtgtgcagggaatgaagcaaytggctcagagggaacttactcatgggtggatttgcatcacagccggtgaatactgagctgggactactgttatagcaagccgcatgcaagccttttgtct

SEQ ID NO: 267488 - DNA, 201 bp, Homo sapiens
tggagaaaatatctgaattaattagatacaaaagcccatactgttgagcctctgatgagaaaaactatatttgtcgtgaagaatgatcgcatgaaatgttmaaccatggtttttcaaacattcttgaaatatttagttatagttacaatggttaaaattttcagtgttacattgaatgtggtgattttctatcatttagtc

SEQ ID NO: 267489 - DNA, 201 bp, Homo sapiens
agtacaaccattcaatagagtactatgcagctgggaaaaaggcatgagaaagacctctacacactgaggtggagtaatttaaggactaccttgctgagtgaaaaaaaaaatacgaaaggtgatctgtattgtgttatcttatttgcaggagtgaaggggactgagtggagtggagtaaggagctcccctcagctgggagag

SEQ ID NO: 267490 - DNA, 201 bp, Homo sapiens
tttcccattcatttatccattcagttattcatggttcatttgtttacttgtatatataattttttaactgtatatatagataatgaagccatacaatgtgcctggcgctcttctaagttctagagtacagttgtaaaaaggagggggccactggacttatggagcttatattctggggttcattgggggcagtatgtcaag

SEQ ID NO: 267491 - DNA, 201 bp, Homo sapiens
cagacaaattgtacatacagaaaagttgcacaaagattttccctatttctcccccaacacacacatacactttcctctgttattaacacatcttgcatttrtgtgttacatttgttaaattggtgaagcaatattgatacgttattattaactacagtccatagcttccattaagcttcattctttgtgttgtacattctg

SEQ ID NO: 267492 - DNA, 201 bp, Homo sapiens
ggagaatacaaaagaattgaccaaaaaaatcccccaaacactggaactagttagtaattatagcaaggttgcaggatacaggtttaatgtgcaaacgtcarttgcttccctctgtaccagcaatgtacaagtggaatttcggattaagaacgcaataacatattagctcctctaaaaatattattagctcctctaaaaatg

SEQ ID NO: 267493 - DNA, 201 bp, Homo sapiens
agaagatatttaattacagaaatctacatttaagggagataataaaggtcacgttggtggttttggccttgtctctgaatgtggcaggtgtaaagtgcccrcagtgccctcacacagaatgtctgagatagccctgtatactggaggaccaacaagactcctgtataagtactccctgtatcaacctatagatggatctgc

SEQ ID NO: 267494 - DNA, 201 bp, Homo sapiens
catagtcctcactgttaaagtgcagaactataagactccgagaaagtaacactggaaaaaacatagatgaccttaggtatagtaataactttttagatacrataccaagtgcataatccatgaaagaaataattgataagctggattttattacaatacaaaacctcagctctttgaaaagcagctgtcaagagaatgaaa

SEQ ID NO: 267495 - DNA, 201 bp, Homo sapiens
agacagaatccaaatgtactttcttcccatttataaaccttcaaagactatccttaactaatatgcaactctctcacatacaataacagcaagatgagtcrtgtctttcaaaactgacatgcatttcctagcctgatccagataccatttttatggatgatcaatctgtagataaatgccctaacctgagtgaatccctaa

SEQ ID NO: 267496 - DNA, 201 bp, Homo sapiens
gccctctgaggcctttgggtcacagtcagccccacctggatgctgccacagggcctacacatgatttgctcctgctggggctaaagcagctgaccatttcytgcactcacttccctacacgttccttcccgcaaggggtgcgccacagcaggcccaagtgagtaattggagtttgttcctgctggtgccgaaggagcaggc

SEQ ID NO: 267497 - DNA, 201 bp, Homo sapiens
tttccaaactacttatggctcgcctcacccccatcctgtgcctataaagaccccaggctcagctggtagagaggggaaatggctggacattggggagaggygaattggcttctgagccactgctgaatgtcatagagaggcaacctggcctcggaggagaaaggaagagagacaacctgacttcgggggacagtgaccttc

SEQ ID NO: 267498 - DNA, 201 bp, Homo sapiens
tctggaagagatagagtatggagtaaactcctgagtagggagctgggtccagactcagacacacacactcacacacacacactacatacatacacccacaytcatacacacacagccatatacacactcctgcttcacaaactagatccagaaataaatttaccattttaccaatgaaaaagttatttttttgcttaagtg

SEQ ID NO: 267499 - DNA, 201 bp, Homo sapiens
gttttgattatgatggcatagcaaaaatatatatacagtacatagggatgtaaatattaaaatatttagtctaaccaaggaaacatgagatgtgggtgagrgcatatatttatgactcattttcctcatttccactattccttccctgaattttgtctgtttggaagaaatcaaatggttttaaagaagcaagttgccctg

SEQ ID NO: 267500 - DNA, 201 bp, Homo sapiens
tgtgagatcataagtaagccatttcacctttcctgtgccactgtttcccgttcctctacaaaaggaggcctcttccatctctaagactcggagctttcttrcatgctggtattgacattaccagagcagatgggctaatgtgtgactcgcctcactaagcctgtgaacttggtgcttactgcggccccaggtgaggcagct

SEQ ID NO: 267501 - DNA, 201 bp, Homo sapiens
ttgtataaggtgtaaggaagggatccagtttcagctttctacatatggctagccagttttcccagcaccatttattaaatagggaatcctttccccattgyttgtttttctcaggtttgtcaaagatcagatagttgtagatatgcggcattatttctgagggctctgttctgttccattgatctatatctctgttttggt

SEQ ID NO: 267502 - DNA, 201 bp, Homo sapiens
ctatagatggatctgctgggcacttgtatgcagaatcttcatttcttttgatgagttgatctttgctcttaataatttacatttgagtttttgtcaaatasatcagttaaggtaaacctaattaatcctttaccttgtaaacaaattctgcttcacaggagacttccgaagacagagacattgttcctgacttggtttcct

SEQ ID NO: 267503 - DNA, 201 bp, Homo sapiens
aaggcatccacttccagcaatcactcatcaaatcagatattcgaagatgagactcttgcctttcaataccctaaatttcactggaacaggaaggcatgcgstgactagggagaggaacgcagcgtagagtctgtggttgtggctcgtatatctcatagacataagacagctgttttaagtagcagactcctaaattaagat

SEQ ID NO: 267504 - DNA, 201 bp, Homo sapiens
aaaaacctttcatatgatattttaagagtctccaaataaggataactgcataaataaactagtaatttatttgcttagttcaaaaatataaaagctaataygtcaacttattcaattaatggtttgctgatggttgatagacacagtaaagacaaataatacaaagagtaaaacatctgaggatagcactgtccagaggaa

SEQ ID NO: 267505 - DNA, 201 bp, Homo sapiens
caatgggagttctccaagttcctgtcttatttcccattttcgctggggtgctggtggatattattgagggcttcaagactgctcacctctccaaaagggtkaaggcatcacctttccttcatggaaggggtggaggaacagctcctggagtgtatgagaggccacattgcgttcccacagctgtgcacccactacagctat

SEQ ID NO: 267506 - DNA, 201 bp, Homo sapiens
tagccagttttcccagcaccatttattaaatagggaatcctttccccattgcttgtttttctcaggtttgtcaaagatcagatagttgtagatatgcggcrttatttctgagggctctgttctgttccattgatctatatctctgttttggtaccagtaccatgctgttttggttactgtagccttgtagtatagtttgaa

SEQ ID NO: 267507 - DNA, 201 bp, Homo sapiens
tgatattttaagagtctccaaataaggataactgcataaataaactagtaatttatttgcttagttcaaaaatataaaagctaatacgtcaacttattcarttaatggtttgctgatggttgatagacacagtaaagacaaataatacaaagagtaaaacatctgaggatagcactgtccagaggaagattcctcagtata

SEQ ID NO: 267508 - DNA, 201 bp, Homo sapiens
aagtattttgaaggaagaaaagatttctatcttttctatcttttcaatctcagattaggggaatttattcaagttaactctaagtctctggggactaagtrgggggaaagaaatgtttaaaagcagtgctgtgttaaaggaggcagtaatgcctgtggccttggggtaaactgagctgacctagagaaacggtgtctgtga

SEQ ID NO: 267509 - DNA, 201 bp, Homo sapiens
ccatgctgttttggttactgtagccttgtagtatagtttgaagtcaggtagtgtgatgcctccagctttgttcttttggcttaggattgacttggcaatgygggctcttttttggttccatatgaactttaaagtagttttttccaattctgtgaagaaagtcattggtagcttgatggggatggcattgaatctgtaaat

SEQ ID NO: 267510 - DNA, 201 bp, Homo sapiens
acggtgtctgtgaaggtccatcagtctcccgcaagggttcttcagacagctgattcagtggcactgtcagaaaagagactccagccctgtagaggccagtstaataaagaagactggagagccggagaatgttctgattagcaatagcttggcctgactaggaatattagagcatcacggaaagaggaaactctcattcta

SEQ ID NO: 267511 - DNA, 201 bp, Homo sapiens
cagtggctcttgcctgttttcccagcactttgaaaggctgaggtgggtggatcacttgaggtcaggaactcgagaccagcctggccaacatggtaaaactycatctctactaaaaatacaaaaaattagccaggcatggtggcacacacctatgatcccagctattcaggaggctgagacatgagatttgcttgaaactgg

SEQ ID NO: 267512 - DNA, 201 bp, Homo sapiens
aattcactgaaaggtttttacaaaatcagtctcttcaacaaattctattcaggttattatctcttttttattgactgactatgtctttcaaagaatttgtscatttcatccaagtagtcaaatttactggtataaaattgtccataatctgtctttatatttttaatatctgcacaatctgtagtgatgtaacctttgcct

SEQ ID NO: 267513 - DNA, 201 bp, Homo sapiens
cggaaagaggaaactctcattctagtagtaaaaggaagtgcaagggaagaagatgcagtgcgtgtcctctttgcctccccaccttttagattttacaaggygctactacccatgggcagatgttcctcactccacccctcaggcagagagaggccacagcacttggtagcagaaggcatcttgctgtgaattagaaggcac

SEQ ID NO: 267514 - DNA, 201 bp, Homo sapiens
agcccagggattctatataaactccaattacctaccccttctttgagccttatattttgagggactctcatgcatatgtatgtaataaatttgtatgtatkttatcgtgttgatctgtctactgtcagtttatttcatagactacattatcgaaccttcagaggataaagaaagtcttttctgtcccctacagtgcttagc

SEQ ID NO: 267515 - DNA, 201 bp, Homo sapiens
tctgcttctgccttccctttcattttcattctttactcactgctaagatttggatgtcttttgcgtttgtctccagccgtctttccaattcccaagatacrcatgaagcacagtggttcagagccctgcctttgaagccagactgtgtgtacagaacctggctctgccatcttttgcctctgtccttctagataataagag

SEQ ID NO: 267516 - DNA, 201 bp, Homo sapiens
ggaataatacatgttttgaaagcaaaaaacagtcagattcaactatgttaactatattataaactaaccactctcacattcttttcttttttctctctcatttttttttttttgagatggagtttcactcttgttgcccagttcagaggtcaatggcatgatctcagctcactgcaacctccacctcctgggtgcaagcaa

SEQ ID NO: 267517 - DNA, 201 bp, Homo sapiens
gaataatacatgttttgaaagcaaaaaacagtcagattcaactatgttaactatattataaactaaccactctcacattcttttcttttttctctctcatttttttttttttgagatggagtttcactcttgttgcccagttcagaggtcaatggcatgatctcagctcactgcaacctccacctcctgggtgcaagcaat

SEQ ID NO: 267518 - DNA, 201 bp, Homo sapiens
aggaggatcgcttgaacgcaggaggtggaggttgcagttagccaacattgtgccactgcacttcagcctgatgacagagtgagactctggctcaaaaaaamaaacaaacaaacaaacaaaaaaaaaacaacaagaacaacaaaaaaataaaaacagacatggatttgcatctgcagttgattgcttgccatataaacttga

SEQ ID NO: 267519 - DNA, 201 bp, Homo sapiens
tacatactatccacatattacatttcatgtctaaaagatacttactcgtgcatttataaaaaatgaattagataaagttaaaataaatgacaaataatatmattgttctcttctaacccagtgcttggcacagagtgtattgatagcatttgatgaatgacatgaaatagaattttgtggtttgttaattttttttgtctt

SEQ ID NO: 267520 - DNA, 201 bp, Homo sapiens
cagagcgagcatcactggggagccatgaccaccccaggcctgtaaaggcagggggaggaagagtcccatgaaccccatgagctgcagccatggagaagggrcctcatgacaggaggtgtcatcacggagcatccagcgttgcctggaagtagccccacacaggaagggagtgagcatggacatcttgcctcctgcctcctg

SEQ ID NO: 267521 - DNA, 201 bp, Homo sapiens
gacacaagggatcctaggggcacagcccatgggagccagccttccagatgcaaagcagagaggggaaagaatacagaattaccagcaccttctctatgagygaatttaccaatcttcccaagtttccttatttcaaccatagctgcttttggatgtgggaaggcacgaaccaaacaagctatttcttcaaatttcatgacc

SEQ ID NO: 267522 - DNA, 201 bp, Homo sapiens
aataatttgcttgggatatgcacttgtatcgtgcttgattacaaagcactttcacgtacaccatcttattctgaggcttatctcaagtttttgtgatagaytttgtccataggcaagggagagggagggagagtggccacccaggggcatagagttgacaagccccagaccattattttacccaggtctttgggagctgca

SEQ ID NO: 267523 - DNA, 201 bp, Homo sapiens
atttagagtttttttttaaaaagcaagaatatatttttcttgcatacaggctagtgttaggaggtggaaatttaaagggcttccgtttattttgtcttgcmtagcatcaaagatagataagtaagtttgaacatgcaaacgtgaagttacctcttactttgaccttcctcaaacataggtatacaacatctgtcatctaat

SEQ ID NO: 267524 - DNA, 201 bp, Homo sapiens
cttccccagggcaaccactgtatctttaatgcactcttctgtgcagttgagtttctgcataatttccatggaactttaacacaatgggatttctatcctarttttatgctttgctttcggtaatttgtcagacctgcaacaatggatgagcaacaaattcttggaaatgaaaaatatgtaattccatatagtgcaaaatga

SEQ ID NO: 267525 - DNA, 201 bp, Homo sapiens
aagactcataagcatggccttccatcaactgtgcacctgcctacagcaagaacaggcaaaccacagacaatctctactggtgaggctgtttcttggaaacrcaagtttcctcaagctattcctcctccccaccctcaattaatacacttcctccctttagaaagaaattagatcagcttaggtgatttttctctttcacct

SEQ ID NO: 267526 - DNA, 201 bp, Homo sapiens
ctcctaataagctccccttcatatatacatcaatcctattagttctgtcccttcagggaaccctgactaacacatcaagtaatgttacttttggacgattrgatacaattccattattcagtggcctattcagtggcctttgactgtcattggtatccaatattgctgtgttagttgttttgattatgatggcatagcaaa

SEQ ID NO: 267527 - DNA, 201 bp, Homo sapiens
aaatgggccctttatgcaggcctgccagaggtatttaaaggtgagcaggattcagaggggaaccttgaacagcaccatccacacaaacctcctctctcctscctacttccccagcttggaaaggcagaccccctccctacttggtattaaacattccacttttttcactaacagtgcaatctccctcaattagcctatact

SEQ ID NO: 267528 - DNA, 201 bp, Homo sapiens
ctgaagtctcgaggagtttatcatttacttgcatctggacacgagtgcagttttcccagagttccatgctcaggcatttctgtggacagagggagattctsttgtgctcagccttcctctccctgacattggtgtggagggctgctctctgagtgagagctgctttctatttgactcaattcagtcagtgttcaccaggtg

SEQ ID NO: 267529 - DNA, 201 bp, Homo sapiens
attcagtcagtgttcaccaggtgactcttctgtgcaaggcagctgccaggggctgctagaggtggatgggatgcatagccaagtatcaaggcacaccgccrgccctctgcagcaggcaggaggatgtgtggaaacttgcaatgggcccctggacaggagccgtggttcacctcactagggggctgggtgagcggaggctgg

SEQ ID NO: 267530 - DNA, 201 bp, Homo sapiens
agtggacttaatggattatttggtaattgtgtgtttaactttttgaggtgcttgagcctattccaattagatccaagacaagtttttaagaaatgctctcrtgagtccccatgttaactccaaaggcttaggggcagaaagatgctttgaaaaatcaacagatttcagccctgccacttgggacttatgtgaccttgatca

SEQ ID NO: 267531 - DNA, 201 bp, Homo sapiens
ggaggatgtgtggaaacttgcaatgggcccctggacaggagccgtggttcacctcactagggggctgggtgagcggaggctgggcttgtgctgctaggggraggccgtggcattaacattgaaccaataatgctctttgccagaaggtggtggaacccagcaagggcagatgtgagtctcggttcacctctcacccagagc

SEQ ID NO: 267532 - DNA, 201 bp, Homo sapiens
gtcttttaaaaaggagaagcaaaatttagagggattttctctaaaggctgaatttatttgcctctgctagaagattcccagggtttgccactacttgcccttgttgtaccacttcagagctcatttgaatgtcttatagagaaagacagttatatctctcgtaggcttgttggacttagattcagtttcaaagaactctcc

SEQ ID NO: 267533 - DNA, 201 bp, Homo sapiens
ctcactagggggctgggtgagcggaggctgggcttgtgctgctagggggaggccgtggcattaacattgaaccaataatgctctttgccagaaggtggtgsaacccagcaagggcagatgtgagtctcggttcacctctcacccagagccctgggattgcacagccaggggcagcgcccagtgccacagcagcctgcactt

SEQ ID NO: 267534 - DNA, 201 bp, Homo sapiens
tcttttaaaaaggagaagcaaaatttagagggattttctctaaaggctgaatttatttgcctctgctagaagattcccagggtttgccactacttgcccttgttgtaccacttcagagctcatttgaatgtcttatagagaaagacagttatatctctcgtaggcttgttggacttagattcagtttcaaagaactctcct

SEQ ID NO: 267535 - DNA, 201 bp, Homo sapiens
cttttaaaaaggagaagcaaaatttagagggattttctctaaaggctgaatttatttgcctctgctagaagattcccagggtttgccactacttgcccttgttgtaccacttcagagctcatttgaatgtcttatagagaaagacagttatatctctcgtaggcttgttggacttagattcagtttcaaagaactctccta

SEQ ID NO: 267536 - DNA, 201 bp, Homo sapiens
cggtgtttcaccatgttgaccaggctggtcacgaactcctgacctcaggtgatctgtccgcctcggcctcccaaagtgctgggattacaggcatgagctaycatgcctggcccatcgtttcttatacttttgatgctttctttgatttttcgcacttgaatttttattttattgggatttactttgtttttaaggaataca

SEQ ID NO: 267537 - DNA, 201 bp, Homo sapiens
atctcctcccatgaatcatgaatgttgttttccttcccccaccggcatgttttccatgaaggttcttaatgacatctagactattttactatttcactatkgcactattgccaagagaatagtgacacccataaccacaacgttaggtcatgaaagcattgactccatttagtcatccattcattcacttatcaagcagtt

SEQ ID NO: 267538 - DNA, 201 bp, Homo sapiens
ttgacggttccgagctaaattgattgaatactgctgttcacatttatttcacaaatgtcaagttttgagtttcactttcctggaaaattccttatgttctttgttgttgttgttgttgttgtcgttgttgttagtttgagatggagtcttgctttgtcacccaggctggagtgcagtggcttgatcttgactcacggcaac

SEQ ID NO: 267539 - DNA, 201 bp, Homo sapiens
tgacggttccgagctaaattgattgaatactgctgttcacatttatttcacaaatgtcaagttttgagtttcactttcctggaaaattccttatgttctttgttgttgttgttgttgttgtcgttgttgttagtttgagatggagtcttgctttgtcacccaggctggagtgcagtggcttgatcttgactcacggcaacc

SEQ ID NO: 267540 - DNA, 201 bp, Homo sapiens
gacggttccgagctaaattgattgaatactgctgttcacatttatttcacaaatgtcaagttttgagtttcactttcctggaaaattccttatgttctttgttgttgttgttgttgttgtcgttgttgttagtttgagatggagtcttgctttgtcacccaggctggagtgcagtggcttgatcttgactcacggcaacct

SEQ ID NO: 267541 - DNA, 201 bp, Homo sapiens
tgaagaggtgcttttaagcaattctttagagttgacaacaggcctgggaacgcagaggagaaaaggctaccttgttctgtagaaacacgaaaggcaggtcrtgctgcagcctccaagggagcagtaagctgggctttgttcttttattctgggtaagaagttagagggccagagacattaaattatgtagatattttcatt

SEQ ID NO: 267542 - DNA, 201 bp, Homo sapiens
gttctctaaatctagcccctaagtgagtcttcaaagtctaacctgagtacccagctgcctacagcaagttttcactcagctattcctcaagtgatacaaaygaagataattctccgccccatcccacttccatttccaggcaaatccatcttggatgctaatcatgttaactaataattaactcctgggaatgcctctact

SEQ ID NO: 267543 - DNA, 201 bp, Homo sapiens
gtcgcagccctaaaccactcagccccactcaggaaacacactgcactcaccggacaggtccatattcttgcattagcctctcatttttccgacgcttgtastttacacataattcccactctgtgtaccacctctcccgcaaagaaaaagggtggcagggcggaacttcctactcccctggcaaacccggattggattcca

SEQ ID NO: 267544 - DNA, 201 bp, Homo sapiens
gcataatgatatactgtttcaaatgaaacacatgtgaagtaacacaattgactcctcattttaaatgatcctgctttaaatgttgagatccagcttctcayagcctaagcatcccacaaccaaatgcctgaaaattaagattcatctctaaaggcagtgtagtcatataagaataagctccacaaaattacatttactatg

SEQ ID NO: 267545 - DNA, 201 bp, Homo sapiens
gtagtgtgaatgtgccctttcatggcacaatttagaaaacagcctggaagacactgcacgttggcctcatgctttttaaaggaaataagacatgtatagartcgcttttatgcatcttgtgatgaagatattccccctggcccatctttaactaacaattgggcctctcaactgccacctcaaagttcagtgctgcttgag

SEQ ID NO: 267546 - DNA, 201 bp, Homo sapiens
tggcacaatttagaaaacagcctggaagacactgcacgttggcctcatgctttttaaaggaaataagacatgtatagagtcgcttttatgcatcttgtgakgaagatattccccctggcccatctttaactaacaattgggcctctcaactgccacctcaaagttcagtgctgcttgagaccaggggacacccttggcttc

SEQ ID NO: 267547 - DNA, 201 bp, Homo sapiens
tcttgagaaagcaaggactctggggttttgttttgtttttttccactctctctactcctttttctttggttctctcattcattcagtcatttgttctttamatctattgtttatttacagttcctgagatcctagttgcaccaggaaatatactagataataaggttacaaagaaatacatttctgctttgagaagatcgt

SEQ ID NO: 267548 - DNA, 201 bp, Homo sapiens
tatgttatatataatatataatatatagtatattatagtatatactacagtatattaatatataatatattaatatataatatattacataatatataacwtataaaatatgtatattataatatatataaaagatatgttgtatatataatatatattataatatataatttatattatatattacatagtaaattatgt

SEQ ID NO: 267549 - DNA, 201 bp, Homo sapiens
ttcattcatgtgtccattcaattgtttgttcaacagatatttactgaggcactcataggcaccccagctaactacgggtgaaaaagagcataacggcaggwggggtgggcgtgctcctgaatctcagaagcctcactggggggcataacagcaggaggggtgggcgtgctcctgaatctcagaagcctcactggggtgcat

SEQ ID NO: 267550 - DNA, 201 bp, Homo sapiens
gtgctcctgaatctcagaagcctcactggggtgcataacggcaggtggggtgggcgtgctcctgaatctcagaagcctcactggggggcataacggcaggwggggtgggcgtactcctgaatctcagaagcctcactggggtttggctccccagggggacccaggcagtgttgtgttttagattcctggccacctgcacac

SEQ ID NO: 267551 - DNA, 201 bp, Homo sapiens
attaaaatgattaaagggttgcaaaactgatctgtgaggatcggcttgaggaattggatttatgaagtctgaggaaaagggagctcagggcggatttattmagtgtattaagggacatgatacggaggaagctgaccaatgttttcctgctctgctgaggacagagcaaatggaaatgatcttacaatatggcaggggaga

SEQ ID NO: 267552 - DNA, 201 bp, Homo sapiens
cagcaccttcagggtgcaagcaagtccagccacggttagcaggctctagttctgtgagccctccatggaaggggtatttattttcttatgccaatcgttcrggtctcctcttgccgactctagtgtcagaggggaaaagagagaaatttcctggctcagtgaagctggagcaaagctttaccagggtgtttagtagctagg

SEQ ID NO: 267553 - DNA, 201 bp, Homo sapiens
atcggcttgaggaattggatttatgaagtctgaggaaaagggagctcagggcggatttattcagtgtattaagggacatgatacggaggaagctgaccaaygttttcctgctctgctgaggacagagcaaatggaaatgatcttacaatatggcaggggagaatttttcatcatgtgtaatggagccataaggactgaccc

SEQ ID NO: 267554 - DNA, 201 bp, Homo sapiens
atgatttcagtcattttgttgcaatacggagaaaatttccctaaagtatatagcttttcttctttcacgattaagaaactaaataaatgaaacaagaaaawctcaaaagagacttctagaattttattattaaatattcattttattttattttattttattattttatttattttatgttattttatgttattttatgtt

SEQ ID NO: 267555 - DNA, 201 bp, Homo sapiens
ctaaataaatgaaacaagaaaaactcaaaagagacttctagaattttattattaaatattcattttattttattttattttattattttatttattttatkttattttatgttattttatgttattttattttatttttgagaacaagtttcgctcttgttgcccaggctagagtgcagtggcgcgatctcggctcaccgc

SEQ ID NO: 267556 - DNA, 201 bp, Homo sapiens
tgagctgtcattgtgccactgtacttccgtctggacaacatagcaagactctgtgtcaaaaacagaaaagtaacgatgagtaaaaaattattggcatccaraaaacaaaaaatggaaagacaataatctcaaaatcaaggatgatgggagatattcggtaatatagtttaagtacccagaagaagcagtgtaataatcaat

SEQ ID NO: 267557 - DNA, 201 bp, Homo sapiens
cagaattccttaacccaaggatgatttgtaagtagttattttcatttggaagcctttttctccaaacgtgcctcatgccataatggttttcatttgggagrctttttctccaaacatgcctcgtgccattatggttgagagcagtgcacacaaaatagaccaggctaccaagcccccaaaccggaagcgaatcatgtgact

SEQ ID NO: 267558 - DNA, 201 bp, Homo sapiens
tctatacgtttaaattgctacaaagtatctatcttattttccctcttattcttattttctctctcttattttctctctctctctcctcatcctcctcctcytctctcctctccccttctctgtcttctgcatctatcttctgactctgaagagtagatgattaccctatctctaatttcatcccccaagaaaatctctctt

SEQ ID NO: 267559 - DNA, 201 bp, Homo sapiens
cctgacacacagtgatgttttcccaggtggttcttcactgtcccatgtcagtagactcccggtagatccaccccgcccagttccatagacaggcttcagcstgacggcaactacagctagtgccacttgtcctcaggctgagacgcttctacgtgtaatataaaattctattatattttataagtctgtcttcaatatctc

SEQ ID NO: 267560 - DNA, 201 bp, Homo sapiens
agttaaaggacattgaaacacagccatccccttttcttcatgacccacagcacttgacatccgtatcactaatttggtaatagagtatgtgctgagctgtgggggggcttctgattttgtcattttctttgtaccacttttcttcccaattgtaggcactctgagaacagcccaatatcttaatattaggaaacgtacttc

SEQ ID NO: 267561 - DNA, 201 bp, Homo sapiens
aaaacaaaagggagaagacagctgaagagctctttcaaaggagggatccacaaggcttggtgattaagacgacgcagagggtgggtcaaggacagcatgtwtgtgttgtgagtggaagaaatgtgattctcttgacagaaacagcagagtctgagttgaagcggggtgatgtggcttctaggtgatgcattcgttttaagt

SEQ ID NO: 267562 - DNA, 201 bp, Homo sapiens
cagaaccagccattgtcacttgttaatgtggccttgggcaggtggcttaactgtaatgtcctaattctccttcccagggtggatatgagattaaaaggagygactgtatgtaaagcgcctgatgggaagaaagtgctgatgagagctatattgctttctcctattccctcctcactccttttaaaaattaaaacacacatg

SEQ ID NO: 267563 - DNA, 201 bp, Homo sapiens
gcctttgttaaagttagtatttatcagctgatagcagatttgttttttattcgatcagttttaaccagtcgtaacgaagaaactggtttgacctttatacrtgacccagttagtaaactgttcatctagaaacctagaaacctatatgctgatagttctagttgaataattcttgttaattttatttaccaaagaaccaga

SEQ ID NO: 267564 - DNA, 201 bp, Homo sapiens
aatttaaaatgcagattagctctatcatacactcactgtaactatgcgtcttgcttgtcggtcttgctctgagctgtggatactcagttatgttttatccyggtttcagatcagaaacagtgctcatccttgctagaaactgccctctgaagcaaagttcaagttctcagggagagagccaatcaccctggctcctcctac

SEQ ID NO: 267565 - DNA, 201 bp, Homo sapiens
aatgcaacctaatgtccctaattaatggatgtgtgttcttttgcagtttgccttctgccgggaatgtaaagaagcgtaccatgaaggggagtgcagtgccstatttgaagcctcaggaacaactactcaggtacagaatgccctactcattcctccaagcagggctccggatacagtgggggactggagccgtttcctgga

SEQ ID NO: 267566 - DNA, 201 bp, Homo sapiens
acccctgcctcaggaccgctgtaatggaggcgggtatacctgaggctctgggaaacggagttagtctagcaatttacatccatatgctctgagactgcaarcatggcagaggcttccacaaagtgatactctggcatctacagtatttatttggaaacagtagctgtaagggaaagaagagcattgcttaacctaaagcca

SEQ ID NO: 267567 - DNA, 201 bp, Homo sapiens
cagagagaagagtcaagatatagaggaggcagagaatggagggtagggggaagggctcaaaggaagagagcatcccttcctgaacagctgcgtgctgggcygagaggaaagcttggctgtccccagcagctgtctggaacttccctgaccagtggaatgctagttagcaaaagagattgtagattataattggcggttccc

SEQ ID NO: 267568 - DNA, 201 bp, Homo sapiens
agaggaggcagagaatggagggtagggggaagggctcaaaggaagagagcatcccttcctgaacagctgcgtgctgggccgagaggaaagcttggctgtcyccagcagctgtctggaacttccctgaccagtggaatgctagttagcaaaagagattgtagattataattggcggttccccaccccatagccaccttcgag

SEQ ID NO: 267569 - DNA, 201 bp, Homo sapiens
tttgagaccactctggccaacatagtgaaaccccgtctctactaaaaatacgaaaaaattagccaggtgtggtggtgggcgactgtaatcccagctactcwggaggctagggcaggagaatcacttgaacttgggacgtggaggttgcagtgagctgagatcatgccactgcactccagcccaggcaacagtgcgagattc

SEQ ID NO: 267570 - DNA, 201 bp, Homo sapiens
aaaattagccaggtgtggtggtgggcgactgtaatcccagctactcaggaggctagggcaggagaatcacttgaacttgggacgtggaggttgcagtgagytgagatcatgccactgcactccagcccaggcaacagtgcgagattctgtctcaaaaaaacaaaacaaactaaaacaaaaacaaacaaacaaacaaaaaca

SEQ ID NO: 267571 - DNA, 201 bp, Homo sapiens
aattcagaatatataaatcataattcagaataagttatacattccctttaaatgaacttatgtaaatgtatttcacgtttgtataaataagagaaaagtayggaaagatgctagccaaatttttaactaggaaggggtgggtgatggaagtggcattggtagaccagaggatgtgactcattattaaaatgtagaaacctc

SEQ ID NO: 267572 - DNA, 201 bp, Homo sapiens
aaaacagattgtgagacatttcaagggacagttggtaggatttggggattatctgcatatgagggagaagaaaaaggggtgcaactgacgactctaaggttttttttttttttttgaatgtttatactttttaaaaaaattttacttttaagttctgggatacatgtgcagaacgtgcaggtttgttacataggtatacat

SEQ ID NO: 267573 - DNA, 201 bp, Homo sapiens
gccaaatttttaactaggaaggggtgggtgatggaagtggcattggtagaccagaggatgtgactcattattaaaatgtagaaacctcaatatcacttggrttactagcaaaagcatatatgacccatttaattcacatcactaaaataaaatgagtaaataattttataacaaaagagacagtaaacagaacagacttag

SEQ ID NO: 267574 - DNA, 201 bp, Homo sapiens
aaacagattgtgagacatttcaagggacagttggtaggatttggggattatctgcatatgagggagaagaaaaaggggtgcaactgacgactctaaggttttttttttttttttgaatgtttatactttttaaaaaaattttacttttaagttctgggatacatgtgcagaacgtgcaggtttgttacataggtatacatt

SEQ ID NO: 267575 - DNA, 201 bp, Homo sapiens
gacccatttaattcacatcactaaaataaaatgagtaaataattttataacaaaagagacagtaaacagaacagacttagtagaagcaagctgggtctagytggaacgttgtcacaacgaggaggtttcaaaggatggaagaactcgaaggtgttatgatcctcaggaaggggaccaatatctatgcatgggagcactgaa

SEQ ID NO: 267576 - DNA, 201 bp, Homo sapiens
tggtaggatttggggattatctgcatatgagggagaagaaaaaggggtgcaactgacgactctaaggttttttttttttttttgaatgtttatactttttwaaaaaattttacttttaagttctgggatacatgtgcagaacgtgcaggtttgttacataggtatacatttgccatggtggtttgctgcacccctcaaccc

SEQ ID NO: 267577 - DNA, 201 bp, Homo sapiens
ttctttaagggcgtaacccagaaatggcacgcttcactttcgtttacatctcaggtgccagatccagtcacatgggaccctgagtgcaggagaggccaggraatgtagtctgtacctggcagacacgtgcccagtgaaggcttcttatactgcagacgggaggagaagatacacatcgggaggagaagatacacatcagga

SEQ ID NO: 267578 - DNA, 201 bp, Homo sapiens
ttctgtaacctaacagccagtgtacatgcaagcagaaattcccgtaacagtttttgcttcacatatcatgtctcatgtgataatagtatctgaataggttrtccttatggattcttagcaaatcattgaagcaaaagaaagctgtaactaaaatctcttacttgtgatcagttttcaaaaggaatcaactaccctggcaag

SEQ ID NO: 267579 - DNA, 201 bp, Homo sapiens
tttaattcacatcactaaaataaaatgagtaaataattttataacaaaagagacagtaaacagaacagacttagtagaagcaagctgggtctagctggaasgttgtcacaacgaggaggtttcaaaggatggaagaactcgaaggtgttatgatcctcaggaaggggaccaatatctatgcatgggagcactgaaagtctg

SEQ ID NO: 267580 - DNA, 201 bp, Homo sapiens
gtataaggattatctgtcaaatattattttaatggaaaaaatacaataaagaacagcgtaaagaaagaaaattaaatttgagcttaccctatagcataacattgttgtcagtatgaaagtgaacaatagtaatgttttaaagacccaatcaacagatgaggatttagcagcctgtgtttggagtactcttctaaatgctgt

SEQ ID NO: 267581 - DNA, 201 bp, Homo sapiens
tataaggattatctgtcaaatattattttaatggaaaaaatacaataaagaacagcgtaaagaaagaaaattaaatttgagcttaccctatagcataacattgttgtcagtatgaaagtgaacaatagtaatgttttaaagacccaatcaacagatgaggatttagcagcctgtgtttggagtactcttctaaatgctgtg

SEQ ID NO: 267582 - DNA, 201 bp, Homo sapiens
atgcgacaccatgcctggctagtttttgttttttagtggagatggagttttaccatgttggccaggctggtctcgaactcctaatctcaggtgatccaccwgtctcggcctcccaaagtgttgagattgcaggcgtgagccaccatacctagcccacttttcttctttttcttcttcttcttcttctttcttctttcttct

SEQ ID NO: 267583 - DNA, 201 bp, Homo sapiens
ataaggattatctgtcaaatattattttaatggaaaaaatacaataaagaacagcgtaaagaaagaaaattaaatttgagcttaccctatagcataacattgttgtcagtatgaaagtgaacaatagtaatgttttaaagacccaatcaacagatgaggatttagcagcctgtgtttggagtactcttctaaatgctgtga

SEQ ID NO: 267584 - DNA, 201 bp, Homo sapiens
ttcaaggaattctcctgcctcagcctcctcagtagctgggactacaggcacacaccaccctgcccagcgaatttttatatttttggtagagacagtgtttsactgtgttggccaggcttgtcttgaactcctaacctcatgatccacccgcctcggcctcccagactgctgggattacaggcatgagccatcgcgcccggc

SEQ ID NO: 267585 - DNA, 201 bp, Homo sapiens
attatatatgtgtgtgttcttcagatgtgactacttcacataaatgtttagggggtacaggagagcacagctaccccacgcactgacaagaaggtcctttyacattcaagtacatctgttttgaggtgaaatctgtttgaaccaaagtaatgggctaaattgtataattgggtctgtatctttcttagagagagaggggca

SEQ ID NO: 267586 - DNA, 201 bp, Homo sapiens
aaaatggaaaatggagcacccagaaagtgaaaaatgtaattgtaaataaaattaagagatgattttgagaaatgtgggcatttaaaggacagtttttaagrtattctgtatgtctggcaattaagatttcaatgaaacacttctgttgccttttactgactgttgatagctttattaatgacagggggtgacacacagata

SEQ ID NO: 267587 - DNA, 201 bp, Homo sapiens
agcaattctcctgcctcagcctcctgaatagctaggattataagcatgcgacaccatgcctggctagtttttgttttttagtggagatggagttttaccaygttggccaggctggtctcgaactcctaatctcaggtgatccacctgtctcggcctcccaaagtgttgagattgcaggcgtgagccaccatacctagccca

SEQ ID NO: 267588 - DNA, 201 bp, Homo sapiens
gggaggctgaaggggacagatcatctgaggtcaggagtttgagagcagcctggccaaaatggcaaaaccctctctgtactaaaaatacaaaagttatctagtgtggtggtgggtgcctgtaatgccagctactcaggaggctcaggcaggagaatcgcttgaactcaggagggagaggttgcagtgagatgagattgcact

SEQ ID NO: 267589 - DNA, 201 bp, Homo sapiens
aaggctttgtcctctgtcagaataaacctcataataacctttgtaaaaaattgatttgtataacattttgtaattctcatcggaacatactgaaagatgtwtccgtctggccttatttttggacaatgggaaatatatttatgcaaatatctccctgaagtttctcatttcagcctcatctgtgaaatgtgtgcctggctg

SEQ ID NO: 267590 - DNA, 201 bp, Homo sapiens
aagatgatggtgttactgaccgaaagagggagttctgctttagggctgtgatgaggcaacggtgtccattgagttgttttagaaaaagtgagtgcgagatsgcaaatatggtaaaatctgatgttgaaaaagaagatttaagtgggatattaatttccttttcaagtcctttatcaccaagtgtcctagactctacaattg

SEQ ID NO: 267591 - DNA, 201 bp, Homo sapiens
tctttcttttttttttttttttttttttttgagattgagtcttgctctgtcacccaggctggagtgcagtggtgcgatcttggctcactgcaacccgcacygcccaggtttcagcaattctcctgcctcagcctcctgaatagctaggattataagcatgcgacaccatgcctggctagtttttgttttttagtggagatg

SEQ ID NO: 267592 - DNA, 201 bp, Homo sapiens
atgctcatactatttgagctgttttaaaaagatttgcttagcgaaagtcattggatcagaataattctgacactcttaatctttttttttttaaactaagrgccttagacattttctttccatttaaaaatttgaatgacaaaaccaagtaagtaattacttgaaatagtgaagtaaataccaaatttgtgcccagggaag

SEQ ID NO: 267593 - DNA, 201 bp, Homo sapiens
aaatttgattaagaggagctaaaaattggggaaaataaagacgcaaattaatttcagtaaatttggaataccattagagattacagtattatttttgatgsatcagtcaaccacattttggcaaatcagccaaaaagaaaataagcggggtttaaagtaaagtatgtagatactgctggcttgaagaaacatataggaacc

SEQ ID NO: 267594 - DNA, 201 bp, Homo sapiens
gatttatgacagtgtatctactttgtgtgtttgaggagttaaggctgataaatgggctgaaaatagtcaactcattattctcatattcatagactatccawaagtgatatagttactgcttcctcactaaatcttagatgggaaatctcatacttcccaaaaatccctataaagaaaagatgactattgtatttaaaaggg

SEQ ID NO: 267595 - DNA, 201 bp, Homo sapiens
cctttccccacaactgccctacgtgaccttattatctgtctttgaaaataaattggtagcattaagcttagcctgaatttgattcagtttactttttcagaaaaaaaaaaagtcaatttcaacaagatggaaggtaaaaactaaccaaccaagagggtttgaaagagaagaaattagtcttaagaaatgtttccctatttt

SEQ ID NO: 267596 - DNA, 201 bp, Homo sapiens
tgatgactccagtctggtgtgttccactgctgatccacaactcaaccgtgacagtaacttcagagcatggctggtggcgatgagaatgggacgtgctttcrggagaggtccatggatcccagacagacagccctaaacgagcctctctggcattcactcttccagctttcttctttgtacgatggcgggtagagggcattg

SEQ ID NO: 267597 - DNA, 201 bp, Homo sapiens
atttgttttctattctggtaacttccaaaagcccacctttgcaaagatacaatgtcaccaaaaggaaaatagcacaatctacattaacactgggaactacyttgagttaataaatcacatagtgttcaatagccatgctgtgttttacttaaaattctagaatatcccaggcacccctgtgagtttgttacagtaccgcag

SEQ ID NO: 267598 - DNA, 201 bp, Homo sapiens
cctttcatgccttttgcactttggggcttcatcaggaaaagatgaccttactcagttaaaaaaaatcctcttcatcagatgtgcagtagctgtgaaacatcaagaagaacacatgccattgaagggtgacacctgaattacctgccattttctatttttcaaaacagtctcagccaaaaggctagaagtgaataaataatt

SEQ ID NO: 267599 - DNA, 201 bp, Homo sapiens
  misc_feature (1)...(201): n = A,T,C or G
taccctcatgctctggagacagcatataaatcaggagcagaaacagagaaggcccccaaactcagacattttaaattcacatcagaaacattttgccactntcttcttaggatacatatgtccattacagattagcccacacttaagttattgctgtgaccgatccttttcactgttgttgtccgtcaggtatttttaaaa

SEQ ID NO: 267600 - DNA, 201 bp, Homo sapiens
gggagtcttcaaaacgccaaggcccctgggcaggaggacgggtgacagttcggtgtgtatcaactccgtagcacggttgatacaagccttgccttgaagcrctttgtcttatggtcagaaccatgaaccatcctttctggcccatattaataagattaaaagctggtagcttgcctttttccctgcctggtttttatgagc

SEQ ID NO: 267601 - DNA, 201 bp, Homo sapiens
ggagtgcagtgacgccatctctgctcactgcaacctccgcctcccaggttcaagtgattctgctgccttagcctcccgagtagctgcgactacaggcaggygccaccacacccggctaatttttgtatttttagtagagacagggtttcaccatgttgaccagaatggtcttgatctcttgacctcgtgatttggcagcct

SEQ ID NO: 267602 - DNA, 201 bp, Homo sapiens
ctggagtgcagtggtgttagctcactgcaacctctccctcctgggttcaagtgactctcccacctcagcctccggagtacctgggattacatgcacccacyaccatgcctggctagtttttgtatttttagtagaggtgaagttttaccatgttggccaggctggtctagaactcctcacctcaagtgatctgcctgcctc

SEQ ID NO: 267603 - DNA, 201 bp, Homo sapiens
cacgttaacaactaaggattccttccctcccctaggatatgccgggcaatgcagtggccactagccagcgtccttggagcactcaaaatgtgggtagtccraagggaggtgtgttgcaaatgtaaaatacaaaccagatttcaaagacttaataccatagaagaatataagatatcttattagtaatttttatgctgatta

SEQ ID NO: 267604 - DNA, 201 bp, Homo sapiens
tgcttctttttgctttcctaaagtggatattaaaatacaatttatatgtgtggctcgcattttatttccaatgtatagcaccactctagaatcgtttaacrgtgtagagggcaagaaagatgtcaacaacagagttcaaggcggagcaagggagaggagtcctagaagactggggaaaggctggggacgaatcctagaaga

SEQ ID NO: 267605 - DNA, 201 bp, Homo sapiens
ccgtaagatgggaatacatgtgcttattgcagaccgttttcatactgattaaatcagttaatgtgtgtaaagctctcacacagtatcagcacattaaaatsttcagttttgttactgaatgaaggaaccagtcgatgaagaaactagaaattcagttcaatccagtgcctccttgcacaaacagatttgaaatctttggat

SEQ ID NO: 267606 - DNA, 201 bp, Homo sapiens
ggctcttgtcttgtctgtgcggagatagccctgtgttctgccttctggctgtcacttctttagtcacttacagatggcattttgaaggaatgctaattgarggacttcactgttcacttctaactaatcattctgacagaaaacatctcctctgcaaaggaagaggaggaacccaagagaagaagcttttgcttctctgtg

SEQ ID NO: 267607 - DNA, 201 bp, Homo sapiens
tacactcaccttgttgcgggattcgggagtatgagggagacctcaggttgaagcaggagaatctttattgagtgtactcaggcccagctgactcacatccraaagactgggcccagaataaagacagtacttgacttttatacacacttcacaaacggaggtgggctagcttgaagcaagcttacagtggcgtgaaagcag

SEQ ID NO: 267608 - DNA, 201 bp, Homo sapiens
tcaccctaagatgctctatgcggaatcaactcaaagaagagcagtgactgaggtgttgccagcgtccctccctcatcggccctttctgcatctgctcttcrtgtaatctgtgcccttctttgttcattgccacatattcaggcgactctgtgctgcaacccccgttagtccttccgttcgtccatctatccatcagttcat

SEQ ID NO: 267609 - DNA, 201 bp, Homo sapiens
ctccacgtgagaagggcctcatctctgtcatgcgcttgtagtctcagcacctgggaaagtactagcatttagttgactcccaaatatattgaactgataarggaataacaacacaatctaacaccttcactgatagctaaaacagtggtaatccggtaaagataatctacatggaaatatatttgccaaccagtgtgtgtg

SEQ ID NO: 267610 - DNA, 201 bp, Homo sapiens
gatttcctgattgattttactgaaagagctagtgagattcctttaatgctttctttcaatagaattgataatatttttctttccctggtaggacattttgyagtaaagtaaggacactctgaaaggaatatttcagtgccccaaatactgtaaaatgatattgcccccatgaagacgttttgctctctctagtgacagact

SEQ ID NO: 267611 - DNA, 201 bp, Homo sapiens
tacattatctcttttaagcattgctttttagtccgaagcaacagctgcttttttgttgttgttcattacaattataatcacattgaattttggttttcttmgcagttggcagtagacaaaaatcacatttcataaatttgactttgactggtatatctgaatagacattagtcctcagattttaatggtcagcaccactga

SEQ ID NO: 267612 - DNA, 201 bp, Homo sapiens
atgctttctttcaatagaattgataatatttttctttccctggtaggacattttgtagtaaagtaaggacactctgaaaggaatatttcagtgccccaaayactgtaaaatgatattgcccccatgaagacgttttgctctctctagtgacagacttaaggatgtctgtctacacctggcccatcaggatagtaattcgga

SEQ ID NO: 267613 - DNA, 201 bp, Homo sapiens
tgctctatgcggaatcaactcaaagaagagcagtgactgaggtgttgccagcgtccctccctcatcggccctttctgcatctgctcttcgtgtaatctgtrcccttctttgttcattgccacatattcaggcgactctgtgctgcaacccccgttagtccttccgttcgtccatctatccatcagttcatcaactggataa

SEQ ID NO: 267614 - DNA, 201 bp, Homo sapiens
attaacaaggactgtgtcatgtggtcagtcctggctgtgaaagaagttgggaagtgtagtggttaaaatctaggcacattgccaccctcagtaatgccaasgttctgttagcaaggaggaaaggaaaagcaatattgatagactaggcaaccagcaggatctgccagtggacacgtatgcctttgtatgctgatcctcttc

SEQ ID NO: 267615 - DNA, 201 bp, Homo sapiens
tgcccccatgaagacgttttgctctctctagtgacagacttaaggatgtctgtctacacctggcccatcaggatagtaattcggatgctgtgacaacttcrctgctccattatcttcattctgcagatgacagctggagcaagaggagctaagctggattacaaagccaattaatgtcagggcttagctgtaaatcttctt

SEQ ID NO: 267616 - DNA, 201 bp, Homo sapiens
acttattagatgtgtgatgttggccaagtcatttaaaccccagtgagtgccagtgtcctcatgggtcaaatggaataatgatagtgtcaaaattattgagsagttttgatggttaagtgaattattaaatataatgggcttaaaatacttctttaaacaagagaacattcaataaagattgtctactttaattattacatg

SEQ ID NO: 267617 - DNA, 201 bp, Homo sapiens
gtcccaacaccttgggaggccgaggtagatggatccctcgagcccaagagttcaagaccagcttatgcaacatggcaagaccccatctctacaaaagattwaaaaaaattagctgggcatggtggcacacacctgtagtccctgctgcttgggaggatggcttgagcctgggagtgcagtgagccaagattgcaccactgc

SEQ ID NO: 267618 - DNA, 201 bp, Homo sapiens
aaaacatgatagggcccttagaggtcagctggtctaacatgacacccagtgtgagaatcttcccacaatcaccagcctctactcagatccactgggaacascacgttcatcaatgcatgccattttggctgcagagattactactgagttttttcttttgtgaaattatattctttctctcaccagtacccacttctctgt

SEQ ID NO: 267619 - DNA, 201 bp, Homo sapiens
ctgcttgggaggatggcttgagcctgggagtgcagtgagccaagattgcaccactgcactccagcctgggtgacagagtaagaccctatctcaaaaaaaaraaaaaaaaaaaaaagtttttcctgacacaaatcatttgaacaaacaatgtagtgaatccagtatcgaatccagtatctaatttcctcacaaacaaataca

SEQ ID NO: 267620 - DNA, 201 bp, Homo sapiens
ctggagcaagaggagctaagctggattacaaagccaattaatgtcagggcttagctgtaaatcttcttgtgtaagtcttggatatgttttctgtagccatraattctttttcacgagtgctgagtgtttattctgtagcagtatggaagcatgtagagtaaaacccaagttacttaacattatgcaggagatcatagtaag

SEQ ID NO: 267621 - DNA, 201 bp, Homo sapiens
catgatagggcccttagaggtcagctggtctaacatgacacccagtgtgagaatcttcccacaatcaccagcctctactcagatccactgggaacagcacrttcatcaatgcatgccattttggctgcagagattactactgagttttttcttttgtgaaattatattctttctctcaccagtacccacttctctgtcaca

SEQ ID NO: 267622 - DNA, 201 bp, Homo sapiens
ctgagtgtttattctgtagcagtatggaagcatgtagagtaaaacccaagttacttaacattatgcaggagatcatagtaagcaataatttgggatatggrttttcctggaaaatttaactcattcagcatgacagactgaaggccaccttcagaacctacgtggacattcaaagacacatttgggacaggtgagacagta

SEQ ID NO: 267623 - DNA, 201 bp, Homo sapiens
tttcctggaaaatttaactcattcagcatgacagactgaaggccaccttcagaacctacgtggacattcaaagacacatttgggacaggtgagacagtacmtaaagggggtaatagagggccagagctcaagtctaggtgccaggatgcaggctggatgggtaatgagatgggggatagtcaaagatacactaattgttca

SEQ ID NO: 267624 - DNA, 201 bp, Homo sapiens
tctaggtgccaggatgcaggctggatgggtaatgagatgggggatagtcaaagatacactaattgttcaatcctaggtttgcatctggaatgtctgtttgkttttttttccaaatttgtctaagcatttctgtgctctcaggtcatctgtacctttattatacttgcttttgaatgtattggtctcagataacatgacagg

SEQ ID NO: 267625 - DNA, 201 bp, Homo sapiens
tttttttccaaatttgtctaagcatttctgtgctctcaggtcatctgtacctttattatacttgcttttgaatgtattggtctcagataacatgacagggyaatgagtctcacatttgtggtttaatattttattgatagtgcagttacttatctgcattttcctagttctcttcatatttctcttgctgtttatcctgta

SEQ ID NO: 267626 - DNA, 201 bp, Homo sapiens
tcctcgttgagcatatgttgcctgcctcctagctccatgccaggcttctccctgaagtgccagctcaggcaccttgctcctggctccctcaacttggacaycccacgggtactttacatccagctaaaatcttcattgctgcccctaaatcaatggctgttttctcgtgtggggaagtcacatctacccagtcctccatac

SEQ ID NO: 267627 - DNA, 201 bp, Homo sapiens
ccctcacatggtagaaggggcaagacagctctctggggcctcacaggatgagaggtgactggttaatgccctctctttataagggcactaatcccattccygagggctctgacttatgacccaatcaccttgcaaaggcctcacctcctaatcccaccgccttggtgattaggtttcgacataggaatctggggagacaca

SEQ ID NO: 267628 - DNA, 201 bp, Homo sapiens
ctgatattctgcttatgtgagctgtgtctcaacattttaaaagcaaactgatacatttaacagatacagacatatgggcacacccatacacataccccaaygtagatttgctagattgaaaatgtgggccatttaaaaaatatagtattgatttgaaataagtagtcagactagctcatgctgctttcagagtaggacaca

SEQ ID NO: 267629 - DNA, 201 bp, Homo sapiens
ttcatcgtccaagatgcatgcctcagcttctgctgttgcgtctacattccaacaactaggaaagatgtgcacttttcctttaaaatcactttctggaagtsttataacaaacccttttcttcatgtccccttgcccagtgtttagtcacatgagtatccctaactttaaaagagacttggcaatgtagtcttcatcctgta

SEQ ID NO: 267630 - DNA, 201 bp, Homo sapiens
acgttagacctaaaaccataaaaaccctagaagaaaacctaggcattactattcaggacataggcagggcaaggacttcatgtctaaaacaccaaaaacartggcaacaaaagccaaaattgacaaatgggatctaattgactttttaataactactacgctgtcctggggtaactaccgatcctgggataatttagagtc

SEQ ID NO: 267631 - DNA, 201 bp, Homo sapiens
ctgtgcagctctctctgctcagttctgttaactccagctgccccgtcttccccctacacacagacctgtgggttcaattccgcaagtctgctgagctcccsctggggtctccctccctgaaccagggcctggccactctctgaaggcagcaggctggagtgattgcaggactcagcacgcttgcttcctgtctctcacgga

SEQ ID NO: 267632 - DNA, 201 bp, Homo sapiens
agtgactctcccacctcagcctccggagtacctgggattacatgcacccaccaccatgcctggctagtttttgtatttttagtagaggtgaagttttaccrtgttggccaggctggtctagaactcctcacctcaagtgatctgcctgcctcgacctcccaaagtgctgggcttataggcatgagctaccacgcccagctg

SEQ ID NO: 267633 - DNA, 201 bp, Homo sapiens
aaggggacaggaacacacctacctcctctaaacagaagttttaagagaaaacccacaagcaaagaaggactggaattccttcccttcctcctttcttgagygtggcactttctcaggcagggggaagcacatcattcttaggatttcgaattgaacatcctggtctcaaaaacggattttagtgatatagcattctaatta

SEQ ID NO: 267634 - DNA, 201 bp, Homo sapiens
ccagtgtttccactgcactggattattctcagaatgttcagccagctgggcaccatagggtcagctggaagaatctgaccctttaagttttcagctgtggytaaatcatgacatttatggtgaagttttacttaaaatatagtttttcatttgattgatcacttcctatattttagagaaaaatcatgtcaccattttgta

SEQ ID NO: 267635 - DNA, 201 bp, Homo sapiens
attgtgtctatctcaaaatgggaaggaaaccatgattgtaagtcaagatacatcgttaccaccaccaccagggccaccaccatcatcattatcatccactstcagaatgaagtaaatgcctagaaagcaggtgccattaaatataggaaagaagtacagctgaaaggtctgtccttcctgttcctactttatgtccctggg

SEQ ID NO: 267636 - DNA, 201 bp, Homo sapiens
ctgtctcagcctcccaagtagctgagattacaggtatccaccaccacgcccatctaatttttgtatttttagtagagacaggggtttcactatgttggctrggctggccttgaactcctgacctcaggtgatccacctgcctcagcctcctaaagtactagcattataggcatgagccactgtgcccagccatgagatatt

SEQ ID NO: 267637 - DNA, 201 bp, Homo sapiens
gtgatccacctgcctcagcctcctaaagtactagcattataggcatgagccactgtgcccagccatgagatattttgatacaggcatgcaatgtgaaatartcacaacatggaaaatggagtatccatcccctcaagcatttatcctttgagttacaaacaatccaattacactctttaagttattttaaaatacacaatt

SEQ ID NO: 267638 - DNA, 201 bp, Homo sapiens
aaaatcttgatgaaatactctgatgagtttactgaggatatatctgcttccttactttaaccttgacaccaggggaaaattattactctaatggttcaaakaatatttttgttattgttttaatcaacataattataagctaaattgagaaatgtatatgacacttctcttaaagaaaaatagatttttttcctctcttgt

SEQ ID NO: 267639 - DNA, 201 bp, Homo sapiens
cactctttaagttattttaaaatacacaattaagttattattgactgtggtcaccctgttatgctatcaaatagtaggtcttattcattctatttttttcyctcccatcctccctctaccttcccaacctctgataactattctcctactctctatgtccatgggttcaactgttttgattactagattccacaaataagt

SEQ ID NO: 267640 - DNA, 201 bp, Homo sapiens
aatacatatgtagctgaaaagttgccagtagagagaatgtttctgtaactgctcttgttagcgaatgccacctatgtgcttggtactgttgtaaatgtacrctctactttgtgccatttagtccttgaatgtagattagcatttagaatcatatagattgatattggacctattctgttcaagaataatttatataatttg

SEQ ID NO: 267641 - DNA, 201 bp, Homo sapiens
caaagatggctctccacacctgggtaagagttcaaagcctttgtgaccagggatactccttggccttatgtttgtcagctcctcttttcttcttcaacttsactagaggaggaaaatgcttacgtcattgtattgtaattgctggtctaggtcctcctggtaagacattaagttggaatatcctaacagctaccttcttta

SEQ ID NO: 267642 - DNA, 201 bp, Homo sapiens
caactatacaaaaaagatagcaatttagaaatattatttttatcattatcatgaaataattttattcacacttttcacatatgtcagcaccagcactgccyaaagttgcttgagttagagcactctctaaatccacttacgtaacctgagaagcctgcttttttccttcttcccatgggcatatattgaggatcttgtcag

SEQ ID NO: 267643 - DNA, 201 bp, Homo sapiens
ttattcattctatttttttccctcccatcctccctctaccttcccaacctctgataactattctcctactctctatgtccatgggttcaactgttttgatwactagattccacaaataagtgagaacatgtgatgtttgtctttctctgcctggcttatttaatagtttccaattctatccaggttgttgcaaatgactgg

SEQ ID NO: 267644 - DNA, 201 bp, Homo sapiens
agccatcggaactcaaatgaatccagaagttggtgttagcataatcagcaacaagccaagaactggggagttcctgcagagcctggaggaaagcctttgtrtaacagcttggtttttaacagcattcctttcccttgaaaacaatgtcatccttcacctaataaatcaggtctcaacaattcaaggaagaaatataccata

SEQ ID NO: 267645 - DNA, 201 bp, Homo sapiens
actacgccttgacctcagcaatgatgctgtccatgtccaggaagtggctgttgtcctggacagcaccatagatgtgtccgagatctgggactgcagctccraggtctcctcttcatacagctgcctgaggaaattgatctcgtcagccagcccttccagctgagactacagctctaccttgttcacgtaagcatcatccat

SEQ ID NO: 267646 - DNA, 201 bp, Homo sapiens
gaaagcctttgtataacagcttggtttttaacagcattcctttcccttgaaaacaatgtcatccttcacctaataaatcaggtctcaacaattcaaggaaraaatataccataagtgttgtagtaatgacaatctaggaattcctgcataaataattcatgtattagatccctagtaggttaaaaaaaaagttccaagtat

SEQ ID NO: 267647 - DNA, 201 bp, Homo sapiens
ctacgccttgacctcagcaatgatgctgtccatgtccaggaagtggctgttgtcctggacagcaccatagatgtgtccgagatctgggactgcagctccarggtctcctcttcatacagctgcctgaggaaattgatctcgtcagccagcccttccagctgagactacagctctaccttgttcacgtaagcatcatccatg

SEQ ID NO: 267648 - DNA, 201 bp, Homo sapiens
ggaggaattatgacaaggaacacaactgtgtaagtgcatttgtgtaagaaaacaaaaacaaataaaaaacaagactagtcccaaagaaaagtattagtgtrttccagcatatgaagagaataatgagtgtggagagctagctatagagtgtttgaggaaacaaattgtatttgccttgtttttataatatctgaatctgta

SEQ ID NO: 267649 - DNA, 201 bp, Homo sapiens
ctcagcagtctctggttgaccacaacggcggtgatgcctcccatgccgccggccccaccagagcctccacccaggccacccccggaagctgctgctgcccwtagaggtggacaccttataggacttctgggtcaccctgatggacatggtggaggcaggagtagaggcaagtggattgaaccaggcagagattccagaagg

SEQ ID NO: 267650 - DNA, 201 bp, Homo sapiens
gccacccccggaagctgctgctgcccatagaggtggacaccttataggacttctgggtcaccctgatggacatggtggaggcaggagtagaggcaagtggrttgaaccaggcagagattccagaaggagcagagaagctgcttcttggtcactgtgcagaagctttttgacttgatatgatcccctttgtccatttttgct

SEQ ID NO: 267651 - DNA, 201 bp, Homo sapiens
agcctggctaaagatttgtctattttgtttgacttttcaagaaaccaactttttgttttattgatcttttgtatttttttcatttcaatttatttatttcygctctgatctttattattattttcttctactaattcttggcatatagaaatgctgctgatttttgggctatcatgaagattaagtctgatgtttctttgt

SEQ ID NO: 267652 - DNA, 201 bp, Homo sapiens
agcaactcctgccattttttgttttccattagcatagaatatcttcttccatccctttattttcaatctatgtggatctttatagtgaagtgtgtttcttktaggcaacatataaatgagtcttgtttttttcatccattcacccagtctgtgtctttttgttgcagagtttagtccctttacattcattatatgtatgta

SEQ ID NO: 267653 - DNA, 201 bp, Homo sapiens
cttataacctaaagaataacttaaatgataaagttaaccacaaaattacaaacatataagtaactagtggcggtaaagaagaaatgaaatattagttaccwtatacatacctatatttacactgtattcatataactgataagtttatatttgtttataacatctcttttctacagttcctcttctattaccttttccttc

SEQ ID NO: 267654 - DNA, 201 bp, Homo sapiens
gctctctctgctcagttctgttaactccagctgccccgtcttccccctacacacagacctgtgggttcaattccgcaagtctgctgagctcccgctggggyctccctccctgaaccagggcctggccactctctgaaggcagcaggctggagtgattgcaggactcagcacgcttgcttcctgtctctcacggacctttgt

SEQ ID NO: 267655 - DNA, 201 bp, Homo sapiens
gttcaaacactctcttggcctctcctgagcaatggaagacacaatttccaaccatcatactatccttgtctaaaagatgttaatttctcttgtagtttctycttacttgcaacagaatcttataacctaaagaataacttaaatgataaagttaaccacaaaattacaaacatataagtaactagtggcggtaaagaagaa

SEQ ID NO: 267656 - DNA, 201 bp, Homo sapiens
cgtgtgagctttgagaattgttaaccccatgcatgtacggaaaaataatattcagccagagattcaaggtagtctatccgcaaatttccagaactctctcygtgcaagtcacttcttttaggtattgtgtcctgaaaattctagtttccttaacctccctaaacttcgatttgtggttccccagttcaccgagacttctag

SEQ ID NO: 267657 - DNA, 201 bp, Homo sapiens
tgaggcactagaattgcttgaaccagggaggtggaggctgcagtgagccgagattacaccacagcactccagcctgggtgacagagttaaactgtgtctcaaaaaaaaaaaaaggaaaaaagggatttagaaacataatgaagtttaaagatatggatttcacgaggcctggcctgaagtgaaaagactgctatatttaca

SEQ ID NO: 267658 - DNA, 201 bp, Homo sapiens
cccaggcctcatccatggggctgatactgggacaagcatttctcccaggtcagtggggatcgtgtctgaaggatgaagaacctgactgcctttctggaaaracagaggccccctgatgtgatgctctagggcacacagacactatccccagggagactttgccacaagatactttgatcctcggattccccgtccggtaca

SEQ ID NO: 267659 - DNA, 201 bp, Homo sapiens
gtcctcggcccgatcactttccccttgttgacaatgctccagtaccctggcccttcatggtgttctctaaatgaagcagacttgtcctcttcctagggccrtgactctcccttcctggaggaccttccttcagctttttgcatggctgcctccattcatttagccctctaaacaggtgtcccctcccaggagaggcctgct

SEQ ID NO: 267660 - DNA, 201 bp, Homo sapiens
atatgagctctccttaattaaactgtgagcttcctgaggggaaaaatcaggtcctgctagcacaaagcaagttcttgaaaaatccttgattaaagagtgtwtgatagagctaaaaaattggaatgcacaattcattctgctctggtgctttaaattaatattaaatatgtctgtaacatataaatcctagactttcacatt

SEQ ID NO: 267661 - DNA, 201 bp, Homo sapiens
aggtcatgagaacctggttagtaaatgtttgccacacagttcctaaagcattaatattggagccataaaactttaaatgtatcatttgttgtgaaatctasttgagtaacatgctttaaattattcttgtttttatgttatctatttgaatatacagttttcaaaaattgataaattttgttaacaattttacttgagatt

SEQ ID NO: 267662 - DNA, 201 bp, Homo sapiens
ctgtcaggttcaagcaattatcttgcctcagcctttggagtggctgggattacaggcacacaccaccacgcctggttaatttttgtatttttagtagagayagggtttcaccatgtttgccaggcttgtctccaactcctgacctcccaggcaggtgacccgcccacctcagccttccaaagtgccgggattatacacatt

SEQ ID NO: 267663 - DNA, 201 bp, Homo sapiens
tgtcaggttcaagcaattatcttgcctcagcctttggagtggctgggattacaggcacacaccaccacgcctggttaatttttgtatttttagtagagatrgggtttcaccatgtttgccaggcttgtctccaactcctgacctcccaggcaggtgacccgcccacctcagccttccaaagtgccgggattatacacattg

SEQ ID NO: 267664 - DNA, 201 bp, Homo sapiens
atgtcccgaaagcctaagatagaggggctggaggctgcgtcagtgccacctggcagtcatcatcttttcatacatgtccggttccttctatgagttcctcdggccctattactctacatccattttcttcccaccattaatatatgtgaagaaagtatgcaagcgctctctctcgttttccagtgtaaacgactggagatt

SEQ ID NO: 267665 - DNA, 201 bp, Homo sapiens
ctgggattacaggcacacaccaccacgcctggttaatttttgtatttttagtagagatagggtttcaccatgtttgccaggcttgtctccaactcctgacmtcccaggcaggtgacccgcccacctcagccttccaaagtgccgggattatacacattgagccaccgctcccggccaatgttattatttataagtaaggac

SEQ ID NO: 267666 - DNA, 201 bp, Homo sapiens
tgcattagcctctcatttttccgacgcttgtagtttacacataattcccactctgtgtaccacctctcccgcaaagaaaaagggtggcagggcggaacttyctactcccctggcaaacccggattggattccaacttccacatctgttttcagcagttccctggctgctgatgcgtctccacacagggggcattaggatga

SEQ ID NO: 267667 - DNA, 201 bp, Homo sapiens
ttgctgcctttaggatcctttctttatccttgacctttgggagtttgattattaaatgccttgaggtagttttctttgcattaaatctccttggtgttctrtaaccttgttgtagttgtatattgatatctttctctaggtttgggaagttctctgttattatccctttaaatacattttctacccctatcttgtccttta

SEQ ID NO: 267668 - DNA, 201 bp, Homo sapiens
gctcactgcaacctctgcctccctgattcaagcgattcttctgccttagcctcccaactagctgggattacaggcacccaccaccacacctggctaatttytgtattttttgtagagacggggtttcaccatgttggccaggatggtctcgatctcctgactctgtgatccacccacctcggcctcccaaagtgctgggat

SEQ ID NO: 267669 - DNA, 201 bp, Homo sapiens
gctgggattacaggcacccaccaccacacctggctaatttttgtattttttgtagagacggggtttcaccatgttggccaggatggtctcgatctcctgaytctgtgatccacccacctcggcctcccaaagtgctgggattacaggcatgagccaccgcacccagcccaattactcttagatttacccttttaaggctat

SEQ ID NO: 267670 - DNA, 201 bp, Homo sapiens
gcaccagctcctttctttcaaggcagtgggttcccttgtgggccagagtgtgtctagaaatgttgtctggtagctggggcctagaacagaggcctcacaaytcagtctgttgccctttcctgctgtggctaagctagtatccaagatacaaaacaaagtcctccctactcctccatctcctctcctcaagtggaaggaagg

SEQ ID NO: 267671 - DNA, 201 bp, Homo sapiens
aggtccacttttcaaccagaaacaaaggggaaagagaagaggacattcccagtctctttaaaggtcaaatctggaagtagcacacaacatcgtactcgtaytccgacagagaaaagttacttgtgaggctacatggccagcccccaaagcagttgggaaatatctgtattcggggtgcgatgtgcccagctagaaactgtt

SEQ ID NO: 267672 - DNA, 201 bp, Homo sapiens
caagagtctagtggacaagagagataaagaaacagatttgaagaggtgtgacaaatgctatgacaaaggaaagcccaggatgctgtgggtacctagaggakgaacagctgctctagatttgaataatatgaaagatttaccagggcacagagttgcctcaggtaagtctttaaggtcatataggagttaggagagagaaga

SEQ ID NO: 267673 - DNA, 201 bp, Homo sapiens
gtaagtctttaaggtcatataggagttaggagagagaagaaaactattccttgcagagacaagatttacagaggcatggagggtgtgaaacaagacagtarcaataaagggtggaagtaggggcgtgatgagagataagacagggaaacagggagaggccagatcaggaaagaacttacgtatcccgcagaagacctggac

SEQ ID NO: 267674 - DNA, 201 bp, Homo sapiens
atctctgcacatgctgtttctcctttgccttctgctgtggttggaagcagcctgagcccttcaccagaagcaggtgctggctcagtgcttcttttacagcytgcagaaccgtaagtcaaataaacccctgttctttataaattatccagtctcaggtgttccaatatagcaagacaaatcgactaagacagtgatcttggc

SEQ ID NO: 267675 - DNA, 201 bp, Homo sapiens
atgctgtttctcctttgccttctgctgtggttggaagcagcctgagcccttcaccagaagcaggtgctggctcagtgcttcttttacagcctgcagaaccrtaagtcaaataaacccctgttctttataaattatccagtctcaggtgttccaatatagcaagacaaatcgactaagacagtgatcttggcctattccttt

SEQ ID NO: 267676 - DNA, 201 bp, Homo sapiens
tgactcatggccagattttaggtttacagtttaattcaggtacatgatttgtgtcctttgagtttacatttgacataaaatattttactctttcttaggcygggcgcagtggctcacgcctgtaatcccagcaccttgggaggctgaggtgggcagatcacgaggtcaggagttcgagaccagcctggccaacatagtgaa

SEQ ID NO: 267677 - DNA, 201 bp, Homo sapiens
ggccagagtgtgtctagaaatgttgtctggtagctggggcctagaacagaggcctcacaattcagtctgttgccctttcctgctgtggctaagctagtatmcaagatacaaaacaaagtcctccctactcctccatctcctctcctcaagtggaaggaaggggtcttttctggagctgagaactgtgcagcctgggattag

SEQ ID NO: 267678 - DNA, 201 bp, Homo sapiens
atggtatcagatgttaattgagcttactgtttgttagacaactcattttatatggaagaaagctgagacaagagaatttagccatggtcacagattaggtsgcactagtttgaaaaatttaggaccttagagacatcattttcattccataactttcctttctcgtatgtgaagaagaattagccacctatttaatttcta

SEQ ID NO: 267679 - DNA, 201 bp, Homo sapiens
tggaagaaagctgagacaagagaatttagccatggtcacagattaggtggcactagtttgaaaaatttaggaccttagagacatcattttcattccataamtttcctttctcgtatgtgaagaagaattagccacctatttaatttctatctccatcaacaaaatatcagtaggatatgtgttgcttattggtaaggaata

SEQ ID NO: 267680 - DNA, 201 bp, Homo sapiens
ctaaaggcaggtaaatcagtgcatggtctgtgaccctatgggagtgtgaggaaggtgggggcagggcttaacttgaacatgtgaggccagggtgggtttcrgcaaacacaaaagactgaagttgaagaaattattattttttctattaaatgagtacaaaaaatggaataaataacaaagtagatgcaattagtttaaatt

SEQ ID NO: 267681 - DNA, 201 bp, Homo sapiens
gctgcacgatgaagataattatatccatttggagaactgttgtgaagtgtacataaaaattacgtagatgaaaggatattgtgaacagtgtaaagcaatayacagatgtaatgcgtaaatattattgctcgtgggaccttcgtgattccctagaacctgtagctcatttcccttctaccttatatgcatcaggactcctca

SEQ ID NO: 267682 - DNA, 201 bp, Homo sapiens
gtcctgtcggggcttacatttaacaaagagtaagttaacaaagtggtgataagaaccacggtagcagtaaacaaggtgatgagagagtagttagggaggcygcttaattagggtggtcacaggaagacctgtgcagctggcatttgagatactctctagaggctgtgaatgagtcatggaaagataggaggcaagagtgct

SEQ ID NO: 267683 - DNA, 201 bp, Homo sapiens
ctgcactaaatttaatttaaagaattcattccagcctttgagatacctatcatctcttggatcctgatttattatttcttctgttttttcccctaaaattmtcatatgattttgatagaagtacattctgtatatatccatccaatatattaatttaaaaataatgtcaatggtacagggcagagatctgaaatgttttac

SEQ ID NO: 267684 - DNA, 201 bp, Homo sapiens
ccttcccaacctctgataactattctcctactctctatgtccatgggttcaactgttttgattactagattccacaaataagtgagaacatgtgatgtttstctttctctgcctggcttatttaatagtttccaattctatccaggttgttgcaaatgactggctctcactcttttttatggctgaatagtactccattgt

SEQ ID NO: 267685 - DNA, 201 bp, Homo sapiens
cagtgagctgtgattgtaccactgcactccaacctgggtgacagcgagaccctgtctcaaaaaaaaaaaaaaaaaaaaaatagtttaaacagtagttaaaccagacctacaagaaagctttgccaagagtaagaaatgtgctgtcatcttttaaatcagtctgcacgggtattcttttttccttccttcctcatacaacaa

SEQ ID NO: 267686 - DNA, 201 bp, Homo sapiens
agtgagctgtgattgtaccactgcactccaacctgggtgacagcgagaccctgtctcaaaaaaaaaaaaaaaaaaaaaatagtttaaacagtagttaaaccagacctacaagaaagctttgccaagagtaagaaatgtgctgtcatcttttaaatcagtctgcacgggtattcttttttccttccttcctcatacaacaaa

SEQ ID NO: 267687 - DNA, 201 bp, Homo sapiens
ctaccgatttctctcctcacagataaagagagttttaatgagcaaaaaacttgcagaatctgaaggaaaaggctggtatagctgtacgaagtggcagagcrtgaaattggtggttattactttttttttttttccccgccatcagattccaccccgcatcaaagctgtgccaaataggctcgctttgtttagggacagggt

SEQ ID NO: 267688 - DNA, 201 bp, Homo sapiens
cactcgagtgcattgaccccaggagacggcagcgctaacttagcagagcgtttgctgtcaggcctttggatacctacagagcttactgtttcttgatagaytcctaatttttttcgtaaacaaatctgaaagtcaccaccttccccgttgactaccgatttctctcctcacagataaagagagttttaatgagcaaaaaac

SEQ ID NO: 267689 - DNA, 201 bp, Homo sapiens
cgtagtagcagcagtatcaattttgtgcaataaaattttgaataaccaattttatgcaaattgatatcaatagagaggagtaatgctgtattgaaattacytgttgccttccctgcttttttagggtgaaaaggtaataaaaagcatgtctaaaagtgatatgaattgcagatagtgataatgttgtaacattttggtgac

SEQ ID NO: 267690 - DNA, 201 bp, Homo sapiens
ccttaaacgcattgccaaagcttctggaggtatgtcttgtgctggctgtcacataaaatacttttattatccctgatcctatcaaaggtctttttacattrgaatattgacagaaaacagctcaaaaacatttatattctcttaatgctttgtgctaccaacacatttatagagccatttttcatgtaactggagaaattt

SEQ ID NO: 267691 - DNA, 201 bp, Homo sapiens; identical to SEQ ID NO: 52845

SEQ ID NO: 267692 - DNA, 201 bp, Homo sapiens
cactgcgacctccgccttccgggtttaagtgatactcctgcctcagtctcctgagtatctgggattacaggcgcccaccaccaggcccaactaattttttstatttttagtagaggcggtttcaccgtgttggccaggttggtctcgaactcctgacctcaggtgatctgcccgcctcagcctcccaaagtgctgggatta

SEQ ID NO: 267693 - DNA, 201 bp, Homo sapiens
ggcgtgagccactgcacttggcctggactcatcttcattgtccacctcctaggctaaatttatgtcttttatgtgcttgtaatctctgcataccactttartgacacttgccctggagtgtgattggtaatccctctccccactagatccttgaaggcaggacctgtgttccctgtttaaccatagttctcaattagtaat

SEQ ID NO: 267694 - DNA, 201 bp, Homo sapiens; identical to SEQ ID NO: 52835

SEQ ID NO: 267695 - DNA, 201 bp, Homo sapiens
ctgtgttccctgtttaaccatagttctcaattagtaattcaaatttgggttggggagagctaagtggtaatttttaattccttcaaattttccatgaattsgactaatttaaattctggtcagagataacaaaggataatacaatttgatctatgattatcttgtgataaatacttaatggaagttaaattatttttaaaa

SEQ ID NO: 267696 - DNA, 201 bp, Homo sapiens; identical to SEQ ID NO: 52838

SEQ ID NO: 267697 - DNA, 201 bp, Homo sapiens
ttagtgacatccattccatccaaaaggttaagggtgtgatctaaaagatcccttagaaattctaaattgtcttaaaattttgaaccagtagcatctgttaygtgtacctaaggctaatgtaacagaatcagttcccctagaaagcatgtgatccaaatgctctcagtggctgggggtagtggctcacacctgaaatctcaa

SEQ ID NO: 267698 - DNA, 201 bp, Homo sapiens
tactcacagcttgctttatggctggaattggtcctattcccataatggaaggctccacacccacttgggaccaggaaactatccgtgctaaaggtgtaagyccacgtttatcagcttctgacttcttcataagaacgacagctgcagcaccatcatttattcctgtaaaatatgagtgacttaatttctaccatgcttatt

SEQ ID NO: 267699 - DNA, 201 bp, Homo sapiens
agccggtgtggtggtgtgcgcctgtagtcccagccactcaggaggctgagacaggagaattgcttgaacctgggaggcggagattgcagtgagccaagatygcaccactgcactccagcctgggcgacagagtgaggctccgtctcaaaaagaaaaaaaaaggattacagcagttggggaggggagatctctgacaggaaa

SEQ ID NO: 267700 - DNA, 201 bp, Homo sapiens
gtctagttgggatgtcaagaaaccaaattaattctttcagtataggttaagtcaatgatcaaatacagagaaatgacatgtttccttaaactgttttaagrataattttgtacataaatattgagttgggtgtggtggctcatgcctgtagtcccccagctacttgggaggttaaggcagggggctcacttgagcccagga

SEQ ID NO: 267701 - DNA, 201 bp, Homo sapiens
ttaattcatttcatcactaccattttggttaataatatatggccattttagtgtcattccatatgtattgcacatgttgaatatccggcacactcagaccrgtgaatgttttctcaacaggttattattgcagcagaactcctaaaaaatgcagatgaattagtcaaacagaaaattcatcccacatcagttattagtggc

SEQ ID NO: 267702 - DNA, 201 bp, Homo sapiens
actaagatataatttctaaagattcctatgtattactcttttagatgttactcttacctataaataggttgatgtttaaaccactatgatatactcacctyttctagttgacaccaaaactggtacaatctctttgtcaaaatggccagctttctgtgcattctctgtcctgttctgggacagaactgcaaccttgtcctg

SEQ ID NO: 267703 - DNA, 201 bp, Homo sapiens; identical to SEQ ID NO: 52836

SEQ ID NO: 267704 - DNA, 201 bp, Homo sapiens
tctccattaaaaataaatttagccgggcatggtgtgtgtgccatgtagctagtagtcctagctgcttgggaggctgaggcagaaggatcacttgagcctargagttcaaggctgcagtgagccatgattgtgcctctgcactccagcctgggtgaccctgtctcacaaaacaaaacaaaaatcaggaaatttaacatgaat

SEQ ID NO: 267705 - DNA, 201 bp, Homo sapiens
cttccccatcatattttcacccactagttttagcattcattcatgactttctaactccaacattccttctattggtaagatattaattggcattttaccayaaagaaaaccttttccttttctcccatttattcagttatttatatcaggatggactcatacattttcattttattgaataagttataactcattactttc

SEQ ID NO: 267706 - DNA, 201 bp, Homo sapiens
cataaagaaaaccttttccttttctcccatttattcagttatttatatcaggatggactcatacattttcattttattgaataagttataactcattactytcattacttactttgatgctgaaatttttcaatacttgggcagttataacccattactatcattacttatttgcacgctgaaattgttcaaaatttaggc

SEQ ID NO: 267707 - DNA, 201 bp, Homo sapiens
agataaagagagttttaatgagcaaaaaacttgcagaatctgaaggaaaaggctggtatagctgtacgaagtggcagagcatgaaattggtggttattactttttttttttttccccgccatcagattccaccccgcatcaaagctgtgccaaataggctcgctttgtttagggacagggtcccacctgtcgcccagacga

SEQ ID NO: 267708 - DNA, 201 bp, Homo sapiens
tagagccttttctttgattcttgtttcatacttgcatcttcaactaattatgctctttcctggattcttcctgtggctcttttgtccttcaagcttcttcrtacatccttgtgctataggtactccctatcgtacatctttacaggcagatgtcatgagtggtttactacacaaaacttctctggtgcttttcttctcatc

SEQ ID NO: 267709 - DNA, 201 bp, Homo sapiens; identical to SEQ ID NO: 52832

SEQ ID NO: 267710 - DNA, 201 bp, Homo sapiens
aggctggagtgcagcagctactaacaggcaaaatcaaccatagtatactatacaacctcaaactgctggcctcaagtgatcctcccaccacagcctccctrgtagctgggactataggcacctgccactgcaccctgtaaaagctattctcttatatatacttctagaagctttacattttttgcttttatttttaaatcc

SEQ ID NO: 267711 - DNA, 201 bp, Homo sapiens
tccctgcctatcttacctcgttccttttatgccaagtaagccaatgtctttttttttttttttttttttttaccttgggaagtaatgaactcagtcctagtaactagtatttctttaactattacccacatggccaacacctagaagatactatcttaaaattggattgtgaaattcactggtaagctctcagggttactt

SEQ ID NO: 267712 - DNA, 201 bp, Homo sapiens
gggagagctaagtggtaatttttaattccttcaaattttccatgaattggactaatttaaattctggtcagagataacaaaggataatacaatttgatctrtgattatcttgtgataaatacttaatggaagttaaattatttttaaaaatcacagaaggtaactcaggttacaaaaatactttgcagagaatcagatatc

SEQ ID NO: 267713 - DNA, 201 bp, Homo sapiens
tggggcagggcgctgtggccccacttttcccacagcgaggaggagccccgccgcgcgcggcagggttttgagaccggcaacgcgtggatgtggtgtccggkgcggcgttggaaacgcgccctccgcgggaaagcgggcctcccgggctcgcacgtgcgggccacgcctcgcacccccttttgtttcagggcgaccccctga

SEQ ID NO: 267714 - DNA, 201 bp, Homo sapiens
aaagattcatagaaaagaggtctaaacttgggtggaaaggctaaagttaaaccattctttgtcaacataaatatatgctgcatgatactggtaactgctastttggtttgttcttaggttaatacagtgacattctcacacatttttgccttagtgacatccattccatccaaaaggttaagggtgtgatctaaaagatcc

SEQ ID NO: 267715 - DNA, 201 bp, Homo sapiens
ctggtcagagataacaaaggataatacaatttgatctatgattatcttgtgataaatacttaatggaagttaaattatttttaaaaatcacagaaggtaaytcaggttacaaaaatactttgcagagaatcagatatcaccaaggagagaattcagaagatcctggcaactggtgccaatgttattctaaccactggtgga

SEQ ID NO: 267716 - DNA, 201 bp, Homo sapiens
aatgctcttggttactcttctggtagggaaagactagagctaactacatgaataagctcacttaaggctaacaggaagacaaatttcataaaagggaatarggttatactcacagcttgctttatggctggaattggtcctattcccataatggaaggctccacacccacttgggaccaggaaactatccgtgctaaaggt

SEQ ID NO: 267717 - DNA, 201 bp, Homo sapiens
tcttcatttgtatgtctagttgggatgtcaagaaaccaaattaattctttcagtataggttaagtcaatgatcaaatacagagaaatgacatgtttccttmaactgttttaagaataattttgtacataaatattgagttgggtgtggtggctcatgcctgtagtcccccagctacttgggaggttaaggcagggggctca

SEQ ID NO: 267718 - DNA, 201 bp, Homo sapiens
cttttttagggtgaaaaggtaataaaaagcatgtctaaaagtgatatgaattgcagatagtgataatgttgtaacattttggtgacaagtaatgcttgctkctttaatagattagattactaaaaggaagtcccttgaaattacccttgatttttcacgtgtgtaccctttgtccattccaaacctgttactgtccttaac

SEQ ID NO: 267719 - DNA, 201 bp, Homo sapiens
ctgaggaaagtagctaccagggacctgtttgtgccaaattctgctatagtttgggtcatagtacttggctggttacgagtgagtggatcaggcagtctcaragccaatcgtgcactgctggcaggacataagagatatcagttatcaataagggagcttgacgggagcattctgtattagaaaatagcgagtgaccccaaa

SEQ ID NO: 267720 - DNA, 201 bp, Homo sapiens
ctcaacacttggggagcctaaggcaagaggatcaattgaactcaggagttcaaaaccagcctgggcgacatagaccttgtctctacgaaatgaagaaggcktggtgcacctgtagttcgaggtaatgggaggctaaggcaggaggaatatttgagcctaggagttttgaggctgcagtgagctatgatggtgccactgcac

SEQ ID NO: 267721 - DNA, 201 bp, Homo sapiens
cgggaaagcgggcctcccgggctcgcacgtgcgggccacgcctcgcacccccttttgtttcagggcgaccccctgagtgtccatgttaaacgccaggtttyattttaggaccatttaccagaaaaagagtaggtccatccgcgcgccctcggatgagcccggtgccctgtccgcccgcagctgcagtcgaggtcgggcgtc

SEQ ID NO: 267722 - DNA, 201 bp, Homo sapiens; identical to SEQ ID NO: 52826

SEQ ID NO: 267723 - DNA, 201 bp, Homo sapiens
ttcccataatggaaggctccacacccacttgggaccaggaaactatccgtgctaaaggtgtaagcccacgtttatcagcttctgacttcttcataagaacracagctgcagcaccatcatttattcctgtaaaatatgagtgacttaatttctaccatgcttattaacctcagttacatatctgtggcttctttaccacct

SEQ ID NO: 267724 - DNA, 201 bp, Homo sapiens
gtttctctccctgttgtccctgcctctttttccttcccgccgtgccccgcggccgggccggggcagccgggaagcgggtggggtggtgtgttacccagtakctcctgggacatcgctcgggtacgctccacgccgtcgcagccactgctgtggtcgccggtcggccgaggggccgcgatactggttgcccgcggtgtaagc

SEQ ID NO: 267725 - DNA, 201 bp, Homo sapiens
tgtgagaaattaataaatacatcatgatatgacagtgtgatcttaccgagtcagtaaatgtgatacacagtataaactcttcatagatcatccagcatgcyggtatagtagaaacactattgtttggtgagaaagatgttaattctggagaaactagatagtttgtggggaaaatgtatttctagattaaactttagccat

SEQ ID NO: 267726 - DNA, 201 bp, Homo sapiens
agttttccttccataagaagctgacagtctttttgctttaaaaatatttcttagtgttttatcaacttgaagaactatcttttttaaataaaataatagcytaatataggtcatatgaatagtcacactcggtttagcttctgttgagcattttttctaaaggtaatagatgtgttgtcttttacggttgtattgatgaac

SEQ ID NO: 267727 - DNA, 201 bp, Homo sapiens
gcacgcgtgcgtagtagcagcagtatcaattttgtgcaataaaattttgaataaccaattttatgcaaattgatatcaatagagaggagtaatgctgtatkgaaattacctgttgccttccctgcttttttagggtgaaaaggtaataaaaagcatgtctaaaagtgatatgaattgcagatagtgataatgttgtaacat

SEQ ID NO: 267728 - DNA, 201 bp, Homo sapiens
tgtgcgcatgtgttgcgcgcacgcgtgcgtagtagcagcagtatcaattttgtgcaataaaattttgaataaccaattttatgcaaattgatatcaatagrgaggagtaatgctgtattgaaattacctgttgccttccctgcttttttagggtgaaaaggtaataaaaagcatgtctaaaagtgatatgaattgcagata

SEQ ID NO: 267729 - DNA, 201 bp, Homo sapiens
ttttaaagcataagactttgagatgggcatggtggtatgtgcctgtagtcccagctactaaggaggctgaggtaggagtattaattgaacccaggagtgcyagtccaatgtgggcaacatagcaagaccctgtctcgggagtgggtgcgtgtgtgcgcatgtgttgcgcgcacgcgtgcgtagtagcagcagtatcaattt

SEQ ID NO: 267730 - DNA, 201 bp, Homo sapiens
gcactccagcctgggtgaccctgtctcacaaaacaaaacaaaaatcaggaaatttaacatgaatcaaacactattatctaatccttggtccacattcaaayttcacctatatttcagtaatgtccttctagctcctttatttgagccaataaagaagcatgcattgtacaactatcaatctctctagtttgcttttgtctg

SEQ ID NO: 267731 - DNA, 201 bp, Homo sapiens
ctgaatttgttcatttctaaaatgacagttccatcttaggataaaaggagttaccgtgtgctgcctaactaaattctaaacttgtaatatagcacttttaycacaaatgctactgagtccaaggatattaaaatcatgaaagagcaatattcacagatcctttgtaactctcttattagcaactattctgtcaaccctggc

SEQ ID NO: 267732 - DNA, 201 bp, Homo sapiens
tgtgtgcgcatgtgttgcgcgcacgcgtgcgtagtagcagcagtatcaattttgtgcaataaaattttgaataaccaattttatgcaaattgatatcaatagagaggagtaatgctgtattgaaattacctgttgccttccctgcttttttagggtgaaaaggtaataaaaagcatgtctaaaagtgatatgaattgcaga

SEQ ID NO: 267733 - DNA, 201 bp, Homo sapiens
gcgccaccagcctggctaattttgtatttttagtagagatggagtttctccatgttggtcatgtgggtctcaaactcccgacctcaggtgatctgcctgcrttgacctcccaaagtgctgggattacaggcatgagccaccacacctggcctattttttaatttaatttaatttaatttaattttttgagacagagttttg

SEQ ID NO: 267734 - DNA, 201 bp, Homo sapiens
gtgtgcgcatgtgttgcgcgcacgcgtgcgtagtagcagcagtatcaattttgtgcaataaaattttgaataaccaattttatgcaaattgatatcaatagagaggagtaatgctgtattgaaattacctgttgccttccctgcttttttagggtgaaaaggtaataaaaagcatgtctaaaagtgatatgaattgcagat

SEQ ID NO: 267735 - DNA, 201 bp, Homo sapiens
gtgcgcatgtgttgcgcgcacgcgtgcgtagtagcagcagtatcaattttgtgcaataaaattttgaataaccaattttatgcaaattgatatcaatagagaggagtaatgctgtattgaaattacctgttgccttccctgcttttttagggtgaaaaggtaataaaaagcatgtctaaaagtgatatgaattgcagatag

SEQ ID NO: 267736 - DNA, 201 bp, Homo sapiens
tgaggaaggagaatcactggaacctgggaggcggagattgcagtgagccaagatcacaccactgcactccagcctgggctacagagtgagactccgtctcaaaaaaaaaaaaaaataaaaaatgtttttttgtggattatgtgcagtacatctttttgtaatttaaagcacatacaacatggtagaaggaatgtgaattaa

SEQ ID NO: 267737 - DNA, 201 bp, Homo sapiens
ggctgaggtggcaagaatctgaagcccaggaggttgaggctgcagtgagctgtgattgtaccactgcactccaacctgggtgacagcgagaccctgtctcaaaaaaaaaaaaaaaaaaaaaatagtttaaacagtagttaaaccagacctacaagaaagctttgccaagagtaagaaatgtgctgtcatcttttaaatcag

SEQ ID NO: 267738 - DNA, 201 bp, Homo sapiens
agttctttgtgagctggctgatctgcaagacaaagaagttggagatggaactacttcagtggtaggtagactggctaaagaatgatcatttttctaaaaaygaccgactttcagaaagttgaagccataagtgggtcatttgtgctgtgtcagaaataagttacatattctgaatgcccagaagattgagcaagaagaaaa

SEQ ID NO: 267739 - DNA, 201 bp, Homo sapiens
gctgaggtggcaagaatctgaagcccaggaggttgaggctgcagtgagctgtgattgtaccactgcactccaacctgggtgacagcgagaccctgtctcaaaaaaaaaaaaaaaaaaaaaatagtttaaacagtagttaaaccagacctacaagaaagctttgccaagagtaagaaatgtgctgtcatcttttaaatcagt

SEQ ID NO: 267740 - DNA, 201 bp, Homo sapiens
ctgcagtgagctgtgattgtaccactgcactccaacctgggtgacagcgagaccctgtctcaaaaaaaaaaaaaaaaaaaaaatagtttaaacagtagttaaaccagacctacaagaaagctttgccaagagtaagaaatgtgctgtcatcttttaaatcagtctgcacgggtattcttttttccttccttcctcatacaa

SEQ ID NO: 267741 - DNA, 201 bp, Homo sapiens
cctgtttgtgccaaattctgctatagtttgggtcatagtacttggctggttacgagtgagtggatcaggcagtctcaaagccaatcgtgcactgctggcakgacataagagatatcagttatcaataagggagcttgacgggagcattctgtattagaaaatagcgagtgaccccaaaagatccaccctttagaaatgtga

SEQ ID NO: 267742 - DNA, 201 bp, Homo sapiens
ctggaaccaagagtgcttgagtgctgacataggtcccatgttaccgtgtcctgtaaacccagcataccccctccccacattcatgtatccaggacatatayttgcaacctgaaaaacataactaagatataatttctaaagattcctatgtattactcttttagatgttactcttacctataaataggttgatgtttaaac

SEQ ID NO: 267743 - DNA, 201 bp, Homo sapiens
tccagcttctcatgaaacctgctgtgtgtgcacagtggtcatggacgctctggaaccaagagtgcttgagtgctgacataggtcccatgttaccgtgtccygtaaacccagcataccccctccccacattcatgtatccaggacatatatttgcaacctgaaaaacataactaagatataatttctaaagattcctatgta

SEQ ID NO: 267744 - DNA, 201 bp, Homo sapiens; identical to SEQ ID NO: 52828

SEQ ID NO: 267745 - DNA, 201 bp, Homo sapiens
atacttacttcacttcagttaatcaaagaagagatataaaaatccttaagacagtctctggccataaggacgaaagcacctaagaagcagattagtatatkgtctttttaacctttttaaagctaatacagtttcagccatgtctgccttacctgtaatacccatatgacagttgtgaaatgcatctgtaagaccatcaca

SEQ ID NO: 267746 - DNA, 201 bp, Homo sapiens
ttagcatttaagtagtaatatttgaagttaaaaacttggaccagtatcttttttctcatttgactaccacattttctcctaataatagattttagtggctrtgcttatgggatagattaaacttgccatgatctgaagagggagggttttttcatgtcctcctcctatatgaaatggctgaacgggtattattacttacga

SEQ ID NO: 267747 - DNA, 201 bp, Homo sapiens
tagattttagtggctatgcttatgggatagattaaacttgccatgatctgaagagggagggttttttcatgtcctcctcctatatgaaatggctgaacggrtattattacttacgacattttggctctgtgttaagcatgatgaatgcaaagagtttgagtagtgactttataagcgtttttctcccccacacttttaaac

SEQ ID NO: 267748 - DNA, 201 bp, Homo sapiens
acagcgagaccctgtctcaaaaaaaaaaaaaaaaaaaaaatagtttaaacagtagttaaaccagacctacaagaaagctttgccaagagtaagaaatgtgytgtcatcttttaaatcagtctgcacgggtattcttttttccttccttcctcatacaacaaagtgtcctttcttccatcaaagccagtccctctacagtaa

SEQ ID NO: 267749 - DNA, 201 bp, Homo sapiens
aaaaaaaaaatagtttaaacagtagttaaaccagacctacaagaaagctttgccaagagtaagaaatgtgctgtcatcttttaaatcagtctgcacgggtrttcttttttccttccttcctcatacaacaaagtgtcctttcttccatcaaagccagtccctctacagtaagtgttctagagtctgtttccttctgctcta

SEQ ID NO: 267750 - DNA, 201 bp, Homo sapiens
gcaaccctttgattatgtccttcttgaaatgctttcggggatggaaggctttgtgatgctgctttgtctggaccatgtcataatactctccaggatagccyctttgttcccatgacttcatgtattatctctctatgccagagactctttcagctgtttctctaagctccaaacacacatacctctatctagtagaatgct

SEQ ID NO: 267751 - DNA, 201 bp, Homo sapiens
tttgaaaacacagatgatatactagtcttgcttagagatattaagcttagtatctagattgtttggtgtaacctgcaaggtttttcacttttctggttctrccttcttttgtgctttcaactctggactcctgtttttgtttgtttgtttgtttttgagacggagttttgctcttgttgcccaggctggagtgcagtggca

SEQ ID NO: 267752 - DNA, 201 bp, Homo sapiens
cggtctcggctcactgcgacctccgccttccgggtttaagtgatactcctgcctcagtctcctgagtatctgggattacaggcgcccaccaccaggcccarctaattttttgtatttttagtagaggcggtttcaccgtgttggccaggttggtctcgaactcctgacctcaggtgatctgcccgcctcagcctcccaaag

SEQ ID NO: 267753 - DNA, 201 bp, Homo sapiens
cttgtagtctcacagtgatacgagcagttatacgcatgggataaaataacattgggccactgtaaattgagatgaagtaaccattttcatctcttctgcakggactagacattgtttctgtatagtatatctaaatatcctgtgtaggcaggacttaagggaactttatgtagacttattttattaaaatgccattttttt

SEQ ID NO: 267754 - DNA, 201 bp, Homo sapiens; identical to SEQ ID NO: 52830

SEQ ID NO: 267755 - DNA, 201 bp, Homo sapiens; identical to SEQ ID NO: 52833

SEQ ID NO: 267756 - DNA, 201 bp, Homo sapiens; identical to SEQ ID NO: 52834

SEQ ID NO: 267757 - DNA, 201 bp, Homo sapiens
tgcagtgagctgtgattgtaccactgcactccaacctgggtgacagcgagaccctgtctcaaaaaaaaaaaaaaaaaaaaaatagtttaaacagtagttaaaccagacctacaagaaagctttgccaagagtaagaaatgtgctgtcatcttttaaatcagtctgcacgggtattcttttttccttccttcctcatacaac

SEQ ID NO: 267758 - DNA, 201 bp, Homo sapiens
gcagtgagctgtgattgtaccactgcactccaacctgggtgacagcgagaccctgtctcaaaaaaaaaaaaaaaaaaaaaatagtttaaacagtagttaaaccagacctacaagaaagctttgccaagagtaagaaatgtgctgtcatcttttaaatcagtctgcacgggtattcttttttccttccttcctcatacaaca

SEQ ID NO: 267759 - DNA, 201 bp, Homo sapiens
gggcttgcgggcagaaccgcggacctcggacgcatttacagagcgcctgaaaccccagtgtttctggacaccccaatgttggagttccccgacttgacgtyttgggcttttttttaaaaaatcttagggtttctcgaaacagtaaagactggggggtgacaaagacttatctctcgttcagctcaggactggaatcccacg

SEQ ID NO: 267760 - DNA, 201 bp, Homo sapiens
ctcgaaacagtaaagactggggggtgacaaagacttatctctcgttcagctcaggactggaatcccacgggcgagaatctcgagtgcgagcccggcccgcrgcgggtctcagcacagctctgatgggtccttttgctctcggcggcttcgggaggtcctatgcgtttctcctggcgccagtcattcgctcgcgtgaggggc

SEQ ID NO: 267761 - DNA, 201 bp, Homo sapiens
aggggcgggcggaggcgcgcggggcgcggggcgcggggcgcggggcggaagtgaggccggggcgcggggcgcggggcggaagtgaggccggggtctgggcytgcgggcagaaccgcggacctcggacgcatttacagagcgcctgaaaccccagtgtttctggacaccccaatgttggagttccccgacttgacgtcttgg

SEQ ID NO: 267762 - DNA, 201 bp, Homo sapiens
agaattcattccacctatctggctgtacttttgtatttgttaaccaatgtctgatacacccaccttcccctacccatcccagcctctagtaaccattattstactctgtacgtctatgagatcaacttttttagcttcgtcatgagtgagaacatgtgttatttatctttctgtgcctgccttatttctctgaacatgata

SEQ ID NO: 267763 - DNA, 201 bp, Homo sapiens
gccttatttctctgaacatgatatcctccaaactcatccatgttgccatgaatgacagaatttcattcttttttgtggttacgtagtatttcaccatatatatgtatgtatgtatgtatgtatatgcatgccacagtttctttattcattcatctgtcgataggaacttaggttgattccatgtcttggctattgtgaata

SEQ ID NO: 267764 - DNA, 201 bp, Homo sapiens
actgtgagaaatgtgccttaagtgtttgaatattaaatgcagtaattcattgtactgagtgctatattttttttaactttcataatggtaagatttttttwaaaaaacccttatgattctgaataaaggcaatatttttaagctgaaaatttgttttactttagcattactagatttctattattatttcactgaccacaa

SEQ ID NO: 267765 - DNA, 201 bp, Homo sapiens
taatgttaggataaattgtgtaaaatagaaaatcagtaattgtcttggattaaataaattgttggtgcctttgttcactatattataaaatacgaaatgaytgtgaaatatattgacttggcatatgcacagaatacagtctcattctcagtgaacttatcctaaatgtgacagaatagcagtaaaaagaaaaaaagaatg

SEQ ID NO: 267766 - DNA, 201 bp, Homo sapiens
tagtagagacggtgtttcaccatgttgaccaggctggtgtcgaactcctgacctcaagtgatccgcctgcctcagcctcccaaaatgctaagattacaggygtgagccaccatgcccggccccacatacattttgtagtcagggtcacaaattctggttttgttggtgttagcaggtgctggtaagatatctggtatcttt

SEQ ID NO: 267767 - DNA, 201 bp, Homo sapiens
ccttatttctctgaacatgatatcctccaaactcatccatgttgccatgaatgacagaatttcattcttttttgtggttacgtagtatttcaccatatatatgtatgtatgtatgtatgtatatgcatgccacagtttctttattcattcatctgtcgataggaacttaggttgattccatgtcttggctattgtgaatag

SEQ ID NO: 267768 - DNA, 201 bp, Homo sapiens
aggcatgcaccaccacacctggctaatttttgtatttttagtagagacggtgtttcaccatgttgaccaggctggtgtcgaactcctgacctcaagtgatycgcctgcctcagcctcccaaaatgctaagattacaggcgtgagccaccatgcccggccccacatacattttgtagtcagggtcacaaattctggttttgt

SEQ ID NO: 267769 - DNA, 201 bp, Homo sapiens
cttatttctctgaacatgatatcctccaaactcatccatgttgccatgaatgacagaatttcattcttttttgtggttacgtagtatttcaccatatatatgtatgtatgtatgtatgtatatgcatgccacagtttctttattcattcatctgtcgataggaacttaggttgattccatgtcttggctattgtgaatagt

SEQ ID NO: 267770 - DNA, 201 bp, Homo sapiens
tccgatctcggctcactgcaacctttgcctcctgggttcaagtgattcttgtgcctcagcctcccgagtagctgggattacaggcatgcaccaccacaccyggctaatttttgtatttttagtagagacggtgtttcaccatgttgaccaggctggtgtcgaactcctgacctcaagtgatccgcctgcctcagcctccca

SEQ ID NO: 267771 - DNA, 201 bp, Homo sapiens
ttatttctctgaacatgatatcctccaaactcatccatgttgccatgaatgacagaatttcattcttttttgtggttacgtagtatttcaccatatatatgtatgtatgtatgtatgtatatgcatgccacagtttctttattcattcatctgtcgataggaacttaggttgattccatgtcttggctattgtgaatagtg

SEQ ID NO: 267772 - DNA, 201 bp, Homo sapiens
taacttcagatggactagagggggtggcaagaagttcctgatagtgatagtaatagatttggtacactgacagtggtgacaagtcagaattaatggccacmcacagggcacccttttggtatatacaactatcttactttagctatgaaattgaaataaaaataaatgcagataaattggccttagagtttatgtacgctt

SEQ ID NO: 267773 - DNA, 201 bp, Homo sapiens
gggcgccaccacatcgagctaatttttgtattattagtaaagatggggcttcagcaagttggccaggctagtctcgaactctttacctcaggttatctgcrcgccccaccccccgcccccctgccaggcctcccaaggtgctgggattacaggtgtgagccattgtgcccagcccaaatttcaataagctgtagtcatcag

SEQ ID NO: 267774 - DNA, 201 bp, Homo sapiens
atagaaagtttcatggcagacacatttaacatttattgaagacctactatttgtcaagtagtatgcttagtactttaaatagccatttattgtttatagcrtaactcctgaaagtagttgctatggcagttccacagatattaaaacaggcttagaaaaaagttaagggacttgattaaggtggcacaattataattctag

SEQ ID NO: 267775 - DNA, 201 bp, Homo sapiens
cttttatttttgaggtggagccttactctcaaaactagggccattttactgcattccagactggatgacagaatgagaccctgtctctaaaaaatatttgaaaaaaaaaaaaaagactgcttttaaaaaaataccttggttgcatatgaattgagacctattttagtctgtaggttgtgacccattagccataaaattagt

SEQ ID NO: 267776 - DNA, 201 bp, Homo sapiens
tgattctaccctggtgggggtttgaggtaactcactgtaggcttccagaagtagaaagtcctaggccttccaccctgcctttgctgccctgggtggggccrgggccacaagtctttggtggtgcttgactggagtagagtgttactgtctaaaagctctgtcttgctagactgccccttccttggtcctttgcctagaaag

SEQ ID NO: 267777 - DNA, 201 bp, Homo sapiens
tttttataaatgaaagttatttttgaaccgtaaaaatgaagactgtacaaatttatttattttttctttttttccttttttgagacagtctcactctgtcrcccaggctggggtgcagtggcatgatcttggctcactgcaacttccacctcctgggttcaagcaattctcatacctcagccttccgagtggcagggatta

SEQ ID NO: 267778 - DNA, 201 bp, Homo sapiens
caacaatttcctttctaagtagaggtgaccattacttcccctccattatttctgtaatataactatactgcattcctttaattaaatcaccaacagatatrtcagatttaaattttattttatttttatttttttgaaacggagtctcgttctgttgcccaggatagagtacagtggcatgatcttggctcactccagtct

SEQ ID NO: 267779 - DNA, 201 bp, Homo sapiens
tggttggaattatttctgtttagaagtttggttaaaaaaaaaccccgaggcaggccaggcgctgtggctcacacctgtaatcccagcactctgggaggcckaggcgggtagatcctgaggtcaggagattaagaccatcctggctaacatggtgaaaccccatctctactaaaaatacaaaaaattagccgagcgtggtgg

SEQ ID NO: 267780 - DNA, 201 bp, Homo sapiens
cacataaaaaagagttgctcagcttttctcttgttttctggatcaacttttatgtggttggaattatttctgtttagaagtttggttaaaaaaaaaccccraggcaggccaggcgctgtggctcacacctgtaatcccagcactctgggaggccgaggcgggtagatcctgaggtcaggagattaagaccatcctggctaa

SEQ ID NO: 267781 - DNA, 201 bp, Homo sapiens
tggctttttaattcatagagaacagtaaaaataaaatgttctgaattttagggttttctctggctttttttccccaacttcctactaccaagtgccagcaratgaacaactagtgatactgatatttactgaaatactgtaactagccaatcatgcatagttttactgcacatttttcaactgacaagtgtgcaggtggat

SEQ ID NO: 267782 - DNA, 201 bp, Homo sapiens
ctggaatgcaatagtgcatctcagctcactgtagcctccacctcctgggtccaggcaattctaatgcctcagcttcctgagtagctggaataattacccarcaattttttttttttttttttttttgagatggagtctcactctgtcgtccaggctggaatgcagtggtgtaatcttggcttactgcagcctcccaagtag

SEQ ID NO: 267783 - DNA, 201 bp, Homo sapiens
aagacgtgaatcttcttttttttgaaatgggttctcagtcttgcctaggctggtatgcaggagcatgatcacaactcgctgcatccgtgacctcccaggcycaagtgctcttcccatctaagcctcccaagcagctgggatgatggacatgagccaccacactcagctcattttttttttttttttttttttacagatggg

SEQ ID NO: 267784 - DNA, 201 bp, Homo sapiens
ttatataatcacatttgtttagttttgcttttgttgcctgtgcttttgaggtcttcctaaaatcttggcccagaccaatgtcctgaagcatttctcctacrtcatcttctaataatttcatagtttcaggtgtaaacgtttatatctttaatttattttgagttggttttatatatggtgagagttagggggtctagctcc

SEQ ID NO: 267785 - DNA, 201 bp, Homo sapiens
aaaattaaatgggtaaggtatcctctttaggtgtgaaataggcagggccctgtatttgttgtttagagagagaataagaatcttagaactcagatatttcratattttgcctgttctttttcagtctctgtgatcacttctttttcctaatcctagaggagaaaaaaaaaaactttctctgtggagagacagcactgcatc

SEQ ID NO: 267786 - DNA, 201 bp, Homo sapiens
tcagctcattttttttttttttttttttttacagatggggtcttgctgtgttgcccaggctgatcttgaactcctgggttcaagtgatcctcttgcttcaractcccaaagtgctagatttataggcatgggtcaccaatcctggtcaagacatgaattctattttttttgacagggtctcattctgtcacctaggctgga

SEQ ID NO: 267787 - DNA, 201 bp, Homo sapiens
attcctagactatgaaaagctatataaagcttctttatagcgttggttattcaagaagcgtttacatttttataggtaataggcatgctatgtagtccacragggattctccacctcattttgaaactggtatcaagatgctgacaaatattgaggattagagaatcttgttgaattcactctattaacaacattgttgaa

SEQ ID NO: 267788 - DNA, 201 bp, Homo sapiens
gatcctgaggtcaggagattaagaccatcctggctaacatggtgaaaccccatctctactaaaaatacaaaaaattagccgagcgtggtggtgggcgcctrtagtcccagctactcgggaggctaaggcaggagaatggcatgaacccgggaggcggagcttgcagtgagccgagaacatgccaccgcactccagcctggg

SEQ ID NO: 267789 - DNA, 201 bp, Homo sapiens
gagggaaagtgagcaagcacctgaacaaggtacagaggcgcgcgaggtagtaccataataccatctacaccaaggtctatactatccctggtctccgctgygtccgccgggaggaggcggtgcaagaatgcgcacgcgcggccccgggcccggccacaccctcttccgccgctcccgcccagcgacctcgctcccggggcg

SEQ ID NO: 267790 - DNA, 201 bp, Homo sapiens
ttctttatgcttttttttagttttaaaatacatgggctcattgtttctaaatcatggagattatggaatgaggaccataagagcaggagtttaaaatgagwtgacacataaccctgaagagtgtgcctgtagactatgttctcgtgatccaggctaaaaactgtcaaccgccaataactgaagaaaaggttgtgctcttta

SEQ ID NO: 267791 - DNA, 201 bp, Homo sapiens
ctgcattactaatcttctgtaggaatctgaaattatgttttttaaatcaataggtttagttataatatgataaccacagtattgtaacaatgatgccaaamggtgagaatcataatttattgtggaacttaggtcacctccgatctattaactgcaccaaatgccttcattttaatgacctaatctttggattaggttctt

SEQ ID NO: 267792 - DNA, 201 bp, Homo sapiens
tttctttgtggtctccatgtttctcaggctggtatatggtggcaggatcgtagctacttgtagactcaagtttctgggctcaagcagtcctcccaccttakcttcctgagtagctgggactacaggtgtacacctccaagcttggctgatgttttcatcttttttgtagagacagggtctcactgcattgcccaggcttgt

SEQ ID NO: 267793 - DNA, 201 bp, Homo sapiens
ccattgcatatatatttcatgctttgtttatcattcatttgttgatgtacacttgggttgctgtcactgtttggcttttgtgaataatgctgctttgaatrtgagtgcacagatatttctccaagaccctgcttttaagatttttggatatatacaagaagtggatttgctgggtcatatggtaattccatttttaatttt

SEQ ID NO: 267794 - DNA, 201 bp, Homo sapiens
cggggtttcaccatgttggccaggctggtctcgttctcctcacctcgtgatccacctgcctcagcctcccaaagtgctgggattacaggcctgagccaccrtgcccagccaggcctcagatttttcttacgcaaagagaggaagttagactaacagtggttctcaaacagggatcacagaatacttcttttcatcaagcta

SEQ ID NO: 267795 - DNA, 201 bp, Homo sapiens
agggattttgccatgttgtagtatgtcaaaatttccttcctctttaaggctgagtgctattccattgcatatatatttcatgctttgtttatcattcattkgttgatgtacacttgggttgctgtcactgtttggcttttgtgaataatgctgctttgaatatgagtgcacagatatttctccaagaccctgcttttaaga

SEQ ID NO: 267796 - DNA, 201 bp, Homo sapiens
tttcaccatattggtcaggctggtttcgaactcctgaccttaggtgatccacctgcctcggcctcccaaagtgctgggattacaggcgtgagccacctcgyctggcaatattttgtatttgtagtggagacagggtttcaccatgttgatcaggatagtctcgatctcttgacctcgtgatccgcccgcctcggcctccca

SEQ ID NO: 267797 - DNA, 201 bp, Homo sapiens
tgcccagatttaaattttagatcttaggtttcaacatcctgaagtttattcagtcgtgtcttgtgttcagttgttgcattggcttctttagttcatagackcttaacttacacagtatgtgtgttcatccatatgtggagttgattatgatattaatgagtttttgtttgattagaccctcaccaggacctagaaaacgcc

SEQ ID NO: 267798 - DNA, 201 bp, Homo sapiens
taaacatccatcttcttctttgaaatcaggtttggcaggaaataaatgtggaagctaaacatgttaaagatatcatgaaaacactagagagctttaaactrgacagcactcccttgaaagcggcacagcatgaccttccagcttctgagggagaagtctggtccatgcctgtacctgttgaacgaaggtaagtggaaacct

SEQ ID NO: 267799 - DNA, 201 bp, Homo sapiens
tatttatttatttatttatttttggagacaagagtttcactctgtcaccctggctggagtgcagtggcacgatcttggctcactgcaacctccacctctcrggttcaagcgattctcctgcctcagactcccaagtagctgagactacaggcgcaggccaccatgcccagctaatttttgtgttttttagtagagacgggg

SEQ ID NO: 267800 - DNA, 201 bp, Homo sapiens
atgtctccaactttgttccttttgctcaggatctctttggagtcttttgtggttctccttttctatttcttttttttattttttttttgagacgaagtctygctctatcacccagtctggagtgcagtggcaggatctcggctcactgcaacctccacctcccggattcaagcaattgtctctgctcagcctcctgagtag

SEQ ID NO: 267801 - DNA, 201 bp, Homo sapiens
ccagctactcgggaggctgaggcaggagaatggcctgaacccaggaagcagagcttgcaatgagccgagagtgatcacgccactgcactccagcctgggcracagagtgagactccatctccaaaaaaaaaaaaaaaaaaaattgcaattgaaaacataaatttaataaactgttattaacattttgatagaatatcttga

SEQ ID NO: 267802 - DNA, 201 bp, Homo sapiens
ggagagtttattttgaactgaggagttcagggggtagacatactaggaaaactgccatctgagctgggctttgacaatagggagggtttgaatgtgggaayttttttaaaacaatgttttaaatttattttattttatttttttattttttgagacagagtctcatgctgttgccaggctggagtgctgtggtgcgatctc

SEQ ID NO: 267803 - DNA, 201 bp, Homo sapiens
cctattcctcccatgaggaacctccatactgttcatagtggctatatcatcttacatttccaagaactttgtatatgaattctttctctaaatcctcaccmgcatttgttagtttttgtcttttttttttttgtggagacagtctcactctgttgcccaggctggagtgcagtggcatcatcttggctaactacaacctcc

SEQ ID NO: 267804 - DNA, 201 bp, Homo sapiens
taacacagtgaaaccccatctctactaaaaattagccgtggtggcgggcgcctgtagtcccagctactcaggaggctgaggcaggagaatggcgtgaaccsgagaggcggagcttgcagtgagccgagaccgcgccaccgcactccagcctgggcgacagagcgagactccgtcttgaggaaaaaaaaaaaaaacaaaaaa

SEQ ID NO: 267805 - DNA, 201 bp, Homo sapiens
ttgcactccagcctgggcaacaagagcaaaactccgtctcaaaaaaacaaaaacaaaaacaacaacaacaaaaatacccgaggccaggcatggtggctcaygcctgtaatcccagcactttgggaggccgaggcgggcggatcacgaggtcccaagatcgagaccaacctggccaacatggtgaaaccctatctctactaa

SEQ ID NO: 267806 - DNA, 201 bp, Homo sapiens
ggctggtctcgaactcctggcctcacatgatctacccacttcagcctcccaaattgctgggattgtgagccaccgtgcccggcctgaagtgtctttactamtagagtgtctctgagactcttctcattgttactcccttaaactaggccctcatctcatgtctcagtgatatttgtaatcacaaacatctcactgctttct

SEQ ID NO: 267807 - DNA, 201 bp, Homo sapiens
ggcgggtggatcacgaggtcaggagatcaagaccatcctggctaacatggtgaaaccctgtctctactaaaaatacacaaaattagccaggcgtggtggcrggcgcctgtagtcccagctactcgggaggctgaggcaggagaatggcctgaacccaggaagcagagcttgcaatgagccgagagtgatcacgccactgca

SEQ ID NO: 267808 - DNA, 201 bp, Homo sapiens
aggaagcagagcttgcaatgagccgagagtgatcacgccactgcactccagcctgggcgacagagtgagactccatctccaaaaaaaaaaaaaaaaaaaawtgcaattgaaaacataaatttaataaactgttattaacattttgatagaatatcttgatgtggtttactggatatctgatatcaaaatggagttttgtaa

SEQ ID NO: 267809 - DNA, 201 bp, Homo sapiens
aggaattgaaatatccaagctccgtgtctgtctttgccactctctgtagctttgggaaaataataaaacctttttaggcctcagatttttcttttttttcttttttttttttttagacagagtctcactctgtcacgaggctggagtgcagtggcacgatctcggctcgctgcaatctctgcctcccgggttcaagtgact

SEQ ID NO: 267810 - DNA, 201 bp, Homo sapiens
caggagaatggcctgaacccaggaagcagagcttgcaatgagccgagagtgatcacgccactgcactccagcctgggcgacagagtgagactccatctccaaaaaaaaaaaaaaaaaaaattgcaattgaaaacataaatttaataaactgttattaacattttgatagaatatcttgatgtggtttactggatatctgat

SEQ ID NO: 267811 - DNA, 201 bp, Homo sapiens
actaacagtggttctcaaacagggatcacagaatacttcttttcatcaagctataatgaaaaatggaaaatttttctaaatttgctaaaattgaaaaaatkggctttttaattcatagagaacagtaaaaataaaatgttctgaattttagggttttctctggctttttttccccaacttcctactaccaagtgccagcaa

SEQ ID NO: 267812 - DNA, 201 bp, Homo sapiens
tggaaagtgtggcactagcaaggggtttttggaaggcaagggtttccatatgcaaagattgggagatggagtatttcagctgaagagaaaacttaagactrttttcaggccaaacagtccaacttgaagagtgggttatattcaatagagtagtaggagatgaattagatactgagcatgaaaataacagctatgaacttg

SEQ ID NO: 267813 - DNA, 201 bp, Homo sapiens
ggaattttaaaacattttaaaatatatttataatgtataaaatatattataataataatgtcaactttcatggtaatattttacctgaaaaaattttaacktaaagaattttctactaaaaaagaatattgttaatataccagcttcagagttgttaaaaaatattgttagatatccgggggatctttattttaaatttgc

SEQ ID NO: 267814 - DNA, 201 bp, Homo sapiens
tcttgaggtcagcagttcaagaccagcctggccaacatggcaaaacctcatctctacaaaaaatataaaaaatagccgggtgtggtggtgcatgcctgtastcccagctactcaggaggttgagatgggaggattgcttgaccctggaagtttgcttaaccctggaaggctgtggtgagccaagatattgccactgcactc

SEQ ID NO: 267815 - DNA, 201 bp, Homo sapiens
ataataataataaatgaagtttgtagtacatgttatttcaaaatagccctaaatgttttcactgcccttaaaacacccctgaaggtgggtgaaaataaaaycaagggcagagaccaaattctttgattgttgatccagtgctctttccaacatgccatagcttatcttcaaatatggcaagcccagatgttactacaaatg

SEQ ID NO: 267816 - DNA, 201 bp, Homo sapiens
gaaaactaggaggtacccaagttcatggaagtcccaggaaaagggtgttccaagaaagagggagtagacaggaatgtcacatgctattaagaggtcacatraaataagactagaaaagtacacattgaattcagaaacttgcaagtcattagaaacattggttatggtggtttggtgtggatgggggacataagcctgccg

SEQ ID NO: 267817 - DNA, 201 bp, Homo sapiens
tgtgaagatgctgaggcccagtaacaaacactaggtaacttatccaagatctcagggctggtcctcgttgaaaggaatgattggtctgctatgcagtggcraatctgaaagacatcttgccaaatcaaccattgacttcagaatgtgaatataataaagaatagaaacatcctgcttctataaattgggttgggatccagg

SEQ ID NO: 267818 - DNA, 201 bp, Homo sapiens
ttcagacaggcagcttcctccctagtgcctactgggtaaattgccgttatatcaagtcagtaggcagaaagatttagatggctttttggtgctagtgcttkcttcctcctttctggaactgtgcaataaatgcattattattccagagcactcggagaatgtggcagtagtcaggcattattgaaagagggccatttagcg

SEQ ID NO: 267819 - DNA, 201 bp, Homo sapiens
tattgtaaatatcttccataaaatgttttaaaataatattattcttaatgactgcattattgttcattaaattgatttgctgtaattttgcaaattactgrttattgaatattgagaatacttaatttttctctgttttaaatagtgtaatgagttaggcatcttttaaagctgtatcttttatacatacctgatggttta

SEQ ID NO: 267820 - DNA, 201 bp, Homo sapiens
tctttttgtcatctacttagcattgtctgttaacacaaccaaagagagtgtgtgtgaacatgtgcagttgtcctaaggggaactgagagatttggtggtartggggagaggaagggcttaacatgaggccattaacgtagatgggaaaacctcaaaaagtactggatataggtgttagattctaaggagcgtgaaaacttc

SEQ ID NO: 267821 - DNA, 201 bp, Homo sapiens
aatcttagatttggaaggcatcttagagattagttagtcatatacctacttattgatttgacttcatacacacatagggaatcagatgtgaaaatgagacrttgtggggactttcctgcctaattaatacattgctgagcatccccctctacccacagacacttaatcacgtattgcataaactgctaatcatgaaactat

SEQ ID NO: 267822 - DNA, 201 bp, Homo sapiens
ctctcttctctttaacttaattctcagtgttttgacagagctcttgcatgcctgttccctaataaaggacaaaagacaatcattttcttatgacagtttcrtattttatctcaatctaacagcagcatgaattgataactacttgtacaagtaatgttattttatttggttcaatgtactatgactgacttttatttaaaa

SEQ ID NO: 267823 - DNA, 201 bp, Homo sapiens
agcaaagtggttcactactctggcctttccaacggtggtggtctctcacttagatgctgcctgggaagcccttagagtcccagtgccacctctacaaggtrctctttcatgtgaagacaggaaaacctcttctgtgtcctcatgacagcagaaaaactcccatacacttatcaggcacaccactggtgtgcaagagcggct

SEQ ID NO: 267824 - DNA, 201 bp, Homo sapiens
ttggaggtgtggcagaagttgtatctcttatgctttttccagtgcaagtaatgggaagcacaactacaaatgtgtttaaaccataaggaaggctactttcrcataacaaaaggtccagagttggctcattcagtggctcagtgatttcatcaataattcagattttttcttatgtctttgcctctccattcggtaggtcat

SEQ ID NO: 267825 - DNA, 201 bp, Homo sapiens
gatgtagtagtctgcttcataccaacctcctctatcttcaaggacctccttggaaagaaacagctgtgcttcttctggagcaaagtggttcactactctgkcctttccaacggtggtggtctctcacttagatgctgcctgggaagcccttagagtcccagtgccacctctacaaggtactctttcatgtgaagacaggaa

SEQ ID NO: 267826 - DNA, 201 bp, Homo sapiens
gctactttcacataacaaaaggtccagagttggctcattcagtggctcagtgatttcatcaataattcagattttttcttatgtctttgcctctccattcrgtaggtcatctttttacctcaggctatctctctttaaaggtctaaaatctatggctattccaggtacaaaattcagacacaacagtatcctgaagaaaaa

SEQ ID NO: 267827 - DNA, 201 bp, Homo sapiens
gggtagtttgcttgatgtagtagtctgcttcataccaacctcctctatcttcaaggacctccttggaaagaaacagctgtgcttcttctggagcaaagtgkttcactactctggcctttccaacggtggtggtctctcacttagatgctgcctgggaagcccttagagtcccagtgccacctctacaaggtactctttcat

SEQ ID NO: 267828 - DNA, 201 bp, Homo sapiens
attgttaaggcagtcattcattctataataatagtattgaactttgtcaggcgctaaaagaaacactgggaatgtaatgatgagaatgttttgtgggcacstaacaaattgtattgaaaaacaaggataaaagaaaaagctaagtcactcatggtcctggagttccctggtcactgctattaactttttggtatgttttct

SEQ ID NO: 267829 - DNA, 201 bp, Homo sapiens
tgtctcctccttatgtcttataagtatcaataaataaacacaaaaaactttcctgggatactctttgatatagatatgttagcatagatctgtaagtagartttcaaagctgtgggatttagaagaatgcacaaataaagcatttattaaaacagcattgtattctctaatgcaagcttgtctaacctgtgggccacatgc

SEQ ID NO: 267830 - DNA, 201 bp, Homo sapiens
ccttcactgcacacccagtctaatatttgaccaaaccctgggcaccatagcctagccaagctgacgcataaaactatcacaggtgactataaaatgttctraaatttaagttttgaaaaatacagttatcacaaggcagagtagaacaagatgtttaacaaatctctctagaaaagatcatttttatatcatcagtagaat

SEQ ID NO: 267831 - DNA, 201 bp, Homo sapiens
actagtaacatctttgatagaaagaattcttgttgcagtacattgaagtattggttcatgtcatttctgtgcagcactcatttatcatctgtttcaaatgmatctttttggtacttcatattagcttgtgaacgtacaaaagtatccttcctatcaagtaactctagcattagaaaagaatgactgcctcttgagagttga

SEQ ID NO: 267832 - DNA, 201 bp, Homo sapiens
tgcatttactgcatatgttacatatgcagtatcttcctacccctagtaagcttaccttatctttctaacctgccattgttactcactagaatttttcattstctcttgttttccttatgatttttatgatgtggaataaataagggaacatactttatttaaaaaaacctccaaaacgaagaaagagtcaagtgttataca

SEQ ID NO: 267833 - DNA, 201 bp, Homo sapiens
tttcttgttatatgttgtcatagttctttacagttttcttttataacattaatcacagttttactcaaacactgttggataccataaagatacattctgtwattaaggatagtatatatatgtgtgtgcacttatgtatacatgtgtccgtgtgtgtatactttgtatgtatttagaggactgtgacttcttccttgtgag

SEQ ID NO: 267834 - DNA, 201 bp, Homo sapiens
aataaggaataataccagtattttaaaattattaatattaatatttataatattaattatattaatatagtaattttgatatttaaaaataaaatagaagrtaacacaatgataaggaaactcagctcttccaagaaataaagttgtatttgtttttaatcatcaaaaccataataaaataaacttaatatgtataatact

SEQ ID NO: 267835 - DNA, 201 bp, Homo sapiens
acttggtgttggcattcagggtccttctttgcatgactcctcccatcctctacttctccccatgagcccaaagttcccggcacagccaacggcttatagctgttaaaacgtaccatgccctttcatattttgttatcttcagatattctgcttcctttctcagaattttagttcatcctttctcttcctgatgagttttta

SEQ ID NO: 267836 - DNA, 201 bp, Homo sapiens
aatgagtacgtctaaaggaacaagtattgaagacccatctattcctctcgtcagtgtgccttcgcacatcatggaggtagtctcatttagtcctcacaccrgacctcagtggggtgggcacttcaagatgaggaaacaagacagagaggggttaaattatttgcccaggataaacaagtaaatagatgtgtaggaagtagg

SEQ ID NO: 267837 - DNA, 201 bp, Homo sapiens
aggtcacaatgatgcatttacgaattgcagatagcctaggtcatggagagtgaagggtctgtgggagaattgacagcagctgaagctggagagacaaaacagggagcaaagggagaggttgtttagtgccagccccacaactgaaggtgggcacaagaaggactgtaagcagaagttaccatgggcagttttacgttttta

SEQ ID NO: 267838 - DNA, 201 bp, Homo sapiens
ggtcacaatgatgcatttacgaattgcagatagcctaggtcatggagagtgaagggtctgtgggagaattgacagcagctgaagctggagagacaaaacagggagcaaagggagaggttgtttagtgccagccccacaactgaaggtgggcacaagaaggactgtaagcagaagttaccatgggcagttttacgtttttag

SEQ ID NO: 267839 - DNA, 201 bp, Homo sapiens
ttcttaatgatgacgacttatgtatttaaagcactgtacagttttttgcatttgctgtaaatatatgatggcaaaatgcttacctagaagtaacagaactrcatgtattactgtgtatctgatatcaatatttaaaatagtgggctgttcttctttaaagaaaaacttatctttgcttatttttaatttccttgttagcag

SEQ ID NO: 267840 - DNA, 201 bp, Homo sapiens
atctctaagagatcatggtgttgtgcttacataagaagtaatgaccacagtgaaaaatcccattctgcataatgcagcactaagtttcaccaaccacattktccttctgttacccattactgcttccctatgctaatgtagaacatgtgcgatgcagtgctggcaagtgtggttctttgacgaaattaatttttgatttta

SEQ ID NO: 267841 - DNA, 201 bp, Homo sapiens
aactgaacattgttgcctgacttaagtagaactttgaatctccttaccaactttttgagatctatccttacaactgtcatcacttgacaatcattactgtrttcaaaatgaatattgtctacatttagaatcaattccctagaatacataattccttttcttttctttctaaaaggtttcttcgtaaatgaattaaaactc

SEQ ID NO: 267842 - DNA, 201 bp, Homo sapiens
atagaaacattttgggaaatgtatttttcaaatttagacttacctttaaagaggaaattataaaaccacacatgaagtgaataaatgaatgctcttctctmtttctatctgtaaaaagccaatgaaggacattttctttctctgtgatggttgcaagtaaaactttgaatctcatctaatgtttgcttaaaaaccggaaag

SEQ ID NO: 267843 - DNA, 201 bp, Homo sapiens
ttgacaatcattactgtgttcaaaatgaatattgtctacatttagaatcaattccctagaatacataattccttttcttttctttctaaaaggtttcttcrtaaatgaattaaaactctaacctgggaaaatataattacaaattataatgcatagaacgtcccatttattaaaagattgacccaatatagctgtgttttc

SEQ ID NO: 267844 - DNA, 201 bp, Homo sapiens
ttatcctaaaatagtggtctgaagcttgcatttttgaacttaaaatagtgtcttggacttattttcaagtaagaaaatataagtattccatagcatgagtrtatgtttaatccttcctatactgatgaccatttagtttattcagatttcttgggattacatgcaatgatgcaattaacatccttggttaagatctttaca

SEQ ID NO: 267845 - DNA, 201 bp, Homo sapiens
agatattgttagagagcaataaaaacacatattccggcttctaaaatacttacattttggtggcacatgggacaccacactctggattgggggaaaatttrgggtatgggttgccacaaaaatgagcaaacatcagtgtctcctgccctttccaaaaagcacaagggggctatccaagagaagggagaaagcaggtctagg

SEQ ID NO: 267846 - DNA, 201 bp, Homo sapiens
aatttcagttggcattcgttatatatttacttaatgtgggcatttcttttcagacttatttatgaacatagaccctatctgtatttctacgtctacctgartatagaaaaatacactgttttttaaattgttatcctaaaatagtggtctgaagcttgcatttttgaacttaaaatagtgtcttggacttattttcaagta

SEQ ID NO: 267847 - DNA, 201 bp, Homo sapiens
gttcaggtggagcttgatttagaagttgacgtaattccactgagacatgatgtttctctgcctgcttagtttagttctagggtattccaggagcttcttargctccatatagaggcacgatggctgtggcagctcccaccgaacaagatcccaggttcaagtcccttaaggaaatgtgaattatctgctggttgcacctga

SEQ ID NO: 267848 - DNA, 201 bp, Homo sapiens
agttcccttttataaatggggatagacaatttcagaaccacattgcttgatattttgagataagtgagataagttacatacaactatgccttggaaaactkaaaaaatgttatgatgtttgatatcagtgtgaactctgaatagtttgtaaacttcacactccacattagtgcaaatgtgttttgtgaaaatactcctaaa

SEQ ID NO: 267849 - DNA, 201 bp, Homo sapiens
tttggtttgaactgtaacatttaaggaggatttttttttttaggctcttgcctccacgaggatttaaaaacaaatttgcatattaccttttccttacagtwcacataattccttttttaggcaacatggctatatattcttttatcttttccctgaaattgcgtctcttattaagatttaaagtatatatctatgtacata

SEQ ID NO: 267850 - DNA, 201 bp, Homo sapiens
ggctatggattgcttttatgtacttatatacaacttaatagagtagtaatgaattgctaaaatctgctttatactatcctaactagaaaaaataatactctttttttttttctttcaaaacgttcatcatttagggctgccctcagtactggccagaggaagggatgctacgatatggccccatccaagtggaatgtatgt

SEQ ID NO: 267851 - DNA, 201 bp, Homo sapiens
gtcctatggtatttttgacttgtttattgaaatcagcctttgcctttgcgcaaacacattttctagttctgtcaatgtaaaaatttccctctgtgtattcytctcagtctttacactttgatcatatgtatctggtctgtgttccttcttcaaatggtgtttctttttgcctaaaaaggttgtaattgcttttgaacatga

SEQ ID NO: 267852 - DNA, 201 bp, Homo sapiens
cacatctcaaggtcttaaagttgtcacttcacttaggtttaatattttatcttaaaaatggttattcatcaaatattcattaaatgctaaccatatttacracattctgcgaggaaccatagggttacaaagtatatgacaaattccttagatataatatataataatcagaggtggaattttacaattattattctctat

SEQ ID NO: 267853 - DNA, 201 bp, Homo sapiens
gtagtggccacagtgattgaaatgagactcccccccccaaattttcagttaatcacatgattgtattaactaggatgacccatttttagagcatctgtttytgacaacttctaatttgtattactctctatttcaacattctgtttattcagcagggcctgataaagatttttagttcatgtctcactatatttagccact

SEQ ID NO: 267854 - DNA, 201 bp, Homo sapiens
atattcagagtgatggctgaattagctaagcataatcaaaaatgtaattatgctgggtaaattgtaattcataaggctggaaagcttaccagtagtggccrcagtgattgaaatgagactcccccccccaaattttcagttaatcacatgattgtattaactaggatgacccatttttagagcatctgtttctgacaactt

SEQ ID NO: 267855 - DNA, 201 bp, Homo sapiens
actttataaaacaagtatatgtagagatctttctttagagactgcagcaaaaagcttcagggctgacttggaggtgtggcagaagttgtatctcttatgcyttttccagtgcaagtaatgggaagcacaactacaaatgtgtttaaaccataaggaaggctactttcacataacaaaaggtccagagttggctcattcagt

SEQ ID NO: 267856 - DNA, 201 bp, Homo sapiens
ctggagacaagggattgtatatgttgttattgtgaactgtggtgtcttgtggcttgtttagtcaattactcaatataaacttttttgaggaagttttttgkgaattattggtaatagccaactattggagaggaagttacacagttttaaagagcattggctttaggatcaaatccagttaaaataaaatcccagtggaat

SEQ ID NO: 267857 - DNA, 201 bp, Homo sapiens
tctgacaataaaggtaagctcctagtccatgttaggccttcattttattatatttttttttttaagaaaaggcatagtctttcgtaaaggttttattgttmtcattgtcagttgggtctgtacccataattgtgtttaatggctttattttggccattaaaatggcttttgaaaacatttctttccatctttgcacagagg

SEQ ID NO: 267858 - DNA, 201 bp, Homo sapiens
gggctgctttcctttatccggcgagtcaagttatcaaaccctcccagtgctggccccatcgttgtacattgcaggtaagtggtggtccaaatggtattgaytgtatgcaatcagctttttttagagtatcaagacaaggcttttgagcacaaaaactaatgtgtgcttacgaagttccagcttgcttgtattatagataaa

SEQ ID NO: 267859 - DNA, 201 bp, Homo sapiens
ttatgttagtgtactaaagtataccaacacatacatatataaaggagttttagaagaaagtatggaaatctatttatcatgaattattttctttgctattratccaatttcccatgtaaataccttattcatagaagtgtaacttaaagataaaaaataattaatgtataaaatccatagggcattacatattcatctata

SEQ ID NO: 267860 - DNA, 201 bp, Homo sapiens
acacttttataaaactatagatatataaaactgtatatctacacatacacagtcacacatatacacacatatatatacatatataatatataatttgttgrtattatcatctatatgtagtggcagttcaaccttcactttgattatgaagtagcaaatgctacagaaaagtcttaagtatttttatacttagcaattaaa

SEQ ID NO: 267861 - DNA, 201 bp, Homo sapiens
ctttatcttcccgtgagctgcaactgcaccttctttaaggaaatctgattctcagcaacctcccctgtctatattggtttctttcttgggtactttgattrttctttaaggttttcttcacagcgttaaagtttctatcttcttataggtagtaattctttatattacattttcactgttaaatttactgtgtggcttctc

SEQ ID NO: 267862 - DNA, 201 bp, Homo sapiens
tgtatatctacacatacacagtcacacatatacacacatatatatacatatataatatataatttgttggtattatcatctatatgtagtggcagttcaamcttcactttgattatgaagtagcaaatgctacagaaaagtcttaagtatttttatacttagcaattaaaaacagacctttatattgaaactctacatgaa

SEQ ID NO: 267863 - DNA, 201 bp, Homo sapiens
ctgccttgtacacatataaagcaaaattaagacacaaatggaaaacaattaaaactacaatgtcttattttcccaaacatatatgatggtgtgacctgtgrtcacttggtgctgctatctaaaatgcctttgctttctttgctttcagaaatggtggcgggcgaagtggcatgttctgtgctataggcatcgttgttgaaa

SEQ ID NO: 267864 - DNA, 201 bp, Homo sapiens
aacattgtctctaatacattttatcttattggatgtgtctcattatcatagcctgttaagaattttttatagtaagtttttcagacagtgcattcgatgtkttttatagtcttgtgtgtttgagaagtattagttagttatgttatctttcaagtgtttgataataatattaaataataagtagactaaatctaaagacca

SEQ ID NO: 267865 - DNA, 201 bp, Homo sapiens
tggcagttcaaccttcactttgattatgaagtagcaaatgctacagaaaagtcttaagtatttttatacttagcaattaaaaacagacctttatattgaawctctacatgaaaaggattacattagttttattgcagtattatggtaatatgatttctgcctcttttttctatatttatccaattgcagggaaaaagtatt

SEQ ID NO: 267866 - DNA, 201 bp, Homo sapiens
acctgaaatgaggaggttggtatttgaaccgaacttgaacattgtctctaatacattttatcttattggatgtgtctcattatcatagcctgttaagaatwttttatagtaagtttttcagacagtgcattcgatgttttttatagtcttgtgtgtttgagaagtattagttagttatgttatctttcaagtgtttgataa

SEQ ID NO: 267867 - DNA, 201 bp, Homo sapiens
ttgttcttctttttatcagtttctttgtaactacagtgatgttagggacagcagcatctatatggatttttcattttattgcgaaatagctgaaaagagtrtaccaggttaagactaactttaaatactttgaaatgtggtgtgttaatagtcaaccccttaaaaaaaatcttagtatcttaaatctctaaatatgtgtgt

SEQ ID NO: 267868 - DNA, 201 bp, Homo sapiens
aaaagtcttaagtatttttatacttagcaattaaaaacagacctttatattgaaactctacatgaaaaggattacattagttttattgcagtattatggtratatgatttctgcctcttttttctatatttatccaattgcagggaaaaagtattaaaatccagtttggcctcattgaagcacatttgcagagtgttatag

SEQ ID NO: 267869 - DNA, 201 bp, Homo sapiens
gataagtattagtgtttttttctatttaataaaaacccaagtgacaaaccaaaaatcaaaaaataaaagaaaaaacagaataaacaaaaaaaaatcctttycaaaaaattctcaaatgtgggatcagctcttttcgtagttattcaattaaattgtatatgttggatcgaatcagactgaagggaaagaattttattacat

SEQ ID NO: 267870 - DNA, 201 bp, Homo sapiens
tctttttttcttttccccaaagtgcttatcagattgttgtggaagaactgcacccacaccgaaccaagagagaagccggagccatggaatgctaccaggtkcctgtcacataccaaaatgccatgagtgggggtgcaccgtattactttgctgcagaactccccccgggaaacctacctgagcctgccccgttcactgtgg

SEQ ID NO: 267871 - DNA, 201 bp, Homo sapiens
ttttttttttaatttaacctcagtagaaatttgggggacttgttctcccagggatttgtatgatttccagctctgttacagtcaacttctaatggctcacrgtctgagcctctacataagtgcttaggctgtatctcagagtgattaatgactgagtaggaaagctaaacacacagcactttgtgaactaaagaccagatc

SEQ ID NO: 267872 - DNA, 201 bp, Homo sapiens
gaaaaaacagaataaacaaaaaaaaatcctttccaaaaaattctcaaatgtgggatcagctcttttcgtagttattcaattaaattgtatatgttggatcsaatcagactgaagggaaagaattttattacattgtaaggagagaggttgtgtctttctcccagtggtcatgagcatgccagtgactctgaggggaggcag

SEQ ID NO: 267873 - DNA, 201 bp, Homo sapiens
aactaaggagagtaaaatgccactagagaattttgagggatactggtacaaggaaagatacttttcatattttcagtatcttgaaaaggtagcatgctgcrgaggtccagaacagaaagacagcagtacagcagacaggtgtatatcaagattttaaactgaaacgggtatttctgggtgatgttatagaaaagtagtaca

SEQ ID NO: 267874 - DNA, 201 bp, Homo sapiens
ttttaaactgtatcaaacttgagaggggcagaaagcattctaaagatggtagaacactagaagtttcagtaaataaaagtgaatataaggtccgtgaaagscaggtgttttttttttaacctctctatcctcagagcctgcatgatacctgttaaatatataattgttgaatgaaaatgagttaatggatacaatgtcaca

SEQ ID NO: 267875 - DNA, 201 bp, Homo sapiens
ccttttcagcttactatactaattatagaaattatcgtattacatttgttttatttgctatggttgaaagatgctattctacgtattttatgggccacaartaagtactgtagattcttaaattgattgctaaatagaagtaaatagggaaaatcccgcaaatccttaggcgtcatctccatattaaatttcagctgaaga

SEQ ID NO: 267876 - DNA, 201 bp, Homo sapiens
actggggtgaatgttatatcatgaagacatttctcctggtatgagtggtggtagagtgggagggttatagagtgcggtgaccaggttatctccaactagckttccatctaatgttactcattgcacaaagaatgttttagaaagtatgcttggaagccagttctcagaagtctttttgtatttatgtgtcttagtttgctc

SEQ ID NO: 267877 - DNA, 201 bp, Homo sapiens
acactgtagtataaagtagagaatgaacaaagtgaggttcctggtttaagttttaaggggagctctattcttctgcctcagtttcaatagtaacagaaatrtaatacttcatttctgtaatgaccattcaaagaataaatgaataatattggtagagaaaagatatataagattaaagtgcatggcactgtaatttatatt

SEQ ID NO: 267878 - DNA, 201 bp, Homo sapiens
tggctctgcttaagtgttaatcacatctgcaaaatgccttcactgcacacccagtctaatatttgaccaaaccctgggcaccatagcctagccaagctgaygcataaaactatcacaggtgactataaaatgttctgaaatttaagttttgaaaaatacagttatcacaaggcagagtagaacaagatgtttaacaaatct

SEQ ID NO: 267879 - DNA, 201 bp, Homo sapiens
caccgtattactttgctgcagaactccccccgggaaacctacctgagcctgccccgttcactgtgggtgacaatcggacctaccaaggcttttggaacccwcctttggctccgcgcaaaggatacaacatctatttccaggcgatgagcagtgtggagaaggtgagcttcctccaggatttgctttttccctgctttgaag

SEQ ID NO: 267880 - DNA, 201 bp, Homo sapiens
agattctaaggagcgtgaaaacttcagatgtttaaagctggaaggttatgcgtcattcaatgattttcagatttttttttaagtaatagaattcttttttaaaaaataatattttctatcactttaatatttaaaatcaatgacaaggaatgaatggtcctggaacttatctgttttataatcccctacattctcaccatc

SEQ ID NO: 267881 - DNA, 201 bp, Homo sapiens
cagtgtcaaaaattaagaacttgaaattgcataaatggctgtttaaaatggctggctttttttttctcaaggaaatcatctgaaatatatggagaaaaacwtttgcagtttatcactgtagcattataaaatagagaaaaaaataaaagcaacttaatagtcaaacaatacatatatttgatttttatgtggtattaaaag

SEQ ID NO: 267882 - DNA, 201 bp, Homo sapiens
ttttctgtacaatatctatatcaagtgtctcaagggctagttaaaagaatatttgaagaaattagagaaaattccaaaaattatacatacaattaaggaartagaaaattggatgtagaaaaataattagaaaattaatcattattgacactaagagagaaatctgagggataatttaaggacttcctttagataatgagt

SEQ ID NO: 267883 - DNA, 201 bp, Homo sapiens
aagaaatgacagctcatttagtcatttgccattcagattgtataccagcttatataataccttgattcattaattatttgctgaacaatcctaaaaattaygtttatccattacccattcatacttttactatctttctacacccaatatgtatgcagttcaggttttcaaactcttacttgagtaaaaagggagaacagg

SEQ ID NO: 267884 - DNA, 201 bp, Homo sapiens
actccatctcaaaaaaaaaaaaagaaaagcatatttcaggtatgttcaggtatggataaagaaaacaacagaaagattaaggaataaaaatacatgatgaygtgaggtctttgaattgtggtggtaagtagatatagcattgaacagaagtttaagtaagtatagaaatctgaccttaggccccttaaaaacctgacctta

SEQ ID NO: 267885 - DNA, 201 bp, Homo sapiens
cactgcacttagcccgggctagtcccagcctacctgggaggcaggaggattgcttgagcccaggaggcggaggttgtagtgagctgagattatgccactgyacttagcccgggcaacagagtatagatttcataataaagattcctcagactgtgcaaaacaaaatgtagatttttaactcttctcagttagtactctttc

SEQ ID NO: 267886 - DNA, 201 bp, Homo sapiens
ctcagggataacatggtctgaattttatttctaaaaggatcactccaagtgttacattgcaaagaataacgtaaggtggctggtgtagtagactaaagtgraatatagtaacagtgaaatacattttgtggtaaagcttggtagatttgaccacacaaaattgtgaaattacctgtggcacaaaaaaatatcaaaggtaca

SEQ ID NO: 267887 - DNA, 201 bp, Homo sapiens
taaacccactttaaaagtccaagacaaattcatgttgagaatttaaaaatatctgaagtatgtctttcaaatcatactcattaagatcagtttactttccratatcatgtggttcctaatgtagtaagcttcaaaagcaaattttgaaaggctgagcattgttgggactttgatgtgtcatatacttattcagttttcttt

SEQ ID NO: 267888 - DNA, 201 bp, Homo sapiens
atcatctttgtactaacaaacctcccgtggctcacaagagcacccaatatttaagttattcagaaatattggaagaatcaacatgtctgtaaaagtaggtwgattttcatccaattctgctatacattgccactttgatggattttaattttgggtgtatgtatgtgaaattgttaacatctacaaaatatacattattaa

SEQ ID NO: 267889 - DNA, 201 bp, Homo sapiens
gtttccatggtataaatactaccaccatggctgaattcaaaggaccaatgtgacatcactgaacacaaaattaggaagagatgcatagtaacacacccttrtttagtacttccaccatacagatacaagagaagtaaatatcctgcaaatataattaatagtaaaataattagaaagtgataagttttgatttattacctc

SEQ ID NO: 267890 - DNA, 201 bp, Homo sapiens
atacaatattagaaaacacagagggacatagccattatacttgctattagaaaagctatggaaaatattatgtataaacttaaaaatataacttttagtcyaggacacggattttctgacaaatgctgattctcaaaaattaggtcacaaagatttagaagcatgaatagatggtagaagaaaataggatgattgttatta

SEQ ID NO: 267891 - DNA, 201 bp, Homo sapiens
gtgattctcctgcctcatcctcctgagtagctgagattacaggcatatgccatacgcccggctaatttttgtatttttagtagaggcgggggtttcaccaygttggccaggctggtctcgaactcctgacctcgtgatctgcctgccttggactcccaaagtgctgagattacagatgtgagccaccatgcctggccaaag

SEQ ID NO: 267892 - DNA, 201 bp, Homo sapiens
tggagtgcagtggcgcgatctcggctcactgcaacctctgcctcctggcttcaagtgattctcctgcctcatcctcctgagtagctgagattacaggcatrtgccatacgcccggctaatttttgtatttttagtagaggcgggggtttcaccacgttggccaggctggtctcgaactcctgacctcgtgatctgcctgcc

SEQ ID NO: 267893 - DNA, 201 bp, Homo sapiens
gcaggtaagtggtggtccaaatggtattgactgtatgcaatcagctttttttagagtatcaagacaaggcttttgagcacaaaaactaatgtgtgcttacraagttccagcttgcttgtattatagataaagtaaaacagcaataaaataaaagttggctgtaagtagtctataaaacaggaacttaagaaatacatacat

SEQ ID NO: 267894 - DNA, 201 bp, Homo sapiens
ctgtaagtagtctataaaacaggaacttaagaaatacatacattcatcctaatgcgtgtagtgttatccacaatttaaagtatagaaactctgccttttartggcaacatctgtgttttttgtttttatcacttttgcaaatcccatattgtatagaatgctaggttgaaatagacatttcttgccaatctagaaaattcc

SEQ ID NO: 267895 - DNA, 201 bp, Homo sapiens
cttattgttcttgtcacctgatttgttggcattgcagttacatcacgtgttgtcttttatgtgagcaatgacaaaaaggatatatctattctgtacatttwtatcaaatatgatatccttcaaagcttgttaaaacaggtgatatcagtctgtgttcttaatatggtcttgttggcaacaccttattggggcgggaaccat

SEQ ID NO: 267896 - DNA, 201 bp, Homo sapiens
aatcctcctcatgaaatctgatgtactcttaaattacattcctgtctccaactctgggaacagtgattgagaagatggtaggggacaaagataaatagagrtagccacaatatcttttgcttaaatttctaaaagaacagtgagtttaagagaagtgaccaaatctgaataacaaggaaataatgttactagcctatctaa

SEQ ID NO: 267897 - DNA, 201 bp, Homo sapiens
actccttaggcaacgtttcagattttgcaaggtacattgtgccctttcccggctaattcttatcaggaatgcacatcccagttgaagcctgctaattgctytgagggctgttgtttttacctttaatttaggttcaggagtctgtagggcaatcctttgaagttcttagttacttactgttcactgaagtatccacttgag

SEQ ID NO: 267898 - DNA, 201 bp, Homo sapiens
ttggtcacaataatacctaaaggatactgaatcagaaaatgagtaactgaaaatgggagatctctataatgaaaacactagatagtagtatacttaaatakgatagtgtacatgagaaaccataaattttaaccagtgtgattcaggctctggctttcaatctatttgcactagggtatcggacaaacccacaaccaggaa

SEQ ID NO: 267899 - DNA, 201 bp, Homo sapiens
caatatcttttgcttaaatttctaaaagaacagtgagtttaagagaagtgaccaaatctgaataacaaggaaataatgttactagcctatctaagcacttrgaaaatgagataaataggttttcaacttaagaatttcttgatttatcagagaggtttactttcttatgaattgcttgcttcagaaatgctccaagattct

SEQ ID NO: 267900 - DNA, 201 bp, Homo sapiens
ctgcatgattcaattatctccacctggtcctgcccttgacatgtggggattattacaattctaggtgagatttgggtggggacacagagccaaacaatatkactcatgaaccttcctgcctttcttaggagacactcatcccagctgcacgtgtaacttggtaaggttttgaggtcatttagaagtagccaggtaaattat

SEQ ID NO: 267901 - DNA, 201 bp, Homo sapiens
ttggcctcattgaagcacatttgcagagtgttatagagcattggtttatgactattgccctattatagacaaacaaagtattctttatcctttatcagtgyagtgactgaaattatgaattccattcagtttttaatgaaatgtggattacttcaaagattatctatctgatttaataaatgcattagagtagaaagttaa

SEQ ID NO: 267902 - DNA, 201 bp, Homo sapiens
ccctgccctttcccactaaatattatagagtcttaatctaactgggagacccaagtgtccctacacatttcctagatgcctccagaaggcactatctgctrtactgagaaccattgctatagaactttaccttcaatatcacttcttatttgtaatgtctgtccctggtggctctgtagaagattttgctctcaatcttcc

SEQ ID NO: 267903 - DNA, 201 bp, Homo sapiens
agacgctttgcccttcctttgatttatgtgtatgttatttttagttatttgataaacacttgctgcgtgtctgtttaagcaaacctttagaaacacatatrttatctgctgtctcattagagcatgtatggtaaaagaaaaaatcatggacgaaaggaatcagactaaagtctagggtttgaaaataattttaagtctttg

SEQ ID NO: 267904 - DNA, 201 bp, Homo sapiens
ttgactaatcttttataaaaacatgaaacccaaaaaagaacattttcatcctcctataatgatgagtaacacagaatgtgtaaataaatttccccaggtcygtagatagagccaggatttgacattaaatctgtctttttcatagcgttgcccttcccttcttcagtagttttatacttagacacttgggacacctcaagg

SEQ ID NO: 267905 - DNA, 201 bp, Homo sapiens
acttgctacaacgcctggataattttgtattttttgtagagccgggatttcaacatgttggccaggctggtcttgaactcctgacctcaagtgatctgccygcctcggcctctcaaagggctgccaggcttgagccaccgtgcccagccaatgtaattgtttttaatctgcatcatcttttgaataaaaagacattttaaa

SEQ ID NO: 267906 - DNA, 201 bp, Homo sapiens
aacaaagtgaaagcaaaagaatatggcctctgaactctatgtgctaaactatatttagcttccatgttcggaaagcttagtgaattattaagggggattakgactcctcttcccctagagatattttgtaagtacacacaagcatttgtctgttgtgttttgaaaatgaacttgccaaggcagggcaattgccagcccaga

SEQ ID NO: 267907 - DNA, 201 bp, Homo sapiens
aagacattttaaatatcagaaaatgaccactgtctaaattttctttaaccagcataaatggatgtaaactaagtagtttgcaaattttcatgtctgtttcmcttttatctttctccttggtaatatgttttctgacattgctgtgaaacatttcatattacttaaaatgtgtatctttaacagatttttcacttttcagtt

SEQ ID NO: 267908 - DNA, 201 bp, Homo sapiens
tgccctcttttatgggcataaaggtcatatggtccaattagatcaaatagatgttactttaattttatgtttattctctagaatcatagtaggtagaatcrttataatttttctaatcaaaaataggaggaagtatgcccttcttgttaaatcttctttctggcctctagaatcccagtccacagcttgcttatgaccttg

SEQ ID NO: 267909 - DNA, 201 bp, Homo sapiens
tgaatctgaaaaaatacatttctgatttcttgttttgcatacttctttattaattatttagcgtacattgatcaggcagataaatgtgagaaccatttccrtctaatcagtttaatgatgtttctgacaatgctatactgtttcatataatacatgacaaatagataacaatttaaaattatttttgtcttcaattatgtt

SEQ ID NO: 267910 - DNA, 201 bp, Homo sapiens
catttcacacaatccacacgtatttattaaggacttatatacttgacataacaccaattgatgtttcagtcatcaaatcttgaacacctacttctgattgyctaacccttctttttcaaattaacaacaaaacaaaccaaaacaactgtctcatacaactactccattctccaaagagaagttgtaaattataaaacttta

SEQ ID NO: 267911 - DNA, 201 bp, Homo sapiens
aagcagaagtcttagaaactgcattagaccaggtgttctaggaagaactgtcacctggagatctgaatgacaaaaacgaactaggcatgcagagatcaggrgaaataccttagagacagaaaaaaaccaaggacctaaatatggaaggaaattggcattgcagagggacagagacagatacagaggtcaaaggttaccttt

SEQ ID NO: 267912 - DNA, 201 bp, Homo sapiens
aagttgattgggctgccttagctgcctttttctatggtgacaggtgtttagactttaatccctctaactgtgcacatagatgtttctggtgaaaagaatgyactgccctttgtataaaaaacataataatgataataatgtaagtttgagaacggtttagtctacacagttattgacaagaggtacagcttgtactggagg

SEQ ID NO: 267913 - DNA, 201 bp, Homo sapiens
actgtgcacatagatgtttctggtgaaaagaatgtactgccctttgtataaaaaacataataatgataataatgtaagtttgagaacggtttagtctacasagttattgacaagaggtacagcttgtactggaggaccagtctggattcaagaagatggtcctaagtgtaccgaagtatatcttttcgtatgaagatataa

SEQ ID NO: 267914 - DNA, 201 bp, Homo sapiens
agacaaggtctcattctgttacccaggctagagtgttatagctaactacagcttccacctgggcccaagaaatactcccccctcagtctctcaggtagctrgaaccacagacacaagccatcacactcagctaattaaacaattttattttttgtagaaactagatctctctacgtagcccaggctgatctcaaactcctg

SEQ ID NO: 267915 - DNA, 201 bp, Homo sapiens
atttctttctcttctataatcttcttaaagggtcaaaataagaaatcactatcacctagatttttttttcctaaaaagtttgattcgattaactgggaagktatttttttaaaaataattactcaaagaatatgctacaaaaagtataaaaatagactttaaaaatattcgaagtcccaaacatctaacataactacaatt

SEQ ID NO: 267916 - DNA, 201 bp, Homo sapiens
cttttgaggggaattatttttatgtcagcttgaaattcttcttgaacttgatttctgacttgggggaaaaaaagcaagcctgatgtgcacaagctttatayagagaatcaactgtttttaaaagaataatccagctgctatctgatcagccaggtaggagttgttctgtggaaatgaagaagccctccattttcagtcaga

SEQ ID NO: 267917 - DNA, 201 bp, Homo sapiens
tatataattagtacttttatgtttatatactgataatatttgtggaaatctagtcaggtattttatgcttttgcagagtttgatgtggattagctgcattrccttttctacaaaagcaaacaccctgaagagttgtctcctttagggagggagcttcactcttttcagtcaacagccatgtatagtcctaagatgctttag

SEQ ID NO: 267918 - DNA, 201 bp, Homo sapiens
agtaagaattcagttcatctacttatttgattgatgtatttctgtggctgtgttctggaaaacagtctttttaacttaaatttaatgctcagaatggattrgcatatttttattgttatatgttccctttgcttatatatctctttagcattattatttgtaatgtcatttcaggttcctatatgatagtggactcttcag

SEQ ID NO: 267919 - DNA, 201 bp, Homo sapiens
accatgtttgtaacattatcctcgggctcacctggactatttattgctggtgttaactctcctgcaagcctcaaacactaaggatgcccttttgtatttgycttggcagcaaacttgctaaaaaacgcaaagatgccatggggaatacccggcaggagatgactcacatggtgaatgcaatggatcgaagttatgctgatc

SEQ ID NO: 267920 - DNA, 201 bp, Homo sapiens; identical to SEQ ID NO: 52875

SEQ ID NO: 267921 - DNA, 201 bp, Homo sapiens
tcacttgatgggaggagactgagatcagagctggggaagctgaggcagtgagacattgtagggcaaggaactggagagaaagaagatgcacagaaagaaayacctccagagattaacagagggatcatttcaaattggaatatatatcaggtaaaactttaagaggcaggatagaaatccactgaaaagcagtaggacaaa

SEQ ID NO: 267922 - DNA, 201 bp, Homo sapiens
aaaattctgctctgtaaaatttctccaaaagtgagatacgtatatattttcagttatatggcatatttcacatagtattctttggacttctttgaacgatkatgcatatacattagcagtaattattttagaatctaatttttatagtcagattcctgaaaggtatttttctcaagacttttctttatttgtattttcagt

SEQ ID NO: 267923 - DNA, 201 bp, Homo sapiens
agtgctagcttgcactttaaacatgtattccaatattaagaaacaatcacttgttacaaaagagtagaagtacatgcaagattttatccaaaatccaaatrcataagacataccagcactgatcatgttttgtctaatttctccattcttctttcttttgtggtctattcactaattacttgatgaagaatttgttttttt

SEQ ID NO: 267924 - DNA, 201 bp, Homo sapiens; identical to SEQ ID NO: 52887

SEQ ID NO: 267925 - DNA, 201 bp, Homo sapiens
tcagagcactctgcatgcagaagatcctctttccatcaccttcatggaccaacataactttagtccaagatgtaagtttttcattaaaattttaataaatratgttacaactcatttcactttgaattctacacgataccttttgagtaatgagagagagtaggaaagtgaggggagaagcagctagaaagaagagaaaga

SEQ ID NO: 267926 - DNA, 201 bp, Homo sapiens
gctcattaggaattattttatatccaattctgaaaatcacctttgttatataattgctcactgagtacagttgctttgcactctgacgcataatgatatcyagaaatgatttttataacaaagatagaataatgaggtatggaaatagtttgggaaaaggtttattatttctcaagtcttaagactgtttttatgtagtta

SEQ ID NO: 267927 - DNA, 201 bp, Homo sapiens
tttttctttattatttaacttgcttgaaatgttgaaatagtgtagacaagcttttattttgtgacttttgtcttcctagtgatcaaattgataatgcctayaaatgaatataccttgcccatccggtttccctaataagacagataattattgtagcttaagggtacaactgactgaaaattcctaaatggtctttatagt

SEQ ID NO: 267928 - DNA, 201 bp, Homo sapiens
gtataatgtgattttgagtgagtttcctgagtaaaactaattttgaaaggatttcggataaatcctcactgagttgatgtttcagctgagacttaaatggaaaaaaaaaattagcctgtcttataagttgccagaagagcttaccaaggagaaggaacagcagatgcaaaggccttgatgttggaacaaactttagatatt

SEQ ID NO: 267929 - DNA, 201 bp, Homo sapiens
tttctactgttataaatgctaaatgatgcacacttgaaagatactcattaaaagcttttttgcagttttgatgcattatcattcaatacgttttgaaaagratgatactttgctacttctacttctcattatagtgatcttaattttaaaatactttcaaggtccattttttttctctaaagttatttttttgtctttaat

SEQ ID NO: 267930 - DNA, 201 bp, Homo sapiens
agataggaaagatgaattcagttaccgacatgagtttgagttgcctgtaagaaatcaaactgcatttacccagttaaccaggctattctaattcaccaacraagtgaaagcaaaagaatatggcctctgaactctatgtgctaaactatatttagcttccatgttcggaaagcttagtgaattattaagggggattatgac

SEQ ID NO: 267931 - DNA, 201 bp, Homo sapiens
tgagatgatagtgtgtaataacattcagattctatatattgataacatgcaaacaaatagtacattaaatagtttctataatatcacatctatctttctcttttttttttgccccttcaagcaacaaaatgcattatttttaaccctatgcaaccatctttcttaacctttggcttcaaatttagaacacttcttttcact

SEQ ID NO: 267932 - DNA, 201 bp, Homo sapiens
aaaaaataagctctttgaaatctaagtaagttgaaatctatgacttctttcccagataggatgaggattgaaaatgttggatttgatatagtagaaaaatmtattgttattagaaaatagaattatcaaattttccagtttgagttacttagcattatatattccaaatattttcctagtttcttttgtaggcattttagg

SEQ ID NO: 267933 - DNA, 201 bp, Homo sapiens
gagatgatagtgtgtaataacattcagattctatatattgataacatgcaaacaaatagtacattaaatagtttctataatatcacatctatctttctcttttttttttgccccttcaagcaacaaaatgcattatttttaaccctatgcaaccatctttcttaacctttggcttcaaatttagaacacttcttttcactg

SEQ ID NO: 267934 - DNA, 201 bp, Homo sapiens
aaaataagctctttgaaatctaagtaagttgaaatctatgacttctttcccagataggatgaggattgaaaatgttggatttgatatagtagaaaaatctrttgttattagaaaatagaattatcaaattttccagtttgagttacttagcattatatattccaaatattttcctagtttcttttgtaggcattttaggga

SEQ ID NO: 267935 - DNA, 201 bp, Homo sapiens
ttctataatatcacatctatctttctcttttttttttgccccttcaagcaacaaaatgcattatttttaaccctatgcaaccatctttcttaacctttggyttcaaatttagaacacttcttttcactgattggctttatagtagatattggtcataagtgaatttaaacttataaagttattaataaaatagttatactc

SEQ ID NO: 267936 - DNA, 201 bp, Homo sapiens
aattcattttaaaataaaaatatcttaaattttgtaaaaatgggttattaaaaaatgccatatactgaaacacatgtgtagtttattgtgtttttagtttrcaggcagagaaaatgaattttaccccaaacatcagcatagttctagatttgccacctcctgtttttgacacagatctcaactgagcttctaattttggaa

SEQ ID NO: 267937 - DNA, 201 bp, Homo sapiens
atattgtatcattaccatgttgtcgttttgtgtccagatgacattggcagtaagcagcgaaggattcagtaatgttttgataaaaagagcattaatgtaawtatttatttatttatttattttgagacagagtttcactcttgtcacccaggctggagtgcagtggcacaatctcagctcactgcaacctctgcctcccag

SEQ ID NO: 267938 - DNA, 201 bp, Homo sapiens
cagctgctatctgatcagccaggtaggagttgttctgtggaaatgaagaagccctccattttcagtcagagtcacgcatataaaggctttgataagattamaataatccaagaatgcaatttcaagatgcacagctagaaacagcaactaagaaatatccatatcttacaggacacagctaagggaagagtcaggttttaa

SEQ ID NO: 267939 - DNA, 201 bp, Homo sapiens
ctttacaagtattttgaagagtaagcaaagtaagaaatttggccttcatttggtgtgttagttagtccttgcattgctataaagtaatatgtgaggctggattattattattattattattattattattattattattattattattattttgagatggaatctcactctgtcacccaggctggagtgcattggcactac

SEQ ID NO: 267940 - DNA, 201 bp, Homo sapiens
tttacaagtattttgaagagtaagcaaagtaagaaatttggccttcatttggtgtgttagttagtccttgcattgctataaagtaatatgtgaggctggattattattattattattattattattattattattattattattattattttgagatggaatctcactctgtcacccaggctggagtgcattggcactaca

SEQ ID NO: 267941 - DNA, 201 bp, Homo sapiens
tctttttggaggttgcctagctatttaattttccttagttcacaaaacaatgaggtagtttcaaatctatttgaaccccaagactttttcaagctgctgtyctctgggtaaagccacttagtcctggcacatggtggaaaggtctggctaaagttttgacaattattagctcatttgcagagttgctctttgacctgtcaa

SEQ ID NO: 267942 - DNA, 201 bp, Homo sapiens
tcagaacttgcctaggataattccagtctatcagtagtctttccatagtctcaaaactacccaaacaagtaaaagcctaccgaaaaagaattacaaacacrttgccacaatgatagtaaaattccgccaagtggaatttcccaaaacttgagtaatccgaaatgtaaacaaagtcaggcagaggagagagcacatttgttt

SEQ ID NO: 267943 - DNA, 201 bp, Homo sapiens
tcagttcattccagtggtctgaatctcctattccatggtttaatcatcactctggctccttctgcatatgaagctattgcatcttactggtcctacattgmagtgtattgtatctgtttgtacaaccgatcatacattttaagtttttatatttctccatctaccttgtttcttcacagagctacaggcaaccagctgctt

SEQ ID NO: 267944 - DNA, 201 bp, Homo sapiens
atgaatgaggtgaaggggctggcagcaacctacctcagaaccaatgcctttggagatctatgcaggaggctgtttaatgcacagagcactggccttgctayaggaggacttatgttccagtcttaagctctgtcactttctgaaatttgggagcagtcctttctgcttgatctttcatttctttatcaccaaaatgagaat

SEQ ID NO: 267945 - DNA, 201 bp, Homo sapiens
ataagcactatatcatccacctcaaagctagtaaccatcttatgccttagtactcgaataaaaatacaggaaaacagaaatgctggaagctaggtttttcsgtcagtcactagactagcatattctctcaggaaatacagatgcactggctcagtcaagttggacagcctaggcctggcctctgagtgtatgtagacttat

SEQ ID NO: 267946 - DNA, 201 bp, Homo sapiens
tgttttcactcagccagtcattcatttaattattgtttaacatagttattgttaaacataaacatactagattggccagaccataattttgtcagcacaawgatcgattatccttaatttttttaacttacctcgtataaatccttacttgagttagacccatggaagagtcactattaacattcctggcatttctaacta

SEQ ID NO: 267947 - DNA, 201 bp, Homo sapiens
ataaatactcttttggcaacaagctccttaggaagctacttcccttttcttcataatttcatttctgttttttcttctacttttctggacattctgcttgkctcaacctcggaagtcattatttcttacttaccatctataaactcattcattactctaaatttgttactccagtcctgacctctctttgagcctgttaaa

SEQ ID NO: 267948 - DNA, 201 bp, Homo sapiens
tgtgtgttggcggagccctgtaagatgtgttgaaatgcggttctaaggacccactctgagcgttcatgggcatcgaggtctgggcgcctggtggaggaagsctgactcgcgcgtgggagcccgctcctcgggcaaaaccaccgccaggctggccccgcgctccccggatccggcctggggctctggccccgcgctccccgg

SEQ ID NO: 267949 - DNA, 201 bp, Homo sapiens
taaagaaccatgaaagataattctatttgtttcttgctactgtactcagtcagaaaattaagaatctagaggtgccatggaggggagagtgtggaagatcytaggacaataatcttttaaaagaatgtccttcatggctctccagtgatctacgacttttcatttttcttcagttcaactttgtttaaattaacgtgaccc

SEQ ID NO: 267950 - DNA, 201 bp, Homo sapiens
gcgctgcctgcttttgtggcgctcttgctcctctctccttggcctctcctgggatcggcccaaggccagttctccgcaggtgagtggccggggggcgtccycgacgaacgcctggagtcctgggctcacgaggggtgagccaggtccccgctagggctggggacaaggatcgtggggagctctctctgtccgggggtgggg

SEQ ID NO: 267951 - DNA, 201 bp, Homo sapiens
agagccagcaaatgtaaattttgctttttgacatatcattacagtgatccactaacatataaggaacaaactgtttttcacctatgtgttcagaacaatcratgccttttcagcttactatactaattatagaaattatcgtattacatttgttttatttgctatggttgaaagatgctattctacgtattttatgggcca

SEQ ID NO: 267952 - DNA, 201 bp, Homo sapiens
ctaaactgattttccaaagcaactgagagtttagttggttttggagacagtgtctgtcattctctccctctccctccttctttgccttgccccctccatakctctgtagttgggtctagtttagggcttacctatatgaaagattaagtaaacactctgttcttttctttgggaagttagtgttgttttagtatgtgggga

SEQ ID NO: 267953 - DNA, 201 bp, Homo sapiens
cttttattcctgatgttggacaaatcatgatggatctgtagtaattcatttgcattcttacgataagttattattatacccattttaaaggcatagaaacygaaagaaaaaggagttgggtaacttcttttgggtcacacagttattaaaaggactcaggcagtctgactttacaaatcgtgttcttaaacatgatgctat

SEQ ID NO: 267954 - DNA, 201 bp, Homo sapiens
tttttagctattttaatatttcaggggaaaagaccattttgtcttgggaaaattgaatgaacgaattttccataaaatgaaatgattaacaaaatcttgcygaatttcatgtttttatttagcaggtattgtatctaaaacgttgtcattgtctgtcagaacagtgttataatgcctttatcttaaattctttataaacta

SEQ ID NO: 267955 - DNA, 201 bp, Homo sapiens
aaaaagagataaaataactaataaaagttaaaaggtatgcagtacctatatagatgtattatgatttaaatattatattatctagatatgtatctgtctcrggggttcccgagactaccctcagattcggtgattcacaaggaggactcagtcatcctgtgagttgtcctgttctcatggctacgacttattacagtgaaa

SEQ ID NO: 267956 - DNA, 201 bp, Homo sapiens
ttacaagtattttgaagagtaagcaaagtaagaaatttggccttcatttggtgtgttagttagtccttgcattgctataaagtaatatgtgaggctggattattattattattattattattattattattattattattattattattttgagatggaatctcactctgtcacccaggctggagtgcattggcactacaa

SEQ ID NO: 267957 - DNA, 201 bp, Homo sapiens
ggcttttgcttctgttcctcaccatcacctttatacccaggaaaagctgcacttttaaagatagaccaggtttcattatttagatatgttaccttctaatrtatagtatttatatctacattacttgaatttcttacttaccaaagcaattttgtaatgacttttactcatatgtagcgtgtcacacatgtaccatgtatg

SEQ ID NO: 267958 - DNA, 201 bp, Homo sapiens
gaggggaattatttttatgtcagcttgaaattcttcttgaacttgatttctgacttgggggaaaaaaagcaagcctgatgtgcacaagctttatacagagratcaactgtttttaaaagaataatccagctgctatctgatcagccaggtaggagttgttctgtggaaatgaagaagccctccattttcagtcagagtcac

SEQ ID NO: 267959 - DNA, 201 bp, Homo sapiens
aaagtaagaaatttggccttcatttggtgtgttagttagtccttgcattgctataaagtaatatgtgaggctggattattattattattattattattatyattattattattattattattattttgagatggaatctcactctgtcacccaggctggagtgcattggcactacaacctctgcttcttaggttcaagtga

SEQ ID NO: 267960 - DNA, 201 bp, Homo sapiens
atattgcaagttataaatttcatcttaattattttcagaaaagaaaatcatgccttatctattttgaatataattagaaatgaattttttaaatcacagawtgccaaatcctacaaaaatcatgttaatttgggaaatttttatttctgacatttaatgtttcaataatttacaattaatttgttggccattaatcaataa

SEQ ID NO: 267961 - DNA, 201 bp, Homo sapiens
atacaaaaagccagtgccctcacttcattaggtcaactctggggcaattcatgctctagtgctccccgtgacatcaggctgaagttagacttatgctaatrccacattctcacttagctgctttccctttcctaccctactttcctctctccttttcatctgacaacactcccttaataaatcatgtgcatccaaatcctt

SEQ ID NO: 267962 - DNA, 201 bp, Homo sapiens
gaaagtggaggattcaagaatgatgcataggtttctggcttgaagaactgtatggatagttttgccatttactgaaaggggatacactagaaaaagaactggcatgagataagattatgagttcgggttggacatggtgtgcttaaggtgactgtcatacattgacgtgaagacatattaatcacatgactccatgggtca

SEQ ID NO: 267963 - DNA, 201 bp, Homo sapiens
ttatataaaatgccataaatctgtaaggcattgtcttggaaactaatatagcactctaatccttcccatcatgtatttgggttaatgctacaatttggaaggacttttaaaaaaaatatttataagcaaaagtacagtcctaaaatagtttggtgtatagaagtggttgtgatcagtgaattctattgaaaaatataataa

SEQ ID NO: 267964 - DNA, 201 bp, Homo sapiens; identical to SEQ ID NO: 52891

SEQ ID NO: 267965 - DNA, 201 bp, Homo sapiens
aaatctgtaaggcattgtcttggaaactaatatagcactctaatccttcccatcatgtatttgggttaatgctacaatttggaaggacttttaaaaaaaatatttataagcaaaagtacagtcctaaaatagtttggtgtatagaagtggttgtgatcagtgaattctattgaaaaatataataagtgatgttgcttatat

SEQ ID NO: 267966 - DNA, 201 bp, Homo sapiens
gctggagtgcagtgccacgatctcggctcactgcaacctctgcctcccaggaggttgcaattctcctgtctcagcctcccaggtagctgggattataggtrcctgccaccatgcccagctaattttttgtatttttagtagagatggggtttcaccatgttggccaggctggtcttgaactcctgacctcaagtgatctgc

SEQ ID NO: 267967 - DNA, 201 bp, Homo sapiens
gacttaagtaaacaatttagagagtaaagttaactaaacattgcttcacaatgttctggtcacttcagattggatgtaaacatgaaagtggcttctgattrtatcctcattcagctagaattgggctaaactattcagttttatttgttatttatttgaaaacattcatttgtcttgataactctccctatccaggcctct

SEQ ID NO: 267968 - DNA, 201 bp, Homo sapiens
gtaaacatgtaatagagaaccagtaattttttattttccttaaaaatgatcctggtaaataagagaattgattcataagatcatggtttgttgatgccatrgcaacataatcttatattgagaacatcatctgttacaatgcaagtagttgtggccatgtgcctagaatagacttagttattaaagtacattgtgatatga

SEQ ID NO: 267969 - DNA, 201 bp, Homo sapiens
ttaccaaagcaattttgtaatgacttttactcatatgtagcgtgtcacacatgtaccatgtatgctttaatcacaagtatgtttatcatacatataaaaargtatagatatagcagcattgcattggatattatcatcaagtatagcttaaaactattaatataaaatgtttcccttttaatatataaatttataataaaa

SEQ ID NO: 267970 - DNA, 201 bp, Homo sapiens; identical to SEQ ID NO: 52869

SEQ ID NO: 267971 - DNA, 201 bp, Homo sapiens
caaatatgtattacatttcattttctactactgaagtgacaaaaatcaagaaggctgataatacaaagtggtaagatataatttaaatggggttggcataygctgctggtgggtatgtaaattggtaatagtttggtattatcttgtaaagctgaatatttacaatctttgttttatcaaaatgggatggataaaactcag

SEQ ID NO: 267972 - DNA, 201 bp, Homo sapiens
gtaatggtgttcttaaaacaactaaagatttccaaggcaatatgaattgcagccataaacttagtaacataatttgcctattacaagcttttagagtgcctttatttatacataaattttcttgttagtgtgatttaaatattttatgtgcctttaatagccctttttcttggatgttacatgtgtaacattcacaagaac

SEQ ID NO: 267973 - DNA, 201 bp, Homo sapiens
ctactgttaaagcacgtggcatttagctgctctcttttctcaccagtaaaatctctggtagaccctgttttagtcagtgatctaatactgggcaagtttcrtaagatcacatgcaatgaggaagccaaattacttcaaaagatcattgagttaaataatacatacttcaagacacccataaggtttaggtgtccagtgtgg

SEQ ID NO: 267974 - DNA, 201 bp, Homo sapiens
taatggtgttcttaaaacaactaaagatttccaaggcaatatgaattgcagccataaacttagtaacataatttgcctattacaagcttttagagtgcctttatttatacataaattttcttgttagtgtgatttaaatattttatgtgcctttaatagccctttttcttggatgttacatgtgtaacattcacaagaact

SEQ ID NO: 267975 - DNA, 201 bp, Homo sapiens
aatggtgttcttaaaacaactaaagatttccaaggcaatatgaattgcagccataaacttagtaacataatttgcctattacaagcttttagagtgcctttatttatacataaattttcttgttagtgtgatttaaatattttatgtgcctttaatagccctttttcttggatgttacatgtgtaacattcacaagaacta

SEQ ID NO: 267976 - DNA, 201 bp, Homo sapiens
agactgttctgaagattaacagcaaaaaaaagataaagtatattaaatgccttgtttaataccaggcatatagtcagaattcaataagtgttatctgatgytgtttcctgcattgcttttcctattacacccttagtttttggcttatagttatcctctatttttaaaatcaatcttcagatatttttcaatgattaagag

SEQ ID NO: 267977 - DNA, 201 bp, Homo sapiens
aaaatagttttttattggtagctgatgataccttctgcaaagaatgccatatttatcttttcatttctaacagtggcatattttatttctctttcatgatmtattgcattagcgtgaacttctaaaactgtaggtttttcttcaattggttaaaggagttaaaagttgtggtgagagaactttgccctttttctacaacaa

SEQ ID NO: 267978 - DNA, 201 bp, Homo sapiens
tttgtccttgcaccaggggttaagagaattgagagtaggagaggtgatgtctgtaccatgtcttttagttggtctcagtttttaaaaaggtctagtgaatsctcagttggattagactgtgtggtaagtgaaaaaagaatgaaaaatattaaatctttgaattaagaagttgttctctagcagggttgtaattgataacct

SEQ ID NO: 267979 - DNA, 201 bp, Homo sapiens
cctcagattatattaatgccaactatattgatgtaagtatttttatagttaagtatgtctactttattggcttatatatatgaacctttttgcttattacmtataaagtgattgctagctttttaaaatataaaagtacaaactgtacacttttccttgttctgcgtcctagtacttactgacattgttgtgctttctttc

SEQ ID NO: 267980 - DNA, 201 bp, Homo sapiens
acttcttcagatcataattcagattatgtcactcctctgctataagcctgttctgttacatttagaatgaaatccaatcttttaaaaaatagaataaaaawaaatatattttaggaagccatgtcatcagaagtgtaatccagagaataatatactctataggtctaaaaaaagattttctaaattatgcaattatatttt

SEQ ID NO: 267981 - DNA, 201 bp, Homo sapiens
gacagttgaaagtgtgggaacagaaatcaattccctctacttttttcaatgcaccacatttatttcacactgtccatgtagaatcatcagttaaaatgatmatatatgttcaatccctattttcatatcaacaagaataatatgagtatataattaccagaggtctatcgtaataatttctctaatgtgtttaaagaacaa

SEQ ID NO: 267982 - DNA, 201 bp, Homo sapiens
ttcttcagatcataattcagattatgtcactcctctgctataagcctgttctgttacatttagaatgaaatccaatcttttaaaaaatagaataaaaaaawatatattttaggaagccatgtcatcagaagtgtaatccagagaataatatactctataggtctaaaaaaagattttctaaattatgcaattatattttga

SEQ ID NO: 267983 - DNA, 201 bp, Homo sapiens
attatttcaaccatgcacaaaaagaactgaggcaaactaaggtgatattttaacaatttcttctgatgatagaattatagctctttttctcattctttatrtttgttcagaatgtgtatattctttatatttgtacagaattgttctgtaatgatcaaatattactattataaacagataaaaaattatagatatttaaaa

SEQ ID NO: 267984 - DNA, 201 bp, Homo sapiens
gcatgccttaagtggataaaaaagcaaaaattggcttcttagccaatgtgaaatttaggtaaatcttaaacttttgttttttactgcagatatatttttarttactatcagatataccctctgtctaccaaaatgatagagatgaaatgcaataaactttgtatcttttcccaaaactgtaatgtggtaaattaacttaat

SEQ ID NO: 267985 - DNA, 201 bp, Homo sapiens
aaacacttttaatcttccctggtttctggcttatgagtttggtaattccttagcatttaacctttgtcacaaattgccatgtggcagtgtgtatgctgtcwttttgatagatttccagtagtgggattactatattcaaaataaagagcctcaaatagagataaacatttatgtttcatgatactctcgttttagattgga

SEQ ID NO: 267986 - DNA, 201 bp, Homo sapiens
ccgcgcccggccgcattctctgtcttttcactttctaatatttaaaagaggcagctcaaggccacacttacccccttttagtgtccattttaatctttccktggtctgtagtgcacagatttagtagactccaatatttcaaataatggccccatgccccaagtgttttccttacagctctgtagacatcatgtggtaaaa

SEQ ID NO: 267987 - DNA, 201 bp, Homo sapiens
atggtgttcttaaaacaactaaagatttccaaggcaatatgaattgcagccataaacttagtaacataatttgcctattacaagcttttagagtgcctttatttatacataaattttcttgttagtgtgatttaaatattttatgtgcctttaatagccctttttcttggatgttacatgtgtaacattcacaagaactaa

SEQ ID NO: 267988 - DNA, 201 bp, Homo sapiens
tattacaagcttttagagtgcctttatttatacataaattttcttgttagtgtgatttaaatattttatgtgcctttaatagccctttttcttggatgttwcatgtgtaacattcacaagaactaaaatatattttacatccatgatatgtaagataaacatgccaatatttgagtagttcataattctaatgctgttaat

SEQ ID NO: 267989 - DNA, 201 bp, Homo sapiens
attcttggttgttagatttggagcaaaagtacatggcccttaatgtctgactaatattaatgtgtcaaaattagtagaatgaagccaaatgcatacatctsagggtgcaatgttgcctgaataactagtttatatgtaaaagtctacctaatggaaagggatgtttctaaatcctcccaatttataaccacgaaagaacaa

SEQ ID NO: 267990 - DNA, 201 bp, Homo sapiens
tcataattttccctctcccattagttcattatatgtaaacgatatgagtatatacttctgcaattggtattttttttaagaagtggaaatgaaatacttayaaagcttggaaaaatttttccataaaacattgtgctattttccataaaacattgtggtatattaaaaatttgaaatcttccaaatttgcaataacgtaat

SEQ ID NO: 267991 - DNA, 201 bp, Homo sapiens
ttcaattaaaatattgagaactaattggaaaaaaattagttgcctaaatgttaaaagtttccttacaataattttctacacatatgtaaagtccaagtctsggtcctcctgtggatttacaatatgaactcataaaaataccttacatctttgttttcccatctataaaacagtataataattcctaccatacctttttca

SEQ ID NO: 267992 - DNA, 201 bp, Homo sapiens
tcaggcttgtatattttttgtgagactatataaactctgtttattgtataatagatttttttctcatttatagatttttaaactgagttttaattgtgacctaaggagttattgctggaattaaatcaccttggctaattagtattatatattcaggtctgtctatatattctttttgtcacttaggttaaatgctataaa

SEQ ID NO: 267993 - DNA, 201 bp, Homo sapiens
catcattcttaggattgtggtctttagagttttgcatccaatcatttttgtatttataatgcagtttctgaaatcacttcaaatattgcttaatgctaatrcttactgatttaaaagggcttagaaacttttcatactgattcgtatttttggtttttgtgttttactgcttcattgggtttaagttcctataacaggtaa

SEQ ID NO: 267994 - DNA, 201 bp, Homo sapiens
caggcttgtatattttttgtgagactatataaactctgtttattgtataatagatttttttctcatttatagatttttaaactgagttttaattgtgacctaaggagttattgctggaattaaatcaccttggctaattagtattatatattcaggtctgtctatatattctttttgtcacttaggttaaatgctataaat

SEQ ID NO: 267995 - DNA, 201 bp, Homo sapiens
gaaatcagatgaagctttgtgctctaaatatactacttgccactctcagtttaattttatggattattggttgagggtggctgagaaaaaaaatagagcamtgcaaatctagtaaacaacactgagaagccaaaagaaggcagtgggaaattcttcttccaaccttatttccccttcctactcaaaccaaaataccaggac

SEQ ID NO: 267996 - DNA, 201 bp, Homo sapiens
aagacagcaataaaaataaataaatcaactaatatatcatacatcatgacaagtgatatagagaaaaataatgttggggaaggaagtagggaatattattkaggcagggtaagaaatggtttacaattctgaaaggatgatcaaagaaaaactcattgttgagaaagtaatatgagtagagacctgaaataagtgagggag

SEQ ID NO: 267997 - DNA, 201 bp, Homo sapiens
ggtcaggaggttgagaccagcctggccaacatggcaaaactctatttctactaaaaatacaaaaatcagctggcttggtggcacgcacctgtaatcctggytaatcaggatgctaaggaaagagaattgcttgaacccaggaggttgaggttgcagtgagcagagactgcattactgcactccagcctgggcgacaaagcg

SEQ ID NO: 267998 - DNA, 201 bp, Homo sapiens
ccttttgctacaaatgtgagttcttaaaaataaattcggcaatatttcatctataccttccaagctgtgctacctcagtctacagacttcttctaaaaaarggaaggaaaaagctttgaaatgtgcatttacagggttctcttaaattaacccaataggagagcagcacaacagcagatgcttcacttctttcattttgta

SEQ ID NO: 267999 - DNA, 201 bp, Homo sapiens
taattgtatacctattaggagattcttttaaattatttcattactgagaacaaaatatacatgcaaaggcagctgttagtaggacttgttcatttttttgrcatcattaaattgtctagaaaaacagagaagaatagcaaatcagagttcaacagaaaggaaaatataaagaagcctcatgaagttatttgatctgagttg

SEQ ID NO: 268000 - DNA, 201 bp, Homo sapiens
cctaaataattggccacatatttcatgttaacagctgaatgaaattaaagactatgtatgaatgaagaaaatacattttcaaaattacttcaaaagataargtgtaatttgagcttttagttttttttttttcctctctctctctgaatttagaattgaaaatgcaaacctatttgactctttatgggtcttgcagtttgt

SEQ ID NO: 268001 - DNA, 201 bp, Homo sapiens
attactaacgctctgttactactagttatttctgcatgcttcacctaattagcttcatacaatatatctctgttcgtttttttgtaattctttcacatgcrtaaagatctattttaccaccttcccttttcttgtgtagaaaaacaggaccatttttagctttgacagtttattatgtactcgagttttatttgttgatga

SEQ ID NO: 268002 - DNA, 201 bp, Homo sapiens
taagatagcggctagccttttgatttgctgggaatcatattctacacctaataattcattttcatttctcttcagatcatgattcaaatagtctttacactgttactctcctcccctttgataaccgtcattctcttgcccacccccaccatttgcatttcctgtgaagcgtggctcctcagatttcccgtttaaagtttt

SEQ ID NO: 268003 - DNA, 201 bp, Homo sapiens
atctttctagagtttttgaatcaaatatttttcaaacttgtaactaattgtatacctattaggagattcttttaaattatttcattactgagaacaaaatrtacatgcaaaggcagctgttagtaggacttgttcatttttttggcatcattaaattgtctagaaaaacagagaagaatagcaaatcagagttcaacagaa

SEQ ID NO: 268004 - DNA, 201 bp, Homo sapiens
aagatagcggctagccttttgatttgctgggaatcatattctacacctaataattcattttcatttctcttcagatcatgattcaaatagtctttacactgttactctcctcccctttgataaccgtcattctcttgcccacccccaccatttgcatttcctgtgaagcgtggctcctcagatttcccgtttaaagttttg

SEQ ID NO: 268005 - DNA, 201 bp, Homo sapiens
tgtcctttccacacttgccttatattggcagtgactattgattgtttatcacttggtttttgctgtctctcttgttattgttagtcctagccttctattgrgttttaaaaggaaactgatatctttctagagtttttgaatcaaatatttttcaaacttgtaactaattgtatacctattaggagattcttttaaattatt

SEQ ID NO: 268006 - DNA, 201 bp, Homo sapiens
acatcaatcatagaaggtttgccgcttccttcagattgcaagaagtgacaaaaactgaccaggatttgtatcgctgtgtaactcagtcagaacgaggttcyggtgtgtccaattttgctcaacttattgtgagaggtaaggtgaaattgttttcacttcacgaaattgcatggctttattagaacaaaagcaactctgtag

SEQ ID NO: 268007 - DNA, 201 bp, Homo sapiens
aattggaaactaaggtaaaactgaaataattactgttgattagggaaaactttcccatcacatgtgtttctgtcatttcttttgtttctcccttgatttargttttttttaatgcggtaggccaaagtcttaggtgatttgatattagttttagcataatttgcacacatagaattcacagaagatataatttcatgcaaa

SEQ ID NO: 268008 - DNA, 201 bp, Homo sapiens
agatagcggctagccttttgatttgctgggaatcatattctacacctaataattcattttcatttctcttcagatcatgattcaaatagtctttacactgttactctcctcccctttgataaccgtcattctcttgcccacccccaccatttgcatttcctgtgaagcgtggctcctcagatttcccgtttaaagttttgg

SEQ ID NO: 268009 - DNA, 201 bp, Homo sapiens
tgattttcaagactcctttgacaaatttcagatagggaagggatgtgcaacaaatagcaagcattgacccacttattttgtacagctactcctagttgttrttgctaatcagaatcctgtagtctaaaattaacagtggctatgaaggagagcaattaaggccatttgtctttcaaatgagtcaatgtgggtcccactggt

SEQ ID NO: 268010 - DNA, 201 bp, Homo sapiens
cctgaggcagtcattctgttagaccttggagctggactttctgtaatatcatttcaagggaaaatgttaactttaaacatttaaaaatatcagacaaagarctgaatctatgatgtgtctttggttaatgtcagaatccttattagggtggctcattcctcaacatttaaaaatgttgaaagtcctacggtgattgttctt

SEQ ID NO: 268011 - DNA, 201 bp, Homo sapiens
tatatgtgatcttttaaataaatttaaaaagccctattgtttacgtagtatttactgtgtgctgtgaactgtgttaagtaatttttgtattttaaaaatarctattggctttacacttcatttgtgttctgaccaaatattttcattagtcccctttgagatccataaagcctttctgagttttgtgaatgtaatgcagct

SEQ ID NO: 268012 - DNA, 201 bp, Homo sapiens
gtggcaaggcaatccaacttctcacctatttgattcattttttaaaaatttaggtgaatgatatacaatagctgctctctttaaatttttttcactctgargttatttcagttgtgcatactaccaaaaaatatttaaaaaatcaaatcggctgacagaggcaacttgaataattaaacattgcagggtggtgtgcaacag

SEQ ID NO: 268013 - DNA, 201 bp, Homo sapiens
cacccttttgtgacttttcttgtttattattttttaaagcagaattaaatttttgtatgtgtgttttatacactctcatgcaagtgcataagctgcttcaytagttatcatgtcctctctgtcttttctgctattattaaaggtaggtaatatattttagtctcattgcatcattagtacttagtatactctctgatatag

SEQ ID NO: 268014 - DNA, 201 bp, Homo sapiens
aaaacaaaatcctttgaaaatagtagttggtgatcacaatggtttatgacaattttaacaaattgtattagaagactctaaggagctgtattttcaaccgwgctttttctcttccttccttcctttctcttccctcactttttttcttcctcttccttccttccttccttcctttttgcattggggtaagaacataaataa

SEQ ID NO: 268015 - DNA, 201 bp, Homo sapiens
tgggaaaggaaatgactgaccctggaaattattaggacatcctgcccaggatgtcattactaaatctgtgttccattattttcataaaaagatatcatctrtacacaccagaggacaatggcaagcagacataattgggctgtgaacatttcatatcacgttagcctagtacttttaattagagtttcagtttaattatag

SEQ ID NO: 268016 - DNA, 201 bp, Homo sapiens
gtttcaaattacattagtgggaatagttttccatttttcttaatgaattattttattaaaaaatatattggccagactctgttcttgactgggtactcaayggtgaatcaaagtttctgcactcattgtattatttgtagtctttttggatacaggtgttatctaccgtgctcattcatagccccccaccccaccacttca

SEQ ID NO: 268017 - DNA, 201 bp, Homo sapiens
tgtactaaggattattgtttcaaattacattagtgggaatagttttccatttttcttaatgaattattttattaaaaaatatattggccagactctgttcytgactgggtactcaatggtgaatcaaagtttctgcactcattgtattatttgtagtctttttggatacaggtgttatctaccgtgctcattcatagcccc

SEQ ID NO: 268018 - DNA, 201 bp, Homo sapiens
tctattattcccacagggaaccttttcatcatcacaattccatgtaaaatctcttacaaactactgaaattttcattctgatcttttataaataaaatttyatacctaataagtgaattcaaaaatgataaaatgcctatagtttaaaattaactttatattgcattgatgattatacaaatatatctcattatggttgat

SEQ ID NO: 268019 - DNA, 201 bp, Homo sapiens
taaaatttacctatttttgactgggcacggtggctcccatgtctgtaatcccagcactttaggaggccaaggcaggtggatcacccaaggtcaggagttcsacaccagcctggccaatatggtgaaaccctgtctctactaaaaatacaaaaaattagctgggtgtggtggcaggtgcctgtaatcccagctacttgggag

SEQ ID NO: 268020 - DNA, 201 bp, Homo sapiens
caggattttgctaacattgggctattcacgtctggcattcttggggcctagttgagaaatgggcttagaagagcctgaataaattctggtctaggaaggcygggagtgctggctcacacctgtaatcctagcactttgggaagccgaggcaggtggatcacaaggtcaggagttcaagaccagcctggccaacatggtgaa

SEQ ID NO: 268021 - DNA, 201 bp, Homo sapiens
aaaggcaagccagggtggtgagatacatcacctggggatgggaatcgggggaatgaggaatttgatcagatgtataataggttggagggttctcactaaastgataagcaggattttgctaacattgggctattcacgtctggcattcttggggcctagttgagaaatgggcttagaagagcctgaataaattctggtcta

SEQ ID NO: 268022 - DNA, 201 bp, Homo sapiens
aaacttgaaactgggatcatccttgtccttaagaagcttacactttattatgataaataagataaaaatttaagtaactatgcagtagaatatactgtatmgttttgaaaagaaaaagtattacttgactttgtcttatttaagctttagatattctgaggggtaaaaaacacaagattgcagttgttagaaaagctgttt

SEQ ID NO: 268023 - DNA, 201 bp, Homo sapiens
tctgagtcatggagtattttattatgtttatttggccccaatatttccaaataaaaagaggcctttgcttttgtgctacaggcgtttcttatctttaggargaatgggccgggcgcggtggctcacacctgtaatcccagcactttgggaggtcaaggcaggcggatcacaaggtcaggagttcgagacaagcctgaccaa

SEQ ID NO: 268024 - DNA, 201 bp, Homo sapiens
gagggtgttgttgatatttacaattgtgtcaaagccttaagatctcggcgtattaatatggtccagacagaggtatgtagatttacctgtagtggactttgtttttattttttattttttttgcaaacaaagagtagatgtctctcatatatactctactcaaccgaaagagatgtttttcatgtgtaatcaatattagct

SEQ ID NO: 268025 - DNA, 201 bp, Homo sapiens
taggccaggcgcagtggctcatgcctgcaatcccagcactttgggaggccgaggcgggtggatcacgaggtcaggagatcgagaccatcctggctaacacrgtgaaaccccgtctctactaaaaagacaaaaaaaattagccaggcatggtggcgggtgcctgtagtcccagctactcgggaggctgaggcaggagaatgg

SEQ ID NO: 268026 - DNA, 201 bp, Homo sapiens
acaattaataagcactatatcatccacctcaaagctagtaaccatcttatgccttagtactcgaataaaaatacaggaaaacagaaatgctggaagctagrtttttcggtcagtcactagactagcatattctctcaggaaatacagatgcactggctcagtcaagttggacagcctaggcctggcctctgagtgtatgta

SEQ ID NO: 268027 - DNA, 201 bp, Homo sapiens
tggacagcctaggcctggcctctgagtgtatgtagacttatcttaaggatgactgcatgttttattagtattgacatccagcccagaaatggcatgtgataaaaaaaataagaacattgcaataacaataatgacagagaaactgtactgcaggaggaaagagacatgttggatcaaccattatagaagggttccatgtca

SEQ ID NO: 268028 - DNA, 201 bp, Homo sapiens
gtgtttattagacttctactgtatgcaaagcccttgttagatagggtgccagttatcaatttattgccccggagcttaaaatttgtccttcattacctgcyctgtcatagtagcacttgaccctttaagcggttctgctttacagctggcacagtgttaagctttgtcagtagagggcactggagagacacttaagaaaga

SEQ ID NO: 268029 - DNA, 201 bp, Homo sapiens
accttattggggcgggaaccattgatttgtgcatttccaggattgattactatccctaataaagttagtctggtaggcaaaatagcaagaccttatctctmcacacacacacacacacacacacacacacacacacacacaataataaccaggcatagtggtgcatgcttttagtcccagctattttggaggctgaggctg

SEQ ID NO: 268030 - DNA, 201 bp, Homo sapiens
acagacaaacaaacaaaactggcatggcattggacagtgacacataagaagctgatgtcatctttgccacttagagaaggcaaaatatcttgttagataamccctcttaaatgctctgcttggctagtactttttgggcttggtcagtgattagagtttaagttgtaaatggtattcataatttcttgtctctgtctcatc

SEQ ID NO: 268031 - DNA, 201 bp, Homo sapiens
atgctgactgggcagaggaagagttaataggaattaagagaggttggagagtagccatctccggaagccaatttaaggttgttttccatccaaaacaggaracctatatagcaataacaacacaagttttatagaatatggcccaattaattacctcaatatgaaaatatggtcatatctctatagtgtgcttgttttcat

SEQ ID NO: 268032 - DNA, 201 bp, Homo sapiens
gtgaggccctaaatctttatcatcttttcattgcatggatcacacctccttgcatgggtttgcccacatagagattatttacagtgcaggaggcagcttgrttttgaaaatagacagccatggtattatcaaagagagcaactgtgttcaacccaatatcagatctagtggatttcaaattagcaaggcatgctatttaat

SEQ ID NO: 268033 - DNA, 201 bp, Homo sapiens
tcatttgctttccactacatgacaaattcaatgtgggtggggaagatcttaaaaaaaaaagtgctaataaagcccgggcacagtgcctcatgcctgtaatyccagcactttgggaggccaaggcgggcagatcataaggtcaggagttcaagaccagcctggcaacgtggtgaaaccccatctctactaaaaatacaaaaa

SEQ ID NO: 268034 - DNA, 201 bp, Homo sapiens
ctctactatttgtatatttgacagtataaggtgtttgagggcagtacatgtggaaatgttaaggagttaacattaatagtactgtggttaaacagatggcrtaattagcccgcaatggggaagaacaatgttttcgtgtttggataaaaagggcacactgtaggtggtagaataagaggttccaaatgacagtaccttatg

SEQ ID NO: 268035 - DNA, 201 bp, Homo sapiens
tacacagcctttgtctctttggtgagcttatcatatgtgttttagtaaaaaagttcttcttaatcaaacaatttgtacacttgatttgtcaaactatattctggttaaagaaaaggccgattcttagttatttatccagttatctgccattgaaagtaaagaaaagtagaaaaaaaatctattactgaatatcttagatgt

SEQ ID NO: 268036 - DNA, 201 bp, Homo sapiens
aaaaaaaaaaaaaaaaaaaaatagtaaccatatagtggaaaaactgaatgtcaaaattaatatcactgaggggaggcagacagatatcatgtgctttcagktatgatactataagaacacaaaaccacttttgtagcattctggtgaagaatgcattacctgaatctcatcatgaggaaatatcagacaaatccaaataga

SEQ ID NO: 268037 - DNA, 201 bp, Homo sapiens
atagttaatagcagagccttcaggcaagcatgggaggaatgcagaaaccacctgctgaatgactgaatgcttgtgattaatttattatagtaatcaaccgyatcacactagaaaagagaaaaattctccatcagggtataagacttactatttaataagtatttgttaacagctcctctgaaagtaagaatatatggacat

SEQ ID NO: 268038 - DNA, 201 bp, Homo sapiens
ttgtagtgcctggtcccgtaccagtaaaatctcttcaaggaacatcctttgaaaataagatcttcttgaactggaaagaacctttggatccaaatggaatyatcactcaatatgaggtattgggagaacaaggaagttaattgaaatgtggattgaaggactaaaaggaagaagaaaggaaaagttagagggaaatatgga

SEQ ID NO: 268039 - DNA, 201 bp, Homo sapiens
tcattatatgttttcattatatctttatattaggttctgatttcatgtcaatttaatctcttttggttgctttgacttgtaagtttgtaactgttttattrtcatccatatacaacatgctatggcagcagttcagcagcaattgttgagtgctcactctgtagagaacaatactccagcaattatggaacagtaagtaat

SEQ ID NO: 268040 - DNA, 201 bp, Homo sapiens
agatctaactgcttaaaatgtagcctaataagttcaatggccgtgtcactgccagtagtttagaaatcattatatgttttcattatatctttatattaggytctgatttcatgtcaatttaatctcttttggttgctttgacttgtaagtttgtaactgttttattatcatccatatacaacatgctatggcagcagttca

SEQ ID NO: 268041 - DNA, 201 bp, Homo sapiens
aataatgatatttctttaatttctaattttccttaattgtcatttcatttctgagttttgttgtttaagtttatattgtttcatctcatgaatcatttccktaatatgttttagcttatcttgaaatattatgttgcggttttgatctgttttatggacatatttttctgactgactttcattgacactaagaattatact

SEQ ID NO: 268042 - DNA, 201 bp, Homo sapiens
ctccctatgtccatgtgttctcattgtttgtctcccacttatgagtgagaactcataatttctagtaattaataatgatatttctttaatttctaattttycttaattgtcatttcatttctgagttttgttgtttaagtttatattgtttcatctcatgaatcatttccgtaatatgttttagcttatcttgaaatatta

SEQ ID NO: 268043 - DNA, 201 bp, Homo sapiens
atatgtaatgatgagcatcagaaagtttaatcatatttactttttagaattgttaaatactcctgaagtcattttggttgattttatgtggcttcctaccrtaaagagatcaatgccttgcagatataaagctttcttttccttctttaataatttataaactctgaatttaatgtttacagattacataactgatcataa

SEQ ID NO: 268044 - DNA, 201 bp, Homo sapiens
atgaaacttctatgttgctttctcccctacctcacctcttttttttttcttttctttttttttttttttttggcgtttgctacagaatggtgaatttatgyatttctcttccactttgacatggacattgcctcattcttcagtagtgtgcatattcaccttaatttattcaaaagctattttacctttttcaataacacc

SEQ ID NO: 268045 - DNA, 201 bp, Homo sapiens
gccttctaaattcctgatggatctgtgttatactgttaaatgggtcacactgtcttttaacctgggttctcttttctttttagactctgaattcagtcacscctcgactacaagctgaagactgcagtatagcgtgcctgccaaggaaccatgacaagaaccgtttcatggacatgctgccacctgacagatgtctgcctt

SEQ ID NO: 268046 - DNA, 201 bp, Homo sapiens
agtcccaatactgctcattttttttttttgtttgctttctattttgtagatagtccatttcatgatggttttaaaaaatgttcctcctgccatttttgtarcaaagatgagaggtaaaatattctatgaaacttctatgttgctttctcccctacctcacctcttttttttttcttttctttttttttttttttttggcgt

SEQ ID NO: 268047 - DNA, 201 bp, Homo sapiens
attttttcatttagatgggaacattagctggcatttggctttagttgtgagctatatagtcttttcttggagatctagaggctctgtaggtctgcccttgrttttatgcctcaggatttaatgtgacattgaaataaaaagggttttgtatcctcagtcaccagctgccttgtggcaacaaagactttctggaccctgctg

SEQ ID NO: 268048 - DNA, 201 bp, Homo sapiens
gtctcatgagtctataattaactactaagtttattttgtatattttctaaatattgattattatatagctatattatttaaactctttggaacactactcrtaacaacttctgatttacacagtttacaaatatatcagaatctcaaagtctagattgcagcaatctatgcctatagcattttcctgagtataagctactg

SEQ ID NO: 268049 - DNA, 201 bp, Homo sapiens
tcataggaagtaaaatcagaattgtattattgaattaaattattttaatgaaagacatgctgcttttttgcttttaaacatttcgagtggtagaaacaagrtgtaaatgaatttgttggataaaaaaagttgtagaaaaaacacgacttttgtaggccttgataatgtaataaggtactactttgctcaaacttttgaaaa

SEQ ID NO: 268050 - DNA, 201 bp, Homo sapiens
aatttttcctggaaagcatgttgtataatgtgcaacctgttttatcaaataaatgtcaagtcagttttcttatttctcttcctatgcctaaataatagttwaaaaatgattttagatatatgttctaatcgttttgctagtgattttttcatttagatgggaacattagctggcatttggctttagttgtgagctatatag

SEQ ID NO: 268051 - DNA, 201 bp, Homo sapiens
tgtgagtagggcagctcagcctgtcattcatggggccttggtgcttattttctcattttcaatgttaaagactatctggcttgcatcttatggacctcccwtagatgttatttttaaacagtcttcctgtctcatgagtctataattaactactaagtttattttgtatattttctaaatattgattattatatagctata

SEQ ID NO: 268052 - DNA, 201 bp, Homo sapiens
cctggtggatgatgatgtttgtaatttagtacattaagctctgtgggtggaagacaagtactacaatatgcacaagctattatcgtcgaaccactttttgktttaatacttattttaaaaatatttattttgattctgttatgtgcaagggaacaaatgatatgtcctttctgtaaactctaagcctctgaaatgcagctt

SEQ ID NO: 268053 - DNA, 201 bp, Homo sapiens
cataaacattctttccgcattctttatcagcacataatcctgagacacaaaaagcctttgtgtcccactgggaatgtgagaaaatcaaagctatctattgsttttgctcctgttaggaaccactaacatttctatattaaccacccatgttttgaattgagatagatgttatcagcaagatgtgtcctccatttatcccca

SEQ ID NO: 268054 - DNA, 201 bp, Homo sapiens
tttatgcccattttgtgtttaagcaaaagaatacttatcaaatgctgatctccacacatagtatagagcatagtgtttaagagtgcggacattggaacttractgcttgagtgggaatatacattccaacatgtttttactacatgatctgaccactttccttcagtttccacatattcaaaatgggaaagtacccattcc

SEQ ID NO: 268055 - DNA, 201 bp, Homo sapiens
aatagctgaaaagagtataccaggttaagactaactttaaatactttgaaatgtggtgtgttaatagtcaaccccttaaaaaaaatcttagtatcttaaayctctaaatatgtgtgtatatatatgtgtgttctttttttcttttccccaaagtgcttatcagattgttgtggaagaactgcacccacaccgaaccaagag

SEQ ID NO: 268056 - DNA, 201 bp, Homo sapiens; identical to SEQ ID NO: 52871

SEQ ID NO: 268057 - DNA, 201 bp, Homo sapiens
aaaataatatgcattttagactgttctccagcctgaattttacccacttgaatgaactgagttgggaatttttaaatgaattgcatattataagtaatagwttatgatatggtctctgaatttttctaaattcttattatggagcaagtccatagatgggcttagaggaaaggcagttttaactcaaaaattttattgcca

SEQ ID NO: 268058 - DNA, 201 bp, Homo sapiens
taagtatttaaataaaatatataaaaggaaaatacacgatagcgaaagaattttttatctggtattttgtcaatagaagctggtgcatcattcagtgttgycattgtgtatgaccagttatatgacatttgcaaataaggactgaagcaaaggctcttcaaatatggtcatagctgaggacacttccaaagtagttgtgca

SEQ ID NO: 268059 - DNA, 201 bp, Homo sapiens
gttaggatctggtgaaacacaattctctctgttatattcaaactgcaaaaaattctgtagatccatttgaaatatgaataagaatgatattttttcttatytaataatatttttaaaactgaatttacaagagttaagtaggagctgtcatactctgataaattctttaaagtattttaagaaacccttgggaatatttca

SEQ ID NO: 268060 - DNA, 201 bp, Homo sapiens
catccttttgagtgtgtgtgtgtgtgcgtgtgcacacgcatgtagtgggacaggctgtctgcgtgagtttaattacagattcatgttagagatttcctttyctgaaataaaacacatgagcaaataattaataagtatttttgttaggatctggtgaaacacaattctctctgttatattcaaactgcaaaaaattctgta

SEQ ID NO: 268061 - DNA, 201 bp, Homo sapiens
tagtattaacattctaaaattaacttgtcactgtaatattaattacagtgatatatggatacatagaattatgtgggcacgtgtatatatgtatgtgtgcrtagatatatgaaagtgaaagaatatttaaacctatactgtagctcctgctgagtggcagatgctgtaactatgcaaaaggcctgtgtgtattcaggtaag

SEQ ID NO: 268062 - DNA, 201 bp, Homo sapiens
ttgtaattggataaattgatgttttattaaagaatacctggtaacattataaatagtattaacattctaaaattaacttgtcactgtaatattaattacaktgatatatggatacatagaattatgtgggcacgtgtatatatgtatgtgtgcgtagatatatgaaagtgaaagaatatttaaacctatactgtagctcct

SEQ ID NO: 268063 - DNA, 201 bp, Homo sapiens
aatggtaaccatatgcactcaactgagggaggaaatttgaggagaaagttactgtgattcaggtttcagcattgatttggttagaagttgacacctttaawgattatcttaaaagtttcactaaaacttcccttaaaacccagagtgctgtctttatgagaaagggagcaaaggtccccgacatccagggttctgatgtca

SEQ ID NO: 268064 - DNA, 201 bp, Homo sapiens
attattttaagtctgaaattaaatttaagtgaagcctttctgagacttatttattttaaacacttgttattgcattttggattaaaaaattacatacacamatttgttttcctgaatatataatgtgtttgatctctccataaatatgtatgttaatatagcactaaaatctaaatctttccacattattgtacacgtagg

SEQ ID NO: 268065 - DNA, 201 bp, Homo sapiens
aggaaaagaaacttgggtaaatatactcactaatgatctttgggaaaacacctggtttattatcctacagtttgtgcaagggctactgcaaaaatagtccraacaaaattgcttttaatgttttcaaagatagaaaattcactggtttatacatgctttagggggaggtgaggtgaaaagggaaggttgccaagcaagagt

SEQ ID NO: 268066 - DNA, 201 bp, Homo sapiens
ccctgacagtggtattgcaggtgttgaaaaatttgtagtgtgataacctagcctatagggtggagcctggaactatgacagttgtctttttacttcaaggkgccacacagttgttgtcatctcctgtttgtttttcataatataaaagcatttgggaagcactgctaaaaatccatgctttccctgtctccctcctcaaac

SEQ ID NO: 268067 - DNA, 201 bp, Homo sapiens
gcagagctgcccaggtctcagaggcttatttttgaattccaacttgtacctgagagctaaaaattaggtaagatttggattgatcacacttcgggatcccytgctacaatggatatgcggttacctgtatttaaaacaaagaactgatgacctttttccttttaatagctgattccttgatttacctaactattcttcatt

SEQ ID NO: 268068 - DNA, 201 bp, Homo sapiens
tataaaaaaagcaaagattaaaagaaaaaagaatcatctacagctataagcacaaaggctccatcacagggatatcaagcatgtttcccttagattctgtyatatgcgttactgtctgcttgagtccatctgatcacaatgtatgcacaaggaaacatgtctatgatatgatcgtgtgtctcttttgtgctttttgcacct

SEQ ID NO: 268069 - DNA, 201 bp, Homo sapiens
gtagagatggggtttcttcctgttggtcaggcctgtagtcccagctactcaagaggctgaggcaggagaatcgcatgaacccgggaggcagaagttgcagygagccgagatttcgccactgcactccagcctggtgacagagtgagactccgtctcaaaaaaaaaaaaaaacaagtaaatttcttaagttgttatcatttt

SEQ ID NO: 268070 - DNA, 201 bp, Homo sapiens
ttcctgtattgcaggaatgctagtgttctctggcctatcatatgaggctgctggcctaccattctagtttgcattttcgacttggtgatacctggccagcwtgttggctttctcctgaagtttgatgtttctcttccccttgcagtacatatttgaaaagaagtttggaactgccagctttgcttggatttgaactatggc

SEQ ID NO: 268071 - DNA, 201 bp, Homo sapiens
cttagaagagcctgaataaattctggtctaggaaggctgggagtgctggctcacacctgtaatcctagcactttgggaagccgaggcaggtggatcacaargtcaggagttcaagaccagcctggccaacatggtgaaaccctgtctctacaaaaagtacaaaaattagccaggtgtggtggcacgtgcctgtagtcccag

SEQ ID NO: 268072 - DNA, 201 bp, Homo sapiens
atagacaaactcttcatttttgttgcaatttgcccttactcgaatagtgaagctgagagatttttcctgtttattggaacattaattaggggtagtttttktttgtttgtttgtttgagagagtcttgctctgtcgctcaggctggagtgcaatggcacgatctcggctcactgtaacctccgcctcctgggttcaagcta

SEQ ID NO: 268073 - DNA, 201 bp, Homo sapiens
tcttcacctcctgggttcaagcaattctcctgccccagcctccttagtagctgggattacaggtgtgcgccaccatgcccggctaatttttgtatttttgrtagagacaggtttcaccatgttggccaggctggtctcgaactcctgacctcgtgatccacctgccttagcctcccaaagtgctgggattacagaattgag

SEQ ID NO: 268074 - DNA, 201 bp, Homo sapiens
ttttttccttcatttcaactttggtgaatctgacaattatgtgtcttggagttgctcttctcgaggagtatctttgtggcattctctgtgtttcctgaatytgaatgttggcctgccttgctaggttggaattgagtagtctgagtgggcttcattgagttgatttttgagcaaagatgtgaagaagacgagggtatattc

SEQ ID NO: 268075 - DNA, 201 bp, Homo sapiens
tcatttctgcaccttgcccataagtggagggtgagagattctttcaaatgctttattgaaatgtagacatattaagacctggccaggtgcagtggctcackcctgtaatcccagcactttgggaggccaaggtgggcagatcacaaagtcgggatttcaagaccagtctggcaaacagagtgaaacactgtctctactaaa

SEQ ID NO: 268076 - DNA, 201 bp, Homo sapiens
agtagtgggcataaaagctatgggctataatgaactttgccaagttttgatgccatgccctgaccattatagaagcccggtaaattaatttagtgtgatcrtataactataagaagatgtttttgatttattggatattaaaacttgaaggaacatagggataatgaaatttatcctactcattttccaaatgaggagcct

SEQ ID NO: 268077 - DNA, 201 bp, Homo sapiens
gacatattaagacctggccaggtgcagtggctcacgcctgtaatcccagcactttgggaggccaaggtgggcagatcacaaagtcgggatttcaagaccaktctggcaaacagagtgaaacactgtctctactaaaaatacaaaaaattacctgggcgtggtggtgtgcacctgtaatcccagctacttgggaggctgagg

SEQ ID NO: 268078 - DNA, 201 bp, Homo sapiens
atgatagcaacagactatgagcattttcttgcagtctatagagtacagggccagacttctggcctgtgctgtttcactggttcaaatgactccatttgtakttgctgtggatgtctgtgttttagtagcagctttgggtataaagctgtcaaagccatcacttcagaattcataggtgatccacagagatccaggtggtgg

SEQ ID NO: 268079 - DNA, 201 bp, Homo sapiens
cttattttgtacagctactcctagttgttattgctaatcagaatcctgtagtctaaaattaacagtggctatgaaggagagcaattaaggccatttgtctytcaaatgagtcaatgtgggtcccactggtagtttaaatttatatacagagggcactcacactattataaagggtaatgggggccctgaaggcctgtgtta

SEQ ID NO: 268080 - DNA, 201 bp, Homo sapiens
tgggcatattcacataatgccatgctctaaagcaaagaatgcaaactatgactacacaaaataatatacataagtataaccaacattatttgagtaaaagscagacaacaaagaatatacactttattgtttaatttgtaaaaaagagataaaataactaataaaagttaaaaggtatgcagtacctatatagatgtatta

SEQ ID NO: 268081 - DNA, 201 bp, Homo sapiens
agatttccttttctgaaataaaacacatgagcaaataattaataagtatttttgttaggatctggtgaaacacaattctctctgttatattcaaactgcaraaaattctgtagatccatttgaaatatgaataagaatgatattttttcttatttaataatatttttaaaactgaatttacaagagttaagtaggagctgt

SEQ ID NO: 268082 - DNA, 201 bp, Homo sapiens
agcagggacaagtgctgtgccttgcagtttgttaaatcaatttgattctacctatctgacagtggaaaaagtccttatttaaggttatgaagactaacatscttcttacaattcattaaatttaattgtttttcagtgctggtgctggacgaactggctgctacattgtgattgacatcatgctagacatggctgaaagag

SEQ ID NO: 268083 - DNA, 201 bp, Homo sapiens
cgcatgaacccgggaggcagaagttgcagcgagccgagatttcgccactgcactccagcctggtgacagagtgagactccgtctcaaaaaaaaaaaaaaamaagtaaatttcttaagttgttatcattttggtatactgtttgaccagattcagtctcaataaaaggagcattaacaaaacttcaaaacttctatggcaca

SEQ ID NO: 268084 - DNA, 201 bp, Homo sapiens
tttttattccatatttattctgtggcctaatccaaaatataatcataaaaatatatattttacattttatgtatcagtgtggcataaccttataattcagyatatatcctgaagactttgagttatgcacattgtcatacttagacatagttctcaacctttagaggatcagacagttatctggacagaggagcattgatg

SEQ ID NO: 268085 - DNA, 201 bp, Homo sapiens
atgatattgctaagtagtgatattgctaagtcatgtggtttatgtattcaacttgttgactctaagctgttcaccaaaatgactgaacaattggcattccwgctggcagtatgcatttctattgatgcatatgctgagtaacccttggtatttatttgcacattttcagattatttttcctattaggtaaagataatattg

SEQ ID NO: 268086 - DNA, 201 bp, Homo sapiens
ctctaattctctttcacacacataaatcaagtttcaggctcttttggaaatgtttactagaaaaaacatcatgggcagattttaaaatgcttttggattgyatgacggcgtggtgccacttccattgaagtgttgtaatattttattttccttcccaaagcgtcaagataaatcctgtaaacattttttctccttttgttg

SEQ ID NO: 268087 - DNA, 201 bp, Homo sapiens
ttatttcagctgctgaggtaacagactttgacggcagtaactccagtgtggggaggtcagcaagctgctttatgtagcagctaccacacttcagcatagcyattgccttgtgtagggtccgaacgttggttgcagaccaggactcctgcatctggtctgtaatgatttcctactctctagatgatctgaattgatttctga

SEQ ID NO: 268088 - DNA, 201 bp, Homo sapiens
atcctgtaaacattttttctccttttgttgttttggttgtactattgtgtttggctctagccttttgcccccagggaaacaaaagtgtttttttttaactkcagtgctcccgctgagtactccagctgttgggcagcagtttcaaagttgttccctatttacacactgcaagtctggcggatcacaaagcttcctacatct

SEQ ID NO: 268089 - DNA, 201 bp, Homo sapiens
accacagtataagtatagttgtttctgtgtgtgtgtgtgtgtgtgtgtgtgtgtgtgtgtgtgtgtgtgtgtgtgtgtgtagggggcgggaggtacttttwttttttttttgagacggagtctcgctctttcacccagctggagcgcagtggcacgatctcggctcactgcaagctctgcctcccgggttcacgccattct

SEQ ID NO: 268090 - DNA, 201 bp, Homo sapiens
cttggagagatggcaaggtgtggctgtgttgctgtcaacttctactttgccctcttgaactgtctccttcatctttccattctccaccctcttctttcccmcctctcttttcctctctctctctcttttgtttctgcaaccgccttttttcagtcttcttattttctttggctatgttttattgcccgctcataagctggc

SEQ ID NO: 268091 - DNA, 201 bp, Homo sapiens
tgaaaggccgtatgtgtcataacttttgccttttcctcttgaatgtaaagcagtgaagtcatttcttcgcatttaccttttagaaaactcatccaactagyaatatgtaggataaatctgaggtagccaacatgggaagcaggaggactagtgaaaaaacaagattgggtcttgaaggcagtcgaaggtggggtggagaat

SEQ ID NO: 268092 - DNA, 201 bp, Homo sapiens
gcagagactttgttagaggcccaaagtgaaaagcactaggctattatgaataattttgtgaacttacgttggattgattttaacatgactacttttgtttaaaaaaaaacgcattagaggttaagaaaacgatttcatagaaaaagtcaaagctcaaacaacacttcataattagcattcaggacacaaaaacacttgaga

SEQ ID NO: 268093 - DNA, 201 bp, Homo sapiens
aggctgttaacacataataaataatgactcatatatttgatttaaaatttcctggattatctataatcagaatttagaatttctctcctagaagtgtggcragctgaagctattagagctgtggcctttacaatcctttaacggaataacccatctcctgttgctgatctgaaccgcataactggctaaactagtgcaggc

SEQ ID NO: 268094 - DNA, 201 bp, Homo sapiens
catagaaaaagtcaaagctcaaacaacacttcataattagcattcaggacacaaaaacacttgagaactctagaaaaccttagaacattccaataaactcatatatatatatatatatatgaaaactgagacccaaggatgaataactaattgttttaatggggtctgaaatagaccatgagttccccaaactacaagtta

SEQ ID NO: 268095 - DNA, 201 bp, Homo sapiens
tagtcccagctactccggaggctgaggcagcagaatggcgcgaacccgggaggcggagcttgcggtgagccgagatcgtgccactgcactccagcctgggygacagagcaagactccgtctcaaaagaaaaaaaaaaaaaaaagaaataagtgaggtaatacgtttcttgccctagagaaacttgctctctagttgagaaa

SEQ ID NO: 268096 - DNA, 201 bp, Homo sapiens
atagaaaaagtcaaagctcaaacaacacttcataattagcattcaggacacaaaaacacttgagaactctagaaaaccttagaacattccaataaactcatatatatatatatatatatgaaaactgagacccaaggatgaataactaattgttttaatggggtctgaaatagaccatgagttccccaaactacaagttat

SEQ ID NO: 268097 - DNA, 201 bp, Homo sapiens
tgcttcagtaaccatgtctgtgtctgtgacaggtgctactgactcctttcttcatgttattgatctaaaatattttttaaaatgtagaatctacaaaaccytggaggcctttcatccttggaagctggaattattgcatcttttcatccttcttaaagaggggaatgttttcacccttacagttaagttgacagttcatat

SEQ ID NO: 268098 - DNA, 201 bp, Homo sapiens
tcgaattttgtcctttgtcacaagttggaagagttggttatgctggtgttacaggtactcacgggggaatgtgctggagctgttgtgtgaccatctgttgwatatatatatatatatatatatatatatatatatatgtgtatatatatatatatgtatatgtatatatatatatttaaactaaaataaaggctttagatg

SEQ ID NO: 268099 - DNA, 201 bp, Homo sapiens
gttcaggttttcaaactcttacttgagtaaaaagggagaacaggtatttaaaagcatatttctagccaggcgccgtggctcacacctgtaatcccagcacwttgggaggccgaggcaggtgtatcacaaggtcaggacttcgagaccagcctggccaacatagtgaaaccccatctctactaaaaatacaaaaaattagct

SEQ ID NO: 268100 - DNA, 201 bp, Homo sapiens
aatatgtccctcagttttttgttacctgggatctaggaatgttctctaattaaagaaatggaatggtgatggtgtgttgaaaggtataggttaatgagttaaaaaaaaaaaatctacattgcaccctaaggaaggatgaacttaactatgctgaactgaattgacaagggttgagctagtcagtgtgctaatgagcaggct

SEQ ID NO: 268101 - DNA, 201 bp, Homo sapiens
aaaaatctaatgataaattctagcaattatcagtgattacaatataggcctggtttgttgttgttgttgtttttgtttttgaaaaggaatcttgctctgtyactcaggctggagtgcagtgccacgatctcggctcactgcaacctctgcctcccaggaggttgcaattctcctgtctcagcctcccaggtagctgggatt

SEQ ID NO: 268102 - DNA, 201 bp, Homo sapiens; identical to SEQ ID NO: 52881

SEQ ID NO: 268103 - DNA, 201 bp, Homo sapiens
aaaagagaatttgcagttgtgattaagttaaggatcttgagatggaaaagttattctgcattttccaggtagatcgagtgtaatcacaagagtgctgatasatgtgaggtagcagaatcaaaggcagagaagggatgtgatgacagaagcaaaagtgggaatggcctgctttgaagaagactggggccatgagccaaggaa

SEQ ID NO: 268104 - DNA, 201 bp, Homo sapiens
aaataataaaattaaaaatactttgtaaactataaagacctatccaaagtaaatatattcttaatgatgacgacttatgtatttaaagcactgtacagttytttgcatttgctgtaaatatatgatggcaaaatgcttacctagaagtaacagaactgcatgtattactgtgtatctgatatcaatatttaaaatagtggg

SEQ ID NO: 268105 - DNA, 201 bp, Homo sapiens
agggaatcatgatttgatctgtgcttttaaggatcactctggatactccatggagaagagattgtaagctcctcagagtgtgtttagagcacatactgctrcaatggtggctaagactaagggagtggaagtggcatgagagagaaatgggtgtatttaatacttttagatacagatacatagtacttgttgatagattaa

SEQ ID NO: 268106 - DNA, 201 bp, Homo sapiens
ggacaacatagcaagaccctgtctctaaaaaaataataaaattaaaaatactttgtaaactataaagacctatccaaagtaaatatattcttaatgatgaygacttatgtatttaaagcactgtacagttttttgcatttgctgtaaatatatgatggcaaaatgcttacctagaagtaacagaactgcatgtattactgt

SEQ ID NO: 268107 - DNA, 201 bp, Homo sapiens
tgtgtttagagcacatactgctgcaatggtggctaagactaagggagtggaagtggcatgagagagaaatgggtgtatttaatacttttagatacagatayatagtacttgttgatagattaaatgtaatgtaggaaggaaaataaaatgaagaatgataggtttttggcatgtgcgactaagtggatgagtttgctattt

SEQ ID NO: 268108 - DNA, 201 bp, Homo sapiens
aggaatgtcgcattaagtgactaatgaaacggaaataactactgcccatgtaacttcataaatgcccttcatagacatttatgtcagagcaaagatggcaraatacttgataatgacattatctccccctcacaacctttattttaatgctgtcaatcaaaactgagccagttaacatttctagagaataatattttatca

SEQ ID NO: 268109 - DNA, 201 bp, Homo sapiens
agaagcaaaagtgggaatggcctgctttgaagaagactggggccatgagccaaggaattcaggcagcctctagaaactggaaaaatcaagaaaacagattmtctcccttgagtctgtagaaaaagaaagccctgccaacaccttgattttagtcccataagactcatttatgacttctgatctctcaaatatataaaatat

SEQ ID NO: 268110 - DNA, 201 bp, Homo sapiens; identical to SEQ ID NO: 52872

SEQ ID NO: 268111 - DNA, 201 bp, Homo sapiens
agttggttatgctggtgttacaggtactcacgggggaatgtgctggagctgttgtgtgaccatctgttgtatatatatatatatatatatatatatatatrtatatgtgtatatatatatatatgtatatgtatatatatatatttaaactaaaataaaggctttagatggctcctggtgaaatatataataacatgttaa

SEQ ID NO: 268112 - DNA, 201 bp, Homo sapiens
aacatgccaccttttttctcatggtttcagtagagcagctaccacatgttgcatgagttcatactttctacgtggcatttttctccctttctaaaatgaaygctgatgaatcttaaaaggaagaagaaaagaaaagctgtgcaaattcatagtaaagttcgttttttatatgtttccagtgtagcagatctctatataaat

SEQ ID NO: 268113 - DNA, 201 bp, Homo sapiens
ctgggtgtggtggcaggtgcctgtaatcccagctacttgggaggctgaggcaggagaatcgcttgaaccctggaggtggaggttgcagtgagccgagatcrtgccattgcactccagcctgggcaacaagagcaaaactccatctcaaataaataaataaataaataaataaataaataaataaataaataaaatatacct

SEQ ID NO: 268114 - DNA, 201 bp, Homo sapiens
cctttgtagccatagagattatatttatttagttttccaaacatgccatcccaatctttttcattgtatttgttcctttggcctggaacatcaataatctrttggttgacactcatccttgaaaattcagctgtttaaaactcagattatcttactaatgtgttcagtggttcacatactgcttggcacatagtaggtgct

SEQ ID NO: 268115 - DNA, 201 bp, Homo sapiens
cgcatttccagattgtgatgatgcctgctgacttccatggcaggtgtaaagcagtgtgggctgttgccagctcacaatgggaacctgaactctagttctayaaatctaattacctgaagcacagtcagcagaccaaaattgatttcaccttcatgttatattcttggaatgataaagtatgtattcattaatttgacttat

SEQ ID NO: 268116 - DNA, 201 bp, Homo sapiens
ttgaaaaaagggattgatttttttcatatcttttgttgctttacctgggactctcacaaagtgttaagaggtaaaattgttgctatatatatatatatatattttttttttcctctttctcattttggccagttgactgaataatttggtcaattagttgacttatttaattaaactacatcctgttataatgccaaaatg

SEQ ID NO: 268117 - DNA, 201 bp, Homo sapiens
gaaattcccattttaaaaatcatcagatctcgtgagatttattcactatcacaagaacagcatgggtaatacctgcctccatgattcaattatctcccatsaggttcctcccaggacacatgggaattgtgggagttacaattcaagatgagatttgggtggggacacaaccaaaccatattaacacctagcaagtgtttt

SEQ ID NO: 268118 - DNA, 201 bp, Homo sapiens
aaactaagattttgaaaattataaagtttgaaattgttttaaaaaattgtagaacctatttgggagcatatccaacatagcattttcttgatttttgttayaaagagagcacactggggaggctcacatgtgaggaatatctaagccagcctgcctgcctgcctgcctgcctgcctgcctgcctgcctgccttcctgcctg

SEQ ID NO: 268119 - DNA, 201 bp, Homo sapiens
tttctttaaattgaaagtttcaaaaattagttatcttagcagaatgtatgtatatttgccacctcatgtataataatcaaatcagtcctaaatcatgtagyttttgtggtgatatgatgatatacggagtaggacaaggtatatcgggtaattgtgtagatctttgagtgtattcaaagtttggcttttaagtgagcttgt

SEQ ID NO: 268120 - DNA, 201 bp, Homo sapiens
cctgcctgcctgcctgcctgcctgcctgccttcctgcctgccttcctgccttccttccttccttccttccttccttccttccttccttccttccttccttccttccttcctgccttcctgccttcctgtcttacttccttcttgccttcctttctatgcctgcctgcctgcctgcctgcctgcctgcctgcctgcaacctt

SEQ ID NO: 268121 - DNA, 201 bp, Homo sapiens
ctgcctgcctgcctgcctgcctgcctgccttcctgcctgccttcctgccttccttccttccttccttccttccttccttccttccttccttccttccttccttccttcctgccttcctgccttcctgtcttacttccttcttgccttcctttctatgcctgcctgcctgcctgcctgcctgcctgcctgcctgcaaccttg

SEQ ID NO: 268122 - DNA, 201 bp, Homo sapiens
gcaatctctgctcactgcaagctccgcctcccgggttaacgccattctcctgcctcagcctcagctgggactacaggtgcccgccaccatgcccggctaatttttttttgtatttttagtagagacggggtttcaccgtgttagccaggacggtctcgatctcctgacgtcgtgatccgcccgccttggtgtcccaaagtg

SEQ ID NO: 268123 - DNA, 201 bp, Homo sapiens
tgcctgcctgcctgcctgcctgcctgccttcctgcctgccttcctgccttccttccttccttccttccttccttccttccttccttccttccttccttccttccttcctgccttcctgccttcctgtcttacttccttcttgccttcctttctatgcctgcctgcctgcctgcctgcctgcctgcctgcctgcaaccttga

SEQ ID NO: 268124 - DNA, 201 bp, Homo sapiens
ggagtgcaatggcacgatctcggctcactgtaacctccgcctcctgggttcaagctattctcctgcctcagcctcctgagtagctgggattacaggcgccygccaccacgcccaactatttcttgtatttttagtagagatggggtttcaccatgttggccaggctggtctcgaactcctgacctcaggtgatccgtctgc

SEQ ID NO: 268125 - DNA, 201 bp, Homo sapiens
ttggactaatagttgtgctttcaattctgcatattaatctggagcaaattccaagttctgtgcgtatatgcttagcaataacattaaattgtgacattaamatgtaaacaggaatttaaaaatacaacatgaaagagaacaaactcttttccttccaatatttagaaagaaacaaaaatagtacataattatatattatat

SEQ ID NO: 268126 - DNA, 201 bp, Homo sapiens
cagcctgttctctctgaagagaggagaacttaacaaatggacattatcctcaagagtcatctctgccagagggctttgtggaagtgatttgtgagaataattttttttttttttttctcactgcatatctcaaatggcatgtttttcaccactgaaaataggaagacagttcttttgtgtttattaaaaataatagctaac

SEQ ID NO: 268127 - DNA, 201 bp, Homo sapiens
taaaagttacatttctaaatgtaatttttagtttgtaaatgaatatggtaaatatttccttgaaaaattttgtgttggttcccccgtgatgtgtacttttrtaatagaatgaattaaatttgctttttactctgaattgtcactctccgtgattgagtaggaaatggttatttttgaggctgaactgagccataatttcct

SEQ ID NO: 268128 - DNA, 201 bp, Homo sapiens
ctcccaggttcaagtgattcccctgccttagcctcctgagtagctgggactacaggcgtgcactgccacgcccagctaatttttgtatttttagtggaggyggggtttcactgtgttggtcaggctggtctcgaactcctgacctcgtgatccgcccgcctcggcctcccaaactgctgggattacaagcgtgagccaccg

SEQ ID NO: 268129 - DNA, 201 bp, Homo sapiens
atggcacatctaaatttaaatatgaaacagttctaaaagcagggatgtatacttgcttgtcctggaccccagaatcgtgactcacttattatttggaaagsagactgctacatattttggtcacaataatacctaaaggatactgaatcagaaaatgagtaactgaaaatgggagatctctataatgaaaacactagatag

SEQ ID NO: 268130 - DNA, 201 bp, Homo sapiens
ctgtatttgctatactaaatgttgatctacctttacatctttttattcatccatcagttcatcttaattcttaattaatacattaaaatattttatgtaarggaatacattttttaaagaatgaattatttgaatttttattagaatgcttagaataatttgtgttttctaaagatttctctaatgatagtttaagaaaag

SEQ ID NO: 268131 - DNA, 201 bp, Homo sapiens
tctcattctttatatttgttcagaatgtgtatattctttatatttgtacagaattgttctgtaatgatcaaatattactattataaacagataaaaaattmtagatatttaaaaaattgatagaaaatatgcggcaaagataaaatgtctttttaagataaatttcctttttcttaaatggatcattagactcaagtataa

SEQ ID NO: 268132 - DNA, 201 bp, Homo sapiens
aattgtgatttctgtagctgcattttaattgttccccagaatgggtagctcagagcattatgctaagggcagaatcaaatgtagtttactgttggtttttrtcatccaatcccaggcatacttgcaagtaagctaatgtgtgttgagcatatttctatattcgtccctttattgctctcttacttctcattgtccctcacc

SEQ ID NO: 268133 - DNA, 201 bp, Homo sapiens
tcagtctgctatagcaaaatgccataaactggatgtcttataaacaacagaaattgatttctcactgtcctggaggatggggagtccaaaatcaaggcacyaacagacttggtgtctaatgagggtctattttctcgttcatagacagtgcctactcactgtgttctcacagtgcagaagaggcaaggatctctcatgaat

SEQ ID NO: 268134 - DNA, 201 bp, Homo sapiens
acagtttaagttctacagctagtctgttttttctcttattctttatttcctctaacttagtaaatacttccataattacaggtcaacaagaatgatctctrgcagatatttagttactggcagttctggatgtttggatctagggttaaaccagaaatagtgaagagatgttttactggaaagtacttttggcaaactgtc

SEQ ID NO: 268135 - DNA, 201 bp, Homo sapiens
aagaatgatctctagcagatatttagttactggcagttctggatgtttggatctagggttaaaccagaaatagtgaagagatgttttactggaaagtactwttggcaaactgtcagcgtctaagttggcaagcatgtctgactgaaaagctagaaggttaaatgtattaacttaggatataatgataaatagatttttaca

SEQ ID NO: 268136 - DNA, 201 bp, Homo sapiens
attgatacctttttaaattgttgtcatatagcaagaaaagagtattaagtttaaaaacacatttaacatatgtaaataatgaatacaacttaaaaataagrtagataagacaactgtatcagaacaatccttgtgcaggtgtgagccattaataatgtaacaattattaataatgtatgtgggttacattgaaaatcataa

SEQ ID NO: 268137 - DNA, 201 bp, Homo sapiens
aatgtcttagctattttttattcactaaaatgactgtattagcttgttattttagcgtcatatgagggaaacactaaacttagtacgatttttaaaaagtmaatacaaacactaaaacaatgttggcacttaaagaatgtgctttaggaataactaattctgagtgaaatttgtgtgtgtgtgtgtgtgtgtgtgtgtgtg

SEQ ID NO: 268138 - DNA, 201 bp, Homo sapiens
tatcatgagcacaactgtccacaaagctcagaggtctgtgcagcctctgtaattcaaagaacaagagttctctttctttgtaacaggaaattgaaatatcrtgcttgctttgtttgggcaccacagaagccacttgatcaggagacaatggaagaggggttgcctgttgctctcaaaactcatattcaaaagctcatatct

SEQ ID NO: 268139 - DNA, 201 bp, Homo sapiens
aatatccaaaacttaaacaagtttccatttgaaacgtgattttgtggacattttgttatcaaacttctaatgagaaataaatgaaggcacagaaatccacrtaggcacttcataattggtttatatcaagtcgtttacatattcagttaaaaataaaactaatgtttgttctttgtgtaaaaggaatacatttgacttcgt

SEQ ID NO: 268140 - DNA, 201 bp, Homo sapiens
tattcagaaatttcttattgaaatgaagaactgtctggatggactggactgtaaagttcatgagggtatgggtatcaacctccttataattgtgtgtgccygatatttaaaagatatgtattaatctctttggaatggctgaattaattaatattgttattcagaatattatttagtacaataattcataattattctttt

SEQ ID NO: 268141 - DNA, 201 bp, Homo sapiens
accaaagagagtgtgtgtgaacatgtgcagttgtcctaaggggaactgagagatttggtggtagtggggagaggaagggcttaacatgaggccattaacgkagatgggaaaacctcaaaaagtactggatataggtgttagattctaaggagcgtgaaaacttcagatgtttaaagctggaaggttatgcgtcattcaatg

SEQ ID NO: 268142 - DNA, 201 bp, Homo sapiens
cacttttttttaaagggatggaagttaggatcaactgtggtagattcgcctagccattcagaaactttgggcagggatgtggcttttcttggtccctaggrtggaattagcctggggaaagctgctagcccttctgaaaacttgtaatcagtgagcagaattttgtagtttttcctctgagtgcctgagcactcttgctga

SEQ ID NO: 268143 - DNA, 201 bp, Homo sapiens
tttaaaagcaagggtttaaaaaaatctatatttaaatgggcttcagggcctgaaatcctagtcttaatttcttaaattgtactaagatgttttatttttaktctgctgcacgttgaaggaaataggaaaacattagcaataaattttcagatacttttttaccacttttttttaaagggatggaagttaggatcaactgtg

SEQ ID NO: 268144 - DNA, 201 bp, Homo sapiens
atcaatcttttgatgtcattttttgttacctctaagtctatgtttgtgtgcattgttgtttgtatgtacatctctgtgtgtgtctgtgtatatttacttaygaaatcatgaccagatagcatgtacattttttgttttgctttcaaaattaatgctgcatcaaacatccgaaaattctgttatttataattgttatctttg

SEQ ID NO: 268145 - DNA, 201 bp, Homo sapiens
tttgcttggattcttccctttggcattgtgtgtgcttagatgtgtattcagtatcctgcacttttggacatgttgccttccatgttggtgttatagtctcrtgattctattctaggaaagaccttagattttgtggtccaaggatgaaaattcatagaagaaggaattgtggtctggagagagtaagtagcataatcaaga

SEQ ID NO: 268146 - DNA, 201 bp, Homo sapiens
atacagttatcagagaaagtctcgctggtgaggtaatgtttcagcagaaacctgaagggaatgagggcatcacccatgtagggcaggagcattagaggcaragggaacatatgcggaaccttgaggagaatttttccttatctgctcagagaaggtgggtcaaatccaggggatgagctagaatgttctaaatcagctctt

SEQ ID NO: 268147 - DNA, 201 bp, Homo sapiens
tccagtacttggtacaaatagatgcttagtaaatggagatgtttttgttagtataagaagagccacaatttttatttaatacttaaaattgagaaataggraaattattaaaactttaacatacaacaacagaagagatgtgaaacatatttatgtacattctttcatttagagtttaaaggttttaattacatctgttgt

SEQ ID NO: 268148 - DNA, 201 bp, Homo sapiens
tcctccttcacatcccacttcagttttggtcttcacttccatgcacaagccccgctggttaggctagcttgaaaacattgttttcaggaagcacacaaaarcttccgagttgaaagctggttcagcacaagtttgttttatttctgactccctgtgagctttgcttggattcttccctttggcattgtgtgtgcttagatg

SEQ ID NO: 268149 - DNA, 201 bp, Homo sapiens
aaccaatggtatgggaaattgcaagtattgtaatctgtttatgtaagtagtttatattttgaaactactttggttgtatctaattttcccatcctgtgaayttctggattttttagaacaaaccttgttacttagcatttagttttggcagaagtttgtatgttagtcaaatctatttcttaaaaaacctgacatttccat

SEQ ID NO: 268150 - DNA, 201 bp, Homo sapiens
ttatgtctgtgtgcccatcataggtttaaagacaagttgagtacacaaattgatgtaatttggatatatatccctgccaaacctcatgttgaattgcaatcccagtcttggtgatgggggccaggtgggaggtgattgttcatggagacagatctctcatgaagggtttaatacaattcccttggtgctgtcctcacaatt

SEQ ID NO: 268151 - DNA, 201 bp, Homo sapiens
tgactcatcactgatgcacacccagaaaaataacaaatcagcattaatatatgagcctttttgtttctgcttatttgtgaaaaacttaaatatcgaattarcattgaattagctatgtgatttcataagatttttatgagattaataacaatgttcaatatcataataaataagtttccttacagttgatgatttctagaa

SEQ ID NO: 268152 - DNA, 201 bp, Homo sapiens
aagaaacaaaaccaatggtatgggaaattgcaagtattgtaatctgtttatgtaagtagtttatattttgaaactactttggttgtatctaattttcccawcctgtgaacttctggattttttagaacaaaccttgttacttagcatttagttttggcagaagtttgtatgttagtcaaatctatttcttaaaaaacctga

SEQ ID NO: 268153 - DNA, 201 bp, Homo sapiens
ttgagttattgtactgtactgtccagtgaaaatttctggtagacaaaacctcccagtatttggaaaatacccagagctctgctcaagattcttcttttcaygtttttcttcttattgtaccatgtctgaaactttgggatgcatgacctcatctattaaaatttccctgtggttggagcagtgttttcattcagctgcaca

SEQ ID NO: 268154 - DNA, 201 bp, Homo sapiens
tagactataaggtccttatgaacagccgggcgtggtggctcacgcctgtaatcccagcactttggaagaccgaggcgggcggatcacgaggttaggagttygagaccagcctgagcaacatggtgaaaccccgtctctactaaaaatagaaaaattagtcaggcatggtggcagctgcctgtaatcccagctactcaggag

SEQ ID NO: 268155 - DNA, 201 bp, Homo sapiens
atccatattaaactaacaaaagaggcatttcaattgaatttttattttatattatttaataatatttagcatattatgtcatttaaaattttctcaatatrtaaatagttatttgtggaaccatgtacttgtttacataaaattattcttaaagtaaagcaagcgggcattgataagaaatcaagatgctgaataatcctt

SEQ ID NO: 268156 - DNA, 201 bp, Homo sapiens
actctcagagattttgtttaatatatgtagtgggaacaaaagtgcatctttttgcctgtatctaaatgtgtaattctctttggtgtcaaaccaaaaaaaasatatatattccatattaaaaagtgcttaaaatagcattcactgaagactccctcagatgtatgtgtatgaatacatgtatctatgaatttatgtttgaat

SEQ ID NO: 268157 - DNA, 201 bp, Homo sapiens
tgtcacattccttatgataaagtctaagtttctccctagtaataaaatttatataagccctttaaaaaataggatgacatttatgttagtttcttattttygcaggctgagcagttcttttactgaaccagtagcagtggtacaaaagttgttttgaaatttcaaatgctctacatctatgtttaggaagtggacacctat

SEQ ID NO: 268158 - DNA, 201 bp, Homo sapiens
tgcttttattttccttttcttgtcttagaacctctaaggcagaactgtttcaaacaagcagaccgatttttggcttaggtgatagtactttgtaaataaamaaatgaaaagatgttttcctttgacagttcccacttccgtaatccttgcaacaatccactcaaacagtgcttttattatatctaagacatttatctgttc

SEQ ID NO: 268159 - DNA, 201 bp, Homo sapiens; identical to SEQ ID NO: 52880

SEQ ID NO: 268160 - DNA, 201 bp, Homo sapiens
aggccaataatgtatcgcttttgtgtatgtgtgtatacatatatatatatattatattaaaagacttgtgttcagtaataccagagatttagagtgagatytggatttgaacccagctttgagtgttactaattgtgcctcaatttcctaatttgtaaaataggataataacaggttgttgtggagactaaatgaattgat

SEQ ID NO: 268161 - DNA, 201 bp, Homo sapiens
accagtgatttggattaaaaaaaaaatgttgctagtgaaataaaagcaaaaccttggcactgttaagtatagaattgaaaccaagttattagtatctgacrgcatttagattgggagaagtagaacagagtctattctcatggactcttcagtactgcgtgatttactcagagctcctggatgttgattctgaagtccaga

SEQ ID NO: 268162 - DNA, 201 bp, Homo sapiens
gattcatgcatatacatttttttctgtgtttttttctttgtttctctgtgtttgtcttgtatgtgtgtgtctatgtgtgtgtgtgtgtatgtatatatccatatatatatatatatatttttttttcttctgagctctgagccttctatctgcctgctagaaatttccatgttgatgtacatcaccttaaactaattatat

SEQ ID NO: 268163 - DNA, 201 bp, Homo sapiens
cacaatggccaacctctaaatgtaaacgtgattgtggcattcagggtaaacccagtgcacatctcatagacttagcttcactgttataaatcaacagcatwtggaattagcagcattttgaggctcagagggcatagggatatcctagtgcaggatttagctaagaaggccttgtttctaaaacagagtgaatggagcaaa

SEQ ID NO: 268164 - DNA, 201 bp, Homo sapiens
attcatgcatatacatttttttctgtgtttttttctttgtttctctgtgtttgtcttgtatgtgtgtgtctatgtgtgtgtgtgtgtatgtatatatccatatatatatatatatatttttttttcttctgagctctgagccttctatctgcctgctagaaatttccatgttgatgtacatcaccttaaactaattatatc

SEQ ID NO: 268165 - DNA, 201 bp, Homo sapiens
cttgagtccacttctttatttaaaaaacttcacatttttgctttaaatttttatctgtaagaaatatgtttgcatttggaggagacatgtctgtgaaaacyacacgtgtgtgtgtgtatatatatattatgtatatattttatatatacccatatattttacacacacacacacacatgggagaatttgttttcttaactt

SEQ ID NO: 268166 - DNA, 201 bp, Homo sapiens
tgctttctaactgatatgctaatcccaccaagtccatctttagtttttgtaatgacttacccagttcacctacaggtgggtgccaggtggtgggaccagamtggtctagtcaagtaatctggcttcagatgagccctgcctcctttaccctctgaatcctttgtgctgtctttctttcctctgaccacattcctactttca

SEQ ID NO: 268167 - DNA, 201 bp, Homo sapiens
caggagttagcttgctggctgtcatagaccctaaatactgggttctgtccttccctaattatagcattactagcctctgccattttgcatttcaccatctrttcatcccacctccagtggaaatatgtattctttctgcctggtcttcctaatatcaaacaaactccagttctacagtcctctgtcataccaactagaaaa

SEQ ID NO: 268168 - DNA, 201 bp, Homo sapiens
ttacgtttttagaaagatcactctgatagaaacatagagaatggactggggataatccagaaggctggagtagtccctgtgagaagtgctaatgggccatwttaagaaagtagcaatggaaatgcaggtaagactgtggctcctacataaggttttagatcagtaggatgtgtaaagcttcatgggaagggagtttgagtg

SEQ ID NO: 268169 - DNA, 201 bp, Homo sapiens
gtgtgactttttgttatttttatagctgtttttcactaaatgtaaatacttcttaaagactcaccatgattacaattgatttctgtgtgagttataaaaaygcctcttcaatgggcatgaaaaaaggtagaaatagatgcacaaagtgatgcatccagaaagacactgactaaagactgagcccaactaaggagagtaaaa

SEQ ID NO: 268170 - DNA, 201 bp, Homo sapiens
aaaaggaaagtaaaacaaaagctaggtttactcttttaacaggggtcatttttctgtgttttcacatatctttggagtaattgagttcagttgtgtactcyttaaagttagaaagatcgaccatagtggtgaacaatattcagttttatggtattcggtagagaacagcccagcacatgcttttgcagtttggagatatta

SEQ ID NO: 268171 - DNA, 201 bp, Homo sapiens
cacatgttaaaatcgcctcgtgtggatcttagagccgattgaattaagacagcaataaaaataaataaatcaactaatatatcatacatcatgacaagtgmtatagagaaaaataatgttggggaaggaagtagggaatattatttaggcagggtaagaaatggtttacaattctgaaaggatgatcaaagaaaaactcat

SEQ ID NO: 268172 - DNA, 201 bp, Homo sapiens
gtcaagttaattcttcatggaatataataagacagtagagagatcttgttatagtggtacactggggagtaaaagtatccaaataacaacaacaaaaaaarcatctgtagttatctctctaaattgactactggccctcagaagagaaacctgtacatcttttttatataaaaggaaagtaaaacaaaagctaggtttact

SEQ ID NO: 268173 - DNA, 201 bp, Homo sapiens
aaacattgcttcacaatgttctggtcacttcagattggatgtaaacatgaaagtggcttctgattatatcctcattcagctagaattgggctaaactattyagttttatttgttatttatttgaaaacattcatttgtcttgataactctccctatccaggcctctgatttagcaataatgaaaaaattgaaaaattaacc

SEQ ID NO: 268174 - DNA, 201 bp, Homo sapiens
attgtgttatttaatttgggaacctttaggagttttgaagtaggttacttacatattatctgtctcagaaaaccaggataccagatgatgtggaaaatggygcgtttttagggagtaagttaagggggctcttacaattttaaaaacttgagatgataagtgataagtgttcctggggggggtggttatggtagaaagaat

SEQ ID NO: 268175 - DNA, 201 bp, Homo sapiens
tttggacacagttgtttttgaacactgctgctgatcccaaatgaatattgaagaggaaaacacaacaggacattagaaacgaccggcagttccgtatgtgrgaaaacaacctggcctttcatgcctcatgctgttctctttggaagattttctttcctaaaacttatttttatttatttatttatttatttatttatttat

SEQ ID NO: 268176 - DNA, 201 bp, Homo sapiens
aattctttaaggatgcatattagtcaacctgttcttaaaactacttattgttaaaaatacttcgtaatatacacaacatattcttttaaaatgttctacarttcagattttaaagtgattcgtagtcatctcaccccacctccagttaatgagattttactgtttatttgttagctacatctaatagaaaggaaaaaaaaa

SEQ ID NO: 268177 - DNA, 201 bp, Homo sapiens
gtagaatgtatattatacacatattatggaaactttgcacttagcatgccttaagtggataaaaaagcaaaaattggcttcttagccaatgtgaaatttaggtaaatcttaaacttttgttttttactgcagatatatttttaattactatcagatataccctctgtctaccaaaatgatagagatgaaatgcaataaact

SEQ ID NO: 268178 - DNA, 201 bp, Homo sapiens; identical to SEQ ID NO: 52879

SEQ ID NO: 268179 - DNA, 201 bp, Homo sapiens
tgcagtggtgcaatctcagctcactgcaacctaaacctcccaggttcaagcgattcttctgtctcagcctccaaagtagctgggattacaagcacccgtgaccgtgcctggctaatttttgtatttttagtagagacagggtttcaccatgttggccaggctggtctcaaactcctgacctcaggtgacccgcctgccttg

SEQ ID NO: 268180 - DNA, 201 bp, Homo sapiens
ggcaggtagataaatcacagactttattcttttttccatttacttcatactgactcatcactgatgcacacccagaaaaataacaaatcagcattaatatrtgagcctttttgtttctgcttatttgtgaaaaacttaaatatcgaattagcattgaattagctatgtgatttcataagatttttatgagattaataacaa

SEQ ID NO: 268181 - DNA, 201 bp, Homo sapiens
agggcgttagctgtgatccacgaatactttcttccactcagtacattaaaattttggaggtaaacatgtagcaaaaattgtatggctacttttgtcaaaattaaaatagataatattttaatcttcactttggggatacattatttgcattccccattaagcctaactttctgaaataatgcttcaaaagacacttggtaa

SEQ ID NO: 268182 - DNA, 201 bp, Homo sapiens
aattttctgaatagcattttgaagaaatgtgtactatctgaaaaatttgcaaaaatacattctaaaagttaagactactggatgctgcgtattgtacattmtctaaagacgcatatataattgatgtttctgacattgctagtatctgtattgtatatggaaaatgcttggaattgaatatggtggaattgcagttttaat

SEQ ID NO: 268183 - DNA, 201 bp, Homo sapiens
tcctctggcttttcttcttttgtcatgttttagctttgctgccaatctccactgatgggtatggcttttttctcattgttggcagggtagtttgcttgatgtagtagtctgcttcataccaacctcctctatcttcaaggacctccttggaaagaaacagctgtgcttcttctggagcaaagtggttcactactctggcct

SEQ ID NO: 268184 - DNA, 201 bp, Homo sapiens
aatatttcaggaagtatgaattggaagagagccaattaaatttttgagtttgagggttaatcacagatctgaggtgaagacatttgcctttcacatattamttccttaatacatttgtatttaattatgatttaacatacatgttggggaactgtaaatggtgcatataaacagatttaaaagaatctgagataaaactat

SEQ ID NO: 268185 - DNA, 201 bp, Homo sapiens
taaagattagacatttctttggttgcatcttggcagaaaatgtaacccagactggttgcaacaaaaggtgaatttatttgtctctcctaactacagttcargtggagcttgatttagaagttgacgtaattccactgagacatgatgtttctctgcctgcttagtttagttctagggtattccaggagcttcttaggctcc

SEQ ID NO: 268186 - DNA, 201 bp, Homo sapiens
caaatatagatatgcatatttgtgtgtttgcacccattatttttagtcgttctgggatatcttctaaagttccctattattttctcctgttgaacctgacygtcaaacgtattgtttgttacatctcttcgtaaatatttttcaatttcagctgggcttttactagctaaaagcactaacatcataaattatataataata

SEQ ID NO: 268187 - DNA, 201 bp, Homo sapiens
cattgaagagctgaatgctaaatctgttttctcttgaaagtcacagcacacattattattgttatttttttttagagtcagggtcttgctctgtcgctcargctggagtgcggtggtgtcatcctacctcactgcagccttgaactcctgggttcaagcaattctcccaccttagtctcttagtctgtgaagtagctgata

SEQ ID NO: 268188 - DNA, 201 bp, Homo sapiens
taaacagatttaaaagaatctgagataaaactatagactaagaaatatgccttgccttcagagaatttatagaaagtctatctgtcagtgctagggtgctrggggctgggaggagctgagagcagctctaaagccaggaagctggacctaaaacagatggctattgagcgaagtatttgaagctagatgatgtgtaagtaa

SEQ ID NO: 268189 - DNA, 201 bp, Homo sapiens
agttattaaaaggactcaggcagtctgactttacaaatcgtgttcttaaacatgatgctatactgccagtgtgacagacatgcatgtatatatacatacasacacatgtataaataagcatttagaactatttagaagtggatcccaaaacttctatacatttatataattgctttaaataaaggttattttcttaaataa

SEQ ID NO: 268190 - DNA, 201 bp, Homo sapiens
ataatggaatcacatgtacaattatgtatctgtttatgtggaaacagataaacatatctgtttcatactgtaattctaaccatatgtctttcttaattacbctttgttcctcaaagtctatggtttctttttgagttggtcagccctctgttctttactcatatttacaaacttatcattatgtctacattcataagttat

SEQ ID NO: 268191 - DNA, 201 bp, Homo sapiens
ttcaaaggtcgctttctctgaagtcttgctgttttcccaggtggagtaattttctctctcccctgaactctcatagcgttctaactctgctttatcacatrtaactgtgctatagttatttcctaccatgcttatctcttctgccacattgtgactctcttgaggacagggaccaaaaattaggtatttctttctgtcaga

SEQ ID NO: 268192 - DNA, 201 bp, Homo sapiens
cacccagccacagcacacattaaaagaaaggccatatcaagctttgctattgactataactacaaaactgtaaaatgagcttatatttaaatctagaaactttttttttcttaacattcttggatataaaactattgagtgctgtactcctgacctcaccctcatggtatttaaggccttccatgcctatgtctctaatct

SEQ ID NO: 268193 - DNA, 201 bp, Homo sapiens
tgctagggtgctaggggctgggaggagctgagagcagctctaaagccaggaagctggacctaaaacagatggctattgagcgaagtatttgaagctagatratgtgtaagtaataatattctctgagcacctctattattattttttaggttctctgcatcagaatgaggaaagagatttaataagttgtgaattttaaat

SEQ ID NO: 268194 - DNA, 201 bp, Homo sapiens
gaattcctaagcttccatcattattattgacagtatttgtggagttttacttttttcttgggaccatggagagtgaagcacattttgataaatggaggtcygaactatacctttatactggatagtataaaagcctttttagctattttaatatttcaggggaaaagaccattttgtcttgggaaaattgaatgaacgaat

SEQ ID NO: 268195 - DNA, 201 bp, Homo sapiens
ctagaaactttttttttcttaacattcttggatataaaactattgagtgctgtactcctgacctcaccctcatggtatttaaggccttccatgcctatgtytctaatctcatctcttcccttttgagcctttgtagccatagagattatatttatttagttttccaaacatgccatcccaatctttttcattgtatttgtt

SEQ ID NO: 268196 - DNA, 201 bp, Homo sapiens
acaaatgggatctaattaaactaaagagcttctgcacagctaaagaaactaccatcaaagtgaacaggcaacccacagaatgggagaaaatttttgcaatstacccatctgacaaagggctaatatccagaatctacaaagaacttaaacagatttacaagaaaaaatcaaccccatcaaaaagtgggtgaaggatatgaa

SEQ ID NO: 268197 - DNA, 201 bp, Homo sapiens
atctcttttggttgctttgacttgtaagtttgtaactgttttattatcatccatatacaacatgctatggcagcagttcagcagcaattgttgagtgctcactctgtagagaacaatactccagcaattatggaacagtaagtaatagagctattgagaaaaagagaactatgagagtcacagaggaaatggtgtcttccg

SEQ ID NO: 268198 - DNA, 201 bp, Homo sapiens
tctcccctacctcacctcttttttttttcttttctttttttttttttttttggcgtttgctacagaatggtgaatttatgtatttctcttccactttgacrtggacattgcctcattcttcagtagtgtgcatattcaccttaatttattcaaaagctattttacctttttcaataacaccacatcaattaccttaactta

SEQ ID NO: 268199 - DNA, 201 bp, Homo sapiens
actaaagagcttctgcacagctaaagaaactaccatcaaagtgaacaggcaacccacagaatgggagaaaatttttgcaatctacccatctgacaaagggmtaatatccagaatctacaaagaacttaaacagatttacaagaaaaaatcaaccccatcaaaaagtgggtgaaggatatgaacagacgcttctcaaaagaa

SEQ ID NO: 268200 - DNA, 201 bp, Homo sapiens
attagctaagcataatcaaaaatgtaattatgctgggtaaattgtaattcataaggctggaaagcttaccagtagtggccacagtgattgaaatgagactcccccccccaaattttcagttaatcacatgattgtattaactaggatgacccatttttagagcatctgtttctgacaacttctaatttgtattactctcta

SEQ ID NO: 268201 - DNA, 201 bp, Homo sapiens
aataagttgtgaattttaaattcatgagaatgccaatagagaccaaaaaaaaaaaaaaaaaaacaagatgagtttaatttcttcaacataggcatcatgattttttttttactacatcctttagataggtgaaagtagtgttggggataactattagtttgcaggtggttgtaataaaggttataataaatgaatattgaa

SEQ ID NO: 268202 - DNA, 201 bp, Homo sapiens
ttgcccacaccagtatgtggacaaattgtaccacagacttttactaaggctcattggtaaatatgcaacaaattcagaacttaggatcatatcatcaacakttttacaacttatgctttgttgttattcaaaccaattgaaagcaactaaaaatctattcctcctcaacagaacttttagcacactgaaaaaaaaaatact

SEQ ID NO: 268203 - DNA, 201 bp, Homo sapiens
gatggttttaaaaaatgttcctcctgccatttttgtagcaaagatgagaggtaaaatattctatgaaacttctatgttgctttctcccctacctcacctcttttttttttcttttctttttttttttttttttggcgtttgctacagaatggtgaatttatgtatttctcttccactttgacatggacattgcctcattct

SEQ ID NO: 268204 - DNA, 201 bp, Homo sapiens
gttctacagttcagattttaaagtgattcgtagtcatctcaccccacctccagttaatgagattttactgtttatttgttagctacatctaatagaaaggaaaaaaaaaaacaacctttttgataggtgataattacttaaaaatttggatccaaattaagagaacagagctcatcaaaatatggatgtattaacactgga

SEQ ID NO: 268205 - DNA, 201 bp, Homo sapiens
tgctggaatctaagatgggcttcctcatcaagtttgctttttttcttgagattttgaaagacactctcagtcttcagctgtatattgagcaccttcactgtggcatgctttagggactgaggtcatagtccttttcattgtggacttttcatcctggacttttacagtctggggtagatggatgtgaaacatatacttgtc

SEQ ID NO: 268206 - DNA, 201 bp, Homo sapiens
ctgaatgaaaagggtctagaaaggacctttcttggtcctggatgactcctatgggcaagtcttgtgtttcagctgccctacagtcagaccctcccctgccycccaacccccaccccctttccagtgtcagttgtgagtactgaagagctagaaccttgctagaaccttgctttcctaatatcctttgtatttagatcaatt

SEQ ID NO: 268207 - DNA, 201 bp, Homo sapiens
cagaaaagatatgagttgaggaccttcaagggtgcatgatcactgttttcatcccaaccccaagttagatggaagttaaatatttctttgctttaaaagtwacaaactattattgtttgcatatggagtattactagtctaataatttttgacagaatgataactgggatgctaggatatagagagaaatggaaaaaaata

SEQ ID NO: 268208 - DNA, 201 bp, Homo sapiens
ttttatggaaattaaactgttttatgagaagatttctgacctattaccctctctttcctgaggagcctgttgcaggtaccttacatttatggccacgtctrcgggagagaagtgatgacattcattcataaactgatcaaactgtcagtgttaactgtggaaaggatagagtttctaacctaatttgtaatgctgtaatca

SEQ ID NO: 268209 - DNA, 201 bp, Homo sapiens
tggtcttatcacacagggaggagccataaatcatgatcactggggatcattaaggatacatcagatgcctctgaaaatgtcatcttctgctaagcactgtrgaatgctgtcagtataaagttaataaataaatttcaattaaaatattgagaactaattggaaaaaaattagttgcctaaatgttaaaagtttccttacaa

SEQ ID NO: 268210 - DNA, 201 bp, Homo sapiens
tgactacacaaaataatatacataagtataaccaacattatttgagtaaaagccagacaacaaagaatatacactttattgtttaatttgtaaaaaagagrtaaaataactaataaaagttaaaaggtatgcagtacctatatagatgtattatgatttaaatattatattatctagatatgtatctgtctcaggggttcc

SEQ ID NO: 268211 - DNA, 201 bp, Homo sapiens
tcttcctatggaatcacacaggacatgcttaatttctccaggatggaattgggacagcacatgtgaaatgctgtctatcaagaaagcttattagagactcrgttcctaaggtttttagtgggaactggtcacatggaccccttcttgctatcatctgccaagattcccttctcccagaaggaaactagacttttagcataa

SEQ ID NO: 268212 - DNA, 201 bp, Homo sapiens
gttagctgaggccagaaatttgtcttctgaattttttcttgataatctaaaatggttcaaacagacattaattttagccagactttcaccatttcagtttrtactctcctgtaatctggtctacaaattaaatattgagacaacatacttgtcactttttggaggcatttctaaaccatttgtttggatacagagtaaaaa

SEQ ID NO: 268213 - DNA, 201 bp, Homo sapiens
tgggaactggtcacatggaccccttcttgctatcatctgccaagattcccttctcccagaaggaaactagacttttagcataaagcacattatttgcacartttaggcacaatgaaccactcttctcagggaatgatgggaaacctcccaaatccgagttcccggacatcagtccaaggtcaactttgcaagccgcccttt

SEQ ID NO: 268214 - DNA, 201 bp, Homo sapiens
agattcccttctcccagaaggaaactagacttttagcataaagcacattatttgcacaatttaggcacaatgaaccactcttctcagggaatgatgggaamcctcccaaatccgagttcccggacatcagtccaaggtcaactttgcaagccgccctttccaagaatttcagtcttagtcctgctacgttaactcttttct

SEQ ID NO: 268215 - DNA, 201 bp, Homo sapiens
ttgatccctaaacatgcactatttataaatagtgggcacttatttaattggtaatatatgctgtctggttgatggtggtataagagttctattttttacayatatttgaagatgcattaaagtgacttagtgacaaatataaatacccaagaaactagtgatagtttcttctaaattgggaagtgtagagggcaaattgaa

SEQ ID NO: 268216 - DNA, 201 bp, Homo sapiens
gaagctgggtatcatccccagcagacatggttctgtcacttacacctgctctgtccgtgtggctcctcttattggtcaccttttctctccattgcaaagayactcatgcttcctagggtgaaactctttttcttgttgaatagctgactttatattttgttacacttgattaatctgattctagtatttgctatctccagc

SEQ ID NO: 268217 - DNA, 201 bp, Homo sapiens
tgtatatatttctaacgtcgccctggaaaggaaaagatctctaacatatttactacatgttttggtaaattcaaccataaaataatttgaaagccttaagrtatctctgttcataattatgaggttagaaattccctacagccggaatatatggaaagtgtcaagtcagaaagggaatctcccttagtttcccaaaataca

SEQ ID NO: 268218 - DNA, 201 bp, Homo sapiens
tttttgtttgtttgtttttttggaaaaacatccagcaaaggatacggaaggcaacgttatcctgtgcttcttagttatcactatgctaactgaaattcagyggactacccttgtcaagaggttatgccgtatattgagtttcagccttgggtctcactctagttcagagagagctcatgttacagaaacaatcctctcacc

SEQ ID NO: 268219 - DNA, 201 bp, Homo sapiens
aatttgctcaataaaaataaaattgtgccttagttttttttctcgttgtacaaagaattatgcttctcttggcttctgaacactggggattccttatatgmtctttggcagataaaaaaaatggtaaagatttatggccaaggaaagcatttctgaaaaaggtgctccacattgtctttgtgtatgtgcagaaattataaa

SEQ ID NO: 268220 - DNA, 201 bp, Homo sapiens
atgtatattatattgatattttgtcagtagaaagattgttatactccagagattccactggctttggatctgaaaagattggggcttaaaccaagtgaccrtttttacttgaataaaaagcctctaaaagattgatcttcaggcacagaggcctgtgtaagaagaacatactcatgaaccatccatgcaaagagtaaaaag

SEQ ID NO: 268221 - DNA, 201 bp, Homo sapiens
ataaacatactcttcaaggaaccaaacatgctatatgcaaatcatttttagcataatgttatgttgatacaggaaatactattccctctgacattactagkagcagtctcttgctttataattctctttttcatctaagtgtaatttaagatctttgtagtaaggagctcatttataggacagtcaaatttaatgaatggg

SEQ ID NO: 268222 - DNA, 201 bp, Homo sapiens
atggttttaaaaaatgttcctcctgccatttttgtagcaaagatgagaggtaaaatattctatgaaacttctatgttgctttctcccctacctcacctcttttttttttcttttctttttttttttttttttggcgtttgctacagaatggtgaatttatgtatttctcttccactttgacatggacattgcctcattctt

SEQ ID NO: 268223 - DNA, 201 bp, Homo sapiens
tggttttaaaaaatgttcctcctgccatttttgtagcaaagatgagaggtaaaatattctatgaaacttctatgttgctttctcccctacctcacctcttttttttttcttttctttttttttttttttttggcgtttgctacagaatggtgaatttatgtatttctcttccactttgacatggacattgcctcattcttc

SEQ ID NO: 268224 - DNA, 201 bp, Homo sapiens
atttatattgtttttttggttagctgaggccagaaatttgtcttctgaattttttcttgataatctaaaatggttcaaacagacattaattttagccagaytttcaccatttcagtttgtactctcctgtaatctggtctacaaattaaatattgagacaacatacttgtcactttttggaggcatttctaaaccatttgt

SEQ ID NO: 268225 - DNA, 201 bp, Homo sapiens
ctcctgcctcggcctcccaaagttctgggattacaggcatgagccactccatctcccaggttttaatctcttctgttctattcttcctaactagatgttcyacaaaattgcttgtgccaatagctcattatatttcctcttgtcagtcttttgcaaatacaccttatttggtctgtaacgccctctttttttgcagtgttt

SEQ ID NO: 268226 - DNA, 201 bp, Homo sapiens
aaaaatgttcctcctgccatttttgtagcaaagatgagaggtaaaatattctatgaaacttctatgttgctttctcccctacctcacctcttttttttttcttttctttttttttttttttttggcgtttgctacagaatggtgaatttatgtatttctcttccactttgacatggacattgcctcattcttcagtagtgt

SEQ ID NO: 268227 - DNA, 201 bp, Homo sapiens
atagaaaaaggtaaacaaacatagataagtaatatttgcagcattgtttataacataagagcttgagtcagaatcctttgagttcaaatcctcattctctstcatttcctgtaagcttggtcaagtgagtcagtaactgtagctttgtgtctttatctgtaaaatagggatgatacctatatcataagtgttatgttatga

SEQ ID NO: 268228 - DNA, 201 bp, Homo sapiens
tgctaccacactgacctttttaaggtgcaaatcacattatccctcatgtagaaccctttaaaggcattacaacaccttcaaaaataaaataaaataaaatraaaaaaggcagactcctttttgtggtgtagaagtccatgcaagataaggtcccagcttcctatctcccaggtgtcttttttttttttttggatggagttt

SEQ ID NO: 268229 - DNA, 201 bp, Homo sapiens
tgattctctagaagcacttctggtcctaaaatcatctctgtccctctggcctcaagaaagtaaagcagaaccagtaggagatagatatgattttattgaaatatatatatatatatatatatatatatatatatatgtctatataattataagattacatatagtaggattttatttacaaaattgaagagatttactgca

SEQ ID NO: 268230 - DNA, 201 bp, Homo sapiens
aggaatttccttttatttatttatattctatgtgtcttcatatataggagttattcagctctgagatataatcaattagaatattgaaagagatttcatargaaacaaagatcaactaatgttcaaaaaattacaaacatgaaaagagaaaggtgagattttgacactggaaaatattaggctcccctaatgtttcagtgt

SEQ ID NO: 268231 - DNA, 201 bp, Homo sapiens
ccgcctggaatggcattacctccatcttcccattctggtctctactcatattttgccttctcagaggctgacctaattaccccgtctctacccttctgttygttaactcctttgcctccttgccttagcactttggtcactgttccatatgcttgtttagtgtctttcttccatactagcctgttttccatgaagacatca

SEQ ID NO: 268232 - DNA, 201 bp, Homo sapiens
gatcaagaccatcctggctaacacggtgaaaccccgtctctactaaaaatacaaaaaaatagcagggcgtggtggcgggcgcctgtagtcccagctactcsggaggctgaggcagcagaatggcgcgaacccgggaggcggagcttgcggtgagccgagatcgtgccactgcactccagcctgggcgacagagcaagactc

SEQ ID NO: 268233 - DNA, 201 bp, Homo sapiens
gattctctagaagcacttctggtcctaaaatcatctctgtccctctggcctcaagaaagtaaagcagaaccagtaggagatagatatgattttattgaaatatatatatatatatatatatatatatatatatatgtctatataattataagattacatatagtaggattttatttacaaaattgaagagatttactgcaa

SEQ ID NO: 268234 - DNA, 201 bp, Homo sapiens
attctctagaagcacttctggtcctaaaatcatctctgtccctctggcctcaagaaagtaaagcagaaccagtaggagatagatatgattttattgaaatatatatatatatatatatatatatatatatatatgtctatataattataagattacatatagtaggattttatttacaaaattgaagagatttactgcaag

SEQ ID NO: 268235 - DNA, 201 bp, Homo sapiens
ttctctagaagcacttctggtcctaaaatcatctctgtccctctggcctcaagaaagtaaagcagaaccagtaggagatagatatgattttattgaaatatatatatatatatatatatatatatatatatatgtctatataattataagattacatatagtaggattttatttacaaaattgaagagatttactgcaagg

SEQ ID NO: 268236 - DNA, 201 bp, Homo sapiens
tattggataaaatgtggtattatggtcagagatttggaagccttgtagaagaactcatttgagagcatagatgttaagtttaattgtaaactttcgattgrggtgctaggaacatatccagttttaaaatctttaggaatgtgggtaagccttaaactaatcatagggcattaagtaaagactcaatacaggatgaattga

SEQ ID NO: 268237 - DNA, 201 bp, Homo sapiens
ttatttaaaaatgaaccagataagattgatcattatctatatatcaatcaattagaaggtggcagtgacttaaaaaacttgctcaacttttgccaaaagtaaaaaaaaacataataaagcaggaagaattctggttccaaagtgaatctaccagctaactcatgcaaacagatgtcagattattttcatttcacgtagaat

SEQ ID NO: 268238 - DNA, 201 bp, Homo sapiens
tatttactacataatatgcatatgcatgatttaagatatggagaaaggtatttaaagatacagtgtatttgggatttagaaaattattattattattattwttttttttttttttgagacagaatcttgctctatcacccaggctggagtgcagtggcgtgatctcggctcactgcaaactccacctcctgggttcacacc

SEQ ID NO: 268239 - DNA, 201 bp, Homo sapiens
gtcttgaactcctgaccttgtgatccatccgtctcagcctcccaaagtgctgggattacaggcatgagccaccactcccggccttatttttcctttttttmaagaaagtcctgccataagttttgtgatttttatgttggaaaggttgagttgaaagatgatggcattttgaatttgttatccagaatctgctatcatttt

SEQ ID NO: 268240 - DNA, 201 bp, Homo sapiens
agaaacagaaattactttgctatgactttagcattgcttcctgatcattttgaataacgataatgtattcagcttatggaggccaatctctattgacaaaraagtttttatagagatgagatgcagagcagatatttttgctcagtgttttacaaaattgaagtgtaaaaaatttgaaatacaagtcgaagtagtatttat

SEQ ID NO: 268241 - DNA, 201 bp, Homo sapiens
ctttcttcttattccccaccccccctccccaaaaatacctaaaggccaaatggcaattattttctagtacagaagagaattcattgattttgttttactgttttttttttttcctccggagttatttaggtcaaagtttttgaaagatctttatgtaatgcctactatcagtaagtatatgcataacaagagaatggtctc

SEQ ID NO: 268242 - DNA, 201 bp, Homo sapiens
aactggtcttttgtgccgaaaaggttgaggaccactgctttcgaggataccagtatttacttacattcttttcctgattgacaatggaaaaaaattgtggmtcttttgcaacaagaataatttatcacagatattgcttgctaagatgctttatagatttatgaaaatagtaagaacctgtttttaaagattggtttctgt

SEQ ID NO: 268243 - DNA, 201 bp, Homo sapiens
tgaggagagagcttgaaaatagaaacaatgagaattgctagttaattaaaagaggaaagtgaaggaaggggaaaaatcaaactgattcctagtttgatcaytgagtccttagttttaataattggttatatttgttgccacttaatcagatgaaaaaaatagtggtaggagaagaggcttgaaaaaaggaaatgaaaagat

SEQ ID NO: 268244 - DNA, 201 bp, Homo sapiens
tgtgacagtgaaatttttgaaactattaagtttcttcttccctcctgtaagagaaaaattacctcccattttcccagcgccttggggtaggggaaggacayctgtgcttgattgttggtctgagatctaactgttacttcttttggctgaagttattttttattttagtttctacagtacaccccagagggaagctttaaa

SEQ ID NO: 268245 - DNA, 201 bp, Homo sapiens
aatgaagtaatttatgggaactagcactgtaaattgtaaagcactgtgcagctatctggggtgtaatcatcattaagtgccttagtctcagctttttactscttccaaattctctctccagtaagtgcaggctgttcaggatttgtgtgtgagtgtgtgtgtgcgcacgtgtgtgtgtgcatgtgtgtgtgtgttttcact

SEQ ID NO: 268246 - DNA, 201 bp, Homo sapiens
cctatttgtagagttggtgatagaacaggcaaatgtactagcacttgaaatatgtttatctgttaattaaatatcattctctacagtatgcattatcattaaaaaaaaaagttcccctaagagtgtattttctcttctgttaatgagtatgacggtataatgcttttcaaagtaacaccccttaaaacatttgtttttttt

SEQ ID NO: 268247 - DNA, 201 bp, Homo sapiens
tatcattaaaaaaaaaagttcccctaagagtgtattttctcttctgttaatgagtatgacggtataatgcttttcaaagtaacaccccttaaaacatttgtttttttttttaagtggtaagtttaaatgtgataaatatgagcatgcttctcgttgtaatgtttagtacttcggtcattaaagtactgtttattcttcata

SEQ ID NO: 268248 - DNA, 201 bp, Homo sapiens
attaaattttgaaagaaccttatgagtcagacataattcatcaagtacagtttgccttttagttttatgaaatattaatactgaaagggaccttagaaagyattttgtccagccttctgattttatgagtgaaaacaaccaactaattttagaacattcaaacaagtattagaacctctactcaatggaaccatatttatc

SEQ ID NO: 268249 - DNA, 201 bp, Homo sapiens
aagtttgtgctgttggctgctttgataatgaaagtcatttgcacatctgtcaaactcaaagtagttgcaaaacgaatttcttaactgttctgaagtgcacwttatgtatgctagttactcaggaggagacaaagcatcaaacatactggaatcactaagtatttaattatgagactgtcaataagcttaacattaaccatt

SEQ ID NO: 268250 - DNA, 201 bp, Homo sapiens
accaatgtaaaactaatatcaactttgatcagcttgaccttaactaagcaaatagtggagaaatgaaagtttcttacagaagtttaatgtcttaaaatggrgagaagcattttgctttcatctgctccatcagctacactgggacagcagttgtgtctccattaaattaggtgtgctttgattctccaaaataaagaattt

SEQ ID NO: 268251 - DNA, 201 bp, Homo sapiens
cctaatctactgttttccattaactgggtgcccatcattaatcacaaaaatgatgtgtgatgaaaactacaggggtttgtccagaaattggaatgtgatartatagcagaaagtgcctttttctcccccaatacatggagaaacaaacacaacttttgcaatgcattttcttcttaacattttccattggtttgaaaaaaa

SEQ ID NO: 268252 - DNA, 201 bp, Homo sapiens
gttgtatgtttattgagttttcaatggattttcattagatacaagttgattctattattccggagcataaggatatttctcttcagtcagagagagccatytgctttttcagggtccacagccccaggagggctgcatatatgatatggtaggtaggtggatgggagtgtgtgaaactaatgctagagcacttgttgcaag

SEQ ID NO: 268253 - DNA, 201 bp, Homo sapiens
acaggcttctctactttctcttcagaattttattgctcctgataataatgctcctggacctttttcctacatcaatgttttaaagggttgggagagggaattttttttttttttttttgagggtgtaggacttttggctaacagcatttctcattctcaaagaatgtcattcactgtagtgggtggtttgaaaatatttac

SEQ ID NO: 268254 - DNA, 201 bp, Homo sapiens
ctgcctccctcattcagctttctgatcgtggaatgctccaagatcattcgtatctcaaagtctttgtgcctgtcattccctccgcctggaatggcattacmtccatcttcccattctggtctctactcatattttgccttctcagaggctgacctaattaccccgtctctacccttctgttcgttaactcctttgcctcct

SEQ ID NO: 268255 - DNA, 201 bp, Homo sapiens
gtccaagaagcaaataaagcttctgtttatgtttttgtatttctaactaagaaagtctattccagattcagttactaacaactatatggaaaataagaagktatctggaaatgtgacttatcttttgaatgaaatatgtcaataagcagggcatgtccctagggacattttctcccactcttatattttttaacttgaatt

SEQ ID NO: 268256 - DNA, 201 bp, Homo sapiens
ggtattgcaggtgttgaaaaatttgtagtgtgataacctagcctatagggtggagcctggaactatgacagttgtctttttacttcaaggtgccacacagwtgttgtcatctcctgtttgtttttcataatataaaagcatttgggaagcactgctaaaaatccatgctttccctgtctccctcctcaaacatggacctcc

SEQ ID NO: 268257 - DNA, 201 bp, Homo sapiens
tttctaactaagaaagtctattccagattcagttactaacaactatatggaaaataagaagttatctggaaatgtgacttatcttttgaatgaaatatgtmaataagcagggcatgtccctagggacattttctcccactcttatattttttaacttgaattttttttttttttttttttttttttttggtctgtgatgca

SEQ ID NO: 268258 - DNA, 201 bp, Homo sapiens
cttagatccctagtcaatgctgatcccaccaccattgaaggaaaagaaggtggacagagataaaatgatgaaagagggagctgcaaaaggaggtaggcaaygaattgaaaaatgaggtgactgtggccccaaggctagaagaatttaacctgacagcgtgcagggaattcagggaggaaagtctacctgctttactccatt

SEQ ID NO: 268259 - DNA, 201 bp, Homo sapiens
gtggaagggttcttatgttacagaaggaagtcacatttttttagtttccttttaactttctttaaatgaaaaggaaagaatgttttaagttatatcttcamctgctagaaaggtagtatacttagaatttttatggccctttcctagggatttatgattttcacataaaagaatgaaaattgaacacacactgaattatac

SEQ ID NO: 268260 - DNA, 201 bp, Homo sapiens
agggaggctgttggggatcactgaggccaaagtgagtttgaggatcaatgggaatattcacaggactgggttagggaggataatttggtctgtgaatattcccagtgatgggaatgatatgtgggcaccctgcgaattccaaaagttgagaggtgattgagtgggaaagtggaagagttgtcttcaagttaggaaccagga

SEQ ID NO: 268261 - DNA, 201 bp, Homo sapiens
catgtgtttttgtttttgtttttgtttttttgtctttagttctgtttatgtgatgaatcacatttatttatttgtgtatgttgaaccaaccttgcatcccrgggaagaagccaacttgatcatggtggataagctttttgatatgctgctggattcggtttaacagtattttgttgaggatttttacatagatgttcatta

SEQ ID NO: 268262 - DNA, 201 bp, Homo sapiens
gcaatgaattgaaaaatgaggtgactgtggccccaaggctagaagaatttaacctgacagcgtgcagggaattcagggaggaaagtctacctgctttactycattccagaactatcttttgcatatttaaactttaaacaaatgtacaactctattcagaattttgtaaagaacattatgaagtattttgaagacatgtct

SEQ ID NO: 268263 - DNA, 201 bp, Homo sapiens
acatggtaccttcttcttttttctataatgtttaaaatagtagccttcctttctcaattctttattcgtcttacatccactgattgaggtaatattttcargaatcttcaatatctatgaaaatattagtgccattttatgtcttatggttcttttctccagcaaattttcagctgacctggctgagcgtggaaaaggata

SEQ ID NO: 268264 - DNA, 201 bp, Homo sapiens
cccatcattaagcctacatattctccaattgcccatgaaaacctgcctttcttagttgaaagacttattagaagtacgtaataacctgtcctctggttccyaggtcatgtctacctgacttttttatatcattgccatcaggatagcttacctaaagtcagtgactccatgtagtgaactcatttctccttaaaagttctg

SEQ ID NO: 268265 - DNA, 201 bp, Homo sapiens
tcttagttgaaagacttattagaagtacgtaataacctgtcctctggttcccaggtcatgtctacctgacttttttatatcattgccatcaggatagcttrcctaaagtcagtgactccatgtagtgaactcatttctccttaaaagttctgtatctcttaatccaataagacacatgattgttttttgtttaattccaaa

SEQ ID NO: 268266 - DNA, 201 bp, Homo sapiens
ctcgaaccagctgacctaagtaaaacttctataaaattctctgattcctacacctcacactcaatttctattgcaaattgttatagttttatatctatcatttttacctgtgaaactacagttacattttaagtacttcagtttgaaagcacagtttttggtttgtcattgttaatggcttgagttttaaattttagtgtc

SEQ ID NO: 268267 - DNA, 201 bp, Homo sapiens
cacatggggacttgagagacaaaatcattgttgaatatgaagagcagcatatttagcatcagaattttctcctaccctgaattaaatttttgttcaagggacacacacacacacacacacacaagtattagtacaattatatacaatttcttattgatcttgtgtattcgaattagttttaaaatatataaatcggtgtgt

SEQ ID NO: 268268 - DNA, 201 bp, Homo sapiens
ttaagcaaagactgaaagtatctccttatgataaatttcccaaagtgttattactttacacatatctatttcttgatacataaattattttccaaaaataytgttatcagttcacttgcctgtgagcaattcgtgtagtcacatgcccatttccctgtgtttccctggccacagtcaagccagtgtgaataaatgatcact

SEQ ID NO: 268269 - DNA, 201 bp, Homo sapiens
acatggggacttgagagacaaaatcattgttgaatatgaagagcagcatatttagcatcagaattttctcctaccctgaattaaatttttgttcaagggacacacacacacacacacacacaagtattagtacaattatatacaatttcttattgatcttgtgtattcgaattagttttaaaatatataaatcggtgtgtt

SEQ ID NO: 268270 - DNA, 201 bp, Homo sapiens
atttgtgaagtatctatagcatctgtaacatggcaggccctaaggacgctggcatgaatagtgggccgtcatctactgggagagtcagtatagcgtgtacrtgcgttagaggtgaaatgcataaaggggcatccaacatggctggtggctggccatgtgaacaagacatttgcatttgccacagcataaagaaggatattt

SEQ ID NO: 268271 - DNA, 201 bp, Homo sapiens
taatgctagtgtagaatcaacatatgaagtgaatgtatcatgatattttattttcacaccaatcctgtgaaatatattattttctcactttttagttggtraatttaagactcaggaaacaaaaacaaaacagtaacttgtccaatatcagacagatgggcctcaactccttttctcagacttttaacggccttaatactt

SEQ ID NO: 268272 - DNA, 201 bp, Homo sapiens
gcctgttttggaggagaggagttgccttggggaaaacaaattttgttttctatgacttgcttcaggggagatagagggataggagacagaagggcaggagaaagtcagaataaggctttgcttctgaggctgtttttgaggccttcccagtttcccagtgtgccacagtgccatacttctgtgtcattttctgaagcccaa

SEQ ID NO: 268273 - DNA, 201 bp, Homo sapiens
gtttatgtggattatgtctatcaatatttaccatataagaaattaaaactgagagattagaaaaccaataattaaaaacccattacatgttagcataaaaygtatttttgcaggaaataaaacccctacatttccaaaataaacaacaaacaaaaaaaatttaccgaggctttttttttaacatattttgcaaatcttcag

SEQ ID NO: 268274 - DNA, 201 bp, Homo sapiens
aggttttgcccttcgctgaagaccgttgctgttgctttattccattaagggctgcaaaatggggattttcttattatatatccatatgttattgtgtattstgtcttattctttcttatccatagagtgtctggaattaacttctatagaagaactttgctttacctgccagggctatttggttacctggaaccacagttt

SEQ ID NO: 268275 - DNA, 201 bp, Homo sapiens
gtatcgatgatgtcaccccattccactgctggatcttgaattttgcagggttaacattttgatttatctgttttgaggagcccgattcatgataaaacaarctgaaaagagactgacttatcatgaataattggtgataattccctggttctgtctattaacttcttttgatgactgatttcacgctgggagatcacattg

SEQ ID NO: 268276 - DNA, 201 bp, Homo sapiens
agggagagaaatttgatcctgtctgtatgcttgagttgcatccatttagcttatgaatgttaatgaaagcctgaaagtatatcacaatagtagattgaacratgtgacagtgaaatttttgaaactattaagtttcttcttccctcctgtaagagaaaaattacctcccattttcccagcgccttggggtaggggaaggac

SEQ ID NO: 268277 - DNA, 201 bp, Homo sapiens
ctcaactcacctgtgagtccaggaagaggaagtactataaggaattttgtatcttaggaattttatttcctagcaatatatcttaacctaaaactggagaygcttctttatttgcctgtaaattagcaaaactttaatattgtcttaccaattttatttttgtatccataatactgcttttctctgatatgggcaagtgaa

SEQ ID NO: 268278 - DNA, 201 bp, Homo sapiens
agtccctatggagaccatagtgttgacccagtagagacagttgagaatacaaattgggagactgattttcttgccttctctactatttgtatatttgacaktataaggtgtttgagggcagtacatgtggaaatgttaaggagttaacattaatagtactgtggttaaacagatggcgtaattagcccgcaatggggaaga

SEQ ID NO: 268279 - DNA, 201 bp, Homo sapiens
ctctttattaagtgcttggaaaacacatggaagcctttttattttacatactgtggtaacatcctagtaagattttattcgttttcactctcaagattgattttttttttttagaaaagcagtttagaaagtacccatactcgttgaaatttgtcatcatctagaccttaatatcacatatcctaagttccccactaatta

SEQ ID NO: 268280 - DNA, 201 bp, Homo sapiens
gggggcctgaaattagaagactgacaaatctagccaagcacagtggcccacacctatagccttggctacttgggaggctgaggcaggagcattgcttgagygcaggagttggagtatagcctgggcaacatcgcaagaccctgtctcttaaaaaacaaaagaaaaaaataccaacaaatcttctgaaacttgtctttaaaa

SEQ ID NO: 268281 - DNA, 201 bp, Homo sapiens
aagaatttttttgtcataaaaatgaacatagttgagaagcaacatgtaagacactcaaaatagaatatcatccaattgtttaaaaaaaattataggcacarcattttagttgagtacttctaagtagaccttgactggctgaaaaattatttgatttctcattgagtaataaaataagctttaattttgtactggaatcta

SEQ ID NO: 268282 - DNA, 201 bp, Homo sapiens
aggcacaacattttagttgagtacttctaagtagaccttgactggctgaaaaattatttgatttctcattgagtaataaaataagctttaattttgtactrgaatctaactgcattatcaggcttgtatattttttgtgagactatataaactctgtttattgtataatagatttttttctcatttatagatttttaaact

SEQ ID NO: 268283 - DNA, 201 bp, Homo sapiens
tgtgatgctgccagactgaaatttggtctaagattgtgtgtgtgtatatgcatacatgtttagtaacatatgcatgtcagcctgttaatattcctacaaawtgtgagccccaaattcgtttgtactggtggctcaatcagcagttaaagtgttgccctctccatcatcaactaagatttctctaatcagaatagtctttat

SEQ ID NO: 268284 - DNA, 201 bp, Homo sapiens
cataaatgcccaacaatagagaaataattgcatagtattttataaaaatacttgtgagttatcctaccaacatgaaaaaattaggcaaaatattaagttgaaatagcattatacagaacaacataatcatgattattgtaactgtaaaatatgtatgaaaatttcttagacaaatcaagtagaataaaataagcaattgat

SEQ ID NO: 268285 - DNA, 201 bp, Homo sapiens
agtagcagccatgttaaggaatgaagaactaacgactattcatttatcataaaaaactagtataaagattatattactgcttctacaatcatgaatgttaygtggataatcagtgtcactaatattaaacatttttggaagttttagcaaatgaaataaggcagcaagaggaataaactgtgtaactactagaaaagacaa

SEQ ID NO: 268286 - DNA, 201 bp, Homo sapiens
tgaatgagtggagacatgcaccatgttccagaatatgggagtacttgatattaatatcactgtatggatttaatacaatcctatttggaaaatcattggattttttttttcttgttatttagaacaagaaaatggggggggttgtttttttaaccacatatttgaaaatcattcagaaaaattaaaaaaaaaatcagggaa

SEQ ID NO: 268287 - DNA, 201 bp, Homo sapiens; identical to SEQ ID NO: 52888

SEQ ID NO: 268288 - DNA, 201 bp, Homo sapiens
gacttttagaactgagcaagacttataattttctttctttggcagttgtctgacaataaaggtaagctcctagtccatgttaggccttcattttattatatttttttttttaagaaaaggcatagtctttcgtaaaggttttattgttatcattgtcagttgggtctgtacccataattgtgtttaatggctttattttgg

SEQ ID NO: 268289 - DNA, 201 bp, Homo sapiens
atgctattagtagacaaataaagaaatttgtatttaaattacttacagataccataaaactttatatgtgttgcctcaagtagaatcttatgctcttgttrttgaataatttagtatattggcatttatagttaagacatcctattttaacatgattttaatagtgaatcacttaatatttaattaaatagttaatgttac

SEQ ID NO: 268290 - DNA, 201 bp, Homo sapiens
gatgaagaggggttggttgatggatacaaacatacagttagatagaaggaatacgttctcgtgtttgatagcacagtagggtgactatagttaacaatatrttgtatatttcaaaataggtagaagaattgaaatcttcgtagcacaaataaatgataaatatttgagtaaatatcctaaatactttgatttgatcaatac

SEQ ID NO: 268291 - DNA, 201 bp, Homo sapiens
ctaaataaacaaatacaaaacatctgcagtagaaaaggataatgagaaaagaatgattttttctttgaacttctgttctgtggtcaaagacaatatttctkctttcttaaataaaatagcctggtaaatgctattagtagacaaataaagaaatttgtatttaaattacttacagataccataaaactttatatgtgttgc

SEQ ID NO: 268292 - DNA, 201 bp, Homo sapiens
tattaaaatcagggtaaaataaactatagctgcaaaatcataagacagttaagtgaatatacctggattaaggaaataaaatttaaaataatgaaaatacygaataaaaattaataataaaaatgtaaaaataaaattgaataaactacattgagttagggtgtgtgtgtgtgtgtgtgtgtgtgtgtttgtgaacacaac

SEQ ID NO: 268293 - DNA, 201 bp, Homo sapiens
tcccaatggaattgttttactgaatcacattacactgggagctgcttgctgcatttattgccagaaagcttaaagccagtttatggctctctaataagaartatataaatgtttatggtaaacatgtttgagctttatttctggctctaattgatggctttattcccatttttctttcttctttctgtccagttttacact

SEQ ID NO: 268294 - DNA, 201 bp, Homo sapiens
aaattaataataaaaatgtaaaaataaaattgaataaactacattgagttagggtgtgtgtgtgtgtgtgtgtgtgtgtgtttgtgaacacaacatacctrtatggtaggggtaacattggtttagattcactttgtacttcatacctgtgttcaaaagactcagctgagccctttgtgaggatattttgactttgaaaat

SEQ ID NO: 268295 - DNA, 201 bp, Homo sapiens
atttcattcaatttctcccccaagatgactactgttaattgggtctatatagtttaaggcctttcctatgaaattacgtccatgttgtacgtttgctttayatatgttatggactggaaaatgaaagcagttgtgtggaagggttcttatgttacagaaggaagtcacatttttttagtttccttttaactttctttaaat

SEQ ID NO: 268296 - DNA, 201 bp, Homo sapiens
ctgctacttcagtctaagcaaaaattgatcagtacttgaaccgaagcagaggagataagaattccaatgaggagacaggtgttgaaagagatttgataggkagaatcagtagaacttggtgacacattggaagtgaattctggcttggaacattaaggtatagggacaggttttaacttgaagggctcaaacattggggaa

SEQ ID NO: 268297 - DNA, 201 bp, Homo sapiens
taaagcacttagacttttttttttttttttttggttattggttttggacccacctaaaaattcttgggaaaaaaaaaaaagaagtaccatttaactttgtwttataaaaaagactgaaagggtatttcatttacaaaatttatttcacaaaaaagacttttcgtataaatgcatcacattaaacagaaaggtaggaattcc

SEQ ID NO: 268298 - DNA, 201 bp, Homo sapiens
taatgcttaccagccactcataacattctaaaaactttgtccagcatttgatacgattatcttatttaattattgcaatgaccctgaggagtcctgatgtwgttatattttacatttgcagaaacagaatctcaaagaagttaagtgcctttcctgagatcacacagctattagctggttgagctgggaagtctgagtcca

SEQ ID NO: 268299 - DNA, 201 bp, Homo sapiens
tcatgtgaagacaggaaaacctcttctgtgtcctcatgacagcagaaaaactcccatacacttatcaggcacaccactggtgtgcaagagcggcttgtacrgactctcaaatgctaactgttaaatttttaggaagttgtgatcttgttgttaacacaatcattactaattatattatgtaagtgattaatcaaaaagatt

SEQ ID NO: 268300 - DNA, 201 bp, Homo sapiens
tggctaatgaaaagagttgctataacttaaatttctggactaaactttttcctactgatctacctcctcagtgttaagagtgcaaactccttctctcttasggcaaaatttctgtcactttgttgttcatccactttgtatcatcttatagtcctcttttctcagctaatgggagtatatctcgtgtttttgaaacttttg

SEQ ID NO: 268301 - DNA, 201 bp, Homo sapiens
tttattattatactttaagttctagggtacatgtgcacaacgcgcaggtttgttacatatgtatacatgtgccatgttggtgttctgcacccattaactcrtcatttacattaggtatttctcctaatgccttcactcccccctgcccccaccccacgacaggccccagtgtgtgatgttcctctccctgtgtccaagtgt

SEQ ID NO: 268302 - DNA, 201 bp, Homo sapiens
gaggcaggagaatcgcttgaacccaggaggcagaggttgcagtgaaccaagatcatgccacagcactccagcctggtgacagagcgagactccatcacaaaacacacacacacacacacacacacacacacacacataaacacacacacacataaacacacacacaaacagtatggtaaaatacaataccaacaagcaaca

SEQ ID NO: 268303 - DNA, 201 bp, Homo sapiens
aggcaggagaatcgcttgaacccaggaggcagaggttgcagtgaaccaagatcatgccacagcactccagcctggtgacagagcgagactccatcacaaaacacacacacacacacacacacacacacacacacataaacacacacacacataaacacacacacaaacagtatggtaaaatacaataccaacaagcaacaa

SEQ ID NO: 268304 - DNA, 201 bp, Homo sapiens
ggcaggagaatcgcttgaacccaggaggcagaggttgcagtgaaccaagatcatgccacagcactccagcctggtgacagagcgagactccatcacaaaacacacacacacacacacacacacacacacacacataaacacacacacacataaacacacacacaaacagtatggtaaaatacaataccaacaagcaacaaa

SEQ ID NO: 268305 - DNA, 201 bp, Homo sapiens
aaaataaaaaagaatgtattttatcagtgagtccatttgcctggtccatttcacagccaggccacattctccttattaattgacctgcttttgttgtgagttttttttttttttttttttttaggttgttttgtatctagtgaatgcctttctgatttaaatttttcagtaatttataattgctttcctttaaggcttctc

SEQ ID NO: 268306 - DNA, 201 bp, Homo sapiens
gcaggagaatcgcttgaacccaggaggcagaggttgcagtgaaccaagatcatgccacagcactccagcctggtgacagagcgagactccatcacaaaacacacacacacacacacacacacacacacacacataaacacacacacacataaacacacacacaaacagtatggtaaaatacaataccaacaagcaacaaat

SEQ ID NO: 268307 - DNA, 201 bp, Homo sapiens
caggagaatcgcttgaacccaggaggcagaggttgcagtgaaccaagatcatgccacagcactccagcctggtgacagagcgagactccatcacaaaacacacacacacacacacacacacacacacacacataaacacacacacacataaacacacacacaaacagtatggtaaaatacaataccaacaagcaacaaatt

SEQ ID NO: 268308 - DNA, 201 bp, Homo sapiens
ggagaatcgcttgaacccaggaggcagaggttgcagtgaaccaagatcatgccacagcactccagcctggtgacagagcgagactccatcacaaaacacacacacacacacacacacacacacacacacataaacacacacacacataaacacacacacaaacagtatggtaaaatacaataccaacaagcaacaaattag

SEQ ID NO: 268309 - DNA, 201 bp, Homo sapiens
ctccccatctcaacgtcagctgattatcaaccttaattcctctttgccggataacctaacatattcacagtcccagcgattaggatatagacacttgtgtktgttgggggcgcattattcagcctaccacaagtctaatctaaatattcacattaaaataaaaatatgacttgaagcagccaaagtcttatttgtttggag

SEQ ID NO: 268310 - DNA, 201 bp, Homo sapiens
ctgaggcaggagaatcgcatgaacccgggaggcagaagttgcagcgagccgagatttcgccactgcactccagcctggtgacagagtgagactccgtctcaaaaaaaaaaaaaaacaagtaaatttcttaagttgttatcattttggtatactgtttgaccagattcagtctcaataaaaggagcattaacaaaacttcaa

SEQ ID NO: 268311 - DNA, 201 bp, Homo sapiens
ggactgtgaattatatcaggtgtttgaaaaattttaaaataaaagaagaaatacatattttagaatttgcaggcaatactgttgtctcatgcaacaactayccaattctgctgttgttcacactgctgccacaaataatgcagaaaagaaggggcatgattttgtcccagtaaaactgaatagatgaaatcaggtggcaga

SEQ ID NO: 268312 - DNA, 201 bp, Homo sapiens
gggacttgttaggcaaatgtatttaagtgtccttttaatgcattttatagcttcagtttattcctttataccacagtgatgttccaacatctgatgaattstggcttttcattaggacatctggatttcacacacacacacacacacacacacacggaataacaaaagataaaacatttttcacaaggtggttatacatat

SEQ ID NO: 268313 - DNA, 201 bp, Homo sapiens
gtcacatagctgataataacagggccaggattcggcccaagcagtctgatgatagatgccctgtgtgtaaacactatgcaatgatacttctaatttcttarcttcccacaaaggcagggtttgaatttcaaagtgaaccaagagaggatgggcccattttatatcatcctataccaatgaatgtggcctgccttgccacac

SEQ ID NO: 268314 - DNA, 201 bp, Homo sapiens
cgaagaggggaaaatacatgggaaaggaaatgactgaccctggaaattattaggacatcctgcccaggatgtcattactaaatctgtgttccattattttyataaaaagatatcatctatacacaccagaggacaatggcaagcagacataattgggctgtgaacatttcatatcacgttagcctagtacttttaattaga

SEQ ID NO: 268315 - DNA, 201 bp, Homo sapiens
cataaactgcctttggaacaatttatgcagtttttttccatcatgaagccaatttgttatctatttctgcatatcagtaaaaacatgttccttattcaaartaaaatatttctctttatatgttactttatttaatacctgaaggtgcactcctcaacttatggcactaatattcgttgctgtggaaatattttcagaact

SEQ ID NO: 268316 - DNA, 201 bp, Homo sapiens
actctcctcccctttgataaccgtcattctcttgcccacccccaccatttgcatttcctgtgaagcgtggctcctcagatttcccgtttaaagttttgggaattaattttcttttgccttggtatttacaagaggtgaagacagtgagtgagccaacattctcacattgttgccagaggacacacaactagatgaatctaa

SEQ ID NO: 268317 - DNA, 201 bp, Homo sapiens
tattaaatacttcaaaatcccgtaaaataaatattattgtgtctccatgttacagcttctcttggggccatatgagtaataaaagacaaataagtttcaarctcaggtctgtctgatatagaaatacttgatctcaaccaccataatatattggaattttcatttttggatagttaggctacaaggttctcttgaaaattt

SEQ ID NO: 268318 - DNA, 201 bp, Homo sapiens
agatcatcttgctgctctcaagacctagttttaagctgtgttatggtaattatattttattttcctcttagaacatatgcctcactcctgggatactgcayctctcctaagagaatttttagagtcccaactgagtttctcagttgtttgccaacatttccccatttggctggatctgaactccagtagctttccaggaag

SEQ ID NO: 268319 - DNA, 201 bp, Homo sapiens
gtggtggacctgggaaatcccttggtggaaaataacctcgagaagctccaaacatggttcctggaggaggtggggggaaaggaggtcctcttctcatgaaygggccccttgtatccactggaaacaatggaccgctgactggagcaagaggtggaggaataaggccagggccagttgcttcattttcagcagggagagatg

SEQ ID NO: 268320 - DNA, 201 bp, Homo sapiens
ctagctaagatcattgatgaaaatggccacactaagcaacatattttcaatgtagaggaaacagccttccattggaagaagatgccatctaggactttcayagctagagaagagaagtcaatgcttgacttcaaaacttcaaaggacaggctgactctttttttaggggctaatgcagctggtgacttgaaattgagccaa

SEQ ID NO: 268321 - DNA, 201 bp, Homo sapiens
atgtcacagtttcatgtttatccagttcaatgtatttttaaatttttccttgagacttctttgactgatagattattgtgaagtgtgtttttaaatttccmaatgtttagggattttcatatctttcttatgctgatttccaattggattccctacaatgatttctggttttcatctgctctggatgattactatctcttt

SEQ ID NO: 268322 - DNA, 201 bp, Homo sapiens
attaattcctgcagtcatttcttttagtgtagtctgctttcccaaatacccaaaagctgttgggagaataaacttgaattccaaggtcttaatcattaggycattttacatagaaactcagacactttatttttaagcaccaatctgtagatgttggagattcattttaaataatctgtggggctcattgacctgtctaga

SEQ ID NO: 268323 - DNA, 201 bp, Homo sapiens
ctctttgtttagcccagttaaagccaaatgatgtgctctcagcagtttttgatgttcagagtattctccccactttgtgcacagtgtaacatagtttaagrtacatgtgcaccccaatatcaagaagcttttttggaattacatatttatagtaaatgattataaaggcttaaaaataaacttcttaggcggggcacagtg

SEQ ID NO: 268324 - DNA, 201 bp, Homo sapiens
ttttttttttgataatatctggtcctgcccttatgggaaggataaagctctgtaaaagcacagggccagctcctgttttctgaaccctttctatggatggsgatgaatctatgtattctacttatcagagtaggtttaccctcatggattatatttgaggtcccacatctgagtggttgacatattgtgccaatataccta

SEQ ID NO: 268325 - DNA, 201 bp, Homo sapiens
tgattccatgtctttgctattgtgaataatgcagcaatacacatatgagtttatgtgtctttttggtagaatgttttattttggtggaggggtatatcccyagtaatgggattgctgggtagaatggtatctctgttttaagttctttgagaaatctctagactgctttccacagtggctggactaatttatacttccatc

SEQ ID NO: 268326 - DNA, 201 bp, Homo sapiens
atggggtttcaccgtgttagcccggttagtctcaatctcctgactttgtgatccgcccacctcggcctcccaaagtgctgggattacaggcgtgcgccacygggcctgtcctctacagatatttttttaagtgcctactcaatgataggtactttcctagatatggagtagatccttcctagctagggtggtcaaactgtc

SEQ ID NO: 268327 - DNA, 201 bp, Homo sapiens
taggacatcaccaccaggaggagacattctgtgacagcaaaagtggaaaacagaaaggtctgcatcatgcggcccgcaaaggagatgggcttggctggatkcaggaggttcaccagcatccggggcaccgtgttgcaggcgtaggcgatgtcgacgaccgccaggtgtgagaggaagaagtacatgggggcgtgcagtctg

SEQ ID NO: 268328 - DNA, 201 bp, Homo sapiens
tctcctgcctcagtctcccaagtagctaggaccataggcgtgcaccaccacacctggttaagttttgtatttttagtagagatggggttttgccatgttasccagactggtctcaaactcctgacctcaagtgattcttctgccttggcctcacaaagtgttgttattacaggcatgagccatggcacctggccatatcag

SEQ ID NO: 268329 - DNA, 201 bp, Homo sapiens
attgcctcaaaaaatgagttgtattttggggatatacaatactcttaattctgtaacaggtcatttatacacacacacacacacacacacacacacacacmtataaatatcaaagtatatttaaatatagctcataaaactgtatagcctattctgttggcatggactagtgcagcgagagcagttgtctacagctggctt

SEQ ID NO: 268330 - DNA, 201 bp, Homo sapiens
ctgagagcatcgctatgaaaatttttacagttgaatagtgttagttgacattcaacatggtttcatgtatttattggccagcagtctatcttcctttgtargaagtatgatttagatttttgtttatagaaatttagggaattggtatttgatgaatatggtagcatgggtgctagtgctgggctctgaggttctgtttca

SEQ ID NO: 268331 - DNA, 201 bp, Homo sapiens
cgcaagtgtatctataaacagaaatccctttgaataatactgaataccttccagtattgtgattatataggaacacaaaatgggtagctgaagatattaamctttctgaataggaatgtaatggagttattcttgatttgattcattttaaagaattatttctaccctattttttcagaagtgtcccatttgaagagagga

SEQ ID NO: 268332 - DNA, 201 bp, Homo sapiens
acaattgtggacaagggtcccaccagcccagaaattgctccggccaagaccatgttctcattgatgtgggtatctgcacaggcaagtttgagaacagccamgatttcacaaaaaaagtgataaattttctggggcctacagaagggtaaaggtagaagtaacacaagatgaatcaaggataaaaggactccagtggtccag

SEQ ID NO: 268333 - DNA, 201 bp, Homo sapiens
aagatacacttcaacttatgataggattatgttccaataaacccatcataagttggtaatattataagttgatgatgctttttttaaaaaaatatagactrttgtcctgttgcccaggctggagtgcagtggctattctcaggtgtagtcatagtacactatattctcaaagtctttgagctcaaacaatcctcctgcctc

SEQ ID NO: 268334 - DNA, 201 bp, Homo sapiens
gcttgcagtgagccgagatcgcaacactgcactccagcctgggtgacagagccagactctgtctccagaaaaaaaaaaaaagaaaagaaaaaaaaaacgcrtgcacacgtatacataggtttcttttttattacgttaattttttaataaaggctaaaatttaaaaataaacatgtcacatattaatatatccttttggtc

SEQ ID NO: 268335 - DNA, 201 bp, Homo sapiens
catggaactaatgccctatgaaagccaagggatgacaatatctcctgatatgtaagttcaggtccaggtgttttacattgaaaggtatatagtacctttcytaggtatgagtaatagatcgtgtgctattttaatttaaatttctattttactaatattttatcttacatcttttttgaaattatcattttagggcttgta

SEQ ID NO: 268336 - DNA, 201 bp, Homo sapiens
ggcaggttagccacaaaattttaacacaatggaaatgcaatatctatgaagcacaataaattgcagaacgataaaatgagttatgtctgtatatagaaatrgaattaatttgattgtgtttatcttaaattctgtgaccttaatggactcacttcttaatttaaggaggtttgtaaaatagatttatttggatttctatgt

SEQ ID NO: 268337 - DNA, 201 bp, Homo sapiens
caacaacaacaacaaaaatacaaagaaacaaacaaaaacaacttccagcctgtacttaagtctcttcacaatttaccctcagttgaccttacaggctatawgttccaggtcaattggagtccttgaaattacttgaacacatcttgagtttgcttacctcatcactgttgcctatgttcttctctcctctagaatttcatt

SEQ ID NO: 268338 - DNA, 201 bp, Homo sapiens
tattgtagcacaatgcattacttacatgtttgtgggattgctgctgtaaacaatcctactgcactcccagcgtggttaaaagcaaacaactatgtattttrctatgcatttactacactctactaaactttttgtcattattttattttattttattttggaggtggagtcttgttctgttgcccaggctggagtgcagtg

SEQ ID NO: 268339 - DNA, 201 bp, Homo sapiens
attgccaactgatgtcatagccgtaataatattgtagcacaatgcattacttacatgtttgtgggattgctgctgtaaacaatcctactgcactcccagcrtggttaaaagcaaacaactatgtattttactatgcatttactacactctactaaactttttgtcattattttattttattttattttggaggtggagtct

SEQ ID NO: 268340 - DNA, 201 bp, Homo sapiens
ccaggaggcggagcttgcagtgagccgagatcgcaacactgcactccagcctgggtgacagagccagactctgtctccagaaaaaaaaaaaaagaaaagaraaaaaaaacgcgtgcacacgtatacataggtttcttttttattacgttaattttttaataaaggctaaaatttaaaaataaacatgtcacatattaatat

SEQ ID NO: 268341 - DNA, 201 bp, Homo sapiens; identical to SEQ ID NO: 52940

SEQ ID NO: 268342 - DNA, 201 bp, Homo sapiens
agaaggggaagcaagcactttcttcacaaggcgacaggacggagtgagtctaagcagagacaggacagagtgagtgtgagcagataaaatgccagacactyataaaacaatcagatctcatgagaactcactcactattacgagaacagcatgggaaaaactgcccgcatgatccaaacacttccctccctcggcatgtgg

SEQ ID NO: 268343 - DNA, 201 bp, Homo sapiens
tacagcagaatttattaaagggagtgaaagagtaggtgtttgtttcttcccatctcccacagaggagttgttgctttccagtgtaaagctactttgaactwattttttcaaaaaacagatcttctacgcattcaaccagcaccaaacaatggaacccatggtagtttaaaccatcttctgaaggtgcctttttatgagcca

SEQ ID NO: 268344 - DNA, 201 bp, Homo sapiens
tctaatttatgtgtgtggagttgtttgtaatattccttgatagtcctttgttatgtgtgtttatgtctgtagtgatatcgcctgtttcattatgatatttraaatttgttttttccttttaatttatgcttgagtttgctaaattttattaatcttttaacatagctatctctttgtttcattgatttaaccattgttttt

SEQ ID NO: 268345 - DNA, 201 bp, Homo sapiens
tgctattatcatcactgtgaattttcctgagcattgacattttctggcctttttgtatgctatttagcagttctgcatttgaagtgatcgttattagattrctgattttagcatccttatcttaacaatatagatgagaatgaggagtaaggctaagagtgtgcccagggactgtaagtgccagcaccttcctacccccac

SEQ ID NO: 268346 - DNA, 201 bp, Homo sapiens
cacccaacttagtcattgattccagcagtaatcagaatgctttgccccattatcaattatctttttgcaaattctctctctctctctctctctctctctcwcacacacacacacacacacacacacacaatagggagcagtagtgtctctatatttctgaatagtggcagaatcagaatcttaagttaggctagcttcttt

SEQ ID NO: 268347 - DNA, 201 bp, Homo sapiens
gtcacccaacttagtcattgattccagcagtaatcagaatgctttgccccattatcaattatctttttgcaaattctctctctctctctctctctctctctctcacacacacacacacacacacacacacaatagggagcagtagtgtctctatatttctgaatagtggcagaatcagaatcttaagttaggctagcttct

SEQ ID NO: 268348 - DNA, 201 bp, Homo sapiens
ttgtcacccaacttagtcattgattccagcagtaatcagaatgctttgccccattatcaattatctttttgcaaattctctctctctctctctctctctcwctctcacacacacacacacacacacacacacaatagggagcagtagtgtctctatatttctgaatagtggcagaatcagaatcttaagttaggctagctt

SEQ ID NO: 268349 - DNA, 201 bp, Homo sapiens
tcaaggacttttcctccacatgttcatttccgtgaaaaatatcacttggtactagatgatgtgaatggctatgattgaactggttacttagggtaataggytgacatcttgtttcggcaattaaacaataaaaaagttgttctttattaagatatgaatccatttcttaaagaaatgggttccatagatttccatagcatt

SEQ ID NO: 268350 - DNA, 201 bp, Homo sapiens
tcaggaggtcgagaccagccttttactagagaccccatctatactaaaaatacaaaaattagccaggtgtgatggtgcatgcctgtcatcccagctactcrggaggctgaggcaggagaatttcttgaaactgggaagtagaagttgcagtgagtggagatcaggccactgcactccagcctgggcaacagaacaagactc

SEQ ID NO: 268351 - DNA, 201 bp, Homo sapiens
gtacttgtgttttctttttatttttaaaaactaaatttagctgtatcaaattaagatttaaggaggtaaaaatcatcggcaaaaagacaacttctaagcartaaaaatatttctgttcatgaaaaatactgccttgtgaaaaaaaaagtgttgtgcttttctttttcaggaaggtaaaccagaagctctttgggttgaaga

SEQ ID NO: 268352 - DNA, 201 bp, Homo sapiens
tcatttttattaacttgcctatgagattttcaacaatttcaccttcttagagatttgtaatttaaagattccgaaatgtataatgggcaaaaaggtttaaygaaagcaagtagcgttatcaatttaaaactcctgagttaggataaattaactgataaattttatgtatctagatacaatcagggggtaccaaatttatgt

SEQ ID NO: 268353 - DNA, 201 bp, Homo sapiens
gtctgatcatccctctggtttaaactctccagagagtaaacatactgtctatccctttttgcagactttttcaatctatcctctatttccagccttatgcraactcctgtctttaggactccaagttctacccttctggggttctacagtaggacttccttggtgcttttcccaaacataagctcttggtagtcagtgttt

SEQ ID NO: 268354 - DNA, 201 bp, Homo sapiens
tcaatcatgcaatttagatagaagttagttccatacagtgtgatctctgacttgctaaggtttagaataaactcaaagggcaatgtggcacagttattaargtttgagagtatgcccatctgtgctctgactctacacatccactgcgagaagaaacatccatataacaccaaaaacactatatgaaaatcttgttgcaca

SEQ ID NO: 268355 - DNA, 201 bp, Homo sapiens
ttatgaatttttttaatgttgattttttaaagacactaaattactgtcctgttgttagtcgagtcgagtttgtaaaaacaaacagaaaccctgcggggggkgtgtgtgtgtgtgtgtgtgtgtgtgtgtgtgtgtgtgtgtgtgtgtatttgcccttggggtgagaggtgagggtggggaagaaaatgagagaatctttta

SEQ ID NO: 268356 - DNA, 201 bp, Homo sapiens
ctgaggcagacagatcacttgaggtgaggagttcaagaccagcctggccaacatggtgaaaccccgtctctactaaaaatacaaaaaaaaaaaaaaaaaaattagttgggcatgatggtgcacccttgtaatcccagttactcaggaggaggctgaggtaggagaatcacttgaacccaggagatggaggttgcagtgagc

SEQ ID NO: 268357 - DNA, 201 bp, Homo sapiens
attcctaaagtgctgggattacaggtgtgagccatcattcccagctgagaataaaaacactttttaaaacctattgttcgggctgggcatggtggctcacrcctgtaatcccagcactttgggaggctgagatgggtggaacacttgaggttaggagttccagactagcctggccaacatggcaaaaccctctctccacta

SEQ ID NO: 268358 - DNA, 201 bp, Homo sapiens
catctgtaataaccgtactcacctcatgtagttgtaaaaatttaaaaagttaatacatggaaagaatttacaattgtgcctggcctgtagcaatattattrttacctgttatcttttaagtattcttgtattaaactcactctgtttcagtttcatcgcttataaggggatacctactttatacagttgctgtgaagatta

SEQ ID NO: 268359 - DNA, 201 bp, Homo sapiens
gtgatcctggctcactggaacctccgcctcccaggttcaagttattctcctgtctcagcttcccaagtagctgggattacaggtgtgaaccaccaggcccrgctacttttttttgtattttttgtagagatggtgtttcaccatgttggccaggctggtctcaaactcttgacctcaagtgatctgcccaccttggcgtct

SEQ ID NO: 268360 - DNA, 201 bp, Homo sapiens
gacttggaaattataagctactcaacagtgaatctcagagctttctccattcatctcacagttagtcttatataaatatacagctctgtaatgattatatrtatcaattttttttccagtcaaggacttttcctccacatgttcatttccgtgaaaaatatcacttggtactagatgatgtgaatggctatgattgaactg

SEQ ID NO: 268361 - DNA, 201 bp, Homo sapiens
tggctggatgcaggaggttcaccagcatccggggcaccgtgttgcaggcgtaggcgatgtcgacgaccgccaggtgtgagaggaagaagtacatgggggcrtgcagtctggagtccagtgagatgagccccagtatggtcccgttccccagcagggtgaagacgtagaacagggagaagagcccaaagaggagcatctgaa

SEQ ID NO: 268362 - DNA, 201 bp, Homo sapiens
ttctcttggtcttcagttttttggaagagtttgagaagaattggcattagttcttcaaatttttggtaaagaaattgtcagtgaagccatctggtcctggkctttttcttgggaggattttaattattgattcaatctccttactgtttatagatttattcggactttctatttatttaagattcagtcttggtacattgt

SEQ ID NO: 268363 - DNA, 201 bp, Homo sapiens
attttttagcccagaacattattttttgttatttactttcccacaatgtttagatgagcatttatgtgaatgactgaatagatttgcaccgtgtcattatstaaacacgaaaacaggatcagtaacttttgttggatttgggcttactattgataaacactctagaatacacagttttaagcattgtctatgcaggtgatt

SEQ ID NO: 268364 - DNA, 201 bp, Homo sapiens
gagcccaggagtttaagaccagcttgggcaacaaagtgagaacccatctctattaaaaaaaaaaatccaaagtaccattagaagtaaatatatatatatatgtgtgtgtgtctttacatagtgtttttcatatatatatttacatatttataccagcttgtattcctttggtggagtcagattttgcacttaaaactttgt

SEQ ID NO: 268365 - DNA, 201 bp, Homo sapiens
tgagcccaggagtttaagaccagcttgggcaacaaagtgagaacccatctctattaaaaaaaaaaatccaaagtaccattagaagtaaatatatatatatatgtgtgtgtgtctttacatagtgtttttcatatatatatttacatatttataccagcttgtattcctttggtggagtcagattttgcacttaaaactttg

SEQ ID NO: 268366 - DNA, 201 bp, Homo sapiens
aaactcaaagggcaatgtggcacagttattaaggtttgagagtatgcccatctgtgctctgactctacacatccactgcgagaagaaacatccatataacrccaaaaacactatatgaaaatcttgttgcacagtaggccacccatcaatattacagcttttctttttcttttgatgttccaggtgacctgcaggaaatgt

SEQ ID NO: 268367 - DNA, 201 bp, Homo sapiens
ccaacacgttgagaggccgaggtgggaggatcatttgagcccaggagtttaagaccagcttgggcaacaaagtgagaacccatctctattaaaaaaaaaaatccaaagtaccattagaagtaaatatatatatatatgtgtgtgtgtctttacatagtgtttttcatatatatatttacatatttataccagcttgtattc

SEQ ID NO: 268368 - DNA, 201 bp, Homo sapiens
gggtattatgtcaaagaaacagttctgcttttcctactggtttcgatgtaactggtgttatacttgcctggtaagcaggagcctctcaagtagtttctggktttctcacaaagggaattgatttatgtgtggctattgaatgattgtgtctgctgtgggaagagtcgtccaagatttcctattctgttatcttggtaacat

SEQ ID NO: 268369 - DNA, 201 bp, Homo sapiens
ggcgtgtacctgtagtcccagctactcgggaggctgaggcaggagaattgcttgatcccaggaggcggagcttgcagtgagccgagatcgcaacactgcaytccagcctgggtgacagagccagactctgtctccagaaaaaaaaaaaaagaaaagaaaaaaaaaacgcgtgcacacgtatacataggtttcttttttatt

SEQ ID NO: 268370 - DNA, 201 bp, Homo sapiens
cccggcgtggcggcgtgtacctgtagtcccagctactcgggaggctgaggcaggagaattgcttgatcccaggaggcggagcttgcagtgagccgagatcrcaacactgcactccagcctgggtgacagagccagactctgtctccagaaaaaaaaaaaaagaaaagaaaaaaaaaacgcgtgcacacgtatacataggtt

SEQ ID NO: 268371 - DNA, 201 bp, Homo sapiens
gttcgagaccagcattgacaacacggtgaaaccccatttctactaaaaatacaaaaaattagcccggcgtggcggcgtgtacctgtagtcccagctactcrggaggctgaggcaggagaattgcttgatcccaggaggcggagcttgcagtgagccgagatcgcaacactgcactccagcctgggtgacagagccagactc

SEQ ID NO: 268372 - DNA, 201 bp, Homo sapiens
gtctgtccattttctgttaaaaaagagggtaattcatagtggtttaatatatatataatatatggttatatatattacatataatatataaccatatataktatatattatatggctatattatatatgatatatgatatatggttatatatgatatatggttatatatgatataatatgtagttatatatgatatatgat

SEQ ID NO: 268373 - DNA, 201 bp, Homo sapiens
tggtggcacatgcctgtagtcccagctacttaggaggctgaggcaggagaattgtttcaacccaggaggcagaggttgcggtgagccgagattgcaccacygcactccagcctgggctatagagcaagactgtctcaaaaaaaaaaaaaaaaaaaaaggataaaatagttttaggacatagttttatatctaacatgatat

SEQ ID NO: 268374 - DNA, 201 bp, Homo sapiens
aggcggagctcaggtggtaatgcttactgacccaccactcacctcctgttgtgtggcctggttcctaacaggccacagacaggtgtgggtccatggcccasgggttggggacccctagtctagtgtgaaacagggaagcctgttagaaaggtatgtagtgacccattcagccccaagggagcccatgaagccatggggatg

SEQ ID NO: 268375 - DNA, 201 bp, Homo sapiens
tatactgatagataatatgctgatatctattaatatattttagtcatattatcctattatctaaaactattggtgagcaaaatttgagcattaagagagtrgaaatgtacttttgcatgatattaaagtgtgacggtaaaagcaaacaagcaatgaaaatgaccttaaattatatttgaccagaactcacaaaggcagtta

SEQ ID NO: 268376 - DNA, 201 bp, Homo sapiens
acagtatactttttactttataaaaagtataccataaaatagttttaaaactatttttatactatataaatagtataagcagtataaaataggctgggcakgatggctcatgcctgtaatcctagcactttgggaggccgaggcaggtgaatcaactgaggtcaggagtttgagaccagcctggccaacacggtgaaaccc

SEQ ID NO: 268377 - DNA, 201 bp, Homo sapiens
tgtaataatattttttctttataggagtaaatcaaatacaaattgtggaggaggcaaccatggttataacaatgagtttaggagcatggaggtaacttackgcttttttttttaacttttattttaagttcaggggtacatgtacagaatgtgcaggtttgttacataggtaaacatctgtcatgggggtttgtcatacag

SEQ ID NO: 268378 - DNA, 201 bp, Homo sapiens
cttaaaaaaagctaccagccaaaataaccattaacatattgattgctttaatatattaatatactgatagataatatgctgatatctattaatatattttrgtcatattatcctattatctaaaactattggtgagcaaaatttgagcattaagagagtagaaatgtacttttgcatgatattaaagtgtgacggtaaaag

SEQ ID NO: 268379 - DNA, 201 bp, Homo sapiens
gatgtcccattcaaaagggttgcattagtgagcttcaggtagcatcgtctttctcattttttgtgtgactaatataagaggatagtgaattatacctcttwcagatcttttttttacaagtcaaaaagataatctctttactcactaagtataattgcaactgctttcgattggttcccacatcccaaattgtaagtaaat

SEQ ID NO: 268380 - DNA, 201 bp, Homo sapiens
tcttagttgttttcattttggagctgacacatccacagaaattagcttgcagtaatagtagcactaaatactggcttatattgaaagggctgatgtcccawtcaaaagggttgcattagtgagcttcaggtagcatcgtctttctcattttttgtgtgactaatataagaggatagtgaattatacctcttacagatcttt

SEQ ID NO: 268381 - DNA, 201 bp, Homo sapiens
aagtggatgaagtttcctctattcctgctttatagagagcttttatcatgaatggatatcgaaatgtgttaaatgtttattatgcatcaactgatataatstaactttccttcttttgtttgttaacatggtggattattttgattgactttttgagatttaatcaggtttgtttttctggaaacaatcccccgctggaca

SEQ ID NO: 268382 - DNA, 201 bp, Homo sapiens
ctgggttgccccttccttcctgtgcagagatccttgtgcaaggggaccatctccacttcatgcccaggcagacatccagggattcagagtgcccatcagcrtgaatcagcaatctgagctgctccgttcttctggtgcagagattgcggtgtagtgggaccctctctgctccacagatttccaggtatttggagcatctgc

SEQ ID NO: 268383 - DNA, 201 bp, Homo sapiens
gtatccgcatcattaaacaacacgtgattgtatagtgttagctttttgtagatgctttttatcaagtggatgaagtttcctctattcctgctttatagagwgcttttatcatgaatggatatcgaaatgtgttaaatgtttattatgcatcaactgatataatgtaactttccttcttttgtttgttaacatggtggatta

SEQ ID NO: 268384 - DNA, 201 bp, Homo sapiens
agaagttgcagtgagtggagatcaggccactgcactccagcctgggcaacagaacaagactctgtctcaaaataaaataaaataaaataaaataaaataawgtcaatagagagtgaaattgaatctcctatatgcaaatcatccagaaagtgtagtacattcacaaactgtttcttagtaagtctaaaccagccaatattt

SEQ ID NO: 268385 - DNA, 201 bp, Homo sapiens
ctttgtgtgacgcatgagaaaataggcttcacttgcaccagcatgatttccatagagacatgaagaacccaaccactgttattcttctaggggcagagaaytgagcttctgtctcattctgtctctgaggaagccacagtgataaagagaatgagactaaggcaagaacagaaaatgcctttgtaactgaaaggatacata

SEQ ID NO: 268386 - DNA, 201 bp, Homo sapiens
tggagactatcatccttagcaaactatataccacacattctcacttataagtgggagctaaatgataggaacttattaacgcaaaggggaaacaacagacrctggggtctgcttgaggcaggagggtgggaggagggagaggagcagaaagtataactattgagtgctggcttaatacctgggtgatgaaataatatgtac

SEQ ID NO: 268387 - DNA, 201 bp, Homo sapiens
catgcctgtaatctaagcactttgggaggctgaggaaggaggttcgctggaacccaggcatttgaaaccagcctgggcagcatagagacctcatctctttwaaaaaatttttaaaatagtaattatatgaaaaaaaaattttaaagaaaaaaagtgctggtcttttttgttaacgttgaacatttaccagagtcagttgca

SEQ ID NO: 268388 - DNA, 201 bp, Homo sapiens
ctcagcctcccaaagtgctgagattacaggtgtgagcctctgggcctagtctgttttacatttttaaatggttggaagaaagtaagaatattttatgacaygtaaaaattacctgaaatgcaaatttcaatgtccataaagaaagttttattggaacatgaccatattcatttgtttatttattgtctatggatgctttgg

SEQ ID NO: 268389 - DNA, 201 bp, Homo sapiens
ctcatgttgaaaaaataaaataatttagttatttattgatttcttgtcatttatttcatgttgtcctgagattggatctaaactttgagctcctaatcatygctcagattgtgtggcctcgtaagattgtgcgtaataagtaaacaagcatctgtacacttgttaacttaatgagcttctgtatgtgacactttaagcctt

SEQ ID NO: 268390 - DNA, 201 bp, Homo sapiens
cttaaactttccactcttgcactgatcatcacctccacagcatatatctcacaaaatcttttcttatccaagtgtaaagacttattttttagcccagaacmttattttttgttatttactttcccacaatgtttagatgagcatttatgtgaatgactgaatagatttgcaccgtgtcattatctaaacacgaaaacagga

SEQ ID NO: 268391 - DNA, 201 bp, Homo sapiens
ttaaggaagcttttctttggagaaacagaaaccattcatgaaagttcctctggctcatctgcagcaactgttcctattcctcatttgtttcaagagatggrgtttcagtatgtcgcctaagctggcctcaaactcccaggctcaagcaagcctcttgcctcagcttcttgagtagctgggactacaggtgcactgccgcac

SEQ ID NO: 268392 - DNA, 201 bp, Homo sapiens
cccgttccccagcagggtgaagacgtagaacagggagaagagcccaaagaggagcatctgaatccttgggccaacgggaaatcccagtaggaggaactctstgatggatgttatattgtcccccatatccctatgacagaggaaatcaagttaatgctcatggtttaggagaagtgtttaaaaacagattcattttaactt

SEQ ID NO: 268393 - DNA, 201 bp, Homo sapiens
atgggattaaagaggctgtgaaacagcaggagatatttcttctgctccttggggttcccatatctgggtccaacatacatgataatggctgtgccataaamgagtccaatcacacagaggtgggagaagcaggtgcagaaggctttcctctgaacttcccttgattggatctgaaggatagcacagaggatgcacatatat

SEQ ID NO: 268394 - DNA, 201 bp, Homo sapiens
tgaaatctttctagatttttctttcttgagaaatctgggtttatcttgaaaaccctgaattagaaaaattagattgatttcattcagcggcaaacacaggmagatgtatactgaatcatatttcttaaaaatctcaaatttagaagattgtgaggttgaatgaggtcatctcctgaagcttctatagcaggaatgccgatc

SEQ ID NO: 268395 - DNA, 201 bp, Homo sapiens
taaaattgttaatactgctcaattcaaaacagtattaaaatgtaggcaaaaactaattaattaaatttgaaaatttattcaaataataaagctacagcctrtggaagaaaatcacaaaggtaaacataattataataataatctctgaatttacagaatatactagcttctttttaccaagtacagttatgtgttgtataa

SEQ ID NO: 268396 - DNA, 201 bp, Homo sapiens
ttataataataatctctgaatttacagaatatactagcttctttttaccaagtacagttatgtgttgtataacaacattttggccaacaatgaactgcttrtgtgatggtggtcccataagattataatactatagttctactataacttttctatgtttacatgtgcttagatacacaaatccttaccattgtgttacag

SEQ ID NO: 268397 - DNA, 201 bp, Homo sapiens
attttggagctgacacatccacagaaattagcttgcagtaatagtagcactaaatactggcttatattgaaagggctgatgtcccattcaaaagggttgcrttagtgagcttcaggtagcatcgtctttctcattttttgtgtgactaatataagaggatagtgaattatacctcttacagatcttttttttacaagtcaa

SEQ ID NO: 268398 - DNA, 201 bp, Homo sapiens
ctcttaatacatatatttaagttaatgcaatgaccttaatctgggtttttgagaaattcatattgtatatttctaaatctaagctacttggaatttatttytaaaccttccatcaacattattttatatgcatattagttgcttttatcttagttgttttcattttggagctgacacatccacagaaattagcttgcagta

SEQ ID NO: 268399 - DNA, 201 bp, Homo sapiens
tatttagcagacaagaatatcacccacggcttcctctatcctcctggttagtagaactcttttttagagcagtagcttagaaagctctcatcagctggatrtgggcatgtgccttaaacatatactccccaccaaaactacctgcttgggtaagctagctgcctgagaggcttccagtggttgtggctggccagagcagca

SEQ ID NO: 268400 - DNA, 201 bp, Homo sapiens
agttctcaaattttatgtcatttttactggtttattgtttttctttttcttcaagttattaaaaatagctatttgactctgggtaagttgactgacttttytgggcctcagtttcctcatttgtaaaatgaaatgactagatctgatgatttctactgttaattccagccccaaatgccatggttgtaggaagatagatca

SEQ ID NO: 268401 - DNA, 201 bp, Homo sapiens
ttcttctgctccttggggttcccatatctgggtccaacatacatgataatggctgtgccataaaagagtccaatcacacagaggtgggagaagcaggtgcrgaaggctttcctctgaacttcccttgattggatctgaaggatagcacagaggatgcacatatatgaaactacaattgtggacaagggtcccaccagccca

SEQ ID NO: 268402 - DNA, 201 bp, Homo sapiens
tgtaagtatgaagacacctatatgaaaaaaagggtaaacctgaaagtgaataaccatagtccactaattctgagaggaagttggggttatcagaccctctrctgacttcttgagaagaccacagagaaacaagtgggaaattcccatgcttaagtacagtctataaagtctatggtaatatctaatattgttaggttgaaa

SEQ ID NO: 268403 - DNA, 201 bp, Homo sapiens
gtattagtaaacactactgtgaagtatgaagtcaacaaaacgaggaaatgcaggaggcagaatatcatgctctgcttttttttttttttttttttttttgkattctaacattttttcatgttagaatgaccaagcttggacttctactgtaatctctattctggctgatgggagcaaaaaatatgtaagaccttgtgcttt

SEQ ID NO: 268404 - DNA, 201 bp, Homo sapiens
acaattcttctttgttattgttttaaaactagcttccttgttaccaaaagttcctgtcctttcactgatcccacagaagtacttgtgtatttctccttccmtgtgacaggatggaattctagcaattttctgctttctaattcagaaattactctgttagtgtgttgtggttcaagaaaattacatacaaggatgttttgg

SEQ ID NO: 268405 - DNA, 201 bp, Homo sapiens
tctctcaatgatctacccagagcaccttttttttttttttttttgaaatggagtctcgctctgtcgcccaggctggagtgcagtggcgcgatctcggctcrttgcaagctccgcctcccaggttcatgccattctcctgcctcagcctcctgagtagctgggactacaggcacccaccaccacacccggctaattttttgt

SEQ ID NO: 268406 - DNA, 201 bp, Homo sapiens
agtaaatcctcaatatattccatttattctttatccttctgagaatttcaatttcagagtgctctttatagctcttatgctaatatatatatatatatatwtttttttttttttttctctctctcttttttttggagacatgttctcgctctgttgcccaggctggaagacagtggcatgatcatggcttgctgcagcaac

SEQ ID NO: 268407 - DNA, 201 bp, Homo sapiens
aactttaatcttttcacacgattcttattacaacattttttcctctctccagattgcccaatcactgaagagctgtgatcttcctaaacagttaaaagtcrggcacagctatgtaactcatacagtttctctttgccagactagactaaagaaggagcactactttattctgataaaacaggtctatgcagctaccaggac

SEQ ID NO: 268408 - DNA, 201 bp, Homo sapiens
ctactgaaaattagctatgcgtggtggcacatgcctgtagtcccagctacttaggaggctgaggcaggagaattgtttcaacccaggaggcagaggttgcrgtgagccgagattgcaccactgcactccagcctgggctatagagcaagactgtctcaaaaaaaaaaaaaaaaaaaaaggataaaatagttttaggacata

SEQ ID NO: 268409 - DNA, 201 bp, Homo sapiens
catatgaggctagctttagaggtgaagtcctgcctggtcatgtactgtggtgcttgtcagcatatgtgggatttaaaccatgagactggggtagaacaacyttaaagaattggggaggtgaaggggaaaagcaaagaaaactaggaaggagtagccaggaatgtgagaggaaagccaggtaactattgtgttctagaaacc

SEQ ID NO: 268410 - DNA, 201 bp, Homo sapiens
accaaaatgaaatcaaatgaaaaaggatttgaataaacatttacaggtttgcagcttttaatcctcacaataattctatgagatagatgccatgagacaartgaagcacagagggatgcagcactttgcccgaggagtgcagctgtgagcagcggagctggggttcccacttgggctgtctgcttccagagcaccctcgct

SEQ ID NO: 268411 - DNA, 201 bp, Homo sapiens
agactctgccacctgaaggagagtgaaataaatggtgagaactcatccaacacatttagcacaaacgtcttcgtatttcttggtttacttcttgttttggwggactatatcactcaggagcttcctgagaaagaaaaaggggaagatacattcttgagagtttttgtgtctcaacatgtttttactctgcctatacactta

SEQ ID NO: 268412 - DNA, 201 bp, Homo sapiens
acctggctagttctattctttagcaagactagtgattgaaaccatggagaagaaagtcagtaaactgaatggcatatagagtacatagcttcgttacagcrgaatttattaaagggagtgaaagagtaggtgtttgtttcttcccatctcccacagaggagttgttgctttccagtgtaaagctactttgaacttattttt

SEQ ID NO: 268413 - DNA, 201 bp, Homo sapiens
gggcaaaatcatcttacacaaagcctatattatagtaagctgttgaatatttcatgtaatttattgaatactgtactgaaaaggaaaaacatcatggtagmatgagtacttgaaatatggtttctactgaatgaatatcactttcccaccattgtacagttgaaaatcttaagtgaaatcattgtaagttggtgactctct

SEQ ID NO: 268414 - DNA, 201 bp, Homo sapiens
ggcgtaatttttttctctctctctttgaacagggagacacatcgcctctgcctcccactgtcccagactgtctgcgggctgatgtcagggttcctccttcygagagccaaaaatgttccttctatttagcagacaagaatatcacccacggcttcctctatcctcctggttagtagaactcttttttagagcagtagctta

SEQ ID NO: 268415 - DNA, 201 bp, Homo sapiens
acttgacagtttggctaggtgttgaattctaagatggaaatactttgtttttctagaaatctgaaggtattactttactgtcttatagtatccagagttgmttttaatacatttggtattttaataaatttctgattagtgatcctttgtaggttgctcatgatctctctgtggaggctttcaatatctcttaatcctatt

SEQ ID NO: 268416 - DNA, 201 bp, Homo sapiens
tgggcaaaatcatcttacacaaagcctatattatagtaagctgttgaatatttcatgtaatttattgaatactgtactgaaaaggaaaaacatcatggtarcatgagtacttgaaatatggtttctactgaatgaatatcactttcccaccattgtacagttgaaaatcttaagtgaaatcattgtaagttggtgactctc

SEQ ID NO: 268417 - DNA, 201 bp, Homo sapiens
gttgggcaaaatcatcttacacaaagcctatattatagtaagctgttgaatatttcatgtaatttattgaatactgtactgaaaaggaaaaacatcatggyagcatgagtacttgaaatatggtttctactgaatgaatatcactttcccaccattgtacagttgaaaatcttaagtgaaatcattgtaagttggtgactc

SEQ ID NO: 268418 - DNA, 201 bp, Homo sapiens
gtggtttatttttatgctttgagaaaataagtctgtagtatgttactatattctactatataaagatacacttcaacttatgataggattatgttccaatraacccatcataagttggtaatattataagttgatgatgctttttttaaaaaaatatagactattgtcctgttgcccaggctggagtgcagtggctattct

SEQ ID NO: 268419 - DNA, 201 bp, Homo sapiens
gtaggaaataacctgcttttgataaaaatgaacagttctctccaattcttcttcaagatctttggctagctttctataggtctccagctcttcagtggcayggctgatcttttcttccactctagaaagcttctcttcttcctctattcggtaattttcctccactgttaatttcctgtagagtttcatttcattttcttg

SEQ ID NO: 268420 - DNA, 201 bp, Homo sapiens
tcgttttgcaggacattgtctaggtgtccctctcccatggatgatcattagtgtggtttatttttatgctttgagaaaataagtctgtagtatgttactayattctactatataaagatacacttcaacttatgataggattatgttccaataaacccatcataagttggtaatattataagttgatgatgctttttttaa

SEQ ID NO: 268421 - DNA, 201 bp, Homo sapiens
tatctgtgtttgatatttttcttctaattgtttaagtctaaaataatttgatctgttataaataatataatcaagttaacattaattaattcaatgtaaaycaaaatattgaggtctttttatcccaaaagtaaaagagagaagtgtaagtggaacaggaagttagacttcatctaaaaaaaaaagttaacattttgtgtc

SEQ ID NO: 268422 - DNA, 201 bp, Homo sapiens
attgcttgaacccaggaagcagaggttgcagtgagctgagatcataccgctgcactccagcctgagtgatagagcaagactcagtctcaaaaaaaaaaaaagaaagagaaaaaaaaaagtcaaaaattgtatctcaactctgtagacttcattccaaattctcaaatgcaaagaatcaccggtacttcttcacaggtaggt

SEQ ID NO: 268423 - DNA, 201 bp, Homo sapiens
agacaagaatatcacccacggcttcctctatcctcctggttagtagaactcttttttagagcagtagcttagaaagctctcatcagctggatgtgggcatrtgccttaaacatatactccccaccaaaactacctgcttgggtaagctagctgcctgagaggcttccagtggttgtggctggccagagcagcacagcggct

SEQ ID NO: 268424 - DNA, 201 bp, Homo sapiens
gaatttatggataatatgatatagaactactcaagaattttgaattttttttctgggcagaatttgtaattacttgcagatcatcttgctgctctcaagayctagttttaagctgtgttatggtaattatattttattttcctcttagaacatatgcctcactcctgggatactgcacctctcctaagagaatttttagag

SEQ ID NO: 268425 - DNA, 201 bp, Homo sapiens
aggaatggctcaatatgaggccagtccagggctgtgaggaatgaactatgaataagtgtccagcattaggttaattcacctgtgtcgagccaaaaacagamcctttgatgtgagaaataccattttcctctgatctttcgattgccctttgtttatctgagggtctgctgggaacagtaggctatatatagggacaactac

SEQ ID NO: 268426 - DNA, 201 bp, Homo sapiens
atctcaacagtaggcactggaattgtgttttccccagtcacaggccttgggcaagaggagagctgctatggctgtggtttctcctggacaatgagactttyagccagcgccagcttgatgaactagaactggtctgtgtgtgttatttttgggtgacccagcctacttccttgagactgtggtgtagcagggccttctcca

SEQ ID NO: 268427 - DNA, 201 bp, Homo sapiens
ttggtagttttctttgctttatctgatatgcacacagacactcttgctttcctttcattaatgtttgtgtaatatatcttttttcatcctgttaatttggyctgccctgtattggtaaaattcaagtgagtttcttgtacacagcatacaagaaacatataagaaagggtcatacttttaaatacactcttctattatcta

SEQ ID NO: 268428 - DNA, 201 bp, Homo sapiens
ctttgctttatctgatatgcacacagacactcttgctttcctttcattaatgtttgtgtaatatatcttttttcatcctgttaatttggcctgccctgtaytggtaaaattcaagtgagtttcttgtacacagcatacaagaaacatataagaaagggtcatacttttaaatacactcttctattatctatctcttggtag

SEQ ID NO: 268429 - DNA, 201 bp, Homo sapiens
tgggtctttcccatgctgttgttgtgatagtgaataagtctcatgagatctgatggttttacaaaggggagctcccctgcacatgccctctctcttgtctrccatgtaagatgtgcctttgcttttcctttgccttctatcatgattgtgagttctccccagccatgtggaactgtgagttcactaaacctctttctttta

SEQ ID NO: 268430 - DNA, 201 bp, Homo sapiens
ttcttagccaactgtcacatagctaaggagtcacagaaggaccaaaatggcatgtatacacccatttctaggttctttctctctcccatatggtacattgrcccccaattcctaaccaatttagcagctttgaactctattcattgcttcttttggttcccaagaccactaacccctggttgggtcccattttcctgtacc

SEQ ID NO: 268431 - DNA, 201 bp, Homo sapiens
tcccaactgagtttctcagttgtttgccaacatttccccatttggctggatctgaactccagtagctttccaggaagttttcagtccctgatgatctcttmtgctttctgtatcccagcagtttctttctccaaggtctcccctcttcttagccaactgtcacatagctaaggagtcacagaaggaccaaaatggcatgta

SEQ ID NO: 268432 - DNA, 201 bp, Homo sapiens
taagacctcaaactataaaaatcctggaaggcaacctaggaaatactcttcttgacatgggtcttggcaaataatttttggctaagtccccaaaagcaatkacaacaaaacaaaaaataggtgagacctaattaaactaagagcttctgtatagccaaagaaactatcaacagagcaaacagcctacagaatgggaggaga

SEQ ID NO: 268433 - DNA, 201 bp, Homo sapiens
cctaagagaatttttagagtcccaactgagtttctcagttgtttgccaacatttccccatttggctggatctgaactccagtagctttccaggaagttttyagtccctgatgatctcttctgctttctgtatcccagcagtttctttctccaaggtctcccctcttcttagccaactgtcacatagctaaggagtcacaga

SEQ ID NO: 268434 - DNA, 201 bp, Homo sapiens
tgcacctctcctaagagaatttttagagtcccaactgagtttctcagttgtttgccaacatttccccatttggctggatctgaactccagtagctttccargaagttttcagtccctgatgatctcttctgctttctgtatcccagcagtttctttctccaaggtctcccctcttcttagccaactgtcacatagctaagg

SEQ ID NO: 268435 - DNA, 201 bp, Homo sapiens
tctatatgtaactgaagtggacaaaagttacctattgagaatgtttgtctaagcacaaggctaacattgattttagtcactgtttcctggcaggtggcagkgccaagccacctgcctccagcctcttgctgtttttagcaatgggatttattgaaactgttctcatcctaagtccatagcctgggagaacccctgaggcat

SEQ ID NO: 268436 - DNA, 201 bp, Homo sapiens
tatctgttaactccaatatctggattatctatgagtttgtttttaataactgatttatttcttatcagtctgttttacttgcttttttgtatatttggtaytttttttaaagtatgctgaatttatggataatatgatatagaactactcaagaattttgaattttttttctgggcagaatttgtaattacttgcagatca

SEQ ID NO: 268437 - DNA, 201 bp, Homo sapiens
gctctgaggttctgtttcaaaaccagcaatttcagagatggagatgtgtttaatttttacttcattagataacggtttggctaattaagacaactcattaygacaatcttaactccaaattatttttcaggtaattaaagccttacaggtagtagatcatgcttttgggatgttgatggaaggcctgaagcagcggaattt

SEQ ID NO: 268438 - DNA, 201 bp, Homo sapiens
atgtttgtctaagcacaaggctaacattgattttagtcactgtttcctggcaggtggcagtgccaagccacctgcctccagcctcttgctgtttttagcartgggatttattgaaactgttctcatcctaagtccatagcctgggagaacccctgaggcatgagtgggagctgctctgtcactgctgtcactttccactga

SEQ ID NO: 268439 - DNA, 201 bp, Homo sapiens
tagaatctatgaaaataaagtgagcattttaaagcttccagaaagaaatctgacacaacctgttttgtctttcattttttctttctttcctttatattcaycatagatgttatgatgccctatctgttaactccaatatctggattatctatgagtttgtttttaataactgatttatttcttatcagtctgttttacttg

SEQ ID NO: 268440 - DNA, 201 bp, Homo sapiens
agttataagttccttataattggatttaacatgttattgcctcaggcagagttgtttcccttctaggctcccattgtcattgaagtggactctctaatatragtttattcattatctaggccattctgttatgattttactacacaaacatagtccttaaatattgcgtttaacaaaacaagccattctgtcttctaaact

SEQ ID NO: 268441 - DNA, 201 bp, Homo sapiens
cctgttaatttggcctgccctgtattggtaaaattcaagtgagtttcttgtacacagcatacaagaaacatataagaaagggtcatacttttaaatacacycttctattatctatctcttggtagaccattcataattaaatgaattattgatactttaatgcgtaagcctgacattttttgttttctctatcaattcttg

SEQ ID NO: 268442 - DNA, 201 bp, Homo sapiens
gttctggcagttttcacatcacatattttgaagctttattttttggtgaatacacttttaaaattgctgtcttcttcatggattaaacctttgatcattayataatctctggttttggtagttttctttgctttatctgatatgcacacagacactcttgctttcctttcattaatgtttgtgtaatatatcttttttcat

SEQ ID NO: 268443 - DNA, 201 bp, Homo sapiens
gtcccccaccacctcccctggccctcttgttacacttcacatcctgaggcagcgctggtctgagcccggcccgccttagttctggcagttttcacatcacrtattttgaagctttattttttggtgaatacacttttaaaattgctgtcttcttcatggattaaacctttgatcattatataatctctggttttggtagtt

SEQ ID NO: 268444 - DNA, 201 bp, Homo sapiens
ttcttttcaacttactttgactttgagtgacttgttgctagaattctgataatttgtttttaagccttaatttgattactgccactcactaaaagtaaatsaaatgtaaatgtttatccccagagtaataattaataaggcaacatgtgtgttctgatcatttttaacactcgctgtcccataagcaactcagccctaggg

SEQ ID NO: 268445 - DNA, 201 bp, Homo sapiens
tactaacctcatgtgcctcaccttccttaaagatctcatacctgacttgctacaacaatgttcttcaatgcctgctgatatggtttggctgtgtccttacycagatcccatcttgaattgtagcttgcataattcccacatgtagccagcccacctgaaccatgctcagcagctggtgagaggtaattgaatcatgggggt

SEQ ID NO: 268446 - DNA, 201 bp, Homo sapiens
ctcttgggtcggaataggagccatgttcagatcttctccaagctcacagtgtacctgctaagtaaacctgggttgcgatttataaagctgcatttctctcygccacctggctagtgaagaaaagtggtggtttgcccctcatttggtattatgtattttcatttattaatacagataaaccaagaatttgattgtgttatt

SEQ ID NO: 268447 - DNA, 201 bp, Homo sapiens
agaactactcaagaattttgaattttttttctgggcagaatttgtaattacttgcagatcatcttgctgctctcaagacctagttttaagctgtgttatgrtaattatattttattttcctcttagaacatatgcctcactcctgggatactgcacctctcctaagagaatttttagagtcccaactgagtttctcagttg

SEQ ID NO: 268448 - DNA, 201 bp, Homo sapiens
tgaagagaggatttctacactgttaaaatggctggacctgcccaaagctgaaaggtaatgtctagtgtcagaaaagtgctggcatagtggcatatatatgsgtaaaaaatgaagtttttttttttttactttaaattacaatttttggctattttcgaaacgacgtggcattgccttataatggacacttttcatgaatta

SEQ ID NO: 268449 - DNA, 201 bp, Homo sapiens
gtttggtacttgtcttcctgcattagaatgtaatctttggtttcctcactgatacattctgttttgaatgaacaaatagtatccagcaataaatgttcaayatatgcatatgcatacatttttaaaaattgaatgaatggatcataatcaattgtcttttattttagttaggagaaactgaaagagagaagggtggggtga

SEQ ID NO: 268450 - DNA, 201 bp, Homo sapiens
catattcatttgtttatttattgtctatggatgctttggggcctcaatggcagagtggaggtgtttcaacaaagaccatatagctttgcaaagcccaacakgtgtatcactggctcttccagaaaaaaatctatacaccttgatttagctcactcctctcctaaaagactgacattccctggaatggaggaagcttagaga

SEQ ID NO: 268451 - DNA, 201 bp, Homo sapiens
atccgccatcaattcatcttgttgagaatgtttagatttctcttcttttaagtctttttctagacagaggatttcatcctcaagttcagaattggacctgytcagcttttcacaggttgcctccaaacttcgtgcttcttctgctgccgccttctcaaagctggcatcctctaaagatgactctacttcatagccttcata

SEQ ID NO: 268452 - DNA, 201 bp, Homo sapiens
gtatgagtaatagatcgtgtgctattttaatttaaatttctattttactaatattttatcttacatcttttttgaaattatcattttagggcttgtatccrgagtcacatggcatcattgacaataatatgtatgatgtaaatctcaacaagaatttttcactttcttcaaaggaacaaaataatccagcctggtggcatg

SEQ ID NO: 268453 - DNA, 201 bp, Homo sapiens
acccaacttagtcattgattccagcagtaatcagaatgctttgccccattatcaattatctttttgcaaattctctctctctctctctctctctctctctcacacacacacacacacacacacacacaatagggagcagtagtgtctctatatttctgaatagtggcagaatcagaatcttaagttaggctagcttctttg

SEQ ID NO: 268454 - DNA, 201 bp, Homo sapiens
tgtcctttccatacttcagcttcttgctgaaaaagctgtttatggcttgtctgaagttgagaattttcattcaaagcatcttttattgctatagcccgtcrttcttcactcattttaaatgtcttgcagatgattttggcttcagctatttgtgatttgagggattttgactcatcttctagagactgtatactttttgaa

SEQ ID NO: 268455 - DNA, 201 bp, Homo sapiens
tcacccaacttagtcattgattccagcagtaatcagaatgctttgccccattatcaattatctttttgcaaattctctctctctctctctctctctctctctcacacacacacacacacacacacacacaatagggagcagtagtgtctctatatttctgaatagtggcagaatcagaatcttaagttaggctagcttctt

SEQ ID NO: 268456 - DNA, 201 bp, Homo sapiens
tttaaagaaacatttaacttagcagcatgaatcagtttcttcaaagctcctttcagaggatcatctaagttagcaccattttcccattgactgttcacttytaattccaggttatcatcatccgttgtgtcttcttcaagcacagcagcctgatctttcatcattggcaagtgtccagtcagggtcttgatgtgattttct

SEQ ID NO: 268457 - DNA, 201 bp, Homo sapiens
taatatatcctagaaactcatgctcttgaacacaggaggcatataccaagttatttattatagcattatttatagtaacaaaaattttatcaatatgtaaygcaaaatttaattgttttgcatttaaatgaggaaatatcacaaaccacagctaagaacaagtcacttaacaagacctagatatatcactatagattacaa

SEQ ID NO: 268458 - DNA, 201 bp, Homo sapiens
ttcagataactgaataataatgtggtttctttctccttctaagctttttaaagaaacatttaacttagcagcatgaatcagtttcttcaaagctcctttcrgaggatcatctaagttagcaccattttcccattgactgttcacttctaattccaggttatcatcatccgttgtgtcttcttcaagcacagcagcctgatc

SEQ ID NO: 268459 - DNA, 201 bp, Homo sapiens
ggtgtgaaatacaattgccaaaggggagaaagtggaaagaaaagatcccaaatcaaattgaggaaaatatgcttccaggaagtatagtcatctgaggaaasagaaggtattatcaaacaagtaaacagtagagttatggataacaaaggaggaacttcagaagcctggggtagctaactaattgaaaagcctgaggacaac

SEQ ID NO: 268460 - DNA, 201 bp, Homo sapiens
gtccacttcagataactgaataataatgtggtttctttctccttctaagctttttaaagaaacatttaacttagcagcatgaatcagtttcttcaaagctmctttcagaggatcatctaagttagcaccattttcccattgactgttcacttctaattccaggttatcatcatccgttgtgtcttcttcaagcacagcagc

SEQ ID NO: 268461 - DNA, 201 bp, Homo sapiens
taggttttagcttgtacattcagcctacaggtaagaagcatctgtaacttcaatagaaataattttatcctctgttcaggttctactttgtttcaatgccrgactaaaagtacaagcagctcacgttcctgtctatactcatcatttacttctccagtaagattttgagagctaaaaagttcatattttatctgagtgtct

SEQ ID NO: 268462 - DNA, 201 bp, Homo sapiens
tgaagcttctgattctcactttcaaaatatatgttttctgattgcaaagatgcttgttgagtctgaagatttttaatatgctctgtaagctcttcctttgwtttgtccacttcagataactgaataataatgtggtttctttctccttctaagctttttaaagaaacatttaacttagcagcatgaatcagtttcttcaaa

SEQ ID NO: 268463 - DNA, 201 bp, Homo sapiens
agagggatgcagcactttgcccgaggagtgcagctgtgagcagcggagctggggttcccacttgggctgtctgcttccagagcaccctcgctgaacactcwctgtgctagacagcacagccataaatcctcagagcccatgatttgtggtgttcccttcagcagtctctattagtcagttctcatactgctaataaaggca

SEQ ID NO: 268464 - DNA, 201 bp, Homo sapiens
ttctcttcttcctctattcggtaattttcctccactgttaatttcctgtagagtttcatttcattttcttgatagaattcagtcattattttaagtttctrttgaagcttctgattctcactttcaaaatatatgttttctgattgcaaagatgcttgttgagtctgaagatttttaatatgctctgtaagctcttccttt

SEQ ID NO: 268465 - DNA, 201 bp, Homo sapiens
ataaagctgcatttctctctgccacctggctagtgaagaaaagtggtggtttgcccctcatttggtattatgtattttcatttattaatacagataaaccragaatttgattgtgttattataatataggaataaataaatgaaatttgtatattttatactgcaggcttaaatgctcagaactgaattgtatcgttttac

SEQ ID NO: 268466 - DNA, 201 bp, Homo sapiens
gtggcacggctgatcttttcttccactctagaaagcttctcttcttcctctattcggtaattttcctccactgttaatttcctgtagagtttcatttcatyttcttgatagaattcagtcattattttaagtttctgttgaagcttctgattctcactttcaaaatatatgttttctgattgcaaagatgcttgttgagtc

SEQ ID NO: 268467 - DNA, 201 bp, Homo sapiens
aggtctccagctcttcagtggcacggctgatcttttcttccactctagaaagcttctcttcttcctctattcggtaattttcctccactgttaatttcctrtagagtttcatttcattttcttgatagaattcagtcattattttaagtttctgttgaagcttctgattctcactttcaaaatatatgttttctgattgca

SEQ ID NO: 268468 - DNA, 201 bp, Homo sapiens
tgctattccttccccaaacattcagaaaacacttgggagatgcaaagatccatgtctaggtttgtttggcggttaaaataaaaccttgacattaattcctrcagtcatttcttttagtgtagtctgctttcccaaatacccaaaagctgttgggagaataaacttgaattccaaggtcttaatcattaggtcattttacat

SEQ ID NO: 268469 - DNA, 201 bp, Homo sapiens
ataaaaatgaacagttctctccaattcttcttcaagatctttggctagctttctataggtctccagctcttcagtggcacggctgatcttttcttccactytagaaagcttctcttcttcctctattcggtaattttcctccactgttaatttcctgtagagtttcatttcattttcttgatagaattcagtcattatttt

SEQ ID NO: 268470 - DNA, 201 bp, Homo sapiens
tgtaaagacttattttttagcccagaacattattttttgttatttactttcccacaatgtttagatgagcatttatgtgaatgactgaatagatttgcacygtgtcattatctaaacacgaaaacaggatcagtaacttttgttggatttgggcttactattgataaacactctagaatacacagttttaagcattgtcta

SEQ ID NO: 268471 - DNA, 201 bp, Homo sapiens
gcgggctatactaaggttcgacataccatcagccaaatacaccagtggtcattcacctcttaaactttccactcttgcactgatcatcacctccacagcawatatctcacaaaatcttttcttatccaagtgtaaagacttattttttagcccagaacattattttttgttatttactttcccacaatgtttagatgagca

SEQ ID NO: 268472 - DNA, 201 bp, Homo sapiens
tcaatgtagtacacagtttttgtttgattcagtgagctatctcatatccttcaaataaattcttcttttccttggtcgtattattcagagtttttctctgytatgtttcagaaacaatgaacactaactgatacacatgtcaaagtcttaaaaccacattaagtttaatcttaaagtggaaggtttaattaagggcgggct

SEQ ID NO: 268473 - DNA, 201 bp, Homo sapiens
  misc_feature (1)...(201): n = A,T,C or G
taccaacttactcatcttaaaatttagtttatattttgtcatagcctctcaccccaaaacttctgattatcctgaacaacaacaacaacaacaacaaaaanacaaagaaacaaacaaaaacaacttccagcctgtacttaagtctcttcacaatttaccctcagttgaccttacaggctataagttccaggtcaattggag

SEQ ID NO: 268474 - DNA, 201 bp, Homo sapiens; identical to SEQ ID NO: 52939

SEQ ID NO: 268475 - DNA, 201 bp, Homo sapiens
aatctatacaccttgatttagctcactcctctcctaaaagactgacattccctggaatggaggaagcttagagaccagaatttcaacctctttccatcttwaatccactttttagtttgttttttatttttctgagagactttcatgttcagatttttagttatccaaaaaactgaagaagaaacaacttcctaatttctc

SEQ ID NO: 268476 - DNA, 201 bp, Homo sapiens
gtggagcgggctgcggggggagctggggaacgcgggcacccacaggcctcacaggcccatgttgtcccccaccacctcccctggccctcttgttacacttyacatcctgaggcagcgctggtctgagcccggcccgccttagttctggcagttttcacatcacatattttgaagctttattttttggtgaatacactttta

SEQ ID NO: 268477 - DNA, 201 bp, Homo sapiens
tgaatacacttttaaaattgctgtcttcttcatggattaaacctttgatcattatataatctctggttttggtagttttctttgctttatctgatatgcayacagacactcttgctttcctttcattaatgtttgtgtaatatatcttttttcatcctgttaatttggcctgccctgtattggtaaaattcaagtgagttt

SEQ ID NO: 268478 - DNA, 201 bp, Homo sapiens
  misc_feature (1)...(201): n = A,T,C or G
agttttggacctgttaaatttgctagttctattggatgtccaagcgcagaagtcaagaatgtagttgaacatatgaggctagctttagaggtgaagtcctncctggtcatgtactgtggtgcttgtcagcatatgtgggatttaaaccatgagactggggtagaacaaccttaaagaattggggaggtgaaggggaaaagc

SEQ ID NO: 268479 - DNA, 201 bp, Homo sapiens
gtcagggtcttgatgtgattttctttatcattcagaacttgttctgcgtgtactttggagtcttcaaatgttattttctgtttattaagttcactcacttstcctttccatacttcagcttcttgctgaaaaagctgtttatggcttgtctgaagttgagaattttcattcaaagcatcttttattgctatagcccgtcgt

SEQ ID NO: 268480 - DNA, 201 bp, Homo sapiens
acatacaaggatgttttgggattcacataaaaatgttgtaaatcagctctgtgtttcaaaaaatcaggcttaaataagcactttttggaacatggacccarttggtcttagcctttaagatttatagagcttttgtttttctgtggttttggtgggttttgtaatttttgttgtatctcagaagagttctggggaagtagt

SEQ ID NO: 268481 - DNA, 201 bp, Homo sapiens
gcaaaagtggaaaacagaaaggtctgcatcatgcggcccgcaaaggagatgggcttggctggatgcaggaggttcaccagcatccggggcaccgtgttgcrggcgtaggcgatgtcgacgaccgccaggtgtgagaggaagaagtacatgggggcgtgcagtctggagtccagtgagatgagccccagtatggtcccgttc

SEQ ID NO: 268482 - DNA, 201 bp, Homo sapiens
gccgatccatgatgaaggacaggattgcatttattttctttagatgatctaccattgaacagtagagacagggtccctcacggtctgtatccaaacagaayccggatttttacagactgatcgaggcataatgctcagaactacatctctttagaggctcactttgcaaggaaaaaagaaatcattctgccctagaagggg

SEQ ID NO: 268483 - DNA, 201 bp, Homo sapiens
ttcgagaggagtggcatactcagggtcagtcctattatttaattttctattttgaaaattccaggtatgaggggttgtgtggcattaaagggaatgtttaygtttttagtacttttcccctgctgtcttgcattcttgaatttttatgagctttggcggaaaccaaaggcggagagattctaagtgggctcagactaggag

SEQ ID NO: 268484 - DNA, 201 bp, Homo sapiens
gaaagagctttactattaattggggtactatgtaatagttaaattaattattgcaagaaaaatctatgcttccaattctttgatcattgtcttaatatatrtatgtatatatacacccacacctgttaccaaaacataattgcttatctgtgtttgatatttttcttctaattgtttaagtctaaaataatttgatctgtt

SEQ ID NO: 268485 - DNA, 201 bp, Homo sapiens
cgaggcaggtggatcatttgaggtcaggagatcgaaaccagcctggccaacatggtgaaacccgtctctactaaaaatccaaaaaaaaaaaaaaaaaaaaatagccaggcgtggttttgggcacctgttattccagctacttgggaggctgaggcaggaaaattgcttgaacccggaaggcggaggttgcagtgagctgag

SEQ ID NO: 268486 - DNA, 201 bp, Homo sapiens
ctgcttttgataaaaatgaacagttctctccaattcttcttcaagatctttggctagctttctataggtctccagctcttcagtggcacggctgatctttycttccactctagaaagcttctcttcttcctctattcggtaattttcctccactgttaatttcctgtagagtttcatttcattttcttgatagaattcagt

SEQ ID NO: 268487 - DNA, 201 bp, Homo sapiens
ataacctgcttttgataaaaatgaacagttctctccaattcttcttcaagatctttggctagctttctataggtctccagctcttcagtggcacggctgakcttttcttccactctagaaagcttctcttcttcctctattcggtaattttcctccactgttaatttcctgtagagtttcatttcattttcttgatagaat

SEQ ID NO: 268488 - DNA, 201 bp, Homo sapiens
aacattctagggaagtgacaaaccatataaggcaatgggtgagccgcaattgtgggcgtaatttttttctctctctctttgaacagggagacacatcgccyctgcctcccactgtcccagactgtctgcgggctgatgtcagggttcctccttctgagagccaaaaatgttccttctatttagcagacaagaatatcaccc

SEQ ID NO: 268489 - DNA, 201 bp, Homo sapiens
tcctcttttctcgtaggaaataacctgcttttgataaaaatgaacagttctctccaattcttcttcaagatctttggctagctttctataggtctccagcycttcagtggcacggctgatcttttcttccactctagaaagcttctcttcttcctctattcggtaattttcctccactgttaatttcctgtagagtttcat

SEQ ID NO: 268490 - DNA, 201 bp, Homo sapiens
ttgccctggtggaggaaacatcatcctacggtcctgttccaccggagatgacagggacccagtgtcagaaggagccctgtgaggatcgattaacctgtcayagcttggttctcctctttcattggtaatctgatggtccaggggattccctgggctgcttgggcctcttcctcctccccctggaagcacaggtgagagtct

SEQ ID NO: 268491 - DNA, 201 bp, Homo sapiens
catggttcctggaggaggtggggggaaaggaggtcctcttctcatgaacgggccccttgtatccactggaaacaatggaccgctgactggagcaagaggtrgaggaataaggccagggccagttgcttcattttcagcagggagagatgaatcaggcacatttaaattaccaagatcatctttggcatcatttctactgga

SEQ ID NO: 268492 - DNA, 201 bp, Homo sapiens
tggatgtccagtagcaggctcctttgaaggcggaatcaatcctgaagggaactcgcttctaccttcagaatgtggggttggggtaaaatccaggtctcggrtgaaggtaaggaggtaaacccctcggtggatagatgtttctcattgcaaatggagcatgtggtggacctgggaaatcccttggtggaaaataacctcgag

SEQ ID NO: 268493 - DNA, 201 bp, Homo sapiens; identical to SEQ ID NO: 52953

SEQ ID NO: 268494 - DNA, 201 bp, Homo sapiens
gaaaaagaaaggaatacctggctttaggaggaattggtagaggcagtttttaaatttaagttttattattattattattattattattattattattattwcgagatagggtctcactctgtcaccaggctggagtgcagcagtggcacgatcatagctcactgcagcctcaaattcctgggctcaagctatcctcccatc

SEQ ID NO: 268495 - DNA, 201 bp, Homo sapiens
aacattatgggaggtatgggactggatcaaaagctaatgaggatattgtaaggggtattgtcctggtgtggagtggctgcagcacaacttgaagagatcartttctagaatttcatcccacatctgctgaaatcagtcatttaaaggtagggcaggagatagctccattttaaataaatgtctcagataattctcatgtcc

SEQ ID NO: 268496 - DNA, 201 bp, Homo sapiens
ttgtcaggtttcttgctgtggttctggatgtccagtagcaggctcctttgaaggcggaatcaatcctgaagggaactcgcttctaccttcagaatgtgggrttggggtaaaatccaggtctcggatgaaggtaaggaggtaaacccctcggtggatagatgtttctcattgcaaatggagcatgtggtggacctgggaaat

SEQ ID NO: 268497 - DNA, 201 bp, Homo sapiens
tgttgttgttgttgttgttgttttcagaaagaatctctcttgggaacctgccaaagctagtgtgattttcctaaaactcaagccacttccctgtgcaacargaaacgtcatttttattaacttgcctatgagattttcaacaatttcaccttcttagagatttgtaatttaaagattccgaaatgtataatgggcaaaaag

SEQ ID NO: 268498 - DNA, 201 bp, Homo sapiens
aaaaaaaaagaaaagaaaaaaaaaacgcgtgcacacgtatacataggtttcttttttattacgttaattttttaataaaggctaaaatttaaaaataaacrtgtcacatattaatatatccttttggtctttttttaaaaaaaatttggctcaggcctttcagggatgaatgtcacatgtcaatgtagtacacagtttttg

SEQ ID NO: 268499 - DNA, 201 bp, Homo sapiens
tacttttgaagaaagcaacaatattgtcaggtttcttgctgtggttctggatgtccagtagcaggctcctttgaaggcggaatcaatcctgaagggaactsgcttctaccttcagaatgtggggttggggtaaaatccaggtctcggatgaaggtaaggaggtaaacccctcggtggatagatgtttctcattgcaaatgg

SEQ ID NO: 268500 - DNA, 201 bp, Homo sapiens
ccgtgaaaagaaatcaggctgggtgctcgctttggcagaacatgtactaaaataggaatgatacagagaaggtcacctagtaaaataaaataaaataaaawaagaaatcaggctggaattttggcctgtcgctcatgctgtagggctaacagttttaaactgcaggtgaagtagccaaatgaaatttaagtttttgttgtt

SEQ ID NO: 268501 - DNA, 201 bp, Homo sapiens
aatttgagaaaagtgcaatcacttaagtaacagcagttacttaaactgaaaatgagatcagtcaaaattacttttgaagaaagcaacaatattgtcaggtktcttgctgtggttctggatgtccagtagcaggctcctttgaaggcggaatcaatcctgaagggaactcgcttctaccttcagaatgtggggttggggtaa

SEQ ID NO: 268502 - DNA, 201 bp, Homo sapiens
gtctgtgctgcagcaagtatcaagattttgatcttatgcttttcaggagaaacctcatggctggaagaaaactgtgacacagcccagcagtctcagtgccyagaagggtgagcatgactgatacagggatttttatcctcctttaacaaaggtgcacataagaatgtagttagttgagacgcagagaggaatttcccccaa

SEQ ID NO: 268503 - DNA, 201 bp, Homo sapiens
caataaggtgaggttttagtgctaggagaggccccaagggcaaggagtcataacagcagctcaaaatataaggaccaagcctacttgtgagaatcagagcrcctggatggggttgggatttcagagtgaaattggagccccgttatcaggagtccttaaagctaaaattaatgtcaagggtcatttgatgccaagttccaa

SEQ ID NO: 268504 - DNA, 201 bp, Homo sapiens
attttgagttgttttatattcttgttgattttcttttttttcctctttttaaaaacatgaaatgcttcacaaaattttgtgtaatctatattcaagaaccrttttaatcttgttggcatcattctgattttagaaagtgctgccaaagccaacactccttgctgattttctgtctagttctatcaattattgaaaaaggca

SEQ ID NO: 268505 - DNA, 201 bp, Homo sapiens
acacatgtttacctaggtaacaaaccttcacatgtacccccaaacctaaaataaaagtggaagaaagagagaaagaaaagacagacagacagacagacagaaagaaagaaagaaagaaaatatttggaaaaaaattgcgtctgtactgaacatgtacagacttttttttgtcactattccctaaacaatacaacaatgatt

SEQ ID NO: 268506 - DNA, 201 bp, Homo sapiens
gacacatgtttacctaggtaacaaaccttcacatgtacccccaaacctaaaataaaagtggaagaaagagagaaagaaaagacagacagacagacagacagaaagaaagaaagaaagaaaatatttggaaaaaaattgcgtctgtactgaacatgtacagacttttttttgtcactattccctaaacaatacaacaatgat

SEQ ID NO: 268507 - DNA, 201 bp, Homo sapiens
ttacattgaaaggtatatagtacctttcctaggtatgagtaatagatcgtgtgctattttaatttaaatttctattttactaatattttatcttacatctyttttgaaattatcattttagggcttgtatccagagtcacatggcatcattgacaataatatgtatgatgtaaatctcaacaagaatttttcactttcttc

SEQ ID NO: 268508 - DNA, 201 bp, Homo sapiens
tgacacatgtttacctaggtaacaaaccttcacatgtacccccaaacctaaaataaaagtggaagaaagagagaaagaaaagacagacagacagacagacagaaagaaagaaagaaagaaaatatttggaaaaaaattgcgtctgtactgaacatgtacagacttttttttgtcactattccctaaacaatacaacaatga

SEQ ID NO: 268509 - DNA, 201 bp, Homo sapiens
atgacacatgtttacctaggtaacaaaccttcacatgtacccccaaacctaaaataaaagtggaagaaagagagaaagaaaagacagacagacagacagamagaaagaaagaaagaaagaaaatatttggaaaaaaattgcgtctgtactgaacatgtacagacttttttttgtcactattccctaaacaatacaacaatg

SEQ ID NO: 268510 - DNA, 201 bp, Homo sapiens
cataaggattctcatctggtctcatactctcaggtagtgctgccacaactctgcgtagctcctccaggaccagccccaggtagggctgaggggtagcaccrggctcctccatagcgtcgaggctgctctggcggtcaccgcagtaacactggccacaacaagcggtggagaacacgcagccttgggtctggaacccgaatg

SEQ ID NO: 268511 - DNA, 201 bp, Homo sapiens
atctcataatgcctttaataaccatttgtcattataagtctacttaaccttaccctgctattatcatcactgtgaattttcctgagcattgacattttctkgcctttttgtatgctatttagcagttctgcatttgaagtgatcgttattagattgctgattttagcatccttatcttaacaatatagatgagaatgagga

SEQ ID NO: 268512 - DNA, 201 bp, Homo sapiens
caatgaccttaatctgggtttttgagaaattcatattgtatatttctaaatctaagctacttggaatttatttctaaaccttccatcaacattattttatrtgcatattagttgcttttatcttagttgttttcattttggagctgacacatccacagaaattagcttgcagtaatagtagcactaaatactggcttatat

SEQ ID NO: 268513 - DNA, 201 bp, Homo sapiens
aaatttgagcattaagagagtagaaatgtacttttgcatgatattaaagtgtgacggtaaaagcaaacaagcaatgaaaatgaccttaaattatatttgabcagaactcacaaaggcagttaggaaatccaggtgtctagagatgactgctgtgtaagaacctagataatcttcatatagaaaaggcaaacatttctacag

SEQ ID NO: 268514 - DNA, 201 bp, Homo sapiens
aacacaagcctccagctacttattttctagtgaaagtacatcatttttagtaataatgtgcatcatttgataattaggttaggtcccctttgtacaattawagcaaatttcaacagtttgtataatccattttcatcatcatcatctttattttacctaaaatgtgttagatcttactaatttggggaaacctgatgtttt

SEQ ID NO: 268515 - DNA, 201 bp, Homo sapiens
actacaaaaacaaaaagctatcatcaatgtggctgtttatttttgcttgtgaagcctattctggagaattacccaatcatcactggcaattattaaggcaraatttcatgttatttaaatgtacttgtctataatagaaaatagtgtcatatttcactgaagtggacattttaaacactttatgattttatttttagaaat

SEQ ID NO: 268516 - DNA, 201 bp, Homo sapiens
attgcttacttcccaaagacaatcactgttctgatttctatcatcatacattcctgttttagaattttatgtaaatggagttaaaccacaggctgtcttargtcggaaacctaataactttccaaattggaaagtactcaagtgcctatggacagtagaataagttctggtttattcattcactggaatattagatagcta

SEQ ID NO: 268517 - DNA, 201 bp, Homo sapiens
aacatgaccatattcatttgtttatttattgtctatggatgctttggggcctcaatggcagagtggaggtgtttcaacaaagaccatatagctttgcaaakcccaacatgtgtatcactggctcttccagaaaaaaatctatacaccttgatttagctcactcctctcctaaaagactgacattccctggaatggaggaag

SEQ ID NO: 268518 - DNA, 201 bp, Homo sapiens
ttgattaatgatatgaaacaatatgaaaagataatatgatgttatatgattaaatttctactaaatattgtgcccatattgcagaattatgctgatattgrttgtgtgccattgtttgtattctcctactttattggcacatgaggtgctatggaggtgggtagagacagaagtaaatacagcactgattatatttggttg

SEQ ID NO: 268519 - DNA, 201 bp, Homo sapiens
gtaatctaagcactttgggaggctgaggaaggaggttcgctggaacccaggcatttgaaaccagcctgggcagcatagagacctcatctcttttaaaaaawttttaaaatagtaattatatgaaaaaaaaattttaaagaaaaaaagtgctggtcttttttgttaacgttgaacatttaccagagtcagttgcacacagat

SEQ ID NO: 268520 - DNA, 201 bp, Homo sapiens
tagttagttgagacgcagagaggaatttcccccaattcatgtacatttcaaaacagaatagtccacaaaggattagatttcttgtggcttccaagttctartggacttttgtttgctttattttttcacaaagcccttttatattaatttattatattcatgtcttacaacgacgactttattttgtttttgtctttgaga

SEQ ID NO: 268521 - DNA, 201 bp, Homo sapiens
aacactatggagaatatttctcaacatagatctttgtatgtttctttagtataaagtctggaagtgaaatggctgaaatcaaaggatgtaaagattttttwaattaatttaagattttaaacatacaaaagtaggaatactaatttaataaatgtctatgtattcatcatcccactctatcaattcatgaccaatactgtt

SEQ ID NO: 268522 - DNA, 201 bp, Homo sapiens
tgtggaatattctgtaaatgccaaatagattcttttggttaatggcattttgagttgttttatattcttgttgattttcttttttttcctctttttaaaarcatgaaatgcttcacaaaattttgtgtaatctatattcaagaaccgttttaatcttgttggcatcattctgattttagaaagtgctgccaaagccaacac

SEQ ID NO: 268523 - DNA, 201 bp, Homo sapiens
ttgcccctgcgagtttagaggaactccatgagtttcctagagccatgctaggctgcaaaaatcaaaacacatcggagaatctttagttactctgtctgtgstgcagcaagtatcaagattttgatcttatgcttttcaggagaaacctcatggctggaagaaaactgtgacacagcccagcagtctcagtgcccagaaggg

SEQ ID NO: 268524 - DNA, 201 bp, Homo sapiens
tataatcaagttaacattaattaattcaatgtaaaccaaaatattgaggtctttttatcccaaaagtaaaagagagaagtgtaagtggaacaggaagttaracttcatctaaaaaaaaaagttaacattttgtgtcatgttaacatattcgattaacatatttgattaatgatatgaaacaatatgaaaagataatatgat

SEQ ID NO: 268525 - DNA, 201 bp, Homo sapiens
ctgctgttactgtgtggaatattctgtaaatgccaaatagattcttttggttaatggcattttgagttgttttatattcttgttgattttcttttttttcytctttttaaaaacatgaaatgcttcacaaaattttgtgtaatctatattcaagaaccgttttaatcttgttggcatcattctgattttagaaagtgctgc

SEQ ID NO: 268526 - DNA, 201 bp, Homo sapiens
ctgataaaacaggtctatgcagctaccaggacaatggaatctacgttgactttagcaacggaacaacctgttaagaagaacactcttaagaaatataaaakagcttgcattgtaagtacaattcttatttttagtctttctagttttgtgacaaatgttaaaagtatatgatttcccatttacatttctttgtgttgctat

SEQ ID NO: 268527 - DNA, 201 bp, Homo sapiens
ccacatgttcatttccgtgaaaaatatcacttggtactagatgatgtgaatggctatgattgaactggttacttagggtaataggttgacatcttgtttcrgcaattaaacaataaaaaagttgttctttattaagatatgaatccatttcttaaagaaatgggttccatagatttccatagcattaagcatgttggtaat

SEQ ID NO: 268528 - DNA, 201 bp, Homo sapiens
catttgcagtggttctcaaacgtcgaggtgcaataaaactctctgggaaagctggtgattcttgatcattctgatgccagtattccacagggcacaacttsagaaatgctgttctctaggtggaaaagacagcttacaatgtttaattccctaaataatctgggaaggtggtggtgggggggtgtccagtggttggaggag

SEQ ID NO: 268529 - DNA, 201 bp, Homo sapiens
taatcccccataggtaaagctttgcaacctggttatctcatctacttccatttgtaacacacacacacacacacacacacacacacacacacacacacacattcctttccaaatagaaaaaaaaatgtattaggccttttatgaatatgtttccttttattataacattgtcatggtgagttacatctttttgtaaatatt

SEQ ID NO: 268530 - DNA, 201 bp, Homo sapiens
taaatgtttattatgcatcaactgatataatgtaactttccttcttttgtttgttaacatggtggattattttgattgactttttgagatttaatcaggtytgtttttctggaaacaatcccccgctggacatgggtaaattttgaaaaatatactatagaactctatttatcaagtaagttatacatatctttatatata

SEQ ID NO: 268531 - DNA, 201 bp, Homo sapiens
ataatcccccataggtaaagctttgcaacctggttatctcatctacttccatttgtaacacacacacacacacacacacacacacacacacacacacacacattcctttccaaatagaaaaaaaaatgtattaggccttttatgaatatgtttccttttattataacattgtcatggtgagttacatctttttgtaaatat

SEQ ID NO: 268532 - DNA, 201 bp, Homo sapiens
catttcctccttaacaatgctaaatacagaattcacactttatttaaccgaggttgaggaataacaggctatggtaaatgaaatgctgtatcattacataygtttcaatggagttttactatggcttaagttcaacatcttgtttgtttcatttgcagtggttctcaaacgtcgaggtgcaataaaactctctgggaaagc

SEQ ID NO: 268533 - DNA, 201 bp, Homo sapiens
tatccgcatcattaaacaacacgtgattgtatagtgttagctttttgtagatgctttttatcaagtggatgaagtttcctctattcctgctttatagagarcttttatcatgaatggatatcgaaatgtgttaaatgtttattatgcatcaactgatataatgtaactttccttcttttgtttgttaacatggtggattat

SEQ ID NO: 268534 - DNA, 201 bp, Homo sapiens
aatgtttgtgtaatatatcttttttcatcctgttaatttggcctgccctgtattggtaaaattcaagtgagtttcttgtacacagcatacaagaaacatayaagaaagggtcatacttttaaatacactcttctattatctatctcttggtagaccattcataattaaatgaattattgatactttaatgcgtaagcctga

SEQ ID NO: 268535 - DNA, 201 bp, Homo sapiens
tttaaattttcccttttaataagaacaccagtcatacaggattaaggtctaccctaatgacctcattttacttgattatttacaagtaattttttttttttgaaacaaagtctcactttgttgcccaggccggattgcagtggcacaatcttggctcactgcaacctccacctcctgggttcaagcgattctcctgcctca

SEQ ID NO: 268536 - DNA, 201 bp, Homo sapiens
acccgtgaagtcctttctggatgttcacacaatgtcagaatcacttgaccgcacatttctcagaacgtatccgcatcattaaacaacacgtgattgtatartgttagctttttgtagatgctttttatcaagtggatgaagtttcctctattcctgctttatagagagcttttatcatgaatggatatcgaaatgtgttaa

SEQ ID NO: 268537 - DNA, 201 bp, Homo sapiens
aagtggacattttaaacactttatgattttatttttagaaatgtgggactacttccacagtgttcttcttataaaacatgccacagaaagaaatggagtamatgtggttagtggaccaatatttgattataattatgatggccattttgatgctccagatgaaattaccaagtaagtgatttgactttttgatttatcaat

SEQ ID NO: 268538 - DNA, 201 bp, Homo sapiens
caaatattcagaccccctcctaaatatgtatttgcttagatatatggaaaactgaacttcccttttttcagtgcctttgccttacattttggaagtcatccttggctcatgccttttcttcactctttatataaagctgaactgaaactaattgcactttaatttctcttagctctatttacatcttccttatgtctactg

SEQ ID NO: 268539 - DNA, 201 bp, Homo sapiens
gttagtttgtgttgcaggaggaacactgcattttgtccattttgtctattgtctaatttatgtgtgtggagttgtttgtaatattccttgatagtcctttkttatgtgtgtttatgtctgtagtgatatcgcctgtttcattatgatatttaaaatttgttttttccttttaatttatgcttgagtttgctaaattttatt

SEQ ID NO: 268540 - DNA, 201 bp, Homo sapiens
tgagcttctgtctcattctgtctctgaggaagccacagtgataaagagaatgagactaaggcaagaacagaaaatgcctttgtaactgaaaggatacatayattatctaaagtaatatcctgggaccacgtggctatcacagctaccaaaatatgtgaatttgttagagtttcatgaatatttatgctattccttccccaa

SEQ ID NO: 268541 - DNA, 201 bp, Homo sapiens
tgcttggctaattttttatattcttggtagagatggggtttcaccatgttggtcagcgttttcttgaactcctgactgcagatgatctgcctacctcagcmtcccaaagtactgagattacaggtgtgagccactgtgcctggcctttgtcattattttagagtgcactccttttacttattaaaaaaagttaactgctaa

SEQ ID NO: 268542 - DNA, 201 bp, Homo sapiens; identical to SEQ ID NO: 52938

SEQ ID NO: 268543 - DNA, 201 bp, Homo sapiens
agtctcttgactgtttctgccctcacctacaaaatgtaagtaacaacttcatgcatccataagaacgtaaaggggcaagctattcttaacctgggtagctracaactggggtagcaacaaccaggtttgtgttccgccttggatatttacttagtaaatatatgtggtttctctgaaccttacctggaaacgagaagtgag

SEQ ID NO: 268544 - DNA, 201 bp, Homo sapiens
tagtgaaagtacatcatttttagtaataatgtgcatcatttgataattaggttaggtcccctttgtacaattaaagcaaatttcaacagtttgtataatcyattttcatcatcatcatctttattttacctaaaatgtgttagatcttactaatttggggaaacctgatgttttgatatagtagaagtattaagtgctttt

SEQ ID NO: 268545 - DNA, 201 bp, Homo sapiens
agacgtagaacagggagaagagcccaaagaggagcatctgaatccttgggccaacgggaaatcccagtaggaggaactctgtgatggatgttatattgtcycccatatccctatgacagaggaaatcaagttaatgctcatggtttaggagaagtgtttaaaaacagattcattttaacttgttcggcactctttggtgaa

SEQ ID NO: 268546 - DNA, 201 bp, Homo sapiens
attaggttaggtcccctttgtacaattaaagcaaatttcaacagtttgtataatccattttcatcatcatcatctttattttacctaaaatgtgttagatyttactaatttggggaaacctgatgttttgatatagtagaagtattaagtgcttttttaaaagaacatgaatgttagcttttaattttggatcagcaactg

SEQ ID NO: 268547 - DNA, 201 bp, Homo sapiens
ctggagtgcagtggctattctcaggtgtagtcatagtacactatattctcaaagtctttgagctcaaacaatcctcctgcctcagcttcctgaagagctgrgactgactataggcacacaccactatacctggcttgaagatatgtttaataaacctaacctaccaaacatcatagcttagcctagcccacctgaaccatg

SEQ ID NO: 268548 - DNA, 201 bp, Homo sapiens
tgatccacccgcctcaaccttctaaagtgctgggactactggcatgagccaccaagcctggcctaagacattattattattattattattattattattaktattattattattttcagatggagtctcactctgtcacccaagctggagtgcaatggcccagtctcagctcacctccgcctcccggttcaagcgattctc

SEQ ID NO: 268549 - DNA, 201 bp, Homo sapiens
tctataaactttctggttctttctctttttcttctccggaaaaccccatcatgcatatattaatccacatgttggtgtcccacagttctcttaatctttcmtcacttctttccattcttttttctttttgctcctttgcctgaataatttttaaaggcctgagtttgcctctctttgttgaaattctcactttattcatgc

SEQ ID NO: 268550 - DNA, 201 bp, Homo sapiens
ctccagtgatccacccgcctcaaccttctaaagtgctgggactactggcatgagccaccaagcctggcctaagacattattattattattattattattaktattattattattattattttcagatggagtctcactctgtcacccaagctggagtgcaatggcccagtctcagctcacctccgcctcccggttcaagcg

SEQ ID NO: 268551 - DNA, 201 bp, Homo sapiens
aaatttccaaatgtttagggattttcatatctttcttatgctgatttccaattggattccctacaatgatttctggttttcatctgctctggatgattacsatctcttttaaatttgttgtggcgagttttagggcctaggacagctctatcttgccatgtgtttcgtcagcactcaaaaaaaatatgtgtattctgctgt

SEQ ID NO: 268552 - DNA, 201 bp, Homo sapiens
tctgctgttactgtgtggaatattctgtaaatgccaaatagattcttttggttaatggcattttgagttgttttatattcttgttgattttcttttttttyctctttttaaaaacatgaaatgcttcacaaaattttgtgtaatctatattcaagaaccgttttaatcttgttggcatcattctgattttagaaagtgctg

SEQ ID NO: 268553 - DNA, 201 bp, Homo sapiens
gtgtaagaacctagataatcttcatatagaaaaggcaaacatttctacagtgtggctgagtttactgatggtgctgggaactctgctgcccatctgagaamtgccaaggaaggatcttgcttcttcaagtgcttttgagaagggaaggtgttattaagtcatcacctccacagagtaccttccaattatcatgagagcttt

SEQ ID NO: 268554 - DNA, 201 bp, Homo sapiens
aagcgcccccgagcagcagggattataggcgtgcatcaccatgctgggctaattttttgtatttttagtagagatggggtttcaccatgttgaccaggctrgtctcaaactcctggcctgaagtgatccccccacctcagcctctcaaagtgcctggccgtttgtgatgtttttgatagatatttttagagattatctttc

SEQ ID NO: 268555 - DNA, 201 bp, Homo sapiens
gtaaatgaagttttgaactgaagtgtagacttccaccgagatgtgttgacttggagatgtatttaaatatccttcttgtttcttggtgtgattttacagtsatgtaattctcaactacattgcaatacatttctccagttagctcctcaaaagcattttttttgtgttgtttgtgaccttctgctatacttatgaatacat

SEQ ID NO: 268556 - DNA, 201 bp, Homo sapiens
ggaaagctactcaagaggagagatgatgcctaacaaatcatgtggcacgttccacttcagagctgaaatctcgtaaatgattaaactggggagatggagcrcttatagaagtgaactgagtgttctcttggtaacttttcttttatatttcctattctcctagcatgggaagcatgactcctcatgggttgaagaattgtt

SEQ ID NO: 268557 - DNA, 201 bp, Homo sapiens
tttgaacctgggaggcggaggttgcagtgagctctcatcactgtactccagcctgggtgacagtgtgagactctgtctcaaaaaaaaaaaaaaaaaaaaaaacccaaccagccaaccaaacaaacaaaccaaagtttataaaataactcttccattacttctttactacttccccttccttctatcattgtcattttcaac

SEQ ID NO: 268558 - DNA, 201 bp, Homo sapiens
ttgtccaccaagaacaagagtgagttttctagcttatttggggttcctgttgtcattgtgtgtgtgtgtgtgtgtgtgtgtgtgtgtgtgtgtgtgtgtgkagtttgataaattacttaaaagtttataaaggccagacacgatggctcatgcctgtaatcccagcactttgggaggccaaggcgggcagatcacctgagg

SEQ ID NO: 268559 - DNA, 201 bp, Homo sapiens
gaaccttttttatccagtgtcgtatgtttatgtgtatgacacttctgactacacaggaagcctcttgaaatatctgattaattttgatgttttgctcaatrttcagtaaaatatttttaggtaaaaaagtagtgtttctcacccattcagttcagttgaataatttttgcactcagtttaaatgctgaactcatttaagat

SEQ ID NO: 268560 - DNA, 201 bp, Homo sapiens
cttgtccaccaagaacaagagtgagttttctagcttatttggggttcctgttgtcattgtgtgtgtgtgtgtgtgtgtgtgtgtgtgtgtgtgtgtgtgtgtagtttgataaattacttaaaagtttataaaggccagacacgatggctcatgcctgtaatcccagcactttgggaggccaaggcgggcagatcacctgag

SEQ ID NO: 268561 - DNA, 201 bp, Homo sapiens
gtgacatatgtgttcagtcatttatgagttaatatttgtcaaccacttagagtagacccttgctggtagtaagtgctatgtgtgtttgttaaatacatacrtatctatttgtgtttactatttgtccggccctatgctaaagacttatctcctttaatgggtacagttctgtgaggtaggagggagcaaatctgttggctt

SEQ ID NO: 268562 - DNA, 201 bp, Homo sapiens
gattgattcgaccaattctctggggagagtttcccagtggccctcttccatcatcatatctggaatcagatgagtttccatagcttcttttttttttttttcgcatcttgctgaagcagagttttgaaaagcaaaaccacaaactcagctgttccccataagaaatctgttatcaaagataatctccatggagactgactc

SEQ ID NO: 268563 - DNA, 201 bp, Homo sapiens
atttatggattgaccattttctcaccgtatttcaggactttgcacagacttagctggcaaacatcctataacaggtgtgatttgagagtcttaaaaaaaaatcactatcttggttttcaggtgaatatttttgagaaactagcttgttcctaaagatgtgtttcccgatccccctcctgcttagaaagctttttttgacgt

SEQ ID NO: 268564 - DNA, 201 bp, Homo sapiens
gctgtctatgataaaatctgagcttccaagcaaaaattagaattttgaaaaacttgtatttgccatttgagtgtaacagcttcctgatccttacacaaaaytgatgaagatagcgaggaatgtggttttttttcatgttgtttaatgacatgcgttaacatttggaagaatgatagaacttagtgaaccaatattttccaa

SEQ ID NO: 268565 - DNA, 201 bp, Homo sapiens
tgtccagttgtctgcttcatagagcagacatttaccttcctcatccaccagccattggaggaggactggggccacgcaaatgattgattcgaccaattctytggggagagtttcccagtggccctcttccatcatcatatctggaatcagatgagtttccatagcttcttttttttttttttcgcatcttgctgaagcaga

SEQ ID NO: 268566 - DNA, 201 bp, Homo sapiens
ttgctgatgtttgtttctagaacatatatggacttgcaacaaattcaggtgtggtgagaaaaggttgaccagaagcctctgtgcctgttcagatgactgcmaggacaagggcgactgctgcatcaactacagttctgtgtgtcaaggtcaggtgctcgttgggctctgcagcagcctggtatcttccagcgtcttagcggg

SEQ ID NO: 268567 - DNA, 201 bp, Homo sapiens; identical to SEQ ID NO: 52971

SEQ ID NO: 268568 - DNA, 201 bp, Homo sapiens; identical to SEQ ID NO: 52972

SEQ ID NO: 268569 - DNA, 201 bp, Homo sapiens; identical to SEQ ID NO: 52973

SEQ ID NO: 268570 - DNA, 201 bp, Homo sapiens; identical to SEQ ID NO: 52975

SEQ ID NO: 268571 - DNA, 201 bp, Homo sapiens; identical to SEQ ID NO: 52976

SEQ ID NO: 268572 - DNA, 201 bp, Homo sapiens
tgagtgttctcttggtaacttttcttttatatttcctattctcctagcatgggaagcatgactcctcatgggttgaagaattgttaatgttacacagagcrcggatcacagatgttgagcacatcactggactcagcttctatcaacaaagaaaagagccagtttcagacattttaaagttgaaaacacatttgccaacct

SEQ ID NO: 268573 - DNA, 201 bp, Homo sapiens
gtactgaggacacagcagtgaacaaaatagtgagctcttctctgggcccaagagtagaatacaatgatccgtttgccatccctgatggtagtagtctttcyatatatcgttaaaattcatgaagatatgtctctccttaattgtttctatgataaactttcagaattacttgttcctatagaacacatttctcattatttt

SEQ ID NO: 268574 - DNA, 201 bp, Homo sapiens
acttcgttttgtagaaatgatatactattttaaaatagactacaacaaaactttgctatttgctatgatgttttatatcgaaataaattctttagtaaatratcataccacattttgaagaatttcaaagctgtaaattatttctcagtagaactgttacaccagtgttataaaatttaatccctatcaattgatgaatta

SEQ ID NO: 268575 - DNA, 201 bp, Homo sapiens
ttgtcaacacaattccttttagttgaaatgagggcaataacgtttgaatatgtttaatttggggctcttgttattaaagtttatgtttcgttgacatgctsatcttgaaaagacttcttaaatattttatttttgtaaaggacttgaccaaacacattacattttcccttgaccctgtacttgggaaagttttacaggttt

SEQ ID NO: 268576 - DNA, 201 bp, Homo sapiens
agatgggattgtaacattttttgagggaatagatttaagataaaagaaaaacaacttattttccaataggtagttaagtaaggaaacccaggttctgatcyttgctctgccacaaactagctgtggctttggaaaggtcactttactggctgagtctccattttctcatctgtgaaaagagatgactcaagacctcaagaa

SEQ ID NO: 268577 - DNA, 201 bp, Homo sapiens
attgagagaaaagtttcagcatctattattgggattgaaggattagaatattttagtaatctgggccaacatggaaatgctgtgtagtttaaagatctttmaggtcgtatcccaataatccaggtttgaaaaatttttaagaatttgtctattggcattataaaatttatatgagaagaagaaataattttaaaactattt

SEQ ID NO: 268578 - DNA, 201 bp, Homo sapiens
taagcacttcaagatcttttttctcaatagattgcttttcttaagatgctgaagtaaatcagtacaatagataaagaccacaaaaacagcattttgcgacrgtgacagtcctactgaagacaggagacagttaaaaccatcagaccaagaacagaggagtggatatttaataattctatgattacttctgggggttaacta

SEQ ID NO: 268579 - DNA, 201 bp, Homo sapiens
cagtgagccaagatcatgccactgcactccagcctgggcaacagtgtgacagcccatctctcaaaaaaaaaaaaaaaaaaaaaaagaaaagaaaatagatmaaaaaattttaaaaatgaaatggaatttttttggtagaataatatggattcatgcctgtttctgttttctcttttttctttttcctttcaataaacatac

SEQ ID NO: 268580 - DNA, 201 bp, Homo sapiens
atgctaattttgaatcatggtgttaatttatttcacacgtcaacatggtcccttgttcttttgaaactacactggcttctatcttgtttcagttatatggygctactttcatgacaccctactgcgaaagtatgctgaagaaagaaatggtgtcaatgtcgtcagtggtcctgtgtttgactttgattatgatggacgttg

SEQ ID NO: 268581 - DNA, 201 bp, Homo sapiens
catttgtctggaagactgttgagcataaaaagatgcagttctatcttgtcttggacattttccacaagctaatgtttttcagtttctcaactgtccattcrttactgaggttgatctgtttcagtttgttctcactgacctctgataggaatatggagaagcgtctggaataaaaaggatcatactgattagccagatgaa

SEQ ID NO: 268582 - DNA, 201 bp, Homo sapiens
aagcagagttttgaaaagcaaaaccacaaactcagctgttccccataagaaatctgttatcaaagataatctccatggagactgactccagctgtccagcrcttgtccatttgcgatgtaaaccatcttgccccccttccctgcttcggagcgactggtcatagtttaagagattactacttttagaattttggtgtggtt

SEQ ID NO: 268583 - DNA, 201 bp, Homo sapiens
gccctgagtagatgctcctattagcagcagttacaaatgggtttttaaaggaaaaaggaagaggcagttcctaagttgtttatcaagcattcatgttacamtaacgagctattggttggctatacattgttctttgtatcacacattccaggaacatgaagatagtgggtgaggcagctgtcaggaacaaaatgcttttaa

SEQ ID NO: 268584 - DNA, 201 bp, Homo sapiens
tttttgttcttagtgacaagttctgatttacttttggaaaaatcattttataatagctttagtggcacaaacaaatcaacgggaccctgaaaactataatrgctttagtgacactaacaaatcaaagggagcctgaaaatagaagagcacactgtctttttgttgttgttgttgttaattgaccacttcgtaacttttttt

SEQ ID NO: 268585 - DNA, 201 bp, Homo sapiens
ttggggggctgaggagggcagatcacgaggtcaggagttcgagaccatcctggctaacatggtgaaaccctgtctctactaaaaatacaaaaaattagccrggcgtggtgggtcacacctgtaatcccagcactttgagggggctgcagcggatggagcacctgaggtcaggagctcaagaccagccttgccaacatggtg

SEQ ID NO: 268586 - DNA, 201 bp, Homo sapiens
gatggttggacaggtggatggatagttaggtggatgaatggatatgtgggttaagagatggatggataggtagatgttctgtaacttgtctttccctttawcaatatgacactatatcatgggtgtcattacagggtgatccctaaaggtctgtctaattcctttcagtggctacaatgtaatgacttaaatgaactcttt

SEQ ID NO: 268587 - DNA, 201 bp, Homo sapiens
gtttgttcccctccagttaactatgaaggcattgcccgaaatctttctgtgagtatctttattttccattatctagttatttttacttttgtataatatayattgagagaaaagtttcagcatctattattgggattgaaggattagaatattttagtaatctgggccaacatggaaatgctgtgtagtttaaagatcttt

SEQ ID NO: 268588 - DNA, 201 bp, Homo sapiens
atatggacttgcaacaaattcaggtgtggtgagaaaaggttgaccagaagcctctgtgcctgttcagatgactgcaaggacaagggcgactgctgcatcarctacagttctgtgtgtcaaggtcaggtgctcgttgggctctgcagcagcctggtatcttccagcgtcttagcggggctttacataggtgttatcttttat

SEQ ID NO: 268589 - DNA, 201 bp, Homo sapiens
ctctactaaaaatacaaaaaaattagccgggcctggtggtgtgtgcctataatcccagctactcaggaggctgaggcaagagaatcgcttgaacccaggakggggaggtttcagtgagccgagatcgcaccactgtactccagcctgggcacagagcgggactctgtctcaaaaaaaaaaaaaagagaaaaagaaaatgat

SEQ ID NO: 268590 - DNA, 201 bp, Homo sapiens
accgcgccactgcactccagcctggtgacagagtgagactctgtctcaaaaaaaacaaagaagagtttgtgtactaagcatgggggattcaaagattaatmgtatatgatctcttggctttttaagatttagtagagtatacaactaattgtacttggggtggggcaagaactctgattagaggtgtgtaaacaaagcctg

SEQ ID NO: 268591 - DNA, 201 bp, Homo sapiens
catggaagtgtcctaggacttacttccacaagtaggactattatggaccttttttatccattaattggggtcttttgcatctattgaattggaaagaattyttacttcatatcttttgatggaacactgtgagacattaacatacaaatgttaccaaatagacctggtgcggtgactcatacctattatctcagcactttg

SEQ ID NO: 268592 - DNA, 201 bp, Homo sapiens
ggaggcagagttgaaaaggcaaggtaaggtatttcctgtcaagttttaaatttactgagtaaactttcagtgggaagtctaacagttatccagtgttatasaagttccctaccacctaccatgtatcactagatgctgaaaaatttctgagccatggccgttttggggtagccacatggccattgtccatagctattctcg

SEQ ID NO: 268593 - DNA, 201 bp, Homo sapiens
taacaagcacctcaagttattcagatgtaggtggttgatttactctacttctagcaacaatgggctaaatttataggcaaaagccacaccattagtacataatagactatgatggtaactggaaggacttttatctacagatttttatcacggactaatagctaatgccatcccattcatttgctaaatgttatatcctat

SEQ ID NO: 268594 - DNA, 201 bp, Homo sapiens
ttaacaagcacctcaagttattcagatgtaggtggttgatttactctacttctagcaacaatgggctaaatttataggcaaaagccacaccattagtacataatagactatgatggtaactggaaggacttttatctacagatttttatcacggactaatagctaatgccatcccattcatttgctaaatgttatatccta

SEQ ID NO: 268595 - DNA, 201 bp, Homo sapiens
ttctttactgctcttttaccctaaggagttagttgctgaagcaaccctgtaggttactaggtgacagttaccatccctgggcaaccagaaacctgtcagtwtgtgctcttaaggttctaaaattgcagacattggttgtttcaaagccacaatgatatttttttaaacttctagatatatttttctttccatcaattgcag

SEQ ID NO: 268596 - DNA, 201 bp, Homo sapiens
tgtcctctctttccttcctccagttccacctggcaacatcacgccatcatttcccccccattcagagccatgccaaaagcttgctctaggaaactctttckgatctccctctccctaaccaccccaacctttctccttctttaaacaactgtagaactttgcaggcggtttgtagggcctaccaaatatgggccactgatg

SEQ ID NO: 268597 - DNA, 201 bp, Homo sapiens
cactaaatatagatgttttactatgttttattttcttatacatttataattgacagtaaaacagtttttgttgttgttttggcttgtttttttttttttttttaattttttttgagcatcttgctctgtcgcccaggctggagtgcagtggtgcgatctgtgctcactgcaacctccgcctcccgggttcaagcgattctc

SEQ ID NO: 268598 - DNA, 201 bp, Homo sapiens
agtatgtatggtttgatagcaccctctgcatagcatgtgctgtaaaaatacttaataatcaaattagaatttaggagtgggggtaggtaaacatatgtttwaattctagggggcgcatgtagatcttttgtgatatatcttttctctttctagtttttgcattttccactctatttttaattccttggagctgtgacttga

SEQ ID NO: 268599 - DNA, 201 bp, Homo sapiens
gtttttttttttttttttttttttttttttccttgagacagagtttcactgtgtcgcccaggctggagtgcagtggtgcgatcttggctcactgcaacctytgcctcagcctcccaagtagctgggattacaggagcctaccactgcacctggctaatttttgtatttttggtagagacggggtttcaccatcttggccag

SEQ ID NO: 268600 - DNA, 201 bp, Homo sapiens
gaagagcacactgtctttttgttgttgttgttgttaattgaccacttcgtaactttttttattcctgctagattttgagtccgtagatgtgttcactccargatgataaccactagctacatgtggctatttaaattaaaatttcatctaattaaactttaatgaagcaaaaagtttatttcctcaatcactcttgccaca

SEQ ID NO: 268601 - DNA, 201 bp, Homo sapiens
tgaggggacaaattcatcaagctacttttccccaaaggtaaacattgcagctttttgcactgaaacagcccatctggtagcatctcactgttgttgttggytacagcacagtactgcaaattactcagatactggatttcttctggaatgaaggtcaagtggttatagcttagattcaaataatgtagtttgctgcatagg

SEQ ID NO: 268602 - DNA, 201 bp, Homo sapiens
ttacagcacagtactgcaaattactcagatactggatttcttctggaatgaaggtcaagtggttatagcttagattcaaataatgtagtttgctgcatagsaaaagctgctagggcagattctcaatattaataggaccccaaaagagctgctctaggttagataatgccccagtttatccaggaatgtaagtaatgttat

SEQ ID NO: 268603 - DNA, 201 bp, Homo sapiens
taatattgaatcttttagtggaaaacataaccctttctttacaagaagattgtaacttaggacacttattattacactggataatttaccagtatgtttaygtgatggcccactaacctgcttttatgatttctgttgattgaataaaactagttttgtatggaccgttaagactatatacactggttctacagagtctct

SEQ ID NO: 268604 - DNA, 201 bp, Homo sapiens
acttttgatttaaataagcagtagcaacagcagccaaaactaaacctcaaccaaataatttcaacagaagagcctttttttaaggaaaattttcatgtacsctaaactgtcttttaaatccaaggaatactgggaatgttagacttagtgaatttcaaatctttctttttcttctaaatattgcttataatttttcagttg

SEQ ID NO: 268605 - DNA, 201 bp, Homo sapiens
gtacaatagataaagaccacaaaaacagcattttgcgacagtgacagtcctactgaagacaggagacagttaaaaccatcagaccaagaacagaggagtgsatatttaataattctatgattacttctgggggttaactatctgtgaatctaaatagaagttccagtggctggaggctgtatctgaggagggaccctttag

SEQ ID NO: 268606 - DNA, 201 bp, Homo sapiens
aattgtttagaaagattcgagggcattttgtaaggtgatactattatgatgtcttgtccaggtattattattatttttttttcaaatttcttgacagaacytgactctatatgagagagaactaagacaccaaaataccaaggattttgatgagtggatagaaggggagggttgtaaattttggctgaaaatattaagaat

SEQ ID NO: 268607 - DNA, 201 bp, Homo sapiens
atgtttgtttctagaacatatatggacttgcaacaaattcaggtgtggtgagaaaaggttgaccagaagcctctgtgcctgttcagatgactgcaaggacmagggcgactgctgcatcaactacagttctgtgtgtcaaggtcaggtgctcgttgggctctgcagcagcctggtatcttccagcgtcttagcggggcttta

SEQ ID NO: 268608 - DNA, 201 bp, Homo sapiens
ttctaattattgctctcaatctggcagagtatgttgaggtattgtgattactagcttcttatatttaattatttgtttgaatttgatttttatatgtattmaaagcatgctctactgaaatattcatcaaaaggaagatagttatttctttcttaaaatgaatattggcatgttttacagaaaaagaagagtcatccgtaa

SEQ ID NO: 268609 - DNA, 201 bp, Homo sapiens
tttttttttttttttccttgagacagagtttcactgtgtcgcccaggctggagtgcagtggtgcgatcttggctcactgcaacctctgcctcagcctcccragtagctgggattacaggagcctaccactgcacctggctaatttttgtatttttggtagagacggggtttcaccatcttggccaggctggtctttaactc

SEQ ID NO: 268610 - DNA, 201 bp, Homo sapiens
aaccatgtgtattttaaaccaatggttaccatttaaatgcttgcttaccacctagtctttccatagtagttttcctgtccatctagttcttctactcatawactcatatccaatttgtcctgcccctttcagccattccacccatgccttaattctcttatccccttttgtattctgttttccccacctttccctctccca

SEQ ID NO: 268611 - DNA, 201 bp, Homo sapiens
taggtaaacatatgttttaattctagggggcgcatgtagatcttttgtgatatatcttttctctttctagtttttgcattttccactctatttttaattcyttggagctgtgacttgacttgggtgcaggtgtggtgaagtctagttagttgacttgggtacgggtgtggagaagtctagttcagttcttgagcatcctga

SEQ ID NO: 268612 - DNA, 201 bp, Homo sapiens
gatcacacagaccttagtggaaaatcttcactggacctgtgccaagaagggggtacatcttcattggatatgtcttgtctttgcttctttaaacatttttktttctttttcattacccaggtttgaaacgcctcctaccctcttattttctttggatggattcagggcagaatatttacacacttggggtggacttcttcc

SEQ ID NO: 268613 - DNA, 201 bp, Homo sapiens
tcatgtaacccttcggtaagtatcgtcaagaagtttggtccagtatgtatggtttgatagcaccctctgcatagcatgtgctgtaaaaatacttaataatyaaattagaatttaggagtgggggtaggtaaacatatgttttaattctagggggcgcatgtagatcttttgtgatatatcttttctctttctagtttttgc

SEQ ID NO: 268614 - DNA, 201 bp, Homo sapiens
gtcttagggcctccccatgtggtctctgtgcacggaatggttgggattcctcatagcatggtggcctccgtgtaagggtaactgcttacatggaggctgaaggctttaagagcaagtattccagtgatgggtctacataagtttaaaataattggatagtattttatgttgtttggatttaccaaattatatttgctccat

SEQ ID NO: 268615 - DNA, 201 bp, Homo sapiens
agtcttagggcctccccatgtggtctctgtgcacggaatggttgggattcctcatagcatggtggcctccgtgtaagggtaactgcttacatggaggctgaaggctttaagagcaagtattccagtgatgggtctacataagtttaaaataattggatagtattttatgttgtttggatttaccaaattatatttgctcca

SEQ ID NO: 268616 - DNA, 201 bp, Homo sapiens
tttttttgtttttctttccttaaacttattataattccatgtagcttcagttatcggtttctttttgatgatttttttctgtgaatgtatttaacattaartaaacacaacttgcatataatctgttttatcttttttagggattgtatccagaatctcatggcataatcgacaataaaatgtatgatcccaaaatgaatg

SEQ ID NO: 268617 - DNA, 201 bp, Homo sapiens
cagtcttagggcctccccatgtggtctctgtgcacggaatggttgggattcctcatagcatggtggcctccgtgtaagggtaactgcttacatggaggctgaaggctttaagagcaagtattccagtgatgggtctacataagtttaaaataattggatagtattttatgttgtttggatttaccaaattatatttgctcc

SEQ ID NO: 268618 - DNA, 201 bp, Homo sapiens
tgcttctaactatgtcatatctttatcatcagcctatggcatcattccagagttgttgttgcctttattagatttataaactctgacattaggacttcacygcaaattattttttttttttgtatttccccacagaatctaaatacattgcatcttgcagatactcaaacctttgtttactgacagagggagaggtccctt

SEQ ID NO: 268619 - DNA, 201 bp, Homo sapiens
ttaggtagatttcatggagctttgagtattcaggcagaatttgtttattgaagtttgcttaaggtaaataggcagagaaggagcttactgttatgctgagracccctaaaatgccagaatgaggaagagtttactctgggtcactaatacccacattagtcctgtggttgtcctgtgtactgattccaaaagtacatgggt

SEQ ID NO: 268620 - DNA, 201 bp, Homo sapiens
tcttctaaacctccaaggagaaacgaactctaatcttaccatccttacagcctagtttatgaagttagcatggcctttcacttgaagatctttttactgtygttgtcctggaattttgcagtgatgtgaatcggtatgagccttcttctatgatttattattttggatacttgatattaggactctttgatgtgaagtttt

SEQ ID NO: 268621 - DNA, 201 bp, Homo sapiens
aatatactgttttctgttactattatctatcttgccttatttcttattttgaacagtatttgaataaatgacaattcaagaactcatgaaagacaccaatytttagattcaggtagcttattgaatcttaagtagaatagataaaataaatatatgttgacaacagaataacattgtagaacacaaagttgaaaataaaaa

SEQ ID NO: 268622 - DNA, 201 bp, Homo sapiens
acctttaacttcagagagaaatgacctgtgaaagcacttggtgagatcttagtaaagaagtgatttgcccactgaggcagaagttataggtgctggttaarttttatctttttctttgaaaatgtttggtacttattgaaacaaaaatgaatgagcatgacagaagaggagaataattgccctagaaatatcagctgtctg

SEQ ID NO: 268623 - DNA, 201 bp, Homo sapiens
gtggctggaggctgtatctgaggagggaccctttagccttttaaagagtgattctgctgtgcagttgaggtgttttctgtcactctccttattgatgaaakgcttgtgtctcaagatacaatgacggtctacaagtcatggagtgaaggtgaacatgaaagctcaatgaaaccattactttatactatgagatggatgttt

SEQ ID NO: 268624 - DNA, 201 bp, Homo sapiens
gccataaaaaatgatgagttcatgtcctttgtagggacatggatgaaattggaaatcatcattctcagtaaactatcgcaagaacaaaaaaccaaacaccrcatattctcactcataggtgggaattgaacaatgagatcacatggacacaggaaggggaatatcacactctggggactgttgtggggtggggtgaggggg

SEQ ID NO: 268625 - DNA, 201 bp, Homo sapiens
tttctgtgaccctttgacgtgtgtgtgtttgtaagtgtttagcacttccttactttctggccctacaggatgttccaggcttttaggttctcttgacttgyttttttttttccttacagatttcttaatattatataaccataaaactagtgtgtataatcaaaagtcagtttctccaccctgcaaattaggagtggactt

SEQ ID NO: 268626 - DNA, 201 bp, Homo sapiens
gaaattgctatttagctactgaactgaaagtgcaaactcgtattcttctttcccttccctacttcaatacctttttcccccaaccccgccccccccccaaraacttccccaaataatgggcttccaaatggaaaaggccccaaaagcatcctgacaattgtcgtcaaagagctctgggatatgtcttctagaaaggagctg

SEQ ID NO: 268627 - DNA, 201 bp, Homo sapiens
tggcagttaatttctgtgaccctttgacgtgtgtgtgtttgtaagtgtttagcacttccttactttctggccctacaggatgttccaggcttttaggttcycttgacttgtttttttttttccttacagatttcttaatattatataaccataaaactagtgtgtataatcaaaagtcagtttctccaccctgcaaattag

SEQ ID NO: 268628 - DNA, 201 bp, Homo sapiens
gttgaaattgctatttagctactgaactgaaagtgcaaactcgtattcttctttcccttccctacttcaatacctttttcccccaaccccgccccccccccaaaaacttccccaaataatgggcttccaaatggaaaaggccccaaaagcatcctgacaattgtcgtcaaagagctctgggatatgtcttctagaaaggag

SEQ ID NO: 268629 - DNA, 201 bp, Homo sapiens
tgggaggtggaggttgcagtgagccaagatcatgccactgcactccagcctgggcaacagtgtgacagcccatctctcaaaaaaaaaaaaaaaaaaaaaaagaaaagaaaatagatcaaaaaattttaaaaatgaaatggaatttttttggtagaataatatggattcatgcctgtttctgttttctcttttttctttttc

SEQ ID NO: 268630 - DNA, 201 bp, Homo sapiens
ttcagtatggagtcattaatgtctattttatactttgaattataacccagtactctgtttttcatgtttttgcttaacttgttccagccatggccacttgkcagttaatttctgtgaccctttgacgtgtgtgtgtttgtaagtgtttagcacttccttactttctggccctacaggatgttccaggcttttaggttctct

SEQ ID NO: 268631 - DNA, 201 bp, Homo sapiens
acagatggtaaagtgccattcttaactcatcatttcaagagtatctgctattaatgctattaataggtcttgtcattgatgatgttaaccttgactacccrgctgaggtagtctttttcaggtttctttgctgtaaagatactcttttttgtccctttccatactgtacctttggtagagagttacattccacctccttga

SEQ ID NO: 268632 - DNA, 201 bp, Homo sapiens
aggtagatacattctgatttctcctttcctcccaccctccaatgttctctttcctgttggcctctcctggtctgatgcttggagtctgggagtctgggaartgtagtagtcaaagttacttctctgagttggcggatcaaaagaaaaggcagtaacacaacttgggtttcttgggaaacagactattagatggaaatgagc

SEQ ID NO: 268633 - DNA, 201 bp, Homo sapiens
cttcaatacctttttcccccaaccccgccccccccccaaaaacttccccaaataatgggcttccaaatggaaaaggccccaaaagcatcctgacaattgtsgtcaaagagctctgggatatgtcttctagaaaggagctgcaattatagaattccttttgttttcagattaaacctcagcacacttttcataaagctgcag

SEQ ID NO: 268634 - DNA, 201 bp, Homo sapiens
agctgggaccctgggcagatgcagccactgcaggggtcccacccggagcagggaggacaaggtagatacattctgatttctcctttcctcccaccctccartgttctctttcctgttggcctctcctggtctgatgcttggagtctgggagtctgggaaatgtagtagtcaaagttacttctctgagttggcggatcaaaa

SEQ ID NO: 268635 - DNA, 201 bp, Homo sapiens
caccattaataaaactgctttcctccctttcctatcttatgagctgaactaaactttacaattcttttctaaagtaatttaatactacttttatttaacgrcatatctttcttgatagttgctgcaaaagagaccaactattttcaggattgggggacaatttttcttttctttttttaaaccaactgaagaaagatctaa

SEQ ID NO: 268636 - DNA, 201 bp, Homo sapiens
gattttcctgggtggaagccaaaattagtgcactttattagtgtgaagtcaacaatcagctgtttctgggagcttccaaagtaggtatacttttgggaaawtgtgcttttcttcttagtttgagtttccttcttggcttattttgaaatgtagtagaatagaaaaatagagagttttgatagaaagtgattttgggatgtg

SEQ ID NO: 268637 - DNA, 201 bp, Homo sapiens
atcccaaaatgaatgcttccttttcacttaaaagtaaagagaaatttaatcctgagtggtacaaaggagaaccagtgagttctttgtttttctactaaaakagttaattattctcatctatttcaatcagagtaaaataaccagattctctagagcttttaataactgatttcatttagtgtgtctgtggccattcttttg

SEQ ID NO: 268638 - DNA, 201 bp, Homo sapiens
acgttgcaaaccaatggagctgtttctcgtaacagacagcgttgatgtaggagtactgctgtcagtggaggtcgttctggattccgagtgggatcggaaastgatgtcccgggattagaggatgtgtttatgctggctttcaggatgttccaaggcatggtgcaatgattgtcaaattccactttgtaagaagacagcaca

SEQ ID NO: 268639 - DNA, 201 bp, Homo sapiens
tatgtaaagttcagtaataccttttccatttttatgccataatttacttctttcaaaagacaaatataagataaaaattaattcaagagcacagatatatrcattctatcgaaatgaatacaatgtgatttataaatgagaacaaattaccaatgaacagtatttcagaagttgaaaaggtgacactaaatgttaaataca

SEQ ID NO: 268640 - DNA, 201 bp, Homo sapiens
caggctgcaaagaacagtgtgtgcaagagcaccaggtaggggaagaacgttgcaaaccaatggagctgtttctcgtaacagacagcgttgatgtaggagtmctgctgtcagtggaggtcgttctggattccgagtgggatcggaaactgatgtcccgggattagaggatgtgtttatgctggctttcaggatgttccaagg

SEQ ID NO: 268641 - DNA, 201 bp, Homo sapiens
agagggaattcccagcattacctcattcatctgtgagaacacagagcagtccctatttagacacacacatttgtctactgctccagcatggccagcccccyacttcttgatggtttctttctgctatgaatatgcatgtccagttgtctgcttcatagagcagacatttaccttcctcatccaccagccattggaggagga

SEQ ID NO: 268642 - DNA, 201 bp, Homo sapiens
atttatattccattatgaaagtttaccattgatagacagctttctaatgtacttttcataagtaggattttgagacttttattttagtatcctcaattcartaggtaatctttgaaactatttctatgcatactttagacattctcagtccccaagaatttccagctttttggtacatgtttgttttctgttttattcatt

SEQ ID NO: 268643 - DNA, 201 bp, Homo sapiens
taggattttgagacttttattttagtatcctcaattcaataggtaatctttgaaactatttctatgcatactttagacattctcagtccccaagaatttcyagctttttggtacatgtttgttttctgttttattcattcctcagctccatctctattgcttatgtctctttttcatggttaaattactagtttttctaaa

SEQ ID NO: 268644 - DNA, 201 bp, Homo sapiens
gaaacaaaaattgtatatagaatcatttctcagttatatatgtatatgggtttgagtgtgtaaatgcatttaaaacaataataaaaaaaatagggccaggstgggtggctcacgcctgtaatcccagcattctggaaggccgaggtgggtggattgcttgagctcaggagttcaagaccagccgtggcaacatgatgaaac

SEQ ID NO: 268645 - DNA, 201 bp, Homo sapiens
tgattttacagtcatgtaattctcaactacattgcaatacatttctccagttagctcctcaaaagcattttttttgtgttgtttgtgaccttctgctatayttatgaatacatatatctgtgtatctgtgtatgtgtaaagggcttgcgtatgggtggtggtcactgaagactactttcatgtttcagtgaaagagttctt

SEQ ID NO: 268646 - DNA, 201 bp, Homo sapiens
taaacaatttgagaatattgtgaaggtggaatatatatatcaagttggaagaatatatcaaggttcttaggaagataactttgttaggataaataactttsttgtttaaaaagaaaatgcgtttgtcagagaagtaggtaaaggtagaggcttacatatgcttgctttttcactgatccagaatctctagggaatggcttt

SEQ ID NO: 268647 - DNA, 201 bp, Homo sapiens
aaaaaaaaaaaaaaaaaaaaagaaaagaaaatagatcaaaaaattttaaaaatgaaatggaatttttttggtagaataatatggattcatgcctgtttctsttttctcttttttctttttcctttcaataaacatactgtttgagaatagttctagatttacagaaaagctgtgaagcttgtgcagagttccatatactcc

SEQ ID NO: 268648 - DNA, 201 bp, Homo sapiens
gaaagtatcagacttatgttctgagaaggataatatcttacatttacccagcactttaacattttcaaaataaacttacaataattatttaatttgatccctgcatcactgtgtaaggtgggcaggatgaggtttatattgcatgtcatagatgaaaaaaaaatgttatcattcattctgttctgattgtcaaaccaagaa

SEQ ID NO: 268649 - DNA, 201 bp, Homo sapiens
tgtgtgtatttgtgaaaagatttttgccttactttattaccccatctgtattttctaaagtagtatttgaacctagtgtacacctaacttagttgtattcrttgatgtttactttgaattatataatgattagaaacatctgacttatcgttcaattttttcagttaaaagttgcaaaggtcgctgtttcgagagaacatt

SEQ ID NO: 268650 - DNA, 201 bp, Homo sapiens
cccacctcggcctcccaaagtgctgggattacaagtatgagccaccgtgcccagccggtttttgttttaagagcaattggaggccgggtgcagtggctcaygcctgtaatcccagcactttgggaggctgaggccggcagatcacttgagccaagagttcaagaccagcctgggcaacatggtgaaaccccatgtctacca

SEQ ID NO: 268651 - DNA, 201 bp, Homo sapiens
ttactaatcagtgagacaaccaaataaaaagatagggatatgtctgtttatatataatttctatgttacaaatatataatacacacatatatttatataaratttcttgaactttgatttttaaaatttttcaatactgtcttcaaacaccaaacacttaaaaaaatttttgactttgtaattgatcagtctacaccattt

SEQ ID NO: 268652 - DNA, 201 bp, Homo sapiens
tacaaaaaaaattagcagggcatggtagtacatgcctgtagtgccaaccacttgggaggctgaggcaggagaatcgcttgaacctgggaggcggaggttgyagtgagccgagattgcaccattacactccagcctaggtgacagagcaagactctgtctcaaaaaaaaaaaagggatgttgtaagttaagcatgatgctat

SEQ ID NO: 268653 - DNA, 201 bp, Homo sapiens
gatagcaccctctgcatagcatgtgctgtaaaaatacttaataatcaaattagaatttaggagtgggggtaggtaaacatatgttttaattctagggggcrcatgtagatcttttgtgatatatcttttctctttctagtttttgcattttccactctatttttaattccttggagctgtgacttgacttgggtgcaggtg

SEQ ID NO: 268654 - DNA, 201 bp, Homo sapiens
cagagcaagactctgtctcaaaaaaaaaaaagggatgttgtaagttaagcatgatgctatgtagcaaaattgatgggtgtgcagacatgacttaaccctcyccttgcatacccttaaggtcttgtttataacttggtgtcttattgccacagagacgttttcgcggtcttatttctattgtaacattaatgctggtcaatt

SEQ ID NO: 268655 - DNA, 201 bp, Homo sapiens
attggccaactatattagctgaaaaaaataattttaaaactttttattaaagaaacttttaaacatacacatggggagagagagtatgtaatgaacattayacccatcacccagcttcataattatgattatgtgcacacggccaataatattttatctataaccactcattcccctgccaccaccctctcatgttatttt

SEQ ID NO: 268656 - DNA, 201 bp, Homo sapiens
ctctgtgtcccttatggtatttgtttcacatgttctaataaaatacataaaggattcctaggaacccaagactgttgtttttactattaggcagaggatartacctgacactcaatgtcagcttttaattgcttgaatgaatgtactgcattttttgttagactgagccacactttgatttggaaaaggggaagatgggaa

SEQ ID NO: 268657 - DNA, 201 bp, Homo sapiens
ggctattggccaactatattagctgaaaaaaataattttaaaactttttattaaagaaacttttaaacatacacatggggagagagagtatgtaatgaacrttatacccatcacccagcttcataattatgattatgtgcacacggccaataatattttatctataaccactcattcccctgccaccaccctctcatgtta

SEQ ID NO: 268658 - DNA, 201 bp, Homo sapiens
catcttacattagtaaggtccatttgttacagctcatgaatcaacagtgatacatgattattaactaaagtccatactttattcagaattacttgtttttyccctaatgtctttttttgtttttttgttccagtaccccatccaggaataccacattacactgagttgtcaggcctccttaggcttttcttggcgaagcgt

SEQ ID NO: 268659 - DNA, 201 bp, Homo sapiens
tttttgtccctttccatactgtacctttggtagagagttacattccacctccttgatggtggagtatctgcataaattatttggaattcttctgaattggraatttgttctcccccttatatttatttattcagtctttttcagtatggagtcattaatgtctattttatactttgaattataacccagtactctgttttt

SEQ ID NO: 268660 - DNA, 201 bp, Homo sapiens
atcagggtctttcatgcagctgcagttagatggtgacttagagttggaacagcaagggctggggcatttaggggctggccaggcatctttctgtctcttcwtgcagtcttagggcctccccatgtggtctctgtgcacggaatggttgggattcctcatagcatggtggcctccgtgtaagggtaactgcttacatggagg

SEQ ID NO: 268661 - DNA, 201 bp, Homo sapiens
tgtgaagttttgtatatgtctttttgaatcccattgaatatacttaataagatgtctttttatttctattttttttttctattcccctctcccctttaccrttctgtgttgatcttagacttttgtcttaggcttacctccaatgactggtgaatcatggtggttcatttatatttaaggatgagagattaggtagatttc

SEQ ID NO: 268662 - DNA, 201 bp, Homo sapiens
taaaactttttattaaagaaacttttaaacatacacatggggagagagagtatgtaatgaacattatacccatcacccagcttcataattatgattatgtrcacacggccaataatattttatctataaccactcattcccctgccaccaccctctcatgttattttgataatagcagcacacttgatgttgtatttgtgg

SEQ ID NO: 268663 - DNA, 201 bp, Homo sapiens
ccctttgaatatcttgtagaagtttcttggcactggatttactcaataggatcgaatccccatcctccagcaaacgaaatcccgtgaagactcccagcacsaggctggtctgaatcctcacagttctttttcagaaagcatgcaactttggtcaaagatcagaggactgataggcaatgtagtcagctgattcatttcaaa

SEQ ID NO: 268664 - DNA, 201 bp, Homo sapiens
cagttgtaatattgaatcttttagtggaaaacataaccctttctttacaagaagattgtaacttaggacacttattattacactggataatttaccagtaygtttacgtgatggcccactaacctgcttttatgatttctgttgattgaataaaactagttttgtatggaccgttaagactatatacactggttctacaga

SEQ ID NO: 268665 - DNA, 201 bp, Homo sapiens
aaattgctatttagctactgaactgaaagtgcaaactcgtattcttctttcccttccctacttcaatacctttttcccccaaccccgccccccccccaaaracttccccaaataatgggcttccaaatggaaaaggccccaaaagcatcctgacaattgtcgtcaaagagctctgggatatgtcttctagaaaggagctgc

SEQ ID NO: 268666 - DNA, 201 bp, Homo sapiens
tatggagcatggtaagagctgcagtaactaggggtgagggaagacctagagaaacatggtgctagcatctcctcggtgaggagggtctagcaagtccaagrcctcatttcccaccggactcataacatagccttccacaatgatcccaagggatcgttctgggattattaaatccagtcctgtcactttcatatttcagcg

SEQ ID NO: 268667 - DNA, 201 bp, Homo sapiens
taatattttattgaggtgccctgtaatctgacattccagggagctttcaaggaaactttgtcacactaaaaaaaattgaggattgttttgtgggttattcygctcctttgtcttctaactcacagaagttctgtcatggttcttaggggttgtagggtgtgtccacttattttaaaatgtcaaagaccagaagagtggaga

SEQ ID NO: 268668 - DNA, 201 bp, Homo sapiens
tgagcagggaaaaaagtggagttatggtcattaggaaaagatcaaggaaagttctgtgtctttcaggtatgtgatttacctaattcatttgaattttttttagtttagcatacatacacgttttgacattagcttttatattttctttcaacagttccttaagagaaaaaaatttacagaatttctctgttaaacatttta

SEQ ID NO: 268669 - DNA, 201 bp, Homo sapiens
tttcagccattccacccatgccttaattctcttatccccttttgtattctgttttccccacctttccctctcccagggcatgtcgtcttttttttttttttcccccattttcccacttccactcttagaatttcaggccattcaagtttgttatattccatgatttcagattaagctgggctcccagagctggagggtctt

SEQ ID NO: 268670 - DNA, 201 bp, Homo sapiens
ggcggaggttgcagtgagccaagatcacaccatcgcattccagcctgggcaacagggcaagaccctttctcaaaaaaaaaaaaaaaaaaaaaaaaaaaaawatatatatatatatatatatatatatatatagcaatttggagagtagtttatttcatgctttacattttgttttagacttgagttagaatagaagaaaga

SEQ ID NO: 268671 - DNA, 201 bp, Homo sapiens
ggctgaggcaggagaattgtttgaacctgggaggcggaggttgcagtgagccaagatcacaccatcgcattccagcctgggcaacagggcaagaccctttytcaaaaaaaaaaaaaaaaaaaaaaaaaaaaaaatatatatatatatatatatatatatatatagcaatttggagagtagtttatttcatgctttacattt

SEQ ID NO: 268672 - DNA, 201 bp, Homo sapiens
aactctagcagtgaggtgatgagcacatagtaaaccaatcacaatgtacctttttaaaaatacaattcagattgtttaaatgtagggagaaaaaagatttyttggtatgaaatgaatatattacactgtccttttttacttccatgttaatatgtcattattataaaaagataaaaatactagacaagttatgaacaaaat

SEQ ID NO: 268673 - DNA, 201 bp, Homo sapiens
acacaacttgcatataatctgttttatcttttttagggattgtatccagaatctcatggcataatcgacaataaaatgtatgatcccaaaatgaatgcttycttttcacttaaaagtaaagagaaatttaatcctgagtggtacaaaggagaaccagtgagttctttgtttttctactaaaatagttaattattctcatct

SEQ ID NO: 268674 - DNA, 201 bp, Homo sapiens
ttctagcaacaatgggctaaatttataggcaaaagccacaccattagtacataatagactatgatggtaactggaaggacttttatctacagatttttatyacggactaatagctaatgccatcccattcatttgctaaatgttatatcctattcatcaagcttggcctgctgttgggtttccaactctcctttgcctgct

SEQ ID NO: 268675 - DNA, 201 bp, Homo sapiens
ttcatgaagatatgtctctccttaattgtttctatgataaactttcagaattacttgttcctatagaacacatttctcattatttttccctttattctttrgaattaaatacagaatagcaagattttagttggttgcctgatgattatctgactccactgaaagttgtcagttttgtgggcattgttggaaacatgcagc

SEQ ID NO: 268676 - DNA, 201 bp, Homo sapiens
catggtgttaatttatttcacacgtcaacatggtcccttgttcttttgaaactacactggcttctatcttgtttcagttatatggcgctactttcatgacmccctactgcgaaagtatgctgaagaaagaaatggtgtcaatgtcgtcagtggtcctgtgtttgactttgattatgatggacgttgtgattccttagagaa

SEQ ID NO: 268677 - DNA, 201 bp, Homo sapiens
aaagatgaatatactagtaggaaaatagggaaggacatgagctgacagctagagcttcataattttatgatgtagttcacctttaaatattaataaagcarttttcttctctgtgcctgatatctgagagttcttctcattttcgttcttcaggacagtttctctacggaagacttctccaactgtctgtaccaggacttt

SEQ ID NO: 268678 - DNA, 201 bp, Homo sapiens; identical to SEQ ID NO: 52967

SEQ ID NO: 268679 - DNA, 201 bp, Homo sapiens
ggcaaacatcctataacaggtgtgatttgagagtcttaaaaaaaaatcactatcttggttttcaggtgaatatttttgagaaactagcttgttcctaaagrtgtgtttcccgatccccctcctgcttagaaagctttttttgacgttagcaagcatctgggggatcttgatgctctcttatggttagagagagagaattga

SEQ ID NO: 268680 - DNA, 201 bp, Homo sapiens
gagatcgagaccatcctggctaacacggtgaaatgccgtctctactaaaaatacagaaaaaattagccgggcatggtggtgggcgcctgtagtcccagctmcttgggaggctgaggcaggagaatggcatggacccaggaggcggaggttgcagtgagccgagatcgtgccactgcactccagcctgggtgacacagcgag

SEQ ID NO: 268681 - DNA, 201 bp, Homo sapiens
cctacttagctttttttctgtggttcttacacagtattcctttttttcttttcttgaaagagactcctcctttcttttcttttcttgaaagagttttaaasagataagatggcaaaagtgactgatctctactcccccagtttgaatggtaaatttgaatggtaaattcccatgaacatatatggaaatgtctttatccta

SEQ ID NO: 268682 - DNA, 201 bp, Homo sapiens
agggcagattctcaatattaataggaccccaaaagagctgctctaggttagataatgccccagtttatccaggaatgtaagtaatgttattgtgccataastttaagcaggaaagattctgaagatgctgacagccaatgatctcttccacagttttaaggttattttcctttaggtctaactcatgcaaattattcaggc

SEQ ID NO: 268683 - DNA, 201 bp, Homo sapiens
ttgaacctgggaggcggaggttgcagtgagctctcatcactgtactccagcctgggtgacagtgtgagactctgtctcaaaaaaaaaaaaaaaaaaaaaaacccaaccagccaaccaaacaaacaaaccaaagtttataaaataactcttccattacttctttactacttccccttccttctatcattgtcattttcaacc

SEQ ID NO: 268684 - DNA, 201 bp, Homo sapiens
atctatccagcattgacaagattataataaataattaaactggatcacagtaaatcgtagtggttattatcttgtctttgaggtagttccccccccatccyctcgcaataaaatcattgatggtcattctagagaattcagctttgaaaattgaacaggttcttctgtttggctattctgtgattgtaatattaattattt

SEQ ID NO: 268685 - DNA, 201 bp, Homo sapiens
atgtagcctattgaggagtgaatccacaagtaaaagaacagaactaaatgtgtcagatgttatagattactaactctctagtttaaaaaaaaaaaaaaaaagctggcttattcacataacttcaatttgatagacataggaaaaattggatcattatctctaaatcagtttttcacatactacaggatcaaaattaacagg

SEQ ID NO: 268686 - DNA, 201 bp, Homo sapiens
aaaatttcatctttggtctagctaaacctatatattaaaaggtctctctttgttgcccagactagagtgcagtggcaagatcatagctcactgcagcctcraactcctggcaatcctcctgcctcagcctctgcgcgttaggactacaagtgtatgccaccatgcccggctaatttttaaattttttgcagacaaggtctc

SEQ ID NO: 268687 - DNA, 201 bp, Homo sapiens; identical to SEQ ID NO: 52979

SEQ ID NO: 268688 - DNA, 201 bp, Homo sapiens
atcctacagctaaagttaagtcgtccttaattcagtcatggcttgaatttttggatgtcaatcagttacaaatatagactgaagccatcattgtaatacaytgggaagttaaaattataaatttctgtatgtagcctattgaggagtgaatccacaagtaaaagaacagaactaaatgtgtcagatgttatagattactaa

SEQ ID NO: 268689 - DNA, 201 bp, Homo sapiens
aagctcagcacttctgagaggcagaggtgacaggatcacttgaagccaggagttcgagaccagcctgggcaaccaagcaatatcccatcctgacaaaaaaattaaaaattaaaaaaaaaaaaaagaataatcagtaacttaatgtttcaaatcctttagaaaaaaacaaaatatctaataaagttaaaaagacccatcata

SEQ ID NO: 268690 - DNA, 201 bp, Homo sapiens; identical to SEQ ID NO: 52980

SEQ ID NO: 268691 - DNA, 201 bp, Homo sapiens; identical to SEQ ID NO: 52981

SEQ ID NO: 268692 - DNA, 201 bp, Homo sapiens
aactggcattaggcaatgtgaaaactaattttacacatctaacgttttcaagtaaaatacttacctggactagcaagtggcccgaattaggcaaaaatgtrccacatttcttgatgttctcatttatttgttttatcaaatttatcagtatttccacagcacctttgctgatcatttcattaagaaatcccagatttccag

SEQ ID NO: 268693 - DNA, 201 bp, Homo sapiens; identical to SEQ ID NO: 52982

SEQ ID NO: 268694 - DNA, 201 bp, Homo sapiens; identical to SEQ ID NO: 52983

SEQ ID NO: 268695 - DNA, 201 bp, Homo sapiens; identical to SEQ ID NO: 52984

SEQ ID NO: 268696 - DNA, 201 bp, Homo sapiens
actttatagaccccatacagtataaaaaagcttccatgttagtttgcaggtcttcacttcttagtacctccaataatgattctgtcaaaaagattaattaytataaatgtctgagtataacagctggagagaaatatattaaagcacttgtgtgtgaacataaaatacacttcgtaaaatatatttatcaaaatctacatt

SEQ ID NO: 268697 - DNA, 201 bp, Homo sapiens
aataatctaatgtattctgtcaaataatattatctctgatagattccttcatgaaatttaaaagtaggaaaccaatcttaaataaataccataatgtgctyttagaagcccacatagaggaagtgtgtgcctgcagaaggaagtgactcaggccatttttagctcttttcaacaataacatctaagaaaaaattttaaacc

SEQ ID NO: 268698 - DNA, 201 bp, Homo sapiens
ccttgtcttctctagatttatgtaaggatttttttcttcctttaaatgacacttaagacatacagaggtgaagaagctacaaagtcttttttttttttttttcttttttttgagatggtgtctcgctctgttgtccaggctggagcgtgatctcggctcactgcaacctccacctgctggattcaagcgattctcctgcct

SEQ ID NO: 268699 - DNA, 201 bp, Homo sapiens
ctagaaaacttaatttttctaatctttaatgacaatttcatggtgtctattttagcaaattgaaatcaaaattgagtccacccttgtatagcagcagcagctgtatcttctgtaaagctatttaataaaggaaatgttgcttttactcaacaagtattgaaatcagacacttaacaggactgttttcttgattatactttt

SEQ ID NO: 268700 - DNA, 201 bp, Homo sapiens
tcttcagtctctcagcatcctcagtcttttgagggtagatttgtatagacctgcttaccatggagcacttaataatggtgggaaggattagaattctagcwtcactatttgtgtaactaactcttggcaagtcagctgtaagatgatggttttgattccaagtttacaggattgctgcaaggattaataatgatgttgaag

SEQ ID NO: 268701 - DNA, 201 bp, Homo sapiens
gcattcttgattttttctaaggggttgacttcggttgtcttagacatcccttctgaagcatggttaccccttctctatggtatataccatagagaagccckgggtcttggggtagataactgcacaaggattcatcatcttgtctcttagcttcctgagatatgacttctgttcataaatccatattaaatgtttctttct

SEQ ID NO: 268702 - DNA, 201 bp, Homo sapiens
gctagaaaacttaatttttctaatctttaatgacaatttcatggtgtctattttagcaaattgaaatcaaaattgagtccacccttgtatagcagcagcagctgtatcttctgtaaagctatttaataaaggaaatgttgcttttactcaacaagtattgaaatcagacacttaacaggactgttttcttgattatacttt

SEQ ID NO: 268703 - DNA, 201 bp, Homo sapiens
agctagaaaacttaatttttctaatctttaatgacaatttcatggtgtctattttagcaaattgaaatcaaaattgagtccacccttgtatagcagcagcagctgtatcttctgtaaagctatttaataaaggaaatgttgcttttactcaacaagtattgaaatcagacacttaacaggactgttttcttgattatactt

SEQ ID NO: 268704 - DNA, 201 bp, Homo sapiens
atcacattttccctgttatttacttgtttatttgtaaatgccatgaggttttgttttgttttgttttgttttttgtctgttttgttcactgctgtatcccyaatacctggaataatgcctggcacattaagtagccactcaatttttttaatgaaaaaaataagtaaattatctgtggattctcagtggtttatctcctct

SEQ ID NO: 268705 - DNA, 201 bp, Homo sapiens
tttcattgtaaaattcaatttgtaaaaactttgatctggacagaatataggcagaatcccattggatgaagtagtatgtcctacctatttttttttttttttccctaatggctcttttgcataaaatcttctatttatttgagtaattctcaccacacaagttacctttggggaaggtaacttcacacattcaaagaagac

SEQ ID NO: 268706 - DNA, 201 bp, Homo sapiens
ggagaatcgcttgaacccgggaggcagaggttgcagtgagctgcgcaccactgcactacagcctgggtgacagagctaggttctgtctcaaaaaaaaaaaagaaaagaaaaaagactatttcaataaatagagattactatatagtacttcatagttgtaatgcttcagtgtataatatacttacgattttcatttaacac

SEQ ID NO: 268707 - DNA, 201 bp, Homo sapiens
gtggaaggatcacatgaggccaggagttcaagaccagcctgggcaacatagcgagactttgtctgtgctacaaaatatatgtatataacacatccaccccrctattctaatgattaagcctttgatagggacggggatcacattttccctgttatttacttgtttatttgtaaatgccatgaggttttgttttgttttgtt

SEQ ID NO: 268708 - DNA, 201 bp, Homo sapiens
tgaggaagtatttgatagttcaatttaatgttttaatgcttaaataacaaaatagcaaaaaacaaaaagtttaaatttatatgagcctcctgccaattcargaaatggatgacattggttacactgttttgtggaaacacaaaattgatttcaaaaccaaaagattcactgagaaactaattttaactgctatatatgtta

SEQ ID NO: 268709 - DNA, 201 bp, Homo sapiens
tctagaactcctggcctcaagtgatccatctgcctcggcctcccaaagtgctgggattacaggagtgagccaccacacccagccacctgactaaaaaaaawtttttttgtagagacagtcttgatatgttgcccaggctagtctcaaacttctggcctcaagcagtcttcccatctcagtctcccaaagtgctgagattac

SEQ ID NO: 268710 - DNA, 201 bp, Homo sapiens
ctgattgttctgggaggttttatgcataaatatttttacatgtttttttttttttaattttacagacagaatcttactctgtcacccaggctgaagtgcartcatcgtagttcactgtaactttgagctcctgggcccaagctaccgttctactttagccttctaagtagctaggactacaagcatgcaccaccacacctg

SEQ ID NO: 268711 - DNA, 201 bp, Homo sapiens
gttttccagagggtcaaataattgaatcatacactatatacctttttgaatctggcttccttcacttggaatgcatttggagctcattcgtgttaagtgtrttaatagtttattcttacaagtggtattccattgaatggaacaaatatgtgaacaatcttacactgttttgttctttttgatttttagctttccagagtg

SEQ ID NO: 268712 - DNA, 201 bp, Homo sapiens
ttatctaagtgtgggtggaattcctcaggctgtggtataatttaaattcttaattagaaaatgctcattgctattaaataggtaagaccaattattacccrgatctgcttagtaactcttggtttatggccactttgtttcagagatcttgcagctgctatagatcgaatggacaagtataattttgatacaatgatatat

SEQ ID NO: 268713 - DNA, 201 bp, Homo sapiens
gagtgataaatgtgttgattgggaatttggagtggtgagccacattctgattgttctgggaggttttatgcataaatatttttacatgtttttttttttttaattttacagacagaatcttactctgtcacccaggctgaagtgcaatcatcgtagttcactgtaactttgagctcctgggcccaagctaccgttctactt

SEQ ID NO: 268714 - DNA, 201 bp, Homo sapiens
cttcttgagcacacacgggagtgataaatgtgttgattgggaatttggagtggtgagccacattctgattgttctgggaggttttatgcataaatatttttacatgtttttttttttttaattttacagacagaatcttactctgtcacccaggctgaagtgcaatcatcgtagttcactgtaactttgagctcctgggcc

SEQ ID NO: 268715 - DNA, 201 bp, Homo sapiens
agtattcttttattttatatatattttcttcccaagacagataaaggacaaaaaaagcattttcagcaagtattccaaatgctgaagatcatgggatatgrctgggcagaaaggtaatgtctgcatggttcttaattgtctgtgcagggtcagctgagcctgaaaatgtacctagtggttaaagtttttcactcagatttc

SEQ ID NO: 268716 - DNA, 201 bp, Homo sapiens
attcctgttactgaatattttaaatcattctttgatttattttgtaggccagacttcatcttttcaaagctgtccgttctgtcctagccaatggaatgaarcttcttggaataacacctgtatgtaggatgtaatttccattaaaatggcttttaaaatgtcaagtgaattctagttatctattctgagatgccttgctgt

SEQ ID NO: 268717 - DNA, 201 bp, Homo sapiens
tttttaatttactttttagacttttttgttaaaagccaagacacaaacacattagccttagcctacacagggtcaggatcatcaatatcactgtcttcacytccacatcttgtcccactggaaagtcttcaggggcagtaacacacatgaagctgtcatctcctatgatgacagtgccttctggagtatctcctgaaggac

SEQ ID NO: 268718 - DNA, 201 bp, Homo sapiens
tgacttttgattatccccagttccaggaatacctgtaagatttctattttatctactgtttatagtacttaagggcaggatttctattttatttactgttwatagtacttaaggacaggatttataattcttgcccttaagcaaatgataggctatgacatagcattcttgattttttctaaggggttgacttcggttgtc

SEQ ID NO: 268719 - DNA, 201 bp, Homo sapiens
aaagtgggcaacttctatttaaaagtttaaacacttaaaaatgaaaaagtttacattgcttcatagtaagaaaaaattacctgaatcagtaagatggttakgtgaaattaatatatacaggtcactataataccaagtttttttgttttttatttttcaattctgatttgggctcaacagttgtttttaaataactttatt

SEQ ID NO: 268720 - DNA, 201 bp, Homo sapiens
ttcattctccatgtatcaagaaaggtgacatctaaattgtgaatcaaatcatatcacttatctttctttgttgcacgagtctctaccagaaccttaacttsttcaacttccattcttgccccattctatcatttttgtaggaacctagctacaatgttaatttgtttttctaacatagcagggtctttccattcccattgc

SEQ ID NO: 268721 - DNA, 201 bp, Homo sapiens
atctgaaaaaattcaaaagttgaaacacttgtggtcccaaggatacccagcctgtatttaatacctttgcgaatgagcatcgttttgctataatagtttargaatgaaggaatgtgtaacgtgcaatggcaaatgcatttagctaactttgattaattagtcgacagttttctaagcactgtcatcagtcccaaggctaaa

SEQ ID NO: 268722 - DNA, 201 bp, Homo sapiens
gcaagaagccttaaggcataaactattgagtttttctattggaagaactaataggcctggcatgtggttcatgcctataatcccagcactttgggaggccraggtgggaggatggcttgagcccaggagttcgagaccagcgtggacaacataggtagaccccgtctcaacaaaattttttttaaaaagtagccaggcatg

SEQ ID NO: 268723 - DNA, 201 bp, Homo sapiens
tatcaatatggcataggggttgagtataggttctgtttttagatagcctgtgttcacatcctagcttttctttccacttaggcaagttaagtaaattccckgtacttcagtttcatcatttataaaatgagggttgaaatagtaggaaagtctgggattgttgcaaagaaaaattaaggtacttaagacatgcctgtcaga

SEQ ID NO: 268724 - DNA, 201 bp, Homo sapiens
tttttctttggaaaaagaaacatcccgtcagaaaaggggccctatgacatgaagtctctataactatcctaatttggtgttttttcaggctgtcattagakgtagacttttctgtgtatttaccttaacacctgtactttctcttttttctttgaaaataattgtctttttgccacttattgaaatgtttgattttttcac

SEQ ID NO: 268725 - DNA, 201 bp, Homo sapiens
aggctggtatgtgatggttaataaactgattcatttaataaacatttggtgggtaggggataatacacaacagcgaatagaagaggaaaacccttgttctygcagaccttatattctagcctagagacagcacaaactaaacaaattaaagataaagcaagaaacaactatgtttttattaagtggttctagatgctagct

SEQ ID NO: 268726 - DNA, 201 bp, Homo sapiens
aagatggcttgattagggttggactctgatctgatacagcggtttaagattgataggaaaagcaaagagtgcaagaagccttaaggcataaactattgagkttttctattggaagaactaataggcctggcatgtggttcatgcctataatcccagcactttgggaggccaaggtgggaggatggcttgagcccaggagtt

SEQ ID NO: 268727 - DNA, 201 bp, Homo sapiens
aagagcttatatatctaagaggtacattatttttctagataagcaaatatatatattagaaaagttttttgtatcaactaattattgctagatagattaartaaataaactattgcacagtggttataagaagtatccattgagaacagaggctctgtaactatccgggtctggttagtgtcttttttgggttatcattag

SEQ ID NO: 268728 - DNA, 201 bp, Homo sapiens
gttgttttatattaactaccataatttgttccaaacaactttaagcaaccaattaagtcttttaacttccccttaggaaattcatctcttaccttctattrcttttcgacatttccctttaccatttctatgcaattgggattaggaagtgagaagagcttatatatctaagaggtacattatttttctagataagcaaat

SEQ ID NO: 268729 - DNA, 201 bp, Homo sapiens
tatgcaaccaggtttgtagcctctgtgagggtcaacatttggttctaaatctgttgctttcagatgaaacactatgtacaattaattatgcattatcggaytccacagctgatgacattattctataaactgtaaaactgaagtacttcataatcaactaaaagtattttacaatggcacgttggcaggaaatgtatacta

SEQ ID NO: 268730 - DNA, 201 bp, Homo sapiens
tgggtatattaaagaatttatctctgagtaccttatccagagctacagatttaaaagctaagataaccaaatattaattacatcatacccattcataagarattcttggtcatattcttgtttttttccattgttgattaaagcttgaattggcactgctcattgcaacgtgggtaataaaaatagcttctggtttgctaa

SEQ ID NO: 268731 - DNA, 201 bp, Homo sapiens
ccagagctattttagttgttattactacttgttgtagaacttttatgtattaattttatttatttatatttattttaggttttgcttttcccagtgttttyattgttgtttttcccaaacctatttttatcattttatatcaaaacatgatattcggattatctaagtgtgggtggaattcctcaggctgtggtataattt

SEQ ID NO: 268732 - DNA, 201 bp, Homo sapiens
caccacacccagctaatttttgtatttcttagtagagatggagtttcaccatgttgcccaggctggtcttgaactcttggcttcaagtgatccacttgccytggccccccaaagtgctgggattatagacgtgagccaccacagctggcccagctttattctttttgctcaatattgctttgggtatttggaggttttttg

SEQ ID NO: 268733 - DNA, 201 bp, Homo sapiens
ctaattgccaatcctcatgaaattttatcccacagatattctgtatctctgtatatattgtatacatatctgtggtttatgcatgaagaataagattttttgttggccagctgtagtggctcacgcctgtaatcttagaactttgggaagccaaagcaggaggatcacttgaggccagaagtttgaaagcagccgggacaa

SEQ ID NO: 268734 - DNA, 201 bp, Homo sapiens
taccaaagcaaactttctcctgtcatatttgtaaggaagatgtgaaacatagttaatagcatcctcggtaatgtccttaaggaaaatttttagattgtcayatacagattccaaattttggtcatacaggaaagacaaaaatctgtagttttaatacttgggtactttgtggcatgttaaaaattatcccaatattgaatg

SEQ ID NO: 268735 - DNA, 201 bp, Homo sapiens
gtaccaaagcaaactttctcctgtcatatttgtaaggaagatgtgaaacatagttaatagcatcctcggtaatgtccttaaggaaaatttttagattgtcwtatacagattccaaattttggtcatacaggaaagacaaaaatctgtagttttaatacttgggtactttgtggcatgttaaaaattatcccaatattgaat

SEQ ID NO: 268736 - DNA, 201 bp, Homo sapiens
tcacaaattattgagagcccaacagttaaacatactttatttaaaaaagtacaaaagtgacattagaaatttttttgaagaaatgtgtatcatctaacagmaaagaaatatgaaccagataatgaatggcacaaatatagcactaaaggggtactcactaaaggggtactcagtcaccacccagaaattgtccgagttatg

SEQ ID NO: 268737 - DNA, 201 bp, Homo sapiens
ttattttcttttattctgcttgctttggatttagtttgctctactttttctagtttcttaaaggagaagctcagattattgatttaaaaccttttttctartataaacatttcatgttgtagatttttctgctttagctacatccaacaaatgtactagtaaggcagcaatgtggtgcagcgctaggactccccttgtttg

SEQ ID NO: 268738 - DNA, 201 bp, Homo sapiens
taatttgatgagttttggcaaagatatgcaagttgtgtaactacctccacaattatatagagctgtttttctggggttttttatttctattgattttttttgctttacttttatctgtattattttcttttattctgcttgctttggatttagtttgctctactttttctagtttcttaaaggagaagctcagattattga

SEQ ID NO: 268739 - DNA, 201 bp, Homo sapiens
cagcatcctcagtcttttgagggtagatttgtatagacctgcttaccatggagcacttaataatggtgggaaggattagaattctagcttcactatttgtrtaactaactcttggcaagtcagctgtaagatgatggttttgattccaagtttacaggattgctgcaaggattaataatgatgttgaagattataataact

SEQ ID NO: 268740 - DNA, 201 bp, Homo sapiens
ttcttaaataatgtattttatgttcctttaatatgaatgcatccagggctggcttattatttttattgttccattgtattctattctttttttttttttttcttaaatcggcttcattgagggataagtacatacaatacttatttaaacatataatttcaccatatttaaacatataatttgatgagttttggcaaagat

SEQ ID NO: 268741 - DNA, 201 bp, Homo sapiens
gaatatcagtgttttattcaccctcctagagatgttctatgcatttgtaaacagactatacatattttacattgttttcacttcttgctttttttttttttcttaaataatgtattttatgttcctttaatatgaatgcatccagggctggcttattatttttattgttccattgtattctattctttttttttttttttc

SEQ ID NO: 268742 - DNA, 201 bp, Homo sapiens
aatgctcattgctattaaataggtaagaccaattattacccggatctgcttagtaactcttggtttatggccactttgtttcagagatcttgcagctgctrtagatcgaatggacaagtataattttgatacaatgatatatgtggtaagtaatcagaacaaaaagttatgatctcttaactcatgaaaactacagaggta

SEQ ID NO: 268743 - DNA, 201 bp, Homo sapiens
tgtatctgtggccgtctccttaagtagccaccaaccacatgtggcttgaagggtgaatagtgtgacagaagagctaaattctcaattttgcttaattccastttaacagtatagattgtcacttgggcctagtgattactgtattgcacagcacagtaccattgtgaggacttgactggtatagtggaaactattaggagg

SEQ ID NO: 268744 - DNA, 201 bp, Homo sapiens
agaggaaaacccttgttctcgcagaccttatattctagcctagagacagcacaaactaaacaaattaaagataaagcaagaaacaactatgtttttattargtggttctagatgctagctggggagatcaggtatggagtcttcaggtggaacgacagttttgtaaagaagcccgtgtgactggagtaagtaagcaagatg

SEQ ID NO: 268745 - DNA, 201 bp, Homo sapiens
tcatttttatctgacttttctgttctagcattccttcactttttcatatttattttttgttctttcacttccttaggctggtatgtgatggttaataaackgattcatttaataaacatttggtgggtaggggataatacacaacagcgaatagaagaggaaaacccttgttctcgcagaccttatattctagcctagaga

SEQ ID NO: 268746 - DNA, 201 bp, Homo sapiens
taccaagatcacctattgtattggtctttacacagtaagctatttagagaacagttttaaaatctttgattaaaacaaatgctaaatcatccgttagctgwttctttgccagatcgagccatcctactttattcaacctttttcagcgaagttacaggataataatatggcattttgaaaaataacagaagaaatgccagt

SEQ ID NO: 268747 - DNA, 201 bp, Homo sapiens
tcagtgttatatagttttcagtgtacagatattttacctccttggttaaatttattcctattttaattttgttgatgttattataaatgggatttttttttaaatttctttttcagatagtttgttgttgtgtatagaaatgctactgatatttggctgggcgcggtggctcacgcctgtaatcccagcactttgggaggc

SEQ ID NO: 268748 - DNA, 201 bp, Homo sapiens
ggaatgttactgttatggctagtatgaattttgttccttaataacatttatatgtaagaaatagtttttaaatgataagaaaatctgattccagctatcayttgtaagagtcagtgtaagtcattgataagaatttcccacctactaaatcatgcaaagttccccaggctcttatgtgtctcctaggacagtcctagagga

SEQ ID NO: 268749 - DNA, 201 bp, Homo sapiens
aagaaaaatagtgaggggttagtgtatcactagataatttacgtaatagttttgaccctgagcttccccatatcagtaggcaaaaaaaaatttttttaaayaggacaagatcaaagcaccgattcaatgagtgataatgtttacttgctctcatttttaaaaacatggaattagtatctattcctcaagacacaatgtttt

SEQ ID NO: 268750 - DNA, 201 bp, Homo sapiens
agatggagtttcaccatgttgcccaggctggtcttgaactcttggcttcaagtgatccacttgccttggccccccaaagtgctgggattatagacgtgagscaccacagctggcccagctttattctttttgctcaatattgctttgggtatttggaggttttttgtggttccatatgaattttatgattgatttttctat

SEQ ID NO: 268751 - DNA, 201 bp, Homo sapiens
gcagaagcttttttagttttatgcaatcccatctgtgtattttttgcttttgttgcctatgctttgaggactagctccaagaaatctttgccaaggcttcrgtgttttcctctaatagttttacagctcaggtcttagatttgtctttaatccactttgaattgacttttgtacatggtgagagatagggatctagtttta

SEQ ID NO: 268752 - DNA, 201 bp, Homo sapiens
aacagagtgagaccttttctctggggaaaagaaaaaaaaagaagaagaagaaattattaagtagcttttagtttagccaaaagaattctccaaatgagaaytgcatgttgttcatttaaatgtaacctttttattgctacccaggttcacaacctatttgtcagctgaaatgcttcaaaattgacctaataactgagtttt

SEQ ID NO: 268753 - DNA, 201 bp, Homo sapiens; identical to SEQ ID NO: 53046

SEQ ID NO: 268754 - DNA, 201 bp, Homo sapiens
atgattgtgagccgctgcactccagcctgggtaacagagtgagaccttttctctggggaaaagaaaaaaaaagaagaagaagaaattattaagtagcttttagtttagccaaaagaattctccaaatgagaattgcatgttgttcatttaaatgtaacctttttattgctacccaggttcacaacctatttgtcagctgaa

SEQ ID NO: 268755 - DNA, 201 bp, Homo sapiens; identical to SEQ ID NO: 53047

SEQ ID NO: 268756 - DNA, 201 bp, Homo sapiens
tgtcttgttatttatatcttcatatgagtaagataaactagtcttagaattactttcaggaaaacttcattcctgctatttactgagtatatatatatatatgtttaccctgtattactaggggtaaaacatgctgtgtagatagattccctttgtaccttgattgccaagaagcgttaagtaccttgagcttagagtttt

SEQ ID NO: 268757 - DNA, 201 bp, Homo sapiens
ctgcctcggtgatagaattctcacaagatctggttgttcaacagtgtgtagcatctccccattcacacttttcctcctgctcccaccgtgtgagatgtgcytgcttccctttcgctttctgccatgattgagttttctgaggcctccccatacgtgcttcctgtacagcctgtggaaccatgagccaagtaaacttctttt

SEQ ID NO: 268758 - DNA, 201 bp, Homo sapiens
actttccttccttttctttttgatgttggttgaagatgggagattatgtgaagaagctttcatttcactactttatcccggaagtcttcttggtttttttktgtgtgtttttttaaattgtgaaaaaatacacataacgtaaaatttaccatcttagccatttttaagtatacagttcagtggcattaggtacatttacat

SEQ ID NO: 268759 - DNA, 201 bp, Homo sapiens
ggtaagacacaccaagaccctgtgtcaaaaaaaatttttttaagtaatttgattaccagagaaacaagtcttttagtatttgtaataaatgtattttttttaattaccagaaaaatagcttgaagttttgatgtgcctctaaatagtcttcataactttctaacgtgctgtcagtataactgtctgatatttggactgtta

SEQ ID NO: 268760 - DNA, 201 bp, Homo sapiens
tccccggtaccggaacaagagaacagttagtacagaaatggctttggcactttaacccttagacattgtcccaaaccttgttacttgagtattgtagcctyaccatgattttttttaacaccgtatcatctccatactttttatttacaaattatatatacacacaataatacaattccttcattctaaaacaatagtaga

SEQ ID NO: 268761 - DNA, 201 bp, Homo sapiens
aaacacaaaaagggaaaatacaacagtgaggcttcggttcttagggcacagacaaatatatttcttgttaattactgggattttttttttttctcttcttraaattgactagaatagcagttactctaacatgtcctcaaatcctattaataatgtaggtgaaagttctgttactgtgaaaatgtgagattctttggaata

SEQ ID NO: 268762 - DNA, 201 bp, Homo sapiens
tttcttactccctttccataacacatgaaaacacaatgatgaatgttttagtaaaaaacattgagttggtaaatttagtgaaaagaattttctacttatgctttgataatagagaagtacatggttcttatgtcaaaaaatggataacaagaatgagaaactgtatactttattgattactaggaaattttatagcaaatc

SEQ ID NO: 268763 - DNA, 201 bp, Homo sapiens
gagttggtaaatttagtgaaaagaattttctacttatgctttgataatagagaagtacatggttcttatgtcaaaaaatggataacaagaatgagaaactrtatactttattgattactaggaaattttatagcaaatctcaaagaagctttaggacatcaagtaataagaataaattaccttggcgattggggcatgcag

SEQ ID NO: 268764 - DNA, 201 bp, Homo sapiens
aataagaataaattaccttggcgattggggcatgcagtttggtaagtacacttgagattttatttttcatttcattgtaaaattcaatttgtaaaaacttygatctggacagaatataggcagaatcccattggatgaagtagtatgtcctacctatttttttttttttttccctaatggctcttttgcataaaatcttct

SEQ ID NO: 268765 - DNA, 201 bp, Homo sapiens
aggtctcaaactcctagcttcaagtgatcctcccacctcagcctcccaaagtattggaattacagacatgagccactgtgcctagccatatataggtgtasgttttgtgggtttttttgtggaggtgaagtctcactgttgctgaggctgtacaatattttaaatatttcaggggaatctgtcttcaaactccacagaaac

SEQ ID NO: 268766 - DNA, 201 bp, Homo sapiens
aactcttgggctcaaacagtcctcctgcctcaaactcccaaagtgctgggattataggtgtgagccaccacacccaacctattttttaattttttaaatarcaatagggtcttgctatgctgtccaggcaggtctcaaactcctagcttcaagtgatcctcccacctcagcctcccaaagtattggaattacagacatgag

SEQ ID NO: 268767 - DNA, 201 bp, Homo sapiens
aaataactgtatttttactagttatctgctctcagtggcttagttttcaaaattcttaatccacatctcctttttctcctaaaggcaactagtagtgtaaycacatgctggtgattataaagtgaagctgtgcttaacgtcctttgtagcatacaaatcacatcaatttcattttattaatttttaaaaactctgctctga

SEQ ID NO: 268768 - DNA, 201 bp, Homo sapiens
tctccctatgttgcccaggctggtctcaaactcttgggctcaaacagtcctcctgcctcaaactcccaaagtgctgggattataggtgtgagccaccacayccaacctattttttaattttttaaataacaatagggtcttgctatgctgtccaggcaggtctcaaactcctagcttcaagtgatcctcccacctcagcct

SEQ ID NO: 268769 - DNA, 201 bp, Homo sapiens
gtctggagtgcagtggtgcgatcttcgctcactgtaaactccacctcctaggttcaagcgattctcctgcctcagcctcctgaatagctgggattacaggygtgcgccaccacgcccagctaatttttgtatttttagtagagacggggtttcaccatgttggtcaggctggtctcaaactcctgacctcgtgaaccgccc

SEQ ID NO: 268770 - DNA, 201 bp, Homo sapiens
gtcacctaatgcttgcttggaccaatgtaagcatgccaaggcagatatttaggctaaattgtaggagctaagaacacaaagtatattgatttctttattayggctagcagatatttaaggatgttatgacaggtctttgaataaattttacttctaagagaagtcactatttgtccttaattagacggggaggaaagtgtc

SEQ ID NO: 268771 - DNA, 201 bp, Homo sapiens
aagaggaacaggctgtcacctaatgcttgcttggaccaatgtaagcatgccaaggcagatatttaggctaaattgtaggagctaagaacacaaagtatatygatttctttattacggctagcagatatttaaggatgttatgacaggtctttgaataaattttacttctaagagaagtcactatttgtccttaattagacg

SEQ ID NO: 268772 - DNA, 201 bp, Homo sapiens
acattgttttccataatggctataccaacattcccaccaacagtgtacaagggttcccttttatccacatcattgccaacatttatctttttttttttttkttgttataaaagccatcttaacaagtgtgaagaaatatcttattgtggattgtggttttaattttgtatttccctgatgattagtgatgttcagcacctt

SEQ ID NO: 268773 - DNA, 201 bp, Homo sapiens
attaataaagcccttcctgtccaaacaatctccagggatgtgtttcctttttgttgtccctgttgttatctctgccgtttctgggcctcacagtggaaacrcggatacgaagtcagccatattggtgacagatcaggggatcagactaaacatgttctgcttgtgtgtgagaaaaagcacttgcaaaaataatgctttact

SEQ ID NO: 268774 - DNA, 201 bp, Homo sapiens
cttgaaaaatgagtatttttgttctttttctggtgtgggggacagcatgtctatttctctctgaaattgtgtgtgctttttccatttacatctttcacctmcttttcctggcttttgtccaaggtgaatttctgcctactctatttcatttagtcccttggatactttgcttctttatcttcagttcttcctgaagtttat

SEQ ID NO: 268775 - DNA, 201 bp, Homo sapiens
ttccacatgtgagactatacagtatttgttttctgtgcatcgtttatttccctgagcataatgtcctttcagtttatccatgttgtcacaaatgacaggakttccttttattttaaggctgaatattacctgttgtatattttaaagtctactcatctattaaggttgattcacatcttggctattgtgaataatgttaca

SEQ ID NO: 268776 - DNA, 201 bp, Homo sapiens
gtcttgttatttatatcttcatatgagtaagataaactagtcttagaattactttcaggaaaacttcattcctgctatttactgagtatatatatatatatgtttaccctgtattactaggggtaaaacatgctgtgtagatagattccctttgtaccttgattgccaagaagcgttaagtaccttgagcttagagttttc

SEQ ID NO: 268777 - DNA, 201 bp, Homo sapiens
ttggtaacctccattctacttctctgcttctatgattataattttttagattccacatgtgagactatacagtatttgttttctgtgcatcgtttatttcmctgagcataatgtcctttcagtttatccatgttgtcacaaatgacaggatttccttttattttaaggctgaatattacctgttgtatattttaaagtcta

SEQ ID NO: 268778 - DNA, 201 bp, Homo sapiens
tctgcctacattgcccaggctagtcttgaactcctcagctcaagcaattctcctacctcagcctcccacactagaattacaggcttgagccactgtgttgkgctctcctcatccacagttgtttattttgatatctactgcttttcatagcttagatgttttgtctttttaaaggttttatttttaaatgtgtttttctat

SEQ ID NO: 268779 - DNA, 201 bp, Homo sapiens
agtcagagatggtgttagcatatccctcctagaattctgttttcttgcttatgtcagagttttttctttaaaaaaaaagttgtaattgatgaatgacataytgtatatatttatggtgtacaacatgatttgatatatgcacactgtgaaatgttgaaatcaagttaattaacatacccatcaccttacgtacttacctat

SEQ ID NO: 268780 - DNA, 201 bp, Homo sapiens
ggatcacttgagcccggaagttcaagaccagccctggcagcatatctctacaaaaaaatttaaaaattagccacacatgatagtttgcgcctgtagtcccmactgctctggaggctgaggtgggaggatcgcttgagcctgggagtttgaggttgcaatgagctgtgattgtgctattgcactccaaccttggtgacagag

SEQ ID NO: 268781 - DNA, 201 bp, Homo sapiens
tgtctctctatccttatgactggttgctagggaagcagtctaccttccttccttcctgtctgcatgtttgtttgctagtcttcattctttttgtattttarggacaccaattttcctaaggttggattatctttcttcaattctgtttatttttctgattacattaatctttgtattctctgattagttcttctgtgtcat

SEQ ID NO: 268782 - DNA, 201 bp, Homo sapiens
atactctaaaataatgattaaaagtaaatatataaatcactaacatagtcatttataatgaagtattatgtactgtacataattgtatgtgctatactttyatacaactggcagtgcagtaagttggtttacaccataagttttaggtctcagatgatggtcatttgcatggttttttttgagacggagttttgctcttgt

SEQ ID NO: 268783 - DNA, 201 bp, Homo sapiens
gcagaagtcttctagaacagtaaagttatgctaatgaagacaaaaaataataaattcatgttaatgtagacagtaaaccatatcagggaaggtagttttggaccttagtatctaagctgtgtgtaagggtggacgttttccattcttagcccttaagtaaagatagtgccatgatgagaaacaaattgtgtttagttttgc

SEQ ID NO: 268784 - DNA, 201 bp, Homo sapiens
ggtgggtcccacggaatcctgttagtttctaccacctcctcccccttctctggagctggtggagcttcagaagtcctgtggagcgtcggctgggatcagtwtgtctcggtgaaaagtaaactttgaaaggtacctggtgctttcttctctccttcccaccccacagctatgaatgctttacctgggtggcggcaagtcatt

SEQ ID NO: 268785 - DNA, 201 bp, Homo sapiens
agtaacatgaagataatgtgtgaggcagctagttgggaacaaaatcacataaaacaattgcccccacccataggaggaagagtttgtgcataactgatgtytgatatgcatgtctttctgggcctgcatacctcacatagctgagactactctgagctatttttcttttctcaagcttatagcatctgtttttctcacgta

SEQ ID NO: 268786 - DNA, 201 bp, Homo sapiens
ggtaggagtgggttggggaaagtccaaaaggaaaagagaaaaagagaggagtgcgatccaaacagttaagtactaccacaaattatctctcatataatgastttactcagaaccattcctaattcatgtaaaccagtaatcaaggtgtgagagggcaaggtaaatgaagttgttatggtagtgaaggacggggtagattgt

SEQ ID NO: 268787 - DNA, 201 bp, Homo sapiens
caaacttaaaaaaaaatctgttgttaccaccatgtgtattttaagaaacagctctagtatcatttctataaagcattctctgacacaaagacacacccttrcccatcttctcacatcaccaatttcctggtatccagctctactcaagtatggtaaggctcctgtcttatgttcttatttgtgtgcttccctgccctacta

SEQ ID NO: 268788 - DNA, 201 bp, Homo sapiens
tgaacctgttaacagaaccattactgttcactatggaagaatcagaatacatgccctgcatttaaaaaatcaacctgtagttcacaacagctggtagtcakagggctaggccctaggctcaatagtcagacttaatagatagcactgatttttattaatttgaccgatttagacatttcagaggcattagcaaatatgtga

SEQ ID NO: 268789 - DNA, 201 bp, Homo sapiens
tgtgagtaatgcattgcactaggcattatgacctgctgcaacattgctgagtgataagaatttttcagctccattatagtcttaatgggaccaccattgtrtatatgtggttcatcattgactgacacattgttacttggtgcattactgtaggtgttgtttttgcagtggtatagctgacagatgagggcctaaaccagg

SEQ ID NO: 268790 - DNA, 201 bp, Homo sapiens
atcagaatacatgccctgcatttaaaaaatcaacctgtagttcacaacagctggtagtcagagggctaggccctaggctcaatagtcagacttaatagatrgcactgatttttattaatttgaccgatttagacatttcagaggcattagcaaatatgtgattagggtattcattaaattttagctgcaggatttcgttac

SEQ ID NO: 268791 - DNA, 201 bp, Homo sapiens
tatttgactggcagcctagcctagtaggtttgtttacatcagtgttaccacaaacatgtgagtaatgcattgcactaggcattatgacctgctgcaacatygctgagtgataagaatttttcagctccattatagtcttaatgggaccaccattgtatatatgtggttcatcattgactgacacattgttacttggtgcat

SEQ ID NO: 268792 - DNA, 201 bp, Homo sapiens
gactgagtgcagtggctcacacctataatcccagcactttgggaggctagggcaggatgattgcttgaacccaggagtttgagaccagcctggacaacaarggtgagatatgccgtctccacaaaaaaatacaaaaaattagccaggcatggtggtgtacacctgtagtcccagctactcaggaggctggggtgggaggac

SEQ ID NO: 268793 - DNA, 201 bp, Homo sapiens
ttttcgtggtaataactgtatatcaattagacttgaaaaatgagtatttttgttctttttctggtgtgggggacagcatgtctatttctctctgaaattgygtgtgctttttccatttacatctttcacctccttttcctggcttttgtccaaggtgaatttctgcctactctatttcatttagtcccttggatactttgc

SEQ ID NO: 268794 - DNA, 201 bp, Homo sapiens
ttacaagtggtattccattgaatggaacaaatatgtgaacaatcttacactgttttgttctttttgatttttagctttccagagtgttgaatcttccaccrgaaaacttgatcacatcaatatctgcagttccaatttcccaaaaagagttaagtataatacacttgtaacaatctataaaatgttgctgactttgttgat

SEQ ID NO: 268795 - DNA, 201 bp, Homo sapiens
tttttggtgtttgggtttttttttttctttttttttttaggttcaaattaacactatccctgaactctgaatttatcatcaaagactaaaaaattatacamagtcaaattaaagatttttgttgcttggctaccttgaacctgagaaataatcaaggatgttccaagttttaccttgctgttttcctccaattttgtttaa

SEQ ID NO: 268796 - DNA, 201 bp, Homo sapiens
acacttgaataattttacctcaagcttaatctttcatgagatccaggcccacagatgttatatgtaaaaatgtttatttagaaatagcatgcttgttcccyggtgccacaaagaaatagcacttgaacataaatttaattatctcagcaaggccatttttactctctgcagaaagggtacactcgccagcagttttgccac

SEQ ID NO: 268797 - DNA, 201 bp, Homo sapiens
cccaggtagctgggattacaggcatgcaccaccgcgcccagctaattttgtatttttagtttctccatgttggtcaggctggtcttgaactcccagcctcrggtaatccacccacctcaccctcccaaagtgctggcattacaggcgtgagccaccgtgccctgccatcatttgcatatttaatggatttttcagatcaca

SEQ ID NO: 268798 - DNA, 201 bp, Homo sapiens
gttacaatgggtttataaaaaaatatttttccttgtatcataacttcagaataaaataataaaaattaaaaaatatttttcttgcctggacatggtggctyacgcctgtaattccagcactttgagaggctgaggcaggagaatcacttgagcccaggagtgttagggctgcaatgagctaggataacactgctgtacagg

SEQ ID NO: 268799 - DNA, 201 bp, Homo sapiens
agttaatagatgccagccagtggccaaccttgcaagcaggatgttttaaatataacagtatcagacctgctagttaactcttttctagggggaaaaaaaaaggtaattttaactttatttagcagtatttatttatttaagtctgtcattccagtaattaacatagatcatctatgaaaggtgaaacgtttttaccttgag

SEQ ID NO: 268800 - DNA, 201 bp, Homo sapiens
aaaatctaagttaatagatgccagccagtggccaaccttgcaagcaggatgttttaaatataacagtatcagacctgctagttaactcttttctagggggraaaaaaaaggtaattttaactttatttagcagtatttatttatttaagtctgtcattccagtaattaacatagatcatctatgaaaggtgaaacgttttt

SEQ ID NO: 268801 - DNA, 201 bp, Homo sapiens
tacagacgtgagacactgcgcctggccataccttctactcttaatcgtgtcgagtcaaccttatattcacaatcttttaatgtctaatgtcttagtgtaaygtgtacagtcttttcctgttcactgttcctgtcatcttttaggttcgacgaggtgctttataaatcatctcaggactttcaacccaggcatatcgtcagt

SEQ ID NO: 268802 - DNA, 201 bp, Homo sapiens
tgatgagctcataacctattggtttctgtgagcttaatttcagtgatctattcagtatgttgaatttatgattaaatatattgaatttgacttgtgtcagwttatggggtcatagaaggtaaaagtgtgttttgtaatacttctcaggatacataatatgacaggttggtctttttatagaattatacctattccctgtca

SEQ ID NO: 268803 - DNA, 201 bp, Homo sapiens
tatgagtaagataaactagtcttagaattactttcaggaaaacttcattcctgctatttactgagtatatatatatatatgtttaccctgtattactaggkgtaaaacatgctgtgtagatagattccctttgtaccttgattgccaagaagcgttaagtaccttgagcttagagttttctggtataaatttatacctcca

SEQ ID NO: 268804 - DNA, 201 bp, Homo sapiens
tttatgcagaatatcttgagtctacatactcccagactgtactaggaattttgatatgtagtttaccaacctcagtttttggtgtttgggtttttttttttctttttttttttaggttcaaattaacactatccctgaactctgaatttatcatcaaagactaaaaaattatacacagtcaaattaaagatttttgttgct

SEQ ID NO: 268805 - DNA, 201 bp, Homo sapiens
tcttttttttttttattattttatactttaagttctagggtacatgtgcacaacgtgcaggtttgttacatatgtatacatgtgccatgttggtgtgctgyacccattaactcgtcatttaacattaggtatatctcctaatgctatccctcccccctcccaactaatattcctcttaacccaggctgcatatatcctttc

SEQ ID NO: 268806 - DNA, 201 bp, Homo sapiens
tattttcattcatgtctttaaattaaaggacatactgctttcttcactggggaggcacttcattaccatattactcttaaacccctttcaattacctaacyggcaaataaaggaaaatcagcagggaggtaatatattacctgttaccgtacattcatccttgaaataatgccattataaagtttcctaaaatttgaaaag

SEQ ID NO: 268807 - DNA, 201 bp, Homo sapiens
ggaagtgcttattaaagctcttctctttgatagtgtcagttgattttcactaatgtttgttttataagtacatattgcggaaatactaagaatattcacatgttttaagggctttttgttttaattatttctattttttaagaaagagaagattctggtgaagttttttctaaaatagtcatatcataatgcataatagat

SEQ ID NO: 268808 - DNA, 201 bp, Homo sapiens
gggaagtgcttattaaagctcttctctttgatagtgtcagttgattttcactaatgtttgttttataagtacatattgcggaaatactaagaatattcacatgttttaagggctttttgttttaattatttctattttttaagaaagagaagattctggtgaagttttttctaaaatagtcatatcataatgcataataga

SEQ ID NO: 268809 - DNA, 201 bp, Homo sapiens
cctgtgagaatacaagtgaacttaaaaccatgctccaagcctggggcggtggctcgcacctgtaatcccagcactttgggaggtggaggcgggtggatcaygaggtcaagagatcaagaccatccagcaacatggcgaaaccccgtctctactaaaaatacaaaaattagctgggcatagtgggtgcctgtaatcccaggc

SEQ ID NO: 268810 - DNA, 201 bp, Homo sapiens
agacattataaatacctagttttttaaaaattcagagattacaaagagatatttaatgaaaaggaaagctcttccccatctcagtttcctctgtgggtatytattaatccgaatatcagtgttttattcaccctcctagagatgttctatgcatttgtaaacagactatacatattttacattgttttcacttcttgcttt

SEQ ID NO: 268811 - DNA, 201 bp, Homo sapiens
tggcagcatatctctacaaaaaaatttaaaaattagccacacatgatagtttgcgcctgtagtcccaactgctctggaggctgaggtgggaggatcgcttkagcctgggagtttgaggttgcaatgagctgtgattgtgctattgcactccaaccttggtgacagagcgagaccttgtctcaaaataaaaatttcaatggc

SEQ ID NO: 268812 - DNA, 201 bp, Homo sapiens; identical to SEQ ID NO: 53054

SEQ ID NO: 268813 - DNA, 201 bp, Homo sapiens
ggggaggcacttcattaccatattactcttaaacccctttcaattacctaactggcaaataaaggaaaatcagcagggaggtaatatattacctgttaccrtacattcatccttgaaataatgccattataaagtttcctaaaatttgaaaagttgccaccattacttaccttcttttgcattttttttttcagcttcacc

SEQ ID NO: 268814 - DNA, 201 bp, Homo sapiens
cagtatacttccttagctaataattaggctgtaacaatcaatgtgtatatacttcccaacatactagactatgaagcacattttcctacatgaaatattayagtgataagttccccttatctgaagccatactgtataatactatcactcccactccatgacactttatgtacaggttttactgtaagggatgccaggaat

SEQ ID NO: 268815 - DNA, 201 bp, Homo sapiens; identical to SEQ ID NO: 53053

SEQ ID NO: 268816 - DNA, 201 bp, Homo sapiens
ggattgttgcaaagaaaaattaaggtacttaagacatgcctgtcagataggaataattcaggactggtgcagtgctcactcttgtaatcccagcactttgrggggcggaggtgggaggtttgcttgaggccagaagttagaggccagcttggtcaacatagcaagactgtctctataagaaataaaaaatctggctgggca

SEQ ID NO: 268817 - DNA, 201 bp, Homo sapiens
tttttttgcttttgtttttgtttttgtttttgtttttgttttgagacagagtttgctcttgttgcccaggctggagtgcaatggcgggatctcggctcacsgcaacctccgcctcccaggttcaagcgattctcctgtctcactttccctggtagctgggtttacaggcatgtgccaccatgccaggctaattttgtattt

SEQ ID NO: 268818 - DNA, 201 bp, Homo sapiens
agcaaggagaagtgttgagcgaagggtgggggaaagcctcttttaaaaccatcagatctcgtgagaactaactcactgtcacgaaaacagaatgggggaaaccaccccatgattcagttatccccacctggtccctcccatgacacgtggggattatgggagctataattcaagatcagattttgggaggaaatagaacca

SEQ ID NO: 268819 - DNA, 201 bp, Homo sapiens
ttgaaactactgtcttgttatttatatcttcatatgagtaagataaactagtcttagaattactttcaggaaaacttcattcctgctatttactgagtatrtatatatatatgtttaccctgtattactaggggtaaaacatgctgtgtagatagattccctttgtaccttgattgccaagaagcgttaagtaccttgagc

SEQ ID NO: 268820 - DNA, 201 bp, Homo sapiens
attttattcacattctcagtaagttccaaatcctgaagcatttgtgaataatgttcttcgtattcattgggttacatttttctcctgggcagagttctttkatctgttgtatgccacattttttccagctgtctatcttctggtctgtgcctccctccctattctctctctccctatttttgtttatttcagtttgatcac

SEQ ID NO: 268821 - DNA, 201 bp, Homo sapiens
ctcaggttatctgtctgccttggcctcccaaagtgttgggattagaggcatgaaccaccacgcccagccaaagttaaactattattctgtgtcagaatctrtattaaatgtgacttgtcaagttattcagtctttatccttaaataaatgagttatctgaattctctcatggtcagtaggtatttaaatagacattgagtt

SEQ ID NO: 268822 - DNA, 201 bp, Homo sapiens; identical to SEQ ID NO: 52987

SEQ ID NO: 268823 - DNA, 201 bp, Homo sapiens
ctttgtctgtttcagcaactaaagaactcaagaacccacaagagactgcagagagggtcgggctcgcagcactcattattcaggtctgttaagactcctayctgtgaggcccttttgtttggtactagagcaaatcccagcagtgaagatttcctctgtcgttttaggacttcaaaggtttactcttatctgactacaagt

SEQ ID NO: 268824 - DNA, 201 bp, Homo sapiens; identical to SEQ ID NO: 52989

SEQ ID NO: 268825 - DNA, 201 bp, Homo sapiens; identical to SEQ ID NO: 53048

SEQ ID NO: 268826 - DNA, 201 bp, Homo sapiens
ttatgttcctttaatatgaatgcatccagggctggcttattatttttattgttccattgtattctattctttttttttttttttcttaaatcggcttcatygagggataagtacatacaatacttatttaaacatataatttcaccatatttaaacatataatttgatgagttttggcaaagatatgcaagttgtgtaact

SEQ ID NO: 268827 - DNA, 201 bp, Homo sapiens; identical to SEQ ID NO: 53049

SEQ ID NO: 268828 - DNA, 201 bp, Homo sapiens
gtacttttaggtttatgtacaagttaataaagaagcagcagatgataaaagtgtagcaaaagcagcacaggagttcttccaacgattggaactgggcgatrtgcaagcactttcactgtggcaaaaatttcgggacttgagcattgaagagtacattcgggtttacaaggtattggttgaccctcccttctgctttcccat

SEQ ID NO: 268829 - DNA, 201 bp, Homo sapiens
ttttttttttcttttttttgagatggtgtctcgctctgttgtccaggctggagcgtgatctcggctcactgcaacctccacctgctggattcaagcgattstcctgcctcagcctccctagtagctgggattacaggcacgtgccatcatgcccagctaatataccaagtcttatgaaatgtcattttatcattaaaactg

SEQ ID NO: 268830 - DNA, 201 bp, Homo sapiens; identical to SEQ ID NO: 53050

SEQ ID NO: 268831 - DNA, 201 bp, Homo sapiens
gggattacaggagtgagccaccacacccagccacctgactaaaaaaaattttttttgtagagacagtcttgatatgttgcccaggctagtctcaaacttcwggcctcaagcagtcttcccatctcagtctcccaaagtgctgagattacaggcatgagccattgtgctgggggtatttttacatttttaaattttgatttc

SEQ ID NO: 268832 - DNA, 201 bp, Homo sapiens; identical to SEQ ID NO: 53051

SEQ ID NO: 268833 - DNA, 201 bp, Homo sapiens; identical to SEQ ID NO: 53052

SEQ ID NO: 268834 - DNA, 201 bp, Homo sapiens
tcagcctccccagtagagtagctggactacaggcatgcaccaccacgcccagctaatttttctatttttaatagagacaggatttcaccatgttggtcagkctggtctcaaactcctgacttcaagtgatccacccagctcggcctcccaaaatgctggtattatagacgtgagcgaccatgcccggccaagagtgatgtt

SEQ ID NO: 268835 - DNA, 201 bp, Homo sapiens
accccatctttactaaaaatacaaaaaatcagctggtgtgatggtgtgcacctgtaatcccagctactcaggaggctgaggtgggagaatcgcttgaaccygggaggcagaggttgcagtgagctgcgcaccactgcactacagcctgggtgacagagctaggttctgtctcaaaaaaaaaaaagaaaagaaaaaagacta

SEQ ID NO: 268836 - DNA, 201 bp, Homo sapiens
gctatcctcccatctcagcctgtcaattagctgggaccagaagcatgggccaccacacttggctaattttttaaattttctgtagagatgatgtctgcctrcattgcccaggctagtcttgaactcctcagctcaagcaattctcctacctcagcctcccacactagaattacaggcttgagccactgtgttgggctctcc

SEQ ID NO: 268837 - DNA, 201 bp, Homo sapiens
tccattttggtacttatgacaccatggattaggaaatggggagagaggggtatttcaggccagtggttcttctacttgcctgaggtcacttatgtaactgyggtcatctagagactagtggggctacaaatcaaaaatggctctttacttctctagccaggcatctctctctctcccaccacattgtctctcccgcagggt

SEQ ID NO: 268838 - DNA, 201 bp, Homo sapiens
tgactgaattatctacgtttgtactgttctttgcttccaatctattctcacagacccaccagcattccattctgcttagaagcacaagttgtataataatwaccatactacagcaaaaaacaaacaaaaaaactatcatcagagcaaacaggcaacctacagagtagcatagaattttcacaatctatctgacaaaggtct

SEQ ID NO: 268839 - DNA, 201 bp, Homo sapiens
aaaagcctattaaaatatttactctctggctcttcaagaaaaaaaaatgccagcttctgattagtgttttaaaacaacatccattttggtacttatgacaycatggattaggaaatggggagagaggggtatttcaggccagtggttcttctacttgcctgaggtcacttatgtaactgcggtcatctagagactagtggg

SEQ ID NO: 268840 - DNA, 201 bp, Homo sapiens
ttttggggccaggcatggtggctcatacctataatcccagcactttaggaggctaaggtgtcaggatcatttgagcccaggagttcaagaccagcctgggygacagagtgagcgagagaccctgtctattaaaaagaaaaaaaaaaaatttttttttttttttttttttgagacagagtctcactctgcgcccaggctgga

SEQ ID NO: 268841 - DNA, 201 bp, Homo sapiens
ttgtaaccctgtgtattttattttatgaatttagaaacattttgagaaggggtctatatgcttcaccaggggcccatggcaaaaaagaaaaagttacactstgtaatgtacccaacttggaaaattttaaatgagaattctcagaatgtgctttttttgctttctttccgtgttagagataacaatgacctgttatgtact

SEQ ID NO: 268842 - DNA, 201 bp, Homo sapiens
ttacccggatctgcttagtaactcttggtttatggccactttgtttcagagatcttgcagctgctatagatcgaatggacaagtataattttgatacaatratatatgtggtaagtaatcagaacaaaaagttatgatctcttaactcatgaaaactacagaggtagaaattggatgccatgttgaaaaactatggaaaac

SEQ ID NO: 268843 - DNA, 201 bp, Homo sapiens; identical to SEQ ID NO: 52988

SEQ ID NO: 268844 - DNA, 201 bp, Homo sapiens
aaaatagcattctgttgttcaactgtagcagtatacttccttagctaataattaggctgtaacaatcaatgtgtatatacttcccaacatactagactatraagcacattttcctacatgaaatattatagtgataagttccccttatctgaagccatactgtataatactatcactcccactccatgacactttatgtac

SEQ ID NO: 268845 - DNA, 201 bp, Homo sapiens
tcaagaaaggtgacatctaaattgtgaatcaaatcatatcacttatctttctttgttgcacgagtctctaccagaaccttaacttcttcaacttccattcwtgccccattctatcatttttgtaggaacctagctacaatgttaatttgtttttctaacatagcagggtctttccattcccattgcgtagattattccttg

SEQ ID NO: 268846 - DNA, 201 bp, Homo sapiens
cgtctgggagtatattttgatgaatattcaggagaatcattttatcgtgaaaaatctcaagaggtcttaaagttgctggagagtaaaggactcctactgaraacaatgtatgatcaggttactattcttcagtaaaattatttgttctttgaaattgttattgatgtatcctttgagtaaggacaacagaatgcaatgtgc

SEQ ID NO: 268847 - DNA, 201 bp, Homo sapiens
atacttttataaagttgtggtttggtaagcgaaaagttctcatttttgcaaaataatgcctgctcattttaaataattaagcaatacaaaaggatgcaaakaattttttaaactaccccataaatcatcaacactgacttttatttttaggtatatttctatgcagatatacaggcagaaaaaaggaaggaaaataggaag

SEQ ID NO: 268848 - DNA, 201 bp, Homo sapiens
tgctttcttctctccttcccaccccacagctatgaatgctttacctgggtggcggcaagtcattagaccatgattagaccccatagaagttagtgttcttkacactttagtgacattgatgatggatctggattgttcttcagaaggacctcattttaaagctgcttatttctcttgcagtcacttaggcagcctacccta

SEQ ID NO: 268849 - DNA, 201 bp, Homo sapiens
tgtgaaaatgtgagattctttggaataactgccctacaagtaatttcttactccctttccataacacatgaaaacacaatgatgaatgttttagtaaaaawcattgagttggtaaatttagtgaaaagaattttctacttatgctttgataatagagaagtacatggttcttatgtcaaaaaatggataacaagaatgaga

SEQ ID NO: 268850 - DNA, 201 bp, Homo sapiens
tatgtaaggatttttttcttcctttaaatgacacttaagacatacagaggtgaagaagctacaaagtcttttttttttttttttcttttttttgagatggygtctcgctctgttgtccaggctggagcgtgatctcggctcactgcaacctccacctgctggattcaagcgattctcctgcctcagcctccctagtagctg

SEQ ID NO: 268851 - DNA, 201 bp, Homo sapiens
tctagaagggatgtggatggttatgaacaaggtggttttctttgattgccatatagtagtcagtggttctttcctggaatcagaaaaatttactcacatgyacaatagggaatgtacggaaaaataagccaactgggttttcttagcattgagggtagactttgctaatttatattttatattcttaaacatggctggagg

SEQ ID NO: 268852 - DNA, 201 bp, Homo sapiens
ctaatctttaatgacaatttcatggtgtctattttagcaaattgaaatcaaaattgagtccacccttgtatagcagcagcagctgtatcttctgtaaagcyatttaataaaggaaatgttgcttttactcaacaagtattgaaatcagacacttaacaggactgttttcttgattatactttttaccttgtcttctctaga

SEQ ID NO: 268853 - DNA, 201 bp, Homo sapiens
aatattgtaccctgagaggaaactttaaaaaatcaatctgtaccaagccaaagtggaaatgtacaagcctcttaaagaaagtgacgtctccaggtctgcargtttgggcaagtttttacggttaatatgtttgtgaaattcaacaaataacttctgttgacaacaggagagtatatgttgttattaatcaagagacagtgg

SEQ ID NO: 268854 - DNA, 201 bp, Homo sapiens
ggcccagaagataagcaaagggtgatactttgtcttcccctttaactgtacagtgagaggtaggagtgggttggggaaagtccaaaaggaaaagagaaaaagagaggagtgcgatccaaacagttaagtactaccacaaattatctctcatataatgactttactcagaaccattcctaattcatgtaaaccagtaatcaa

SEQ ID NO: 268855 - DNA, 201 bp, Homo sapiens
tttttctaatctttaatgacaatttcatggtgtctattttagcaaattgaaatcaaaattgagtccacccttgtatagcagcagcagctgtatcttctgtraagctatttaataaaggaaatgttgcttttactcaacaagtattgaaatcagacacttaacaggactgttttcttgattatactttttaccttgtcttct

SEQ ID NO: 268856 - DNA, 201 bp, Homo sapiens
cagtaatttacttcctaaagtctagaaaataaaaatattgtaccctgagaggaaactttaaaaaatcaatctgtaccaagccaaagtggaaatgtacaagyctcttaaagaaagtgacgtctccaggtctgcaagtttgggcaagtttttacggttaatatgtttgtgaaattcaacaaataacttctgttgacaacagga

SEQ ID NO: 268857 - DNA, 201 bp, Homo sapiens
gatatgttgcccaggctagtctcaaacttctggcctcaagcagtcttcccatctcagtctcccaaagtgctgagattacaggcatgagccattgtgctggkggtatttttacatttttaaattttgatttctgatacagtaaatactagcagataccacttacgtgaatgctattacttcaggagtcacaagatcaatttc

SEQ ID NO: 268858 - DNA, 201 bp, Homo sapiens
tttcggttcacaatctcaaatacatatatgtatgtgatgctcccatgctaggcaagacacccacacattttagctctgacgggcattgttggtgaagccaracatgccagagattagtctctagaagggatgtggatggttatgaacaaggtggttttctttgattgccatatagtagtcagtggttctttcctggaatca

SEQ ID NO: 268859 - DNA, 201 bp, Homo sapiens
aaattacctgaatcagtaagatggttatgtgaaattaatatatacaggtcactataataccaagtttttttgttttttatttttcaattctgatttgggcycaacagttgtttttaaataactttattttgaagtaatttaatactcacaagaagtttcaaaatagtacggtgtttccccccaaagatagtacataaccat

SEQ ID NO: 268860 - DNA, 201 bp, Homo sapiens
ttcattgtaaaattcaatttgtaaaaactttgatctggacagaatataggcagaatcccattggatgaagtagtatgtcctacctattttttttttttttyccctaatggctcttttgcataaaatcttctatttatttgagtaattctcaccacacaagttacctttggggaaggtaacttcacacattcaaagaagacc

SEQ ID NO: 268861 - DNA, 201 bp, Homo sapiens
cagtgtgatttattatgtctgtccctccattgaagtgtcactaactttgtcaaaaatacctttcactaattagaggtgccagaatttttatactcgctacycaggaattggtcacttcaataatctgaattactataaccttggtcctcttttcatgaacagcttgagcactgacattctgttgtctaggtgattacgtga

SEQ ID NO: 268862 - DNA, 201 bp, Homo sapiens
tagaatactcagaagattgaagttcacatttcctactgactcggtggagttgtatggctcttatttccctcccttgtagagcagtccacttagacactctwcttgtggcatcctctttgtgtttagttaaaacatatcaattgacgactttagtctgtcagacctcaaatatcttaatttgattcaagtccaacctatttt

SEQ ID NO: 268863 - DNA, 201 bp, Homo sapiens
gtagtcctagctactcggaagcctgaggtaagaggatcgtgttagcccaggaggtcaagactgcagtccactgcacccagcgtggttgacagagcaggacsttgtctcaagaaagaaaccccagagtaagacctgatgtaggcttttgtggttttaataaagagaaattgcctacttttattagttaaatgtagaagtgag

SEQ ID NO: 268864 - DNA, 201 bp, Homo sapiens
tcctggaagatgttttaaatgagattcaattaaggatgctacagaacatggcttcaattaagagtgaattcagttttttcttattaaagtcataacttacrtgccacttttatgttattctggactttgggcagtgtgatttattatgtctgtccctccattgaagtgtcactaactttgtcaaaaatacctttcactaat

SEQ ID NO: 268865 - DNA, 201 bp, Homo sapiens
cccaggaggtggaggttgcagtgagctgagatcacaccaccgcactccagcctgggcaacagagcgagactctgtctcaaaaaaaaaaaaaaaaaaaaaaacagttacataataacacaaatagtataaaaatttctttaagttcaaaatggcctccaaaggttctatttcagtatttctaccttgcccctttctagcagg

SEQ ID NO: 268866 - DNA, 201 bp, Homo sapiens
tttcaaaatagtacggtgtttccccccaaagatagtacataaccatagtacttttatcaatagcaggaaattaacattgatagagaccttactgaaatttygccagcttttacatgtactctcctgtaaatgtttgtgtggctatggttttatgagactttatcacatgtatagattcatgtaaccatcaccacattcaga

SEQ ID NO: 268867 - DNA, 201 bp, Homo sapiens
ttgaacccaggaggtggaggttgcagtgagctgagatcacaccaccgcactccagcctgggcaacagagcgagactctgtctcaaaaaaaaaaaaaaaaamaaaaacagttacataataacacaaatagtataaaaatttctttaagttcaaaatggcctccaaaggttctatttcagtatttctaccttgcccctttcta

SEQ ID NO: 268868 - DNA, 201 bp, Homo sapiens
atcttactctgttgcccagcctggaatatagtggcacaatcacggctcactgcagccttgacctcccaggctcaggtgattctcccacctcagcaacccargtagctaggactacaagcacacaccagcacacccaactaattttttgattttttatagagacagggtctccctatgttgcccaggctggtctcaaactct

SEQ ID NO: 268869 - DNA, 201 bp, Homo sapiens
ccttccttatccacaaccctaaatattatggcttgcagtaaatgcctgaatgaatttgcttttatagttctcttttgcccccttttctaattatatataakttgtggaatataaaatgtattgtttgtccaggaaataagtaactattataggatacactaattaccatttgtcagaatttaacttactttgttaacatag

SEQ ID NO: 268870 - DNA, 201 bp, Homo sapiens
aaaatatttaacacccacagtcatttattgcatttccattttggtgcatatgcttcactagtggtttttctctgtaccttatagcattcttttcccatgayatctagctgttttgtacgtgggacctaggattttgttggcaagcatttgaaactttttctttaattattctaatttggtttttttggttacaaaacaggg

SEQ ID NO: 268871 - DNA, 201 bp, Homo sapiens; identical to SEQ ID NO: 53055

SEQ ID NO: 268872 - DNA, 201 bp, Homo sapiens; identical to SEQ ID NO: 53056

SEQ ID NO: 268873 - DNA, 201 bp, Homo sapiens; identical to SEQ ID NO: 53109

SEQ ID NO: 268874 - DNA, 201 bp, Homo sapiens
agtgcaagtttttttccttacacatgagaaatgactttcaatcaatcagaattggcctggaatgaaccttcccggacctaggtcggtcatcagtcaaggaygctgtatcagtctgctcaggctgccgtaagaaaataccacaggctggtggcttaaaccacagaaatgtgtcttctctccattctagaggctggaaagtct

SEQ ID NO: 268875 - DNA, 201 bp, Homo sapiens
tttcatgtggaggtcaaacagtcagaaacgtttgggaagtgctgtgtaatgctaactgttcgtgcataatgttttcccatttagtaagtgctgttgcatgygttttctgtgattctcaccacagcccaatgcaaaaaataaaaaaaggatttacgcttttttttttttttttttttttttttgagatggagtctcactcta

SEQ ID NO: 268876 - DNA, 201 bp, Homo sapiens
tgtggtagtctagttgtgatggtctgtctgttgcttctgttttccagctatatcatttgcaaacaaatgacaattttgtacttaaatatatatatattgcraaggggcttaacactttctgcccttcccagaaatgtatctcttagcaatatgactcgtagaacctaacagttccatcacaggaggaagtgttctgcagta

SEQ ID NO: 268877 - DNA, 201 bp, Homo sapiens
tagtgagaccctgtctctagttaaaaaaaataaaaacgtgcatggaagctgagggtgctgcttgacctgatgacgctgtggtctctgtgtttgaaacttgrctgcttcagctgcttagtgaatattacgtgagtgaccagggagtacttcccacccttgtgagcctgcacattctggggtatcttttgagttgtcactgtc

SEQ ID NO: 268878 - DNA, 201 bp, Homo sapiens
atcctaagaagagataggtaatatataaaagagtattaaaaagaaatggagagtaaaggtatatgtcgggcagatgcagtagaaaagcaagggtcatgacrtcaatgctgggcaaagctaaattgtgaagacaaaacaataatgaaacagggttattcatcacgctaaagcgtacagtccataggatgatataactaccat

SEQ ID NO: 268879 - DNA, 201 bp, Homo sapiens
aagcgataacatactatttcatatagaatataagacatttacaacagtatacttctatttctcctctcccagcctttccgctattatcatacataaacccstcaatatcttattatttttgttttaaagaaatttaagtgatttttaaaaatctttttttattatactttaagttttcgggtattaaaaatcttttatatt

SEQ ID NO: 268880 - DNA, 201 bp, Homo sapiens
tccacgtgccagtacctcatgcctttttattgccccataatattccatcatacagatatactacgttttatttatccacgtatctgttgatggacactatrttatgtccatttgggggctgttatgaatgactgttgtgaacattgatacgcaagcttttgtatgaacgtgtgttttcgtatctcttgggcatatacctag

SEQ ID NO: 268881 - DNA, 201 bp, Homo sapiens
attaaaaaccgtgttactctgctcttccttcttaattgtaataaatttgcttttgtgtttgaatgacaacttagtcttttattctgagtatcagttactgwgcagtgtttataacgcgaatgatgcttttagggcattttgaggcatgtaagagtgatttaactccactctgaatgatcccaacatccttttgagtttcag

SEQ ID NO: 268882 - DNA, 201 bp, Homo sapiens
tattttggaaacttatgtctcatgccaggatctgcagatagttctttttcaaaatattgtttagacaaaataaatttctttaaatataatatctctacttyaaatgcctggggtgttgcatgcatttttctaggctagcaaagcttaaagattatttctataatttcagttacatttacctttatagatgggttactctaa

SEQ ID NO: 268883 - DNA, 201 bp, Homo sapiens
atgttggccaggatggtctcaatctcttgacttcatgatctgccctcctcggccttccaaagtgctgggattactgcgccactgtgcccggcatgagccargcatgagccactgcgcccggccttgagactttagttcttatatcccaattgctccccacccatgctttagatctgataagcatgtcataccacagttttt

SEQ ID NO: 268884 - DNA, 201 bp, Homo sapiens
tgatataaagaatttaatcaaaatttcacccatttgtcaatattttgccacatttgctgcacatttctctcatatgctctatatgttgtaacgagcaggcrgtcttcccagcccctcctttaccttcagggccctggcctcacttcttgtccccctcgccccaggaggctgtgaaaagcaaagcactgtgcctcccaggca

SEQ ID NO: 268885 - DNA, 201 bp, Homo sapiens
atttatatatatattatatatatattatataaatatatatataatatatatatttatataatatatataatataaaaatattatatatgtatatatatttwttttttttgagatggagtcttgctctgttgccaggctggagtgcagtggagcaatctcagctcactgcagcctccgcctcctgggttcaagcaattccac

SEQ ID NO: 268886 - DNA, 201 bp, Homo sapiens
gaacacagctgttggcatttgatcaggattgaacacgagatagtgaatccggccttgactgagagtgctttcttctttataggcctgtactaactttggtracaaacttctggtgataatcgaaagaataagggggtaaagagagattccttttaagaaattcagaaaaatctctgtaatacagaatttttcagttttaag

SEQ ID NO: 268887 - DNA, 201 bp, Homo sapiens
tggatttggttttctctcactctttggctgcagtgggcgtctttgttcacttccggctgtcacagggccaggcactgagcagtcacgccccagcacaggcrcaggggtgcacaaggctcctctctgccaggccccactttcagagcttatggtaggggctaaatgacaaaaagtatattctttaattgattcttcctagaa

SEQ ID NO: 268888 - DNA, 201 bp, Homo sapiens
taaaaatagttaacctaagaaggtttatattagaagcttgaaagaagaatagattgtacatttggggtatcatgtaaatgctaatatttttaattacttcrgttttttatatgtatatttataaaataattaacatttcaaaactttcatcatctttatccaagtaaagtttttagttgcccttttttttttttttttttt

SEQ ID NO: 268889 - DNA, 201 bp, Homo sapiens; identical to SEQ ID NO: 53068

SEQ ID NO: 268890 - DNA, 201 bp, Homo sapiens; identical to SEQ ID NO: 53070

SEQ ID NO: 268891 - DNA, 201 bp, Homo sapiens; identical to SEQ ID NO: 53072

SEQ ID NO: 268892 - DNA, 201 bp, Homo sapiens
ctcactttggttgttgtgtcgctgtcgtatttttcttttttcgcagtattgaaatgttcactcctagggaccgaacactggttttagtgtccatagtggcaaaaaaaaaaattttttttcaaaacttgtttctatttggtcctctgtgacccaagttgttgcttagctttcctgcctagtaagagccagaaacgagattag

SEQ ID NO: 268893 - DNA, 201 bp, Homo sapiens
tctgatgagaagctctgcagcttagagcccctgtgtgcccaacacttaagcagcctttagccatgcctgtttttctctttgtttcttattggggatggggktgtgtatattttggtcataacagttttagagacattaatttccacttttttttttttttgaagaatccaaagctttatagttgttgtactcctgatgctg

SEQ ID NO: 268894 - DNA, 201 bp, Homo sapiens; identical to SEQ ID NO: 53111

SEQ ID NO: 268895 - DNA, 201 bp, Homo sapiens
tttgccacatttgctgcacatttctctcatatgctctatatgttgtaacgagcaggcggtcttcccagcccctcctttaccttcagggccctggcctcacytcttgtccccctcgccccaggaggctgtgaaaagcaaagcactgtgcctcccaggcacatgatcttctcagaaaggaggagccccagggaaggaggaggc

SEQ ID NO: 268896 - DNA, 201 bp, Homo sapiens
tctgttaccaacattagaataacatacctgaattactccaggcagcaagaatgcctaccagatggataaggctgagggaaggtgttgggtggggggtgggrggggtcccacgtgaactgtcccgtcttcctggcctgtttagggaggaagattttgccaccaggagctcctgctgttgagccagctccctgctgttctggg

SEQ ID NO: 268897 - DNA, 201 bp, Homo sapiens
ccacgcccaacacgggcctcggggtcctttcttagtcacagtgaccacgggaaaagaaaaggggcatctgagacagacagatggcagatgagacccccccwgccaaaacccacagccctggcccctcccatcccgtgccggcttgcacagcctgcgtcgggagcaccctgcctttccgtctgcagtcattagggcccgcag

SEQ ID NO: 268898 - DNA, 201 bp, Homo sapiens
agcagccagcgtctcttgcctttttcgtccgcttgctgctttctggtttttatcttcttacccatgtgagcttccagcaccacctgctccccccaccaccaaaaaaaaaaaaaaaaaaaaaaaaaaagctccactccaccggtcttttataacctatcaaactttaaggatatttttccattcaaatctagttatgccaca

SEQ ID NO: 268899 - DNA, 201 bp, Homo sapiens; identical to SEQ ID NO: 53073

SEQ ID NO: 268900 - DNA, 201 bp, Homo sapiens
cttttatacgtttttaggatcttggtggcgctctcggttcataatgctctgagttggtgttacgtcatattatcctgtattgtactgtgtatacatacgtyacgtaaatgcttaatgtggtctcgcatgtttttctgtgaatttggcttaaactttcagactaggcatctaggaggtggcggcaagtggaaggtggagctg

SEQ ID NO: 268901 - DNA, 201 bp, Homo sapiens
aaaaccaagcctttcatacttggaaagcaaattaaaactgtgttataataacgtattttgaaagaacaggtgtttaaaggtagctattctccccccttgtrttgccagattaatcatctttgcaaaaagtgcttatgtaagcaagaatttaacattcagaattttttcttttcttgggctataatgggcttaaaggctata

SEQ ID NO: 268902 - DNA, 201 bp, Homo sapiens
aatagggaattgctgaaagtatgaatttaggatcctagttcgcccacctcctcctcagtggagagatcattatcctcgctgatgctcttgcgagaagcccrtggaaacaggactaaagtgttatctgctcgtgtcgtggttataacctcacctctccatagctgcgtgtggtcagcacgccggctggcgtgggagggcaag

SEQ ID NO: 268903 - DNA, 201 bp, Homo sapiens
aactggcatacgatccgttcagagattcaataaggtaaccaatcatatttagacttagtataaaagagggttgggcatggtgactcacgcctgtaatcccrgcactttgggaggctgaggggagcggatcacttgaggtcaggagtttgagactggcctggccaacatggtgaaaccgtggtgaaatcccatctctactaa

SEQ ID NO: 268904 - DNA, 201 bp, Homo sapiens
cttgcacagcctgcgtcgggagcaccctgcctttccgtctgcagtcattagggcccgcagccccggcctctcccatcccgtgccggcttgcacagcctgcrtcgggagcaccctgcctttccctctgcagtcattagggcccacagccccggcctctcccatcccgtgccggcttgcacagcctgcgtcaggagcaccctg

SEQ ID NO: 268905 - DNA, 201 bp, Homo sapiens
ggactgctctagaccaatcccaggtgcacgaggcttggggcaggagaggcttctttgtttctgtaggagccctttgcggggaggacattttcctgtttccyaacatgtccctgttccctctctttgtgcccggtttattcagcagacgtgttttcagcatcaaacagatgccaggcttgctcctagccctgggaacatagt

SEQ ID NO: 268906 - DNA, 201 bp, Homo sapiens
gaagtaagcttgcttttcagatagcttagtttgtagccaacgccattgcatttctaattccaggcacagaaagatccgaagaaggaccgtcctcttgcackccgcaagtccgagctgcctcaggacccccacaccaagaaagccttggaagctcactgcagggccgatgagctggcctcccaggacggccgctagcctccg

SEQ ID NO: 268907 - DNA, 201 bp, Homo sapiens; identical to SEQ ID NO: 53067

SEQ ID NO: 268908 - DNA, 201 bp, Homo sapiens
tgtttatcgtttctcttctttgtctgcattcttttggatcaattgagtactttttatgattcccttctatctcatttgttggcttctttatgataactccrtattgtttgattttaattgttagtcttttctagaacacacctttaacttatcacaatctaccttcaagcgataacatactatttcatatagaatataaga

SEQ ID NO: 268909 - DNA, 201 bp, Homo sapiens
ctttgataaatgtgtatagtcacgtcttccgcaccacagtcaggatatagaacagtttcttttggttttgtttgtttgtttgtttgtttgtttttgagacrgagtctctgttgcctggctggagtgcagtggcaccatatcagctcactgcaacctccgcctcctgtgttcaagtgattcttctgcctcagcctcccgagt

SEQ ID NO: 268910 - DNA, 201 bp, Homo sapiens
agagggacggctgtttcctctcccccaagacctacagcctcgtctctgggtgagctgacccctctctcccttggcagcttcctgggcggcgtggccctacrgctcctgctctggcctctgtatccctgatgggcagccccagaaacctcggaagcagtgaccgtgctttccttccaggcgccatggttcctcaggccctga

SEQ ID NO: 268911 - DNA, 201 bp, Homo sapiens
tgaacccgggagtgggaggttgcagtgagccaagatcgcaccactgcactccagcctgcgcaccacagaataagactctgtctcaaaaaaaaagaaatgcrgattctttgggtcccaccctagacctgtggactctctgggggtgtgttgcagtgctgtgtgttttcagtgctctccaggtcatcctcaggcaagccaaaa

SEQ ID NO: 268912 - DNA, 201 bp, Homo sapiens
tgggattttttttttaatttctgtggtttaatttataatatggccaatatcaatagatatagttcttataaacaaaagttctttaggatttgcaaccgttytgaggagtttagtaggggcctaagaccaaaaagtttcagagctacttttctaaaacagtgccactcaaaggctgcagcttcaacagcctttaggcttgtt

SEQ ID NO: 268913 - DNA, 201 bp, Homo sapiens
tctgctcttccttcttaattgtaataaatttgcttttgtgtttgaatgacaacttagtcttttattctgagtatcagttactgtgcagtgtttataacgcraatgatgcttttagggcattttgaggcatgtaagagtgatttaactccactctgaatgatcccaacatccttttgagtttcagttccctgaaaagggtac

SEQ ID NO: 268914 - DNA, 201 bp, Homo sapiens
gtggtaagagtggcatagttgtatatttttgcaaatctctgcaatgtctggcttactaggagacattaagacaaggattcccctgtccgcttctgcattcrgtctgttgccatatgttgctttggtggaagtttgggaaaacgtggttgggaagggaggagtattttagtagccttttcagatagtcgtggacatttgctt

SEQ ID NO: 268915 - DNA, 201 bp, Homo sapiens
tagtagccttttcagatagtcgtggacatttgctttgatattacaccaaaagttagtatgggtcgtttcttaaaggaatctgtaaggtggaatctgaaacyatatcagtaaaagccgtctgtaaattttattccattaaatcaagtggtctactttgtactttgaatggctcttttgcccttgaatggtgttaacactatt

SEQ ID NO: 268916 - DNA, 201 bp, Homo sapiens
caaaatacacctaagtgaactatagagcatgagagatgacaagtcagtcaggaaagggccggggagacagaccagccattcctctagagctgccagctgcrtggtctgttctcatctcagctctcagtgcagttcgcaggtaggaagcatgcaagcagcagggccttctgatggcagatcctcctctcgtggaatcccaca

SEQ ID NO: 268917 - DNA, 201 bp, Homo sapiens
tactaagatgtttgtgaactcaccaaacagattggcccccccatgacctagtgggtacatctgtagtaattggatttggggttcattcagcctctttcaaccaacatttaagtagttcctattgcactgccctgttacaagatcaagaacagcaaagcactattgctgtgctgtttatcagggcatatgcataattgtgtt

SEQ ID NO: 268918 - DNA, 201 bp, Homo sapiens
tttgcaatttaggtcctgctctgtagtagatcaagaacttgatcaagaatgcaaaccaaaatagcattctctcctgagtaaagctgcctttgaaagtcagscctagtatctgtgtgatattcggggccccagaacgtccaactgcttggtctgtccactgcccttagaaaggggcacgtcccctcctgggagggttacctt

SEQ ID NO: 268919 - DNA, 201 bp, Homo sapiens
tggatctgttcattcagcagacatctgtggtcccactatgtgctggccagttttagatgctgaggataaaaatggtaaaaagacaaagttctcctctgagaaaatttataattaagcatccagtatgattaatgtagggtatataaattattatcaattgttctcgttttgaagatactgtcttttgaggaaaattgattt

SEQ ID NO: 268920 - DNA, 201 bp, Homo sapiens
agattaacgtgctctccattagaatctcagcaggctttttatcctcaagaagttgagaaagctaattctaaaattcacatggaaatgcaaaggatctagartagccaaaacaactgtgaaaaagaacaaagttggaagactaataatactatgcaattccaagacttcttatagtttttgtttgtgtttggagacagggtc

SEQ ID NO: 268921 - DNA, 201 bp, Homo sapiens
ggatgcgtttgcgaaatacttcctagtgatgcaggctgtgtcctcatggttggggctgctctttttttttttttttttttcctgagacggagtctctatcrcgaggctggagtgtggtggcgtgatctcagctcactgcaacctccgcctcctgggttcaagcgattctcctgcctcagcctcccgagtaactgggactac

SEQ ID NO: 268922 - DNA, 201 bp, Homo sapiens
gttacaagcagtggagacacacttgggcttgcatagatgaagacaagtgtttttaaggcacagtcacagagggactccacacagaggagcagggtggagckggactgtggaggcagaagggtccagactccagcagcgtgagtgacccctctgtgtcctcatccaccccgccactcccagtctttgcgtgtcatgcccctt

SEQ ID NO: 268923 - DNA, 201 bp, Homo sapiens
tgcaggctgtgtcctcatggttggggctgctctttttttttttttttttttcctgagacggagtctctatcgcgaggctggagtgtggtggcgtgatctcrgctcactgcaacctccgcctcctgggttcaagcgattctcctgcctcagcctcccgagtaactgggactacaggcacatgccaccacacccagctaattt

SEQ ID NO: 268924 - DNA, 201 bp, Homo sapiens
acacccagctaatttttgtatttttagtagagacggggtttcaccatgttggccaggatggtctcaatctcttgacttcatgatctgccctcctcggcctyccaaagtgctgggattactgcgccactgtgcccggcatgagccaggcatgagccactgcgcccggccttgagactttagttcttatatcccaattgctcc

SEQ ID NO: 268925 - DNA, 201 bp, Homo sapiens
gtgaagaacctgattaagactttttcctattcttctatttgtactctgaagttttcttactgagttattggacatgtttatatattctggatatgagtctrttggttatatgtattcaaatagttctatcctgtgccttgccttttcatccttgtggatgtcttgatgaaggaaaatgtttaatttcagtgtagatatatg

SEQ ID NO: 268926 - DNA, 201 bp, Homo sapiens
tctgcagctgggggcacgtggacgaggctgagacccaggcagagtgtggccttcgcccaagggtccggtaactttgctggctgtttcgaagaaccgcacaygccccacttccacctaaaagtggactcgccagccagaagacttcacatcctgcaccgctactcacgtcgatgtttccgcagactagatgctcgcccgctg

SEQ ID NO: 268927 - DNA, 201 bp, Homo sapiens
atttctggaacagcaagtcctccagcttggttcttctcaggggtgtcttggttagtcttaaccccttgcatttccacatacattttagaatccatgtattsagttccacagaagtgtgtgttggaatatggattgggatagcattgaatccgtaggtcagtttcttactcgggtaactgttatccacaggctgctagagca

SEQ ID NO: 268928 - DNA, 201 bp, Homo sapiens
tatgtttaagaaagtctctgattcccactctttaacctaagagggaagaatctacaaagaatgacaagactcccgctggcctggttcaggtcaaatgcccrcccttgaaccgagtgtgctcccgactgcttgaaaccgcctctcgtttgtatttcacagtagcagtgtgggttactggcaccacttaggatacttaaaagc

SEQ ID NO: 268929 - DNA, 201 bp, Homo sapiens
tgaggcaggagaatcgcttgaacttggaaggcagaggttgtagcgagccgagattgagccactgcactccatcctgggcaacagagtgagactgcttctcaaaaaaaaaagacatggagtctggctatgtttcctgagttggtcttgaactcctggcctctagtaataatcctgccccagcctcccaagttgggatttttt

SEQ ID NO: 268930 - DNA, 201 bp, Homo sapiens
gcagggtcacctcctcctttcaaacaggaatccatgctgaggctggagcctctttagacccacgtggccccacagcccacagaaccaaggctgaccccaargcttgagctaaagcaaacagtcacgtatatcacgtgttgctatcagatgacttgtgagaagctgccttgtttccagtgctatcagagcccgggtgattct

SEQ ID NO: 268931 - DNA, 201 bp, Homo sapiens
taaaataatttttaaaaagaaagaaatttggtggctgggcaccatggctcacacctgtaatcccaacactttgggaggctgaggcaggagaattgctcgargccaggagtttgagaccagcctgggcaacacagcaagacctcatctctagaaaaagaaaaaaaaaaaaaatagccaggcatgtggtgcgtgcctgtagtc

SEQ ID NO: 268932 - DNA, 201 bp, Homo sapiens
tgcatttaaaggaaaaaggacggatcaggaaaggggcaattactcaagttgtttttcaggagttctcattggttgacagaaacacttggttagttctcatwggttgacagaaacacttggtgaatgattggctatacattgttgaactacaggccacgagttaccgtgtccaacgtggcatttttagctacatggcgtagc

SEQ ID NO: 268933 - DNA, 201 bp, Homo sapiens
ctcaggtgatctgcccgccttggcctcccaaagtgctgggattacaggcgtgagccaccacgcccagcctgaggcttttgtttttatgtaagtttagattkcataaaactttttttttttttttgaaacggagtctcactcggtttcccaggctggagtgcagtggcgcgatcttgactcctcacaacctccgcctcccag

SEQ ID NO: 268934 - DNA, 201 bp, Homo sapiens
ccaagagtccagaagctgaagaatttagagtccaatgttcaagggcaggaagcatccagcacaggagaaagatggaggccagaagactcagccagtctagsccttccacgttcctctgcctgcttaattctggccgcaccggcagctgattagatggtgcccacccaggttaaggatgggtctgcgtctcccagtccactg

SEQ ID NO: 268935 - DNA, 201 bp, Homo sapiens
cagtgagctatgatcgcaccactgccctccagcctgggtgacagagccagactcggactctgaaaattaaaaaaaaaaaggtaccgggatgcaggaaaaaygtgcacaatttggtgaccaaattgacgtaagaaatgatagctgaaaattaagcttttttggtttttatatatagtcatttgattatattcagtgcccttt

SEQ ID NO: 268936 - DNA, 201 bp, Homo sapiens
cagcttgttatctacaaaatattctccaggggtttactgcatgcagtgaacatgtagacttggagaccattgacctcttaacagtgtgagctttgcagccyatgtacacagcatgtctccccattttggtcttcttgttttgtagttgtcagcaaacagatgctataaatatcttcttagactcgtaaattagtattttgg

SEQ ID NO: 268937 - DNA, 201 bp, Homo sapiens
actgcattaaataaaatatgttgtttgaatgaatgccccccatttcttttttacttcttgaatgtgactgctagaagattcggaattagcacatggctgaygccatatccccggctcctttccggagttgcacaggaaagggctcacggcaccaagtccccacggcagccacggtcatcggcctcttctgcccctctaatt

SEQ ID NO: 268938 - DNA, 201 bp, Homo sapiens
caaaaatgtttaattgagataaagtccaacttaggatttgtcctttatcagtagtgcttttggtagcatatctaagaagtctgccaaacctaagctcacaragatttttctcctatattttcttcatcgtttcacattttacatgtaggtctgtgatccattttgtctgcagttcgttctttggcgtatggatttccaatt

SEQ ID NO: 268939 - DNA, 201 bp, Homo sapiens
aatgatgaatcccaaatttgccccaagttgttagttcaactttgttcctactcgttttgtactaagaataaatacatttgaaagacaagatggcaccgtcrctaaatgttggctcctgcctttccgagagcttgagcgcttctttctgttttgcgtgagatctcttgtctgtgggctcgcgacttgcatagacctccccag

SEQ ID NO: 268940 - DNA, 201 bp, Homo sapiens
ggtttgtgaccctcttgtcaagaatttaagcaaccagtacaaggcctctgtcccaagcagtgcctgggcctggtgtggcaggcagcaaaagcctgggcctstttgtggttcacgtctgatgagaagctctgcagcttagagcccctgtgtgcccaacacttaagcagcctttagccatgcctgtttttctctttgtttctt

SEQ ID NO: 268941 - DNA, 201 bp, Homo sapiens
atagatagggttgcaagactgggaatgtgatttctgccttatgcccacgtgggcgggaagaaggcgcagagtggaaactgggtgatgaattagactgtccygtgaagatgggcacacatgagatgctgtctgtggtcactgtgagagcaggggacattttctttcctttctgctctaagttcagaaggcaacatagccttt

SEQ ID NO: 268942 - DNA, 201 bp, Homo sapiens
ttgaaggtgttactacctttgcacaaagtgaaatctctgagtgtctaccatccccaggtaaggggcagcaggactctaggaacacagctgttggcatttgrtcaggattgaacacgagatagtgaatccggccttgactgagagtgctttcttctttataggcctgtactaactttggtaacaaacttctggtgataatcg

SEQ ID NO: 268943 - DNA, 201 bp, Homo sapiens
aggccaactggggcagtggggccaggtcagggagcagggctccagggccaggtggacagccaggaggctggagtcgtgcagtccctcacaggctgccctargcttagtctggaaggtggggagcgcctcctccttcagagaccactgagctctcagctccccatggagcttcttggcacctgatttctagtgccacctttt

SEQ ID NO: 268944 - DNA, 201 bp, Homo sapiens
agaagctgaagaatttagagtccaatgttcaagggcaggaagcatccagcacaggagaaagatggaggccagaagactcagccagtctagcccttccacgktcctctgcctgcttaattctggccgcaccggcagctgattagatggtgcccacccaggttaaggatgggtctgcgtctcccagtccactgactcaaatgt

SEQ ID NO: 268945 - DNA, 201 bp, Homo sapiens
gaaaagaatttgataaggcttaaactattaaaacatgtgcaacaggctattaaaggaaacaaaataactagaagccagttaggaggactagttcagctttygaatggagctattcaacagtttcagaaattttttttacgctactaatgggccagtgggcatagcatctttttaagcttccttccagtttgtggtactaaa

SEQ ID NO: 268946 - DNA, 201 bp, Homo sapiens
tttgaatgaatgccccccatttcttttttacttcttgaatgtgactgctagaagattcggaattagcacatggctgacgccatatccccggctcctttcckgagttgcacaggaaagggctcacggcaccaagtccccacggcagccacggtcatcggcctcttctgcccctctaattcctcaactcaggttaagagcaaa

SEQ ID NO: 268947 - DNA, 201 bp, Homo sapiens
atgccaaattgttctcccattcatttttcaagacaaatatgttctaatccataggagagtgagaatttccaagttcattaattcgggttcctgttaccaaytcatgttttacagcccatatgaagttttgtttcactgaaacctttgattatcacaagtagaacttgggaactctacactgctgtctccagacaagacaca

SEQ ID NO: 268948 - DNA, 201 bp, Homo sapiens
gtgaatggtattttctgaaccctcagagtgtgtacaataccattttgtaaagaaaagcatctatattcaaggtagatctaaataattcctagaaatgccarattgttctcccattcatttttcaagacaaatatgttctaatccataggagagtgagaatttccaagttcattaattcgggttcctgttaccaactcatgt

SEQ ID NO: 268949 - DNA, 201 bp, Homo sapiens
aaagtaatatgtaaaaaaaaaaaaaaaatttatctctcccctcctctcccaccttttcctattcaaaaataaaagacaactgggcacagtggctcatgccsctaatcccagcactttgggaggccaaggcaggaggagcccttgaagccaggagtttgagaccagcctgggaaacatagtgagacctcctctctaccaaaa

SEQ ID NO: 268950 - DNA, 201 bp, Homo sapiens
agtttttaattcccactaatatagtaaataaagtgaatatcactttgcaagagtgagagctgttaattgcagtcctgtctaaaagagggcaagagaccccrtgccggcttcagttgggtccttccggcgtaaatgttacatgcaggactctgacttggcaccagcacaaaggaggtgcaaaccccaccaacctaggccccg

SEQ ID NO: 268951 - DNA, 201 bp, Homo sapiens
ttcatgtaaaatgtccagaataggcaaatccatagagacagaaagcagattagaggttgccaggggctgcggggagggaggaagggggagtagttacttayagggatggggagttcttctaggatcatgaaaaaggtttgaaactcgacagagggctgattgcacaacattgtaaatgcactaaatgcccctgaagtgtac

SEQ ID NO: 268952 - DNA, 201 bp, Homo sapiens
gtagtcggcctaaggactacaaaggccatgcgggttcctgtcccagacttgtgcctgaagaagagtaataggcataaactgagcagagaatatataccctraaaccttacctgttcagactaatgacacttggggaatagcttttttctttcattaattttaactctcaattactttggaggcccactctagccccagaat

SEQ ID NO: 268953 - DNA, 201 bp, Homo sapiens
agtgaaaacgaccaggcggtcccgggggccagcacttgtggcaattgcacagcacaagagtcgggtagaagccccgcggtgttgctgtgacgaggccaaasagctgctctaacgcaccggattgcacttgtacaattcagtgtgtaagcacatatatgcacttcatatgcaaatgcctgttttggattgttgtactctttt

SEQ ID NO: 268954 - DNA, 201 bp, Homo sapiens
tgattaggttttttcagtttgtcatcgatgtatgtgacctcgttataatacacatggatttttgtctgctggttgtgttactcatgagcaatgtgttctamttatggtattttaacttataacttatgaaaaagttatgtttcactctagggaacaagtcctgaagaaccctcaagccctaaagtaccacctccacttctt

SEQ ID NO: 268955 - DNA, 201 bp, Homo sapiens
gtagctagagggcattgatgagaagtatagtgaaagaaggaagaacacaggcggtggggtggtgcctggccttggtttgtgaccctcttgtcaagaatttragcaaccagtacaaggcctctgtcccaagcagtgcctgggcctggtgtggcaggcagcaaaagcctgggcctctttgtggttcacgtctgatgagaagct

SEQ ID NO: 268956 - DNA, 201 bp, Homo sapiens
agttaaaaaaaaaaacaatcagcatgaaagcactccgatgtatgcatacttttacttcgcgttggttccctacgttcttagaacaaggaaggagtgtgagwacttgctttggattgaaaggttttccagactagctgtaggaagtatgaaagtaaccaaggtctcacacacagccccagcactctgggtggatttcacttc

SEQ ID NO: 268957 - DNA, 201 bp, Homo sapiens
agcctcctgagtagctgggactgcaagcgcccatcacacccacctcatttttgtatttttagtagagacaaggtctcactgtgttgcccaagctggtctcraactcctgagctcaagtgatccccctgcctcagcctatgaaggtgctgggattccaggcgtgagccaccacacctggcccaagcattttttccctgcgct

SEQ ID NO: 268958 - DNA, 201 bp, Homo sapiens
actatctctacccaaaacttttcatcatccccaacaaaaactccattaaacagtaagtggctgtctccccattctgctttctgtctctatgattttgcccmcagtaggagcctcttagaagcggaatcgtacagtatctgtctttctgtgcctggcttatttccctaaacataatatcttccaggtccccccacattgtag

SEQ ID NO: 268959 - DNA, 201 bp, Homo sapiens
aaataagttacattaaaaatgcatctgattaaattacttattttagagggaattggaagaattctgtgattggcgttccgatctaatcccccaaagagaaraacacgaacgagaatgaacacatttctccttttatattattcttagttaagagaaatgctctgccaggagaaaacttaaatgactatccaatgggtaggg

SEQ ID NO: 268960 - DNA, 201 bp, Homo sapiens
tttttcttcccttttacttttgatcagttcgtatctttatacgtaaagtgggtgtatggtagatagcgtattgttgagtcttggtttttttttgttttggtttggtttttgttgttgttgttgttgttgttttgagacagagtctcgctctgtcacccaggctggagtgcaatggcacaatctctgctcactgcaagctcc

SEQ ID NO: 268961 - DNA, 201 bp, Homo sapiens
atgttagaactatttccatcatactgctaagactttaattgactttttcactgtattgaaatttgtaccgatggtgcagaagcagtagtgggtacaacatygcgcaccttagcaagaagcacagtgatggcaccaagctgacaaccacacaccccagtagaaatagaaacagccagtttcacttagtggtctaaatgaagc

SEQ ID NO: 268962 - DNA, 201 bp, Homo sapiens
ttcttcccttttacttttgatcagttcgtatctttatacgtaaagtgggtgtatggtagatagcgtattgttgagtcttggtttttttttgttttggtttkgtttttgttgttgttgttgttgttgttttgagacagagtctcgctctgtcacccaggctggagtgcaatggcacaatctctgctcactgcaagctccgcc

SEQ ID NO: 268963 - DNA, 201 bp, Homo sapiens
tcccttttacttttgatcagttcgtatctttatacgtaaagtgggtgtatggtagatagcgtattgttgagtcttggtttttttttgttttggtttggttkttgttgttgttgttgttgttgttttgagacagagtctcgctctgtcacccaggctggagtgcaatggcacaatctctgctcactgcaagctccgcctccc

SEQ ID NO: 268964 - DNA, 201 bp, Homo sapiens
gaggcaggagaatcgcttgaacctgggaggtggaggttgcagtgagccaagatggtgccactgcactccagcctgggcaagaaaagcaaaactccgtctcaaaaaaaaaaaaaaaaaaaaaaaaccaattcttacacattaaatagcttagggttggggaatttttatttttggtatagcctttgacttaggtcagaatta

SEQ ID NO: 268965 - DNA, 201 bp, Homo sapiens
tgttgagtcttggtttttttttgttttggtttggtttttgttgttgttgttgttgttgttttgagacagagtctcgctctgtcacccaggctggagtgcartggcacaatctctgctcactgcaagctccgcctcccgggttcatgccattctcctgcctcagcctcccccaagtagctgggactacaggcgcccaccacc

SEQ ID NO: 268966 - DNA, 201 bp, Homo sapiens
tgttgaaaccatttatttttcatgtgattatgaatgtacttgggtttaaatgtaccaccttcctattttttttctatttgtcccacctgtttatcgtttcycttctttgtctgcattcttttggatcaattgagtactttttatgattcccttctatctcatttgttggcttctttatgataactccatattgtttgattt

SEQ ID NO: 268967 - DNA, 201 bp, Homo sapiens
tggccctaactgatttttaaccagctctcatccagcatccactgggtctctgttaccaacattagaataacatacctgaattactccaggcagcaagaatkcctaccagatggataaggctgagggaaggtgttgggtggggggtggggggggtcccacgtgaactgtcccgtcttcctggcctgtttagggaggaagatt

SEQ ID NO: 268968 - DNA, 201 bp, Homo sapiens
tgaattcctgacctcaggtgatccacccacctcagcctcccagaatgctgggattacaggtatgagccaccgcctggccctaactgatttttaaccagctstcatccagcatccactgggtctctgttaccaacattagaataacatacctgaattactccaggcagcaagaatgcctaccagatggataaggctgaggga

SEQ ID NO: 268969 - DNA, 201 bp, Homo sapiens
ttggtttgactgaaggggcctcacccagtcagacttgagggaaggtgcccgcggcagaggtagagaaaagcagggacacagtgggtgacaggtgtcggtcytggtggggtgtcagttatggggtgggccggtgcgatctgctgagaggtgagggtggagagggagcagaattcccccaaaatgtcagcagatattaaagag

SEQ ID NO: 268970 - DNA, 201 bp, Homo sapiens
aacagcaacaaaaagtcaataattttgtggataatacagtctggttatttctgtagtgaaaatagttgggttttcaaagtttggttttccatctcagatcygcctgtggagaattggtttgcgggctttgtttttaaggtgggttcccagggactcgctgtgtgttccctgatgccccccgtccttgcagaccgagccttc

SEQ ID NO: 268971 - DNA, 201 bp, Homo sapiens
gcctgtagtcccagctactcgggctgaggcaggaggatggcgtgaacctggaggcggagcttgcagtgagccaagatcacgccactgcactccagcctggrcgacagagcgagactccgtctcaaaaaaaaaatccttgcccttttggggtttatattctgggtagtgtggggaaataaaagaacacaaaatacacctaag

SEQ ID NO: 268972 - DNA, 201 bp, Homo sapiens
gaggctaggccagtctagtcttttcacgttcttctgcctgctttatattctggcctctctggcagcttaggtggtgcccacccccattaagggtgggtctscctttcctagcccactgactcacatgttaatctccttttgcaacaccctcacaggcacacccagtgcatccttcaatccaaacaagttgacactgagtat

SEQ ID NO: 268973 - DNA, 201 bp, Homo sapiens
agagtgacccccagagtgagcgccatgcctgaggcttagagcagggtcacctcctcctttcaaacaggaatccatgctgaggctggagcctctttagaccmacgtggccccacagcccacagaaccaaggctgaccccaaggcttgagctaaagcaaacagtcacgtatatcacgtgttgctatcagatgacttgtgagaa

SEQ ID NO: 268974 - DNA, 201 bp, Homo sapiens
ggtcccacaatagcccgtctgcaagctgaggagcagggaagccaggcccgttccaaagctgaggaacttggattccgatgttcgagggcaggaagcgtccrgcacgggagaaagatgcaggctgggaggctaggccagtctagtcttttcacgttcttctgcctgctttatattctggcctctctggcagcttaggtggtg

SEQ ID NO: 268975 - DNA, 201 bp, Homo sapiens
tcctgccaccatgcccagctaattttttttttttttttttttttttgtatttttagtagagacggagttttaccttgttggccaggctagtctcgaactcstgacctcaggtgatccgtctgcctcagcatcccaaagtgctgggattacaggcgttagccaccatgcagcccctttcaagccttttaacatcatgtcacc

SEQ ID NO: 268976 - DNA, 201 bp, Homo sapiens
gacaggatctcgctctgtcacccaggtcccacaatagcccgtctgcaagctgaggagcagggaagccaggcccgttccaaagctgaggaacttggattccratgttcgagggcaggaagcgtccggcacgggagaaagatgcaggctgggaggctaggccagtctagtcttttcacgttcttctgcctgctttatattctg

SEQ ID NO: 268977 - DNA, 201 bp, Homo sapiens
gtgtttctttacatatacttgaaccagaatagcatatcacagcaagttgaacacagaagcatgtcggcagatccgcctgtcttctgttgagtattgaagawacatgcaaaaatgtacaacatggccattttctcgctggtttctttttgaaaataaggttattttcataaaatattacttaacatgaagtgaacctattgc

SEQ ID NO: 268978 - DNA, 201 bp, Homo sapiens
tctactaaaaatacgaaaattagctgggtgtggtggcgcacatctgtagtcccaattactggggaggctgaggcacaagaatcatttgaacccaggaggcrgaggttgcagtgagccaagatcacaccagtgcattccagcctgggcaacagagtgagactctgtctctaaaagaaagaaagaaaatacccatgttttcta

SEQ ID NO: 268979 - DNA, 201 bp, Homo sapiens
agtcaagaatagggtgtgtgtttttaaacccaggaaaagaatagacagaaacacaaagacaaagtggtttgggatacatcctaacttttggttccatatgwcaaataaaattgcgaggtggttctttttggatcctacagcactttgccaattgtgacaagctgttgtgaacactcatgtacttcttcctcacagcactcc

SEQ ID NO: 268980 - DNA, 201 bp, Homo sapiens
gttttggtattttattattgttcacattgtgtgtgtgtgtgtgtgtgtgtgtgggcgcgcgcacttgcgcgtcggccacttgtaaatttctttgcttcttrgctttggcctcattgaggaacagctggaatgccaagtgagcattgcatctacttgaccaaggttgatgctgttccttcacaccgtgaagtgccttcagag

SEQ ID NO: 268981 - DNA, 201 bp, Homo sapiens
agaaaagatacatgctggaggtgataggtatcccagttactctgacctggtcattacacattgttaacaggcatcaaaatatcacatgtcccctccaaatmtgcacaactattatatatcaattttaaaaaagaaaaactcatacccataccacccaatgatgacactgtggatatttggggagtgattcttcctatgatc

SEQ ID NO: 268982 - DNA, 201 bp, Homo sapiens
ggcaacatgcttggctacgtatattttgcctgctgggttttgatggtgaaaacaaaaattgaaagacggcaagatatttgtttaaaacctggaattcgtaratgttcaaacctaataaatgttctttttacagtataattaatggatttgccttaccactaaaagaagagcacaagattttcttattgaaggtgttactac

SEQ ID NO: 268983 - DNA, 201 bp, Homo sapiens
cactgccatgtttgttgcagcatcgctcacaatagccaagaaatgaaatcaacctaagtgtcaatcagtggatgaatgactaaacaaaatgtaggacatayagacaatggaatattattcagccataagaaagaatagaaacctgtcatttgcagcaacatggatggaaccagaggtgattgtgttacgtgaaataagcca

SEQ ID NO: 268984 - DNA, 201 bp, Homo sapiens
atataggatctcgctatactacccaggctagagaacagtggctcttcacaggtgtgattatagcgcactacagcctcgaactccgggttcagatgatcctsccgcctcagcctcccaagttagctggggcacaggtgcatggcaacatgcttggctacgtatattttgcctgctgggttttgatggtgaaaacaaaaattg

SEQ ID NO: 268985 - DNA, 201 bp, Homo sapiens
ggacgaccttggtcagagctactttctactttcttttcccaatttccttaacccttcaagccagcctcggctcatcacctcttttgaaggccacccccacmcaccttcccagcctgcctgcctctgttggacgtgctagccacctgtccttttgcatcattgagcggattttattgtgcactcatcatgaacaaggtgaaa

SEQ ID NO: 268986 - DNA, 201 bp, Homo sapiens
ctgaagaatttagagtccaatgttcaagggcaggaagcatccagcacaggagaaagatggaggccagaagactcagccagtctagcccttccacgttcctmtgcctgcttaattctggccgcaccggcagctgattagatggtgcccacccaggttaaggatgggtctgcgtctcccagtccactgactcaaatgttaatc

SEQ ID NO: 268987 - DNA, 201 bp, Homo sapiens
tccatatgatcctacagccttactgctgggtatatatccaaaagaaagaaaatcagtatatcacaggggcacctgcactgccatgtttgttgcagcatcgytcacaatagccaagaaatgaaatcaacctaagtgtcaatcagtggatgaatgactaaacaaaatgtaggacatatagacaatggaatattattcagccat

SEQ ID NO: 268988 - DNA, 201 bp, Homo sapiens
gccagctccctgctgttctgggtaacacctgtaaacccagaatttttaaattatgtagttacaaagataaaaataactatacttcctggtaggcatttagyatttttaaactttttgctggtatcctcttttttctgatacacacacacatacacacacacatatgtatatatataggaagaatcctcggatttccctctt

SEQ ID NO: 268989 - DNA, 201 bp, Homo sapiens
gaaactgtagagaccagcgccacggagccctggctgaagtacagggcgttcgtatgccaaggagagactggcagtcgtgggaagtgtcccaaaaacttgarccccttccccagatgcaaaattagctatcgctatgggtaacgttagaccttcaagagaagacagggacaagtggactcacaatgtgctgttttgcataaa

SEQ ID NO: 268990 - DNA, 201 bp, Homo sapiens
gtttagacagttttccatgcatggaccctgattacagcgggagcaggcaacgtgaggtgcccgcaatcagacatccagctccacatggtggcctccctgcycccagctcatccttacgcagtgccttcaaattgagtgtcttcaaaggtgctgcttagtctcactttggttgttgtgtcgctgtcgtatttttcttttttc

SEQ ID NO: 268991 - DNA, 201 bp, Homo sapiens
tagaaataaaaaacatccatatgatcctacagccttactgctgggtatatatccaaaagaaagaaaatcagtatatcacaggggcacctgcactgccatgkttgttgcagcatcgctcacaatagccaagaaatgaaatcaacctaagtgtcaatcagtggatgaatgactaaacaaaatgtaggacatatagacaatgga

SEQ ID NO: 268992 - DNA, 201 bp, Homo sapiens
gagaaagtcactttaaggaaaataactgacagagtttgttgtcagtgataaaatgtgagctttctagggaagttttgtttcattttgtttttagagatgcsgtcttgctctgttgcccaggcggagtgcagtggcacagtcatagcccactgcagcctcgaacttctgggcttgagtgatcctcccacctcagcctcctga

SEQ ID NO: 268993 - DNA, 201 bp, Homo sapiens
atgcaggagctcacccctaataaactactactggttgagttttgatgtagacaatgacctaaaaacactattagatagatactcctcccttgtcaactacrttgtctgtgtgagaccagactttcatcctatatttcaacctaaacattctgaacacagaagcagatatgataatctagcatttttctattaaaacagaca

SEQ ID NO: 268994 - DNA, 201 bp, Homo sapiens
tagtgtcacgatcatggctcacttcagcctcgacctcctgggctcaagcaaacctcctgcctcagggtcctgagtagctgggactacaggcacccaccgcyacgcctggctaatttttgtattttttgtagagatggggttttgccatgttgcccaggctggtctcgaactcctggactcaagtattccacctgcctcagc

SEQ ID NO: 268995 - DNA, 201 bp, Homo sapiens
tgtgctgcacagtcaccctgctgccggcggaccagccctctcccatgcaccctctctccttgtccgctcgaggctgcaggtggcactgcctccttcccagrattctgcagggcagcagccagacaggtgttagccctggagctctgagccagacccccgagcgagcgtccagccagtccactcgcgtcaagtcttctgagg

SEQ ID NO: 268996 - DNA, 201 bp, Homo sapiens
aagaaactgacatttataggaaatcaagtattgccattattgtcctctttataattttgtcttaactatatttgttcaagtttcaatgtttttaattcagyttctgagcaaggtcgtttttggctactgtcagctggagacagtgagtggagtggcctctgtggctatgtgagagccactgtgaagaaagtctcgggatgt

SEQ ID NO: 268997 - DNA, 201 bp, Homo sapiens
ttaccatcaggagagtaacaagattgagttatagatgctggtaagtcacttgatacatcattaacaaaaaacaaaaacaacatttattgaggacatgctayatttcagggatttttctaagcactgtacatctcttaattcacatcaaccccagtaaagacaatattcccattttccagttgagaaaactgaggcccaaag

SEQ ID NO: 268998 - DNA, 201 bp, Homo sapiens
tcggccttccaaagtgctgggattactgcgccactgtgcccggcatgagccaggcatgagccactgcgcccggccttgagactttagttcttatatcccarttgctccccacccatgctttagatctgataagcatgtcataccacagtttttattttatccatttgcaagcataattactgatctttcttttaagagaga

SEQ ID NO: 268999 - DNA, 201 bp, Homo sapiens
aatctattgtgctggaccactgagaacgcaacctggtgtactcaatcatgcaagaaatgtgtattgcagacaccatgctacctcttggggctaccccaagractaaaataatatagtctctacctatatggcatccacccttactggtctgggagacaagaagaggcagcagacgtaatgatacgagggccaaggactgcg

SEQ ID NO: 269000 - DNA, 201 bp, Homo sapiens
tctctgccctcgaggcatttacagctgcaggccttgaggagtttctttggttcctgaagggctgcttgctcaccacgagcagtgtttgcacaaatagatgygcttcttgttgcctggctccatggctcctcctagagcattgttttcttattcaggttagttcagtgtctaattctaatgggaaaattgttttttctaggt

SEQ ID NO: 269001 - DNA, 201 bp, Homo sapiens
gctttaccgccttgaaaatacttcccaagttacactgtaactattttatgatcattgaatcacaagtgaacgttagattactgctgttctgtgcgtggatytgtaattttttttcagcctccataattatgtcagaggatttataattttcttaacattttatgtttattaaaataggctatcatagccagggttaacaaa

SEQ ID NO: 269002 - DNA, 201 bp, Homo sapiens
gtctctgttaccaacattagaataacatacctgaattactccaggcagcaagaatgcctaccagatggataaggctgagggaaggtgttgggtggggggtsgggggggtcccacgtgaactgtcccgtcttcctggcctgtttagggaggaagattttgccaccaggagctcctgctgttgagccagctccctgctgttct

SEQ ID NO: 269003 - DNA, 201 bp, Homo sapiens
tcccatcccgtgccggcttgcacagcctgcgtcgggagcaccctgcctttccgtctgcagtcattagggcccgcagccccggcctctcccatcccgtgccrgcttgcacagcctgcgtcgggagcaccctgcctttccctctgcagtcattagggcccacagccccggcctctcccatcccgtgccggcttgcacagcctg

SEQ ID NO: 269004 - DNA, 201 bp, Homo sapiens
ctaaattcctcttacccaactgaaagcacgtgctctttaaaaaaaaaattaattctgctgttcagatagcagcaaagtcagagcaggtgtgaggccggcarcctgctcaggtggtgcgtgcccactgcccacttgtgttagaaatcacatcatctcctggccggccatggaatccagcactgtctgtcagctctggggaaa

SEQ ID NO: 269005 - DNA, 201 bp, Homo sapiens
taatgctctttctccttttactttttagctggcatactgtgtagtgcagtttttagaaaaggacagcaccctcacggaaccagtaagtactgatgctagcrcgtcttgtaagatgtgtgcatttcactaaatgtaaatattacaacatctgcttcaccaaattgccattcattcagactttttcatcttaaattgcaatac

SEQ ID NO: 269006 - DNA, 201 bp, Homo sapiens
tttgatttgtgtctttttaaaatatctttcacgtccacctaactttttggacacaatactgtattcatgtccttgtctgctaattctaacatttgtgtcakttcagtttagttcagttgactggtttttcttctcattataaatccttctcctgcttctttgcgtgtctggtaatttttaattggatgtctgacattgtga

SEQ ID NO: 269007 - DNA, 201 bp, Homo sapiens
gttgttgtcatctctagtggtttgatttgtgtctttttaaaatatctttcacgtccacctaactttttggacacaatactgtattcatgtccttgtctgcyaattctaacatttgtgtcatttcagtttagttcagttgactggtttttcttctcattataaatccttctcctgcttctttgcgtgtctggtaatttttaa

SEQ ID NO: 269008 - DNA, 201 bp, Homo sapiens
aatagcagccagcgtctcttgcctttttcgtccgcttgctgctttctggtttttatcttcttacccatgtgagcttccagcaccacctgctccccccaccmccaaaaaaaaaaaaaaaaaaaaaaaaaaagctccactccaccggtcttttataacctatcaaactttaaggatatttttccattcaaatctagttatgcc

SEQ ID NO: 269009 - DNA, 201 bp, Homo sapiens
tctgtggatgttaaggtcacactatttcatttgtttcaaacaaagtgaacgaaatttcagagttgaattttttaatcttctcaaacttatttttggcttaragcggtctctaatcaaatggttttcatctgatgggcagggatctttcagaccctctcactgcatgcaggatacccctcgtggactgctctagaccaatcc

SEQ ID NO: 269010 - DNA, 201 bp, Homo sapiens
agttattacgcataatttacttgagttctcactaaaggcttggtgctagaatatggcatttgtgtctgtgtgcatgcttttgatagtcttttctgtaattrtgtgcatgcttttgatagtcttttctgtaattgtgtgcatgcttttgatagtcttttctgtaattgtgtgcatgcttttgatagtcttttctgtaattgt

SEQ ID NO: 269011 - DNA, 201 bp, Homo sapiens
gcacagcctgcgtcgggagcaccctgcctttccctctgcagtcattagggcccacagccccggcctctcccatcccgtgccggcttgcacagcctgcgtcrggagcaccctgcctttcccctctgcagtcataagggttgcattccctcctgacctgcacacctgatagggcatttcggcgtgagagcctttgattttgcg

SEQ ID NO: 269012 - DNA, 201 bp, Homo sapiens
gatcaatatactttgctttctgcttttcagatgttcctcctgctgatcaagagaagctttttatccagaagttacgtcagtgttgcgtcctctttgacttygtttctgatccactaagtgacctaaagtggaaggaagtaaaacgagctgctttaagtgaaatggtagaatatatcacccataatcggaatgtgatcacag

SEQ ID NO: 269013 - DNA, 201 bp, Homo sapiens
tattaggagagttgactcacacgatcacaaggtgaagacccacaataggctgtctgcaggccgagtcccaaaacctcaaaagtagggagacggacagtgcrgccttcagtctgtggcggaaagcccaggagcccctggcaaaccactggtgtaggtccaagagtccagaagctgaagaatttagagtccaatgttcaaggg

SEQ ID NO: 269014 - DNA, 201 bp, Homo sapiens
ccccacccatctccttttttcttgaatctctattcaaaataaaaatagaagaaagcttaaatgtgtttcacaataactttgggttaagcacttttgtgatsaatatactttgctttctgcttttcagatgttcctcctgctgatcaagagaagctttttatccagaagttacgtcagtgttgcgtcctctttgactttgtt

SEQ ID NO: 269015 - DNA, 201 bp, Homo sapiens; identical to SEQ ID NO: 53066

SEQ ID NO: 269016 - DNA, 201 bp, Homo sapiens
ttccctgtggccagggtgccgccagcgagtgggtgaggcacacgtgcctcgcggttatcctttgacttccacctcagaagtaagcttgcttttcagatagyttagtttgtagccaacgccattgcatttctaattccaggcacagaaagatccgaagaaggaccgtcctcttgcacgccgcaagtccgagctgcctcagga

SEQ ID NO: 269017 - DNA, 201 bp, Homo sapiens
tcatccctgcgtttctacagtatccgtgaaggccattacagttggtctttacgtcagctcccctctcagatgacacagagaacaagctcagatgcttgatrctcagatgcttgatgctcagagcttttatagctgatgactttctgaaaaatgatattaaggtttggagttcagtatcaataccagtaaagaagggaagaa

SEQ ID NO: 269018 - DNA, 201 bp, Homo sapiens
agttcgtttttcatgctgtgctcagcacgtaagtgtggggaaatggagcaggggggctgcgggaggagccgctggctgggctcaacatgcctgtgcctttwccccttcagtgtgttcttgtgtctgatgcatctctaacacagatgacattttactgtttttcagagagaagctaaaaatgaaagaacgggaagaagcatg

SEQ ID NO: 269019 - DNA, 201 bp, Homo sapiens
ctcttttagaatgctctacccccattctctgctggccatctgaatcctttcatctttttttttttttttttgagacggagtcttgctctgtcacccaggcwggagtgcagtggcgcaatctccgctcactgccagctccgcctcccggattcacaccattctcctgcctcagcctcccgagtagctgggactacaggcgcc

SEQ ID NO: 269020 - DNA, 201 bp, Homo sapiens
ttagattgcaaacttttgtctttgtacctatgtcttaggaacattactcatacttttactagaagtgttttttaattagttgttcctggcttttcagcccsttttttcatccctgcgtttctacagtatccgtgaaggccattacagttggtctttacgtcagctcccctctcagatgacacagagaacaagctcagatgc

SEQ ID NO: 269021 - DNA, 201 bp, Homo sapiens
gggatgtgtggctgtcagaaaacaagtaacgcggaatgagcaggccttgcattttagaccttagggatcctgtgcgatgtgggactgttggaatatggagsagcctgagagtggagaggcgagggctcagcaggaatgcgtgctcccaggctcaccgtgcggttttctttataggacaatacatggcttgatatacaacgc

SEQ ID NO: 269022 - DNA, 201 bp, Homo sapiens
tgctgggatttgacttgtttctttcttccctgtcacccttttgactaaattcatttcgatgaagatgaaatgtaggtgctttatgaaggtatatgctatawgccttttttttttttttttttggtcttttgatctttcattaaaactgctaagatttcttctccccagagctttcttgctaatgtgcctatatcctcttac

SEQ ID NO: 269023 - DNA, 201 bp, Homo sapiens
tcttatttttatttttcagctttctgatctatcaccaattaatgggcataaatgttaatgcccgttaatcacacaagggctttgtctgtaccgtgggtccytgtcttgctgtgggaaggtgtttaacgatgattctagaagaagcacagcagcatttttatgttgaaatgttaatgctctttctccttttactttttagct

SEQ ID NO: 269024 - DNA, 201 bp, Homo sapiens
ttatttagagctctttgggttaacgggggcaggcacccaattcactgttgtttacactcacaagggagtttaccaggcagacactgggtctctcacacttrgtccacagagtcacagggacagcttttccttccgtgtcccatgtccccgctctctgtatgcagccttccttctttggggcatccctctatgatgacagag

SEQ ID NO: 269025 - DNA, 201 bp, Homo sapiens
aacgtgtattaggcttcttagagttgatgctgatgctctatttctcttaattcttttttttttttctgtgtaacatttggatagtttcctttgctttcttsaacttctttaatcttttctgccatgtctattctgttaatttttattacagtaaatttttcatttcacacattttttttaattaagtgagcaaatttactt

SEQ ID NO: 269026 - DNA, 201 bp, Homo sapiens
  misc_feature (1)...(201): n = A,T,C or G
cggtattcttcactcgaaagcaaaaccaagcctttcatacttggaaagcaaattaaaactgtgttataataacgtattttgaaagaacaggtgtttaaagntagctattctccccccttgtattgccagattaatcatctttgcaaaaagtgcttatgtaagcaagaatttaacattcagaattttttcttttcttgggct

SEQ ID NO: 269027 - DNA, 201 bp, Homo sapiens
gaaagtcaggcctagtatctgtgtgatattcggggccccagaacgtccaactgcttggtctgtccactgcccttagaaaggggcacgtcccctcctgggarggttaccttatacagtgacaggaaggaaccagtcctatggccatccacgtgtctacttgtaaatacacacacaggcaggacagttcttggagaactcctg

SEQ ID NO: 269028 - DNA, 201 bp, Homo sapiens
gccttttatcattaaaaatcagctgaattctgccacattagcagccaaccctccttcccaccccagcagcgggtgccagtgtgctctggtgagtctgcgcygatggccggacgtcccggagctgccggcagttccagctgccggggctgccagggtccgggagggtttcctggtgtcatggtctttgggtttgatgtacgc

SEQ ID NO: 269029 - DNA, 201 bp, Homo sapiens
tctcctgccccagcctccagagtagctgggattacaggcctgtgccaccatacttggctaatttttgtatttttagtagagacagggttttgccatgttgrccaggctggtcttgagctcctaacctcaggtgacctgcccgcctcagcctcccaaagtgctgggattacaggggtgagccaccgcgcctagcccgtaagt

SEQ ID NO: 269030 - DNA, 201 bp, Homo sapiens
tttttgatatttgcatgtggtagtctagttgtgatggtctgtctgttgcttctgttttccagctatatcatttgcaaacaaatgacaattttgtacttaaatatatatatattgcgaaggggcttaacactttctgcccttcccagaaatgtatctcttagcaatatgactcgtagaacctaacagttccatcacaggagg

SEQ ID NO: 269031 - DNA, 201 bp, Homo sapiens
gccgtgctccaagcggaggctgttggtgggtcccatgaagagcactgcttgttgcctggagtagtcaaaagcagaagaagcgttggtgtgaaacagtcccygcaagtctcaggagtcttgcagccacttaggtttctgtatctcccacctgactgtgagccccctcgaggaaaggtgctgtgtcctgaattgtggaaattt

SEQ ID NO: 269032 - DNA, 201 bp, Homo sapiens
ttttgatatttgcatgtggtagtctagttgtgatggtctgtctgttgcttctgttttccagctatatcatttgcaaacaaatgacaattttgtacttaaatatatatatattgcgaaggggcttaacactttctgcccttcccagaaatgtatctcttagcaatatgactcgtagaacctaacagttccatcacaggagga

SEQ ID NO: 269033 - DNA, 201 bp, Homo sapiens
tgttcagagcgatgacccaaggtggcccttgccctcagggaaccagcgggcccggagtcacagcggtgttctagcttcagcccctctaagccacagagagktaccaccagggccactccctcttcagaacactggggagcccgttgcctgtcagacagcctgagcccagccagccagcccagcccctccagggtaccccct

SEQ ID NO: 269034 - DNA, 201 bp, Homo sapiens
gtggaggaagcgcgaggtagatttgtgggaagaaggctctgctctcccttacctctcttcactgccgagcactcattgtgtgccagggccagcaggaagayattaaaccaaggacttcccggccacccagtcatacttgagataaatattccaaagaaaatgtacagcatcatagaagagcttaaaattaggggcccaatt

SEQ ID NO: 269035 - DNA, 201 bp, Homo sapiens
tttctgctttctccatcaaggccttgtaactaggtcagtaattcccaggcactttgtagtttttgtgtctgggtagctggagtcttcgtctctgtttcttktttgtatttgcttaattgttagtggaaaggtggttgctgttggtttcatatttttgatatttgcatgtggtagtctagttgtgatggtctgtctgttgct

SEQ ID NO: 269036 - DNA, 201 bp, Homo sapiens
gtatgtcttctggtctcaggtagatccaggtgagtttagaggtcgtcggtgttgacgcatctaaaaccacgcaggaaacggctgacaatcgtgcagccgartgtacccctggagcagcccagggacaccccgattggcaacagcgggagttgggagaagagagggaggccagagggtgggtgtgtggaaggagactcacgt

SEQ ID NO: 269037 - DNA, 201 bp, Homo sapiens
gaataaaacagagaataaataacagaataacccttgtggttttgaacagagaactgtaaataatcaaacctttctttcctgttgcctctaaagttagactrtcagcggtttttttttttaatgtatcccttcatgtcttaaaatttttatatgttacactgctgcagttatgttacggcataaatattcactcattggtaa

SEQ ID NO: 269038 - DNA, 201 bp, Homo sapiens
aatcctccttatctgcccctttgatgcaacagtattttgtaaggcatatccatattgtgtatagctgtatttcattcatctctatcgctttggaatgttayatagactgcatttgcatttacctaatccaccactgatgggcatttggttgtttctagtctgagctgttaggacgttgtgctgtggacattcctttacctc

SEQ ID NO: 269039 - DNA, 201 bp, Homo sapiens
gcttcacagaggaggggacagtccctggagagtagacattgccagaaattataacaccagtgagagtcaggttaactctcggttttagattgcaaactttygtctttgtacctatgtcttaggaacattactcatacttttactagaagtgttttttaattagttgttcctggcttttcagccccttttttcatccctgcg

SEQ ID NO: 269040 - DNA, 201 bp, Homo sapiens
ataggcgcatcctcgcatttccctcctaggttgttgcagggaccggagcgctgtatgacatgtgttccacagcccgccatgccgtgtgcgtagggcccccrtgtgcatagggccgccgggcagctcccgccgagaggctgattagttttatccttcttccagatgaggctgagccttcgggtgaccctgtgagtgagcaca

SEQ ID NO: 269041 - DNA, 201 bp, Homo sapiens
taaccttgcctctgtgtttgtgtgtgtgtttggtcggtgtttagacagttttccatgcatggaccctgattacagcgggagcaggcaacgtgaggtgcccscaatcagacatccagctccacatggtggcctccctgcccccagctcatccttacgcagtgccttcaaattgagtgtcttcaaaggtgctgcttagtctca

SEQ ID NO: 269042 - DNA, 201 bp, Homo sapiens
gcagtgagtggtgaagaggatgcctctcttactagatgtgtgaccatgggcaggtacttctgtaagataggcgcatcctcgcatttccctcctaggttgtygcagggaccggagcgctgtatgacatgtgttccacagcccgccatgccgtgtgcgtagggcccccgtgtgcatagggccgccgggcagctcccgccgaga

SEQ ID NO: 269043 - DNA, 201 bp, Homo sapiens
cattgagacctcttataatattccataaggctggatattgttttgaggaagacgatttttcctcttaaccttgcctctgtgtttgtgtgtgtgtttggtcrgtgtttagacagttttccatgcatggaccctgattacagcgggagcaggcaacgtgaggtgcccgcaatcagacatccagctccacatggtggcctccct

SEQ ID NO: 269044 - DNA, 201 bp, Homo sapiens
agtcgtgggaagtgtcccaaaaacttgagccccttccccagatgcaaaattagctatcgctatgggtaacgttagaccttcaagagaagacagggacaagyggactcacaatgtgctgttttgcataaaagcatgtgacagggcaaggaggaagggaagtccaggtggggaaagcagagccaaggtggccgcgcagctgcc

SEQ ID NO: 269045 - DNA, 201 bp, Homo sapiens
tttggattgttgtactcttttagaactaagatggctaaactctaaaaatattatgaaatctgcatggattcacattcagtattttgtactggtatgattgyggtaagacatttggaaactacaggaacatataaagaaaggttgcccagtggaaattctttctagctgtctgacttggccaaggaacataaaacatccact

SEQ ID NO: 269046 - DNA, 201 bp, Homo sapiens
catttttatgttgaaatgttaatgctctttctccttttactttttagctggcatactgtgtagtgcagtttttagaaaaggacagcaccctcacggaaccrgtaagtactgatgctagcgcgtcttgtaagatgtgtgcatttcactaaatgtaaatattacaacatctgcttcaccaaattgccattcattcagactttt

SEQ ID NO: 269047 - DNA, 201 bp, Homo sapiens
tttgagagagagggtagaaaccccagttcacgaatgccacactccccgtaggagctaaagactcaattcagactttcctttctctgcccttcatggccctrgaagttatggagagcttcagcagtggctgctaatgacaggaccctgggaggacatggcggcctgcccaaagtgtgtgtgtgtgtggcctttccttaatag

SEQ ID NO: 269048 - DNA, 201 bp, Homo sapiens
ctcacagagagatgccatcaaactgtccccatcatcaccaggatgtgtcactacctcacaccatcctggagccaggagccaccgccagctcagtggcttcygtcagcatggtccatcactcctcacgatgctgtcgtctgcgctaggctcatccagacggttctgctccgtggcgtgtgctggggctggagtgttcacagg

SEQ ID NO: 269049 - DNA, 201 bp, Homo sapiens
gtaagtcacgtgtggatggcgttgtccttgtgtgtggtgatgctcatttcccccctcgatgctcccctaccccatcgtctcctctgacaggactcagcatrtggagggggtttctcaaagcctatttgtcatgtgcaggtggacccccttgtgcactgtgtgcagggggctgctgggctcatcctccctgccttcctcccc

SEQ ID NO: 269050 - DNA, 201 bp, Homo sapiens
ggaaggtgggcagtgcaggctctcattactcaacgtgtagagcacattgaaggcctgttctccaggagaagaattgacgagttaacgtggacatgaagtaktttcccttttgtccatgtcattccagattgtgatggtcaaaacaaagaaagaaatttggcagctgggaggccgggcacaatggcagatgcctgtaatccc

SEQ ID NO: 269051 - DNA, 201 bp, Homo sapiens; identical to SEQ ID NO: 53113

SEQ ID NO: 269052 - DNA, 201 bp, Homo sapiens
tgtgagaggtagttgaaggaatagctggagagtgggaagcaggctctgatgctgatggatggagtaggctggatttttgtggagaaattcaaccatgtatytacctatcctttatttacatttccttcaagaaactagtataaccctatacagaacattcaaagaaaactagcaaatatcatgtgaataacatttatatta

SEQ ID NO: 269053 - DNA, 201 bp, Homo sapiens
gtgcccggcatgagccaggcatgagccactgcgcccggccttgagactttagttcttatatcccaattgctccccacccatgctttagatctgataagcaygtcataccacagtttttattttatccatttgcaagcataattactgatctttcttttaagagagaatctttatataaatagaaaaaaattagagatcacc

SEQ ID NO: 269054 - DNA, 201 bp, Homo sapiens
tatagttcagaagtaaacattttgtccatccatgtgcaggaaaattctaatgatgggatggagttgaaatattgacagaaccaagctggtgtcagaatagwtcatgctgattggctgagaaggcctccacctgtcagtgctgggatcaggacagcccatgctgattggctgagaaggccgccacctgtcagtgctaggatc

SEQ ID NO: 269055 - DNA, 201 bp, Homo sapiens
tgttttctgtgattctcaccacagcccaatgcaaaaaataaaaaaaggatttacgcttttttttttttttttttttttttttgagatggagtctcactctrttgcccaggctggagtgcagtggtgcaatctcggttcactgcaacttccacctcccagattcaagtgattctcctgcctcagcctcccgagtagctggga

SEQ ID NO: 269056 - DNA, 201 bp, Homo sapiens
ctcaagtgatccacccgcctcggcctcccaaagtgctgggattacaggcatgagtcaccgcgcctggcctttaccctttccaatggaggagaaaattgagrctcaggcaggctgtttggtctgaggtccttcttctaggtgggaagagggtgtagagagactgtttccatgaggctgtgctgcctttgttgggcagcgtga

SEQ ID NO: 269057 - DNA, 201 bp, Homo sapiens
tggtgactcacgcctgtaatcccagcactttgggaggctgaggggagcggatcacttgaggtcaggagtttgagactggcctggccaacatggtgaaaccrtggtgaaatcccatctctactaaaaatacaaaaattagccaggcatggtggtgcacgcctgtaattctagctactcgggaggctgaggcacaagaatcac

SEQ ID NO: 269058 - DNA, 201 bp, Homo sapiens
agcacctgtcaaaggggaccctttgaggccaactggggcagtggggccaggtcagggagcagggctccagggccaggtggacagccaggaggctggagtcrtgcagtccctcacaggctgccctaggcttagtctggaaggtggggagcgcctcctccttcagagaccactgagctctcagctccccatggagcttcttgg

SEQ ID NO: 269059 - DNA, 201 bp, Homo sapiens
aagatcttgagagttgcattcagctcatctaggtttttttcttttcttttcttttcttttctccttttttaaggcagggtctcactctgtcacccaggctggagtacagtgatgctgtactccatagctcactgcagcctcaaacccctgggcttaagggatccttctacctcagcttcccaagtagctgggtctacagat

SEQ ID NO: 269060 - DNA, 201 bp, Homo sapiens
agatcttgagagttgcattcagctcatctaggtttttttcttttcttttcttttcttttctccttttttaaggcagggtctcactctgtcacccaggctggagtacagtgatgctgtactccatagctcactgcagcctcaaacccctgggcttaagggatccttctacctcagcttcccaagtagctgggtctacagatg

SEQ ID NO: 269061 - DNA, 201 bp, Homo sapiens
gatcttgagagttgcattcagctcatctaggtttttttcttttcttttcttttcttttctccttttttaaggcagggtctcactctgtcacccaggctggagtacagtgatgctgtactccatagctcactgcagcctcaaacccctgggcttaagggatccttctacctcagcttcccaagtagctgggtctacagatgt

SEQ ID NO: 269062 - DNA, 201 bp, Homo sapiens
aatttaaaggaagagaagacttatattggcaaaagagaaggaagtagataaaattaaggaaagaggagggcaagaagaagagggaatgcatggtgagacgrgagggaggccctgtctactgcttggtctgtggttggcctacacctgatacccacacgagaaagactccattgcccataggagcgggacttggacagaccc

SEQ ID NO: 269063 - DNA, 201 bp, Homo sapiens
agacagcccacagaggaaggagcccaaggcacctggaggagaggctggggtcacagagaccgagggagggtgcaggttcagggctgaatgatggcgtccayggtcatcattcctcagagaggcccagtgaggcaaggccgggaagggcttagcagccagagggcacccataggcctcatgccagaggtggctccgtcagag

SEQ ID NO: 269064 - DNA, 201 bp, Homo sapiens
agtgtggtaggaacacaataaatacttattcaatagttttgagctaggagaaccattaaatgatgcatttttagaaataattccttttaaagacacttgtwtggtagatttttatgtcagacttgaaaactagcagcacttccttttttatttttatttggctcttttggggtttttgtttgtttgttagattcttggagt

SEQ ID NO: 269065 - DNA, 201 bp, Homo sapiens
gggtggggggtggggggggtcccacgtgaactgtcccgtcttcctggcctgtttagggaggaagattttgccaccaggagctcctgctgttgagccagctycctgctgttctgggtaacacctgtaaacccagaatttttaaattatgtagttacaaagataaaaataactatacttcctggtaggcatttagcattttta

SEQ ID NO: 269066 - DNA, 201 bp, Homo sapiens
gtgtcagggaggcagcagaagcaggtgcttcctgatattaaccagagacggtcctggcacagatggggccgtgtgaatcacatgcagacatacgtatgcastcacgtgcgtgccattattttcatgtggaggtcaaacagtcagaaacgtttgggaagtgctgtgtaatgctaactgttcgtgcataatgttttcccattt

SEQ ID NO: 269067 - DNA, 201 bp, Homo sapiens
agaatggtggtctcttcctctgtggcatgtctgtgactcttgggcagcaggcctcttccagagggacggctgtttcctctcccccaagacctacagcctcrtctctgggtgagctgacccctctctcccttggcagcttcctgggcggcgtggccctacggctcctgctctggcctctgtatccctgatgggcagccccag

SEQ ID NO: 269068 - DNA, 201 bp, Homo sapiens
agcaaaataccaagtaaataagagcctgactgtacacagatttgtgacgatcttgaaggtgttcatgcaggactgaagtacgggaaaccccagggtgggcractctgggttccacctggggaatctgttccgaagacaccttcccatctctttcttgggttacaagcagtggagacacacttgggcttgcatagatgaaga

SEQ ID NO: 269069 - DNA, 201 bp, Homo sapiens
agggcttagcagccagagggcacccataggcctcatgccagaggtggctccgtcagaggatgagggccaacaccagacggtggctgagaacggagctgctstgggctggcagggtgtgaggggcaggggtgagggggcagggggtgagaggcaggggtgaagcaggtcagcaggagggcgctgctgtgacaggagctcagc

SEQ ID NO: 269070 - DNA, 201 bp, Homo sapiens
gggattttttttttaaactgtattttctccagtggttacatgccctaactcttctgcctatatctgaggtattctccaaactgaagggtgagaggttgtatttttttttttttttgagacaggatctcgctctgtcacccaggtcccacaatagcccgtctgcaagctgaggagcagggaagccaggcccgttccaaagct

SEQ ID NO: 269071 - DNA, 201 bp, Homo sapiens
gtgtgaatcacatgcagacatacgtatgcactcacgtgcgtgccattattttcatgtggaggtcaaacagtcagaaacgtttgggaagtgctgtgtaatgytaactgttcgtgcataatgttttcccatttagtaagtgctgttgcatgtgttttctgtgattctcaccacagcccaatgcaaaaaataaaaaaaggattt

SEQ ID NO: 269072 - DNA, 201 bp, Homo sapiens
catttctttaaaaaattgacatgagagcagttttagtaacaaaaaccttttatacgtttttaggatcttggtggcgctctcggttcataatgctctgagtkggtgttacgtcatattatcctgtattgtactgtgtatacatacgttacgtaaatgcttaatgtggtctcgcatgtttttctgtgaatttggcttaaactt

SEQ ID NO: 269073 - DNA, 201 bp, Homo sapiens
tgcggctcctgtggagagtccagctcacggaggccccccagagccctcgttatacctgcaggttccccccaccaaaccctgctgtgtcaggaaaacagaarttcagtggcagcgcagacttatgggtagagaagggtcccctgtctttcaacacttacccaaacactagaatgttactcatttccatgaataataaaaata

SEQ ID NO: 269074 - DNA, 201 bp, Homo sapiens
agccattgttttactcctttactgcattaaataaaatatgttgtttgaatgaatgccccccatttcttttttacttcttgaatgtgactgctagaagattmggaattagcacatggctgacgccatatccccggctcctttccggagttgcacaggaaagggctcacggcaccaagtccccacggcagccacggtcatcgg

SEQ ID NO: 269075 - DNA, 201 bp, Homo sapiens
atctcgctctgtcacccaggtcccacaatagcccgtctgcaagctgaggagcagggaagccaggcccgttccaaagctgaggaacttggattccgatgttygagggcaggaagcgtccggcacgggagaaagatgcaggctgggaggctaggccagtctagtcttttcacgttcttctgcctgctttatattctggcctct

SEQ ID NO: 269076 - DNA, 201 bp, Homo sapiens
ctctcggttcataatgctctgagttggtgttacgtcatattatcctgtattgtactgtgtatacatacgttacgtaaatgcttaatgtggtctcgcatgtwtttctgtgaatttggcttaaactttcagactaggcatctaggaggtggcggcaagtggaaggtggagctgtcacagacactcggcccccgcagcctgtgc

SEQ ID NO: 269077 - DNA, 201 bp, Homo sapiens
tctgcaagcttggttctgtctgctgcagacaaatagctgtaatgcttctgcctcacagagcagctaggatgaaaggggaacacatggaaagcttgggcagyccccgtgacaaagttgtcagtgtcctcggaagtggccagaaagagacaagcctccaagatttctcagaatgcttaccagggggacgcctcaatgcagcct

SEQ ID NO: 269078 - DNA, 201 bp, Homo sapiens
catggagtctggctatgtttcctgagttggtcttgaactcctggcctctagtaataatcctgccccagcctcccaagttgggattttttttttaatttctstggtttaatttataatatggccaatatcaatagatatagttcttataaacaaaagttctttaggatttgcaaccgttttgaggagtttagtaggggccta

SEQ ID NO: 269079 - DNA, 201 bp, Homo sapiens
cccaacacaacgtgttgaaaggccgacttttcctcactcctctgcaaccctctgctgtcacaagtcaggtgtcgatttatgcatgagcctgtgtgacagcrcagagcctggctgttttcattcatgaagctttacaggaagtcttgatttctggaacagcaagtcctccagcttggttcttctcaggggtgtcttggttag

SEQ ID NO: 269080 - DNA, 201 bp, Homo sapiens
gtcttgatttctggaacagcaagtcctccagcttggttcttctcaggggtgtcttggttagtcttaaccccttgcatttccacatacattttagaatccaygtattcagttccacagaagtgtgtgttggaatatggattgggatagcattgaatccgtaggtcagtttcttactcgggtaactgttatccacaggctgct

SEQ ID NO: 269081 - DNA, 201 bp, Homo sapiens
tggtcattactcactgcagactcaaactcctgggctcaagcaatcctccccctccccctgcctcagcctcacaagtagctgagtctacactgcaagtgtgygccaccacaactggctaatttttttttaaagagatggagtctgggccaggtgcagtggctcatgcctgtaatcccaacactttgggaggccaaggcgggc

SEQ ID NO: 269082 - DNA, 201 bp, Homo sapiens
tgtcatttacactaagacatgatggattttttttttttttttttttttagatgaggtcttgctctgttgcccagactagagtgcggtggcatggtcattastcactgcagactcaaactcctgggctcaagcaatcctccccctccccctgcctcagcctcacaagtagctgagtctacactgcaagtgtgcgccaccaca

SEQ ID NO: 269083 - DNA, 201 bp, Homo sapiens
gaccggagcactatatgaagtgttccacagacccctatataggatctcgctatactacccaggctagagaacagtggctcttcacaggtgtgattatagcrcactacagcctcgaactccgggttcagatgatcctgccgcctcagcctcccaagttagctggggcacaggtgcatggcaacatgcttggctacgtatatt

SEQ ID NO: 269084 - DNA, 201 bp, Homo sapiens
  misc_feature (1)...(201): n = A,T,C or G
agattttcttaaaaccacccttcacagaatctatgggaaattcctaggcttgagagcttacatcagaaaacagataaataatatattttataggtaagtcncgtgtggatggcgttgtccttgtgtgtggtgatgctcatttcccccctcgatgctcccctaccccatcgtctcctctgacaggactcagcatgtggaggg

SEQ ID NO: 269085 - DNA, 201 bp, Homo sapiens
gtgagtgacccctctgtgtcctcatccaccccgccactcccagtctttgcgtgtcatgccccttcttccccgcgctttaccgtgtaatttctctgcatgcycttctgcatttactcagtaacataatacagttagcagttgtgggacctccagcaagtattgaactgttgagtggctgttcttcatttggaaaatgggagt

SEQ ID NO: 269086 - DNA, 201 bp, Homo sapiens
ccttggcctctttctccaataatgttggtatttgaaaaaatttacctagttttggtattttattattgttcacattgtgtgtgtgtgtgtgtgtgtgtgtrggcgcgcgcacttgcgcgtcggccacttgtaaatttctttgcttcttggctttggcctcattgaggaacagctggaatgccaagtgagcattgcatctac

SEQ ID NO: 269087 - DNA, 201 bp, Homo sapiens
ttaaggattaagtatgtgcctgagatgtgtatctccatttactaacagcagtagtaatcccaactcttaactgttctttaaatgttcactccagcaaaatygaaagcttcacagccatatccacccctcgctgttttcttcacagccctctggcttctgcttcgacccagagaggctcccttagctcttcacagcgggtgc

SEQ ID NO: 269088 - DNA, 201 bp, Homo sapiens
aatactggccaaagactcacagtccaaaagaagtaatgttcttaaacgaattagaagagattttagatgtcattgaaccatcagaatttgtgaagatcatkgaacccctcttccggcagttggccaaatgtgtctccagcccacacttccaggtatgtggggcttgggggacctgattaaattcttccagtgttcatttgg

SEQ ID NO: 269089 - DNA, 201 bp, Homo sapiens
caaaataagcaagacctcccggtgcccagggagcaggccacacagtggaagagagtgaccatgtcacaccaccaccttacagccaaacgtgaagggccagrtggcgtgtgcagcaggctctcagaaacacatgggcagttaccttagcacaagtctaagtggttagaaaaagtccacaagaatgaggggtcctccaaactg

SEQ ID NO: 269090 - DNA, 201 bp, Homo sapiens
attgcaacctctgccttccaggttcaagtgattctcctgcctcggcctcccgagtagatgggattacaggtgcgtgccaccacacccagctaatttttgtwtttttagtagagacggggtttcaccatattggccaggccgatcttcaactcccagcctcatgatccgcccacctcggcctcccaaagtgctgagattaca

SEQ ID NO: 269091 - DNA, 201 bp, Homo sapiens
acaacctgttctttgtagcattgatttattttatttatttatttatttttgagatggagtcttgctctgtcacccagactggagtgcagtggcaccatccyggctcactgcagcctccacctcccaggttcaagtgattctcccacctcagcctcccaagtagctgggactacagacatgagccaccactcctggctaatt

SEQ ID NO: 269092 - DNA, 201 bp, Homo sapiens
ggcagattttattttttgcttgtcacttaaaactggctaaggtagataagctttgcacgaatgtaattcaaaatacactgtatacatatgtgtgtatctatgtgtgtgtgtgtgtgtgtatatatatgaaacaactgccatttagtcattccttagacaaatatgtgaatatttaccttatacaccaggccctgttttaga

SEQ ID NO: 269093 - DNA, 201 bp, Homo sapiens
gcagattttattttttgcttgtcacttaaaactggctaaggtagataagctttgcacgaatgtaattcaaaatacactgtatacatatgtgtgtatctatgtgtgtgtgtgtgtgtgtatatatatgaaacaactgccatttagtcattccttagacaaatatgtgaatatttaccttatacaccaggccctgttttagat

SEQ ID NO: 269094 - DNA, 201 bp, Homo sapiens
tgaggcaggagaatggtgtgaacctgggaggcggagcttgcagtgagctgagctcacaccactgcactccagcctgggagacagagagagactccgtctcaaaaaaaaaaaaaatacaaaaaaaaatcagccgggtgtggtggcgggtgcctgtagtcccagctactcgggctgaggcaggaggatggcgtgaacctggag

SEQ ID NO: 269095 - DNA, 201 bp, Homo sapiens
ctactcgggctgaggcaggaggatggcgtgaacctggaggcggagcttgcagtgagccaagatcacgccactgcactccagcctgggcgacagagcgagamtccgtctcaaaaaaaaaatccttgcccttttggggtttatattctgggtagtgtggggaaataaaagaacacaaaatacacctaagtgaactatagagca

SEQ ID NO: 269096 - DNA, 201 bp, Homo sapiens
aatgctctgagttggtgttacgtcatattatcctgtattgtactgtgtatacatacgttacgtaaatgcttaatgtggtctcgcatgtttttctgtgaatktggcttaaactttcagactaggcatctaggaggtggcggcaagtggaaggtggagctgtcacagacactcggcccccgcagcctgtgcataggtgctcta

SEQ ID NO: 269097 - DNA, 201 bp, Homo sapiens
agacggggtttcactatgttggccaggctggtctcgaactcctgaccttgtgatctacctgcctcggcctcccagagtgctgggattacaggtgtgagccrccgcacctggccttcagtgaaggtttttattcctagtcagaaccctctcctgccagtgcccgctgtgtgaggtttattttgctgtgaacatctggtagca

SEQ ID NO: 269098 - DNA, 201 bp, Homo sapiens
gactcaagcaatccgcccacttcagcctcccaagcagcagtgactaccggcaccaccacactcagctgatttttgtatttttagcagagatggagttttamcatgttggctaggctggtctcaaactcctggtctcaagtgatctgcctgccttggcctcccaaagtgctgggattatgggcatgagccaccgcgcccagc

SEQ ID NO: 269099 - DNA, 201 bp, Homo sapiens
cgtggtgaaatcccatctctactaaaaatacaaaaattagccaggcatggtggtgcacgcctgtaattctagctactcgggaggctgaggcacaagaatcrcttgaacccgggaggcagaggttgtgatgagtcgagttcgcaccactacactccaacctgggccgcagagggagacgtcacctcaaaaataaataaataa

SEQ ID NO: 269100 - DNA, 201 bp, Homo sapiens
cctgagcagtcctttctctggaaatgatcttagctgccgactcaaaggtcgtcccactctgactgttgctttcctcatcgttgcggattgcagaggatgtyggtgccattgtcacacgggtcctccctgcgtgacgcagcccttgccatttccagcattttcagctgtgaatctctgctgcgtctttcgtcatctcatccc

SEQ ID NO: 269101 - DNA, 201 bp, Homo sapiens
ttgcacccactggatagtataagacctcagaagtcatcactgtgccatcagcctttgttggtgttggttgtcattcaaagtttgacagtcaagagtccaartaactttggtggtcaacttgcgtgcgcacctgtccaaagtgatgtttcctgctgcagttttgatccaggctctctctgaggacccacacagcttctgcgt

SEQ ID NO: 269102 - DNA, 201 bp, Homo sapiens
gggatttgacttgtttctttcttccctgtcacccttttgactaaattcatttcgatgaagatgaaatgtaggtgctttatgaaggtatatgctatatgccttttttttttttttttttggtcttttgatctttcattaaaactgctaagatttcttctccccagagctttcttgctaatgtgcctatatcctcttacttta

SEQ ID NO: 269103 - DNA, 201 bp, Homo sapiens
gtggagaggctctgggaaggggagggaacgacttcctctttattcccgtagcttccatttgagtggccgacaagtgtctcaaatagcatttcagattgtgccccccccccactccacccccgccttcctcctagaaaatgcagctggtgctcgtgtgcagccactgttcagacacgtggaggccacagtgctcgcttggaa

SEQ ID NO: 269104 - DNA, 201 bp, Homo sapiens
taattagaactagcaagtcgaagttgcacaggtgggtataaaatgaatttgggatccctcactgggaaatgctaaagttcacacagacatatacacacacttttttttttttttttttttttttttggtggctccctcgaaatcatttgtttacagtctggccaaggttgtggcctccagtattccccctaagagatggga

SEQ ID NO: 269105 - DNA, 201 bp, Homo sapiens
caggtgggtataaaatgaatttgggatccctcactgggaaatgctaaagttcacacagacatatacacacacttttttttttttttttttttttttttggkggctccctcgaaatcatttgtttacagtctggccaaggttgtggcctccagtattccccctaagagatgggatctttgcctaaaagttactgagaaacga

SEQ ID NO: 269106 - DNA, 201 bp, Homo sapiens
gaagaaactttatccagaaaagtttctaactaattggcagtcagtcttctggcatatacatcatgtttgggtgatttagatggtttattgttttgtttcaraatattggtattaacacagtgtctctacttttaaactgaattatgtgtttattcatggaaatggatgcttttgatatgtaaactctccaaattaagtttc

SEQ ID NO: 269107 - DNA, 201 bp, Homo sapiens
agaagagagtagactcagataaatgtattccatcctccatctgtaatcataaagtaaaacattatttgtgatgtaatgcttttaaagaacaccatgagaascctgacttgatttattgaatcgtagcacacatgtccagtgaaatttcaaacagttgacaatggcattacctatttgttggcatgtgagacatgctggaca

SEQ ID NO: 269108 - DNA, 201 bp, Homo sapiens
agatgaagcgataacgggctgcacgaagggtgttgagcatttagtaatcagtgccctgggtgcctgttctccccaaggctttctagaactagagtcctatrtgggaaatatggcctgtatctggaaataatgctgtgctggatttatatctttatccctaggagtttgtttgacctgtctcaacctttccctgtttaaaaa

SEQ ID NO: 269109 - DNA, 201 bp, Homo sapiens
atatttcaatttgtgtcactttctagctatcgaatttataaagcggctttcattttctacgtaagtttttaagcttaattttttcagggaaaaaatagatytcaagaaaaaaagtgtttgggatcataagttaataactcatcctattggtaagggaagttgaataagagtccaaactaatggattagaattgtgtaatat

SEQ ID NO: 269110 - DNA, 201 bp, Homo sapiens
gaaattctatggagattttaactttttcataatgtttgagagaaataaatatatatatttatttatatatatattatatatatattatataaatatatatataatatatatatttatataatatatataatataaaaatattatatatgtatatatattttttttttttgagatggagtcttgctctgttgccaggctgga

SEQ ID NO: 269111 - DNA, 201 bp, Homo sapiens
ttatttatatatatattatatatatattatataaatatatatataatatatatatttatataatatatataatataaaaatattatatatgtatatatatwttttttttttgagatggagtcttgctctgttgccaggctggagtgcagtggagcaatctcagctcactgcagcctccgcctcctgggttcaagcaattcc

SEQ ID NO: 269112 - DNA, 201 bp, Homo sapiens
ttagtcttaaccccttgcatttccacatacattttagaatccatgtattcagttccacagaagtgtgtgttggaatatggattgggatagcattgaatccrtaggtcagtttcttactcgggtaactgttatccacaggctgctagagcaagcatcaaatcaatggttagctagtaaaagctcccctctgagtcggggatg

SEQ ID NO: 269113 - DNA, 201 bp, Homo sapiens
agcgcttctttctgttttgcgtgagatctcttgtctgtgggctcgcgacttgcatagacctccccaggaccctgggagcaccttgcatggaagaatacacktggggctggcatggtggctcacacccgtcatcccaacatttttgggaggctgaggcaggaggatcacttgagcccaggagttcaggaccagccttggcca

SEQ ID NO: 269114 - DNA, 201 bp, Homo sapiens
ggaccctgggagcaccttgcatggaagaatacacttggggctggcatggtggctcacacccgtcatcccaacatttttgggaggctgaggcaggaggatcrcttgagcccaggagttcaggaccagccttggccaacatagtgagattgtgtctctataaacaatttaaaaactagctgggtgtgggtgcatgcctgtagt

SEQ ID NO: 269115 - DNA, 201 bp, Homo sapiens
ggaactggtgcagagtgacttctgccctttgtgttggtcagagcagggcacaaggacagcccagcttcagaggaaggagaaatagagtccacctcttcccrtgaggccagaatacatcatacaggcaggaaaggcatttagaatcctttctggagacttctatagccagcaggttcccagcttagtgtctggggggtctga

SEQ ID NO: 269116 - DNA, 201 bp, Homo sapiens
ccagaacgtccaactgcttggtctgtccactgcccttagaaaggggcacgtcccctcctgggagggttaccttatacagtgacaggaaggaaccagtcctrtggccatccacgtgtctacttgtaaatacacacacaggcaggacagttcttggagaactcctgtagcatgtctgcttccttgttttcacaactcttgaaa

SEQ ID NO: 269117 - DNA, 201 bp, Homo sapiens
ggctccatggctcctcctagagcattgttttcttattcaggttagttcagtgtctaattctaatgggaaaattgttttttctaggtttatttatgaaacasagcatcataatggcatagcagagttactggaaatattgggaaggtaagcctctgttatgggtagcaaacggctgtagatggaatttataccagagtgatc

SEQ ID NO: 269118 - DNA, 201 bp, Homo sapiens
ctggctgcgccagatgctagccacagctgttcaaagctaagtctatccactgatttttttacttacttagtggaaaaggcagtgtgactttttatagaccrcctcttggtttggtttgggttttggggctttttttgagtaagaaaaggtgaatcaatacaatttatagaaatgaaagtcttgaaaatagggaattgctga

SEQ ID NO: 269119 - DNA, 201 bp, Homo sapiens
tcaggtgatctgcccgccttggcctcccaaagtgctgggattacaggcgtgagccaccacgcccagcctgaggcttttgtttttatgtaagtttagattgyataaaactttttttttttttttgaaacggagtctcactcggtttcccaggctggagtgcagtggcgcgatcttgactcctcacaacctccgcctcccagg

SEQ ID NO: 269120 - DNA, 201 bp, Homo sapiens
gtgggctgcagaagagaggccacctctctctgacttgtgtctcctgtggtccgctccgcccctgccagcatgttcacctgcacatcccctctgccaggccsttcatcagcctgccatctgcatgctgtcttattctccctgcctgctgctgctctcatttttttgccttgtggatggtaaaattattctctgctttacaca

SEQ ID NO: 269121 - DNA, 201 bp, Homo sapiens
agttcagtgccaggacccactcaggccttcagctgcaggcccagccccccaactcgccctcgtctgtgtcccccacgcacgcttgcgcccatcttggcttytgcttcttagaggacctgatcagcacagagtacattccagaatcttttccagacacatatgcataaggccaactcattcttaattttttttttttttcct

SEQ ID NO: 269122 - DNA, 201 bp, Homo sapiens; identical to SEQ ID NO: 53069

SEQ ID NO: 269123 - DNA, 201 bp, Homo sapiens; identical to SEQ ID NO: 53071

SEQ ID NO: 269124 - DNA, 201 bp, Homo sapiens
ccactggatagtataagacctcagaagtcatcactgtgccatcagcctttgttggtgttggttgtcattcaaagtttgacagtcaagagtccaagtaactytggtggtcaacttgcgtgcgcacctgtccaaagtgatgtttcctgctgcagttttgatccaggctctctctgaggacccacacagcttctgcgttttgag

SEQ ID NO: 269125 - DNA, 201 bp, Homo sapiens
aagagtccaagtaactttggtggtcaacttgcgtgcgcacctgtccaaagtgatgtttcctgctgcagttttgatccaggctctctctgaggacccacacrgcttctgcgttttgaggatacggaggagctaagttaccatgggaagcggctactgttagaattacctaagactttataaaatgttgtctgtaaatatttt

SEQ ID NO: 269126 - DNA, 201 bp, Homo sapiens
cagctccctcacactgccaccttatgacagggataatgagatggacccggatttcagaaacaataaaatgtggaatgtgtccatgaaatagggttgaaagkttgacttggaactcagtgggcctgttgcttttctctatgaaacgtctgtagcttcttagcacagtgcgtccatttagaaaggggggtctgttaactagta

SEQ ID NO: 269127 - DNA, 201 bp, Homo sapiens; identical to SEQ ID NO: 53114

SEQ ID NO: 269128 - DNA, 201 bp, Homo sapiens
ataggatctcgctatactacccaggctagagaacagtggctcttcacaggtgtgattatagcgcactacagcctcgaactccgggttcagatgatcctgcygcctcagcctcccaagttagctggggcacaggtgcatggcaacatgcttggctacgtatattttgcctgctgggttttgatggtgaaaacaaaaattgaa

SEQ ID NO: 269129 - DNA, 201 bp, Homo sapiens
agagacttcatttcgataaataagtaaataaataaataaagtctgaagctccactggtcactccttttattgattatttgcagctggtctaaccagttacrtatgtctggcttgattacatggccagagcaacataaaagccctgctgggaacttctgatttgagctcttccaaaaccaggatggatgcctcacatagatc

SEQ ID NO: 269130 - DNA, 201 bp, Homo sapiens
gtcagggtgctggtgtgttgggcagagagagctccccacctcacctagtcccaggtacatttaatatggtaggttcggccaggcgcagtggctcccgcctrtaatcccagcactttgggaagccgagggaggcggaccacctgatgtcaggagttccagaccagcctggtcaacatggtgaaacaccatctctactaaaaa

SEQ ID NO: 269131 - DNA, 201 bp, Homo sapiens
tgaaagggtcagatgcagaaggggctggcctcgctgactgcagcctcgcagctgtgtctggggctgagtagtttctctgatctctaggggtcctgcctagkgttgtcttctcctgacctgcccctgtcccctgtgttttccctccaggtctacaccagctctcagcccctgcgtgtggggtactatgagactgacaactat

SEQ ID NO: 269132 - DNA, 201 bp, Homo sapiens
ggcaggggcaccggtcccagcatggcacgggctgacccattcttggctcctccagctatgactgcagtaaccccctctttggccagaccgtgaacccatgraagtcctccaaaagcccagggggctcctcagggggtgaaggggccctcatcgggtctggaggctcccccctgggcttaggcactgatatcggaggcagca

SEQ ID NO: 269133 - DNA, 201 bp, Homo sapiens
ggtgcccagcctcagctgctggcaccagggatgcaggaatcatttcccagcctgctgaccttcagcaaacagcagcctttctaacagtattcctgtccacrttttgggagcagcacgccacgctgcctgcagaccccagctcatgtagcctgttcctgccagacttgctgctacgtgagccagggtctgcaagcagcgtgg

SEQ ID NO: 269134 - DNA, 201 bp, Homo sapiens
gcttctgtcattaagagatggagtctgtttccccacctcttgaatctgggctgatcttatgatttgttttgaccagtaaagtctggtggaagggatgctgygcaacttctgcatgtaggcctcaagaagcctcgcaacttccacgctcattttggagctcttctgcggctctgtgaagaagcctggaccaacctgctggag

SEQ ID NO: 269135 - DNA, 201 bp, Homo sapiens
ccccaccctgactctggccgctgtggaggaaacagtaccagcactgcgggtttgccagcctttcttaagcaagacctgaaggactatggcctggccctacrttgtggcctctctctagctgggtgcttcctgggcctgggggtggggagtcctgccttgctaaccctatcctgatgcctgtatcccctatagggcatgaag

SEQ ID NO: 269136 - DNA, 201 bp, Homo sapiens
cggggtttacatctcaacatgagatttgggtggggacaaatatccaaactctatcagagtccttctttccttgtcttgataatcccttctctctgtactartctctttagcaaactggttgctgggccatacccttggtttcctctcccaaacatgcctttttactgtttttttttttttttgagatggagtctcgctctg

SEQ ID NO: 269137 - DNA, 201 bp, Homo sapiens
agtggcgcgatctcggctcactgtaagttccgcctcccaggttcatgccattctcctgcctcagcctcccaagttgctgggactacaggtgcccaccaccrcgcccggctggtttttttttgtatttttagtagagatggggtttcattgtgttagccaggatggtctcgctctcctgacctcgtgatccacacgtcttgg

SEQ ID NO: 269138 - DNA, 201 bp, Homo sapiens
atgtggtgagccgagatcgcgccattgcactccaacctgggcaacaagagtaaatctctgtctcaccaaaaaaaaaaaaaaaaaaaaaaaatagagatctrttgtggccaggcacggtggctcatgcctgtaatcccagcattttgggagtctgaggcaggcaggtcatgaggtcaggagttcgagatcagcctggccaac

SEQ ID NO: 269139 - DNA, 201 bp, Homo sapiens
gggcatggtggtgagctcctgtaatcccagctacttaggaggctgaggcaggagaattgcttgaatccaggaggcagaggttgtagtgagctgagagggcrccactgcactccagcctggacaacagagggagactctgtctcaaaaaaaattaaaaataataaaataaaataaaaggggatctattgtataacatggtga

SEQ ID NO: 269140 - DNA, 201 bp, Homo sapiens
agcctcccaaagtgttcgggttacaggtgcgagccactgcaccggccttttttttttcaagacaaagttttgctctgttgcccaggctggagtgtagtggygtgatctcagctcactgcaacttctgcctcccaggttcaagcaattctcatgcctcagcctccagagtagctgggattacaggtgtgtgccaccacaccc

SEQ ID NO: 269141 - DNA, 201 bp, Homo sapiens
gtggcatgatctcagctcactgcaacctccacctcccaggtttaagtgattctcctgccttagcctcccaagtagctgggattacaggcacaagccaaaaygcccagctaatttttgcattttttgtagagacagggtttcaccatgttggtcaggctggtctcgaactcctaacctcaggtgatccacctacctcggcct

SEQ ID NO: 269142 - DNA, 201 bp, Homo sapiens; identical to SEQ ID NO: 53126

SEQ ID NO: 269143 - DNA, 201 bp, Homo sapiens
tcttagtcatgggctgcatctggggctccatttgaagaacaatttgtagttttacagctttgattctggaagagacaaacttaacgaggaggttaaagatrcggggattgaaatatatggcctgcagtataggggattatttctttggcacactttacaggccctgaatatctgcttgatagttttaaaaaggcctggtcc

SEQ ID NO: 269144 - DNA, 201 bp, Homo sapiens
caaagtgagatatttcttgaactcatgtctaccaataaagagaaaatgaaaggtagatggtaaatcagaattaggtttggttgcatttgatagaaaacctractaattggcttaaagaggaaacattaatttatctcttacataagagaagctgagatataggcactccaggtatggaggctccacaattatcagggactt

SEQ ID NO: 269145 - DNA, 201 bp, Homo sapiens
aggctggagtgcagtggcgcgatctcggctcactgcaagctccgcctcccgggttcacgccattctcctgggttcacgccattctcctgcctcagcctccygagtagctgggactacaggcgcccggcaccacgcccggctaattttttttgtatttttagtagtagagacggggtttcaccgtgttatccaggatggtct

SEQ ID NO: 269146 - DNA, 201 bp, Homo sapiens
ttcctcccagctcatcccctactgcggggcatctgagaccagtattttgctctcttgagtgttctggttgtgctctggtcctggtactctctctctctctstctctgtgtgcgttggggttgaaggccagaaacagccaggttgaggctggggccagatgtccccagtgaggcaggtgctgggccctaggtcatcctctgt

SEQ ID NO: 269147 - DNA, 201 bp, Homo sapiens
atagaaaacctaactaattggcttaaagaggaaacattaatttatctcttacataagagaagctgagatataggcactccaggtatggaggctccacaatyatcagggacttaagctccctttttccttttgcaacgtattttgttgctagtgtcagccttagcctccctccctttaagagggagaagatatgtaactagt

SEQ ID NO: 269148 - DNA, 201 bp, Homo sapiens
ttaatttatctcttacataagagaagctgagatataggcactccaggtatggaggctccacaattatcagggacttaagctccctttttccttttgcaacrtattttgttgctagtgtcagccttagcctccctccctttaagagggagaagatatgtaactagtaaagctctaaggcaaggcctcatggtccagaatgac

SEQ ID NO: 269149 - DNA, 201 bp, Homo sapiens
agctcagaagacaggatgcctgcattccagacctgtcttgtcactctgcattgggtagctttgggcaagtcccagtcccacctaatctccctattgagacytcaagcctcagtttcctcatatgaccagtaggaatccttatccttgctctgcccacctgagtcactgtgaaggtgttttatgaaagggtcagatgcagaa

SEQ ID NO: 269150 - DNA, 201 bp, Homo sapiens
gcgcccgccaccacgcctggctaatttttttgtatttttagtagagatggggtttcacggtgttagccaggatggtcttgatctcctgacctcgtgatccrccggccttggcctcccaaagtgctgggattacaggcatgagccaccacgcctggcttctgtctttctgtctctttctctctctgcctctctttctctctc

SEQ ID NO: 269151 - DNA, 201 bp, Homo sapiens
agaggtctcactgtaagatggtgttataatttatatttccctcaggaggccaggtttctcccccttgaagaggatatcatggccaggtggtactgcagaaraatataagtcatttctttcttagcgtctgagggtcaaattggtcccaaatctccagaatacatcttaggggcgtttttgccttgtggggaacgtttccca

SEQ ID NO: 269152 - DNA, 201 bp, Homo sapiens
acaatctcagctcactgcaagccctgcctcccaggttcacgccattctcctgcctcagcctcccaagtagctgggactacaggtgcctgccaccatgcccrgctaatttttatatttttagtagagatggggtttcactgtgttagctaggatggtctcgatctcctgaccttgtgatccatctgccttggcctcccaaag

SEQ ID NO: 269153 - DNA, 201 bp, Homo sapiens
aggccacgccagtgtccaggagacagttaacctcctggcccttaatggtcaagcatacctggggctctgtgagggtgatggcatgggttggtacttgcccygggcaccctcagtcctgctgctggatcatctggttagtggcttctgactcagagggccttcgtcccctggggcagtgggccttccagtgattcccttgac

SEQ ID NO: 269154 - DNA, 201 bp, Homo sapiens; identical to SEQ ID NO: 53120

SEQ ID NO: 269155 - DNA, 201 bp, Homo sapiens
tttggagtccttgttgggcctcaggtctaaggggatactgcctttggtagggaaaggaggcggaatcctttaatttaacttgaatgggacgggcattcttygctcatccatatcgtccttctgttgcccagacttcaggattaatttcttccttaagcaggggacaacaaacgggtgttccttttcctatgttcaggtgta

SEQ ID NO: 269156 - DNA, 201 bp, Homo sapiens
aaataagtaaataaataaataaagtctgaagctccactggtcactccttttattgattatttgcagctggtctaaccagttacgtatgtctggcttgattmcatggccagagcaacataaaagccctgctgggaacttctgatttgagctcttccaaaaccaggatggatgcctcacatagatcatgatgattcaatccaa

SEQ ID NO: 269157 - DNA, 201 bp, Homo sapiens
tgtttggaaaccttgtagccacaggtggcgaggaaattcaagagcgcttgggtagcttgatggcacaaggtttctgaatgggtggctaaaagcaaatcatmcacatactgaaggacaagagtgtcaaggtatgagaactggctcaagtcttgggttaacgcctggccaaatagatgggagctatcccggaacccttggggt

SEQ ID NO: 269158 - DNA, 201 bp, Homo sapiens
gtgaaaagagtaaagttccccagtcacaacttagtggctgggagaagtatctagtgactggctgtcctaggaccccttggatagtgatagatctggaggayagttgtccgggacaggagagtaagactgagaaggccacgccagtgtccaggagacagttaacctcctggcccttaatggtcaagcatacctggggctctg

SEQ ID NO: 269159 - DNA, 201 bp, Homo sapiens
atcccttctctctgtactagtctctttagcaaactggttgctgggccatacccttggtttcctctcccaaacatgcctttttactgtttttttttttttttgagatggagtctcgctctgtcacccaggctggagtgcagtggcgcgatctcggctcactgtaagttccgcctcccaggttcatgccattctcctgcctca

SEQ ID NO: 269160 - DNA, 201 bp, Homo sapiens
gcccagggtcacatagcaagtcagtggcactgtggtaggagaggctctgtccttaaccaccagcataacattgccaccttgatttttttttttttttttttgagacagagtcttgctttgttgcccaggctggagtgcagtggtctgatcgtggctcactgactcccaggttcaagcaattatcctgcctcagcctttcga

SEQ ID NO: 269161 - DNA, 201 bp, Homo sapiens
catttaggtgtttgccattgtacccccactcagaatgactgatgctgtgccatgcacataataaatgttcctgatgctggggtttgcattggctgggactrcctgagaattggtctgactccatcagcgccattgctggtggaatgtttcattgggtcatggcctctgaagtatctttatttccataggcaatcttgctgc

SEQ ID NO: 269162 - DNA, 201 bp, Homo sapiens
tctcccagtgccatccctgcctctgtggggccattttcagggcagaggtgaggtcccaacctacatggggacacccagattgggacatctaggtagatgcygcactttgccctgatttcttgtaaccactgctgtaattttgcctttttcataaaaccactaccatctgccccagcttcctcctcctgccccatttctctc

SEQ ID NO: 269163 - DNA, 201 bp, Homo sapiens
gaggtggacaggatccctgcatagagaatgggattgctgtgggccgggcgagcaagctgggaaggatgtggggatgggagtgcctggaccgagcattttgyttcccagcaaaggtgatttcgtggacccctgcctgggggacctggtctcaattctgaagcttccccaatggcttaaaggactgctggccttcctggtgaa

SEQ ID NO: 269164 - DNA, 201 bp, Homo sapiens
gagctcatggagtaaggttgggttgctatctgccttgagagtgacttttcagacagtgtcattgtggaagggacttgagaggcagtctaaccagctacccwtcctgtagtagccttcccttatccatgtttccagctccttatgttgctcttctactgctgggaagctcactagtcactgcttctgtctctttctggtttc

SEQ ID NO: 269165 - DNA, 201 bp, Homo sapiens
gtcaccaagtgccagcctgtgcccctctggggcctgattttctcatccagacagtaggggtttgaacttccctctcagagctcccatggggttgtgaaggrtccacggaggggtgagatctagagggttggcagtaggggtctgatgttgctgatctccgtggctgtgaccatcatggctggtgaccacactccttctgcc

SEQ ID NO: 269166 - DNA, 201 bp, Homo sapiens
gggcgtggtgacacatgcctgtaatcccagctactcgggaggctgaggcaggagaatcgcttgaacctgggaggcggaggatgtggtgagccgagatcgcrccattgcactccaacctgggcaacaagagtaaatctctgtctcaccaaaaaaaaaaaaaaaaaaaaaaaatagagatctgttgtggccaggcacggtggc

SEQ ID NO: 269167 - DNA, 201 bp, Homo sapiens
aaactaaagaaaggttgagaaatgtagtcttttggggcaattttccccttccaaaaaattggggttctattaataaggaggaagaggagaatgattttggstaaataaactgtagtatctaccaaagatgaagagagccataggtttccagaatagtgggagagcatatttttttagaaataaatattcttggctgggcat

SEQ ID NO: 269168 - DNA, 201 bp, Homo sapiens
ctttgacagttttttgttttgttttgttttgttgttgttgttttgagacagaatctcaatctgttgccaggctggagtgcaatgacatgatctcagttcartgcaacctctgcctcccaggttcaagcaattctcccacctcagcctccgaagtagctgggacttcaggcacgtgccaccacgcccagttaatttttgtat

SEQ ID NO: 269169 - DNA, 201 bp, Homo sapiens
agcctttcgagtagctgggattacaggtgcctgtcaccacgcctggctaatttttcttttttactttttttttttttttgagatggagtcttgctctgtcrcccaagctggagtgcagtggtgcgatcttagctcactgcaagctccacctcctgggttcacgccattctcctgcctcagcctcccgagtagctgggacta

SEQ ID NO: 269170 - DNA, 201 bp, Homo sapiens
tcacatagcaagtcagtggcactgtggtaggagaggctctgtccttaaccaccagcataacattgccaccttgatttttttttttttttttttgagacagrgtcttgctttgttgcccaggctggagtgcagtggtctgatcgtggctcactgactcccaggttcaagcaattatcctgcctcagcctttcgagtagctgg

SEQ ID NO: 269171 - DNA, 201 bp, Homo sapiens
ggcaggtgctggggccagagccaccccagccacagtccctgagttaaagagcctggggtgggctaggtctgagtgctttcacctggtgtgttgtgtcctcygcaggtgtaccgcaaaaccgtgattgcccagtggagggcgctggacctggatgtggtgctgacccccatgctggcccctgctctggacttgaatgcccca

SEQ ID NO: 269172 - DNA, 201 bp, Homo sapiens
ctttctctccatattgctgcatgggcatggaggactaggtaagcatacttagagtctgtatatatgtttacccttttttctttttctaattttagtgcccragtaagggctattagttttgccagctgagcgctagttcctggagtgaggggattattttcaagtattccattatcactgaccactgcataccctgctttt

SEQ ID NO: 269173 - DNA, 201 bp, Homo sapiens
aatcccagtactttgggaggccaaggcaggtggatcacctgaggtcaggagttcgagaccaggctggccaacatggtgaaaccccatctctactaaaaatmcaaaaaaaaaaaaaaaaaaaaaaaaagtgggtagagaaccaagcccacagagaataataatgcaaaatatggcttaatgtaggagggatcatattgagag

SEQ ID NO: 269174 - DNA, 201 bp, Homo sapiens
ttagtcatgggctgcatctggggctccatttgaagaacaatttgtagttttacagctttgattctggaagagacaaacttaacgaggaggttaaagatacrgggattgaaatatatggcctgcagtataggggattatttctttggcacactttacaggccctgaatatctgcttgatagttttaaaaaggcctggtccag

SEQ ID NO: 269175 - DNA, 201 bp, Homo sapiens
aggtcctttgcacacttcccactcgtgttgtcctctctggctgctcccccaagggagaattaggcccccctcagcattggcattccagtagaaatcccacygcaggatcctccctaagccatatgaggtagctacggaaacgtggagaggacccactcactccgtccagcagtaggacttgtcatcatccacacgaacaac

SEQ ID NO: 269176 - DNA, 201 bp, Homo sapiens
ggaggcggagcttgcagtgagccgagattgcgccactgcactccagcctgggcgacagagcaagactccatctcaaaaaaaaaaaaaaaaaaaaaaaaaawatatatatatatatatatatatgtaaattagtctggagtggtggtttgcatctatggccccagctactcaggaggctgaggtgggaggattgcttgatcc

SEQ ID NO: 269177 - DNA, 201 bp, Homo sapiens
gtgcagcttcttgcgtgagtgacagatttttaaactcaggactttgtgccagagtgctctgggagactgggggactggaagctcttaccaagaccataacmcacacaagaatcttatggctggagatctgcctagaggagacagaaatgggatcatctctggaacataaaaaccctatttgaattagctgggtgtggagat

SEQ ID NO: 269178 - DNA, 201 bp, Homo sapiens
ttaggccgggcatggtggctcatgcctgtaatcctagcatttcaggaggccaaggcgggcagatcatgaggtcaggagatcgagaccatcctggctagcayggtgaaaccccggctctactaaaaatacaaaaaattagccgggcatggtggcaggcgcctgtagtcccagctactcgggaggctgaggcaggagaatggc

SEQ ID NO: 269179 - DNA, 201 bp, Homo sapiens; identical to SEQ ID NO: 53122

SEQ ID NO: 269180 - DNA, 201 bp, Homo sapiens
tccttacctcaggtgatctgcccgcctcggcctcccaaagtgctgggattataggcatgagctactgctcctggcctaattttttttttttttttttttttgagatggagtctcactctgttgccaggctggagtgcagtggtacgatctcggctcactgcaacctgtgcctcctggatttaagcgattcttctgcctcag

SEQ ID NO: 269181 - DNA, 201 bp, Homo sapiens
attgtgcatgcaggtggccacaggtttagatgttacctgtatactatacttccctgcattctccgcaaaatcaggtttccgcatgttcactgattggtctyctggaggtgcagacttactttggtgtctaggagaaaatgtctcagctgcctgacactagttgaagatttaaaaatagctgttagcagctgtgtcattaac

SEQ ID NO: 269182 - DNA, 201 bp, Homo sapiens; identical to SEQ ID NO: 53123

SEQ ID NO: 269183 - DNA, 201 bp, Homo sapiens
ctccttacctcaggtgatctgcccgcctcggcctcccaaagtgctgggattataggcatgagctactgctcctggcctaattttttttttttttttttttttgagatggagtctcactctgttgccaggctggagtgcagtggtacgatctcggctcactgcaacctgtgcctcctggatttaagcgattcttctgcctca

SEQ ID NO: 269184 - DNA, 201 bp, Homo sapiens
tcctttatagaggagggactgtgcaaggagaaccaggggtggagggaatgctcacttttcattttgtatacctttaaagaatatatcaagaggattatctrgtgtgtttggggagaagtcttgaacccattttttcttctttgtagctccttgtgttagaaaaaaaatccaaagtaagtactctatcagttcaatgaattc

SEQ ID NO: 269185 - DNA, 201 bp, Homo sapiens
cttatgtctacttccccttcctcaggcctgggaagtgaacaaagggaccaactgtgtgacctcctatctggctgactgtgagactcagctgtctcaggccmcaaggcagggcctgctctatggcgtccctgtgagcctcaaggagtgcttcacctacaaggtatgctctgcctcagcgccaggcctccatcgtcccctcca

SEQ ID NO: 269186 - DNA, 201 bp, Homo sapiens
tctttttagtcccattttatagagaaggaaacaagcttagattgcttaagtaactcaaaaagttacaatctgaaatttcttttttttttttttttttttttaagacagggtctggctctcaccagggtggagtgccgtggtgtgatctcggctcactgcaacctccgcctcccaggctcaagtgatcctcctgcctcagcc

SEQ ID NO: 269187 - DNA, 201 bp, Homo sapiens
cataataaatgttcctgatgctggggtttgcattggctgggactacctgagaattggtctgactccatcagcgccattgctggtggaatgtttcattgggycatggcctctgaagtatctttatttccataggcaatcttgctgccaatgatctctccccgtcccgaatagccagactacagaagatccttcacagctatg

SEQ ID NO: 269188 - DNA, 201 bp, Homo sapiens
catcctagaagtccctgttttggttcacacctcaagattctgtgggccctccttatccaacctttctggggtctgggaactctcccagcatgaccctcaamcctctgattctaagcatggtggtgctagtcactgtgtgacgctaggtaagttacccacatctcttcatcaaattgaaatgttgttaatttttttttgtat

SEQ ID NO: 269189 - DNA, 201 bp, Homo sapiens
aacctttctggggtctgggaactctcccagcatgaccctcaaccctctgattctaagcatggtggtgctagtcactgtgtgacgctaggtaagttacccayatctcttcatcaaattgaaatgttgttaatttttttttgtatcttactgagctatcagttgtagtgctcacataagctagtagacatgaaagtgctttga

SEQ ID NO: 269190 - DNA, 201 bp, Homo sapiens
tgagcagcctgggcaagagagtgagactccgttttgtgccactgcactccagccagggtgacagagtgagactctgtctcaaaaaaaaaaaaaaaaaaaaaggcattgggatttataatgtgctgtttaaagtctgaagctcggccaggtgcggtggctcacgcctgtaatcccaaaactttggaaggctgaggcaggtgg

SEQ ID NO: 269191 - DNA, 201 bp, Homo sapiens
tgctgggattacaggggtaagccactgcacccgagcccttgtttctttctttcttttttttttttttgttttttttgacagagtctcactctgtcgcccasgctggagtgcagtggcacaatttcagctcactgcaacctccgcctcctgggttcaagcggttctcctgcctcagcctcctgagtagctggtattacaggc

SEQ ID NO: 269192 - DNA, 201 bp, Homo sapiens
atgtggcagcccatgggtatgacataggccaaggcccaactaacagtcaagaaacagctcctcgtctgtgtggtttctgggcgtcatcgtgagggtggggkttggagcctgttgagagcagggctggcttgactgtgcatacccaggctccagccatgccagtctcctgctccacaacctcccctggtgcccatcacccac

SEQ ID NO: 269193 - DNA, 201 bp, Homo sapiens
tttgtataagaagggaaattagtgtttacttagtctagccctcatattttatggagggagaaattgagttctgtggagattaaataaataatacaagaatkggaggtagagccagaactggaacccatctttctttttctcagttcatatccttctgcaaattcctctagagcagagaatacaatttttacttctttgagt

SEQ ID NO: 269194 - DNA, 201 bp, Homo sapiens; identical to SEQ ID NO: 53119

SEQ ID NO: 269195 - DNA, 201 bp, Homo sapiens
ttgggaggccaaggtgggaagatcacttgatcccaggaattctagatcagcttggacaatgtagtgagacctggtctttaccaaaaaaaaaaaaaaaaaaattagctgggtgcgctggcatgtgcctgtggtcccagctactcaggaggctgaggcaggaggatcacttgagcacaggagtttgaggctgcagtgagcagc

SEQ ID NO: 269196 - DNA, 201 bp, Homo sapiens
actctgtcttaaaaaaaaaacaaaaggaaagagagggagagaaagaaaaggagagaaaggaaagggaggaaaggggagagggaaaggagagaagaaaggcraaagtaatggggaaaggaaaaggggaaaggggaaagaaaggggagaaaggggagagaggacaggaaaggagaaaggaaaggagtcttacttggtctgctt

SEQ ID NO: 269197 - DNA, 201 bp, Homo sapiens
tgagaggcagtctaaccagctacccatcctgtagtagccttcccttatccatgtttccagctccttatgttgctcttctactgctgggaagctcactagtmactgcttctgtctctttctggtttcagggctggactccttgccaccaaaccaggaggccatgttgtctattctacctgctcactctcacacttacagaac

SEQ ID NO: 269198 - DNA, 201 bp, Homo sapiens
tgaatccaacaaaggcctgagcactctgggcagggacctcgctgtccctccagctgggcacattgagcctggagatcccttgccagggtgccagcccgagkggaggctgggttgagtatctgtggcctacccctgatctgagcttgttgtgaggtaggaggtgggcaggaggttgcctctctgtttgggaaggatttgggc

SEQ ID NO: 269199 - DNA, 201 bp, Homo sapiens
tggcatctcctcccctcacgggaagccttcctggtacccatggctactccatccctggcatcctggcactctgacgatgttgtcgtcggggtgaactgtgrccctgtgggacaagtatatagagggctgatcaagagtattggagtgagtgattgatggagaactttagccctgtgctgtgtgatgtgtgagcactgcatg

SEQ ID NO: 269200 - DNA, 201 bp, Homo sapiens
gggatgctgtgcaacttctgcatgtaggcctcaagaagcctcgcaacttccacgctcattttggagctcttctgcggctctgtgaagaagcctggaccaayctgctggagacatgtgctggaagctgtcttagacctcctaagctcagttaaacggttaggtgacccaaacagcatgagtgaccccagccaagaccaacct

SEQ ID NO: 269201 - DNA, 201 bp, Homo sapiens
ctggatgagtccctccagaatgcggcgtccctgtcttcaaggcacgtactgtgaccagcacactaatctctgttactctagcggatggccttcagcttttrgaaccagcccggcaacctcctttccccttgctcatcagtccccgggaacgagcccagtgacctcccctcagctcactcatgtacccttggaaactggacc

SEQ ID NO: 269202 - DNA, 201 bp, Homo sapiens
cctctagactcttgtgaacccaaaccacagcttgacctgccccttgagaaaaattgttgtggcttcccactctcttctcaggcaggcatgcctggctctcycagctcacctcaggagggctcttatcattactcccatctttcctcagaggcctacatacctacccctgggagtccttgctatgccatctgcctgtgcccc

SEQ ID NO: 269203 - DNA, 201 bp, Homo sapiens
ccccgaggagggtgggggtcggcctgacccgcttccgcccgtgcttctcaggtggcagggcagtgtctggcccccaggctgctctaggtctgggttcctcrctccttgtctgcttacctccctcacctctctgccccacagtgcgtctctccgtgggccccatggcccgggacgtggagagcctggcactgtgcctgcgag

SEQ ID NO: 269204 - DNA, 201 bp, Homo sapiens
cattctggaggcagaacgactgatgccctctgagaggcagcactgcctgcccggaggacctgtgtcccactgtggctctgttcagatccaggggcaggtgmtggggccagagccaccccagccacagtccctgagttaaagagcctggggtgggctaggtctgagtgctttcacctggtgtgttgtgtcctccgcaggtgt

SEQ ID NO: 269205 - DNA, 201 bp, Homo sapiens
ttgctgtgggccgggcgagcaagctgggaaggatgtggggatgggagtgcctggaccgagcattttgtttcccagcaaaggtgatttcgtggacccctgcctgggggacctggtctcaattctgaagcttccccaatggcttaaaggactgctggccttcctggtgaagcctctggtgagggcacaaggagtggaggggct

SEQ ID NO: 269206 - DNA, 201 bp, Homo sapiens
tggcatgtctggcatggggctccggctggggcgcagtcttcagcatttggggctctggggtgcagggggcagaggacggccggggctgtggtgcccaaccrgtgctaaactcaagcttgggaggtcgcccacgagaaacagtcgcccttccccacccgcctgctcggcttggcggggagcgggatgtcgctgggggcgatg

SEQ ID NO: 269207 - DNA, 201 bp, Homo sapiens
gtcaagactgggaaaaccaataagcctgtcctctctcttttaggctgccacagagcccaaattccctgctgttcgactggctttgcagaattttgacatgrcttacagtgtgcagtttggagatctttggccatcaatccgtgtcagtctcctctcagagcagaagtatggtgcactggtcaataactttgctgcctggga

SEQ ID NO: 269208 - DNA, 201 bp, Homo sapiens
gataatgacccaagagtgcttctcaagacgagagacgtgcttttctgcatgtctgattttcaaaaactggtttgccacccaggagatgttttctcccacaycaacttggatagaagagcttatggcagacaagctgactcaacactcagactgatgtcaccagatcaaagtgaaaaatatgtagctctcatgatccaaata

SEQ ID NO: 269209 - DNA, 201 bp, Homo sapiens
ggttcaagcaattcttgtgcctcagcctcccaaatagctgggattacaggcgcccgccaccatgcctggctaatttttgtatttatttatttatttatttwttttgagacggagtctcgctctgtcacccaggctggagtgcagtggcgcaatcttggttcactgcaacctccgcctcctgggttcaagcgattctcctgc

SEQ ID NO: 269210 - DNA, 201 bp, Homo sapiens
tgccagcctgtgcccctctggggcctgattttctcatccagacagtaggggtttgaacttccctctcagagctcccatggggttgtgaagggtccacggargggtgagatctagagggttggcagtaggggtctgatgttgctgatctccgtggctgtgaccatcatggctggtgaccacactccttctgcccagttcggc

SEQ ID NO: 269211 - DNA, 201 bp, Homo sapiens
atgaccaaaagttagtcatatagtcatacttagttgtaaaagaaaggcttagccgggtgtggtggctcacacctgtaatcccagcactttgggaggccgasgcaggcagatcacctgaggtcgggagttcaagaccagcctgaccaacatggagaaaccccgtctctactaaaaatacaaaatttgccggcgtggtggcgc

SEQ ID NO: 269212 - DNA, 201 bp, Homo sapiens
cagagaatacaatttttacttctttgagtgccctcaaaaatggagacattggccggggggcggtgactcacgcctgtaatcccagcacaagctaggaggcygaggcaggtggaatacttgagtccaggagttcgagactagcctgggcaacatagacctcatcttcattaaaataaaaaaaaaggagacatttatttatgg

SEQ ID NO: 269213 - DNA, 201 bp, Homo sapiens
ctttttctcagttcatatccttctgcaaattcctctagagcagagaatacaatttttacttctttgagtgccctcaaaaatggagacattggccggggggyggtgactcacgcctgtaatcccagcacaagctaggaggctgaggcaggtggaatacttgagtccaggagttcgagactagcctgggcaacatagacctca

SEQ ID NO: 269214 - DNA, 201 bp, Homo sapiens
cacctcacctagtcccaggtacatttaatatggtaggttcggccaggcgcagtggctcccgcctgtaatcccagcactttgggaagccgagggaggcggaycacctgatgtcaggagttccagaccagcctggtcaacatggtgaaacaccatctctactaaaaatacataaattagctgggtgtggtggtgcactcctgt

SEQ ID NO: 269215 - DNA, 201 bp, Homo sapiens
aaattgagttctgtggagattaaataaataatacaagaattggaggtagagccagaactggaacccatctttctttttctcagttcatatccttctgcaaattcctctagagcagagaatacaatttttacttctttgagtgccctcaaaaatggagacattggccggggggcggtgactcacgcctgtaatcccagcaca

SEQ ID NO: 269216 - DNA, 201 bp, Homo sapiens
ttactctgctactctctgttgcctttgctcttgttaaattttctccctggaattccctcacccttggctgtccaaatccttttgactttctttttttttttctttctttttttttctctttttttcgagatggagtctcactctgtcacccaggttggagtgcagtggcacgacctcggctcactgcaagctccgcctcct

SEQ ID NO: 269217 - DNA, 201 bp, Homo sapiens
actgtctcttgttccccagctgtgtccacctacctttctgtcccccactcccccttttacttccctccctcccctccccctttcccttgcccattcttccyccacatgacttctcctttcctcattgattttccagcccggtcgccctcacccctcggaaaataccatagcgaccttgcctgcactcctgggtctccgccg

SEQ ID NO: 269218 - DNA, 201 bp, Homo sapiens
catgcacataataaatgttcctgatgctggggtttgcattggctgggactacctgagaattggtctgactccatcagcgccattgctggtggaatgtttcrttgggtcatggcctctgaagtatctttatttccataggcaatcttgctgccaatgatctctccccgtcccgaatagccagactacagaagatccttcaca

SEQ ID NO: 269219 - DNA, 201 bp, Homo sapiens; identical to SEQ ID NO: 53124

SEQ ID NO: 269220 - DNA, 201 bp, Homo sapiens; identical to SEQ ID NO: 53125

SEQ ID NO: 269221 - DNA, 201 bp, Homo sapiens
gttcaagcctgggttcaaagttcgattctcttgcctcagcctcccaggcagctgggattacaggtgtgtgccaccacgcctgactaattttgtatttttttagtagagacggggtttcaccatgttggtcagactggtctcgaacacctgacctcaagtgatccattagcctcagcctcccaaagtgctgggattataggc

SEQ ID NO: 269222 - DNA, 201 bp, Homo sapiens
atcagggatggaaatcaagttcgagttacctcatgggatggcaggaaatggggagaactggagggggacacctatgaccgggtgagtgattcttgatttargacatgcatccagcttaatgcggcctccccatcctggttctagggcctgaggggttaggatccagcccctatgtttgagcatgtagagctgtttctggac

SEQ ID NO: 269223 - DNA, 201 bp, Homo sapiens
gggagttcaagaccagcctgaccaacatggagaaaccccgtctctactaaaaatacaaaatttgccggcgtggtggcgcatgcctgtaatcccagctactygggaggctgaggcaggagaatcgcttgaacccgggaggcggaggttatggtaagccgagatcgcgccattgcactctagcctgggcaacaagagcgaaac

SEQ ID NO: 269224 - DNA, 201 bp, Homo sapiens
ccactctccactacttttccctctcacacttctctggcaggcaggcaggatgcaaaagcaggagtgggcactagctggatccaagtttgcccctaggctcygaggtgggggtcaggtagtagggggtagagtcaagactgggaaaaccaataagcctgtcctctctcttttaggctgccacagagcccaaattccctgctg

SEQ ID NO: 269225 - DNA, 201 bp, Homo sapiens
acctcgttgtcagcctgtgatgcctccttgttctacccacatctattcttttatccctttgagaacaccctttgatcctcaaagtttacccattgtccccygagtccgggcctaccctgatactgtcccctgtggcctccatatctaccctgtggcctctcaaggcccttgcaaagagcctctgcagatcccctacagctg

SEQ ID NO: 269226 - DNA, 201 bp, Homo sapiens
tgcagaagaatataagtcatttctttcttagcgtctgagggtcaaattggtcccaaatctccagaatacatcttaggggcgtttttgccttgtggggaacrtttcccattgctttggaggtcccttcgtggtcgccaaatgttactggggggtccttgctcccagagctcccaagatggtggcgggccgcttccaagatgg

SEQ ID NO: 269227 - DNA, 201 bp, Homo sapiens
cggtcctgagtgtctgctggaagtagacatgttgagacccagcttctaccctctgtaataaggaccataatattgctaatatttatggcatgtttatacaractaggcatttttttgaggtgctgtacatatgttatctctttttgttctgtcagcagccttatgaagtaggtaatattattgctgttttacatttggaga

SEQ ID NO: 269228 - DNA, 201 bp, Homo sapiens
ctggagtgcaatggcacaatctcggctcactgcaacctctgcttcctgggctcaagcaattctcccgcctcatcctcccaagtagctgggagtacaggcaygtgccagcatgtccagctaatttttttggtattttttgtggagacggggttttgtcatattgcccaggctggtctcgaaatcctgggctaaagccatccg

SEQ ID NO: 269229 - DNA, 201 bp, Homo sapiens
gaacccaggaggtggaggttgcagtgagctgagatcgtgccaccgtactccagtctgggcgacagagcgagactctgtctcaaaaaaaaaaaaaaaaaaaattatctaccaaatgctaggcatttaagtgccttgatgaacaagccctcatagagcttccagtttagtgaggaagacagctatttaaaaacaataattggc

SEQ ID NO: 269230 - DNA, 201 bp, Homo sapiens
ctcaacacctcaaaccagggggtatcttgccttgcctgacctggaaggctcaacccctcaaaccagggggtgttttgccttgctgccctggaaggctcaayccctcaaactaggaggtgtcttgccttgcttccctggaaggttgacctgtttcctccctttccccctctgaaggtcctttgcacacttcccactcgtgtt

SEQ ID NO: 269231 - DNA, 201 bp, Homo sapiens
actcagaatgactgatgctgtgccatgcacataataaatgttcctgatgctggggtttgcattggctgggactacctgagaattggtctgactccatcagygccattgctggtggaatgtttcattgggtcatggcctctgaagtatctttatttccataggcaatcttgctgccaatgatctctccccgtcccgaatagc

SEQ ID NO: 269232 - DNA, 201 bp, Homo sapiens
ttgcctgacctggaaggctcaacccctcaaaccagggggtgttttgccttgctgccctggaaggctcaatccctcaaactaggaggtgtcttgccttgctkccctggaaggttgacctgtttcctccctttccccctctgaaggtcctttgcacacttcccactcgtgttgtcctctctggctgctcccccaagggagaat

SEQ ID NO: 269233 - DNA, 201 bp, Homo sapiens
ctttccccctctgaaggtcctttgcacacttcccactcgtgttgtcctctctggctgctcccccaagggagaattaggcccccctcagcattggcattccrgtagaaatcccaccgcaggatcctccctaagccatatgaggtagctacggaaacgtggagaggacccactcactccgtccagcagtaggacttgtcatca

SEQ ID NO: 269234 - DNA, 201 bp, Homo sapiens
ttttttttttgagatggagtctcactctgttgccaggctggagtgcagtggtacgatctcggctcactgcaacctgtgcctcctggatttaagcgattctyctgcctcagcctcccgagtagctgggactacaggtgcgtgccaccacacccagctaatttttgtctttttagtagagatggggtttcaccatgttggcca

SEQ ID NO: 269235 - DNA, 201 bp, Homo sapiens
aggagaagcgggaaattacctttcaggtttccagtgattgtggttttgagtaatcagcaaaggggtggggtcctgattgacaatagctttgtaggctttgsgggggagtaggatttttttttggtttttgttatttttgttttttgtttttgagacggagtcttgctctgtcgcccaggctggagtgcaatggtgcgatct

SEQ ID NO: 269236 - DNA, 201 bp, Homo sapiens
agatggggtttcaccatgttggccaggatggtctcgatctcttgaccttgtgatctgcctgcctcggcctcccaaagtgctggaattacaggtatgagccrctgtgcctgacacctgtcaaattattttactgtgtttatttaccatgtttctttcactgtggggtctctgtccttgctgttttgtttttcttttaacttc

SEQ ID NO: 269237 - DNA, 201 bp, Homo sapiens
ggacctcgctgtccctccagctgggcacattgagcctggagatcccttgccagggtgccagcccgaggggaggctgggttgagtatctgtggcctacccctgatctgagcttgttgtgaggtaggaggtgggcaggaggttgcctctctgtttgggaaggatttgggccaagggcaggatccaggcaggagggtgggggtt

SEQ ID NO: 269238 - DNA, 201 bp, Homo sapiens
gcagttattccagggtggtgaatgctctgctgatttcgatgtccttctccatactcttaggcattttttaaaatacaatgaacctgtatttatataatgaraacaaaaataaagcaaaatttgattttcattgtgagatgggaaaggcaagatgcagtactgtgtgtatagtatgattcctttgtgcaaaaaagaatatat

SEQ ID NO: 269239 - DNA, 201 bp, Homo sapiens
gcttacctccctcacctctctgccccacagtgcgtctctccgtgggccccatggcccgggacgtggagagcctggcactgtgcctgcgagccctgctgtgygaggacatgttccgcttggaccccactgtgcctcccttgcccttcagagaagaggtgagcagggctgggtgggcatgaatgtggaccgctgaacccagac

SEQ ID NO: 269240 - DNA, 201 bp, Homo sapiens
tcctccacagacggccaccagatggagcccttgcctgcatttggaaatcctcaggctttttttttttttccttttctttctttctttttttttttttttttgagactgagtatcgctctgtccctcaggctggagtgcagtggcgcgatctcggctcactgcaagctccgcctcccgggttcacgccattctcctgggttc

SEQ ID NO: 269241 - DNA, 201 bp, Homo sapiens
attttgcacatgcctgaatatggcaacacagcccaccctgtttcccccagatactccccaggagcaggaatatttactgaaagctgcatctcactctgccstcacctttccttctgtaggaccctgtgtggtgaggtttgagcattctaggcagatttccactattagcatgttcttcccttttgtcaagctcctactcca

SEQ ID NO: 269242 - DNA, 201 bp, Homo sapiens
attcggtcatagccttctggaagtccagagggagagaagaaaaggtggggtcatgggcttaatgaatccaatgcaagagagcccagcctgtgtgctggacmattcttatctgactgaatgctgtgggaatccattagaagggagatgagtaagggtagggttacttggaggaggaggaacttgaactaggaggaggaagaa

SEQ ID NO: 269243 - DNA, 201 bp, Homo sapiens
ccctcatattttatggagggagaaattgagttctgtggagattaaataaataatacaagaattggaggtagagccagaactggaacccatctttctttttytcagttcatatccttctgcaaattcctctagagcagagaatacaatttttacttctttgagtgccctcaaaaatggagacattggccggggggcggtgac

SEQ ID NO: 269244 - DNA, 201 bp, Homo sapiens
aactataccatgccctccccggccatgaggcgggccgtgctggagaccaaacagagccttgaggctgcggggcacacggtatgactgcagggtcctggaartactggcatctcctcccctcacgggaagccttcctggtacccatggctactccatccctggcatcctggcactctgacgatgttgtcgtcggggtgaact

SEQ ID NO: 269245 - DNA, 201 bp, Homo sapiens
aaaatagttcacctctctctaaactcttgagcaaatctagagaaaaatgtgtttctggtaattctgttgacgcttcacccattttttcccaccctgccccctgaataagttttgatatcttttctagaccgaagagaaggaccaccatcaatagaatagtatagctgggagagacatcacagaacacctatttatgccctt

SEQ ID NO: 269246 - DNA, 201 bp, Homo sapiens
aataaataatacaagaattggaggtagagccagaactggaacccatctttctttttctcagttcatatccttctgcaaattcctctagagcagagaatacmatttttacttctttgagtgccctcaaaaatggagacattggccggggggcggtgactcacgcctgtaatcccagcacaagctaggaggctgaggcaggtg

SEQ ID NO: 269247 - DNA, 201 bp, Homo sapiens
agccagggtaggggaggagggtaagaggggaggggaggaggggaagggtagaggggagaaggggaagcaaggggaggtgaggaagggaaggggagaagggraaggaaggggaggggaggaagggaagggaagggtagagggggaggaggggaagcaaggggaggggaggaagggaagggtagagggggaggaggggaagcc

SEQ ID NO: 269248 - DNA, 201 bp, Homo sapiens
tggccaggctggtctcgaactcctgacctcaggtgatccgcctgcctcggcctcccaaagtgctgggattacaggtgtgagccaccactcccggattcttrgctgtgtccaaggaggacacagctggatgaaggggtacctaaacaccttctgaattttcacaaaatagttcacctctctctaaactcttgagcaaatcta

SEQ ID NO: 269249 - DNA, 201 bp, Homo sapiens
tggaggtagagccagaactggaacccatctttctttttctcagttcatatccttctgcaaattcctctagagcagagaatacaatttttacttctttgagygccctcaaaaatggagacattggccggggggcggtgactcacgcctgtaatcccagcacaagctaggaggctgaggcaggtggaatacttgagtccagga

SEQ ID NO: 269250 - DNA, 201 bp, Homo sapiens
ggactctgtgtcataagtttaaggaaaggtgctgtgccttgatgtgtatgtaggccagatttatgtttgactttatacaagcatctcagtgcagtaaacarcagtattgtcaccagcatgtctcacctccagccataaggtggttttctcctatctcagtaaatagaacgtaggatcgggttttacactgacacattccat

SEQ ID NO: 269251 - DNA, 201 bp, Homo sapiens
ctcctgggcctgcagtccgaaccttcgatgcttcacttttgacagaggggatatcagtcgcttccctcctgccaggtaggatctggagccatgactggagyggtcctgagtgtctgctggaagtagacatgttgagacccagcttctaccctctgtaataaggaccataatattgctaatatttatggcatgtttatacag

SEQ ID NO: 269252 - DNA, 201 bp, Homo sapiens
ccaaggattttgtgaatgaagccatctcccactgggaactgcagtctgagggtggccaatctgcagccccatcccctgcctcctgggcctgcagtccgaamcttcgatgcttcacttttgacagaggggatatcagtcgcttccctcctgccaggtaggatctggagccatgactggagcggtcctgagtgtctgctggaa

SEQ ID NO: 269253 - DNA, 201 bp, Homo sapiens
tgtctttacaaaaaataaaaacaaaattagccaggcgtgatggtatgcacctgtagtcccagctactctgaaggctgaggtgggaggatggcttgagctcrgcaggcagaggttctagtgagctgaaatcatgccactgcactccagcttgggcaacagaatgagactctgtctcaaaaaaaaaaaaaaaaaaaaaggaag

SEQ ID NO: 269254 - DNA, 201 bp, Homo sapiens
tgaacattgtcctgcagggcacactgtagctcagcctcataaaagcctacctaccatatttgagggtgcataccagggccgtttcagaacgtaccagctaytccaggttactcaaatctgtagtcctgtcctttgagttgggccagagattttctcccttggcttatgctgaagaataagatggctatctaaaattaatgg

SEQ ID NO: 269255 - DNA, 201 bp, Homo sapiens
aaatgtaagttttcaactattttgggtaaagaccaaggagtgtaattgctggattgtaagtgtatattttagctttgtgagtaactggcaaattgtcttcyaaactggttatttgattttgcatttccaccagcaataaatgtttctatttctccatatcatcaccagtatttagtgtagtaagtgttttagatttcagcc

SEQ ID NO: 269256 - DNA, 201 bp, Homo sapiens
ccacacatttagaaaagtaggaagaataagttttgcattatcccaatagatttaaaaactctagttccttttaaaatctttaaatagacttaaaacaattycaaattttttccagctttatcgcggtatacttgacaagtaagtgtatatatttaaggtgtacaatgtgatgctttgatacatacagtgtgaaatgattac

SEQ ID NO: 269257 - DNA, 201 bp, Homo sapiens
acatgacatttttccatcattactgcattatacagaatagtttcatggtcttataatttatatttcctgtgctctacctattaattcctccctgattttcsccaaacttctgaaaactacagatctttttactgtccttataattttgccttctatagaatgtcatatcgttggaatcatatagtatatctacttatcaga

SEQ ID NO: 269258 - DNA, 201 bp, Homo sapiens
tacaagccaaggaacacactgtggtgtcagcaagggagcgacttgtgccaccttgtgtttttggaaggtctatcttggagttgtgtctaggatggattggrggagggagagggtctgggagagaggaaaggaagctgactggtgaggagatatggaattaaaggatgcttataatttggtaggaaacagccacatagaaac

SEQ ID NO: 269259 - DNA, 201 bp, Homo sapiens
gtgaaagaaaacagtcacagaaaactatgattccatttataagaagtgtccagggaggccgggcgcggtggctcacgcttgtaatcccagcactttgggakgctgaggcgggcggatcatgaggtcaggagatcgagaccacggtgaaaccctgtttctactaaaaatactaaaaattagctgggcatggtggcgggcgcc

SEQ ID NO: 269260 - DNA, 201 bp, Homo sapiens
tataatcttccttagtgaatgtggtgctttgaatggaagcacaatccagtgggatttaagctgtgtgtgtgtgtgtgtgtgtgtgtgtgtgtgtgtgtgtgtttaccacccagcagaggctacacttgctcactgtttgtaaaccccctattagttgtgctgtccttctattttcccttggacttctcttgtgttcagtct

SEQ ID NO: 269261 - DNA, 201 bp, Homo sapiens
cccaggaggcggaggttgtagtgagccaagatcgtgccactgcattccagcctgggcaacagcgccgagactatgtctccaaaaaaaaaaaaaaaaaaaaagttgagtgacaaatatgtggcttcagaaaggttgagtaacttgtcctaagtcaaacagctagttaaagagaaactagcgttcaaacctggggctccatag

SEQ ID NO: 269262 - DNA, 201 bp, Homo sapiens
tcacaatggacaatgaatcagatatttcaaccatgtattttcctttagcaaactagattttttttttctttgaggcggagcctcagtctgttgcccaggcygaagtgcagtggtgtgatcttggctcactgcaacctctgcctcctgggttcaagcgattcttgtgcctcagcctcccgagtagctgggactacaggctcc

SEQ ID NO: 269263 - DNA, 201 bp, Homo sapiens; identical to SEQ ID NO: 53167

SEQ ID NO: 269264 - DNA, 201 bp, Homo sapiens
tgcttgaacccgggaggcggaggttgcagtgagccaagattgccccactgcactccagcctggacgacagggcgagactgtgtctcaaaaaaaaaaaaaaagaaagaaaattgagaaaatttaaaaatattaattcatcaaaataacaataatccactgtatgttaacagatttctgtgaaaattaactattttccaaaat

SEQ ID NO: 269265 - DNA, 201 bp, Homo sapiens; identical to SEQ ID NO: 53168

SEQ ID NO: 269266 - DNA, 201 bp, Homo sapiens; identical to SEQ ID NO: 53169

SEQ ID NO: 269267 - DNA, 201 bp, Homo sapiens; identical to SEQ ID NO: 53170

SEQ ID NO: 269268 - DNA, 201 bp, Homo sapiens
gccacctaatttatttttttatttttattttttttgcgatagagtcttgctctgtcacccagtgcagtggcgcagtcttggctcactgcaacctctgcctrctggattcaagcgattctcctgtctcagcctcccaagtagctgggattagaggcacccaccaccacactcagctaatttttgtattttttagtagagatg

SEQ ID NO: 269269 - DNA, 201 bp, Homo sapiens; identical to SEQ ID NO: 53171

SEQ ID NO: 269270 - DNA, 201 bp, Homo sapiens; identical to SEQ ID NO: 53173

SEQ ID NO: 269271 - DNA, 201 bp, Homo sapiens
ctgaacctggggaggtcaaagctgcagtgagccgagattgtgccactgcactccagcctgggcaacagagcgagactccgcctcaaaaaaaaaaaaaaaaagaatttgggcagtgacccttagatgaatgttattttctttgttggcattttcccccctggactttgaaggtagagtttgatcaaggcatttctttactgt

SEQ ID NO: 269272 - DNA, 201 bp, Homo sapiens
cggggctccgcgactgggcgggcggaggcggcgccgccctgcaggatccgggctggaagcctctcggagtgctgcctccagccaaggtgtgtgtttatttkattgcttttggtggcgaggcgcggggctcgggctcgtcgcgcgccccatggccggggagcgcatccgccaaccccgggcggaggtgggcccctccgagcg

SEQ ID NO: 269273 - DNA, 201 bp, Homo sapiens
aaaaagatgggtgtgtgtttagattagtcttagcgctacatttttggaaactctatccatgccccaagacaatgtaaatatgcctgacagtttttttttttcatcatccaaaattctgatttgaggagacagttgggtgtggtagcttatgcttgtaatcccagcagtttgggagacagaggcaggaggatcacttgagcc

SEQ ID NO: 269274 - DNA, 201 bp, Homo sapiens
atgtattagtaactgtttttttcgtttctaaacttgcctgcttacttgtgccttgaaatagtaatctagaagttccccaaatcggttctaatttatctttrtgtaccaagatgtagtagaattatctgccatatgattttaggggtaactatcaaaatattttaaactggtatttcaaagtttggttttgtagaaaacaac

SEQ ID NO: 269275 - DNA, 201 bp, Homo sapiens; identical to SEQ ID NO: 53175

SEQ ID NO: 269276 - DNA, 201 bp, Homo sapiens
tacagttcaaagatgagacttgggtggggacacagccaaaccacatcaggccagcagtgaggtatagccatagagagagatgtattagtaactgtttttttcgtttctaaacttgcctgcttacttgtgccttgaaatagtaatctagaagttccccaaatcggttctaatttatctttgtgtaccaagatgtagtagaat

SEQ ID NO: 269277 - DNA, 201 bp, Homo sapiens
caaaaaaaaaaaaaaaaaaaaagttgagtgacaaatatgtggcttcagaaaggttgagtaacttgtcctaagtcaaacagctagttaaagagaaactagcrttcaaacctggggctccatagctaggattaaacttcttcccattatgtcgtgctgacatctgagtactctagaaactagtgaaatactcatgtcttataa

SEQ ID NO: 269278 - DNA, 201 bp, Homo sapiens; identical to SEQ ID NO: 53159

SEQ ID NO: 269279 - DNA, 201 bp, Homo sapiens
ttttaaactgcaatgaccaccactaacaactggttaagtgtggtagaaccactgtagctttagtaggttactctgcatattctttttttttttttttttttgagacagagttttgctcttgttgcccaggctggagtgcaatggtgcgacctcagcttattgcaactccgcctcccgggttcaagctattctcctgcctca

SEQ ID NO: 269280 - DNA, 201 bp, Homo sapiens
ctgtgctggatccattctatagcagctgacagctaactcgccttctctggaaacaggctctttcattgctggacaggtctaattgttggaagatttttttyccccttatactgagatgaaagccagccccttgaaactgtcatccataaactgtcatccatttgtccaacttcagtcttttgttgtcacataaattaaatc

SEQ ID NO: 269281 - DNA, 201 bp, Homo sapiens
atgaatacatggttttgcacagaaaagtttttaacctatgaaatggcccaactgttgtctatattaattggtttatttggtatttgtagggtattgatgaygtcactggtgaaccgttagtccagcaggaggatgataaacccgaagcagttgctgccaggctaagacagtacaaagacgtggcaaagccagtcattgaat

SEQ ID NO: 269282 - DNA, 201 bp, Homo sapiens
gctccttttagaatggtatatgcagatttaattctgtcactgaaaatgtttcaagaactaattggaactgggcaatagcttgcatttcacttgttttgttytttgcatttaggttttcctaggacattaggacaagccgaagccctggacaaaatctgtgaagtggatctagtgatcagtttgaatattccatttgaaaca

SEQ ID NO: 269283 - DNA, 201 bp, Homo sapiens
tagagatgaggtctcactatgttgcccaggctggaggattctttttaacaattactttttatatgcctgatacagcagcatcgttgcatagaaagagagarcactttagcagaaatctaaggaccagatgtcatatgcattgtgctgttggctttcactgaatccaagcttaattaaactgaggctaataacttctctatc

SEQ ID NO: 269284 - DNA, 201 bp, Homo sapiens
attgatttagactctaaaataaatgtatatagttatttttgctaacctaagaacctactcataaatggctagtgttaaaatgatgtaagataaaatgctttcccttcacttttttaacagaagtggaaatggaggtgatgtaacttgcctgaggtgacacaggtagttaagagcagagaaaggactagagccaggactggt

SEQ ID NO: 269285 - DNA, 201 bp, Homo sapiens
gcactaccacgcccacctaatttttgtactttttgtagagatgaggtctcactatgttgcccaggctggaggattctttttaacaattactttttatatgsctgatacagcagcatcgttgcatagaaagagagagcactttagcagaaatctaaggaccagatgtcatatgcattgtgctgttggctttcactgaatcca

SEQ ID NO: 269286 - DNA, 201 bp, Homo sapiens
aataagttttgcattatcccaatagatttaaaaactctagttccttttaaaatctttaaatagacttaaaacaatttcaaattttttccagctttatcgcrgtatacttgacaagtaagtgtatatatttaaggtgtacaatgtgatgctttgatacatacagtgtgaaatgattaccacagttaggtttaataattaaca

SEQ ID NO: 269287 - DNA, 201 bp, Homo sapiens
ccagtggtgttttcagctgggttttgtttttttttttttgagacggagtctcgctctgtcccaggctgagtgcaatggcgcgatcttggctcactgcaacytccacctcttgggttcaagcgattctcctgcctcagcctcccaagtagctgggactacaggcagtgccaccacgcccagctaatttttgtatgtttagta

SEQ ID NO: 269288 - DNA, 201 bp, Homo sapiens
ccaacctggttcacttctattcatgttttgaaatgctgaagaaataaggttgggctgtgaaaccgaatatgaccatctttttttttttttttttgagatgragtcttgctctgtcacctaggctggcgtgatcttggctcactgtaacctccgcctcttgggctcaagctcttctgcctcagcctccccagtagctgggat

SEQ ID NO: 269289 - DNA, 201 bp, Homo sapiens
aactgccacagagagcaccagggactccccaagctcttagaaaaaacccagaaaaggaattaaatgtgggtggatgagggcctttctttcctgctgctgcrtttttattgaattgggaaatgagctgagctcctaggtgagctctaccaagagcagcagcaaccgtttattaatcagcacactctccatgtgcccagcact

SEQ ID NO: 269290 - DNA, 201 bp, Homo sapiens
actaggctggtgacagtgaagaagaatgtgtggaaaagaaggattagaggtagactaagcttgtcagggagctcctgacataggagggttcagagacatayattcagccacacatggtacaggtgaggtgttccaagaggtaagtggaatgatttttgcaagtaaggagtggcatttttggtcaaaatgattgcatgaaaa

SEQ ID NO: 269291 - DNA, 201 bp, Homo sapiens
ctttcataattaaaaaaacagctttttcttcctgtgtgtatgtgtttatgtgtaggagggcagtagtttatcttagtcatttatctttaaatatttagccstgaaaaatcatagccacataacccttctatctcaggttgttactaaggcagtgatgtatattctggtatcttgaatggaaagtttaaagcaattgtggtg

SEQ ID NO: 269292 - DNA, 201 bp, Homo sapiens
tgtgcccaggttctgtgctgtgctggggttgagctccctgtgactcatgactacctgtgctgagctgtaactgccacagagagcaccagggactccccaakctcttagaaaaaacccagaaaaggaattaaatgtgggtggatgagggcctttctttcctgctgctgcgtttttattgaattgggaaatgagctgagctcc

SEQ ID NO: 269293 - DNA, 201 bp, Homo sapiens
aaatgtaatttaatccttttcattggtaataatgataacctttagcacgagagtcatcattttgtccatagttgtatttagaacctggtttgtttgtttcrttctgtgcaatgttgaacactaacaagtgctttctgaaggtaattctgtttttagcataagtcagagttgtttgaatgtgtgcagtgtttgtgtctattt

SEQ ID NO: 269294 - DNA, 201 bp, Homo sapiens
aggagtgttggcgtgtggtagaggtgcagtttaacaggacagttagaaaagtcttaacaaggcaccactggagccaagatttggaagagctgaggatacamatgggtatctggagcaaaagcagagggaatatgaactgtgaatgtccagggtgggcacctgcttgagagctgcaaggatgccggtatggctggcacggag

SEQ ID NO: 269295 - DNA, 201 bp, Homo sapiens
tccaccattaggggattggttaaattatgctctatctaaaccatgctgtactctgcagttattaaagagaatgattcccagcactttgggaagctgaggcracaggattgtttgaggccaggagttcaagaccagcctagggcacaaaccaagaccctgtctctgcagaagagaatgagacagtaatatgtaatatgaaga

SEQ ID NO: 269296 - DNA, 201 bp, Homo sapiens
acacatgatggatttatttgttggtttgttgtgaaacttaagaaaaaggcaaagatagtggcctctttggggcaccctatatttattacatttatttgaawccttcctagtgttttctgaattatttgtgtgtgtgatgtgtgtgtgtgaacacactcaggattcagaagctgtgtgggaccatgtatgtgtgtccacagc

SEQ ID NO: 269297 - DNA, 201 bp, Homo sapiens
ctccactgcttctgcttagttcaggccttcatcttgtgcttggattattatcgcagcctcctttgcttccaccatgccacatccaaatgtcacatttccawgggcctgcgacccatgtaggcacgtaaggccccgtgcgtagtttagtgctctgctgttgtcatcttgaaattcttcattttccaacaagaggaacacctt

SEQ ID NO: 269298 - DNA, 201 bp, Homo sapiens
tctcctatcttcagggtgttcattcatgcaacatattttttaaatttttaaattttaatttaatttaacttaattttttgagacagagtctcgctctgtcrcccaggctgtagtgcagtggtgcaatctcggctcactgcaacctctgcctcttgggttcaaactattcttgtgccttagcctcccaagtagctgggatta

SEQ ID NO: 269299 - DNA, 201 bp, Homo sapiens
aaagttcacgctccatatcctgcccatctagcaccatctcttagtggtgggcttttctttgactgtcagtgcttgaagaagttcttccaggtataccaaakggccccacatctctgcaacatttgctgttgctgtttccttcttctcatttcccctacccaacctggttcacttctattcatgttttgaaatgctgaagaa

SEQ ID NO: 269300 - DNA, 201 bp, Homo sapiens
cccctacccaacctggttcacttctattcatgttttgaaatgctgaagaaataaggttgggctgtgaaaccgaatatgaccatctttttttttttttttttgagatggagtcttgctctgtcacctaggctggcgtgatcttggctcactgtaacctccgcctcttgggctcaagctcttctgcctcagcctccccagtag

SEQ ID NO: 269301 - DNA, 201 bp, Homo sapiens
gaagcagttttctcctgaaagtatttatgtggttttgttaaaacttcacatccttttatgaacttggcattccactaacaacactcagctgcttttacaaytgtgtcagcaaggttccatctgcttatattgaggttgatgaaaagaagtaaagctgttgttgtttgtattatgtggcattctttttagatcactggaact

SEQ ID NO: 269302 - DNA, 201 bp, Homo sapiens
tctttctttttgagagtcattcagtccctgcagtgtttatgctgactgtcctgcatatttagggttgctgtagaatggattttgtgctatataaatatccgtgtgtgtgtgtgtgtgtgtgtgtgtgtgtgtgtgtgtgtatgtatgtgtctgtgttctcatggtttttctaaagaaatgtcatctgcttattggctcttc

SEQ ID NO: 269303 - DNA, 201 bp, Homo sapiens
tgataggagttgtggctgatgttaggtactacagccccagggttttcttttattgcctttcaggctttttgagtttctcagctttcatcaccctctctgcmcttacctaggcatgttaatttctctagactctacttttaactcacagaagttagcccttttcttagtctgttttctgctgctacaacagagtactttgga

SEQ ID NO: 269304 - DNA, 201 bp, Homo sapiens
ttctttctttttgagagtcattcagtccctgcagtgtttatgctgactgtcctgcatatttagggttgctgtagaatggattttgtgctatataaatatccgtgtgtgtgtgtgtgtgtgtgtgtgtgtgtgtgtgtgtgtatgtatgtgtctgtgttctcatggtttttctaaagaaatgtcatctgcttattggctctt

SEQ ID NO: 269305 - DNA, 201 bp, Homo sapiens
aaagaaatttatttctcatggttctagaggctggaaagtccaggagcatggtgtcagcatctgatgagggccttcttgctgcatcatcccatggcagaagrcatcaaatggggaagaagtgcatgcctctgagagggaatgggagccgaacttatccttttatcaggagcctattgttttatctagaacccacttctgtga

SEQ ID NO: 269306 - DNA, 201 bp, Homo sapiens
cttcccatttcaggaccaaaatcagccttttgtattttggatctttacatatttatttattttttctttcctttgttttattttgttttgagtcagagtcytgctctgtcgcccaagctggagtgaagtggcgttatcttggctcattgcaacctctgcctcctgggttcaagtgattctcatgcctcagcctccagggta

SEQ ID NO: 269307 - DNA, 201 bp, Homo sapiens
tgaacattcgttcagctctgtcttgtatatctagtttgccttcactttatagacagtcacaacaaaaagaggatacagatgtgtgggtgtgtgggtgctasaaacgataacaattttgtatctcccacccagcctaagaaacagagtgttatcagtaccccatagctcctttttccatctctctcctccagcactatcctg

SEQ ID NO: 269308 - DNA, 201 bp, Homo sapiens
aggatcgcccagaactttggtctccagcatctctccagcggccacttcttgcgggagaacatcaaggccagcaccggtgaggggctgcggggacgagggcygggggcgagccgcgttgggctggggtgaggccctggagggactggggctcccggatcacggcgcccttcccccgcccgcgtgtggtcgtgcaggctcgta

SEQ ID NO: 269309 - DNA, 201 bp, Homo sapiens
agacatgggtgagacttataaagtacaattcatcctgagacaaattcccttcagctgtgagcctgtgaaatcaaagcaagtcatctacttccaaaatgctrtggtaggaaggtgtatgatggacattcccattccaaaggaagaaataggcaagaagaaaggggcaggtggtcaccgataagtccaaaatccaacagggga

SEQ ID NO: 269310 - DNA, 201 bp, Homo sapiens
attcgttcagctctgtcttgtatatctagtttgccttcactttatagacagtcacaacaaaaagaggatacagatgtgtgggtgtgtgggtgctacaaacrataacaattttgtatctcccacccagcctaagaaacagagtgttatcagtaccccatagctcctttttccatctctctcctccagcactatcctgcatct

SEQ ID NO: 269311 - DNA, 201 bp, Homo sapiens
tctgcctggagaaatgagcatcttgaaatgtgtgcatagccacaatgtgtttactcagctgggggcccacagggctgcctcttcccaaagggaacacctcygtagtacagacaccgaatgaactaactttagcccatgtgctggtagattacagaaggggggattaactctcaaggtaagataggagaaaaatgatcaggg

SEQ ID NO: 269312 - DNA, 201 bp, Homo sapiens
ttactcaagccccacggtcggccctgtggaacccatgggtatgaaaagtcagtcctccatgtgcaagggttttgcatcctgcaaatactgtatgcatttgsttgcgaatgtggaacccagtgatatggaggcccgactgtatttattgaaaaaatccttggcccatgttgtggctcacacctgtaatcccaacactttggg

SEQ ID NO: 269313 - DNA, 201 bp, Homo sapiens
aagctgtagaattaagccttttttttttttttgagacagagtctcgctctgttgcccagactggaatgcaatggcgctatctcagctcactgctacctccrcctcccaggttcaaggcctcagcctcccaagtagctgggactacaggcatgtgccaccatgcctggctaattttggtatttttagcagagacggggattc

SEQ ID NO: 269314 - DNA, 201 bp, Homo sapiens
taatcaggtaagagaatgctttgcttaattcagtaattttcctcagttattcaaggcttgccaaagaatcagactataagatagcatttaaaaaaaaaaaacattgctgcacatgatgtttcatttgttgagaagggttttctgagtcttaattgcctgaaagtcatgaccgtggctgtcaggggtgaacgatacaaaaag

SEQ ID NO: 269315 - DNA, 201 bp, Homo sapiens
aatgcaatggcgctatctcagctcactgctacctccgcctcccaggttcaaggcctcagcctcccaagtagctgggactacaggcatgtgccaccatgccyggctaattttggtatttttagcagagacggggattcgccattgttggccaggctggtctcaaactcctgacctcaagtgatctgcctgtcttggcctccc

SEQ ID NO: 269316 - DNA, 201 bp, Homo sapiens
ggcccttattctcaggaagcgttctagggaaagtatggtagaaagaacactaaatgatgattcaggcctgagttcccatcccgactccacctctcacgttyagaacgggcataatgatcagttgatttcgctgcccgtgaatgccgggagactctccttagtctgtaaagtcccctcctcaccacagagatggaacctctg

SEQ ID NO: 269317 - DNA, 201 bp, Homo sapiens
tcccatttcaggaccaaaatcagccttttgtattttggatctttacatatttatttattttttctttcctttgttttattttgttttgagtcagagtcttkctctgtcgcccaagctggagtgaagtggcgttatcttggctcattgcaacctctgcctcctgggttcaagtgattctcatgcctcagcctccagggtagc

SEQ ID NO: 269318 - DNA, 201 bp, Homo sapiens
agcctttgtttaagtcactgagctcaacaagacctgcccttgaggtgttctcagttcacaaggggaaaggggaaagggacagatggttgaacaaagaattwcggtgtgagagaaattgcttgaggaagtgagcaaaggctttggacacagggtctagggagctacttgctgtagggcatgtgttaagagttcaggctttgg

SEQ ID NO: 269319 - DNA, 201 bp, Homo sapiens
agtcactgcgcccggcctagcaagagatttttgaaccacaagtcttggtcgtcagtattgaatcattatggtgtgtggcatggtagtggctgcaccatgtyggagtaaatgtgttctcatggtgggggatattagtgaccctgggtaacagtccatggcacttggcttgcaccacagagttaacatacagcagatcagctg

SEQ ID NO: 269320 - DNA, 201 bp, Homo sapiens
aagttactcaaacactttctatttcttcaaccacaaaccaagaataataatggtactacttcatacggttgttgtaagaattaattgagataatacgtacragggagtatagaaagacttgacccaatatttgcttatttattttttctttttaaaatttttatggatatctatttttaatgtgctccatggtaggaatta

SEQ ID NO: 269321 - DNA, 201 bp, Homo sapiens
agtagaataagacttccagagttgcaagatgaaatgcgatgctttcttctcttcttcttcgctatttctacttctgggccatcttggccagcaagagattwttttttttttttttttttttttgatacgaactctcgctctgttgcccaggctggagtgcaatgacatgatctgtgctcactgcaacctccactttccgag

SEQ ID NO: 269322 - DNA, 201 bp, Homo sapiens
ggtagctgggactgcaggtgcacaccatcacgcccagctaattttttgtatttttgggggttttgccatgttggccagtctggtcttgaactcctgagctygggcaacccacccaaccttggcctcccaaagcgctgggattacaggcgtgagccactgttcccggccaatatttctttctttttgagagtcattcagtcc

SEQ ID NO: 269323 - DNA, 201 bp, Homo sapiens
tagtgggggaaaactggagcacagccaagatggtgccacaacagtttagatgcggtctagggtaacagtaatggataaaaggggaagtgagaggagtgggkgtagtgatggcagtgtctgataggactgtaggagaatggtgggcggggcagagccaagtgctgccctttgaaggggtgaacttgaatgactgtgccagga

SEQ ID NO: 269324 - DNA, 201 bp, Homo sapiens
taggaattagcttaatcctgcaattaagtgaaacacattttaagaatgtataatattttctctttttgtgtgccactttttattttaaacaaccaaaataktggtcatgaccttcatttgacaacccctggtccagtacttcctaagtgtttcattactgttgccactggtatcgttgttcttgctggctgttgaaggatg

SEQ ID NO: 269325 - DNA, 201 bp, Homo sapiens
aagtaaaataaagaaggtggcaatagaggtaatatattctcccatccccatctctcttgtcatgttgggttaacaaccatagaatacacatgtgataattmcatggcttactcataaatcataagaataagtcatatacccaaggccctgagctgtaatggaattttagtgcatttcaaatttatagccagtttctgatta

SEQ ID NO: 269326 - DNA, 201 bp, Homo sapiens; identical to SEQ ID NO: 53162

SEQ ID NO: 269327 - DNA, 201 bp, Homo sapiens
gagagactttcattccagttgatggattttacctaactaaagtcaattattttgaggtgttaatcaccacttttattaaaacaaatctttttgtctccagygtcaagaaactaaggtaacctggttggctttctgtaaccctggactagtattttagagataatctcttcaatagtgaaaggtggattggctggcagattc

SEQ ID NO: 269328 - DNA, 201 bp, Homo sapiens
agggcaccgtgtgccagaggatcgcccagaactttggtctccagcatctctccagcggccacttcttgcgggagaacatcaaggccagcaccggtgagggsctgcggggacgagggccgggggcgagccgcgttgggctggggtgaggccctggagggactggggctcccggatcacggcgcccttcccccgcccgcgtgt

SEQ ID NO: 269329 - DNA, 201 bp, Homo sapiens
agagctcagctgagcagactggcttgttaccctcattagacaaagaaactagccaataagatttgagcttttatttgttggaggaactaatgttatgttaycttttagagcttcctgttcttttcttttctagtgcttcccccgctcccagctctcaacctctatccgatataaagactgttttcttgtcaaggtcacagt

SEQ ID NO: 269330 - DNA, 201 bp, Homo sapiens
cccagtgtttaagactctgagctctggaacaggcctcatgctagattgatatagggcctggcacatagatgcttaataaatattagctgaatgagtatttwgtggatttaaagagtattcaaaccacaaaactaaccataccctatattgtcagagggaacagtgtacctttttttttcttcccatttcaggaccaaaatc

SEQ ID NO: 269331 - DNA, 201 bp, Homo sapiens
gctcagcaacacgtttcaacatgccttccaggtgattctgatgcatgctcacttctgagagccactccaaagaagtatctgctacatattatacacatatrcccccacccccagacccgcaagttcttcctctttgttcccagaaaaggtttgaaggggctcagtatcaggtctacagcacactgagatttatttatttat

SEQ ID NO: 269332 - DNA, 201 bp, Homo sapiens
ggaggaactaatgttatgttatcttttagagcttcctgttcttttcttttctagtgcttcccccgctcccagctctcaacctctatccgatataaagactkttttcttgtcaaggtcacagttagtgatgctagaacacaaggcagagactgtggctaagctttcaggtcttagaagagggatctctaaaattctttgttt

SEQ ID NO: 269333 - DNA, 201 bp, Homo sapiens
acaaccatagaatacacatgtgataattacatggcttactcataaatcataagaataagtcatatacccaaggccctgagctgtaatggaattttagtgcrtttcaaatttatagccagtttctgattatccagttgagttgcctgtgcctctcagttctgttctggcctaccttttgacaggtttatttcttgtgactat

SEQ ID NO: 269334 - DNA, 201 bp, Homo sapiens
tttattgaaaaaatccttggcccatgttgtggctcacacctgtaatcccaacactttgggaagctgaggtgggcagatcacttgaggccaggagaccagcrtgggcaacattgcaaaacctcatctcgacaaaaattagccgggtgtggtggcatgtgcctataatcccagctacttgggagctgaggtgagaggatcact

SEQ ID NO: 269335 - DNA, 201 bp, Homo sapiens
ctgggtcacaaattctagacagtacatcttagtccagaagtcaagcaacctatagcatagagaccattttgtttaattagctctgatttatggtaaaagtwtgtgcttaatatggatctgagattagcttcatggtagctgtcacccattggcccttcctacactgcctagagtggtacaggctgaggcttatcagatacc

SEQ ID NO: 269336 - DNA, 201 bp, Homo sapiens
caaaacactgctcctaactccaccgcctatccgaaaatctataagaactaatgataatcccaccaccctttcctgactctcttttcggactcagcccgcckgcacccaggtaaaataaacagccttattgctcacacaaagcctgtttggtggtctcttcacatggacgtgcgtggcactatgcagggggagctcagcaac

SEQ ID NO: 269337 - DNA, 201 bp, Homo sapiens
atatataccctggggttcgtcatctcatgccaggaaaatttaggacacggacgcaaggagtttaggagcggaggtttaataggcagaagagaagagaagasaaagagaaacagccctctctacagagatagaaggggctccaagtggaaaagaccagctggtggtggatgccccggattttatagtccagggtgaggagat

SEQ ID NO: 269338 - DNA, 201 bp, Homo sapiens
ctcccaaagtgttgggattacaggcgtgagccacaccatgcctggcccactgagtaatttctaagaagattcagaccttccctacagctcccctcttcttytgagtcctcatcagaattgcccttgatgcatcattcatggcaatctagggtgttactagccgcttcctccaaattcttcagcctctacccattacttggt

SEQ ID NO: 269339 - DNA, 201 bp, Homo sapiens
ttaaagtaagccaagattgtgtcactgcactccaacctgagcaacagagagagactccatctcaagtatatatatatatatatatatatatatatatataatatttaaactcattacacttcccaaatatatatatatttggaatgagtttaaaacgtaagctttacgttttttaaaacgtaacttttgtttgttgactga

SEQ ID NO: 269340 - DNA, 201 bp, Homo sapiens; identical to SEQ ID NO: 53172

SEQ ID NO: 269341 - DNA, 201 bp, Homo sapiens
gttaaagtaagccaagattgtgtcactgcactccaacctgagcaacagagagagactccatctcaagtatatatatatatatatatatatatatatatatwatatttaaactcattacacttcccaaatatatatatatttggaatgagtttaaaacgtaagctttacgttttttaaaacgtaacttttgtttgttgactg

SEQ ID NO: 269342 - DNA, 201 bp, Homo sapiens
cagtctcccaaaatgttgggattacaggtgtgagccactgcacctggcccattcttgggccttttgttctttctgcctataccattgtacaatttccactstgaaacttggaggacagggatcaggcaaagtacctaatgtataaaaggagcttaccgagtctgtattaaaggcctgggtcacaaattctagacagtacat

SEQ ID NO: 269343 - DNA, 201 bp, Homo sapiens
aggttaaagtaagccaagattgtgtcactgcactccaacctgagcaacagagagagactccatctcaagtatatatatatatatatatatatatatatatataatatttaaactcattacacttcccaaatatatatatatttggaatgagtttaaaacgtaagctttacgttttttaaaacgtaacttttgtttgttgac

SEQ ID NO: 269344 - DNA, 201 bp, Homo sapiens
ctgagattagcttcatggtagctgtcacccattggcccttcctacactgcctagagtggtacaggctgaggcttatcagatacctcatttgaagagtcacmcccatatctttggctcagattttctttagcacactgcaagagtaaatagaagggagagttctcttagattgccaggagttgggtcttaccctctgttgta

SEQ ID NO: 269345 - DNA, 201 bp, Homo sapiens
ggaattactatttgtgttgctttaaaagtgacattcctccttatcctctgaatgcgtctagtacttgggctgtgctcaggttacagggaggctgttctatsgtttttacagagtaagaaaatccagagggcccctgagatttccaatgtaatcctactctgtagggctgaaagtgcctgctatggtggataccaaggcaga

SEQ ID NO: 269346 - DNA, 201 bp, Homo sapiens
agaggttaaagtaagccaagattgtgtcactgcactccaacctgagcaacagagagagactccatctcaagtatatatatatatatatatatatatatatatataatatttaaactcattacacttcccaaatatatatatatttggaatgagtttaaaacgtaagctttacgttttttaaaacgtaacttttgtttgttg

SEQ ID NO: 269347 - DNA, 201 bp, Homo sapiens; identical to SEQ ID NO: 53174

SEQ ID NO: 269348 - DNA, 201 bp, Homo sapiens
tcatttacaaatttctttagtcttaattgagatacagtgggaccggttttcccctaatttgtgtatggggacttatattcaaagaacaagcaagcaggccrgacgcggtggcttgtgcctataatcccagcactttgagaggccaaagaggagaatcacttgagtccagcctggttaacaaagccagaccccatctgcgtg

SEQ ID NO: 269349 - DNA, 201 bp, Homo sapiens
tcttaaagaattattgtttttttgataaagactatttggtttatgataaagactatctgataaagacagattgagctgtctttatcatataatagtgaackccagttttgggtggtagatagtattacttgttattcaaatgtggaatacatgccttactaggttagtctttatggaaacattacacttggatatagatgg

SEQ ID NO: 269350 - DNA, 201 bp, Homo sapiens
taaagtaagccaagattgtgtcactgcactccaacctgagcaacagagagagactccatctcaagtatatatatatatatatatatatatatatatataatatttaaactcattacacttcccaaatatatatatatttggaatgagtttaaaacgtaagctttacgttttttaaaacgtaacttttgtttgttgactgat

SEQ ID NO: 269351 - DNA, 201 bp, Homo sapiens
gctgaggcaggaaaatcacttgaacctgaaaggcggaagttgtagtgagccaagatcacaccactgcacctccagcctgggtgacagagaaagactctctcaaaaaacaaaaatagaaacaaattatgtcattgttaagaggggcagttttctaagttttcctgtaggtctaatcggatggattttttttcaggatctttt

SEQ ID NO: 269352 - DNA, 201 bp, Homo sapiens
acatcaaggccagcaccggtgaggggctgcggggacgagggccgggggcgagccgcgttgggctggggtgaggccctggagggactggggctcccggatcrcggcgcccttcccccgcccgcgtgtggtcgtgcaggctcgtacgtgccggggcgcatgcagctggcggccgcgcggcttaaccgcgcctggggaggaggc

SEQ ID NO: 269353 - DNA, 201 bp, Homo sapiens
ggctgaggcaggaaaatcacttgaacctgaaaggcggaagttgtagtgagccaagatcacaccactgcacctccagcctgggtgacagagaaagactctctcaaaaaacaaaaatagaaacaaattatgtcattgttaagaggggcagttttctaagttttcctgtaggtctaatcggatggattttttttcaggatcttt

SEQ ID NO: 269354 - DNA, 201 bp, Homo sapiens
ataatcttccttagtgaatgtggtgctttgaatggaagcacaatccagtgggatttaagctgtgtgtgtgtgtgtgtgtgtgtgtgtgtgtgtgtgtgtgtttaccacccagcagaggctacacttgctcactgtttgtaaaccccctattagttgtgctgtccttctattttcccttggacttctcttgtgttcagtctt

SEQ ID NO: 269355 - DNA, 201 bp, Homo sapiens
agttcaaggctgtagtgcatgatgatcctgcctgtgaatagccactgcgttccagtctaggcaacacagggagatcccatgtctggaaaaaaaaaaaaaaaggaaccttcattgaaatctagagttggaggaattatatgtagagttggagcttacatgtaattccagattgagttcctcaaactccttttggtggctgtt

SEQ ID NO: 269356 - DNA, 201 bp, Homo sapiens; identical to SEQ ID NO: 53161

SEQ ID NO: 269357 - DNA, 201 bp, Homo sapiens
ggctgcgcgtttgaccgcccccctcctcgcgaaggcaatggcttccaaactcctgcgcgcggtcatcctcgggccgcccggctcgggcaagggcaccgtgwgccagaggatcgcccagaactttggtctccagcatctctccagcggccacttcttgcgggagaacatcaaggccagcaccggtgaggggctgcggggacg

SEQ ID NO: 269358 - DNA, 201 bp, Homo sapiens
gttgcttttcaaagcctgggtttccctcaaagaacatctgcaattaccatgctgcttttgaagaccatagtgaaagtgctaacctagaccagctctaccarctgtggtgaagtggctatgttgtctgggatatataccctggggttcgtcatctcatgccaggaaaatttaggacacggacgcaaggagtttaggagcgga

SEQ ID NO: 269359 - DNA, 201 bp, Homo sapiens
aaacaggtttcaatagttatcctttttatagatcatacagagtcttggcttattacagggtttctagagtatgttctattccatttccccccctagctggrtgagactcaggatgtagcacaggtcaagcaagggtctgactggttttgagacctctccagtccaaaggtccactccatatccacttattgttgctttttt

SEQ ID NO: 269360 - DNA, 201 bp, Homo sapiens; identical to SEQ ID NO: 53164

SEQ ID NO: 269361 - DNA, 201 bp, Homo sapiens
tgtgcagtgtttgtgtctattttccctgagagctaaatgatttcagacttgagatgttcctggctacgcactcacttagagcccttggtgtaggtgtatgwtcagaaactaaactatagatgctggagccagagtattttgccttgattttgcgaatgtgttttaccatacgaggctagtacataacaactctgaccttat

SEQ ID NO: 269362 - DNA, 201 bp, Homo sapiens; identical to SEQ ID NO: 53165

SEQ ID NO: 269363 - DNA, 201 bp, Homo sapiens
aatagcagaaatctggttttctgtgtgtatgtgtgtgagggggaatctcagttttcatattggcaacatatttaaattttttaaataacatgcaagtcaarcaaaactttatgctgagtgcattcaaaacagcagtttatactctgttacaatcactttctggccttgtagtcccccccaaaatttagcaaaccttaagat

SEQ ID NO: 269364 - DNA, 201 bp, Homo sapiens
aaatctttcagattacttgccgttttcctatttgctcccttgcccaacttctgttgcattcatcccaatctgcttttctcctccgctgcttatataaagcmgcgtgtggtattacaccagatgttcatggtgtgtttatgaatgcatgtgttcctatcccgggccaagaaaatacacttgacataggacgtccaaaatttt

SEQ ID NO: 269365 - DNA, 201 bp, Homo sapiens
tgcacagaaaagtttttaacctatgaaatggcccaactgttgtctatattaattggtttatttggtatttgtagggtattgatgacgtcactggtgaaccrttagtccagcaggaggatgataaacccgaagcagttgctgccaggctaagacagtacaaagacgtggcaaagccagtcattgaattatacaagtgagtgt

SEQ ID NO: 269366 - DNA, 201 bp, Homo sapiens
tatggaatgttttctctatcttttcagtgcttgcttttgccatgacttcctctcagggttgaataactgaagttctttgacatcataggcctgttttagtraagtacgtcatcctcccaagtgatttggttagtatttttctccttgaaaacccatctggtcactttttcagttgcgatttttctttaaagctctggaata

SEQ ID NO: 269367 - DNA, 201 bp, Homo sapiens
aacatactgttaagtgtgctatttctttttctactactcttaaaattaccactgtcaccaaggcctaattcatcatgtggtaggagttaaagatgaatacrtggttttgcacagaaaagtttttaacctatgaaatggcccaactgttgtctatattaattggtttatttggtatttgtagggtattgatgacgtcactgg

SEQ ID NO: 269368 - DNA, 201 bp, Homo sapiens
ttccttaatctttgagtcttccaaatgcagaagctaggttatagaatagcatattttattttaatattacatttatggaggtagatattcttggttaaagstcatttttaaaaaataatttcaacttttagattcagaggatacatgtgcaggtttgtgacatggatttattatgtggtgctaaggtttgggatgcaaatg

SEQ ID NO: 269369 - DNA, 201 bp, Homo sapiens
ttgttattaatatgttgccccagttggtctcaaactcctggcctcaagggatcatcccatcttgacctctcaaagtgttgggattactggtgtgagctacmacactcagttcaagggtacgatgtttgtatctttagtgccttgtgtggtacctggtacatagacttgcagaaaattttggttggagaagtggtgtgttca

SEQ ID NO: 269370 - DNA, 201 bp, Homo sapiens
gagttcaaggctgtagtgcatgatgatcctgcctgtgaatagccactgcgttccagtctaggcaacacagggagatcccatgtctggaaaaaaaaaaaaaaaggaaccttcattgaaatctagagttggaggaattatatgtagagttggagcttacatgtaattccagattgagttcctcaaactccttttggtggctgt

SEQ ID NO: 269371 - DNA, 201 bp, Homo sapiens
gccgggcgtggtggctcatgcctgtaatcccagcactttgggaggcccaggcaggtggatcacaaggtcaggaattcgagaccagcctggccaatatggtraaaccccgtctctactaaaaatacaaaaattagctgggcatggtggtgtgcgcctgtagtcccagctactcgagaggctgaggtacaagaatcgcttgaa

SEQ ID NO: 269372 - DNA, 201 bp, Homo sapiens
tgctgtgtggagaggtgactcaggtgagcaagagggagaccagtatggatgaggagagtggcctgtggtttgaacttgttggtggcaaaggaggagagaartaaagggatttgggatatatatgaaggcagagctgactggatataatgaattggttgtgagaggtgatggagagaaagaagtctacaatgaatcctaggg

SEQ ID NO: 269373 - DNA, 201 bp, Homo sapiens
ttgccaggagttgggtcttaccctctgttgtaagaaatattagcttttctctgtgtatgtatgggtatgcacatgtatgtatgagtatacacacacacacmgggactggcactctattgagtgagtcctactacaaactctgaacaaattctgatatttaatgatagattcttttattgggtcatatctaaaggatatgca

SEQ ID NO: 269374 - DNA, 201 bp, Homo sapiens
gtcgaggtggatggtttggccataagggtgtggctattaacatggtaacagaagaagacaagaggactctttaagaaactgagaccttatacaacacctcsattgaggtgatggccctcaatgttgctgacctcatctgaggggctatcctgctacctagccccagccaggattcattcttgggaaactgaggagcagcag

SEQ ID NO: 269375 - DNA, 201 bp, Homo sapiens
aggtgatgaataccccatttaccctgatgtgattattacatactgtatgcctatatcaaaatatctcagctgggcatggtggctcacacctgtaatcccascactttgggaggccaaggcaggaggatcatgaggtcaggagttcaagaccagcctggccaatatggtgaaaacctgtctctactaaaattacaaaaatta

SEQ ID NO: 269376 - DNA, 201 bp, Homo sapiens; identical to SEQ ID NO: 53289

SEQ ID NO: 269377 - DNA, 201 bp, Homo sapiens
cagcacagggttagcactattatcctggaaagcgatatgaaatacagtggactctaccttatattcattttcttttcaaatgtccaggttacatgtctccrgctattccataggctcctttaatgcaggaacttctgtttctttgtatccccactgggcacagagtagacaaagttgatgtaggtcgagaagcagtagggt

SEQ ID NO: 269378 - DNA, 201 bp, Homo sapiens
gagaagcttgattctgtgattgaattcagcatcccagactctctgctgatccgaagaatcacaggaaggtatttgtcccttgaaggtcccttttcatgctwctcagagctttctcaaactctgagaattgctcttgcctaatcccggccatgaagcttagtgccatttcaacatggattgattttatttggtgacatccgc

SEQ ID NO: 269379 - DNA, 201 bp, Homo sapiens
cactggacctgtgaggcgtgcgaactggtggcagtgagagacttcggcggacatggctcccagcgtgccagcggcagaacccgagtatcctaaaggcatcsgggccgtgctgctggggcctcccggggccggtaaagggacccaggtgagcggcaggactgggcttggcggcggagcctgctgaactccaaggtcaaggcg

SEQ ID NO: 269380 - DNA, 201 bp, Homo sapiens
ggtggatcacgaggtcaggagttcgagaccagcctggccaacatggtgaaaccccgtctctactaaaaatacaaaaaattagccgggcgtggtggcaggcrtctgtaatcccagctactcaggaggctgaggcaggagaattgcttgaacctgggaggcagaggttgcagtgagccgagaccatgacactgcactccagcc

SEQ ID NO: 269381 - DNA, 201 bp, Homo sapiens
tggcctgttgccagttcttttactagctctgtgatcttgggcaacttagcccctgagtttcatctgtaaaatgcagttaaaaatagttcctacctcatggrtttattatgtattatacatactaagtaccgtaaaacaatgcatggaaaactgcttggcatgatgcacatgctcaaagttagctaatgttaatatgaatcc

SEQ ID NO: 269382 - DNA, 201 bp, Homo sapiens; identical to SEQ ID NO: 53300

SEQ ID NO: 269383 - DNA, 201 bp, Homo sapiens
atctattcagtgtctcctcaggtggtttattgcttggcctcaaggttgcttccagtggtgctagctttttgcagtgcccagattgtacctgtcttctgtcragagcagccccttttctggcatcatggccacctaagtgatcagctaatcaggagaagctttcttaaaagcctacaattggagagtgggaagagtgtggca

SEQ ID NO: 269384 - DNA, 201 bp, Homo sapiens
gcggagcctgctgaactccaaggtcaaggcggccggagatctagaagccctggacctgcccggagcgggccggggactaaggcctgcggggaacgctggcyggggtctcggttctggtggggcatttcggagagggtccaaattggaggtcggggcagtctgagttaggattggagtgcccgagggattcagtgttgaagt

SEQ ID NO: 269385 - DNA, 201 bp, Homo sapiens
ctgtaatcccagctactcaggaggctgaggcaggagaattgcttgaacctgggaggcagaggttgcagtgagccgagaccatgacactgcactccagcctrggcaacagaatgagactctgtctcaaaaaataataataaaataaaataaattaattaaataaaataaaagaattagccaggcatggtggcgcatgcttgt

SEQ ID NO: 269386 - DNA, 201 bp, Homo sapiens; identical to SEQ ID NO: 53294

SEQ ID NO: 269387 - DNA, 201 bp, Homo sapiens; identical to SEQ ID NO: 53295

SEQ ID NO: 269388 - DNA, 201 bp, Homo sapiens
gtcgaggctgcactgagccatgattaggccactggactccagcctgggtgacaaagcaaaaccctatctcaaaaaaataaaaataaagtatcacactcacrgtagcagtgattgtagattcccagtcctgatgatacctccaagccacgctcagtggctcatggagctattttggttggtacttgagagcaatcccatttt

SEQ ID NO: 269389 - DNA, 201 bp, Homo sapiens
aaacagcaggattgctgtaaagggtgaaagagagaagattcattccctccatttggaagtaggtggttagtgtgacttcctcacagagagaaggacccccktcctcacagagcatgtcactgctgaaggtgtttttccaagtttacccaacagatgagtggcagggttagccctggaagcctgctttctgcctcgtagtcc

SEQ ID NO: 269390 - DNA, 201 bp, Homo sapiens
gttggccaggctggtctcaaactcctgacctcaggtgatccaccctccttggcctcccaaagtgctgggattacaggcgtgagccaccgcacttggccttrtaagactttttagagtgcaagttattttgtttgttctgaatttatggcactcattcatagtattcttgaagtttttctgtgctggtgtgttttgttatat

SEQ ID NO: 269391 - DNA, 201 bp, Homo sapiens
tgaaggaattcgttttctttttttctttttctttttttttttttttttgagacaagagtcttgctctgtcacccaggctggagtacagtggcgcgatctcmgctcactgcaacctccacctcacgggttcaagcagttctctgccacagcctcctgagtagctgggattacaagcacccaccaccacgcctggctaatttt

SEQ ID NO: 269392 - DNA, 201 bp, Homo sapiens
atttcaacagcaatgagaaagattggcagaaagcactctctagatgtacggccacagtgccagcctggtttttcattgtcagggctcctgacattcactgrttttgcaaagtacagaattttggttttttgggtttgtttgtttgtttgagacgtagtcttgcttcttcgcccgggctggatctcggctcgccgcaacttc

SEQ ID NO: 269393 - DNA, 201 bp, Homo sapiens; identical to SEQ ID NO: 53297

SEQ ID NO: 269394 - DNA, 201 bp, Homo sapiens; identical to SEQ ID NO: 53296

SEQ ID NO: 269395 - DNA, 201 bp, Homo sapiens; identical to SEQ ID NO: 53290

SEQ ID NO: 269396 - DNA, 201 bp, Homo sapiens
ctttctgctgctatctactgccccaggttagatttttctcctaccgtgtgcatgtcaggagggtgtaataattacaacatagtcacccattgctcagttaygtgacagacccccaagctaaagattttacatgtatcatctgatttaatcctataacactaggagataggtcctttttactgacagagaaactgagctcag

SEQ ID NO: 269397 - DNA, 201 bp, Homo sapiens; identical to SEQ ID NO: 53291

SEQ ID NO: 269398 - DNA, 201 bp, Homo sapiens
agtgtgagcggcgagtgggacgtgcgtggcgtgcgtgcgttgacctgggaagcactggacctgtgaggcgtgcgaactggtggcagtgagagacttcggckgacatggctcccagcgtgccagcggcagaacccgagtatcctaaaggcatccgggccgtgctgctggggcctcccggggccggtaaagggacccaggtga

SEQ ID NO: 269399 - DNA, 201 bp, Homo sapiens
taaggctctccctgtttgaaagttgggggtgaatgtgtagaactggtttatagcctggagacccatgagtcgcaacctttgagtagtgtccacaataaggrttgggagtgctcatgggacctggcttggagttaggacctgaggctactgaaggctaagcagcttgggatgacgcaaatgattttagatgaaaaggaactt

SEQ ID NO: 269400 - DNA, 201 bp, Homo sapiens
gagcacctaacattggggatataaagcattgggcaagactgataaagttcttgccctcatcaactaaacattcacaatgatactggaaaattatgatatatgtgtgtgtgtgtgtgtgtgtgtgtgtgtgtgtgtgtgtatcaagcacccacaacctagatgacagcctgctatatagtaggtactcaataaattttgact

SEQ ID NO: 269401 - DNA, 201 bp, Homo sapiens
agcacctaacattggggatataaagcattgggcaagactgataaagttcttgccctcatcaactaaacattcacaatgatactggaaaattatgatatatgtgtgtgtgtgtgtgtgtgtgtgtgtgtgtgtgtgtgtatcaagcacccacaacctagatgacagcctgctatatagtaggtactcaataaattttgactc

SEQ ID NO: 269402 - DNA, 201 bp, Homo sapiens
tagtagagatggggtttcaccatgttggccaggctggtctcaaactcctgacctcaggtgatccaccctccttggcctcccaaagtgctgggattacaggygtgagccaccgcacttggccttgtaagactttttagagtgcaagttattttgtttgttctgaatttatggcactcattcatagtattcttgaagtttttc

SEQ ID NO: 269403 - DNA, 201 bp, Homo sapiens
gttgaccacagagcgttttcggttatgcaatttctcttaaaaatccagagctccagtttctcttgagaaaccagaagacctggcagtgatgcctccattcyagtgtggcagcagtcacttgcagttgtgtggcattgctgctttggatggtctgtgtgtcttcctgtcccctgcacggtcctcttcactgcccattgctta

SEQ ID NO: 269404 - DNA, 201 bp, Homo sapiens
tttttttttttttcttgagacggagtttcactcttgttgcccaggctggagtgtagcggcacgatctcaatcccagctcaccacaacctctgcctcccagktttaagcgattcttctgcctctgcctccctagtaactgggattatgccaccacgcccagctaattttgtattttcagtagagacggggtttctccatgtt

SEQ ID NO: 269405 - DNA, 201 bp, Homo sapiens
actgcaacctccacctcctgggttcaagcgattcttgtacctcagcctcccgagtagctaggattacaggcacctgccaccatgcctggctaatttttatrtttttagtagagatggggtttcaccatgttggccaggctggtctcaaactcctgacctcaggtgatccaccctccttggcctcccaaagtgctgggatta

SEQ ID NO: 269406 - DNA, 201 bp, Homo sapiens
ggctggagtgcagtggcgcagtcttggctcactgcaacctccacctcctgggttcaagcgattcttgtacctcagcctcccgagtagctaggattacaggyacctgccaccatgcctggctaatttttatgtttttagtagagatggggtttcaccatgttggccaggctggtctcaaactcctgacctcaggtgatccac

SEQ ID NO: 269407 - DNA, 201 bp, Homo sapiens
tgagcggcaggactgggcttggcggcggagcctgctgaactccaaggtcaaggcggccggagatctagaagccctggacctgcccggagcgggccggggastaaggcctgcggggaacgctggccggggtctcggttctggtggggcatttcggagagggtccaaattggaggtcggggcagtctgagttaggattggagt

SEQ ID NO: 269408 - DNA, 201 bp, Homo sapiens
agccaccatgcccagcaagtcttcccatttataatggggaaactgaaacttatgtgtcactagtgtgttgagtggaaatagtgataattaatatttatgaytccttcctgtgtgctagttgtactgttttaagtgctttacatatattatttcatgtaattcttaccataaccctataatcagtatatgttagaatgtaat

SEQ ID NO: 269409 - DNA, 201 bp, Homo sapiens
ggcttactacagcctcgacctcctgggctcaagtgatcctcccacttcggcctgatgagtagctagggttacaggcacacacctccatgccctgctacttttgttgttgttgttgttgttgttgttgttgttgtagagatggagtctcactgtgttgcccacactggttttgaactgagctaaacccaggagcagtcctcc

SEQ ID NO: 269410 - DNA, 201 bp, Homo sapiens
cgccccagcctgggcaacagagtgagactttgtctcaaaaaaaaaagatcttaaatcagactttacaaatggtagcctacaataacatttagcctgcagasacatctcatacaccttaactttttattatgaagaattttgaatacacaaaagaagacaggatggcataatgagcccttacccagccccaaccattaactg

SEQ ID NO: 269411 - DNA, 201 bp, Homo sapiens
tacaatttgctgaagttctcctgttcatcctcctgtccacccagtgaggttggtaatgatttcctcagtaagttaagagacatctgaaatgcaaacacagrtttctgtgattaaaaaaaaaacaacttaagctataagatacctagaaaaagtgaacagcttgatttattttacaatgtgaacagatttgtgtagcttaca

SEQ ID NO: 269412 - DNA, 201 bp, Homo sapiens
gcttactacagcctcgacctcctgggctcaagtgatcctcccacttcggcctgatgagtagctagggttacaggcacacacctccatgccctgctacttttgttgttgttgttgttgttgttgttgttgttgtagagatggagtctcactgtgttgcccacactggttttgaactgagctaaacccaggagcagtcctcct

SEQ ID NO: 269413 - DNA, 201 bp, Homo sapiens
tggatggtctgtgtgtcttcctgtcccctgcacggtcctcttcactgcccattgcttacatttgactcatttcatacagttgcattgcctgcttggctccyactggcagatgtttgcaatcttacatgtaaaatccctaacctggggttagtgcctagtgcctgctcagtaatgtttgttttcttcctgctatactttgtt

SEQ ID NO: 269414 - DNA, 201 bp, Homo sapiens
cttactacagcctcgacctcctgggctcaagtgatcctcccacttcggcctgatgagtagctagggttacaggcacacacctccatgccctgctacttttgttgttgttgttgttgttgttgttgttgttgtagagatggagtctcactgtgttgcccacactggttttgaactgagctaaacccaggagcagtcctcctg

SEQ ID NO: 269415 - DNA, 201 bp, Homo sapiens
tacttaacatcttcctctgccctctctatttcctgtaaattggtggtttatacttaattagtatatacttaattcaatttaggttcaattttttggcccarctacttcacaggtggtgggtgctgtgctctccctgaggaggcacatggtatttccttgtctctggtgtttatagtcatgctgttcagtgtctaggttcag

SEQ ID NO: 269416 - DNA, 201 bp, Homo sapiens
catatccatggttccctcatctacggattcaagcatttgtggattaaaaatattcagaacaaaaccaccaataaatataacccaggaaagctgaagaaaakaaaaaataatacaaattttaaaattcagtatatcaattctttacatggcatttacattgtattaggtatacataatctagaggtgatttaaagtatgcaa

SEQ ID NO: 269417 - DNA, 201 bp, Homo sapiens
acccagatctataccactacaaaacccagtctctgccactacatcagggcttcacatactgtacccatcagaacctgaggtgctgcttgagagccactcartcataaactttaaaggtgggcctaggaaatgccctagatgattgataatacactgaaatttgagaaccactcagcccaccatgctgtctctctagtggtt

SEQ ID NO: 269418 - DNA, 201 bp, Homo sapiens
acatgctaccatgcccagctaatttttaaacaattttttgtagagacagggtcttgctatgttgcccaggctggtattgaactcctggacacaggcgatcmtcctgccttgacctcccaaagtgcagggattataggcacaagccactatgccctgagatttttttcttaactcatattgaagttaataatttcagtaatt

SEQ ID NO: 269419 - DNA, 201 bp, Homo sapiens
agagatggagtttcaccatgttggcccggctggttttgaactgacctcaagtgatccgcctgcctcggcctcccaaagtgctaggattacacgcttgagcyactgtgcctggctcttattgcttttttttttttgagacagagtcttactctgtcacccaggctggagtgcagtggcgcgatcttggctcactgcaacctc

SEQ ID NO: 269420 - DNA, 201 bp, Homo sapiens
ggcggccggagatctagaagccctggacctgcccggagcgggccggggactaaggcctgcggggaacgctggccggggtctcggttctggtggggcatttyggagagggtccaaattggaggtcggggcagtctgagttaggattggagtgcccgagggattcagtgttgaagtgttgggttagggaatgtgagggctgat

SEQ ID NO: 269421 - DNA, 201 bp, Homo sapiens
tgctgaagttctcctgttcatcctcctgtccacccagtgaggttggtaatgatttcctcagtaagttaagagacatctgaaatgcaaacacaggtttctgygattaaaaaaaaaacaacttaagctataagatacctagaaaaagtgaacagcttgatttattttacaatgtgaacagatttgtgtagcttacacccatta

SEQ ID NO: 269422 - DNA, 201 bp, Homo sapiens
ttgaactcctgggctcaagtaattctctctcttagcctcccaaagtgtagggattacaggcatgagccaccatgcctggcctattgactatgatttaacamaaatgtaaattataagattttgtagtttctactacacttgcatgtttattgaatttcctaatatccaagatgccattgactgaaagatgcatcattatgt

SEQ ID NO: 269423 - DNA, 201 bp, Homo sapiens
ggcgacaaagccagactctctccaaaaacaaaccagaaacagaaaagaaatgacgacccaagacccccctacaagcatacttcttttgcgtattatgtttwactcacaaaacaaagctcatcatgcgtttgattctgtgttgtgttccttttcttttcttttgagacggagtctcgctctgtcgcccaggccggagtgcag

SEQ ID NO: 269424 - DNA, 201 bp, Homo sapiens
tggcctattgactatgatttaacacaaatgtaaattataagattttgtagtttctactacacttgcatgtttattgaatttcctaatatccaagatgccaytgactgaaagatgcatcattatgtataactaagaaaaaacagctaccaattataatctgacacagcgctttctcatggccacacctcacttttagagatg

SEQ ID NO: 269425 - DNA, 201 bp, Homo sapiens
gggggaatacctgggcagcagaggccccaggattttgactgtccggacgtctccccatccctacactccacctgccaccattctcctccccttgccaagcrtttctaaggtggacccaagaattttgattcatggcatgaagggcacagtggtcccagggcagaatcagtatctgccctggaaaagatctgaaccctacac

SEQ ID NO: 269426 - DNA, 201 bp, Homo sapiens; identical to SEQ ID NO: 53340

SEQ ID NO: 269427 - DNA, 201 bp, Homo sapiens
gagtagctgggattacaggcatgcgccaccacgcccggctaattttgtatttttattagagatagggtttctccatgttggtgagagtggtctcaaactcycgacctcaggtgatctgcccgcctcagcctcccaaagtgctgggattgcaggcgtgagccactgcacccggccacagttgcacctttttttcctgggaaa

SEQ ID NO: 269428 - DNA, 201 bp, Homo sapiens
ggagaggcagctgtactggaaattgtggaacgcctgaccaagctcatcagagaggtctttccaggtaagactgtgccatcagtccctccacagtgttctcrgaactctaggcactgcctggcacagtgggacaacagcagcagcgagtgtcctggctgaccttcatccatggacagcgatggctgttggccaggtcttcat

SEQ ID NO: 269429 - DNA, 201 bp, Homo sapiens
ggtggatcacaaggtcaggagatcgagaccatcctggctaacacagtgaaaccccgtctctactaaaaatacaaaaaaatagccgggcgtggtggcgggcrcctgtagtcccagctactcgggaggctgaggcaggagaatggtgtgaatccgggaggcagagcttgcagtgagctgagatggtgccactgcactacagcc

SEQ ID NO: 269430 - DNA, 201 bp, Homo sapiens
aagtccagtgctctttccactcccaccacatgcacagctgcagccagtactgtgtgccagatctccaggggatgccctgcccttgagtgtgtccagctagyctgctggcctgacagctcctcaaggactggctcagtgtctcatttgcccaagtccttgcactgaccagcccatcccaagaggatctcacagctggtgccc

SEQ ID NO: 269431 - DNA, 201 bp, Homo sapiens
cctcctgggttcaagcgattctcctgcctcagcctcccgagtagctgggattacaggcatgcgccaccacgcccggctaattttgtatttttattagagayagggtttctccatgttggtgagagtggtctcaaactcccgacctcaggtgatctgcccgcctcagcctcccaaagtgctgggattgcaggcgtgagccac

SEQ ID NO: 269432 - DNA, 201 bp, Homo sapiens
taggaaggacgcaggcttttgctcagggtgaaatgggatgtcattggagggttctaggcacaggtgtaatctattctgacttctgtatgtttaaaaggacscttgaggccagacgcagtggctaacatctgtaatcccagcactttgggaggctgaggagggtggattgcttgagtccaggagtttgagaccagcctgggc

SEQ ID NO: 269433 - DNA, 201 bp, Homo sapiens
taggctggtcttgaactcctgggctcaagtaattctctctcttagcctcccaaagtgtagggattacaggcatgagccaccatgcctggcctattgactakgatttaacacaaatgtaaattataagattttgtagtttctactacacttgcatgtttattgaatttcctaatatccaagatgccattgactgaaagatgc

SEQ ID NO: 269434 - DNA, 201 bp, Homo sapiens
ctgatttctccgagaagggagagcatgtgtagcattcagacagatgggatccctcaggaaattcatgatcctttaacagatgcacatttttttttttttttgagatggagtttcgctctttttgcccaggctggagtgcaatggcgtgatcttggctcaccacaatctccgcctcctgggttcaagcgattctcctgcctc

SEQ ID NO: 269435 - DNA, 201 bp, Homo sapiens
gggcaccaccacaccgacagctttcggatgctctatgatgatgcaggtattcaacctggagggcaactgccagctccctccctccttctctccccagaccygctcagtcctgctgtctctctcctgacaggtgtccccataagcgccatgttcatcacacctggagtcaccccatggaaaaccacattacctggagtggtc

SEQ ID NO: 269436 - DNA, 201 bp, Homo sapiens
ctttggggcaatttgcaggttttgagaagtagaaatgagggtctggagagggcatctgtgagcctcttctgggaacccctcccttgtaggtgtacattgtyggccacgtgcccccggggttctttgagaagacgcaaaacaaggcatggttccgggagggcttcaatgaaaaatacctgaaggtggtccggaagcatcatc

SEQ ID NO: 269437 - DNA, 201 bp, Homo sapiens
taggtgtacattgtcggccacgtgcccccggggttctttgagaagacgcaaaacaaggcatggttccgggagggcttcaatgaaaaatacctgaaggtggyccggaagcatcatcgcgtcatagcagggcagttcttcgggcaccaccacaccgacagctttcggatgctctatgatgatgcaggtattcaacctggaggg

SEQ ID NO: 269438 - DNA, 201 bp, Homo sapiens
gggttcttgctgtgttgcctaggctggtcttgaactcctgggctcaagtaattctctctcttagcctcccaaagtgtagggattacaggcatgagccaccrtgcctggcctattgactatgatttaacacaaatgtaaattataagattttgtagtttctactacacttgcatgtttattgaatttcctaatatccaagat

SEQ ID NO: 269439 - DNA, 201 bp, Homo sapiens
ccaggctggacacataagaagacatgtgacattgtctcaggaggggcctggacagctctggcttccttgggctcaggaatcaatctaagaagagagtgagmtttggtccatgaccttgggcctgctcccttgaggggagcttctgatttctccgagaagggagagcatgtgtagcattcagacagatgggatccctcagga

SEQ ID NO: 269440 - DNA, 201 bp, Homo sapiens
gctccctcacttggcagggcaacaagtcgtgctcagttgtggggtagatgctagggatctgagatgatggacacccacacttggctccaaggagctcacgktcttgtgggcaatgcagacaaacccattgaccctacccttacatccaagcaaggagagagagtcacctggggggatgtgggaacttcacagggcacatga

SEQ ID NO: 269441 - DNA, 201 bp, Homo sapiens
ggccacgtgcccccggggttctttgagaagacgcaaaacaaggcatggttccgggagggcttcaatgaaaaatacctgaaggtggtccggaagcatcatcrcgtcatagcagggcagttcttcgggcaccaccacaccgacagctttcggatgctctatgatgatgcaggtattcaacctggagggcaactgccagctccc

SEQ ID NO: 269442 - DNA, 201 bp, Homo sapiens
gctggagtgcagtggcacaatctcggctcactgcaacctccgcctcctgggttcaagcaattctcctgcctcagcctcctgagtagctgggattacaggcrtgagccactgtgcctggctgaattttattttctgtagagacgaagtcttgctttgttgcccctgctagtcttgaactcctggcctcaagcaatcttcctg

SEQ ID NO: 269443 - DNA, 201 bp, Homo sapiens
ctgagaaagagccagcttgaggcaggggaatagcctctttctctgtctgcagaggaagcgcaaggaccatgtgcccaagagaaaggcaaagggcctccccgccacatccatcctggccagcctggctccgggcttggaagcaggtgagagccactcacggtctcagctcagggacttgggatgcccagcaactctgcccac

SEQ ID NO: 269444 - DNA, 201 bp, Homo sapiens
agttctacacactggctggaaaacgacaactgacaggtgagatgaggagtttctggagtggagaaatgttcctgaatactttgagggctgacgtcaaaggrgccaaactgctcagtgtttgtagttaactgagaaagagccagcttgaggcaggggaatagcctctttctctgtctgcagaggaagcgcaaggaccatgtg

SEQ ID NO: 269445 - DNA, 201 bp, Homo sapiens
gatctcccacctccccatccatggtcctgacatgctaattagagcttaattattttgatgtagggcctggaagctgatggatcccatattcttatggaaarcatgtatttattattacagccaccttctgggcggcggggggttccaagtcaacaggcatgacgacattgtgtctcagctttggggtcagagaggtctggg

SEQ ID NO: 269446 - DNA, 201 bp, Homo sapiens
gtcctgtctctcatggtgagagggggccttgtagaaccccccaggaaccaaatgtggagtaaccactgcttcccatttatgacgttctgttcatcatctcwcatttctcattttaattctcacgagggccccaaggggtagggggcgctgttatcttgattttacagaggaggaaacgggcccaggggaaggttccgctgt

SEQ ID NO: 269447 - DNA, 201 bp, Homo sapiens
gtataaatgtgactgcaaaactgccctgagctgctactctctgcctctggggtagccctgctctgcaggagcagtcatggagctgtacatcacctgttcamcaaagctgtttgcttcaacctcaagcttgcccttgaattttttcctgggcaaagccaagaaccctcatgggctaagctccactttggggctcacctgctc

SEQ ID NO: 269448 - DNA, 201 bp, Homo sapiens
gtaagttcacatgtgatagtgctctgagaaaaaggaagctggggaagaaatagcgaccagacaggcaggagaggtggcacttgagatgaggtggtcagggragtcttctgaggaggtgaccttggggcagaggcctgaatgaggaggaggcagccgcatgatgatgtgggaagattgggcgaggccatggcgtagtcaggg

SEQ ID NO: 269449 - DNA, 201 bp, Homo sapiens
aagtgtccacataaggtgccatttgagttctgagtgtattgagggagggagcccagtgggtatctcggggaggtggagggaacagcaagtcaaaggccccrgggtgggaatgtgcgtggtaggttaggggaagagcacggaggccatgtggccacagtaagaggcacaaggggagagtgggaggggaggtccgatcttgca

SEQ ID NO: 269450 - DNA, 201 bp, Homo sapiens
cacccttctccagctcaggatcagaaccctggaggcacctgccaccgagtcagggcagtgcctcaccaagtcaccttttcccctggatgactgtcacagcytcatacctggtctccctgcctctggccctgccctgctatggcccatccgctacacaagagagaagaaactaatctcctatagcaccactttcatcttgtc

SEQ ID NO: 269451 - DNA, 201 bp, Homo sapiens
ggaggtgtgtactgtgttagataggtgggaaggggaagtgtccacataaggtgccatttgagttctgagtgtattgagggagggagcccagtgggtatctyggggaggtggagggaacagcaagtcaaaggccccggggtgggaatgtgcgtggtaggttaggggaagagcacggaggccatgtggccacagtaagaggca

SEQ ID NO: 269452 - DNA, 201 bp, Homo sapiens
aattttactgaagagggaggtgagccttagggttaaataaactagtgaaggtcacatttacttaagaggcccaaatcctggtgtgagcactgcccttactktctgttcccgctgcttcctttcctcaacaaagtcaatctaggcaaagagatgcctggatgcttccaggttatctaacccagccaacccaagtcaggctgc

SEQ ID NO: 269453 - DNA, 201 bp, Homo sapiens
aaaacagtgaggcgacagggtgacagctatgggaggtgtgtactgtgttagataggtgggaaggggaagtgtccacataaggtgccatttgagttctgagygtattgagggagggagcccagtgggtatctcggggaggtggagggaacagcaagtcaaaggccccggggtgggaatgtgcgtggtaggttaggggaagag

SEQ ID NO: 269454 - DNA, 201 bp, Homo sapiens
tctggccctttgcccacattatctcccttaatcctcacatcagtctcacgtgaggctgaggaacctaaagctcaaaggaattttgtaacttgcccggggaytcctgagtccaactgattccacagtctgtgtcctcgacctccatgtctcctggctgtggcagaacgcagctctcaatcaggcttttggacgtggtcctgg

SEQ ID NO: 269455 - DNA, 201 bp, Homo sapiens
gccaggccctgttctaatctcagaagatatgtaaatttaaaaacaaagtcacccctctcctggacctgacatcttacaggagagggacaataaatatgtaraattaattatagtactgagagaagggctaaggagaaaatcaaaacagtgaggcgacagggtgacagctatgggaggtgtgtactgtgttagataggtggg

SEQ ID NO: 269456 - DNA, 201 bp, Homo sapiens
gctgctggtgtggcagcaggaggagccctctgagtttgacttggcctacgccgacttcctcgccctggacatcagcatgctgcggctcttcgagaccttcytggagacggcaccacagctcacgctggtgctggccatcatgctgcagagtggccgggctgagtactaccagtgtgagtgaaggcctgtggctggccccgc

SEQ ID NO: 269457 - DNA, 201 bp, Homo sapiens
cagcccagatcataccctgctgggcaaaggaggaagagccagaggatccagacgccttggaggacttggaacacctgtaacaggacaaggagttctgctcmggcacgtggccacagaaaactacttaggaagcctgtggtgagaacaacaacagtgcctgagaatcccacggctctggggaagtgagccccgaggatgagg

SEQ ID NO: 269458 - DNA, 201 bp, Homo sapiens
accgtgtagcatatcacacaaccacgcaagaatggtttcgttgcagtgttcaagctctccaagagaagagtagtctttgaaggattaggaaagcttcatgrgggaggtgctctttgaagtgtggggaggatttacagaagtgaaaaggagaagggtactccaggtggcaggcacagaggtgggaaggtatgtggtgcattc

SEQ ID NO: 269459 - DNA, 201 bp, Homo sapiens; identical to SEQ ID NO: 53338

SEQ ID NO: 269460 - DNA, 201 bp, Homo sapiens
ctctggggctgcgggaagctgctcgcagccagcttgaaggtgcttctaaagatagcaaggcaggagctaggcagggaggcaggtggggagagctagtgggmcttagcaagtgctgtttgaggctgaagattttaagtggaggcgccagctggccagggagggacaccgacattgcgaagaggtctgggtacgtgagagcta

SEQ ID NO: 269461 - DNA, 201 bp, Homo sapiens
tcctgggttcaagcgattctcctgcctcagcctcccgagtagctgggattacaggcatgcgccaccacgcccggctaattttgtatttttattagagatarggtttctccatgttggtgagagtggtctcaaactcccgacctcaggtgatctgcccgcctcagcctcccaaagtgctgggattgcaggcgtgagccactg

SEQ ID NO: 269462 - DNA, 201 bp, Homo sapiens
gttgcacagcgaatgagttccagagccaggaattgaatccaggccgcctggctccagagcctctgatcttccagattgatgtcccacccatgggaaagatrggaggggaagatgcaacggaaaaagaaagtgggacattgaggtggaaggggcggaagcctgtctggccagaggtgggggcctccttcatattgtccctgg

SEQ ID NO: 269463 - DNA, 201 bp, Homo sapiens
agcccaggaggttgaggctgcagtgacccaggatcacactgctgcactccagcctgggtttttgtttgtttgtttttgtttgtttgtttgtttgtttgtttttgtagaggcacggttttgaactcctggcctcaagtgatcctcccactttggcctcccaaagcactgggattaccggtgtgagccaatgcatgtggccca

SEQ ID NO: 269464 - DNA, 201 bp, Homo sapiens
gagcccaggaggttgaggctgcagtgacccaggatcacactgctgcactccagcctgggtttttgtttgtttgtttttgtttgtttgtttgtttgtttgtttttgtagaggcacggttttgaactcctggcctcaagtgatcctcccactttggcctcccaaagcactgggattaccggtgtgagccaatgcatgtggccc

SEQ ID NO: 269465 - DNA, 201 bp, Homo sapiens
ccagggtctgatcttcgtcttcacaacaacctcttagaataagtactgattttatccccaatttacagataaggaagccagggtcatacagcttagaaaasgcagtcttgggagcagactccagaattaactccaaagcccttcctctaaaccccacgacactgatgatgctcctaagttcatatttattgagcctttact

SEQ ID NO: 269466 - DNA, 201 bp, Homo sapiens
tgagcccaggaggttgaggctgcagtgacccaggatcacactgctgcactccagcctgggtttttgtttgtttgtttttgtttgtttgtttgtttgtttgtttttgtagaggcacggttttgaactcctggcctcaagtgatcctcccactttggcctcccaaagcactgggattaccggtgtgagccaatgcatgtggcc

SEQ ID NO: 269467 - DNA, 201 bp, Homo sapiens
ttgagcccaggaggttgaggctgcagtgacccaggatcacactgctgcactccagcctgggtttttgtttgtttgtttttgtttgtttgtttgtttgtttgtttttgtagaggcacggttttgaactcctggcctcaagtgatcctcccactttggcctcccaaagcactgggattaccggtgtgagccaatgcatgtggc

SEQ ID NO: 269468 - DNA, 201 bp, Homo sapiens
ccaggctgccaactgggcgcctgagaaagcagcccatagcccccacccccaccttttttgggttccagtacctctgccccctctaaagatcttcatcatgrgtcccaggacacagatatggagtaataataaaaataaataatggcactagcagcagttactctagatcaagtgtaaagggtcaggctggctctaagaata

SEQ ID NO: 269469 - DNA, 201 bp, Homo sapiens
tagaaggtgattgggccatcagggctccactctcatgagtgggagtaatgctgttacaaaagggcaagtttggtcttcttttgtcttggccctttgccaaracatgccatgtgaggactcagcctttctcctctccagaggatgcagcatgcaaggcatcatcttggaagaagcgaatggccttaccagacacccagcctg

SEQ ID NO: 269470 - DNA, 201 bp, Homo sapiens
aacacaggcacgcaaggcaaacaaatccagggccctgggccaggtgcagtgatcatatgcctgtaaacccagcactttgagaagctaaggctggaggatcrcttgaggtcaggagtttgagactggcctgggcaacatagcaagaccctgcttctacaaaaaataaaaaaaaattagctgtgtgtggtgctgtgtatctat

SEQ ID NO: 269471 - DNA, 201 bp, Homo sapiens
ggccacagtaagaggcacaaggggagagtgggaggggaggtccgatcttgcaggcctccatgaggactctggatttggagggttttgcgcagaagaatgamatcctgtgacttataattttatggaatcatcatgtctgctgtgcagggaacaggctgtaggggcaggtgggggagcagtgaggccgtttggagggaagga

SEQ ID NO: 269472 - DNA, 201 bp, Homo sapiens
gagaaagagccagcttgaggcaggggaatagcctctttctctgtctgcagaggaagcgcaaggaccatgtgcccaagagaaaggcaaagggcctccccgcmacatccatcctggccagcctggctccgggcttggaagcaggtgagagccactcacggtctcagctcagggacttgggatgcccagcaactctgcccacca

SEQ ID NO: 269473 - DNA, 201 bp, Homo sapiens
gcagatcacttgagctcaggaatttgagaccagactgggcaacatggcaaaccccacctctacaaaaaagtacaagaaaatttgccaggcctggtggcacrtgcctgtagtcccagctacttgggggactaaggtgggagaatcagttgagcccaggaggttgaggctgcagtgacccaggatcacactgctgcactccag

SEQ ID NO: 269474 - DNA, 201 bp, Homo sapiens
ctgaggggcagtgtggcccagggaatgagtcctaaggctgccttgctcaccccacagccaggtgctctgtataagagaactcttttacctgcacaactgargcaggaggtgggactggactccagaggcagggctttgacaccagaccagattgaggactagctaaaatacggcctgggcaaaagcagttttcaaacacac

SEQ ID NO: 269475 - DNA, 201 bp, Homo sapiens
ctcgggccagcccagatcataccctgctgggcaaaggaggaagagccagaggatccagacgccttggaggacttggaacacctgtaacaggacaaggagtyctgctcaggcacgtggccacagaaaactacttaggaagcctgtggtgagaacaacaacagtgcctgagaatcccacggctctggggaagtgagccccgag

SEQ ID NO: 269476 - DNA, 201 bp, Homo sapiens
tcaagtggagccttgaggcagtgagtgggggagccacatgggtgtccagaacattacaggaagagaggacagtgcacggggtctgaggtggacacacaggwgatgtgcatgaggaacagcaaggaagcccgcgtggctgaagcagggtgggcaggacaagtgggggtgaggttggcagatggtggggtggggcaggtgcca

SEQ ID NO: 269477 - DNA, 201 bp, Homo sapiens
acaagtaaagtacgcagcattggaggagatgataagtgttatggggaaaataaagtagaacagggaaggcgggttgtggggagggggtacttacaagacgkccagagaagagctgtcaaatcaggtgacactcaagtggagccttgaggcagtgagtgggggagccacatgggtgtccagaacattacaggaagagaggac

SEQ ID NO: 269478 - DNA, 201 bp, Homo sapiens
aagaaaagaaagtccccgtctcaatgaagaattccttcatctggggagaaaaaaacaaaccacacgaacaagtaaagtacgcagcattggaggagatgatragtgttatggggaaaataaagtagaacagggaaggcgggttgtggggagggggtacttacaagacgtccagagaagagctgtcaaatcaggtgacactca

SEQ ID NO: 269479 - DNA, 201 bp, Homo sapiens
tcagagaggtctgggtttgagccttagtttgcttatctatgcagtgggcataagaatccctatctcacagactggctgccaggatgaaataagaccagtgkatgaaagtctgggcacctatccaacactgtctgagtgcctacaattctaactggcctccccacagccttgttcattcatcgaatgtgcatttgcacgtct

SEQ ID NO: 269480 - DNA, 201 bp, Homo sapiens
agagaccagctttgaaggaggatgttttttcccctgcagggaagttctggcacatcgctgacctgcaccttgaccctgactacaaggtatccaaagacccyttccaggtgtgcccatcagctggatcccagccagtgcccgacgcaggcccctggggtgactacctctgtgattctccctgggccctcatcaactcctcca

SEQ ID NO: 269481 - DNA, 201 bp, Homo sapiens
gctaattagagcttaattattttgatgtagggcctggaagctgatggatcccatattcttatggaaaacatgtatttattattacagccaccttctgggcrgcggggggttccaagtcaacaggcatgacgacattgtgtctcagctttggggtcagagaggtctgggtttgagccttagtttgcttatctatgcagtggg

SEQ ID NO: 269482 - DNA, 201 bp, Homo sapiens
gctggaagatgtgctgaccgatgcatccaaagctggggacatggtaagaggccctgcttctttcttttctcatctggggttatttcctgcacaagtctccygcttggcacaaactcacccacccacccaaagatgcccatatcccagagggtcctttatcagcccggcaccagcagagggcttcctccatcctcaccacag

SEQ ID NO: 269483 - DNA, 201 bp, Homo sapiens
tcaccaattaacattttgctatatttgccttattattttttctttgtatgtgtgtgtgtgcatatatatatatctatatatatatatatattttttttttttctggtccatgttgcaaagaagttgacatcatgacctttgactcttaaatagtttagtgtgcacagcagatctttgaataatgtcgcttcattcaacatc

SEQ ID NO: 269484 - DNA, 201 bp, Homo sapiens
tcaggcatccctgcaatgattaaacaccaagggaaggctgccttccctagtccgtgaccgacaccggagttttgggtccacagataaaacgtgtctccttygtctctaccagaaaatgaaaggaattgaaattaagagaagggaaagattgaagagtggaaaggagaaagtggttgagggacagtgagagagcttggagaa

SEQ ID NO: 269485 - DNA, 201 bp, Homo sapiens
ttaacacatttaatagtgtcacgggatccttggggtgtcgctttgccagctggaaacctctgtggctggtggcgccttctgcctgagtattgcttgcaccractgggttcgttccacccactcagcctggcaggctgtgcttggctcacgctctcagccctgatcccacacctgccaagggcaagccaggtgcagagtggc

SEQ ID NO: 269486 - DNA, 201 bp, Homo sapiens
cttttaccaagattcaccaattaacattttgctatatttgccttattattttttctttgtatgtgtgtgtgtgcatatatatatatctatatatatatatatattttttttttttctggtccatgttgcaaagaagttgacatcatgacctttgactcttaaatagtttagtgtgcacagcagatctttgaataatgtcgc

SEQ ID NO: 269487 - DNA, 201 bp, Homo sapiens
gggttgggggtttcttgccccccagaaaggtgaagaaggggtagagacatggagagaaggggttggggtattgccccttccccagaaaagcgggacttgcygctaagggtgaaggaccaagacaggcgtccctgcatggtctgacacctctgaaacttgggtgaataatcaggcatccctgcaatgattaaacaccaaggg

SEQ ID NO: 269488 - DNA, 201 bp, Homo sapiens
agcaatgtataaaaaagaataataagccatgaccaaatgagttttatttcagctatgtaaggctggttcaatatttgaaaatcattcaatgtaattcaccrtatcgacagactaatataaaaaatcacatgatcatactgatcattgcacgaaaagcatgtaacaagcaaacactcattcaagataaaaaccctcagcaaa

SEQ ID NO: 269489 - DNA, 201 bp, Homo sapiens
gagcaaaactccatctcaaaaacaaacaaacaaacaaaaaaaaaaaacaaaagataatggcctccaattccatccatgttgctacaagacatgctttcatyctttttatggctgagtagtattctcttatatatgttaccacattttctttatctaattatccatcgatggatgcttaagttgattttatatctttgctat

SEQ ID NO: 269490 - DNA, 201 bp, Homo sapiens
aggggttgggggtttcttgccccccagaaaggtgaagaaggggtagagacatggagagaaggggttggggtattgccccttccccagaaaagcgggacttkctgctaagggtgaaggaccaagacaggcgtccctgcatggtctgacacctctgaaacttgggtgaataatcaggcatccctgcaatgattaaacaccaag

SEQ ID NO: 269491 - DNA, 201 bp, Homo sapiens
cctctgattattactctctctctgttctttagaaaaaccctttaagatcttcccttgctatcttcattccactgtgagcagcttgaagtcaggaccctccycttatttttgttcatagaacctagcatagtacctacctgacccaataagtgtccattgaataagagattgatattttccacaaacagaacatgactccga

SEQ ID NO: 269492 - DNA, 201 bp, Homo sapiens
gaaataagggatggggcgcagagatataaggggttggggtatttgcctctcccctagaaaagcgggacttgccgctaagggtgaaggagaaggggttgggrgtttcttgccccccagaaaggtgaagaaggggtagagacatggagagaaggggttggggtattgccccttccccagaaaagcgggacttgctgctaaggg

SEQ ID NO: 269493 - DNA, 201 bp, Homo sapiens
ctcctggaatgaagccatgctgcccatcaatgtcctggaggggttcctacctggacaggggctcagccagggtttctcacacctgcagaccctcagctggraagtaatcagaatcttcagccttttaaaagctaagtcttagaaaaagcaatatagactcacactgccaaggaggattaaagaaaactactggagagattc

SEQ ID NO: 269494 - DNA, 201 bp, Homo sapiens
gctagaaaccgtcattctgagcaaactatcccaaggacagaaaaccaaacaccccatgttctctcttataggtgggaattaaacaatgagaacacttggaygcagggtggggaacatcacacaccagggcctgtcgtggggtgggtgaagggggcagggatagtattaggagatatacctaatgtaaatgacgagttaatg

SEQ ID NO: 269495 - DNA, 201 bp, Homo sapiens
agaaaagcagagaaggggttggggcacaaaggtgcagagatataagaggttggggcgcggaaataagggattggggtgcagagatataagaggttggggcrtggaaataagggatcggggcacagagatataaggggttggggtggggaaataagggatggggcgcagagatataaggggttggggtatttgcctctcccc

SEQ ID NO: 269496 - DNA, 201 bp, Homo sapiens
ccaaaagcaaatggagacaactacagggaaggtcacatgggccgagagagatgggagccttccaaccaaaagaatcataaatcttcagttatgatctggcygtttctctaagcagcaagctagtggggaaaactcaaggggcctgtgcctgtgattcccatggccctctgacagtgggcacattctacaaaacttgagtga

SEQ ID NO: 269497 - DNA, 201 bp, Homo sapiens
gccataaaaaaggatgagttcatgtcctttgtagagacatggatgaagctagaaaccgtcattctgagcaaactatcccaaggacagaaaaccaaacaccscatgttctctcttataggtgggaattaaacaatgagaacacttggatgcagggtggggaacatcacacaccagggcctgtcgtggggtgggtgaaggggg

SEQ ID NO: 269498 - DNA, 201 bp, Homo sapiens
ttcactagacaagtacgcattgagaagctcctctgtgccagtctctgaacacatagatgacatcaagaacattacagcctaattgggggacagatattgcrttcataattgccacacagtggaggcccaagggggagggaattggttctgctacagggatcttgcttgggagatgcttgagctgtatcttaaaaaatgagt

SEQ ID NO: 269499 - DNA, 201 bp, Homo sapiens
ctacagaatgggagaaaatttttgcaatctacccatctgacaaagggctactatccagaatctacaaagaacttaaacaaatttacaagaaaaaatcaaamaaccccatcaaaaagtgggccaaggatatgaacagagacttctcaaaagaagacatttatgcagccaacaggcacatgaaaaaatgctcatcatcactgg

SEQ ID NO: 269500 - DNA, 201 bp, Homo sapiens
cattcactagacaagtacgcattgagaagctcctctgtgccagtctctgaacacatagatgacatcaagaacattacagcctaattgggggacagatattrcgttcataattgccacacagtggaggcccaagggggagggaattggttctgctacagggatcttgcttgggagatgcttgagctgtatcttaaaaaatga

SEQ ID NO: 269501 - DNA, 201 bp, Homo sapiens
cctgcagcacttatatttcccagaaataacattaagatgacttagtttttgatgaaggacattcattcctgaaatgcaatcctctgacaactctgaggctmctactgacagttatttaaattatttggttctacatttgatctaacatatatatcatgtgttgggattatttctcaacacgactgtttccctgacaaggca

SEQ ID NO: 269502 - DNA, 201 bp, Homo sapiens
gaaaactggctagccatatgtagaaagctgaaactggatcccttccctacgcctcacacaaaaattaattcaagatggattaaagacttaaatcttagacytaaaaccataaaaaccctagaagaaaacccaggcaataccattcaggacataggcatgggcaaggacttcatgtctaaaacaccaaaagcaatggcaaca

SEQ ID NO: 269503 - DNA, 201 bp, Homo sapiens
ttgtaaaactagtttctttatgtagaatcagcctcttttatgtgtatataagtgaactgtcccaatgcccagcggctttttaaaactcgcccagcaggtgrcaggaccatcaaccccatgactgcagatactaacagacctatgtgactggctggccgaaccgtctcagcaactagatggtcctgactcatccaattcaaa

SEQ ID NO: 269504 - DNA, 201 bp, Homo sapiens
agaaaaggaggagcatggtctccactgttctcccagtgctcacaaagtgcaggcacacttcagtgctctgtgtgcataattatcttactcggttcttacactacaccatgaaggtagacagataaacttcctttacacatgacactctgggtttagtgatttacccagggttacacagctggagccaggaccatcttactc

SEQ ID NO: 269505 - DNA, 201 bp, Homo sapiens
atctgttctgtgcttacattatgttaggggccagcagctccaaaagtaattctcacacacataggaatttgtaaaactagtttctttatgtagaatcagcytcttttatgtgtatataagtgaactgtcccaatgcccagcggctttttaaaactcgcccagcaggtgacaggaccatcaaccccatgactgcagatacta

SEQ ID NO: 269506 - DNA, 201 bp, Homo sapiens
atttgcaaatatatcatgggagggtatgttcagactgtagatataaagcagaactaaaattatagattaaaggagttcaaaaagtatcctgtacttaccarctgaacatcaggatcaacatattgctgtatagctctaacaaatgcagctggattttcttgtacttttatgctacataaaaagattaattttgaagctatg

SEQ ID NO: 269507 - DNA, 201 bp, Homo sapiens
atcatttgttaaccatcataataatgatggattcaggcaagaattataatagatgctaagacaaatgggtaaaagtttgatgaggaacaggattatttatrtagtctcaaaatatctacatatgtacacatgcaactgataaagcttaactttacagtggagaaatcgggcagatgtcaccataatccaccatacagtgga

SEQ ID NO: 269508 - DNA, 201 bp, Homo sapiens
aaaatcaggtacaatattaagagcaacaaaataaataataagagtaatggactataacaaaataggaatctatgagtctatgcagatataaagaaacaaaygaataaatggggagaagagaaagttcttcctatgccacctaataactgtagaaggactgatggaatggaatactatcatttgttaaccatcataataatg

SEQ ID NO: 269509 - DNA, 201 bp, Homo sapiens
ctctgctaaaaggaatcaggactcctgggaaagatatctgattccagggcggggaagcaacactgtaagatgagcctggaatatcttattttgccagaaartaagaaagtgttccaagaaagatggagacacatgaaaaagacacagaagccagcttgaaggggaatcccactggcaaaatcaggtacaatattaagagca

SEQ ID NO: 269510 - DNA, 201 bp, Homo sapiens
tcttatcagatgctttccgcactgaagggcctacctccgcctccttctcatcttttattctccactttcaaaagcccccaaattgtagaaaagacatgcaytgtcaatgattagcagaagaaaacaaagtaatttttccacctatagaattatttaaagtcacaatgtcaaaagctaaaattatttacatttaattatata

SEQ ID NO: 269511 - DNA, 201 bp, Homo sapiens
gtggcacgatcttggctcactgcaacctccacttcctggggtcaagcgattcttgtgcctcagcctcccgagtagctgggattacaggcgcctgccaccaygcccggctaattttttctaattttagtagagacggggtttcactatgttggccaggctggactcaaatgcctgaccttgtgatccactcaccccggcctg

SEQ ID NO: 269512 - DNA, 201 bp, Homo sapiens
aaaagtcctcatgctcatgctacaacccatactaattaaatcacattctcagggattgggacacagacatttgtgttttttaaagttcccaagatgacacyggtatgcattcaagaggacctaaagatgtaatagccaggatagcagagctttttcagatgtcagtttctatctcctgcatggcacagatcctgtcctcca

SEQ ID NO: 269513 - DNA, 201 bp, Homo sapiens
aggaatagtagaattatgattatcattttattgaatctttagatcaatttggtaattatagccatcttaagaaaactgagtttttcaatccattaacatgwttatctccccattgatttatatcttcaattttattcagcaatattttgttgttttagtatagaggttttgcatgtctttcgctaaatttattcccagata

SEQ ID NO: 269514 - DNA, 201 bp, Homo sapiens
atgaataaatgagtgaatgcttaagcaaactgtagtacatccatactattcaatacaacacagtaacaaaaaggaaccaactattgatacacataacaacytggatagatctcaagattattatgctgaatggaagaggccaatatcataaggttacataatgcatgactatataacattcttgaaataaaattatataaa

SEQ ID NO: 269515 - DNA, 201 bp, Homo sapiens
tcatttccattataatttaatccacattagtgacagaacaactggaattataatttacaaaatgcctgggtattgtgacactgagatcaataatcacaatwaaagaagtcaaatgtgagcatttctatatttcaagaaaaactttgtcattaaaataaaaaccaagtcaagaatctcatttgaaagtagcaggtgcaactg

SEQ ID NO: 269516 - DNA, 201 bp, Homo sapiens
cttcccaggacctatcttttatatctgagggccagttttattattttaattatcttttctaatgcaacaccattaaaaatatcgtttccctgctgtctctyggtttcagccagattcagaatagactccagctggttctacacatagttcaatgacatcactgggactgactcagagccagcatttctactactgatgact

SEQ ID NO: 269517 - DNA, 201 bp, Homo sapiens
tacctgttagaaagcagagctcaggtatcaggtgggcgagctgagcctcactgttgtcatttctcttcttctttaacagactaacaagcatgggctgattyaggtccgatacagtaatatcatactgctataaaatgcaagattaataagtaaaaagttaacatggaagcaccgccaggtgagcatccttacattcaacaa

SEQ ID NO: 269518 - DNA, 201 bp, Homo sapiens
acacaaacattacctgttagaaagcagagctcaggtatcaggtgggcgagctgagcctcactgttgtcatttctcttcttctttaacagactaacaagcaygggctgattcaggtccgatacagtaatatcatactgctataaaatgcaagattaataagtaaaaagttaacatggaagcaccgccaggtgagcatcctta

SEQ ID NO: 269519 - DNA, 201 bp, Homo sapiens
aataattcttatgaactgggatgcaaaaatccttaacaaaatttcattaaattgaatccagcaatgtataaaaaagaataataagccatgaccaaatgagwtttatttcagctatgtaaggctggttcaatatttgaaaatcattcaatgtaattcaccgtatcgacagactaatataaaaaatcacatgatcatactgat

SEQ ID NO: 269520 - DNA, 201 bp, Homo sapiens
aacatgtctctattattgaataaattacttaaaaggaccatcctccatgggttaaatcgatgtcctggcattcatgtaacttaaagagggtctgcccactrccaagcatcaggggcctgtatccaggagcctgacagaggtataaaacacaaacattacctgttagaaagcagagctcaggtatcaggtgggcgagctgag

SEQ ID NO: 269521 - DNA, 201 bp, Homo sapiens
aaaattaattaaagatgaattaaagtcttcacaataaaactaagcatgttagaggacataattttacaattctggcatgggaaaatcttactaaataatayataaaatctagaagtcacaaaataactatagacagattaggctacatcaaatttaaattttctctaaaaagaaagagtaaagaaaagtaaaataaaaata

SEQ ID NO: 269522 - DNA, 201 bp, Homo sapiens
gatctgcccacctcagcctcccaaagtgctgggattacaggcgtgagctaccgcacctggccttctattctttaaaacagtaaattggtgattatgacaayataacaaaatatacttctttaaaagtgaatattgagtacagatgaaatatgctgtctagaaatgaaaaagtggccatgaatgcgaattttccaagatgaa

SEQ ID NO: 269523 - DNA, 201 bp, Homo sapiens
gtgtcggggtttgagtacttctttttccaaataataaaacaaaagtaaaactaaagtaattaaaacagtgtgatcttattactggaataaataaattattyggtagcacagaataggaagtccaaaaaataatcaatagaattgatgtagtatatgaaaaaaattggcatttcaaattagtggggaaataaaggatacact

SEQ ID NO: 269524 - DNA, 201 bp, Homo sapiens
ctagtaaattcaaataatggcaaagagaaacttggttttaggatgatatcagggggtctattttacatcaaagtaatacatggaatatatgagataaaggraatcgattcccccaacatgtctctattattgaataaattacttaaaaggaccatcctccatgggttaaatcgatgtcctggcattcatgtaacttaaaga

SEQ ID NO: 269525 - DNA, 201 bp, Homo sapiens
gtgctggagatgtggctggggtttgtctcacagtggagacaaggaattgcaacttttttctattgttgtacaccttgaaggcgaggttaattaaatcctgktgtggggtttgagggccagaatttaatttttggagttttatttaatgtcgggagcagattgggtaataaaatgtatattgagaataggacggccttttga

SEQ ID NO: 269526 - DNA, 201 bp, Homo sapiens
aggtaactattgcagttttttatgtgtcctccaaatattgcctatgtttcttccaatatttaaatctctctctctctcacacacacacacacacacacacattttcgctctggctttttgtcttactaatatatcttgattattagcctagaatttctttttgtataaatctatggggcacaagtctaattttgtaacatg

SEQ ID NO: 269527 - DNA, 201 bp, Homo sapiens
gcttaggaggaatcctgggctgcaggcattccttggcttggtggtcagatttctggcacttgtagcgagctcctggggaggaggttctggaggaacgcctrgccgctgcggttcaggcgtttggaagttcttgtgtgctggagatgtggctggggtttgtctcacagtggagacaaggaattgcaacttttttctattgtt

SEQ ID NO: 269528 - DNA, 201 bp, Homo sapiens
gaggtaactattgcagttttttatgtgtcctccaaatattgcctatgtttcttccaatatttaaatctctctctctctcacacacacacacacacacacacattttcgctctggctttttgtcttactaatatatcttgattattagcctagaatttctttttgtataaatctatggggcacaagtctaattttgtaacat

SEQ ID NO: 269529 - DNA, 201 bp, Homo sapiens
tgcacagatgggacacggcttaggaggaatcctgggctgcaggcattccttggcttggtggtcagatttctggcacttgtagcgagctcctggggaggagkttctggaggaacgcctggccgctgcggttcaggcgtttggaagttcttgtgtgctggagatgtggctggggtttgtctcacagtggagacaaggaattgc

SEQ ID NO: 269530 - DNA, 201 bp, Homo sapiens
cccatttcttcttctgctcctcaccacctctctagcccagctgatcaagagtggacacatgactccacctgtgtagtcacctcgtgtggaaaatctcgctyaatcagggcagacaattgacgggctaatcagatgccctgtcaggaatatagaggcagaatcagcagatagggagaagcaccaaaagacacacacaaaaga

SEQ ID NO: 269531 - DNA, 201 bp, Homo sapiens
acattaacaagaaatggggaaaggattccctatttaataagtggtgctgggaaaactggctagccatatgtagaaagctgaaactggatcccttccctacrcctcacacaaaaattaattcaagatggattaaagacttaaatcttagacctaaaaccataaaaaccctagaagaaaacccaggcaataccattcaggaca

SEQ ID NO: 269532 - DNA, 201 bp, Homo sapiens
cgctaagccgagaaggagtcagagagccttgggccagagttccacgggctctgtgagtggctgccaggtgagttgaacagtccgatttccagtggggtccygcacagatgggacacggcttaggaggaatcctgggctgcaggcattccttggcttggtggtcagatttctggcacttgtagcgagctcctggggaggagg

SEQ ID NO: 269533 - DNA, 201 bp, Homo sapiens
ggaactaagggacaggacctgggactacaccccatgcctcctgaggcccatgcctgccctctttctctgtatcagccaccctgttggagagggaagttttrgtctggggatagagaaaggaagggtgatattactttggagaatgggtcacttcagagaggataggtatagagtgagggagcttcaggaggactgtctaag

SEQ ID NO: 269534 - DNA, 201 bp, Homo sapiens
tatttaatccactttagtcacaatactattttaacacacaatcagaataaaacattattattgaaaatgttagatttttttccatcccaatcttcaaaatyggtgaaatcggtgtctattttcacttatgccacatgtccacttggactatccacatttcaaatgctcaatagctacacatggtacagaccccatcccaaa

SEQ ID NO: 269535 - DNA, 201 bp, Homo sapiens
taatttatagattcaatgccatccccatcaagctaccaatgactttcttcacagaattggaaaaaactactttatagttcatatggaaccaaaaaagaacscacattgccaagacaatcctaagccaaaagaacaaagctggcagcatcacgctacctggcttcaaattatactacaaggctacagtaaccaaaacagcat

SEQ ID NO: 269536 - DNA, 201 bp, Homo sapiens
gcaggtggggataactaaaaaggagtgcttaaaagagtattgtctaagttggcaccagagttggggagttttaagaggtttagaagcttggctgtcaatayccacaacagttatggaggcaacggaaacaggcccttgaaaagaaggtaatgtggagtgggtagcctccgtattgattaagaaggggacggacttaccctc

SEQ ID NO: 269537 - DNA, 201 bp, Homo sapiens
aggaggagaaacctttcactgacaggagctacacaggaatacaggaactaagggacaggacctgggactacaccccatgcctcctgaggcccatgcctgcmctctttctctgtatcagccaccctgttggagagggaagttttggtctggggatagagaaaggaagggtgatattactttggagaatgggtcacttcagag

SEQ ID NO: 269538 - DNA, 201 bp, Homo sapiens
tcccacctccaaataccatctcctcaagggttagggcttcaacatatgaatttgtgatagcacaaacattcaatccataacaccacatttaaaaaaaaaaagtagtacaggtgaaattaattttaataatatattttatttaatccactttagtcacaatactattttaacacacaatcagaataaaacattattattgaa

SEQ ID NO: 269539 - DNA, 201 bp, Homo sapiens
taagatcctgaagcatttcttcaaaaaattgtaagaggagatgaaacctggctttaccagtacgatcctgaagacaaagcacaatcagagcaatcactacygagaggtggaagtggtccagtcaaaggaaaagccaacccatcaagagcaaaggtcatggcaatagtttcttgagatgctccaggcattctgcttgttgac

SEQ ID NO: 269540 - DNA, 201 bp, Homo sapiens
ggaactgggcaggtggggataactaaaaaggagtgcttaaaagagtattgtctaagttggcaccagagttggggagttttaagaggtttagaagcttggcygtcaatacccacaacagttatggaggcaacggaaacaggcccttgaaaagaaggtaatgtggagtgggtagcctccgtattgattaagaaggggacggac

SEQ ID NO: 269541 - DNA, 201 bp, Homo sapiens
catggaaatgctaccttgcatagctctctgagagtaaagcagcacccttcactctctatccctaaaatgtcagtcagtgcgttttcatcagcacatccccrtgacccttgtgggttacttcctgcaaatggtctgcagactccacctggattcattccctggctctcaaggcccaaataaggcagtggacatactactata

SEQ ID NO: 269542 - DNA, 201 bp, Homo sapiens
ttatgatcgagcaagtagttaaataaacggcaattctagaatcaaaaattgatgtaaaattatttggacatacaggcacaagggtgcaggagcaaaaaaakgtagaattaatttaaagttctgaagccataggccaaatggtgtttcttagtcttgcctactttgggaattattttttaaggtgccaatttcaaggacact

SEQ ID NO: 269543 - DNA, 201 bp, Homo sapiens
aaaagctcatttaccctctaatgacaaaggttacaatgaacactcatttccattataatttaatccacattagtgacagaacaactggaattataatttayaaaatgcctgggtattgtgacactgagatcaataatcacaataaaagaagtcaaatgtgagcatttctatatttcaagaaaaactttgtcattaaaataa

SEQ ID NO: 269544 - DNA, 201 bp, Homo sapiens
agggaagcagataatttagttaaagtgtctcagcctaataagggaactgggcaggtggggataactaaaaaggagtgcttaaaagagtattgtctaagttrgcaccagagttggggagttttaagaggtttagaagcttggctgtcaatacccacaacagttatggaggcaacggaaacaggcccttgaaaagaaggtaat

SEQ ID NO: 269545 - DNA, 201 bp, Homo sapiens
ggaactaattacagtggagcttccattacatctttcttcctctaaagagaagacatggaaatgctaccttgcatagctctctgagagtaaagcagcacccytcactctctatccctaaaatgtcagtcagtgcgttttcatcagcacatccccgtgacccttgtgggttacttcctgcaaatggtctgcagactccacctg

SEQ ID NO: 269546 - DNA, 201 bp, Homo sapiens
tgagatcatgctataaagagcctggcaggccgggcgtggtggctcacacctgtaatcccagcactttgggaggctgaggcgggtggatcacctgaggtcasaagtttgagcccagcctgcccaatgtggtgaaaccgcgtctctactaaaaatacaaaaattagccgggtgtggtggcaggtgcctataatcccagctact

SEQ ID NO: 269547 - DNA, 201 bp, Homo sapiens
agactgccccatgcttaactatctggctctaaacatctatattcattttgaaaatatctatacacaagctggaggcgagttatattgagacaatctcagawttcccaaaacagcatgactgtccttaccttctaggatagtaggatgttacggggaagcagccctgaagtctgacaaatgtgaatctgatccccagctctt

SEQ ID NO: 269548 - DNA, 201 bp, Homo sapiens
ggacgcaaaggaggctttggattgggaagaagggtggcaatgagatgtagctgtaatccaggaatagtcagggaagcagataatttagttaaagtgtctcrgcctaataagggaactgggcaggtggggataactaaaaaggagtgcttaaaagagtattgtctaagttggcaccagagttggggagttttaagaggttta

SEQ ID NO: 269549 - DNA, 201 bp, Homo sapiens
ggccttgatgaatgtgagacagagaggagttaagtatgactcctgggcttctagcttgggcaattgaactaattttcttatgacaaataattatagtcttktgccttgtctatctaccttccaaggtgtaagcttcttaggtgaagcaattcagaaccgcaagaatttactgaatactttctacatgtcaggcatttatta

SEQ ID NO: 269550 - DNA, 201 bp, Homo sapiens
ctcttctgcctaggaatcccatatctcccattgtccacctcactgatcaaaatcctaaacaaggaactatcactctcgctcaggtgtcctgctagaaatawtcttgcctttcatcaagctctctctgacaaccttgggcaatatatttagcctcactaggccccaagggtgatgacaggattaaatgagatcatgctataa

SEQ ID NO: 269551 - DNA, 201 bp, Homo sapiens
gtttgataaatgtgcaaattaccacagagagtgacaggggccagatcatgaagggtttcttgtatcacaagttaaggggatctccaagccatgcccggtakctttaaccatctatttgaaatgatacatttaccaagggcaatggtgctcagaacctcattgtttggttccttctggaaacactggttatctcacatgatg

SEQ ID NO: 269552 - DNA, 201 bp, Homo sapiens
ctgccatggaaatgctctccaacgtcttcagtgatccatggaagagtctctgttccttggcaggacatttaaagttctctttacctttgaaatcacaactyccacaccttcctagctaaacctgaatgagcaaaagtttctaaaatatggccctcacttcccatcattgcatgtttgcctcttctgcctaggaatcccata

SEQ ID NO: 269553 - DNA, 201 bp, Homo sapiens
taagaattctgaccacactaaccatgcctaggaaggaaaggagttgttgttttgtaagggattgaggtttgggagattaatcggacacgatcagcagggaragcacgtgtgtttttatgagaattatgccgagataggtaacagatgaggatgaaatttgggcttgactgaagtaatgggggctgtctgtgaagccttgcg

SEQ ID NO: 269554 - DNA, 201 bp, Homo sapiens
aaagcactatatttgagccatctcaaaatacaatgaaaaggttctatatgagggaaccatggtgaataatggttcctttgtgaggaaggaaggaggaaaaygtcaaaggagactaagatagaacaacctgaaagtagcagagaaccgcagggatgtgtcccaggagtcaaggaaggaagagatcagttccagccggtggga

SEQ ID NO: 269555 - DNA, 201 bp, Homo sapiens
atggagtagcagaggtccttccagttatgttgtcctatcctctctccaccttgctggctctttctcaccatctcccctacccatccctccatgattctgtmatttttctcctgcctccctctcaagagaaaagcaaaatttctcttataacaggcataaagttgttgctcccatttgaaacagcttatcaaattttatttt

SEQ ID NO: 269556 - DNA, 201 bp, Homo sapiens
taatatatgaacaaaattcaatgtattctcacattttggggtagtccacattaaatcccatggaacctgcaactcttctcaagcagttcagaaagctctcrgcaacatattcagttctgtcgctacataaaatcaaccaggtattcaaagactgtgcatttaaaatcttgcaagttcgaatatccttggaccagtcagcag

SEQ ID NO: 269557 - DNA, 201 bp, Homo sapiens
gccagaacccagggcaaaggctcaagaaacaagcaaaccaaataattctgggatcatgtgataacatctcctactttaatctttaaaataaatttattaawtactaatagaaaaaatgtgacagggtccttacaggtatttccacagcccacagctcgcctccgagcttgcaagtcatctgcatagcgatcttggtggcga

SEQ ID NO: 269558 - DNA, 201 bp, Homo sapiens
cttgtgacagtgaatgagtctcatgagatctgacagttataaaaggagacgttcccctgtacaagctctctctctttgcctgctgccatccatgtaagacrtgacttgcttctccttgccttccaccatgattgtgaggcttccccagccacatggaaactgtaagtccaattaaacctctttcttttgtaaattgcccag

SEQ ID NO: 269559 - DNA, 201 bp, Homo sapiens
aacaattctaagacccatagtttaatgagtactattagccaatgtttaaggcattatccctgattttgcctgtttttaatagctgtctgaacaacagccaygtcaaatgtctgcaaatattaataatcataacaagaagtatgtattgagtatttactatgggtggagatgttcaatgcaccttattttagataattccca

SEQ ID NO: 269560 - DNA, 201 bp, Homo sapiens
agcgctttgggaggccgaggcgggtggatcacctgaggttgggagtttgagaccagcctgaccaacatggagaaaccccgtctctactaaaaatacaaaaytagccaggcgtggcagtgcttgcttgtaatcccagctactcgggaggcagaggcaggaaaatcgcttgaacccgggaggcagaggttgcagtgagccaag

SEQ ID NO: 269561 - DNA, 201 bp, Homo sapiens
cacccaaagataagccaaagttgagaattagcttaaactatggtgcttttcccattaggtacaagataaccaaaataaaggacacaaaaatacactttttwaaaaaaaagctgaagttgagagtatggatatgagtggggggtggatagagaagtttcaagtcccctggctttttttttttttttgagacagagtctcaca

SEQ ID NO: 269562 - DNA, 201 bp, Homo sapiens
tgaggatgtcaattcaacacgagatttgggtggggacagagccaaaccatatcaagggggaaaactggttccaaatgttggggtaacattttctttctctytgggattttgacaattccggtcatcactgccttcctgccaatacacttaaaaataatatttatctatatattattttaaaggtatgtatatttaatttaa

SEQ ID NO: 269563 - DNA, 201 bp, Homo sapiens
aatccaaaatacatacctgatcatgaatttaatggagtaaataaaatagcttaagccaggaagaaaacattttgcaaagggctgctataggctcaaaacayattgttcaattacaaaggtggaaacaattctaagacccatagtttaatgagtactattagccaatgtttaaggcattatccctgattttgcctgttttta

SEQ ID NO: 269564 - DNA, 201 bp, Homo sapiens
ggccctgggtcagatgaaagtgcaacatacaggttaacagtgcaacatacagccttttgacaacagctctcaaaagttgtttacatttcatgtctgagatmttgaagtgtgttagaaagatttaagagtaaattttcccaaaggaaattgttaactcaaagccagtgatatggtttgcctttgtccccacccaaatcttat

SEQ ID NO: 269565 - DNA, 201 bp, Homo sapiens
cagttataagatgaatatgttttggacacaatgtacagcatgttgagtatagttaattatcatgtactattgtatagttgaaatttgctaagagagtagaycttaagtagtctcaccacacacacacacaaatggtaactatgtgaggtaatggatatgttagttaccttgactgtggtaattatttcacaatgtatacat

SEQ ID NO: 269566 - DNA, 201 bp, Homo sapiens
atttttggggatggtatggagagataatgggcgatgtttctcagggctgctttgagcgggattaggggcagcttgggaacctagagtggaagagattaagrtgaaggaagattctgtggtaaggggtgatattgtggggttgttagaagaaacatttgtcatttagaattattagtgatggcctggatacagttttgtata

SEQ ID NO: 269567 - DNA, 201 bp, Homo sapiens
atggattaaagacttaaacaaaagatcttacactgcaaaacttctagaagaaaacataaagctccatgacattgatcttggcaatgattttctgaatatgrcaccaaaaatacaacaatataataaaagtttctgcatagcaaaggaaataattaacaaaatgaaaagcaacttacataatgggagaaaacatttgcaatc

SEQ ID NO: 269568 - DNA, 201 bp, Homo sapiens
agtaaaaggatagaaaaaatattccatgcaaatggaaaccaatagagagcaggggtagctaaacttaggcaaaatagacttttgtaaaaaaaaaaaaaaamcctcacaaaaatcaaagtcgttggataaggataaaagaatcaattcattaagagaatacatcaattttacgtatgtatgcacctaatagttgagcatcta

SEQ ID NO: 269569 - DNA, 201 bp, Homo sapiens
aggtacacgtagctcaaaagttctgaagcaggttcaacccaaagaagaattcaccaagacatattacaatcaaactgtcaaaaatcaaagacagagaatgwtgaaagcagcaagaagagaggcttattacatacaaaggaaccctcataggctatcagcagatttctcagcagaaaccttacaggccaggagaatgagatg

SEQ ID NO: 269570 - DNA, 201 bp, Homo sapiens
aacataagcaactcagcccatcaaaggcccagtttaaacctttccacttgaatgcattcaccatctgtatagcacatccaatagaaatgaaaaccacgtawgtcattttaagttttctggtagccacattaagaaaaggcaaaaaagaaacagacgaaattactttgaatagtgtatattatttagcccagtatatccaac

SEQ ID NO: 269571 - DNA, 201 bp, Homo sapiens
atagtctgataatcagatgggcagaaccagatggcacaaaggtatatctcaaatttaaaaggcacatagtggggttttcctaaagttcagtctgctgaggmcattgtagtaagagctgagcattcctgacccttaatactgggggcctggtgtttttctggttgctttgtttgcttgaaggttgttgttattgtttagatt

SEQ ID NO: 269572 - DNA, 201 bp, Homo sapiens
cttgatgtgtagggaagggagggggcctgaataatccctgaggagtagtagaacagcagatggaacactgagaagttatttccttgaggacagatttccaygatggaaaggaaatgagaggttctaagaggcgggctagtggcttgtactatagcatagcctgcctttgctggtgtgtggtgattatgcctggtggaaccg

SEQ ID NO: 269573 - DNA, 201 bp, Homo sapiens
aataagagaagaagaaaaacaggtattaaaggactaagaattgggaggacccaggacatctaattagagagtgcctaaggaggttcagcatagccttgccrgtaaagattatttattcactttaagagttaagagtggtggtttggggatagcaccaggagatatcagctgtgatggcttggagaaacagtgtaaactggc

SEQ ID NO: 269574 - DNA, 201 bp, Homo sapiens
aaaacaggaatgatgattttcatgtgcgtccatgtaaagagaccaccaaacaggctttgtgtgagcaataaagcttttaatcacctgggtgcacgcgggcygagtccgaaaagagagtcagcaaaggcagataggggtggggccgttttataagatttgggtaggtaaaggaaaattacagtcaaagggggttgttctctg

SEQ ID NO: 269575 - DNA, 201 bp, Homo sapiens
gggtcctgcagacctacaatatcagaacaccattaagaatgagcaccccttaggccgggcgctgtggctcatgcctgtaatcccagcgctttgggaggccraggcgggtggatcacctgaggttgggagtttgagaccagcctgaccaacatggagaaaccccgtctctactaaaaatacaaaactagccaggcgtggcag

SEQ ID NO: 269576 - DNA, 201 bp, Homo sapiens
caaaacgattagtgcattatagattcaacaaatacttaacttttctgaaaatccagttacttgttttatgagcctccaattgcaaactgaaattatctctcattattgctaatgacagtgaagaattttccattcagcatcaaagagtcaaaaaatacctaaaaacatttttccttgcatatagcatattgacaacattgt

SEQ ID NO: 269577 - DNA, 201 bp, Homo sapiens
ttcaagtgttcaaaaactcatgtgctactggctactgtattgggtcctgcagacctacaatatcagaacaccattaagaatgagcaccccttaggccgggygctgtggctcatgcctgtaatcccagcgctttgggaggccgaggcgggtggatcacctgaggttgggagtttgagaccagcctgaccaacatggagaaac

SEQ ID NO: 269578 - DNA, 201 bp, Homo sapiens
acaaaacgattagtgcattatagattcaacaaatacttaacttttctgaaaatccagttacttgttttatgagcctccaattgcaaactgaaattatctctcattattgctaatgacagtgaagaattttccattcagcatcaaagagtcaaaaaatacctaaaaacatttttccttgcatatagcatattgacaacattg

SEQ ID NO: 269579 - DNA, 201 bp, Homo sapiens
gatcctaatgggagtctacattttagtactttaccataaagttttgttttgttttgtgttgaaaaatagtacttccttatcttctccaatgagagtttttgtaacttggatagattattgtaaagatatgacaaggccaggcatggtggctcatgtctgtaatctcagcactttgagaggctgaggtgggaggatggcttg

SEQ ID NO: 269580 - DNA, 201 bp, Homo sapiens
ttacaaaacgattagtgcattatagattcaacaaatacttaacttttctgaaaatccagttacttgttttatgagcctccaattgcaaactgaaattatctctcattattgctaatgacagtgaagaattttccattcagcatcaaagagtcaaaaaatacctaaaaacatttttccttgcatatagcatattgacaacat

SEQ ID NO: 269581 - DNA, 201 bp, Homo sapiens
aaattgatataaataactcataatttcttatgatcgagcaagtagttaaataaacggcaattctagaatcaaaaattgatgtaaaattatttggacatacrggcacaagggtgcaggagcaaaaaaaggtagaattaatttaaagttctgaagccataggccaaatggtgtttcttagtcttgcctactttgggaattatt

SEQ ID NO: 269582 - DNA, 201 bp, Homo sapiens
gatatctacattcccatgttcaatagccaagatagaatcaacctgtgacaactgatggatggttaggtaaagaaattgtgagatatacacacacacacacaatagaatattattcagccttaagaaaatcctgccatttgcaacaacatgaatgaacccacggacattatattaagtaaaataagccagacacaaaaagac

SEQ ID NO: 269583 - DNA, 201 bp, Homo sapiens
tttgtggccccatgtgtagcttttggagcttacgtctaatgtctggtgtggattggctaatgaaacgttgtgccattaataacttgccttcaggagaggamgggaccaaattagtatatattttttaaaggcttcccgcagcctgccgtaaaacacagctgggttttcctccctgccttgtgtaatctgccttactttatc

SEQ ID NO: 269584 - DNA, 201 bp, Homo sapiens
agatatctacattcccatgttcaatagccaagatagaatcaacctgtgacaactgatggatggttaggtaaagaaattgtgagatatacacacacacacacaatagaatattattcagccttaagaaaatcctgccatttgcaacaacatgaatgaacccacggacattatattaagtaaaataagccagacacaaaaaga

SEQ ID NO: 269585 - DNA, 201 bp, Homo sapiens
aaatcctctaattagatataaactaattttatgtcattttccttcctaatgagaataaatatgaaaatctaaggaaatggctttgctgttcctctgaaaayatatcttcacactgactcacccaattgattccaattctcactgagggaatgaactctgaaaacatttctactcactgtaactatgaatttcctaaagaac

SEQ ID NO: 269586 - DNA, 201 bp, Homo sapiens
caaaacttctagaagaaaacataaagctccatgacattgatcttggcaatgattttctgaatatgacaccaaaaatacaacaatataataaaagtttctgyatagcaaaggaaataattaacaaaatgaaaagcaacttacataatgggagaaaacatttgcaatcacatatctgatacggggatgatatccaaaatatat

SEQ ID NO: 269587 - DNA, 201 bp, Homo sapiens
ccctttggttgatggtgatgatgatgatgtaaccctacagatagggctatgtgtcctgcttggaataagatgctttccaaatattttaagaagctgacttwagattattgtcctctcctattttccatttccaacattttcttgaacttgccatttcacataatcactgcagaaaattttgtactgaaacacagacaacag

SEQ ID NO: 269588 - DNA, 201 bp, Homo sapiens
gtttaccatggccagagccgcatccctccccacatggaaagagtcatgcagggcttttataactctccactgggctgcctgagggagatatatttttggcyccatatgccaccaggatccttgtttttgtctcccttgctttttttattagctgttcttcctgtggtgtgtatttgggttctactggggaattgtagaaag

SEQ ID NO: 269589 - DNA, 201 bp, Homo sapiens
aagaatcaattcattaagagaatacatcaattttacgtatgtatgcacctaatagttgagcatctaaatatataaatcaaatattaacatctgaagagagaaacagcaatacaataatagtagggagcttcagtactccacttttaacaacagatagatcatcctgacagaaaattaataaggaaacattggacttgaatt

SEQ ID NO: 269590 - DNA, 201 bp, Homo sapiens
taatgccagtgagaatgagccagtagtgagagagaaaactgatgatgcagaaaggagaagggagaactgctagagcagcatccttcacaggtcagagggawtgagatttagtacagaggtggagcgccttataggaacagacatgctgcactcataataaagggaagggcaggcagagtctatgggtacagatgccgttag

SEQ ID NO: 269591 - DNA, 201 bp, Homo sapiens
tggattgttaaatgcacacagtgagcaggcttgacagacctgcttagccattgaagctgagttaaacccagtaaagaacttgtttaccatggccagagccrcatccctccccacatggaaagagtcatgcagggcttttataactctccactgggctgcctgagggagatatatttttggctccatatgccaccaggatcc

SEQ ID NO: 269592 - DNA, 201 bp, Homo sapiens
aaagaatcaattcattaagagaatacatcaattttacgtatgtatgcacctaatagttgagcatctaaatatataaatcaaatattaacatctgaagagagaaacagcaatacaataatagtagggagcttcagtactccacttttaacaacagatagatcatcctgacagaaaattaataaggaaacattggacttgaat

SEQ ID NO: 269593 - DNA, 201 bp, Homo sapiens
aaaagaatcaattcattaagagaatacatcaattttacgtatgtatgcacctaatagttgagcatctaaatatataaatcaaatattaacatctgaagagagaaacagcaatacaataatagtagggagcttcagtactccacttttaacaacagatagatcatcctgacagaaaattaataaggaaacattggacttgaa

SEQ ID NO: 269594 - DNA, 201 bp, Homo sapiens
tcaagtttcacagttggccctgcagaatctatgaatacaaaaagttggccctctgtatacataggtttcacatcctgagaatactgtatcttcagtctgcrtttgtttgaaaaaaaattgcatataagtggatccatacagctcaaaaaagttgtttcatgctcaactgtatatcttttcctatttttttacttataacct

SEQ ID NO: 269595 - DNA, 201 bp, Homo sapiens
gtgttccagctactgtgtggaagggcccggttttgtctttgttctgcaagaaggaaagcaaacacaagaagcctagcctgggagatagaaacacccatggraggatggaaatctgtgacccctcctccctcaccaacaccacatccaatcagccacgaggcccccctgcttccccaaatccccattgccattacattcacc

SEQ ID NO: 269596 - DNA, 201 bp, Homo sapiens
taaaagaatcaattcattaagagaatacatcaattttacgtatgtatgcacctaatagttgagcatctaaatatataaatcaaatattaacatctgaagagagaaacagcaatacaataatagtagggagcttcagtactccacttttaacaacagatagatcatcctgacagaaaattaataaggaaacattggacttga

SEQ ID NO: 269597 - DNA, 201 bp, Homo sapiens
tatactgtctttactggttttgggattaaattatattgtctcataaaataagttgaatggctttgtctttgtctattatctggaacagcttgtataacatrggaattatcagttctttgactatagtaaaacagttgcaaatctctctggctctgttttcttttgagggaggtcattgttgactactgatgtaatctcttg

SEQ ID NO: 269598 - DNA, 201 bp, Homo sapiens
tacctgttacagtaattatacggattgcctcttaatctgctatgtggtaaattacattgatacattttctaaagttaaatctgtgcattcctggaataaaycatgcttagtcttatttaaaacctatttttctatgctgctaaatggaatttcctaatgttttacttagattttttttatgtcgatgtttacaagtgactt

SEQ ID NO: 269599 - DNA, 201 bp, Homo sapiens
tagttgttgcaattctttttcatgtttaagtctttaagctacatgaagtctctttttgtttttcatgtgagctaggagtctaattttctttctatatgaarcctagctatcccagtatcttttattaagtagttcatcctttcaactgtaatgccaattctactaaatgacagattcatatatgcagcaatttgtttctgg

SEQ ID NO: 269600 - DNA, 201 bp, Homo sapiens
tatgattgaaccggttcatgctcctagcagcaatgtttaagagtttgtttctctgcattctcaacaacagttattactgacagatagtttaattttttccraatgtataagagtgaaattaaatctcattggtgttttatttttaattttccttattactactggtgaagttgagtatcatcttagatatttgttagtgaa

SEQ ID NO: 269601 - DNA, 201 bp, Homo sapiens
ctatcccagttaaagcaaccctttaactctataaatttgggcagtaaacctacacgtcagttcctgcataaatcccctttgttaatttccctaattctcavaatttatgacatatctgaaccctctatcttgtccttagacagctgaatggaggaagggaagaatttggcatgaggaaagaaggtttaagttgtctgaaac

SEQ ID NO: 269602 - DNA, 201 bp, Homo sapiens
gttggaccaacccacagagattgtcagaggcatcagggtgagtctgagataataatcaaagccaggcagatgagcaaccagtttattaacccaaagggackggtcagaggaaaatgtggtttcaaggccttgggactgacactggggactccagagcagggtgagagggttttaaaggctggagctggcaagggggaggca

SEQ ID NO: 269603 - DNA, 201 bp, Homo sapiens
gctatggatagggcacctttcctcatctgctgtctttcccttcttctcttgctttgccactttatctgttagcacccctatcctagccctataggcttccytcctaggtctacacttaacattgctctgtcataactcgagttcctccagggttggtttcttttgaccttcaaactgcttgtcagggaaaccagcagccac

SEQ ID NO: 269604 - DNA, 201 bp, Homo sapiens
aattttatgtcattttccttcctaatgagaataaatatgaaaatctaaggaaatggctttgctgttcctctgaaaacatatcttcacactgactcacccarttgattccaattctcactgagggaatgaactctgaaaacatttctactcactgtaactatgaatttcctaaagaacagggaccatagagtaactgctacc

SEQ ID NO: 269605 - DNA, 201 bp, Homo sapiens
ttgttgagtgctcctgcagaatttggtgtcagtaagaaaagaattacttttctaatgccaacaaaaaataacattcccatatattgcagtgtttaaatggrtttgctatttcagaccactgtaaaatagggcaatacataatttgggttatatttgcaagaatataacaatggataactttagggagcattcctctgtctc

SEQ ID NO: 269606 - DNA, 201 bp, Homo sapiens
ctagcgtcccatctgaggctcagaggggcaggggcggggcggggggtggtggtggtggtgatggtggtggtcttccaagcacacgtggttgttgtcagaaytgatttccttgcagctgtagaactgaagcatcttgcctcttcaaggctaacaggaaagagtgagtctctgactctaggcttcttacttgacattctccag

SEQ ID NO: 269607 - DNA, 201 bp, Homo sapiens
tgtattataatagttattgttattttgtttctatgatagactgctttcctcccactgtggactcaagaagtgattcattcattgattcattcattcattcmttccttctttaggaaatatcaggtattgtgctatatctagggatacaaagatgacgtgtatgataattcctaggtgggactcttgagtatcatatttaca

SEQ ID NO: 269608 - DNA, 201 bp, Homo sapiens
tgggcagagctactcactgttaggacctggaactctcccattataagtcgtaagggcccccacgctacatgccaagctcatcttgggacaaatccaaacasttggggaggtcttaggactaacagaggtatctgaagcgtgtggagaccccaaccacagagtaccatcaaaaccctgtggcccacccaacaccataggcag

SEQ ID NO: 269609 - DNA, 201 bp, Homo sapiens
ttctttatgaatgctttgtgccaccagaaaggtcagcttgtgagcatactgacatggtgctgggacactgactatgccctgaggagaaaaaagtattgatrataattaagagattaccttgttcttcaaagagattttttctgattttactttgtctactggttacacagataatagaatgggcttctgggtaaacaacag

SEQ ID NO: 269610 - DNA, 201 bp, Homo sapiens
aaaacactcatcatctacagtgagagagactgacaagtagagagctgatggcactgagtgtgacaagtgctatgaaagaattaaaaggatgtcccaggagsttagtagaggcacacctaatctattcttgatgtgggggtaggtgaagccaaagtgggcttcccagaggaagggacacttcagctgagcccaaagggctat

SEQ ID NO: 269611 - DNA, 201 bp, Homo sapiens
tgaactttattttcaactatttaaaccactctacaaaatgctctacaacattaagaaaacctcagcaaaatttggggtgggaattagactctgtttatctrtcatcaaaatatcacgcaaacacttattttaagtgtttaacttaagatatttaactctgtggaattctttgtagatgatggtatatttaaattccacata

SEQ ID NO: 269612 - DNA, 201 bp, Homo sapiens
tccatgcaaatggaaaccaatagagagcaggggtagctaaacttaggcaaaatagacttttgtaaaaaaaaaaaaaaaacctcacaaaaatcaaagtcgtkggataaggataaaagaatcaattcattaagagaatacatcaattttacgtatgtatgcacctaatagttgagcatctaaatatataaatcaaatattaac

SEQ ID NO: 269613 - DNA, 201 bp, Homo sapiens
agatttagtacagaggtggagcgccttataggaacagacatgctgcactcataataaagggaagggcaggcagagtctatgggtacagatgccgttaggtraaggtagagataacgagaggtttgcaaaagttctcttctgatagcttcctttttatcagtaaataggaagcaaggtcatcactgggagaagctgctatta

SEQ ID NO: 269614 - DNA, 201 bp, Homo sapiens
aaagccacaaaaggagacagcatgagtgatcaatatgcagtaggagagaaatcaggagagtgttattctacaggccaaataaagaatgtctcagagggagraaatgattgactgggtcaagcaagacaaggaccaagaggtgaccattggatttagcaaagtggaggttattggtggtgttgactaaggcaagtttgctgt

SEQ ID NO: 269615 - DNA, 201 bp, Homo sapiens
tcccgtggtaagcagaatttgaactctgatctatccctcatcaaaatatcttttgcatgtagctgtattctcattcctggggcattccaacatgaaaaggktgagaagatgaggaaaagccacaaaaggagacagcatgagtgatcaatatgcagtaggagagaaatcaggagagtgttattctacaggccaaataaagaa

SEQ ID NO: 269616 - DNA, 201 bp, Homo sapiens
gtatcctctgcaagctggcatatggatgacgtctaactgccagtcttcccctggataagttcccctcctttggactggttttattagagggggcattttgwtgcctggattgttaaatgcacacagtgagcaggcttgacagacctgcttagccattgaagctgagttaaacccagtaaagaacttgtttaccatggccag

SEQ ID NO: 269617 - DNA, 201 bp, Homo sapiens
ggcctccaggctgaatgtaaatagtattttattccaagagccttagcaaccccttgagttatttgggagataaaggattagccattatcactttggagacyctgaggtaacccaaactggggaattatttcttttaagaggaccttagaacctcattagccttttctggggtaacctttgacccaacctaaaagtatctat

SEQ ID NO: 269618 - DNA, 201 bp, Homo sapiens
acagggtcaggggagggagtcggggagtgggtaatgagcacagaattgaagctggagaaggcagggatcacatcagtgaggtcccatgggttgtgctaagygggtgaatattttcctgaatggaagtgactacagtctctgaatggctttatgtaggaagtggcatggccaggtttatattttagtgctattgcttggaca

SEQ ID NO: 269619 - DNA, 201 bp, Homo sapiens
tccatgagattgctgcccacatgaccacaagcacagaggacaaatcacactgagaggcagatgctggatggttgactaagttccctcaacaactattgacsacttcctagaaacctacctcccagcagatgtaatccaaactggagtcctacaaaattaccaaatttttatatgtaatggatgttccatttgcttgataat

SEQ ID NO: 269620 - DNA, 201 bp, Homo sapiens
aaggataataaaagcacctacttcgtaggattgatataaagatgaaatatgataatgcacagaaagtgctcaccacagtccctggcacatggcatgtgctyaaaacctatgagatattatcattcctgataacacactcgttaataaggagatattttggagccagtggatgtggagatgtcttttgtgaatatgtgaatt

SEQ ID NO: 269621 - DNA, 201 bp, Homo sapiens
atagaccaatatttagacatcactttatactttatacatcattttcatatatatccagataatcttctcaataaccctatgagttagataccatgaacccrttttacggaaggggtgaggaggctccttagaaatgggagaactggggctctgcacagcccagcacacagcaggagctctctttgccccccaaaccccctc

SEQ ID NO: 269622 - DNA, 201 bp, Homo sapiens
acatctgcaaagatcttatttccaatatggtcacgcttacaggtactgagggttaggtctcaacatatctttttggagggcatacctcaattcataactcyggcctacttaagcaatttggtgaaggccttgggcagttcagaaaatcatcaaaggaattgttgacctgaaatacctgatctttgaattgaccaatgaagc

SEQ ID NO: 269623 - DNA, 201 bp, Homo sapiens
tcagatcatgccttattacccattttaaaatctgacccacccccagctcagggagacatttgagcatttcctcctctcaggtggccagtggacttgcgatwaacctttctcacagcaaaaacccagtgcttcggtgttggctttccactgcacatgggcaaacagaccccatttggtttcagtgacagcatgatgtaccca

SEQ ID NO: 269624 - DNA, 201 bp, Homo sapiens
cacagaatttgttctctcttgcttctggaggcagaagtctagaatcaaggtctaaaagcaaatctaaaagcaaggctgtgctctctagaatggctctagcrgaggatcagttccgtgctttctcttagcttccagtgtagccagcgaggcttggcatcccttggcttgtggacacttcactcccatctctgcctctgtcac

SEQ ID NO: 269625 - DNA, 201 bp, Homo sapiens
tcacctcactgccagatccaatcagatcatgccttattacccattttaaaatctgacccacccccagctcagggagacatttgagcatttcctcctctcakgtggccagtggacttgcgataaacctttctcacagcaaaaacccagtgcttcggtgttggctttccactgcacatgggcaaacagaccccatttggtttc

SEQ ID NO: 269626 - DNA, 201 bp, Homo sapiens
ggttaaacacagaatttgttctctcttgcttctggaggcagaagtctagaatcaaggtctaaaagcaaatctaaaagcaaggctgtgctctctagaatggytctagcagaggatcagttccgtgctttctcttagcttccagtgtagccagcgaggcttggcatcccttggcttgtggacacttcactcccatctctgcct

SEQ ID NO: 269627 - DNA, 201 bp, Homo sapiens
aattaccatgtctccttaggcctatcttggctgtgacagtttctcagtcttttcttgtctttcttgacctcgacaggtgttttgtagactttccttaaackgatatttttctgatatttttctcatggttagattggagttgtctgcttttgttttaattataattttaagtttggtaaacttttaaattacagaaaaaaa

SEQ ID NO: 269628 - DNA, 201 bp, Homo sapiens
tataaaataatgctaaattatttaaattatttattataaaataaaccaaaagtaaattgatttctttaagccatttacaattaatgtgagagtggtagaakaaaacaacaatgacaaaaggattagaagagcaagacagaaatcttgtttctatatggaagttaactgctagtcagttattatatgaaaagaagatggaaa

SEQ ID NO: 269629 - DNA, 201 bp, Homo sapiens
atcggatccaagatatattatatttaattaccatgtctccttaggcctatcttggctgtgacagtttctcagtcttttcttgtctttcttgacctcgacargtgttttgtagactttccttaaactgatatttttctgatatttttctcatggttagattggagttgtctgcttttgttttaattataattttaagtttgg

SEQ ID NO: 269630 - DNA, 201 bp, Homo sapiens
cttaaccatgtgtttttatggttactatcagagctcagaatctgacctgttgaactgaccaagcctttagagcctggtaattcaacagccttaatagagcragcacaggctttgcatcagcctgacctacgtgctaatcccggaaccaggctaagaaacctaggcaatttctttttgcttgtgtggaaataatacttacta

SEQ ID NO: 269631 - DNA, 201 bp, Homo sapiens
ttttttatcttacaataattttagatttaaagaaaagttgccaagataggacaaagtgttcacatataccctacacccagttttccctattattgtcttayattagtacactgcctttgtaacagttaatgtactaatatttatatgttactgttatcaaaaatccatacctcattcagatttccttaattattattcatt

SEQ ID NO: 269632 - DNA, 201 bp, Homo sapiens
gacagagaagttttgacagcagagctgacactgagctgagctttaagtgagaattagctgagtcagtttcctaaacttatctgaacagccaccagacacamacacacacaaaaatcacctagggacttgttaaaaaataaattctcaagtttcttccctggaaattcttagtatagaactcagttttagcaagcatcccgg

SEQ ID NO: 269633 - DNA, 201 bp, Homo sapiens
atgaaattcttagaatcaccccatttatttaaaagcagcccatctgactatctaagcttccatgcatttatctaaataatggatattgagggcctaccagrtgctattgttcgatgagatcacaaagatatgcaaaacagccagagagaaaaatgtagaaaaaactatgctgcactgttagaagggcaggaatggagttgt

SEQ ID NO: 269634 - DNA, 201 bp, Homo sapiens
ggtaagcactactcatcaaatgcaagtttgggtttcaatagattcccagatgattcaaatatatattcatacttccagtttttctgaccattatccaagcstaaagcaatatattttggaataaattgaatattcccatgcttccttctaaagagataataaaagaggctgatcccacctattgtaaagcaaccagggatg

SEQ ID NO: 269635 - DNA, 201 bp, Homo sapiens
atgaagcccaggcttactgctgaggtttccttcttttcctttctccttacaggccccagacactcagtttgctactgatgctcttcagaactgctactacycaaaccttgagtttctcctttcatccagagaggcctttaaaaattttaatcacccaatgaaagcaggcagaaaacatcaaaaagataaatgtgagagatt

SEQ ID NO: 269636 - DNA, 201 bp, Homo sapiens
ctaactaaatgccacctacaaagagattcacttcagctgtaaggacacacatagattgaaagtaaaaggatagaaaaaatattccatgcaaatggaaaccmatagagagcaggggtagctaaacttaggcaaaatagacttttgtaaaaaaaaaaaaaaaacctcacaaaaatcaaagtcgttggataaggataaaagaat

SEQ ID NO: 269637 - DNA, 201 bp, Homo sapiens
tcattaaacacagtacctgcttttgaagaattcacagtctcacaggagagaagtatgtgtaaactgatggttaaaatacatcacagtgttaggtgttgcasaggggaatgggcaaagcattattagatcatagaaggaatgactaggcatgcagctccttccagactcagcttgggaatcctcccagtccgacggctgtgc

SEQ ID NO: 269638 - DNA, 201 bp, Homo sapiens
ttttaagtacatatttataggattataatataaatgcacagatatcaaggtaccacctgatgaagcccaggcttactgctgaggtttccttcttttccttyctccttacaggccccagacactcagtttgctactgatgctcttcagaactgctactacccaaaccttgagtttctcctttcatccagagaggcctttaaa

SEQ ID NO: 269639 - DNA, 201 bp, Homo sapiens
tgcagacactttgaagggtgagaaaaatggtatttattgggcgaaaagggaaaaaaaaaaaggaaaaacagagactctccggaaagccagagtcctgctastgcacttcctgcctggcgaactgaatcccaggttccacccaggaagagggcggcaggctcctccccactgcaaaccacgcgaacctcccaaggctccacc

SEQ ID NO: 269640 - DNA, 201 bp, Homo sapiens
tcaagattatctgtctttgacttttgacaatttgattataatgtatctcagagtgttattttcttaatttatcttgtttggggtcctttgagcttaccgartctgtatgtatatgtccctcccaagattttgaagcttttccaataggatttcttttattatcattattatttaaatattctttcattatttgtttgtaat

SEQ ID NO: 269641 - DNA, 201 bp, Homo sapiens
cagtgctgctctgaagcctggcacaggctccctttcctctttgtccttggtagcctaaggaaaactaattaatgcatgtgagaggtggcaatcacataacrtgaagctgaaataggtctcatatattatctaaaccagtattcctcagccctggctgaacatcagaaccatttcgagaacttttaaaatattcggatgatc

SEQ ID NO: 269642 - DNA, 201 bp, Homo sapiens
gccaaatactatatgtggcagggttctgtgccaagaaataaagggctctgcaattctcaacattttcatttgacagtggttcaactttctttccaaaagccgtttatcatcctgtaggcacctctgtcataaacaagatgtctttattgagccttccaaagctgataagagttgtatgattcaatcagtgacagagactca

SEQ ID NO: 269643 - DNA, 201 bp, Homo sapiens
gttacttattctaggcttcttgtttgtatccaagaattcttactggctttgtagaattgaagagtttgagtcacttggaaaccattatttcagattggttkatccaactgggcagagtatttgtgaagctgctggggaatttattgatgttaatattttaaatattccaataaataatttgtgctatcttctctctaagga

SEQ ID NO: 269644 - DNA, 201 bp, Homo sapiens
tgagaaaaaaaaatacctttttacatgaataaaagtacatgaaatgctagagggatagactcctcctctgtctaaaatggctgatgtttagagagttgagwtacttattctaggcttcttgtttgtatccaagaattcttactggctttgtagaattgaagagtttgagtcacttggaaaccattatttcagattggttga

SEQ ID NO: 269645 - DNA, 201 bp, Homo sapiens
ttgaccctaacatttgcacagtgtcatcataagggaggcacttaatatagatttgctgaatgaatgaatatgtgaatgaatagtgttgtttggcacaagtrtatttcagcttaacatgtctttttgaaaagtattctgtttgcaacctcacccattgcctcagcttctctggaaatttctccatctcaaaaccacacccaa

SEQ ID NO: 269646 - DNA, 201 bp, Homo sapiens
ctccctgtgcttacctcattatagcatttatcacactgcattgcaattttctgttaatatatctatagtttagttcatagttatgcacttgagagtaaagrtcctatcttatttttatttgaccctaacatttgcacagtgtcatcataagggaggcacttaatatagatttgctgaatgaatgaatatgtgaatgaatag

SEQ ID NO: 269647 - DNA, 201 bp, Homo sapiens
aggcacagatcctgaactaacttgtcaggtttgtctggttttaggacaggtaaaatgggggaattgtaaggagagtttataggctttaaaaggccatgctrtagcaggcgagtgatagcaggctttaatcctttcatagcatgctatgggatgggatattggcattgagcggggtaagggtgattaggttttactgagatg

SEQ ID NO: 269648 - DNA, 201 bp, Homo sapiens
atctttcaggaaagcagagtagtagcagctcataatggctaaggttggaggagtccagagtgtcaaaaataagaggtaacagatggtaatgactctggagkgcgggcagatgtcagatcttgaaagttcaagaggccattccctgcaagattaaagatggagcagccagctaagagtcaccagtccttttccaggccttct

SEQ ID NO: 269649 - DNA, 201 bp, Homo sapiens
ttattttatatacaaagaaactgaatcataggaatgttaaataacttccctagttactatgttttaagtgaaacatttacatatttattcaaaaatatttactaagcaccatccatgtattaaacactgctgtgggcattgtggatgcacaaattaataagccagcccttgtcttccaggatctcagggttgagtggaatc

SEQ ID NO: 269650 - DNA, 201 bp, Homo sapiens
tttattttatatacaaagaaactgaatcataggaatgttaaataacttccctagttactatgttttaagtgaaacatttacatatttattcaaaaatatttactaagcaccatccatgtattaaacactgctgtgggcattgtggatgcacaaattaataagccagcccttgtcttccaggatctcagggttgagtggaat

SEQ ID NO: 269651 - DNA, 201 bp, Homo sapiens
ttttattttatatacaaagaaactgaatcataggaatgttaaataacttccctagttactatgttttaagtgaaacatttacatatttattcaaaaatatttactaagcaccatccatgtattaaacactgctgtgggcattgtggatgcacaaattaataagccagcccttgtcttccaggatctcagggttgagtggaa

SEQ ID NO: 269652 - DNA, 201 bp, Homo sapiens
tttttattttatatacaaagaaactgaatcataggaatgttaaataacttccctagttactatgttttaagtgaaacatttacatatttattcaaaaatatttactaagcaccatccatgtattaaacactgctgtgggcattgtggatgcacaaattaataagccagcccttgtcttccaggatctcagggttgagtgga

SEQ ID NO: 269653 - DNA, 201 bp, Homo sapiens
ttaatttaaaaacatatatacatgcaaataatacgtatatattattttaaaggcatgtatattatatgtgtgtgcatattatatatatatacacacacacmtagttttatagttctcagcaacatggttattttaattcaagctagtccacgagagttggaaaataaaatacttatttttattttatatacaaagaaactg

SEQ ID NO: 269654 - DNA, 201 bp, Homo sapiens
ttattccctttctcattcctccaagagcctcaagaaatttagcccagttgttccttcctgcgggggtgtcttggtctcaattaggatgcgtagtgggaacwgtggctgggcctgggtgactgcctttacggttttgggtgaataattcgtccacttctcggagggcagcctcaaagattcgttccttttccgaggaggtgc

SEQ ID NO: 269655 - DNA, 201 bp, Homo sapiens
cccaagattgaggatgtcaattcaacacgagatttgggtggggacagagccaaaccatatcaagggggaaaactggttccaaatgttggggtaacattttytttctctttgggattttgacaattccggtcatcactgccttcctgccaatacacttaaaaataatatttatctatatattattttaaaggtatgtatatt

SEQ ID NO: 269656 - DNA, 201 bp, Homo sapiens
agaaaataccttgaggggtgtatcagtctgttcttgcactgctataaagaactacctgagactgggtaatttatttttaaaaaagatgtttaactggctcwcagttctgtgggctgtaccggcttctgcttctggggaggcctcaggaaacttacaatcatgttgaaaggtgaaggggaagcaagcacgtcttcaatggca

SEQ ID NO: 269657 - DNA, 201 bp, Homo sapiens
gaacagacttttcaaaagaagacatacatgtggccaacaggcatgtgaaaaaaaaactcaatatcaccaatcattagagaaatgcaaatcaaaaccacaargagataacatctcacaccagtcacaatggctattattaaaaagaacagggctgggcgcggtggctcacgcctgtaatctcagcactttgggaggccgagg

SEQ ID NO: 269658 - DNA, 201 bp, Homo sapiens
tgattacttttccagttcccagaaccttccacaattacgtggagtaatagaatcaccaaactgacttctagcagtccttgtgtcttttctgcctctgggcrggacaataaaggcacaaagtatttttccaagaacaataggacacaatacctggcaaggcacaaaacgtgtatgcgcatggctgagaatggcctgggaacc

SEQ ID NO: 269659 - DNA, 201 bp, Homo sapiens
atgtgcacacccagctgagtcataatagcaactggcctcagccacaactttgctctgaaatcggagcaggcactgggagcaggaagaggccaggcagcagragcaggcacttccaagcctgtgggggttgaggggggttgccaggcccctgagagcacagagatgcccagtctgcagccatggctgggtggctgcagctgc

SEQ ID NO: 269660 - DNA, 201 bp, Homo sapiens
actgtccttggcctaataaatgacttgagtctctcgaccttctattgaaagtcaactcacttcattcacaccccagcattcttcctatcaaatctcatgcrtgttctagttcacttgtaattagcaaaatgtacgaccttctccagagacccccacagcctgtttacagtctcctcccagaggcctctcagaagctggcaa

SEQ ID NO: 269661 - DNA, 201 bp, Homo sapiens
cagccctcatgtttcaggtcatcccttgcttgaaggtgggacatcacatgtggcatgcccctttctgcccaggagcctgtctgcctcctgttgccaacaayatgttgtccacagcgcacaggctgtttgtgctgaggggttcctgcaggcctgctccgagctaccctcagccctgcctttggcctcccttccatgatcatt

SEQ ID NO: 269662 - DNA, 201 bp, Homo sapiens
atgccacgatggatacctcccccctaccagcccccatcttctgcctatcactggggatccctgggtgagcacaggccatatgagctgagtactagattaargatcttccaattaagccttgcccatactctgaaccccaagaagtgtccttttgggggaccttgattttccctctggtataactaagaccctcaaaaggac

SEQ ID NO: 269663 - DNA, 201 bp, Homo sapiens
gtcggggagtgggtaatgagcacagaattgaagctggagaaggcagggatcacatcagtgaggtcccatgggttgtgctaagcgggtgaatattttcctgratggaagtgactacagtctctgaatggctttatgtaggaagtggcatggccaggtttatattttagtgctattgcttggacagccaaatggaagacagtc

SEQ ID NO: 269664 - DNA, 201 bp, Homo sapiens
ggataagacatcatcaaagaagaatatagagacagagagtagaccaagggaggccctaagtactctggcatgtagaggctggagagataaggaagaaccarcaaaggggaccgagaaagagactccagtgaggcgggaggagaaccaggcaaccacggtggcccagaaacacaaaagaaagaaatgggatccactctgccc

SEQ ID NO: 269665 - DNA, 201 bp, Homo sapiens
ctgtcccaatgcccagcggctttttaaaactcgcccagcaggtgacaggaccatcaaccccatgactgcagatactaacagacctatgtgactggctggccgaaccgtctcagcaactagatggtcctgactcatccaattcaaactctcgcactctgactctgctgcacttacagtccactcctaaaatcatcaggtgaa

SEQ ID NO: 269666 - DNA, 201 bp, Homo sapiens
tgaattaggatgtgcttgtatagtccaggagagacatgaggtttatttgatctagggtagcaatggtgaaaagtggctatattctacagagatgttgaagwtagagctaacagaatttcctggaagattggatgtgaagcataagggaaagaaaggagttaaggaagactccagggtttttgtctaagcaactggaaggat

SEQ ID NO: 269667 - DNA, 201 bp, Homo sapiens
atgtcatcttatttggtatttcatatttatcatattcttttttctttgctccccctcttctcttttcctctattgaattgatagtatcccagtaaatcaartaagcagtccattagcctgaggctggctgtgtacttcgagatcctgtgtaagaaaccacaacctaactacagttgactcttgagcagcaagggtttgaac

SEQ ID NO: 269668 - DNA, 201 bp, Homo sapiens
atggctggttctgccactgctattgtaatgttatgcaagtccttcagtgggcctggaccttggctccttcctcggtaaaatggactgatggtaatcacagygaatattttccaggtgcttcctacatgccaggcactatcctgagtacttcaagtgtctaatctatcctctcaacacctccataaattatatatgcaaagc

SEQ ID NO: 269669 - DNA, 201 bp, Homo sapiens
aaagtctccctgtttacttgtggatttaaaaagttggtaagtttctctttgtaatccttgcagttttacttttgtgtttcaaagctatagttaaaacataygcaataattcatgattgctatatcttctggggctttgtttttgctacttttataaatatataatgtccttactttcacccttaaattcaatttcatttga

SEQ ID NO: 269670 - DNA, 201 bp, Homo sapiens
tgacctcgtggtctgtccgcctcggcctcccaaagtgctgggattacagacgtgagccactgtgcccagcctggactcagttcttagccagctgttggacygaggatctcagaggcctttctcagtttcctaccacagggcagttcacgccacatcagttggcttctttcagagcaacgaaggcagagggtgagaaagggc

SEQ ID NO: 269671 - DNA, 201 bp, Homo sapiens
atctgctatgtggtaaattacattgatacattttctaaagttaaatctgtgcattcctggaataaatcatgcttagtcttatttaaaacctatttttctawgctgctaaatggaatttcctaatgttttacttagattttttttatgtcgatgtttacaagtgacttggcatgtcgttttcttttttatactgtctttact

SEQ ID NO: 269672 - DNA, 201 bp, Homo sapiens
aacttcttcgctaccccatggtacaaaactcattttcttttatgtgggtctcagcaaagataaaagatgctgttaccagaaaggggtcccaatccagaccycaagagagggttcttggatctcgcacaagaaagaatttgaggcaagtccatagagtaaagtgaaagcaagtttattaagaaagtaaaggaataaaaaaaa

SEQ ID NO: 269673 - DNA, 201 bp, Homo sapiens
tcgcttgataccaggaggtggaggttgcagtgagcagagatcacgccattgcagtccagcctgggtgacagagcaagactccgtctcaaaaaaaaaaaaaagcacaaaattatgctctctggtcttattttcgattcatgtccactaaaatcaaatggagctagtgcagcccagcaatcactctgcatttgcctgtttatt

SEQ ID NO: 269674 - DNA, 201 bp, Homo sapiens
taaaggaacttcttcgctaccccatggtacaaaactcattttcttttatgtgggtctcagcaaagataaaagatgctgttaccagaaaggggtcccaatcsagaccccaagagagggttcttggatctcgcacaagaaagaatttgaggcaagtccatagagtaaagtgaaagcaagtttattaagaaagtaaaggaataa

SEQ ID NO: 269675 - DNA, 201 bp, Homo sapiens
ctagtcaagtcttcccacatggagtatgaaagctgagatttcttgaggtaatacgattcaaatttggtaacatcctaattggttcagaccctgttttggcytaatactatggtaatattcactaggcaaagagaaggttgttgggacattggggcttagtctttgagggggaatttcctgagggggtgggtgaggggagtc

SEQ ID NO: 269676 - DNA, 201 bp, Homo sapiens
ggcatgtgccaccatgcccagctaatttttgtatctttagtagagacgaggtttcaccatgtttgccagaatggtctcaaactcctgacctcaggtgatcygcccgcctcggcatcccaaagtgctgggattacaggcatgagccagcgtgcccagccaaattttttctcttttgattttaaaagaaattaaaacattttc

SEQ ID NO: 269677 - DNA, 201 bp, Homo sapiens
acctccaacaggaagtcccccattccaatgacccagtgatgtcattttgactttcctcagctgtaagcactttcctttgtgagctctttcttccattacargaaaaaattctctctctctctgtctctctctctctttttttttttttaatagatggagtctcactcttgccgcccaggctggagtgcagtagcacgatct

SEQ ID NO: 269678 - DNA, 201 bp, Homo sapiens
agatatcaaatttgggaggggccaggggcggaatgatatggtttggctgtgttcccacccaaatcttatcttgaattcccacatgttgtgggaggtacccmatagaaggtaattgaatcatgggagcaagtctttcccatgctgttcttgtgacagtgaaaaagtctcatgagatctgatggttttaaaaagaggggttcc

SEQ ID NO: 269679 - DNA, 201 bp, Homo sapiens
gatgctggcacaggtgctggctccatgtgagactccagctggaccagatgtaccacatgcagcttccactgcgggcacccatttctgaatgaagggaacayagtggtgcctggaatcttggagacaccagggactgcagagccccaaagagggtgtcatagccctggctcagggagcccctagttctgagctccgtgaagg

SEQ ID NO: 269680 - DNA, 201 bp, Homo sapiens
gtggggtctggccactgtgcacatccaggcgtgctgactgctgtggcagagcaggcagctccagatgctggcacaggtgctggctccatgtgagactccarctggaccagatgtaccacatgcagcttccactgcgggcacccatttctgaatgaagggaacatagtggtgcctggaatcttggagacaccagggactgca

SEQ ID NO: 269681 - DNA, 201 bp, Homo sapiens
acatgactccgaaataattttttatatttaacaagcaagtatatcaatttactatgcaccaggcattattcttagcattaaacacatattaacacatttartagtgtcacgggatccttggggtgtcgctttgccagctggaaacctctgtggctggtggcgccttctgcctgagtattgcttgcaccaactgggttcgtt

SEQ ID NO: 269682 - DNA, 201 bp, Homo sapiens
gacagagtagggactcctcttaaaggcctgctgtccccagctctaagcatggaaataaaggaaaatcttgggttcattcaggggaaattccaggtacccargtagtcctgagaagtaaatgagcaacttgataagctagaaggtaataatagcttaaaacacgagccaaggaagttagagtcacgagatgttccctctaca

SEQ ID NO: 269683 - DNA, 201 bp, Homo sapiens
cccgtctctattaaagataaaaaaaattaaccaggcatggcagcgtgcacctgtaatcccagcaactccggaggctgaggcaggagaatcgcttcaacccrggaggcagaagttgcagtgagccaagatcgcaccactgcactccagcctgggtgacagggcgagactctatctcaaaaaaaaaaaaaaaaaaaaaaaaaa

SEQ ID NO: 269684 - DNA, 201 bp, Homo sapiens
ctcccaagcagctgggattacaggtgtgcaccgccatgcctggctaattttttgtatttttagtaggaacggggtttcaccatgttagccaggctggtctygaactcctgacctcaggtgatccgcccaccttggcctctcaaagtgctgggattacaggcatgagccatcacgcccggcctggctaactggttttattca

SEQ ID NO: 269685 - DNA, 201 bp, Homo sapiens
ggaaagatgtcacatttgaaaaaaaatttcattaagaatgagctttccatttgggaaaccagtatcacaaaagagcctgtgacaatgatgctgttcttaawttatttctcacattttcttgcaccttactcacttcagtgaaggtattcataacacatatgatagaagtccagaatcatatacatgctttaaggaccagac

SEQ ID NO: 269686 - DNA, 201 bp, Homo sapiens
aagattttcccataatatttaaatggttgttctccctctctaaccctaagtgtatatgactgaatttgcttcatactgaacctttactatgtgattcagckgcatttttatcatcttaagacctaactagaatttctctttaggtaaaaacctttatgtggaaattttttttttttttttgagatggagtcttgctctgtc

SEQ ID NO: 269687 - DNA, 201 bp, Homo sapiens
gggagaactggggctctgcacagcccagcacacagcaggagctctctttgccccccaaaccccctctcagggtcctttgaagagtaagctctcctcatgcrttctacattcatgaatttagggaatgttgatctgcagctttttggggaagatatttactgtgtaaaacaaaacttacctctgcttgtggccaactctaaa

SEQ ID NO: 269688 - DNA, 201 bp, Homo sapiens
gacttttgtccgtgaatgggtgcagaattctagctgttattagggaatatgagtgagtgaactcctattttgccgtcttactgatgtcacgtcctgacaayaaaataaagttctattgtttaaaccacccagtttgtggcactttgttatggcagatttagcaaactaatacaagagctttcaagggaatactaccaaaca

SEQ ID NO: 269689 - DNA, 201 bp, Homo sapiens
atgcaattataccttcctcatgctaattattccataaataatatggttagttctaaatggacttaatactaaaaaaaaattggtaaaataatagataccawtttatagagctttaccaaaacgaaccaaaaaaatattttcaaagaaagcctaggtgcttcttcctagtttgcaagtcaagcttaatctaaatggtgattt

SEQ ID NO: 269690 - DNA, 201 bp, Homo sapiens
aagatgatgaactgactaggcacattttcagttttcatagctgatagggtgattatttttatttatttactttttaaaagttctcttaaaaattatttcartagctttgggggtacaagtggttttttgcaagagtgattaaagaacaagaatgcaacaatgataacagaaatctgacccagcttggtatgtgaaaaatcc

SEQ ID NO: 269691 - DNA, 201 bp, Homo sapiens
gggctggtgctaaggtgaggctccatttcaggattcacagccagtgggcctattaccaggtgtgctgatgggtgtagcttcctgcagacctctgggaagcstcccattggatgactggatggttctttactttactgccctagtctatggctgaggtaggctgtaactaaattgcaaggctcccacaaggagacttttgtc

SEQ ID NO: 269692 - DNA, 201 bp, Homo sapiens
taactctggcctacttaagcaatttggtgaaggccttgggcagttcagaaaatcatcaaaggaattgttgacctgaaatacctgatctttgaattgaccartgaagcaagatgatgaactgactaggcacattttcagttttcatagctgatagggtgattatttttatttatttactttttaaaagttctcttaaaaatt

SEQ ID NO: 269693 - DNA, 201 bp, Homo sapiens
ctaattcttcttttttttgagacagagtcttgctctgtcacccaggctggagtgcagtggctcgatcttggcttactgcaagctctgcctcctgggttcaygccattctcctgcctcagcatctcgagtagctgtggctacaggcgcccgccaccacacccaactaattttttgtattttttagtagagacggggtttcac

SEQ ID NO: 269694 - DNA, 201 bp, Homo sapiens
aactggacaagtcattaacctctcttggcctcaacattctcttctgtaaaatgaaagggttggaccagttctctggttctcaatcctgattacaagttacmatgatctggggcatttaaaaaaaaaaaacaccaaagcccaagccccaccttgtatcaatcaaatcagaagcactaggggtgggatctaggtgttggtatt

SEQ ID NO: 269695 - DNA, 201 bp, Homo sapiens
tgctccataacctgcaggtgttccaggctcagcccagagacacagtcctcagctcagtgcagaccctcatccctgagtccatggcactacacagctcctgsgaagctgttcatgtagactttaatgtgagtgatgcctctcagggttgacaatgcacaacctgtgcagctgtccatgacagcactgctcactgtttcttaa

SEQ ID NO: 269696 - DNA, 201 bp, Homo sapiens
tgagtttcctcatcagtaaagtggcggtagtaacaatctcacagagtcgttgggaagatcaaatgtgtatgaaaatgctttgcaaatgccacagaaatgcyagggtttgttaaggtgacaatgttgattattaaaacagcatcctgtgtctcctacaagtttattttgttgttttctcattttacgtcctcacaattctct

SEQ ID NO: 269697 - DNA, 201 bp, Homo sapiens
actttaaggaactaattgaaacaagtgccagtaggagatcacagataatggattccattatatgcatctgttcactacagagtacgcaagaaaaatagacmaaaaggatcaaacttctcagaaaggtggagatgcagagtaatgttgtccttagaaactgacagacaggaataaaatggatagaacgcagctctggagtat

SEQ ID NO: 269698 - DNA, 201 bp, Homo sapiens
cagatgcgttatcaggagccctggctgccacacttgataggtatgggccatatcgcaggtcctgctgaccctgagtttcctcatcagtaaagtggcggtartaacaatctcacagagtcgttgggaagatcaaatgtgtatgaaaatgctttgcaaatgccacagaaatgctagggtttgttaaggtgacaatgttgatta

SEQ ID NO: 269699 - DNA, 201 bp, Homo sapiens
atccacaacttcttatgtgtcctagtaggaatttttaaggcatattcaaatgtgtatacgaattgtttaaacaagttggatattattattatggattccarattaaaggcaaaaatttctaaatgaaattttgctccactcccaaacataagctggggtatgactgttttctgtttaggaaggcaagaaagtatattaaaa

SEQ ID NO: 269700 - DNA, 201 bp, Homo sapiens
gtcaaaaataagaggtaacagatggtaatgactctggagggcgggcagatgtcagatcttgaaagttcaagaggccattccctgcaagattaaagatggarcagccagctaagagtcaccagtccttttccaggccttcttcccaaccattctttccaagactgccctaggacatcttcccactgtgagttttgaaacttt

SEQ ID NO: 269701 - DNA, 201 bp, Homo sapiens
ctcactcataatcacaagaagagcaagggggaaatccacccccatgatccaatcatctcccaccaggcccctccccaagattgaggatgtcaattcaacaygagatttgggtggggacagagccaaaccatatcaagggggaaaactggttccaaatgttggggtaacattttctttctctttgggattttgacaattccg

SEQ ID NO: 269702 - DNA, 201 bp, Homo sapiens
caaaaatacacttttttaaaaaaaagctgaagttgagagtatggatatgagtggggggtggatagagaagtttcaagtcccctggctttttttttttttttgagacagagtctcacactgtcacccaggctggagtgcagtggcacgatcttggctcactgcaacctccacttcctggggtcaagcgattcttgtgcctca

SEQ ID NO: 269703 - DNA, 201 bp, Homo sapiens
tgcctcccacatcccaaagctgtgcgtgttaggttcattggcatgtctacaaggtccacgtctaagtgaatgttggtgtggatgtgagtgttccctgcaayggaatggagtcctgttcaggaagggttcctgagctgctgggataggctccagctacccatgaccctaaactggaaaatgtgggtaaataattatcttact

SEQ ID NO: 269704 - DNA, 201 bp, Homo sapiens
atgcttgctgtgaaatactgtaaatggtaatggttccaagcattagtatctaaatgtccaagcattagtgtctaaattttatcaatgagaagccacagtcygaagatttgcctaaactcatcctgcaagtcagctgtaaaaattagtttttcagttattcagtcttgtctgtggctgtaacttaattttttaaatgatttt

SEQ ID NO: 269705 - DNA, 201 bp, Homo sapiens
atcagaagggcaacaggtaggtaaaatgtggtagacacatggagtggattactaggctaacattcaggaataatgacctaaaaatatatttagcaacatgrataaatcttaaacacattgtattgaataaaggaaaagcttaaaaaaagattgagatctatacaatggtaaaatattacattaatttttaaaacattaagg

SEQ ID NO: 269706 - DNA, 201 bp, Homo sapiens
aatctaaatataagactcttctggttaaaaaccttcaaggcttcccattactcttcaaatcgtggcaaacatttttaagcagagctttaaggcagttcgtrgtctggtccctgcctgcctccctagcctcatcttgctccatttctccttttttccaccctaccctacaatcacgttaacagatttttctcttccacaaac

SEQ ID NO: 269707 - DNA, 201 bp, Homo sapiens
gctttttgggtctttttaaaagaaaattccacctgtcctcagtttacaaggacaaggacattatataatattttcttttcattaacttcgtaagtgtactrttcacagcaagtatcttcaatccctcaggtatttacactcacacatatgtaagtatacatgcaatgtgagtgagatagaagtccaactttatctccatat

SEQ ID NO: 269708 - DNA, 201 bp, Homo sapiens
tgacccctcctccctcaccaacaccacatccaatcagccacgaggcccccctgcttccccaaatccccattgccattacattcaccattatcctttgctgkgaatgttgcaacagctcctgatttattgcccactttccacccttatcttcgtcagcctccagcatcattcctaaacagcagccagtgtgatatttaaaaa

SEQ ID NO: 269709 - DNA, 201 bp, Homo sapiens
catgttctctcttataggtgggaattaaacaatgagaacacttggatgcagggtggggaacatcacacaccagggcctgtcgtggggtgggtgaagggggsagggatagtattaggagatatacctaatgtaaatgacgagttaatgggtgcagcacaccaacatggcacatgtatacatatgtaacaaacctgcacgttg

SEQ ID NO: 269710 - DNA, 201 bp, Homo sapiens
aatgtaaggacaattgttttttaattctaaataattctcttgtcactgtcacagcagcagtcttggtgttcagaagctgtggtaagaccagtggacttaayatcaagacaggagtttgagcatcttatgtaacatgacattgacccttttgtatagtctaaaaagttatttattttttctttctggggaaaagtttgatgt

SEQ ID NO: 269711 - DNA, 201 bp, Homo sapiens
gcgggaggagaaccaggcaaccacggtggcccagaaacacaaaagaaagaaatgggatccactctgcccaaagacgtggagtctgtggattgcttttcaartttagtgatgggaggccatagaagaataggttttcaacatttagggctgtgcctaaagatctgtgtccagaaaatttgtcatgagaccatcaagaattcc

SEQ ID NO: 269712 - DNA, 201 bp, Homo sapiens
gagggctggcttgaacatagtgttctgacaccaagtggcatgtgataggtactcaataaatgcttgatcaattgaggaagcacatcaataacaggccctcrggtggtgattctgtgggaattttattttacttgtgtaattgtgaatgttttccaaattccccaccatgagtgtgaattacttttataatcagaagttcaa

SEQ ID NO: 269713 - DNA, 201 bp, Homo sapiens
gaattttccattcagcatcaaagagtcaaaaaatacctaaaaacatttttccttgcatatagcatattgacaacattgtctctcacacctgttgaatgttyttcctctgtgcctagtactatgctacccttgaatgcgtgtcttactttttataataacctgtgagatagaggttttttaaattgtcatttgtgacacaga

SEQ ID NO: 269714 - DNA, 201 bp, Homo sapiens
aggagctggagggaggggggaatgggagttattaattaatgagtacagagtttccattttgcacagtgaaaaaagatctaaagttggatggtggtgatgaytgcacaacaaaataaatgaagttcatctcccaagactgcacatttaaaagtaatttaaatggtaaattttatgttatatatattttaagataaataaata

SEQ ID NO: 269715 - DNA, 201 bp, Homo sapiens
agtggttagaccaaacaatctcagagaagaccctcagagattaaggggaaggctgcggagagaggaaggaactgtcatttttccgacgtgaaaacagacarggtttctgggcttctgttttctgcagacacatggaggccatgtgtgcttccgggacttccagccccttacagacatttttattcacatcttaaaagtcta

SEQ ID NO: 269716 - DNA, 201 bp, Homo sapiens
gtgtatcctaaaaatgtgaattttcaggcctatctgtgaacttctgtttactaactagattcagtgaaggtccagggaatatgccttttatggagctccaytccacccctaagaagacgctggagtatgtgatccttagaccagtctgcagaacactgaagagctgagctacaaccatgtaggtgtgggggaaagaaatgg

SEQ ID NO: 269717 - DNA, 201 bp, Homo sapiens
tggtaaatatcagtcagtaacagtgtaattctaagttcaaacccttactgaacataatgttaaaaatatataggaaatacagacctctcattctcacaggwctgcaaggtttagatactaaatatacatatgaatgtctataaagaactatcacttcttcatatttgagaatactacaactgaaattatttttatctgtct

SEQ ID NO: 269718 - DNA, 201 bp, Homo sapiens
aaaatacagctcatcctgctttcattattacttattacacacagaaaattcagtttctgaattccttctaggatttgtgataattatctatcacactaatrtaagaaaacaaagctgctagcttcacgttcacatgaaccattttattaaaaaaacttgaaaattataaaaaattcattacatttcatatcacagagtctc

SEQ ID NO: 269719 - DNA, 201 bp, Homo sapiens
tgtgaggacaaaatttcaaacatggagcttatgttacaaataaagagagtgaagccactgaggttgagggctggcttgaacatagtgttctgacaccaagyggcatgtgataggtactcaataaatgcttgatcaattgaggaagcacatcaataacaggccctcgggtggtgattctgtgggaattttattttacttgtg

SEQ ID NO: 269720 - DNA, 201 bp, Homo sapiens
aaggacgaattgggtgctttatagagagcacgctgacactctgaatgaacatatggaaactccgtcatttttcctccaccaagcagaaggccaaacacccyactcccattttctatcttttatgcacttctccctttatgaatctacgtttgggctaccagttgcctctctgtctatagtttgaccacagtatttttgaga

SEQ ID NO: 269721 - DNA, 201 bp, Homo sapiens
ggaacacagcctacagtttcttcccacataaacttaaaaatcttgaataagaagttacagaaatggcatgaaataatagactactattttaaaaaataatkccagtttatattttgtggactattaagtagacactgtgatactaagccagcctccgggacaggcatatgtgctgagcacctagggcagtttagtacaatc

SEQ ID NO: 269722 - DNA, 201 bp, Homo sapiens
cagatatacaagagaaaccggaacacagcctacagtttcttcccacataaacttaaaaatcttgaataagaagttacagaaatggcatgaaataatagackactattttaaaaaataattccagtttatattttgtggactattaagtagacactgtgatactaagccagcctccgggacaggcatatgtgctgagcacct

SEQ ID NO: 269723 - DNA, 201 bp, Homo sapiens
tccctggcctctacccactagacgccagtagcagcctcccagctgtgacaaccagaaacgtctccagacaatacaaaatgttccctgaagaggggggggawatgtccctgcctgaaaaccgtaactataggaataatacatttatggagtgatctgtccccgcaggaaaacatctaggttcagaaaagcaccccaattcaa

SEQ ID NO: 269724 - DNA, 201 bp, Homo sapiens
gcagcatttccctggcctctacccactagacgccagtagcagcctcccagctgtgacaaccagaaacgtctccagacaatacaaaatgttccctgaagagkggggggaaatgtccctgcctgaaaaccgtaactataggaataatacatttatggagtgatctgtccccgcaggaaaacatctaggttcagaaaagcaccc

SEQ ID NO: 269725 - DNA, 201 bp, Homo sapiens
ttggcaccactgacattttgaactggataattctttgttagggaccgtcctgtgtactgtaggatgtttagcagcatttccctggcctctacccactagaygccagtagcagcctcccagctgtgacaaccagaaacgtctccagacaatacaaaatgttccctgaagaggggggggaaatgtccctgcctgaaaaccgta

SEQ ID NO: 269726 - DNA, 201 bp, Homo sapiens
gcttaacatgtctttttgaaaagtattctgtttgcaacctcacccattgcctcagcttctctggaaatttctccatctcaaaaccacacccaagctgcctrtgcttcctggccctgttctggcctcctcatccagtctaacttgcctacattcccccacgtcttctcacacttcagcttacatacctgcccttgtacccag

SEQ ID NO: 269727 - DNA, 201 bp, Homo sapiens
gtgcacaggaacaaatgacagttggtttttgggtggaatgcatccaaatttcctctctcaaagcttcctgtcttccctttggcgactatctcattgtgtgmagcagtcttggttggaagacataccctggtgtagtgcagaaggtctgcaaatgtttgttgccatataagttaccctgttttagaggtgggcacatcagag

SEQ ID NO: 269728 - DNA, 201 bp, Homo sapiens
acaagctgtacataaagcatagtgccagcatctgcttctggcgagggcctcaggaagcttataatcatcatgaaaggcaaaggggggccagggtgtcacayggtgaaagagggagcaaaagagagagatcaagagacatgccaggctcttttaaaccgccagctgttgcacaaactaacagaacaagaactcactcattac

SEQ ID NO: 269729 - DNA, 201 bp, Homo sapiens
tctgtgaatattgggtggcgggcattttcagtttcctaacaataatacatacctcactggattgttaggagcagcgaaataggtaaggtatgagacagacsaggcacagtgtctagcacacataggtacataataaatattcattttctggctgggaatggtggctcatgcctgtaatcacaacactttgggaggcagagg

SEQ ID NO: 269730 - DNA, 201 bp, Homo sapiens
cacttcaagggtagtatttaataatttcaacgtatctaaatttctaaactagtgctagaaatgtatctacaagaacatttttaatggtaacaacagacttraaatatatcatttaagtatgagaagccatattagcgtgctatcaacatctggtcataggacaaagaattgaaggatcaataaaaaattatggtgaataaa

SEQ ID NO: 269731 - DNA, 201 bp, Homo sapiens
attaagacaacaaaggatgtcttaatcctttgggatgagtggttgaggggaggtggcagcagatggtctcaggaactgcattttcaacaaccacctaagakcaaactcttcagccccgccttgtacctctcccaccaaacacccactcctgtttcacttcctacatctcctattggacctcagaccctccagtccccaggc

SEQ ID NO: 269732 - DNA, 201 bp, Homo sapiens
agccatcccttttcgtttcttggccttcagaaggcacccgagagtggccccggccagctgtcctcaattaaccgggagctactaggagtagctgaaagacmgaaacaggaaaaagaaaaataactcagtaaaagggagaaaggaataggactcagaaaaacaaaaccaaggaaaaggactcaggttgcccacccagccggg

SEQ ID NO: 269733 - DNA, 201 bp, Homo sapiens
tgagttctcctgttttaatgccctttctcctatggacaccagtttctacaccaaaaaaatgcaaacaaatacataaaaatgaaaggctctgggaaatacgrctttacttatagaaattatgagatggatcattttaagtacataagtccttcttcacatgtggatctgaaactgagcttctctttactgaactctcgccaa

SEQ ID NO: 269734 - DNA, 201 bp, Homo sapiens
gacccaaattttacccggggcattcccctggaaaaattctgggcccagcacggggtccctgagggcttcccccttaagggtctgacttagtctgttgcacrtctccaaccttagatgggtgccggcaccactttggaatggttccctcctccactgaggacctactgttaacttttccttgaggattttctatcccagtta

SEQ ID NO: 269735 - DNA, 201 bp, Homo sapiens
ccactggctgggctggattcagccccaggagtccacctacctcggcctgagagcaaaggagaagggctagctttccatcaatggctccctctggagtcaamgttcattcctgtccattagggcatgaggagagctgtactccttctgcccacaacatttcttcctgctgttgtcttatggggctgggaggagacccaggac

SEQ ID NO: 269736 - DNA, 201 bp, Homo sapiens
attctccagggccaggagccacaactggtgcttttacattgacggcaggggactggcgggggcttagtggattcctgtgcccaatcgcacttttattgcayttgaagcaagagcctttgctggcattatccttatggccctttgagtttcccttggacaatctttgtgcatttagggcatcaccagtgatggctaacataa

SEQ ID NO: 269737 - DNA, 201 bp, Homo sapiens
gaggtatcttatacttgtgggttaaggtgggggaatacaagaagaggacgcaaaggaggctttggattgggaagaagggtggcaatgagatgtagctgtartccaggaatagtcagggaagcagataatttagttaaagtgtctcagcctaataagggaactgggcaggtggggataactaaaaaggagtgcttaaaagag

SEQ ID NO: 269738 - DNA, 201 bp, Homo sapiens
ccggttgctctcaaaaccttgtctcctgataagatgttatcagtgacaacggtgcccgaaactttattagcaattttaatttcgcccggtcctgtgatccygccctgcctccatttgccttgtgatattctattaccttgtaaagtacgtgatctttgtgaccgacaccctattcgtacactccctccccttttgaaaatc

SEQ ID NO: 269739 - DNA, 201 bp, Homo sapiens
caggtaagatgggggtattgcagggagaattgcagggttttaagagtccatgggtaagtaatatctcaactatgggagctagacctttgcttgcttcctgytcaactgggtattgttttccattgggaaaatggctggggtctttaagctgtattttgactggcactgctgttttagccttccctgggtttccagtatacc

SEQ ID NO: 269740 - DNA, 201 bp, Homo sapiens
atgcacgcctgggagtaggtctctgaactggcccccctgggcgtggctgtcttttatggtctgtagactatagaggtgaaatagacccagtctcctatagygctcctaggcttattaggaagaggaaattcctgcctaataaattttggtcagaccggttgctctcaaaaccttgtctcctgataagatgttatcagtgac

SEQ ID NO: 269741 - DNA, 201 bp, Homo sapiens
taattgcattaactgcacaaattgtagaggatgtgtgtttgaacaatatgaaatctgggcaccttgaaaaaagaacaggataacagcaatgtttaaggaamaagagagataatcttaaactctgaccaccggtgagccgggcggaacagagccatatttctcttctttcaaaagcaaataggagaaatattgctgaattct

SEQ ID NO: 269742 - DNA, 201 bp, Homo sapiens
gtagtccacattaaatcccatggaacctgcaactcttctcaagcagttcagaaagctctcggcaacatattcagttctgtcgctacataaaatcaaccagktattcaaagactgtgcatttaaaatcttgcaagttcgaatatccttggaccagtcagcagcagacacaggttgacactgagaaaaataatgatcatgaaa

SEQ ID NO: 269743 - DNA, 201 bp, Homo sapiens
tggatacttcatggaaaaaagaaggttgaaataaaatacgagctttcaaataaaacaggccaaggacagaacatagcaatgggcttgttccagaattcacrtgagaaagagcctgtgatgtcagcccaggatctgcggactgtggcttctttcataatcatttcctgctttattagctcatgggtttagagaaagtagagc

SEQ ID NO: 269744 - DNA, 201 bp, Homo sapiens
gagctaccattgaatggtgatgtttaccacaggaggggaagaaagagagcagttggctacatgcactggtagataccaggtttctaccatccttccaagcmatggcattggcatttatatgccgttcagattttttttttctgcttttttaaaaatgcgtatacatttaaggcataagagcatagttttgttacatggata

SEQ ID NO: 269745 - DNA, 201 bp, Homo sapiens
tggggcatgccaactcacagtgtgtgattgtggtgacttggagtagcatgttgacaagtatcctgagaccaaatctggctttgctgtgaggagagctaccmttgaatggtgatgtttaccacaggaggggaagaaagagagcagttggctacatgcactggtagataccaggtttctaccatccttccaagcaatggcatt

SEQ ID NO: 269746 - DNA, 201 bp, Homo sapiens
gagcagtcatgaattccagaaccgtctcattccggaggactttgtaactcacatcagcactaaacaggagcttcctttcaaaatatgacacagaaatggcraacccaggccaaagggataatctttaaaaacaaaaaagaaaaaaaggaatattgtcaatgttataccggaaacacaataaagatttttaaatggtgattt

SEQ ID NO: 269747 - DNA, 201 bp, Homo sapiens
aaatggaggtgtcagaaaagccaggacattagaattgagctttgtgaaaactgaagtttaaaaggcagaatttggggaagggaatccaggcaactgaagtraactgaattgaactgaactgaagcatgcaaagtgcagaccgctgggggttagaatagagagtggcattaggggaaaggagggtaccgcaagcgagaattt

SEQ ID NO: 269748 - DNA, 201 bp, Homo sapiens
gtttgttttaacctgaatattactatacattaaagagaaggtgctttcaaaaagaattgaacatggaagatgaggggtaaggataactgttgcaaatgcgrctagagcttctagaggcagcaacagattccatcaatagtttcttgagtatctaatatgcgcaaagcactgagctagtcctgggaatccaaaaacaaggag

SEQ ID NO: 269749 - DNA, 201 bp, Homo sapiens
cagcacttcagaaagatctctctgatggctgtgagggtgagggatcacagtgaggagagagctagggcataaagagtgacggtagtgggaggggatccacragatggcctgcattaatgcagtgggaacagggctggcaaaaagaaaattcacggataaaggatacagaactcgtcttggtgacaagtgaatgaggaggtt

SEQ ID NO: 269750 - DNA, 201 bp, Homo sapiens
ccttgaagctaggatttgacctaggggtaaaggagaaaggtacagcgtggctttctgcagatgcctagtgaacacacacaaaggctgaggaaggtgtaggycagtgagtggatggggtgataaaggcatggggtgcataggagggatgctgagaaatataagaaagaaagagggggccaaactatgcagtgctagagagga

SEQ ID NO: 269751 - DNA, 201 bp, Homo sapiens
tttagtacagacggggtttcactgtgttagccaggatggtctccatctcctgacctcatgatctgcccacctcagcctcccaaagtgctgggattacaggmgtgagctaccgcacctggccttctattctttaaaacagtaaattggtgattatgacaacataacaaaatatacttctttaaaagtgaatattgagtacag

SEQ ID NO: 269752 - DNA, 201 bp, Homo sapiens
ttgctcttctacgtgtgtgacagaaagcaaagtcagagaggacttcacacttggccttgaagctaggatttgacctaggggtaaaggagaaaggtacagcrtggctttctgcagatgcctagtgaacacacacaaaggctgaggaaggtgtaggccagtgagtggatggggtgataaaggcatggggtgcataggagggat

SEQ ID NO: 269753 - DNA, 201 bp, Homo sapiens
tctcttataaagaaatggttctgctggagtgtcactgagttataataaacagtgcacaagtttacggatttgcatctcagctctgtgaatattgggtggcrggcattttcagtttcctaacaataatacatacctcactggattgttaggagcagcgaaataggtaaggtatgagacagacgaggcacagtgtctagcaca

SEQ ID NO: 269754 - DNA, 201 bp, Homo sapiens
tcttagcatttgaaaatactttgtatgataagataaaatagagaaatataaaggtcaatatcaggatgtcttccactttgaaaactgactacataataatyagtctttctttcctgggacagggaggagggcatactagaagctgtcacagttttctttcttttcctccctaattacaatatatatgcagtgaagcacaac

SEQ ID NO: 269755 - DNA, 201 bp, Homo sapiens
aaatgtgctccagacctttaaaatgagtttaaaaacccagtggcccagatcactgggaatatttttaggagtgtcagaagcaggagtggaagagggacttyccttcagaaactccttatcacccccaaacatcctgggttcacagctagcttcctggaagctctcctacccaattgcagcccgagatgctctgaggataat

SEQ ID NO: 269756 - DNA, 201 bp, Homo sapiens
ttgagttactaaaagaagatattaaccacagagtatgtttacattagaggaatgttcgttgtctccaacttttagtttgcattccaagagttggcttgaargctggttacttggagctggcaacaggtttacccctatgaagagcgttgccagtgctccacagggtgattaggttctggagcctgccaaactgttctcaca

SEQ ID NO: 269757 - DNA, 201 bp, Homo sapiens
ggcacagtccctgcctttctgcatcaatacattatctacaaagcgaggtccacaagaagcacaaacaatgcttaacaaagcacgataaagcacaacaaacygatgaaagagatactattattgtcccctttgcagatgagaaaacactgtgaaacattaagcaatcttcccaaggctccataactggaaattagcacagct

SEQ ID NO: 269758 - DNA, 201 bp, Homo sapiens
cacaataaaagaagtcaaatgtgagcatttctatatttcaagaaaaactttgtcattaaaataaaaaccaagtcaagaatctcatttgaaagtagcaggtrcaactgatgctatggctaaaaagtttggagaagcctttatcaagtgagtttgtatgcatgactccattaatttagaacacatggcgtgcttactgtgttc

SEQ ID NO: 269759 - DNA, 201 bp, Homo sapiens
cttctagaggtagcaaaataattcacatgaggatttatgaagatgtacttcatccttgatttgggaagaggtgagagagacgatgtccacctaccacggtkcacccatgtgaactttcttgttactcctactgtgtcatccagtcactgagcaaagtcctgggcacacttcattaaacacagtacctgcttttgaagaatt

SEQ ID NO: 269760 - DNA, 201 bp, Homo sapiens
aggaagactccagggtttttgtctaagcaactggaaggatagagttgtcatcaactaagctgtacaaagctgaaaatgaggtttgaaggagaagatagaamgttggagacatttcacatttgagacgtctattagatcatctacatggatattgctgtttggagttcacggacattgtcagcatatagggaaaaattaagc

SEQ ID NO: 269761 - DNA, 201 bp, Homo sapiens
gacatctcagatgaagggctgtggacagcacaattcaaaagctccttgctctgaatcaatatgaatgacacatttccttcaaggaatatatcagtgttacrtaggccatctaatactaaaaactcagccccaggaaggatgcatgcggtgatccagtacctctggatgttgtccacaagcctggccaggcgctgctgccgg

SEQ ID NO: 269762 - DNA, 201 bp, Homo sapiens
agagagagagagagagaagggggaagtgctacacattttcaaacaacgagatatggtaagaactcactcactatcatgaaaacagcaagggggcaatccamcctcatggtttaatcacctctcaccaggccactcctccaacacatggggattacaattcaacataagctttgggtggggacacagagctaaacacagcat

SEQ ID NO: 269763 - DNA, 201 bp, Homo sapiens
tgagtaggtcttcccagaagacccttagatttagtcttgatgacttaagaaagaaaaataaaactaaaaaaaagtattccaggtcaagggaacagtgtgtrcaaatgtacagtctttaaagaacatgttctttataggtaaacagttcagtaggaccagagtcaagggtcacagggtcaggggagggagtcggggagtggg

SEQ ID NO: 269764 - DNA, 201 bp, Homo sapiens
tgcttgagtaggtcttcccagaagacccttagatttagtcttgatgacttaagaaagaaaaataaaactaaaaaaaagtattccaggtcaagggaacagtrtgtacaaatgtacagtctttaaagaacatgttctttataggtaaacagttcagtaggaccagagtcaagggtcacagggtcaggggagggagtcggggag

SEQ ID NO: 269765 - DNA, 201 bp, Homo sapiens
acggtggcccagaaacacaaaagaaagaaatgggatccactctgcccaaagacgtggagtctgtggattgcttttcaagtttagtgatgggaggccatagwagaataggttttcaacatttagggctgtgcctaaagatctgtgtccagaaaatttgtcatgagaccatcaagaattcctgaatttgcaaattcttctcta

SEQ ID NO: 269766 - DNA, 201 bp, Homo sapiens
ggatcacatcagtgaggtcccatgggttgtgctaagcgggtgaatattttcctgaatggaagtgactacagtctctgaatggctttatgtaggaagtggcwtggccaggtttatattttagtgctattgcttggacagccaaatggaagacagtctagagaggagagaacagtgggacgaaaggctgctgacatcatatcc

SEQ ID NO: 269767 - DNA, 201 bp, Homo sapiens
agaaaaaatattccatgcaaatggaaaccaatagagagcaggggtagctaaacttaggcaaaatagacttttgtaaaaaaaaaaaaaaaacctcacaaaawtcaaagtcgttggataaggataaaagaatcaattcattaagagaatacatcaattttacgtatgtatgcacctaatagttgagcatctaaatatataaat

SEQ ID NO: 269768 - DNA, 201 bp, Homo sapiens
gtttccagtagcagagttcactgttcccccgtgcaaggggcagtacagagaggagacagacaggtacatccagcaagggcaggaaaggaagggccaagcasgagtgggagaagccaaaagactgggatctcataccaggggtcaggatagagaatctctgaccagggtgaggctgggattgaccctcatgttcattcttca

SEQ ID NO: 269769 - DNA, 201 bp, Homo sapiens
gctcataggcggaagggacttgccttgtcttgtatgacactttggactgaggacttttgagttaatgctgaattgagttgagactttggggaactgttggragggcacgattggttttgaaatgtgaagatatcaaatttgggaggggccaggggcggaatgatatggtttggctgtgttcccacccaaatcttatcttga

SEQ ID NO: 269770 - DNA, 201 bp, Homo sapiens
ggaagtttggaggggtgtttagggtgaaatccagaaatctaccaccaggaacttttcacagacctaggggacacagaagggggagcagatttcaggtgagkatgaattctggatatggtctagtctgaggtgaatgtataaccaggcactggcagccagtatgcaattgcatttaaaacaaagcaaacatctcttatctaa

SEQ ID NO: 269771 - DNA, 201 bp, Homo sapiens
ctgtctactatgttgctagtttcttttgttgcacagaagctctttagtttaattaggtccaacttgtcaatttttctttttgttacaattgcttttggagrcttagctaaaaattctttaccaagactgattttctaggttttcttgtaggatttttatagtttgaggtcttacatttaaatctttaattcatcttgagtg

SEQ ID NO: 269772 - DNA, 201 bp, Homo sapiens
agacaattgacgggctaatcagatgccctgtcaggaatatagaggcagaatcagcagatagggagaagcaccaaaagacacacacaaaagaaaagagagarggaaagagagagctacaaatattgggtttccagccacttctcagatttcttcagggaggggttttaggtgagggaggtatgtggcttggaatagctcctt

SEQ ID NO: 269773 - DNA, 201 bp, Homo sapiens
ctgcctgagctcagcatgactctcttctgttatccttgtctcttatctgcacctcctaggacaagccaacagataggacaaacacatgcctatcagtaagstttcatcaaaatgaaatttgcaattgattggttgaagcattagctcccaggctgaattggcccaatgggcatttcttgttctctaggatttaatagtctt

SEQ ID NO: 269774 - DNA, 201 bp, Homo sapiens
actgggactgactcagagccagcatttctactactgatgactgaggtagactgccccatgcttaactatctggctctaaacatctatattcattttgaaawtatctatacacaagctggaggcgagttatattgagacaatctcagatttcccaaaacagcatgactgtccttaccttctaggatagtaggatgttacggg

SEQ ID NO: 269775 - DNA, 201 bp, Homo sapiens
gggactttctctatcagtagttcttaacaggagggctgcaacaccagccctggttttggcatagccgttggaaagacagaaatgaagcagtggattggtgktcctcaattcaggaagactggcaggcccagggcatcacgatagaggaaagccttgcttgcaaatccatctcccactgtttcagctttgctctcagccatg

SEQ ID NO: 269776 - DNA, 201 bp, Homo sapiens
gccacctggcctggaaggctaggggctggtaggttagaaaaggccccacagaggcatggacaattaagccaagctgtgactcatgaccaggagttatcctrgtgaaggaggggcaggttactgtggggtcagcatggcacatgcagtggcagggagcttggctgtttgaactggacaagtcattaacctctcttggcctca

SEQ ID NO: 269777 - DNA, 201 bp, Homo sapiens
agccttaatagagcaagcacaggctttgcatcagcctgacctacgtgctaatcccggaaccaggctaagaaacctaggcaatttctttttgcttgtgtggdaataatacttactatatggggttgttgtgaggacaaaatttcaaacatggagcttatgttacaaataaagagagtgaagccactgaggttgagggctggc

SEQ ID NO: 269778 - DNA, 201 bp, Homo sapiens
aagggagagcgctttgggttggtttgttacataacagtggatcaccaaaacagatggcaagccaatagaataagagtcagcaaatttttctgtaaagggcyaggtatattttgggttctgcaggtcaaatggtctctgtggcaatgactcaatttgccattatagtcaaaagcagccacagaccatacttaaacaaatgag

SEQ ID NO: 269779 - DNA, 201 bp, Homo sapiens
acatccagcaagggcaggaaaggaagggccaagcacgagtgggagaagccaaaagactgggatctcataccaggggtcaggatagagaatctctgaccagrgtgaggctgggattgaccctcatgttcattcttcactcaacaaacattggtgggcagagctactcactgttaggacctggaactctcccattataagtcg

SEQ ID NO: 269780 - DNA, 201 bp, Homo sapiens
aggaggagacccaaatgccccccaatcccctccttttggaaccagaattccaactccagtccaacattatttcctactcttcaagagatcacctggctcawgtgggcaaagtaatatgagctgcattgcacaggttgggaaaccgaggctgagaagttgttaatttatgcgtgacatcattatggtaggggtatgtgaggg

SEQ ID NO: 269781 - DNA, 201 bp, Homo sapiens
gatataaaatcatcaattgggtgcctgctattttaggtactttcacttacttcctaaagtgctcaaaatgagcttgtgaagtattttcgccagtcattttmtagatgaggacgctgaggctcaggactactactaatttacccaatgtcacatagctggaattcaaatctaaactaggttaccttcaaaacctgaactctt

SEQ ID NO: 269782 - DNA, 201 bp, Homo sapiens
cccaggtactgccaaatgaccaagactgtgtcttcagcaagtaatcctggtcaccttaggaatttgacctacatgggggtttcaagtcaggaaacgcgttycaactgtgattttggctgccaaatgtcactgagcctaagcccctttctcttaaaaataaggattttaatagcacttgcctcgggttgctctagtgagggt

SEQ ID NO: 269783 - DNA, 201 bp, Homo sapiens
tattatgacacttatttcattctaccttacatagtatttatttgtaaagaacttttattcgaaattgaaattttggagaacaagtactctgttttatttayctttgtttgctccatggtcgcaacaccctgccaggttcagagtaggctctttataagtatatgagagtggcaaatagatgtggacatgaatagcaacacc

SEQ ID NO: 269784 - DNA, 201 bp, Homo sapiens
ctacaagacatgctttcattctttttatggctgagtagtattctcttatatatgttaccacattttctttatctaattatccatcgatggatgcttaagtkgattttatatctttgctattgtgaatagtgctgcaataaacgtacaagtgcagataaatttttgatataatgatttattttcctttgggtagatacccag

SEQ ID NO: 269785 - DNA, 201 bp, Homo sapiens
ggagaagtgggggaggagagaagagcagtgctccttctactctataaaagattgactgctttcaaatacagaatgtagaagcaatggttatgctctgagarctgtaaattctaaaataattaatgtaacactgtgagaacctccccctctgagtcagtagcctgataacttggacagatgtgttatgtatctccccccagc

SEQ ID NO: 269786 - DNA, 201 bp, Homo sapiens
cactgccttcctgccaatacacttaaaaataatatttatctatatattattttaaaggtatgtatatttaatttaaaaacatatatacatgcaaataataygtatatattattttaaaggcatgtatattatatgtgtgtgcatattatatatatatacacacacacatagttttatagttctcagcaacatggttatttt

SEQ ID NO: 269787 - DNA, 201 bp, Homo sapiens
ttccggtcatcactgccttcctgccaatacacttaaaaataatatttatctatatattattttaaaggtatgtatatttaatttaaaaacatatatacatrcaaataatacgtatatattattttaaaggcatgtatattatatgtgtgtgcatattatatatatatacacacacacatagttttatagttctcagcaaca

SEQ ID NO: 269788 - DNA, 201 bp, Homo sapiens
tttgggattttgacaattccggtcatcactgccttcctgccaatacacttaaaaataatatttatctatatattattttaaaggtatgtatatttaatttwaaaacatatatacatgcaaataatacgtatatattattttaaaggcatgtatattatatgtgtgtgcatattatatatatatacacacacacatagtttt

SEQ ID NO: 269789 - DNA, 201 bp, Homo sapiens
ccaataactggctcctctattggtctgtttctcttgtctatttttctcgttttcatcctttcttcttgatctctagtatatctgatgatctgaagttgaaygccagtaattttgcatgaaaatggtggaggcctttcaaggctctggatgatatgtttttccagagaggatttacttctgcttctgaaggcaatccagatc

SEQ ID NO: 269790 - DNA, 201 bp, Homo sapiens
gagagatgggagccttccaaccaaaagaatcataaatcttcagttatgatctggccgtttctctaagcagcaagctagtggggaaaactcaaggggcctgygcctgtgattcccatggccctctgacagtgggcacattctacaaaacttgagtgagctgcagatggtcaatggctctaacagctggcctcctggaatgaa

SEQ ID NO: 269791 - DNA, 201 bp, Homo sapiens
gtgtctcctaggtactagtcactgcactaaacacatggaatagaaaaacaacaaatattgtatctttcttcaagtagctttcaaacttgaggaggagacaygtatatgaacgtatcattacagaacaacataccaagtacaagcatagatgcatgcacagggtaaaccagggatctgcaaataatgaaatctggaagttgg

SEQ ID NO: 269792 - DNA, 201 bp, Homo sapiens
gaaactcagagaggttaaggttcacatcaccccactggtgagcagggaggctgagatttaaagccaggagtgctctcccagccctttattcttctccttcmtcaatggcttaggaagaaaatgagactgacttgagtaatgacttcatggccagcatggccctagcaacaaatgtcagagtgtggggcataagtgtgtcat

SEQ ID NO: 269793 - DNA, 201 bp, Homo sapiens
gtatcttaaaaaatgagtaagagttcaacagttggataggatgacagggttaggggagagcaggggacctgggataagggaatttaaggcaagagatgtcyatgtgtattgtgtttacagcagtgctattcaaagtccagatccacaatgagatgaggaatttgccccagcattacatccttaaatgagaaagtcttacta

SEQ ID NO: 269794 - DNA, 201 bp, Homo sapiens
gcagtacagcccacgtaatttgctgagcctaatgggtgtcagggtcagtccaagtgaaagcgaagagaggatgggatgacgggtgcaaaggaatagtaaakaaagcatgtttgagatccagaacagaataatggattgtggagggaggtattgaggataggagagtatatgggtttggcaccatggggtggataggcaaaa

SEQ ID NO: 269795 - DNA, 201 bp, Homo sapiens
cagagcttagttttttatgggtatgaaatagaactcataaagtttattcttccatctttgaattttgtgaaaatcagatgccaactggagaatcatcaaarcagtgcacaaatacatagtactgttatcatttcagcaaatttgcttatagagctcacttgctatgcagcactgaattccaacttgcttgcttaacttggg

SEQ ID NO: 269796 - DNA, 201 bp, Homo sapiens
ttatctttctttcatatgtttattggccatctttatttcttttcttctgaacagcctgttcatgtactttgcccatttttattcaatttctttctttgtastgaatgtactatttaaaatttttaaagtatattttgatcttttttctatttattgttgtattctgatttcatttatactactttcatcacatatgtttta

SEQ ID NO: 269797 - DNA, 201 bp, Homo sapiens
gactagacttcctctctcatattgcttttcctgccagaaattgtttgtctcttcccatttttcaattgtaaaagtttattgtgagataagatgttacagaytcacttttacctctccctctcctctaaatataactaaatactctggaaataactcaacagatgattgtaaaaggactccgaaatatggaaaaaagaaaag

SEQ ID NO: 269798 - DNA, 201 bp, Homo sapiens
atcagaatgactaaaataaaaaatagtaataacaccaaattctggtaaggatgcagaaactctattactcatatattgctggtggtaacataaaatattayggccgttctgtataaacattaatagtttgaagtttcttttaaactaaaaacttagcataaaacccagatatcacattttcaggcatttatcccaaataaa

SEQ ID NO: 269799 - DNA, 201 bp, Homo sapiens
gaagctaatgtgacaaaaactgtatacaatcacacacacaaacacacacacacacaatgagtacatgcatagctgataaaatctgataaggtctgtggatmgtaccaatgtcaattacctggttttgatattgtactataggtatgtaaatgttaacagtggcgaaggctgggtgaaggggggcactcatagactcatgaa

SEQ ID NO: 269800 - DNA, 201 bp, Homo sapiens
gtaaacactcagccatctctggcttttccactgtcagtttttggtttacaaatcaccatgaaggacagaaagccccttcggccagcattgcttagggagcycagggaagcaggggtggggctgtcctccccaagcaaggcagcattcttgagcttctgagcctatctctccaacctcttctttttcctgcttcttataatc

SEQ ID NO: 269801 - DNA, 201 bp, Homo sapiens
accatgaaggacagaaagccccttcggccagcattgcttagggagcccagggaagcaggggtggggctgtcctccccaagcaaggcagcattcttgagctkctgagcctatctctccaacctcttctttttcctgcttcttataatctgagctcccaaatccaggaattaaatatgtttgggtgagggtttgcactcatca

SEQ ID NO: 269802 - DNA, 201 bp, Homo sapiens
cagcattcttgagcttctgagcctatctctccaacctcttctttttcctgcttcttataatctgagctcccaaatccaggaattaaatatgtttgggtgarggtttgcactcatcactccatcccctcccaactcctagaatcctcccatttgtcctctggaactcatggttcatcgctagcaaaatctatatatcctcag

SEQ ID NO: 269803 - DNA, 201 bp, Homo sapiens
tggatcctctggttgttctacctcatttcttgaagataatggcatctgattcactgtcacttttcccagtatcattcctgtgattattcttatttttctcyatctacatagtcacactctgatctctcaactcttctgcatcttatccctttcttgacctgctccaaccacaccagccccctgctgtcatagcgacaccat

SEQ ID NO: 269804 - DNA, 201 bp, Homo sapiens
cctacctttccagcttatcccctctgttattttaatccaatgtgtccttgaccccaccagcatctataatttacttatccatgaccttttctctgcccctyactctcctcatgaccctccttccttccttatggactttagtttccagtttcattattatttctctcttacttacaccttcaaatccatgttctgctctct

SEQ ID NO: 269805 - DNA, 201 bp, Homo sapiens
aaaatccaattctttaaaacttacttgaaatagctttttttttttttttttttttttgagatggagtcttgctctgtcgccaggctggagtactgtggcaygatctcagctcactgcaacctccaaatccctggttcaagcaattctcctgcctcagcctcccgagtagctgggactacaggaacccaccaccacgtccgg

SEQ ID NO: 269806 - DNA, 201 bp, Homo sapiens
gccagtactatttctttatattaccagtgttccctgtccatcactgggaatgcagaaaattagaaagctcgtagaatgatgaggaacccagtaccagagcraccctggaccctgattcctgtaatcctggccagtgatggtgattatactccaaatcacatggactggatacctgaaacagcaaggctgctacccatgtgg

SEQ ID NO: 269807 - DNA, 201 bp, Homo sapiens
cgtacagtattataccatttctcttttaaaaaataggattatatgcgtttgcagagtctgaaagaatattactaatattaattgaattaattattaattcmattgtgattcactcatttgttaaatatttactgagtaaacacacatacacactcttttctctctcctttctttgtgctacgtaagtttccaaatcctcca

SEQ ID NO: 269808 - DNA, 201 bp, Homo sapiens
gaaaaaccctgaagtgaaaagagcaagctacaaaacatgacgtacagtattataccatttctcttttaaaaaataggattatatgcgtttgcagagtctgraagaatattactaatattaattgaattaattattaattcaattgtgattcactcatttgttaaatatttactgagtaaacacacatacacactcttttct

SEQ ID NO: 269809 - DNA, 201 bp, Homo sapiens
gtccagggtaaatgacgtaaagtatatccatgaaattaaaaaactatgaaaacactagcatgataatagagatcatgtttatcatatggaaatgtttgagraaaaccctgaagtgaaaagagcaagctacaaaacatgacgtacagtattataccatttctcttttaaaaaataggattatatgcgtttgcagagtctgaa

SEQ ID NO: 269810 - DNA, 201 bp, Homo sapiens
aagtaaaaggatagaaaaaatattccatgcaaatggaaaccaatagagagcaggggtagctaaacttaggcaaaatagacttttgtaaaaaaaaaaaaaaaacctcacaaaaatcaaagtcgttggataaggataaaagaatcaattcattaagagaatacatcaattttacgtatgtatgcacctaatagttgagcatct

SEQ ID NO: 269811 - DNA, 201 bp, Homo sapiens
aaagtaaaaggatagaaaaaatattccatgcaaatggaaaccaatagagagcaggggtagctaaacttaggcaaaatagacttttgtaaaaaaaaaaaaaaaacctcacaaaaatcaaagtcgttggataaggataaaagaatcaattcattaagagaatacatcaattttacgtatgtatgcacctaatagttgagcatc

SEQ ID NO: 269812 - DNA, 201 bp, Homo sapiens
acttggaaatgaagatcatgactttgtgttaggtatgttccagcattattatacctctctaaatatatgcaacaacagtaatacagctacatgtggtggcrcgtgcctatagtcacagctacttgggaggctgaggtaggaggactgcttgagcccatgagttcaaggctgtattgtgctatcactgtgcctgtgaatagc

SEQ ID NO: 269813 - DNA, 201 bp, Homo sapiens
cagtcttgagctaaaaattagagaggcaaaatatgaaaagaactcaatccaatctatatagctttctatttttgtgtaatttaaaaaatgaaataaataaaaattccatttgaaaaacactgcaaaacagaaaataaaaattacctacaatccctccttccctagagatacatacaattttttaaattagggattgtccgt

SEQ ID NO: 269814 - DNA, 201 bp, Homo sapiens
acagtcttgagctaaaaattagagaggcaaaatatgaaaagaactcaatccaatctatatagctttctatttttgtgtaatttaaaaaatgaaataaataaaaattccatttgaaaaacactgcaaaacagaaaataaaaattacctacaatccctccttccctagagatacatacaattttttaaattagggattgtccg

SEQ ID NO: 269815 - DNA, 201 bp, Homo sapiens
gacagtcttgagctaaaaattagagaggcaaaatatgaaaagaactcaatccaatctatatagctttctatttttgtgtaatttaaaaaatgaaataaataaaaattccatttgaaaaacactgcaaaacagaaaataaaaattacctacaatccctccttccctagagatacatacaattttttaaattagggattgtcc

SEQ ID NO: 269816 - DNA, 201 bp, Homo sapiens
cgacagtcttgagctaaaaattagagaggcaaaatatgaaaagaactcaatccaatctatatagctttctatttttgtgtaatttaaaaaatgaaataaataaaaattccatttgaaaaacactgcaaaacagaaaataaaaattacctacaatccctccttccctagagatacatacaattttttaaattagggattgtc

SEQ ID NO: 269817 - DNA, 201 bp, Homo sapiens
cctgtgcattggcatccctcctgtggcctgcttcccttgtccccagagagcacttgccactctcctgccaccctttgttgcagacttccacagaccttccygtggtaagcagaatttgaactctgatctatccctcatcaaaatatcttttgcatgtagctgtattctcattcctggggcattccaacatgaaaagggtga

SEQ ID NO: 269818 - DNA, 201 bp, Homo sapiens
ctgtgttcagtgctatcattttggaagccatggtgggagtatttacaccatgaaaattggcaaacactgcaaattaaggaactttttttttttctccagaragccagtttactagcacatgactctacatggtagttggcttctgccaaagtgactgagacaagaaacccagaaggaagatgtaaaccttcatagaaccta

SEQ ID NO: 269819 - DNA, 201 bp, Homo sapiens
gtatggatggccctagcccaaaggagtccacttacagttgcttcactaacatgctcattatacagctcttagaataggcacctaataccaagccccgattmgattcctacacccactgtgagagcccaccactgcagctcaaagctgacttcgcctagccatggtctgccaccccaccaggtggggaccggctgccatgga

SEQ ID NO: 269820 - DNA, 201 bp, Homo sapiens
aataagaattttcttacctgtgagaagtcctggtgaccggcagtggaaaaaatactaagttctaacagaagtgacagggactcacagagcaaatgtgttcrttttaaaagaagaaaggtgacttcatccctggtgccgtggagtttaaaaagagcaacgagtgctgcctggctgagccaactctgcttcatcagtgatgac

SEQ ID NO: 269821 - DNA, 201 bp, Homo sapiens
tttcaaagagcttcagaaaatcctaaggcaccaattgccttaactggcaccagagaaagaaaaattatgcacttatttccttgagtcatgtcattatctcycccaaatccaactctgaaaaacagtactctagggaaggaaaatagatatttagactttctgagaggtgaaaattactggggaagtggaagcagggaggaa

SEQ ID NO: 269822 - DNA, 201 bp, Homo sapiens
ctcaatatcatatcaaaggaaataaaatctggctgagccaagaagctactagaaggtgtacttggacatgagtcagaataaagaacgattccaaaaatacrtacaagaaaaggtccctgcagaggaaaatcatacacttccgacttacactcagatctattgagtgaaatcagacaaaatacccagtgttaagattaagga

SEQ ID NO: 269823 - DNA, 201 bp, Homo sapiens
aaagcctattaaaattttcaaacttagagaaaagtcagaataattgtacagtgaacacctatatacttaccaccgggtttcttcaattaacattttgccaygttagttttatcccatgttgattctctgctcatttctctatccatccagcaactcatttaattatttttgttattgtctttcaaaataagtttcagacat

SEQ ID NO: 269824 - DNA, 201 bp, Homo sapiens
aaatcatacacttccgacttacactcagatctattgagtgaaatcagacaaaatacccagtgttaagattaaggacaaaaacatttgctgcaattgaaatytatgactaaactattaaaaaacaaaatctgtaggataaatgtgagtttctgctgaaatgcagagaccatgatcttatatttccaacccagcatctaaggc

SEQ ID NO: 269825 - DNA, 201 bp, Homo sapiens
attttatacaaaattgcaagatcttttccaacattcttatgtaattttcctctcccaccaccaatgtatgaaagctttaattgcttcatgtcctcaccaamatttcgtgttgtcagcctttaattttagccacactggtagatgtggaatggtatctcattgtggttctaatttgcatttccttgatgactaaagatattt

SEQ ID NO: 269826 - DNA, 201 bp, Homo sapiens
ctttatcctcaacttgaatgtttacaggctgctgagaggagaaatgagcaaaacaggaacagagtgcctaacacatgttaggtgctcaaagatgtctgacyagcttcccacctggccagggcaagagctcattacatgacagctgatggtcctcatcataacactgcgaagtgggcattcttactctcatgttagagccca

SEQ ID NO: 269827 - DNA, 201 bp, Homo sapiens
tggacaccaatacttttttatttttttgagatagggtctcactctgttgcccaagtaggagtgaagtggcttgatcatggcttactgcagccttgacctcmcaggctcaagtgatcctctcacctcagcctcctgagtagctaggactactggtgcatgcaaccacacccagctagtttttgtatttttagtagaggcagg

SEQ ID NO: 269828 - DNA, 201 bp, Homo sapiens
ctaacacatgttaggtgctcaaagatgtctgactagcttcccacctggccagggcaagagctcattacatgacagctgatggtcctcatcataacactgcraagtgggcattcttactctcatgttagagcccagggaatgacagattttctcaaggccataaaacttgtaaatagtgaattcggtatctgaacccaggtc

SEQ ID NO: 269829 - DNA, 201 bp, Homo sapiens
ttaatcttgagttcctgagctcaagcaatccagctaccttggcctcccaaagtgtggggattataagcatgagccaccatgcccagccagataccaatackttttaaggtaagttttgcaaatattttcttctgtcctgtggtttgtctatacattttcttaatgatgtttctgtgcttcttttcatttctttaaattttt

SEQ ID NO: 269830 - DNA, 201 bp, Homo sapiens
taaatattattttaaaagaacacttcagagccaagagggaccatggagaccaattttccttttccttttgaaaactataatagaaaggcacagttacaagrgctcttggctttcgtaaaaagatcattcccactccattggccaccactgagaaggccagcctgaagaatctctctatatgcaaactgtacctgggctgat

SEQ ID NO: 269831 - DNA, 201 bp, Homo sapiens
attgaggaagctgcattatttatccgttagccaactgagacatcagcacacaagaggtggctgattgaggctagaagtagtctgccattgaaccagacacrttctctgtgcaaaactaaaaacatgtctggagtagaaatccaatattgggccataatcacattggtatcatcatttaatcaactgaagtaaatatccaac

SEQ ID NO: 269832 - DNA, 201 bp, Homo sapiens
gattgaggctagaagtagtctgccattgaaccagacacattctctgtgcaaaactaaaaacatgtctggagtagaaatccaatattgggccataatcacaytggtatcatcatttaatcaactgaagtaaatatccaacattttatatctttgctgattattaaatagtattaacaataatactacatccttaaaaagcaa

SEQ ID NO: 269833 - DNA, 201 bp, Homo sapiens
ctgccactcatactcctgcctccttccccaagcttgggatgaatccgtatgcttgattatccacaggatactcctgccacctaatgcagccaagtcacackggaacttctaaccaccacttctagggccatttctggcactgaagacttgatctaaaaatacaaattcagaaaaaccctggtcgtacattgactatgcctt

SEQ ID NO: 269834 - DNA, 201 bp, Homo sapiens
aatattataaattaaaagtacctgaggaaatccaggacctgaaataagtcgggacctggaatcaatgggcttgactctgtatcactctagagccagtactrtttctttatattaccagtgttccctgtccatcactgggaatgcagaaaattagaaagctcgtagaatgatgaggaacccagtaccagagcgaccctggac

SEQ ID NO: 269835 - DNA, 201 bp, Homo sapiens
actggaacttctaaccaccacttctagggccatttctggcactgaagacttgatctaaaaatacaaattcagaaaaaccctggtcgtacattgactatgcyttaattgcctctatatggccccatctgtagagagggaattcattaactagaagtaccatgtctggggaatcaggtagcatattccatcattcagatattc

SEQ ID NO: 269836 - DNA, 201 bp, Homo sapiens
aaattctccaatcaaatgacacagtgtagctaaatggataaaaaagaaaacctaactaaatgccacctacaaagagattcacttcagctgtaaggacacayatagattgaaagtaaaaggatagaaaaaatattccatgcaaatggaaaccaatagagagcaggggtagctaaacttaggcaaaatagacttttgtaaaaa

SEQ ID NO: 269837 - DNA, 201 bp, Homo sapiens
aatctgccaattgtcttcaatttttttttgttctcaaaagcctattaaaattttcaaacttagagaaaagtcagaataattgtacagtgaacacctatatwcttaccaccgggtttcttcaattaacattttgccacgttagttttatcccatgttgattctctgctcatttctctatccatccagcaactcatttaatta

SEQ ID NO: 269838 - DNA, 201 bp, Homo sapiens
tcaggcttcccctccactctaacaataaccgactgaggtcaagactcagctcctttgtgacttgtggctgtgaccctttggttgatggtgatgatgatgakgtaaccctacagatagggctatgtgtcctgcttggaataagatgctttccaaatattttaagaagctgacttaagattattgtcctctcctattttccat

SEQ ID NO: 269839 - DNA, 201 bp, Homo sapiens
tcattaggcttctatctaatttcttgctcagctattttgaggctttgagattttcctgtgtcaagtttcactccaaagaggctaaaacaagaaaaaatgcmctttttatttagatagaggtattcagatccaacattagagattttcgaaatcacagatttaagacatgtcaaagtggcttacaaagggaacttgcaaatc

SEQ ID NO: 269840 - DNA, 201 bp, Homo sapiens
cttctttctccaagagatgggtgaggggctaaatgccacatggggagaaactttatccagccaaatgatgctattaattctctttgcaagaaagagctgcrcaaatgccataataacaagttaagacagtagctagggcccactaggatgtgtgtatggccttcccatccccagcccccaaggaaatcaccaatttcaagc

SEQ ID NO: 269841 - DNA, 201 bp, Homo sapiens
atagaactcataaagtttattcttccatctttgaattttgtgaaaatcagatgccaactggagaatcatcaaagcagtgcacaaatacatagtactgttaycatttcagcaaatttgcttatagagctcacttgctatgcagcactgaattccaacttgcttgcttaacttgggaagtgatacagaatgtgggaggcagta

SEQ ID NO: 269842 - DNA, 201 bp, Homo sapiens
agacttccacagaccttcccgtggtaagcagaatttgaactctgatctatccctcatcaaaatatcttttgcatgtagctgtattctcattcctggggcaytccaacatgaaaagggtgagaagatgaggaaaagccacaaaaggagacagcatgagtgatcaatatgcagtaggagagaaatcaggagagtgttattcta

SEQ ID NO: 269843 - DNA, 201 bp, Homo sapiens
tttaccaagattcaccaattaacattttgctatatttgccttattattttttctttgtatgtgtgtgtgtgcatatatatatatctatatatatatatatwttttttttttttctggtccatgttgcaaagaagttgacatcatgacctttgactcttaaatagtttagtgtgcacagcagatctttgaataatgtcgctt

SEQ ID NO: 269844 - DNA, 201 bp, Homo sapiens
tcggctcactgcaagctctgcctcccgggttcacgccattctcctgcctcagcctcccgagtagctgggactacaggtgcccgccatataatgccatcttyaaatcccataaggcactacctcacattagtgctctgggagaaattttttaaatcttagagtatcttttatcaagggtgtagactcttttggttcatctta

SEQ ID NO: 269845 - DNA, 201 bp, Homo sapiens
gagcaaggacatcttcacatggcagcaggagagagagagagagagaagggggaagtgctacacattttcaaacaacgagatatggtaagaactcactcactatcatgaaaacagcaagggggcaatccaccctcatggtttaatcacctctcaccaggccactcctccaacacatggggattacaattcaacataagcttt

SEQ ID NO: 269846 - DNA, 201 bp, Homo sapiens
ggagcaaggacatcttcacatggcagcaggagagagagagagagagaagggggaagtgctacacattttcaaacaacgagatatggtaagaactcactcactatcatgaaaacagcaagggggcaatccaccctcatggtttaatcacctctcaccaggccactcctccaacacatggggattacaattcaacataagctt

SEQ ID NO: 269847 - DNA, 201 bp, Homo sapiens
taagggaaagaaaggagttaaggaagactccagggtttttgtctaagcaactggaaggatagagttgtcatcaactaagctgtacaaagctgaaaatgagrtttgaaggagaagatagaacgttggagacatttcacatttgagacgtctattagatcatctacatggatattgctgtttggagttcacggacattgtcag

SEQ ID NO: 269848 - DNA, 201 bp, Homo sapiens
gggagcaaggacatcttcacatggcagcaggagagagagagagagagaagggggaagtgctacacattttcaaacaacgagatatggtaagaactcactcactatcatgaaaacagcaagggggcaatccaccctcatggtttaatcacctctcaccaggccactcctccaacacatggggattacaattcaacataagct

SEQ ID NO: 269849 - DNA, 201 bp, Homo sapiens
agggagcaaggacatcttcacatggcagcaggagagagagagagagagaagggggaagtgctacacattttcaaacaacgagatatggtaagaactcactcactatcatgaaaacagcaagggggcaatccaccctcatggtttaatcacctctcaccaggccactcctccaacacatggggattacaattcaacataagc

SEQ ID NO: 269850 - DNA, 201 bp, Homo sapiens
tgtgtcccagtcactccagctgtggctgaaaggagccaacgtagagctcaggccatggcttcagggagtgcaagcctcaagccttggcagctttcacgtgrtattgagcctgtgagtgcatagaagtcaaaaattgaggtttgggaacctctgcctagatttcagaagttgtattgaaatgcctggatgcccaggcagaag

SEQ ID NO: 269851 - DNA, 201 bp, Homo sapiens
aaaatttgcagcttgacaatgcaatagaaaagaaaatcccattttctgaagaaaaattcaagccagctacagaaatttgtgtaaataatgagaagctgaakgttaatcaccaagacaacggggaaaatgtctccaggacatgccagagatctttgccacagcccctcctagcacagtcttggaggcctagaaggaaaaagt

SEQ ID NO: 269852 - DNA, 201 bp, Homo sapiens
cattttatccctgccctagagatttgtggaactttgaacttgagagagatgatttagggcatctggtggaagaaatttctaagcagcaaagcattcaagargttagttgggtgctgctaaaggcattcagttttgaaagggaaacagagaataaacatttgaaaaatttgcagcttgacaatgcaatagaaaagaaaatcc

SEQ ID NO: 269853 - DNA, 201 bp, Homo sapiens
ttcttatcttttcttgtaacattaagcctacacagtgtaatttcttctttgcaggcagtctgcaagtctgcatttcttccttgaaatcttaagcttttccrtttatagttgatgttatgcaatgttatgacaatgtattaggtatgaaaattcttatttattctacttgtgatttttttttcattctaagagtgtgtattt

SEQ ID NO: 269854 - DNA, 201 bp, Homo sapiens
gtcccctaaaagaagtatttttgcagccataaaaaggaacaggatcatgtcctttgcagggacatggatggagctggaagccattatcctcagcaaaccarggcaggaacagaaaaccaaacaccgcatgttctcacttataagtgggagctgaacaatgagaacacatggacacgaggaggggaaaaacacacgctgggg

SEQ ID NO: 269855 - DNA, 201 bp, Homo sapiens
agacttctgtccacattccaacaaaacctgtgggaaagtccttagaccacagtctagttttctcactgatagatactctaacttcaggtaaatcattcttraatgttcagaggctgaagcattgctcaaaactttcccattatcttctggtgtcactcaagagtttctgacctcccaggtagtttttctgatttaaaaaag

SEQ ID NO: 269856 - DNA, 201 bp, Homo sapiens
tcactttttaaaaaatactcagctcttatctgaaaagggcattccttaataatttcctatacaggaagacttctgtccacattccaacaaaacctgtgggraagtccttagaccacagtctagttttctcactgatagatactctaacttcaggtaaatcattcttaaatgttcagaggctgaagcattgctcaaaacttt

SEQ ID NO: 269857 - DNA, 201 bp, Homo sapiens
ttggaagacataccctggtgtagtgcagaaggtctgcaaatgtttgttgccatataagttaccctgttttagaggtgggcacatcagagagtatagtctgytgttctctatgtctatcttgctctcgttcttgtattactagtgcttggcataaaatagatactcaataatatttgttgaataaatgaataaacaacaaac

SEQ ID NO: 269858 - DNA, 201 bp, Homo sapiens
ccattatcttctggtgtcactcaagagtttctgacctcccaggtagtttttctgatttaaaaaagcaccaaaagaaggccaatcaacccacaatgctggcrtcttgcttaacctacccgctagggctggcccttggcaaaactacaaaacaggttagctaagattactctaagctccttctccccttcagcactgtgtagc

SEQ ID NO: 269859 - DNA, 201 bp, Homo sapiens
gcctctgtggaaatgtgccgtcactggccagttgttctgtctgtctgctgtggaacccaggtgagttaagtataaatatctggccgggcacggtggttcaygcctgtaatcccagcactttgggaggccgaggagggcggatcacgaggtcaggagatcgagaccatcctggctaacacggagaaaccccatctctactaa

SEQ ID NO: 269860 - DNA, 201 bp, Homo sapiens
tgtgtgtctgtatcacaccaggctccttatatggaaatttaatatatgcaaccatttgcctcaacatctgttgggatttgagtctcaggtgctgtactgartgggagtaaccacaatgtaacctggagtttttgatatgctaatgcttgtactgagctaggatagattgttttctgcctaacccagggacaggaataggca

SEQ ID NO: 269861 - DNA, 201 bp, Homo sapiens
ttcactacagagtacgcaagaaaaatagacaaaaaggatcaaacttctcagaaaggtggagatgcagagtaatgttgtccttagaaactgacagacaggartaaaatggatagaacgcagctctggagtatgaagacctgagtgtgaatctgctgtctgagctgggcttagttagtttgcctttgcaagactcagttttct

SEQ ID NO: 269862 - DNA, 201 bp, Homo sapiens
atgcgacagtggccaaacactgtctcccttttgtttcatatgtcagggactgcatgtgatttcttttggaaaatgtgctccagacctttaaaatgagtttraaaacccagtggcccagatcactgggaatatttttaggagtgtcagaagcaggagtggaagagggactttccttcagaaactccttatcacccccaaaca

SEQ ID NO: 269863 - DNA, 201 bp, Homo sapiens
gaagcacacaggctgttcaggattcaggcaagcacaatacagtgtgatgatacgtgctgtgacatgggaatctgcagaggctatggcagcactgaggaggraggagagactctccttcagaccaggatgggggttggtaggaggtggtggcaggaagagatcccagaacagatgacttaagcagaagcttcaaagatgagt

SEQ ID NO: 269864 - DNA, 201 bp, Homo sapiens
atgtcctccaatgaataaatgagtgaatgcttaagcaaactgtagtacatccatactattcaatacaacacagtaacaaaaaggaaccaactattgatacrcataacaacttggatagatctcaagattattatgctgaatggaagaggccaatatcataaggttacataatgcatgactatataacattcttgaaataaa

SEQ ID NO: 269865 - DNA, 201 bp, Homo sapiens
ctaaaataaaaaatagtaataacaccaaattctggtaaggatgcagaaactctattactcatatattgctggtggtaacataaaatattatggccgttctrtataaacattaatagtttgaagtttcttttaaactaaaaacttagcataaaacccagatatcacattttcaggcatttatcccaaataaatgaaaattta

SEQ ID NO: 269866 - DNA, 201 bp, Homo sapiens
cattctcctgcctcagcctcccgagtagctgggactacaggcatccaccaccatgcctggctaattttttgtacttttagtagagacagggtttcaccatsttagccaggatggtctcaatgtcctgacctcgtgatccgcccaccttggcctcccaaagtgctgggattacaggtgtgagccaccatgcctggcctgaaa

SEQ ID NO: 269867 - DNA, 201 bp, Homo sapiens
cacattgaacactgcaaatttccttgtaaatatcagtttaactttaccctacaagttttttattatttaatcttcttttctcatttcaaaaattttcagtrtgatttattttaagccataaactgtttccctcaatgtgtctatatactatcaattatttggaatttgtggagaattgctttgtgtctcttaaatcatgtt

SEQ ID NO: 269868 - DNA, 201 bp, Homo sapiens
aagatgcaaatatcatcaacccagaattgacagttgttatcatttttgtatttgtttcattttttaagaaaactaatagaattatagtcaaattccctttrttgagcatccttacctataattcacaaccctccctgcctcatagatgtaaccactgtcatgaatttagtgtgcaatcttccatttccactttttcctttt

SEQ ID NO: 269869 - DNA, 201 bp, Homo sapiens
tggttagattggagttgtctgcttttgttttaattataattttaagtttggtaaacttttaaattacagaaaaaaaaaataagacaaagatgcaaatatcrtcaacccagaattgacagttgttatcatttttgtatttgtttcattttttaagaaaactaatagaattatagtcaaattccctttattgagcatccttac

SEQ ID NO: 269870 - DNA, 201 bp, Homo sapiens
tatttttctgatatttttctcatggttagattggagttgtctgcttttgttttaattataattttaagtttggtaaacttttaaattacagaaaaaaaaaataagacaaagatgcaaatatcatcaacccagaattgacagttgttatcatttttgtatttgtttcattttttaagaaaactaatagaattatagtcaaat

SEQ ID NO: 269871 - DNA, 201 bp, Homo sapiens
agatttccttaattattattcattgctctttttctattccaagatcggatccaagatatattatatttaattaccatgtctccttaggcctatcttggctrtgacagtttctcagtcttttcttgtctttcttgacctcgacaggtgttttgtagactttccttaaactgatatttttctgatatttttctcatggttaga

SEQ ID NO: 269872 - DNA, 201 bp, Homo sapiens
atgatggaaatgttctatgtcttcactttccaatacagtggctgctacgtgtggcctttgagtacttgaaatgtatgactgaggaactggattgatttcarttactttaaatgtagccttcaaaggccacatgtgattagagcctccatcttagatagcacagctcaagcactgagtggcctggcccagggtaagcactac

SEQ ID NO: 269873 - DNA, 201 bp, Homo sapiens
ctggtgcacaactgagcagcaaggccttttgctggtggagggggcggaatgagacatgtttaacagtgttccacagttagtactatgtgctgcataaaccrgggacttgtttccagccggaagtgatgcttcctgtcaaaatcagtttacagctatgttcccatcaccccagcacttagaagaaggctgatcccacagaaa

SEQ ID NO: 269874 - DNA, 201 bp, Homo sapiens
gagccagggaagggagcaggggaatgggaagagatgaggctttaaaggcaggaattggccacatcataaggagatttggaaactctgctaaagggcttacrggtggtcctaaggcaataaggagacatggaaatgtattagcgttgcgagcagtgtgatcagatatgctttaaagggagattactcagactacaggaagaa

SEQ ID NO: 269875 - DNA, 201 bp, Homo sapiens
cccattgtctctggtagaatcagtatctctctctttctctcctccattcccagttctaaattcttagagaaggaatcttgggtgggctgctcatctgtatkgtagttgtctgtggccagagaggacaggatgcatgttacaagcatggctgctgggaatccacccatggtgatcatgtagcgaagggaggatggggtcagt

SEQ ID NO: 269876 - DNA, 201 bp, Homo sapiens
aaaggtatcaggcagaggaaatagcatatgcaaagagagaaagagagagcatggattgtctaaaaaacagcaaatacttctgtttgataaatgtgcaaatwaccacagagagtgacaggggccagatcatgaagggtttcttgtatcacaagttaaggggatctccaagccatgcccggtagctttaaccatctatttgaa

SEQ ID NO: 269877 - DNA, 201 bp, Homo sapiens
ccattccaggtctctagaatagatctgctgagaatgcttaaagtcaccatcttgttggtgaggcatttggagagagcatgagccagtgggtcttgtagaaygaaaaagaacttggttatttgctttgtctcagcctctaggttcattgccaaagttagaatggagcaaagaaggccaattgctggactcaggagcctcctt

SEQ ID NO: 269878 - DNA, 201 bp, Homo sapiens
caattattttagaaccatcattctggatgctgctgggaggtaagactggagagaggaggcccagatgtgaggtttctgtattcctagaaaaaattgataasggctttaaactagggtaatatctgtggaggtggggagaaatggatggatttgagaaataatatggagttcgaatctgctgaatgtgttcccaaatcagat

SEQ ID NO: 269879 - DNA, 201 bp, Homo sapiens
aaatgggttgttacccttggttggctctgagatttctgtgtctgaacattggcctgctaagtatgttttaattttttttccttgaagagagaaaaaggcarttgagtcccttcctacattgtgtacttaccaggaaatgctgagggcgtcagtgagcaggtgtggttggaatggctaatctgtgtgcaaataggtggaggc

SEQ ID NO: 269880 - DNA, 201 bp, Homo sapiens
ccacctgcatcaacatcagtagggtacctatcccatatccaagacaacaggtaggccaatccatcctcaggcgaagcattagcaaacctgaacaggacccrtcccttcctccatacccatcaaacagcccacgaggcacctgcagtaataaagcaggagcccaaatagcagcagaagaacaaggtagactattagcattgc

SEQ ID NO: 269881 - DNA, 201 bp, Homo sapiens
gggaatatgccttttatggagctccattccacccctaagaagacgctggagtatgtgatccttagaccagtctgcagaacactgaagagctgagctacaaycatgtaggtgtgggggaaagaaatgggctgagggtggagccagggcagaaagcagacagtgatcttctttcctaaatcaatcggctaggagaaaaacaaa

SEQ ID NO: 269882 - DNA, 201 bp, Homo sapiens
tatgactactttttatcttccttgtaattttctgcattttcaacaatgaacatgtattgcttttgtaatctcaaaaaggtatgcaataaatattattttaraagaacacttcagagccaagagggaccatggagaccaattttccttttccttttgaaaactataatagaaaggcacagttacaagggctcttggctttcg

SEQ ID NO: 269883 - DNA, 201 bp, Homo sapiens
acctgggctgattacaactcatggccaaactcttgcccatattacaaagagatcttgataacgctctgcatgtagcaggttctcaaatgaaagtgattgartaattgaacatgactgattcatcacatctgtgaatgcagcaagtgggacatccacacagtagaagtcctgtcagcctaattaggataggcaccaatcatc

SEQ ID NO: 269884 - DNA, 201 bp, Homo sapiens
ttcactcaacaaacattggtgggcagagctactcactgttaggacctggaactctcccattataagtcgtaagggcccccacgctacatgccaagctcatsttgggacaaatccaaacacttggggaggtcttaggactaacagaggtatctgaagcgtgtggagaccccaaccacagagtaccatcaaaaccctgtggcc

SEQ ID NO: 269885 - DNA, 201 bp, Homo sapiens
agtgtttcacctcagggcatatcacttactgacagcttctagaaaacatgaaattaaaatctgtttccaaatgagtattttctgtttaaattagtacgggrgatgctgactttctggcatgttgaaaataactttataaaaatacaaaatgttactgcaaagtaatatgaatttctagaattctattaccctcactaaatt

SEQ ID NO: 269886 - DNA, 201 bp, Homo sapiens
gagtgagggaggcttgttgttgttgttgtttgtgtttttttgagatggagtcttgctctgttgctcaggctgaagtgcagtggcacgatctcggctcactrcaacctccgcctcccaggttcaagccattgtcctgcttcagcctcccgagtaactgggattacaggcgcccgcctccatgtctggctaatttttgtattt

SEQ ID NO: 269887 - DNA, 201 bp, Homo sapiens
cccggctaatttgggagtgagggaggcttgttgttgttgttgtttgtgtttttttgagatggagtcttgctctgttgctcaggctgaagtgcagtggcacratctcggctcactgcaacctccgcctcccaggttcaagccattgtcctgcttcagcctcccgagtaactgggattacaggcgcccgcctccatgtctggc

SEQ ID NO: 269888 - DNA, 201 bp, Homo sapiens
gacctatacattgttgaaagtggattatggaagtctgctactatcattgtgttgcagtctatctcacccttcagatctatgaatacttccttcatgtattyaggtgttttgatgttggatgcatatatttttaaaattgttatatcctcttgatgtattgacctctatcataatataaagaccttctttatctctttatac

SEQ ID NO: 269889 - DNA, 201 bp, Homo sapiens
tgtgctttacagttccagccatggttccaacaaccatgctatctcatcccattgtctctggtagaatcagtatctctctctttctctcctccattcccagytctaaattcttagagaaggaatcttgggtgggctgctcatctgtattgtagttgtctgtggccagagaggacaggatgcatgttacaagcatggctgctg

SEQ ID NO: 269890 - DNA, 201 bp, Homo sapiens
gagagaaagagagagcatggattgtctaaaaaacagcaaatacttctgtttgataaatgtgcaaattaccacagagagtgacaggggccagatcatgaagkgtttcttgtatcacaagttaaggggatctccaagccatgcccggtagctttaaccatctatttgaaatgatacatttaccaagggcaatggtgctcagaa

SEQ ID NO: 269891 - DNA, 201 bp, Homo sapiens
attttatatacatatatgttaggtctatttggtctaaggtgttgttcaggtactctgttttcttattgattttctgtgttgatgacctatacattgttgawagtggattatggaagtctgctactatcattgtgttgcagtctatctcacccttcagatctatgaatacttccttcatgtatttaggtgttttgatgttgg

SEQ ID NO: 269892 - DNA, 201 bp, Homo sapiens
ctgtggaaggacaggagttagggtgaggaaagccatagggaaacttggatccctatggcttcatcattctctctctctctgtgaaccaactttatctgctstccaatttgtgctttacagttccagccatggttccaacaaccatgctatctcatcccattgtctctggtagaatcagtatctctctctttctctcctcca

SEQ ID NO: 269893 - DNA, 201 bp, Homo sapiens
atttttgtgatatcagttgtaatgtctcctttttcaagttctgatactgagttttctctcattttttcttagtctagttaaaggtttgttgattttgtttmacttttcaaagaatcatctcttagttccatcgatcttttctattgtcttctctcaatttcatttatttctgctctgatttttattatttcttttcttcta

SEQ ID NO: 269894 - DNA, 201 bp, Homo sapiens
aagacggggtccttgtcaaacatccatgaaatattaggcttgcagacactttgaagggtgagaaaaatggtatttattgggcgaaaagggaaaaaaaaaaaggaaaaacagagactctccggaaagccagagtcctgctagtgcacttcctgcctggcgaactgaatcccaggttccacccaggaagagggcggcaggctc

SEQ ID NO: 269895 - DNA, 201 bp, Homo sapiens
ctgatttcaatttctttggatatatacccagaagtgagattgctggatcatatggcaattctatgtttggttttctgaggaacttccatactgtttttccrtaatggttgtattagtttacattcccactaacaatgccaaggtttcctttggccaatgtggtatatataatatcctcaccaacacttgttatcttttgtc

SEQ ID NO: 269896 - DNA, 201 bp, Homo sapiens
cacgtggttgttgtcagaattgatttccttgcagctgtagaactgaagcatcttgcctcttcaaggctaacaggaaagagtgagtctctgactctaggcthcttacttgacattctccaggaactcacctgattaggtcaggcccacccaggattatctcccttttcattaacttcacctcaactgcaggatttcttcacc

SEQ ID NO: 269897 - DNA, 201 bp, Homo sapiens
caggagtggtggtgggcgcctgtagtcacagctacttgggaggctgaggcaggagaatggtgtgaacccaggaggcggagcttgcagtgagccgagattaygccactgcactctagcctgggccacagagcaagactctgtctcaaaaaataaataaataaataaaaattaaaaaaaaaaatctatggccaccctacttct

SEQ ID NO: 269898 - DNA, 201 bp, Homo sapiens
gtccaggttcagtgtctcgcagactataatcagggagggtctagcgtcccatctgaggctcagaggggcaggggcggggcggggggtggtggtggtggtgrtggtggtggtcttccaagcacacgtggttgttgtcagaattgatttccttgcagctgtagaactgaagcatcttgcctcttcaaggctaacaggaaagag

SEQ ID NO: 269899 - DNA, 201 bp, Homo sapiens
tggaggcctttcaaggctctggatgatatgtttttccagagaggatttacttctgcttctgaaggcaatccagatcgagacaagtcagttaatcaactccrtaattgaaccgatttgaatctgtgctttagtctttgtgatgtccagcctgtttccaattcatcattgctcctggagtgttgaccttccatgtgtttacca

SEQ ID NO: 269900 - DNA, 201 bp, Homo sapiens
acttaatgtgattaccgacatggttggattgaggtccaagatatggttggacttaaatccaactttactatttgttttctgcttgcttctttggctttttktctctctgtttttccctgtgggcttcttttggattaagtatattttaaaattccattttaattatctatgagattttaaggtatacttctttgcattaca

SEQ ID NO: 269901 - DNA, 201 bp, Homo sapiens
aacgaagggatgtgggcagggagccatagttcttcctgccaaagcagaatctttgcctaatttccccatgacagtcctacgtccatgaagaactgaggagaatgacatcagtaagtcttacactcgagttttctgtcagagcaggtgcaacttcaaaactgcttccgccctcaggaccaggcatttcctaaacacccctcc

SEQ ID NO: 269902 - DNA, 201 bp, Homo sapiens
tagtatatctgatgatctgaagttgaacgccagtaattttgcatgaaaatggtggaggcctttcaaggctctggatgatatgtttttccagagaggatttrcttctgcttctgaaggcaatccagatcgagacaagtcagttaatcaactccgtaattgaaccgatttgaatctgtgctttagtctttgtgatgtccagcc

SEQ ID NO: 269903 - DNA, 201 bp, Homo sapiens
gtgttcaatattttgcaattaagtatgatgttagctgaaggccttttgtaagtgctctttatcaaaataaggaggttaccttctatttcaaatatcctgtkttttaattataaataggcattgaatttattaaatgtttttctgcatttactgaagtgactatgtgattttccttcattattctttagcgttaatagcata

SEQ ID NO: 269904 - DNA, 201 bp, Homo sapiens
tttcctttggtcccctaccaaataagtctgacttgccggctcatagtagtattgcttgtaccaagacgcacaggactcataaaccaaagatgaagatgtgrcccccccaaggcccttgtcgtcaaggaatttattgcctgttcagtgagatgaatgaatgaatatcactattaattttaccaagcacttaaaaaacatttt

SEQ ID NO: 269905 - DNA, 201 bp, Homo sapiens
gaacgaagggatgtgggcagggagccatagttcttcctgccaaagcagaatctttgcctaatttccccatgacagtcctacgtccatgaagaactgaggagaatgacatcagtaagtcttacactcgagttttctgtcagagcaggtgcaacttcaaaactgcttccgccctcaggaccaggcatttcctaaacacccctc

SEQ ID NO: 269906 - DNA, 201 bp, Homo sapiens
ataactggctcctctattggtctgtttctcttgtctatttttctcgttttcatcctttcttcttgatctctagtatatctgatgatctgaagttgaacgcsagtaattttgcatgaaaatggtggaggcctttcaaggctctggatgatatgtttttccagagaggatttacttctgcttctgaaggcaatccagatcgag

SEQ ID NO: 269907 - DNA, 201 bp, Homo sapiens
ccaccatgtccagctaatttttgtactgttagtagagacagggtttcaccatgttggccagggtggtctcaatctcttgacttcatgacccgcccacatcrgccccccaaagcactgggattacaggcgtgagccaccgcgcccagcaggttttaattttttaaatatgcttaagtcctcctgtccattgttaaacaaagt

SEQ ID NO: 269908 - DNA, 201 bp, Homo sapiens
ctgaacgaagggatgtgggcagggagccatagttcttcctgccaaagcagaatctttgcctaatttccccatgacagtcctacgtccatgaagaactgaggagaatgacatcagtaagtcttacactcgagttttctgtcagagcaggtgcaacttcaaaactgcttccgccctcaggaccaggcatttcctaaacacccc

SEQ ID NO: 269909 - DNA, 201 bp, Homo sapiens; identical to SEQ ID NO: 53346

SEQ ID NO: 269910 - DNA, 201 bp, Homo sapiens
ccctgagagcacagagatgcccagtctgcagccatggctgggtggctgcagctgcgcccagcagggtggggctcccacccagccaactccaaaggggaacrgggctcccacctgttcctagctcccgtgggctctatagagcatgtagcccctgctgtgcctcccctgctgcagccagcatcttcacagcagccactccag

SEQ ID NO: 269911 - DNA, 201 bp, Homo sapiens
gcctcctagccttcatggtttccagagacattctgaatagccacgggccggctggtgctgacaacttggtgtattctggccaatgggggagggagctgaaygaagggatgtgggcagggagccatagttcttcctgccaaagcagaatctttgcctaatttccccatgacagtcctacgtccatgaagaactgaggagaat

SEQ ID NO: 269912 - DNA, 201 bp, Homo sapiens
aattataccttcctcatgctaattattccataaataatatggttagttctaaatggacttaatactaaaaaaaaattggtaaaataatagataccaattthtagagctttaccaaaacgaaccaaaaaaatattttcaaagaaagcctaggtgcttcttcctagtttgcaagtcaagcttaatctaaatggtgatttagat

SEQ ID NO: 269913 - DNA, 201 bp, Homo sapiens
aagcaggcacttccaagcctgtgggggttgaggggggttgccaggcccctgagagcacagagatgcccagtctgcagccatggctgggtggctgcagctgygcccagcagggtggggctcccacccagccaactccaaaggggaacggggctcccacctgttcctagctcccgtgggctctatagagcatgtagcccctgc

SEQ ID NO: 269914 - DNA, 201 bp, Homo sapiens
cttcctgtcttccctttggcgactatctcattgtgtgcagcagtcttggttggaagacataccctggtgtagtgcagaaggtctgcaaatgtttgttgccrtataagttaccctgttttagaggtgggcacatcagagagtatagtctgttgttctctatgtctatcttgctctcgttcttgtattactagtgcttggcat

SEQ ID NO: 269915 - DNA, 201 bp, Homo sapiens
ggcctgacaaagacaactgcttttcttccagggctgatgagagacccaaaggataaatagagcttaaagcaagttggaagccgtagaccattatgcagatrccatatattattacttctttacagttgggttggttactagaggactcaccagccccagcacccagatctcatgcctcctagccttcatggtttccagaga

SEQ ID NO: 269916 - DNA, 201 bp, Homo sapiens
ttattaaaataataccgaaaatcagagtaaaaaaatttgagctctgataattggaatgactagtgcccaaattttattacagcttctagttatttctgttkgcctgcagcttaaattttaagtaatataaacctattaataatagaaacataattctcaacaaagatgtcttacatatgatcatagttccagcataatgac

SEQ ID NO: 269917 - DNA, 201 bp, Homo sapiens
ggcctcagccacaactttgctctgaaatcggagcaggcactgggagcaggaagaggccaggcagcagaagcaggcacttccaagcctgtgggggttgaggkgggttgccaggcccctgagagcacagagatgcccagtctgcagccatggctgggtggctgcagctgcgcccagcagggtggggctcccacccagccaact

SEQ ID NO: 269918 - DNA, 201 bp, Homo sapiens
ctactaaaaatacaaaaaattggccaggcgtggtggcaggcgcctgtagtctcagctgctcgggaggctgaggcaggagaatcgcttgaacctgggaggcrgaggttgcagtgagccaagatcacgccactgcagtccagctggggctacagtgcaagactccgtctcaaaaaaaaaaaaaatgcaattataccttcctca

SEQ ID NO: 269919 - DNA, 201 bp, Homo sapiens
cagagcaacgaaggcagagggtgagaaagggctcccaagaaagcaagctggtctttgtataacctaatctcagaagcttcagccttgcatttctcccataycctattcattcgaagtgagtcactaaatccaaaccaaactcaagggaaagaatacaggagggcatggataccaggaggcaaggaccaatgtcagtcatcg

SEQ ID NO: 269920 - DNA, 201 bp, Homo sapiens
aggtcatcccttgcttgaaggtgggacatcacatgtggcatgcccctttctgcccaggagcctgtctgcctcctgttgccaacaacatgttgtccacagcrcacaggctgtttgtgctgaggggttcctgcaggcctgctccgagctaccctcagccctgcctttggcctcccttccatgatcattggtgcccaaagtcta

SEQ ID NO: 269921 - DNA, 201 bp, Homo sapiens
gtatagtatataatccaagtaataaaaataactataaatatgtgcataatgagttatgaaaagaaaagcaacgaattagtctgggttttttttttttttttcattttttgagacagggtctctcttgcccagcctggagtgcagttgtgtgatctcagctcgctgcaacctctgccagctaggcaggctgttattattaaa

SEQ ID NO: 269922 - DNA, 201 bp, Homo sapiens
aagagggtgtcatagccctggctcagggagcccctagttctgagctccgtgaagggctgcaactcttctctccttttcattgcctgcaatgtggtcagccrgggggagtgtttcagccccgtttgtgttatagctccttcagtcctgccatttggcaggtcctgatttcttgtcccacatccaggaagaatgaggtataca

SEQ ID NO: 269923 - DNA, 201 bp, Homo sapiens
tgcagccaagtcacactggaacttctaaccaccacttctagggccatttctggcactgaagacttgatctaaaaatacaaattcagaaaaaccctggtcgyacattgactatgccttaattgcctctatatggccccatctgtagagagggaattcattaactagaagtaccatgtctggggaatcaggtagcatattcca

SEQ ID NO: 269924 - DNA, 201 bp, Homo sapiens
gcttgactgaagtaatgggggctgtctgtgaagccttgcggcagtacagcccacgtaatttgctgagcctaatgggtgtcagggtcagtccaagtgaaagsgaagagaggatgggatgacgggtgcaaaggaatagtaaataaagcatgtttgagatccagaacagaataatggattgtggagggaggtattgaggatagg

SEQ ID NO: 269925 - DNA, 201 bp, Homo sapiens
gccaccatgtccagctaatttttgtactgttagtagagacagggtttcaccatgttggccagggtggtctcaatctcttgacttcatgacccgcccacatsggccccccaaagcactgggattacaggcgtgagccaccgcgcccagcaggttttaattttttaaatatgcttaagtcctcctgtccattgttaaacaaag

SEQ ID NO: 269926 - DNA, 201 bp, Homo sapiens
acgccaccatgtccagctaatttttgtactgttagtagagacagggtttcaccatgttggccagggtggtctcaatctcttgacttcatgacccgcccacrtcggccccccaaagcactgggattacaggcgtgagccaccgcgcccagcaggttttaattttttaaatatgcttaagtcctcctgtccattgttaaacaa

SEQ ID NO: 269927 - DNA, 201 bp, Homo sapiens
cacgccaccatgtccagctaatttttgtactgttagtagagacagggtttcaccatgttggccagggtggtctcaatctcttgacttcatgacccgcccayatcggccccccaaagcactgggattacaggcgtgagccaccgcgcccagcaggttttaattttttaaatatgcttaagtcctcctgtccattgttaaaca

SEQ ID NO: 269928 - DNA, 201 bp, Homo sapiens
cattcttaaatgttcagaggctgaagcattgctcaaaactttcccattatcttctggtgtcactcaagagtttctgacctcccaggtagtttttctgattwaaaaaagcaccaaaagaaggccaatcaacccacaatgctggcatcttgcttaacctacccgctagggctggcccttggcaaaactacaaaacaggttagc

SEQ ID NO: 269929 - DNA, 201 bp, Homo sapiens
ggctcagcttgggctcagaggcctgacaaagacaactgcttttcttccagggctgatgagagacccaaaggataaatagagcttaaagcaagttggaagcygtagaccattatgcagatgccatatattattacttctttacagttgggttggttactagaggactcaccagccccagcacccagatctcatgcctcctag

SEQ ID NO: 269930 - DNA, 201 bp, Homo sapiens
tcatctaacatagagatagttttacatttactttttccattctgaattctgaattccattctgtatgcgttttggaatttttttttttgagacagagtctygctctgtcaccaggctggagtgcagtggcgcaatctcagctcaccgcaacttttgcctttcggtttcaagtggttctcctgcctcagcctcccgagtagc

SEQ ID NO: 269931 - DNA, 201 bp, Homo sapiens
tctgatggctgtgagggtgagggatcacagtgaggagagagctagggcataaagagtgacggtagtgggaggggatccacgagatggcctgcattaatgcrgtgggaacagggctggcaaaaagaaaattcacggataaaggatacagaactcgtcttggtgacaagtgaatgaggaggttaaggtgaagaagaggaagaa

SEQ ID NO: 269932 - DNA, 201 bp, Homo sapiens
caggagaaggaatttcacaagacaatgtcatcagttaaggcaggaacaggccattttcactttttttgtggtggaatgtcatcagttaaggcaggaacccrccatctggatgtgtacgtgcaggtcacaggggacatgatggctcagcttgggctcagaggcctgacaaagacaactgcttttcttccagggctgatgaga

SEQ ID NO: 269933 - DNA, 201 bp, Homo sapiens
aaggtactcagtgggggagcttttgagccaggatgagccaggagaaggaatttcacaagacaatgtcatcagttaaggcaggaacaggccattttcacttyttttgtggtggaatgtcatcagttaaggcaggaacccaccatctggatgtgtacgtgcaggtcacaggggacatgatggctcagcttgggctcagaggcc

SEQ ID NO: 269934 - DNA, 201 bp, Homo sapiens
aaaattggtaaatggaatctaattgaacaaaagagcttgcgcacagcaaaagaaacgatcaacagagtaaacagtttacagaatgggagaaagtatttgcmaactatgcatctgacaaaggtctaatatccacaatctgtaagaaacttaaccacatttacaagaaaaaaaaaaacccattaaaaagtgggcaaaggacat

SEQ ID NO: 269935 - DNA, 201 bp, Homo sapiens
ctctaccagaaaatgaaaggaattgaaattaagagaagggaaagattgaagagtggaaaggagaaagtggttgagggacagtgagagagcttggagaagasagtaagaagaggccgcttacccgatttaaaattggtgagatgttccttgggctggtcggtctgaggacctgaggtcgtaggtggatctttcccatggagc

SEQ ID NO: 269936 - DNA, 201 bp, Homo sapiens
caccaattaacattttgctatatttgccttattattttttctttgtatgtgtgtgtgtgcatatatatatatctatatatatatatatattttttttttttctggtccatgttgcaaagaagttgacatcatgacctttgactcttaaatagtttagtgtgcacagcagatctttgaataatgtcgcttcattcaacatca

SEQ ID NO: 269937 - DNA, 201 bp, Homo sapiens
gtgcgtgggcaagtgagtgtggggtctggccactgtgcacatccaggcgtgctgactgctgtggcagagcaggcagctccagatgctggcacaggtgctgkctccatgtgagactccagctggaccagatgtaccacatgcagcttccactgcgggcacccatttctgaatgaagggaacatagtggtgcctggaatcttg

SEQ ID NO: 269938 - DNA, 201 bp, Homo sapiens
aaactgcttgatatagatctatttacactctgtccgcaggtatttgcagacctgtttactcaggcctttcctggttaactgtactggtttcctgtactcarttggtagtactacacacattacaatcacagattgcttgctttatagacgtttatagatgtgctgtttaggttggctttatttccttaagtaaactgcaag

SEQ ID NO: 269939 - DNA, 201 bp, Homo sapiens
attgaaatgtttcttctttcttaatatagtgatgatgaaaacacatttaaaatattagttgcaacagatattcatcttggatttatggagaaagatgcagycagaggaaatgatacgtttgtaacactcgatgaaattttaagacttgcccaggaaaatgaagtgagtgtggtttgtatttgtgcactatctaccatattc

SEQ ID NO: 269940 - DNA, 201 bp, Homo sapiens
acctaaaagtggtaaaaagagtaagtttatgttatgtatatttcaccacaaaaaaaaagtgtttaacagtaggatagtatgttttcaaatctcacaaaatrtatatggaaacatttttgccattggctctagacctgcactcatgagttaagctcttagaagtaatacattccaaagataacagtaaactctgtttttcat

SEQ ID NO: 269941 - DNA, 201 bp, Homo sapiens
aaaatggcttgttttgcctcaaaatttaccatgttgagcaagctggcagttgctaaagtttggccttaccttctccactgacaacttgcaatgagtatgcrcattttaacattatgatagaagctattttttgatatacttctttttttctaggagaagagatcaactttgggaaacttatcacaaagccttcagaaggaa

SEQ ID NO: 269942 - DNA, 201 bp, Homo sapiens
aaacattatgagtgaaaaaaaaacagttgcaaaaggacaaatattatatgactctacttatatgaggtacctagagtaatcagattcatagaaacagaagrtagaatagtggttactggggagagggaggaatgtgaagttactgttgaataggtatggagtttcagtttgggatgatgagaaagttctatagatggatgg

SEQ ID NO: 269943 - DNA, 201 bp, Homo sapiens
aggtaatttcttacagttcacattttgaataatggctaccttatagtaacagattttaatttaggatatgtttagttgatagtttaaacaaaatgaatccwcaaaatgtttctatgaagtaagtagggtgacaattaattacattcatttgcagttgctgcacagcagggaaaattagtgtttaattaatgttagttatta

SEQ ID NO: 269944 - DNA, 201 bp, Homo sapiens
tacagacagctgattagcaacctttgttcctctttgccatgtattcacaggtcccagagtttaagacgtggacatctttagggggctcttattttgcctaygacactggttaatttcatctctattaatcatagctgccatttttggactccatatcctagccatcaggcctctacatttcacgtgtcctgtactcctccc

SEQ ID NO: 269945 - DNA, 201 bp, Homo sapiens
cagagaaggtaatttcttacagttcacattttgaataatggctaccttatagtaacagattttaatttaggatatgtttagttgatagtttaaacaaaatkaatcctcaaaatgtttctatgaagtaagtagggtgacaattaattacattcatttgcagttgctgcacagcagggaaaattagtgtttaattaatgttag

SEQ ID NO: 269946 - DNA, 201 bp, Homo sapiens
ctatatatgatcattcagaagagataccaaataatataaaaaatggttggccaggcgcagtggctcatgcctataatcctaccactttgggaggctgaggygggcggattgcctgagctcaggagatcgaaaccagtctgggcaacaaggtgaaaccctgtcccctactgaaaatacaaaaaattatccaggcagggcggc

SEQ ID NO: 269947 - DNA, 201 bp, Homo sapiens
agccagaaatttgtggatcgggtagctaatccaaaagacattatccattttttcaggcatagagaacaaaaggaaaaaacaggtaagctagttatttttaygaggtaaaaaaatgttcttataggatttgtgaaggaatctttattaaaaactgtaacataataatggaagatgttttaatatgattgtaatgtcttaaac

SEQ ID NO: 269948 - DNA, 201 bp, Homo sapiens
atgtaatcattctgcattgtggaaattattgcaataccttgattccatcgaacaaagtattttgcttatgcttataaacttttcaaacattagtttctcartaggataaatgatatagctccatcatgatctactgtagaaaattaattcataaatttcaaagtatcaagcataaacactgtgaatactgaaggattagtg

SEQ ID NO: 269949 - DNA, 201 bp, Homo sapiens
atgaaacaaagtttgtgttaagtatttatgtgtggaatttaccacttgtggtgccatgttggcacttaaaatattttggattttggattttcagattaggractcaacctgcattgcttgtttcccacactagaacaaggactttgttcactgctgtgtcttccatatctagaagaagcctgggacatctgacataaagta

SEQ ID NO: 269950 - DNA, 201 bp, Homo sapiens
gaaaattcctgtggtaataagctgctattcagccaagttaaactcagtttactacgttgttttttaatctttttaaaaattttgagattgaagaaatgctkgaaaatgctgaacgggaacgtctgggtaattctcaccagccagagaagcctcttgtacgactgcgagtaagtcctatttatatagattgaatattattaa

SEQ ID NO: 269951 - DNA, 201 bp, Homo sapiens
tttttgtaagtagaatatggagtatgcttttaacaggtgatacgatattcatgcagatacctacttttacatacacactaacattctttgaaattattttrcataggcagatgcactttgtgccttggacattttaagttgtgctggatttgtaaatcactttggacgttcaatgtctgtggagaagatagacattagtcc

SEQ ID NO: 269952 - DNA, 201 bp, Homo sapiens
aagggaggaagatgaatatgcataaaattcctcttcacacagtgcggcagtttttcatggaggatattgttctagctaatcatccagacatttttaacccrgataatcctaaagtaacccaagccatacaaagcttctgtttggagaaggtaattctttttgataaagtcaatgagatctactttagttgaagaattattc

SEQ ID NO: 269953 - DNA, 201 bp, Homo sapiens
ctttggcatgtgattccagttgctgtaggtgatttgtagtacaaaaatgtagcaaatacttttactattgtaattttgttttgagaagacactatcctcayctatgtttttgtaagtagaatatggagtatgcttttaacaggtgatacgatattcatgcagatacctacttttacatacacactaacattctttgaaatt

SEQ ID NO: 269954 - DNA, 201 bp, Homo sapiens
tatacattttttctccaaaagtcatattgcagcctttttgcatgtaggaatgaacactaaacatgttgagggggtcatttgaaaacaccacattaccaaarcaaaagtacaaaaatgcagaaaatgcaataaatatgtagtcatgtgccacatacaacattttgatcgatgtcagactgcatatccagtggtggtcccatg

SEQ ID NO: 269955 - DNA, 201 bp, Homo sapiens
aaagtaacaatgttgagaccaaaggaagatgagaactcttggtttaacttatttgtgattcatcagaacaggtaaaacttttctctgaaaaagtttgagcsaagtgctgaggcttcccaaatctgtttctgagcttacctattttagtgaaatgcccttaatctttcaaggttgtcaatgcaagatcagacaaaacataga

SEQ ID NO: 269956 - DNA, 201 bp, Homo sapiens
ttgttgctttgtttccttgccaggtgattgaggtagatgaatcagatgtggaagaagacatttttcctaccacttcaaagacagatcaaaggtaggtgcartgattttctgcaaaagaaacatctgaaaaaaattaaaaattatccagaattccaaagttacacatttttctatgccatgtaagtttaacagacttatttt

SEQ ID NO: 269957 - DNA, 201 bp, Homo sapiens
atcattaagcaatgcatgactatcacagaaaggacactttaaagtacacaagtggaaacaagaaggcagagtggctcattgttcagcctcagctgggaatrtgtgtgtcaggcaattcaaaatatttaccactctgcgtctccataaatgatgccaaaagtatcgtgagtgttgatttttagggttacagagaaattttgg

SEQ ID NO: 269958 - DNA, 201 bp, Homo sapiens
catccagtgatttgtatcttacagaatgtgcagctctcactgctaacagaaagagggatgggtgaagcagtacaagaatttgtggacaaggaggagaaagrtgccattgaggaattagtgaaataccagttggaaaaaacacagcgatttcttaaagaacgtcatattgatgccctcgaagacaaaatcgatgaggaggta

SEQ ID NO: 269959 - DNA, 201 bp, Homo sapiens
gagattgaagaaatgcttgaaaatgctgaacgggaacgtctgggtaattctcaccagccagagaagcctcttgtacgactgcgagtaagtcctatttatayagattgaatattattaattttcaaagcatagtaatgtacagtttacatggtttctttgaaaagtagtgaggagagtgctcatagtaataagaagagcaat

SEQ ID NO: 269960 - DNA, 201 bp, Homo sapiens
tatcagattcctcattattatcagtctcttctctgaatgttacctccactttctaaccttcagtgaagcccagctgtcccctgaggttcctgtgtcccatrcagttctcttacccctgggcttttggaaagaagcggggatcactgttctccttgctccacccactgcttccttttctgcctgcaaacacactgttccctt

SEQ ID NO: 269961 - DNA, 201 bp, Homo sapiens
gggtttcaccgtattatccaggttggtctcgatctcctgaccttgtgatccgcccgcctcggcctctcaaagtgctgggattacaggcgtgagccaccgcrcctggtctgcacattgattttgtatcctgagactttgctgaagttgcttatcagcttaaggagattttgggctgagacgatggggttttctaaatataca

SEQ ID NO: 269962 - DNA, 201 bp, Homo sapiens
gtaaagtcattattttttcctttccatatgctgttggttagaattgagtctctgagtccagcttactctcaaagggcagggagttaagtttccacttctgrtggacataagttaaaaccaccaaagtaattaataaatattttagggtagatattttgaggctgtgcgacttttctgttcctccttaaatttgttcattaa

SEQ ID NO: 269963 - DNA, 201 bp, Homo sapiens
cctgtcaccacgcccctgctaatttttgtatttttagtagagacggggtttcaccgtattatccaggttggtctcgatctcctgaccttgtgatccgcccrcctcggcctctcaaagtgctgggattacaggcgtgagccaccgcacctggtctgcacattgattttgtatcctgagactttgctgaagttgcttatcagc

SEQ ID NO: 269964 - DNA, 201 bp, Homo sapiens
gaatcagaaagcagtgggtatacatattttaaatttcttaattaagtgaggcaatggctggattctttcttttattttaggttcaggggtacatgtgcagktttgttacataggtaaactcatatgacagggattgttgtacagattattttggcacccaggtattaatcctagtacccattcattatttttcctgatcct

SEQ ID NO: 269965 - DNA, 201 bp, Homo sapiens
gtgtaggaatgctgtgatttttgcacattgattttgtttttattttcatttttttgagacagagtcatgatctgttacccaggctggagtgcagtggcgtratctcagctcactgtaagctccgcctcccaggttcacgccattctcctgcctcagcctcccgagtcgctgggactacaggcacctgtcaccacgcccctg

SEQ ID NO: 269966 - DNA, 201 bp, Homo sapiens
tttgaaggggttgtttgattttttcttataaatttgtttaagttctttatagattctggatattagccctttgtcagaagggtagattgcaaaaatgttcycccattctgtaggttgcctgtccactctgatggtagtttcttttgctttgcagaagctctttagtttacttagatcccatttgtcaattttggcttttgt

SEQ ID NO: 269967 - DNA, 201 bp, Homo sapiens
tagaaaattggcatttcttttcctaagcacagtaaattacgaattcattcataaaacagcacatattgtcatataagtaatattacaaaactacattgtastgactaaaagacattcattaattcattgactaaatcttactgagtacctgctattatggatgctgcaggatatagggatgataaaacagatgaggttttg

SEQ ID NO: 269968 - DNA, 201 bp, Homo sapiens
aagaaattactggacatatttatacttacttgcattttctgtgtgttttctctagtatatagttagactgatttatagatttctactattgatagaattcrtgcttttctgattgaccaaaggggaaatccttcctatgtaaaacctttcatgatcttcctccaaatatagaattgactgctttctcttttcgggtttcca

SEQ ID NO: 269969 - DNA, 201 bp, Homo sapiens
ttcatgtatctttaaataataactgatataggtataataccatagtttgcatatcacttgtttatttaatatttgatattgaaaactcttagcacttatgkgagattgatgtttttactcccattatatttattagtaaaaagataatgttaagaaattactggacatatttatacttacttgcattttctgtgtgttttc

SEQ ID NO: 269970 - DNA, 201 bp, Homo sapiens
gtgtaacagctttctctgctgtaaagttcccattttctacttttcaattaataaatatttttgggaaaatactttgagactatgcaaatatcctgtttcaycttaaacttttactcgctaattttagcatccatgggtgatcttatttccagtaattaatactgtggtattttaattgtaagttttgatttccttcattct

SEQ ID NO: 269971 - DNA, 201 bp, Homo sapiens
atgcagttctcttacccctgggcttttggaaagaagcggggatcactgttctccttgctccacccactgcttccttttctgcctgcaaacacactgttccctttaagcttctgccatctggctaaaccgcattgctttttctctcagactttttacctacttacctaccttcaattttgccagtgtttttagtgtttcaac

SEQ ID NO: 269972 - DNA, 201 bp, Homo sapiens
aaaaattacaggaaaagctgtctagacttgactacatagaaattataaatgtttgcatatcacattgtcaaaaaacaaaattaaaagatattgacatgaamatatttgtatgtgggcagaaaaaagtttaatattcttaatattaatgagctcttagaaatcttaaaaataattaaacatttgatagaataatgaacaaag

SEQ ID NO: 269973 - DNA, 201 bp, Homo sapiens
tatgaacgagaaatactgactgtggggaaaagaccgtggctattaacaaaaatggcttgttttgcctcaaaatttaccatgttgagcaagctggcagttgmtaaagtttggccttaccttctccactgacaacttgcaatgagtatgcacattttaacattatgatagaagctattttttgatatacttctttttttctag

SEQ ID NO: 269974 - DNA, 201 bp, Homo sapiens
atataattgagttttaaaagatttgtataatactttgtccttgtttttcaaaattgtgatcaatgtctttaccctccttctattcaaatctaaaacttggsacattttttattttttattttttatttttgagaaggagtcttactgtcacccaagctggagtgcagaggcacgatcttggctcactgcaacctccacctc

SEQ ID NO: 269975 - DNA, 201 bp, Homo sapiens
tgtgccaatcttacagagttgagaagattgagatgataagaaaaatggctagagtagtgaccagcataaagacaatacttgggtaacttaagattttctcrttgttcttaacatgttgcagtcttatttagctgtggatttaattctgtttgttccgcgtgggctttatcatatattctaatgtaatattgtttttcagca

SEQ ID NO: 269976 - DNA, 201 bp, Homo sapiens
cagcacatattgtcatataagtaatattacaaaactacattgtactgactaaaagacattcattaattcattgactaaatcttactgagtacctgctattrtggatgctgcaggatatagggatgataaaacagatgaggttttgaattcgtcgagcttacaggaggtggaggtgcaaagagagacatgatacacaaatat

SEQ ID NO: 269977 - DNA, 201 bp, Homo sapiens
actttgggaggccgaggagggggttcacctgaggtcaggagtttgagaccagcctggccaacatggtgaaacctcgtctctactaaaaatacaaaagattrgctgggcatggtggtgtgtgcctgtaatcttagctactcaggaggctgaggcaggagaatcgcttgaacccaggaggcagaggttgcagtgagccgagat

SEQ ID NO: 269978 - DNA, 201 bp, Homo sapiens
tcaggggtctacatgatgtggtctaaaccaaaaaagctgccgtcccctgggtgcagtggagtttatttcactggaacctttgtccatgttgatcctgttgygtgggacatacttctctcctcctttctctataccttcttcagcacccacctaaagcctctgtcttcaaagaagcctttcttgacctgcccacagagaaca

SEQ ID NO: 269979 - DNA, 201 bp, Homo sapiens
aggagtttgagaccagcctggccaacatggtgaaacctcgtctctactaaaaatacaaaagattagctgggcatggtggtgtgtgcctgtaatcttagctrctcaggaggctgaggcaggagaatcgcttgaacccaggaggcagaggttgcagtgagccgagattgtgccattgcactgcagcctgggcaacaagagtga

SEQ ID NO: 269980 - DNA, 201 bp, Homo sapiens
ttcattctggcccaaccactagttgtatgaccttgagcaaccgcatcccttatcccttggtttgtattaggttggtgcaaaagtatttgcgggttttgtcrtagaaagtaatggcaaaaactgcagttacttgtgcaccaaccaaatgcttcgtagatttatgagatctaaatggattaaatagtgtctgttgcacagtag

SEQ ID NO: 269981 - DNA, 201 bp, Homo sapiens
gctacttaattctactttgccctttccttcacttctgcttctactgtttctcttccctgcgtcccttaattgtaactgttccaccccccataaccccaggwagggacttctagatgtgtattatatttactcattctcttgatttgtatttagtatttcttattattgaatctaaagtcttcctgacttttaagtccctta

SEQ ID NO: 269982 - DNA, 201 bp, Homo sapiens
acttcctgagcttcattctggcccaaccactagttgtatgaccttgagcaaccgcatcccttatcccttggtttgtattaggttggtgcaaaagtatttgygggttttgtcgtagaaagtaatggcaaaaactgcagttacttgtgcaccaaccaaatgcttcgtagatttatgagatctaaatggattaaatagtgtctg

SEQ ID NO: 269983 - DNA, 201 bp, Homo sapiens
tatttgaaaacatcagtcttattttcttttaccttgaactcttccaagataaataatctaaagtccttgcttattgatccctaaatcttctggtgagtctsccatggatcatatgactgcaaaaactagacttacttggttttaagttggtaagctgaggaaagccttattgaaacatgagtagtaatattttaagtttta

SEQ ID NO: 269984 - DNA, 201 bp, Homo sapiens
ggttaacaagttatttttccttctaaagttagagatttgttttataagctcaggtgcttaccttgcctgcttgaatatcaatatactgaaagctcaaagcygattttgtatgctttgtgtcttaaattcaagtaggagctacttttgtaaatagtctgttaaaatttacaaatgtttttggggtgtttactgaatgcagga

SEQ ID NO: 269985 - DNA, 201 bp, Homo sapiens
ctctcagagtatgagacaactccacatatttgaaaacatcagtcttattttcttttaccttgaactcttccaagataaataatctaaagtccttgcttatwgatccctaaatcttctggtgagtctcccatggatcatatgactgcaaaaactagacttacttggttttaagttggtaagctgaggaaagccttattgaaa

SEQ ID NO: 269986 - DNA, 201 bp, Homo sapiens
actatcagttttttggttgctactgttcctctgattgttgcagctttgaccattgcattctcttttatgttggcctctgtgtcctttcaatgtcttcccayctgttttgaggtcatgaccttagttagctttttggcacctcaagatggtctaggctcttggctcttgtaatggcaaaaatcacaattacttttgcaccaa

SEQ ID NO: 269987 - DNA, 201 bp, Homo sapiens
tctaaagctcgtcaactgtgatcacagtaaaagaaaacttatttaataagcagtaaataaggaacctgtttatgaacagaaatattagtcatcaaaaaggrtatttggaatgttttaaatatttatctgtttgttaactggaagctaatatgcagctatagattggagtcttgcagtaatttgatatattgatatagtatt

SEQ ID NO: 269988 - DNA, 201 bp, Homo sapiens; identical to SEQ ID NO: 53355

SEQ ID NO: 269989 - DNA, 201 bp, Homo sapiens
ttgtgtgtttgggggtttggaactattttttaattttatggaaaatgtattttgtttttgttctcttactaccttttgattggtttaagggaagatcaagrcaaaattgcttttatttatattttattttattttttggtgacagggtctcgctctgttgccaggctggagtgcagtggcacgatgtcttttctaaatgga

SEQ ID NO: 269990 - DNA, 201 bp, Homo sapiens
acaatatagaacaagtgcttttgtcttcagaactctttcaagtctaagatgttataatcttatcctctcagagtatgagacaactccacatatttgaaaayatcagtcttattttcttttaccttgaactcttccaagataaataatctaaagtccttgcttattgatccctaaatcttctggtgagtctcccatggatca

SEQ ID NO: 269991 - DNA, 201 bp, Homo sapiens
caggggttcttggagaagaacctggtcccagaggagcttgactgaccataaaaatgagtactgcagatgcactgtaagcacctgacttctggaatcccttrttatttggggtttctaaagctcgtcaactgtgatcacagtaaaagaaaacttatttaataagcagtaaataaggaacctgtttatgaacagaaatattag

SEQ ID NO: 269992 - DNA, 201 bp, Homo sapiens
tgcttttatttatattttattttattttttggtgacagggtctcgctctgttgccaggctggagtgcagtggcacgatgtcttttctaaatggattcttaycaaattaaaaatgcgtggcatgttcttggtcctaaggtgtttattccttcttaggcttaggctttcagttgatatattctccttaattcttccgtttctt

SEQ ID NO: 269993 - DNA, 201 bp, Homo sapiens
ttagtgtgtgtatttataaacactacagtatctcaataagctgggaaataatgagactgacagttgggcattgagttatgcgtacctataattctatctcyctttagatttttaaaaatatcaaatagttttataattaggcatcattcagttttgcagataggactcagaaaatctttagctaaagaagtatgcaagttt

SEQ ID NO: 269994 - DNA, 201 bp, Homo sapiens
gcttgcacagcaaggaagttctctctgtgtactaaattggccataacatgccaaggatactgtactcctctttggaattatatttcaaggagactgtcaaytatatatgatcattcagaagagataccaaataatataaaaaatggttggccaggcgcagtggctcatgcctataatcctaccactttgggaggctgaggc

SEQ ID NO: 269995 - DNA, 201 bp, Homo sapiens
aaccaccaaaattggttagcatgcaatcgacagagtcatagatgtagattacccacctttaccttagcccaaatcgtctttttttgtcctgtcttgttttwtttttcttttttgtttttgtgtttttgtgtcctgtggaatccagtgtcctggcttgttttatgttaagctttccttgactccagtgggtagaattcatca

SEQ ID NO: 269996 - DNA, 201 bp, Homo sapiens
gtgatgatgaaaacacatttaaaatattagttgcaacagatattcatcttggatttatggagaaagatgcagtcagaggaaatgatacgtttgtaacactygatgaaattttaagacttgcccaggaaaatgaagtgagtgtggtttgtatttgtgcactatctaccatattcccttggttaacaagttatttttccttct

SEQ ID NO: 269997 - DNA, 201 bp, Homo sapiens
gaaaagtgaactcagggaaaggactctgcttacctctctgagttctagcttttcttcagttttggcctggtaattccttggtatgtgatcagctcttcaawgccattgagaatttttttttttttttaaatgtttgaggtactaatttggattgttgtcagcagaagtgagtttgaagacaatgagaggtcattttgtctg

SEQ ID NO: 269998 - DNA, 201 bp, Homo sapiens
cttgaagcatctacgttatccatgaagtgtcgcgagagaaacggacgccgttctctcccgcggaattcaggtttacggccctgcgggttctcagaggcaarttcagaccgtgttgttttcttttcacggatcctgccctttcttcccgaaaagaagacagccttgggtcgcgattgtggggcttcgaagagtccagcagtg

SEQ ID NO: 269999 - DNA, 201 bp, Homo sapiens
gctaacttaactgattacctccagtactaggcctttttttgaaaaatgaactgattttttaagtataaatttgtgaaacatttttatcaggttggatttgktgggtttttttttaagtctctgacagaatacctgtgaagtagtaactatacttgtcatcactttgggacagaagcaacaaattaagactgtaacttctag

SEQ ID NO: 270000 - DNA, 201 bp, Homo sapiens
ttctctataccttcttcagcacccacctaaagcctctgtcttcaaagaagcctttcttgacctgcccacagagaacatgcttcttcctttgtgtcctcatycaactttgtacatacctcttatagcaccactcacagtctgcttccagtgatctgtttacatgtttttcttcccagtcagtttgtgaatttcttgacagcc

SEQ ID NO: 270001 - DNA, 201 bp, Homo sapiens
ctgcgtgagggcggggcctcgccgctactttccccgccccctcactgcgtgcggtagccaatgagagccgaactggacttgaagcatctacgttatccatraagtgtcgcgagagaaacggacgccgttctctcccgcggaattcaggtttacggccctgcgggttctcagaggcaagttcagaccgtgttgttttctttt

SEQ ID NO: 270002 - DNA, 201 bp, Homo sapiens
tgtgtcttaactcccgagccaatactcttccctttacatcagggtttctccatagtagcactgttgacattttggactagataattctttgttgtgaaggrttgtcctatgcattgtaggatatttaacagcatccttagcctcaggggctgttcgttcagtatttggtctttggcttcatcctcatctgtacttaagtta

SEQ ID NO: 270003 - DNA, 201 bp, Homo sapiens
ttttgacttttcaataatagaatgtaaggtgcatttttccttccttgaaggcaaaaaaacttgtggccaaaggaggtctgtttcctgccagagaatcctgyatgtgctctttcttttttaactcttgagccctaaaacagaatcttctcctgagtgtaagctacttaattctactttgccctttccttcacttctgcttct

SEQ ID NO: 270004 - DNA, 201 bp, Homo sapiens
agttctcttaagtttatctgctaggtccttagttcttcctcccaaatatatatggttcctctctactactcttttcacactaataaacttagtccaaaacttgatcacatttcacatggcctgcaggaggtccccttccatctttctgcttctattcttttctgctacatctactcagcatagcagccaaagtgaactttt

SEQ ID NO: 270005 - DNA, 201 bp, Homo sapiens
ttttagagtaaattcctctagtattaaataagctggaaatgaatttgaatggaatgggaataaataaaaggactgtaaaagttatgtgcactttgggaggycgaggctagcgggatcatctgaggtcaggatttggagaccagcctgaccaacatggtgaaaccccgtctctactaaaaatacaaaattagccaggcgtgg

SEQ ID NO: 270006 - DNA, 201 bp, Homo sapiens
acagaagggaaaatcgccgccttgcatctcacttccgggttcgtctcctagcctgctcaggattggctcctgcgtgagggcggggcctcgccgctactttmcccgccccctcactgcgtgcggtagccaatgagagccgaactggacttgaagcatctacgttatccatgaagtgtcgcgagagaaacggacgccgttctc

SEQ ID NO: 270007 - DNA, 201 bp, Homo sapiens
cccccaatttgattcctaaaactagtcattaacatagtcaacattgtatttactgtgagactattgtcattgaatagttcacgccaatagaaattggtcaytcagtgactttctcacacattatgtcagttcatctctaaagattttttaaaattgtttttattaaatatgcatccataggaattttaagctggtgaaatg

SEQ ID NO: 270008 - DNA, 201 bp, Homo sapiens
gatgataacattaaggttaaattagcagaaacatttatttttaagagtatgattttataaagaagcatttttagaaactaagaaatatgaaagctttcgtwtgcacatcaccctgaggaaatttacactgtgactcggtgttcatttctctccacttcagacatgttggtttgctgcgtattaaagggaggaagatgaata

SEQ ID NO: 270009 - DNA, 201 bp, Homo sapiens
tgaaactgcatgcctcttaacaggtctgtggggtaggtacttactatattatttctgttttacagaaaaggaaacaggctttaaaaagataggtagcttaycctagatctcataacttgtcagtaccagatctgggaatgatctcacattctctgcactctacaaccagtagttgaccactgtactagtttccagagcaag

SEQ ID NO: 270010 - DNA, 201 bp, Homo sapiens
ctagctaagatccttagctttttgcttcacaaacatgttgtctttattgccatttagggagtggtatctggaaagatgctgttccattcttggtaggtttratataaaagcagagaggaagaaagagagaaaaggcagcctggaaaattgtaaaggattcatgctgagttcaaccttgcattcaacaaatgacagctttgt

SEQ ID NO: 270011 - DNA, 201 bp, Homo sapiens
caacatagaataaagcttctatttgtgtagaaagactggagaccagttatgatgccttaaaagttttacagaatggcttgactaatttttttaaggaaacrgtattcatctatgaaaagaggctatgtaaataaactaaatacgaaacgtcagatttcctgaattatgttgtaagcaaaaatcttattatggtaccttttg

SEQ ID NO: 270012 - DNA, 201 bp, Homo sapiens
agggacacaccggagaagttgtcagggaagaactcaaaggatttggggcctgattatataatttattacagttgtcccttggtatccacggggggtgttcrgtccaggacctaaaatcctgggatgctgaaatcccttgaataaaatggtatagcatttgcatataacctacatatatcctcctatgtactttaaatcatc

SEQ ID NO: 270013 - DNA, 201 bp, Homo sapiens
ataaaggtcaaattctcttataacaaggtccatggagtatggaaatttattattgtgctgcaattttattggaaaagataaaaattacacttgtagccacrggagttgtaaataggagttgacagcccagatttttccattgaagttagtcagcagaggatagtggctaggtgaataaaagtacctctgaagtcacggcct

SEQ ID NO: 270014 - DNA, 201 bp, Homo sapiens
taatgaggtcctacttgtccatttgtatttttcttgcagttgcttttggggacttagccaaaaattatttgccaaggccagtgttgagaagggtattttcwtggttttcttctaggattattatagtatgaggtcttactattaaatctttaattcatcttgagttaatttttgtatatggtgaaaggtagggatccattt

SEQ ID NO: 270015 - DNA, 201 bp, Homo sapiens
gcatgtgattccagttgctgtaggtgatttgtagtacaaaaatgtagcaaatacttttactattgtaattttgttttgagaagacactatcctcatctatrtttttgtaagtagaatatggagtatgcttttaacaggtgatacgatattcatgcagatacctacttttacatacacactaacattctttgaaattatttt

SEQ ID NO: 270016 - DNA, 201 bp, Homo sapiens
acagtgttttttttttaaagcctgagccactttgtggttttagcctcaatataataatcatccccttactcttagactaattccttttcccctgtcacttkgcctgtatactctgtaaaaatgaggaccttagaaaatcaacatttcctgtgaacttgagagactatacaagcagtgcccaaatcagtaggattaggcagg

SEQ ID NO: 270017 - DNA, 201 bp, Homo sapiens
gggataaaggtatcgtcaacaacaaagaagggattaggaggctttccttcaatacatttgtagttcatttggttaggtgattagattttatccttcaggtrtttttctatgaaatatttttagtgtgtgtatttataaacactacagtatctcaataagctgggaaataatgagactgacagttgggcattgagttatgcg

SEQ ID NO: 270018 - DNA, 201 bp, Homo sapiens
gaaattggcagcacctatcaaaattacaaatacatgtactctttgacctaacaattcccttccaggtattcctttacaggtcgactcaccagggcaacaarattactcgctgtagaagattactttgtacaagattactgactgtagcattgtttgtaaaacaagactgccaagaatctaaatgtccattggtagggaact

SEQ ID NO: 270019 - DNA, 201 bp, Homo sapiens
gtatgtcatgggcattggcatttcttgaaagatccccaagataattccaacatgctgctagcattaagaactgctagcatagatttaagagctggatgacmtactgtgttagtgaggtaggggaaaactgtccctcttgtgcactgccattgcattatgtgtaaatctctatggtgggaaattggcagcacctatcaaaat

SEQ ID NO: 270020 - DNA, 201 bp, Homo sapiens
gtatggctcatgaattagtagataggtaagtgaaagagaatagaaactctagaaatagcctcaaatacatgtaggaattgagtatttgatgaaggtcaccrtctcacaatgtaggggaaataatggattcagtaaaactgctaggagaaactgttacacatattttaaaaatctaggtgtggggaaggcttctaagtatga

SEQ ID NO: 270021 - DNA, 201 bp, Homo sapiens
taaatgtttcttccttcaaggaatttacactttagtggtatgctaattacagggcactgctaatccaccaagataaatgttttcttcaggtgtaatgaaayctaagggacgtgccagtatcttcctgggaaaggtcattgaaggttttacaaagaagataggtgacatttgagctggtgatcagccgatcagttagcatgc

SEQ ID NO: 270022 - DNA, 201 bp, Homo sapiens
ccaatcttacagagttgagaagattgagatgataagaaaaatggctagagtagtgaccagcataaagacaatacttgggtaacttaagattttctcattgktcttaacatgttgcagtcttatttagctgtggatttaattctgtttgttccgcgtgggctttatcatatattctaatgtaatattgtttttcagcaactt

SEQ ID NO: 270023 - DNA, 201 bp, Homo sapiens
tctaagggacgtgccagtatcttcctgggaaaggtcattgaaggttttacaaagaagataggtgacatttgagctggtgatcagccgatcagttagcatgyattaaaggaaatgatctggtgtagagagaagaaacagtggcacaggacgggcatctactttgaaggatggtcatggaaagcctctgaggaagctacattt

SEQ ID NO: 270024 - DNA, 201 bp, Homo sapiens
ctactaaaaatacaaaagattagctgggcatggtggtgtgtgcctgtaatcttagctactcaggaggctgaggcaggagaatcgcttgaacccaggaggcrgaggttgcagtgagccgagattgtgccattgcactgcagcctgggcaacaagagtgaaactcaatctcaaaaaaaaaaaaagtatctaaatgtaaaatat

SEQ ID NO: 270025 - DNA, 201 bp, Homo sapiens
gcaggaacaggtgagcactacaaaggtattggatgttgttataaatgcagtgggaatccacagaaagattttaagagaggagtggcaccttgtgatttacrtttacaaaggatcactgtggttgcagaacaagtgtaaacaagcttatctgaaaggagggtgctgcaggtagtctgagctaagagagacgatggaggcttg

SEQ ID NO: 270026 - DNA, 201 bp, Homo sapiens
tcctagcctgcagttttaaccttactcagcctttgggtagagtagaaaaaaacaataaagacatgagaaaaatccgggagagtatagagttgcagaaggcygtactggcctttataggagtaaaaaataccaagatgggcgcagatgcaaatcagtttatatgtctatggtaagtagtggagggacttattttagctcacg

SEQ ID NO: 270027 - DNA, 201 bp, Homo sapiens
ttggaagattatcgggatacctcaggttttggaaggaagtaagggcccctttctgagtccttgtttggttgttcttgtctttgtaaattgaagcacacacmaatcagatctagctttctaagtttttttttttccagaaatggatcaaaatgctattctgatatttttgatatatgcttaaggatattaaagaaaaaatag

SEQ ID NO: 270028 - DNA, 201 bp, Homo sapiens
acatcccaaagcatgttaataaaattgtagactaagaatttataaacactacttttattgaagacgggaatcagcagactttttcttaacaggccagatarggagtattttaggctcggcaggtcaagaggcaaaaccggggatattatgtaggtagacacttgtataaccatttaaaatgtaaccatttcaaaatgtgaa

SEQ ID NO: 270029 - DNA, 201 bp, Homo sapiens
attttggctgtgatccagtagctggcatttaacattagtgtccagtggataggctcttactcagctgcatagttcttttgtatttctgtgtgttcacagcygtgctctgtggtggggttggggagagagatgaccactcataagggccactcctggaccatgggtgaggtccctcctatcactggcactgtacctgcatta

SEQ ID NO: 270030 - DNA, 201 bp, Homo sapiens
aaagtcacctctggttgaggtctactgtatgaacttcacctaaatcctgtgggctttggtgacatgaatccagagaggaaagtagacgctggtgacacaaagtaatagaggttcattttaaacaccaggtgtgcacataactttctgttatctctgtattttatgtacatttctgttattgtacttagttaagttatatta

SEQ ID NO: 270031 - DNA, 201 bp, Homo sapiens; identical to SEQ ID NO: 53351

SEQ ID NO: 270032 - DNA, 201 bp, Homo sapiens
ctgtacctgcattactgttgtttggtgtcttgggttgcagggctcccttagacagaggccatggctgccagacaggccacacccttcccagaccagcactrtggaggaaggcatgtcccattcctgcactggcccacgaacccacgtgtctcactcctttcagtgttctgaaagtgggatttctcccctacttgagtgcca

SEQ ID NO: 270033 - DNA, 201 bp, Homo sapiens
acccccttcactgtggttatgtggttctttggtaatgctgttagattcatttgtcaccctgtgcattctcaagatacttctgctttcatatttaaaacaaagaaggttttcacagattgggtgagaatcttgagccttctgcattttgccttatttcccatttgtttctctacatcaactgtttttttctcttgtttcaaa

SEQ ID NO: 270034 - DNA, 201 bp, Homo sapiens
ccaaactagccaggtcctttaaaaaaaatcgtggggtttgaataggaaatacaggattgcctctgttctccagagtaacctatgcgtgcaacttaaaaatrtctgcacatctagagttgtttgtgtgttgaaccagaaccgtatgtgaccctttctgcccatttatttagcatacattaatttcccataagagcacgggaa

SEQ ID NO: 270035 - DNA, 201 bp, Homo sapiens
cagccctggcattgggcaacccccacaaggttaccagcttcctccctcttcagcttccagtttgtatcacctctctatcagctcttggtgctttttctccmaagatctgctcaaaatatgttggcttactcgatattttggtctttattagtggcagtggtgcttcttggccctgtctagttggccatcttgtccttcttc

SEQ ID NO: 270036 - DNA, 201 bp, Homo sapiens
ttttaaaaattgagatttttttgtttgtttttctacctgaattgcagaagttacttatatattctaattagtaaacctttgtgatacatatattttttccmaatcaatggcttgtcttttgactttgtttatggactcttgttgacagaaatatttaatttttatgtagttaaatctattggtttttctttttttccattt

SEQ ID NO: 270037 - DNA, 201 bp, Homo sapiens
ggagtaggagtgaacacctaacatctgtatagtggtttacagtttgtcagtgtttttataactatcttataaaatctcacttttaggaaatgattgttcawgaccatctttaaatctaaattagattatcttattacctgtttgatatggaagtaagactagagatcctacaagtattttttcattttatctggtcattaa

SEQ ID NO: 270038 - DNA, 201 bp, Homo sapiens
actacagtatctcaataagctgggaaataatgagactgacagttgggcattgagttatgcgtacctataattctatctccctttagatttttaaaaatatsaaatagttttataattaggcatcattcagttttgcagataggactcagaaaatctttagctaaagaagtatgcaagtttttctaagttattttaagaata

SEQ ID NO: 270039 - DNA, 201 bp, Homo sapiens
ccaaaatactagctgtgccttaacagctgttgctagacttaagatgaatgaaaaggctggagtccagcgatccatgtggtttgccctaggtttagcctggkccttctgctcttcctttcgattccaagaagagtccaatatgggcttgattctcttattacttcactttcaaaactgtgtgtcttaactcccgagccaata

SEQ ID NO: 270040 - DNA, 201 bp, Homo sapiens
tgtagaattttatattacagacccataagtgtgagtgcttatgggctggtgaaaaaaggaacaaggaatgtgggctagaagaagcagcttcatggagggartaaaattgacctgaggtttcaaagataagatttggcttagtagggtggaaaatggtggtcccagctgagaataagggcatgagcaggaactccagaaaga

SEQ ID NO: 270041 - DNA, 201 bp, Homo sapiens
ttcaaggaaccctggttccttttggagaatggtatttggaaaccaagatctggatgttacatgtgcacattactattgtattgttgcttctaggctctcastggacagagctaagaaaaatatgtgtacatactaacccatgagaatagacatactcatgtttatttatttatttatttatttatttaatttttgcttttg

SEQ ID NO: 270042 - DNA, 201 bp, Homo sapiens
aaaaggaacaaggaatgtgggctagaagaagcagcttcatggagggagtaaaattgacctgaggtttcaaagataagatttggcttagtagggtggaaaayggtggtcccagctgagaataagggcatgagcaggaactccagaaagaagggtgattgaggaaaaagccttatatcagtgtttctcaagctttttttccat

SEQ ID NO: 270043 - DNA, 201 bp, Homo sapiens
tgggattacaggcgcccatcaccacgcccggcaaattttttgtatttttagtagagacagggttttgccatgttggccaggctggtcttgaactccagacytcaggtaatccacctgccttggcctcccaaagtgctgggattatagacgcaagctaccgcttctggcccatcatgtcttaaacattgtacaggatctcac

SEQ ID NO: 270044 - DNA, 201 bp, Homo sapiens
gaagcagttatagaaccttgtaaagatttatgtacatttgttctgtattgaactagtggttaggaaaactgtaatgttaatgataacgttgaatacttcasattttcagatgaactctaaggctaaaaaaaatgattttactctataactgttattatttattttataagtttgtctcaatttgtttgaatatcctttaat

SEQ ID NO: 270045 - DNA, 201 bp, Homo sapiens
catgtatatatttggcatagttaggtcttcctgttgaatcaaaccgtttatcattatataatacctttctttgtccctttttactgttggttggtttaaartcggctatatctgataaaagaattgtgactcctgcccttttttgtttttcatttgcatgttagatctttctccatccctttactttgagcctgtgtgtgt

SEQ ID NO: 270046 - DNA, 201 bp, Homo sapiens
cagtgggatcggaattttttttagcttctaccatttacttatatttggagaaatgatgatgatgatgatgatatcccaagagcttttaatattactttaaygaatatttattaagtactcactatatgctctacatgtgtcatgtagagggtggcgcatggtggtgatttcatgacatacaggtattcaggcattgtccga

SEQ ID NO: 270047 - DNA, 201 bp, Homo sapiens
gatgatgatgatgatgatatcccaagagcttttaatattactttaatgaatatttattaagtactcactatatgctctacatgtgtcatgtagagggtggygcatggtggtgatttcatgacatacaggtattcaggcattgtccgaaatgttctctgggaggatgtctggaaaaaactccagttccagatcgcgtctgca

SEQ ID NO: 270048 - DNA, 201 bp, Homo sapiens
atcagttctaggagccttttggcagggtctttagggttttccaggtacagaatcatatcgtcagcaaagagagagtttgacttcttttcctgtttggatgycttttctttctttctcttgcctgattgctctggctaggacttccagtactatgttgaataggagtggtgagagtgggcattcttatctttttccagttct

SEQ ID NO: 270049 - DNA, 201 bp, Homo sapiens
atagaagtagaatcatatagtatttgcctttttgtgactggcttatttcacatagcgtaagtacctgaaggtttatctacgttgtagcctgtgacttacayctttcatttttagctttggctgctgctgccatgttccctgtatttaagctgtggtttaaaacagcttgagaggactcaactcaggctgccaagaaaaatg

SEQ ID NO: 270050 - DNA, 201 bp, Homo sapiens
gggctggtttgttcttttatttctagttcctccaggtacaatgttaaattgttaatttgatttaaattaacaaattgttaatttgattctcttaatgaagrcatttagttctgtaagctttccttttaacagttttagctgcatccctaagattttgtaagttgtgattctatttttattttcattaatgaaattaatttc

SEQ ID NO: 270051 - DNA, 201 bp, Homo sapiens
cctctgttctccagagtaacctatgcgtgcaacttaaaaatatctgcacatctagagttgtttgtgtgttgaaccagaaccgtatgtgaccctttctgccyatttatttagcatacattaatttcccataagagcacgggaaaggaaaataggagtttaatcatcttggtgaaactaggaaacaggatgtacactggagat

SEQ ID NO: 270052 - DNA, 201 bp, Homo sapiens
ttagttttctgcctggatgttctttctaacactgtcagtggggtgttgaagcctcccactattactctgttgctgtctgagtctttttttaggttaagcasaacttgatttatgaatctgggcatgtatatatttggcatagttaggtcttcctgttgaatcaaaccgtttatcattatataatacctttctttgtccctt

SEQ ID NO: 270053 - DNA, 201 bp, Homo sapiens
gatgtggtgggggttgtctcgcggtggcagccactcttccccaaacctggctattttcagtcatcctgctggtgcttaaaggtgttcctccgcagaccacstgtttgtttatttacactcgctttaaacgcgggcccgttcccttttccaaactagccaggtcctttaaaaaaaatcgtggggtttgaataggaaatacag

SEQ ID NO: 270054 - DNA, 201 bp, Homo sapiens
aatcccgacggaatctggagctccagatgtggtgggggttgtctcgcggtggcagccactcttccccaaacctggctattttcagtcatcctgctggtgcytaaaggtgttcctccgcagaccacgtgtttgtttatttacactcgctttaaacgcgggcccgttcccttttccaaactagccaggtcctttaaaaaaaat

SEQ ID NO: 270055 - DNA, 201 bp, Homo sapiens
ctggcgggctcagcgttctgattccgaggttccctgcggtgagggcgtgttgaggcttggaatcccgacggaatctggagctccagatgtggtgggggttktctcgcggtggcagccactcttccccaaacctggctattttcagtcatcctgctggtgcttaaaggtgttcctccgcagaccacgtgtttgtttatttac

SEQ ID NO: 270056 - DNA, 201 bp, Homo sapiens
gagagagaggaatactggatgttaaaaaaaattaaatctctctcctagtttctttcttccttttcaaaaacataatacataatcttttctcctttttaatyctgatttgatgatttgttcattttatttatgaaagcaggcagtaactttgattgaggaatgggagactatcgtgtgtgagaaaagccttagcttctaata

SEQ ID NO: 270057 - DNA, 201 bp, Homo sapiens
taacatgttgcttccaggagggaagtgagcaattattgtttattccaaaacatctggatatatatgcggttatatgttacagttaaaaatttgtatactarttcatgttaactgcaaagacaaactattagcaaattatctattagacttcatttggatttgtctctggtttatttaagttttgtctttgatagcagcaga

SEQ ID NO: 270058 - DNA, 201 bp, Homo sapiens
tcaaaaaccaaatataaaatgacttgaattatttttctggcttacctatacttcatttatctttattaaggttagtaagggaaatgtgtgtggtttatatkgtagatacatgcacacacagcaggataaattttcattttaatgctcattaagaatttaattgtacttaatatattttgcagttataaaggaaatagaaaa

SEQ ID NO: 270059 - DNA, 201 bp, Homo sapiens
tatcttacagtcgtgtaggtcagaaatcgtacacaggactggaatcaaggttttggcatggctgtcttcctttttggaggctctaagggagaatccatttycttaccttttccagcttctagaggtgcctactatgttccttggctcttgctctccttttatcttcaaatcctgcaatgttgtatctctctaaccatttcc

SEQ ID NO: 270060 - DNA, 201 bp, Homo sapiens
ttaacaggtgatacgatattcatgcagatacctacttttacatacacactaacattctttgaaattattttgcataggcagatgcactttgtgccttggayattttaagttgtgctggatttgtaaatcactttggacgttcaatgtctgtggagaagatagacattagtccggttttgcttcaaaaaggaagcacaaaga

SEQ ID NO: 270061 - DNA, 201 bp, Homo sapiens
attagaaccatatacattggtggtggggatgaaaaatgggtcagctactgaggaaaacgatagcagttcctaaagtagttaaacatagaattatcatgtartatagcaatttcacttctaggtacataaccaaaagaattgaaagcaggaacttatttgtacatcagtgttcgtagcagcatgattcacaatagccgaaaa

SEQ ID NO: 270062 - DNA, 201 bp, Homo sapiens; identical to SEQ ID NO: 53357

SEQ ID NO: 270063 - DNA, 201 bp, Homo sapiens; identical to SEQ ID NO: 53358

SEQ ID NO: 270064 - DNA, 201 bp, Homo sapiens
ttcaggcattgtccgaaatgttctctgggaggatgtctggaaaaaactccagttccagatcgcgtctgcaaccatgaaatctccccaccatgaatgaggargaggaggaagaggaagagttataagtcaggacttacctcttgcctttattaatttgctgtttcaattaagtttaaataaaactacatgactgaaggatac

SEQ ID NO: 270065 - DNA, 201 bp, Homo sapiens; identical to SEQ ID NO: 53402

SEQ ID NO: 270066 - DNA, 201 bp, Homo sapiens; identical to SEQ ID NO: 53347

SEQ ID NO: 270067 - DNA, 201 bp, Homo sapiens; identical to SEQ ID NO: 53348

SEQ ID NO: 270068 - DNA, 201 bp, Homo sapiens; identical to SEQ ID NO: 53350

SEQ ID NO: 270069 - DNA, 201 bp, Homo sapiens
tttctagcacgattggagaaatttttctggactgtatcctcgaatatgttttccatattgcttattctctcttctctctcaggaatgccaatgagtcatargttttgcctctttacataatctcatatttctcagaggttttttttttccattcttcttcattctttttcctttatttttctctgaccaagtagatttgaa

SEQ ID NO: 270070 - DNA, 201 bp, Homo sapiens
acataccagaaataaaacataaccatccccacctggagtgacatcatgactcctgagcagcaaagtctgtgtggggtgtgtgtgtgtgtgtgtgtgtgtgwgtgagagagagagagagagagagggagagagagaaagagaaagagtgtgtgtgagtcatggtggctctgaccagacacccgtgttcaaaatcaaaaccct

SEQ ID NO: 270071 - DNA, 201 bp, Homo sapiens
taaaagacataggaatttactgcaagttaagctttgtaagagtaggaatcggctgggcgtggtggctcacgcctgtaatcctagcatttgggaggccgaggtgggcggatcacgaggtcaagagatagaggagatagagaccatcctggccaacctggtgaaaccccgtctctactaaaaatacaaaaattagctgggcat

SEQ ID NO: 270072 - DNA, 201 bp, Homo sapiens
cgaaactttctgattgtggtccttttttgggagtatttttcttttaataattttctcaaaattttctttgataattggtttgttgaacctgtttttttccyaccttggatcagattaagttattcattttccagattatttagaattgagcattctctcataagtcttgggtcttccctcccattcttccttctttctttt

SEQ ID NO: 270073 - DNA, 201 bp, Homo sapiens
aaaggaatattttgttttcataaagaggaaaatccattcttagaaaaaaactgagtaaaaaagtatctcaatgggctgggtgcagtggctcatgcctttartcccagcactttgggaggccgaggagggggttcacctgaggtcaggagtttgagaccagcctggccaacatggtgaaacctcgtctctactaaaaataca

SEQ ID NO: 270074 - DNA, 201 bp, Homo sapiens
ttgcctctgttctccagagtaacctatgcgtgcaacttaaaaatatctgcacatctagagttgtttgtgtgttgaaccagaaccgtatgtgaccctttctrcccatttatttagcatacattaatttcccataagagcacgggaaaggaaaataggagtttaatcatcttggtgaaactaggaaacaggatgtacactgga

SEQ ID NO: 270075 - DNA, 201 bp, Homo sapiens
agatttcaaaagattgtgttcccattaagtggtagtaatttcctttattattctgtatccttaatggtgttctctctctctctctctctctctctctctcyctctcccccccgttccccactcttcctttctcctttgctttttcttctctttcatacatatatgcgtgcctagttctaggaggaaacgggttaaaaattg

SEQ ID NO: 270076 - DNA, 201 bp, Homo sapiens
gttctcttaagtttatctgctaggtccttagttcttcctcccaaatatatatggttcctctctactactcttttcacactaataaacttagtccaaaacttgatcacatttcacatggcctgcaggaggtccccttccatctttctgcttctattcttttctgctacatctactcagcatagcagccaaagtgaactttta

SEQ ID NO: 270077 - DNA, 201 bp, Homo sapiens
tgtgtgcatatcatttttgaagtttttgaagagaaatcgtttgtggaaatatcttttgtttgtaaagatttgaattttggagatatatacagagatttttwaaaaattcattgtggtttattgaaaatagcctgagttttcatcatgggttttagtcctgtttctgtcactagttatgtgataaagcagttaatttctctg

SEQ ID NO: 270078 - DNA, 201 bp, Homo sapiens
aattaaaagacataggaatttactgcaagttaagctttgtaagagtaggaatcggctgggcgtggtggctcacgcctgtaatcctagcatttgggaggccgaggtgggcggatcacgaggtcaagagatagaggagatagagaccatcctggccaacctggtgaaaccccgtctctactaaaaatacaaaaattagctggg

SEQ ID NO: 270079 - DNA, 201 bp, Homo sapiens
cacactcaagtcttactcccttccctattcctttcatccctttttgccccacccattgtaggtaaccaatttcatttttgtttattcttttcaccaaaatrtgcaaatttgtacattttttcatgtcccctattttcttacataaaaggttttatgctatatatactctttttgtctgaacaaatggagttttttgtccta

SEQ ID NO: 270080 - DNA, 201 bp, Homo sapiens
ttccgtcacttctagaaaatccttagctattatcccttcagatgttacctctatgctattcttattctccttctgagtcttcagttaaataatgataagayctctttactctctcctcacatgactcttgtattttctgttttctctttctgtgctacattctgaataattatttctgatcactttttttttttttttttt

SEQ ID NO: 270081 - DNA, 201 bp, Homo sapiens
ttggtacttattttgacattctgacttttctacatatgctttatcaacctcttaattaaaccatcattgtctattttgagagataactgcgctgcttcccrttgtgtgttttaaatgttattgttcagtttgagtcaaataaaaggatatttaatctgtggtgccttgacattaaaagtggtaaagtgatttttaaagggc

SEQ ID NO: 270082 - DNA, 201 bp, Homo sapiens
acctttttcagattaattttgaggcttaaatgagagaattcatgagaaaatacttcataaattgctacagaaacatgtagtattatgatttgaaaagtattctgacctaccttcttggatatatcagtgagaactgtgtgcatatcatttttgaagtttttgaagagaaatcgtttgtggaaatatcttttgtttgtaaag

SEQ ID NO: 270083 - DNA, 201 bp, Homo sapiens
ggggtttcaccgtgctagccaggatggtctcgatctcctgacctcgtgatccacccgcctcggccttccaaagtgctgggattacaggcgtgagccaccgygcccggccagcatgggaactcttgaaataactgcatgtatttctttttttatccaaaaaactatttgaaagcttgctttgctaggttgttttttgcataa

SEQ ID NO: 270084 - DNA, 201 bp, Homo sapiens
atatgatcattcagaagagataccaaataatataaaaaatggttggccaggcgcagtggctcatgcctataatcctaccactttgggaggctgaggcgggyggattgcctgagctcaggagatcgaaaccagtctgggcaacaaggtgaaaccctgtcccctactgaaaatacaaaaaattatccaggcagggcggcgtgc

SEQ ID NO: 270085 - DNA, 201 bp, Homo sapiens
tttattcattctaatgtgtttttgtttaaaatctattaatatatggtttcatcttcattctaatacttggataggctttattttgtttctcctagcttttkggatacagaattaacttatttacatttattcttagcaggctataggctttcttataagcattgctttagctctctcatatgttgtgatgttcagtattct

SEQ ID NO: 270086 - DNA, 201 bp, Homo sapiens
ggtcatcgtgattcgccattagcttaaggatcatgtaggttgaccagggtgaggtaggactatccacaggattgtgtaaattgtggtaggggatgcagtayacaatattcatgaattaaacacttagctaactgctttcctgaaaatggtctgtgttctaaaagacaaagatctaggttttttgctgttttttactttaac

SEQ ID NO: 270087 - DNA, 201 bp, Homo sapiens; identical to SEQ ID NO: 53352

SEQ ID NO: 270088 - DNA, 201 bp, Homo sapiens
tcactgtaagctctgcctcccagtttcacgccattctcctgcctcagcctcccgagtagctgggactacaggcgcccgccaccacacccggccaatttttkgtatttctagtagagacggggtttcaccgtgctagccaggatggtctcgatctcctgacctcgtgatccacccgcctcggccttccaaagtgctgggatt

SEQ ID NO: 270089 - DNA, 201 bp, Homo sapiens
aattattagttaatatctgatattcctatttattcttaccatgcatacaatctatagcccaatagcatgggaactcttttttttttttgagatggagtctstcgctctgtcgccgaggctggagtgcagtggcacgatctcagctcactgtaagctctgcctcccagtttcacgccattctcctgcctcagcctcccgagt

SEQ ID NO: 270090 - DNA, 201 bp, Homo sapiens
tcccagcactttggaaggctgaggcaggcggatcacctgaggtcgggagttcatgaccagcctgaccaacatggagaaaccccgtctctactgaaaatacmaaattagccggacatggtggcacatgcctgtaatcccacctactcaggaggctgaggcaggagaatcgcttgaacctgggaagtggaggttgcagtgagc

SEQ ID NO: 270091 - DNA, 201 bp, Homo sapiens
tttcaggctgggcgcggtagctcatgcctgtaatcccagcactttggaaggctgaggcaggcggatcacctgaggtcgggagttcatgaccagcctgaccmacatggagaaaccccgtctctactgaaaatacaaaattagccggacatggtggcacatgcctgtaatcccacctactcaggaggctgaggcaggagaatc

SEQ ID NO: 270092 - DNA, 201 bp, Homo sapiens
ttgaacgttattggtgtatagaaatgctactgacttttgtacactttttttttttattctgaaactttgctgaagtcgtttatcagttctaggagcctttkggcagggtctttagggttttccaggtacagaatcatatcgtcagcaaagagagagtttgacttcttttcctgtttggatgccttttctttctttctcttg

SEQ ID NO: 270093 - DNA, 201 bp, Homo sapiens
attacaggcacctgccaccatgcctggctaatttttatatattttttagtagagttggggtttcaccatgttggccaggcttgtcttgaactctggacctyaagtgatccgcccgcctcagcctcccaaagcactgggattacaggcgtgagccactgcgcctggccttattgtaggtttcgatgtcaaggaaaaagaaag

SEQ ID NO: 270094 - DNA, 201 bp, Homo sapiens
ggagcacagtggcacgatctcggctcactgcaacctctgcctcctgggttcaagcgattctcctgcctcagcctcccaagtagctgggattacaggcaccygccaccatgcctggctaatttttatatattttttagtagagttggggtttcaccatgttggccaggcttgtcttgaactctggacctcaagtgatccgcc

SEQ ID NO: 270095 - DNA, 201 bp, Homo sapiens
tgcttacctctctgagttctagcttttcttcagttttggcctggtaattccttggtatgtgatcagctcttcaatgccattgagaatttttttttttttttaaatgtttgaggtactaatttggattgttgtcagcagaagtgagtttgaagacaatgagaggtcattttgtctgaataacctagcctgcaatgactgtta

SEQ ID NO: 270096 - DNA, 201 bp, Homo sapiens
acattttgatcgatgtcagactgcatatccagtggtggtcccatgagattataataccatatttttactatatcttttctattaagatatgcttagatacmcaaatacatagctatggtgttataattgcctgcagtattcagtacagtaacatgttgtacaggtttgtagccaaggagcaataggctatctcctatagtc

SEQ ID NO: 270097 - DNA, 201 bp, Homo sapiens
ctctgaaaattggtcagactctagatgtttgttcttatatatatgtctggctttttacagacaaactatttgacataagtttatttagctttcattttttrgtgttgtatgaaataaaccttagctgctgataggcttgtacattgactgttcatttttctaacagcagacactggtctggagacttctacccgtagcagg

SEQ ID NO: 270098 - DNA, 201 bp, Homo sapiens
cctgtgcacattcacacttggcagttgagtggaaaatacagaattagatcttgtcagagttgaattataagttttatttctaaaacacggttctttaaaamtctatttttataatatataaagacagtctttaaggcagttctgacatgtgccttttacttaaataaattttgaatggccacatgcacttagggttttaat

SEQ ID NO: 270099 - DNA, 201 bp, Homo sapiens
ggtcaggagtttgagaccagcctggccaacatggtgaaacctcgtctctactaaaaatacaaaagattagctgggcatggtggtgtgtgcctgtaatcttrgctactcaggaggctgaggcaggagaatcgcttgaacccaggaggcagaggttgcagtgagccgagattgtgccattgcactgcagcctgggcaacaaga

SEQ ID NO: 270100 - DNA, 201 bp, Homo sapiens
gtttgagaccagcctggccaacatggtgaaacctcgtctctactaaaaatacaaaagattagctgggcatggtggtgtgtgcctgtaatcttagctactcrggaggctgaggcaggagaatcgcttgaacccaggaggcagaggttgcagtgagccgagattgtgccattgcactgcagcctgggcaacaagagtgaaact

SEQ ID NO: 270101 - DNA, 201 bp, Homo sapiens
taagtatacacacattaaaattatttctgataaaaaaatcacaaactccacagaaataattaaagatatatgcaaattactttcaaatacattttgacatyaaagtcaggcaattcacttggaagaatgttataatgaatgtcactgaatttttgtagtaagatgtttgacgtcaactttgattatgggaatacatctcac

SEQ ID NO: 270102 - DNA, 201 bp, Homo sapiens
ggagtgacatcatgactcctgagcagcaaagtctgtgtggggtgtgtgtgtgtgtgtgtgtgtgtgtgtgagagagagagagagagagagggagagagagaaagagaaagagtgtgtgtgagtcatggtggctctgaccagacacccgtgttcaaaatcaaaacccttattagctgtgtacccatcattgagttatctaaa

SEQ ID NO: 270103 - DNA, 201 bp, Homo sapiens
tggagtgacatcatgactcctgagcagcaaagtctgtgtggggtgtgtgtgtgtgtgtgtgtgtgtgtgtgagagagagagagagagagagggagagagagaaagagaaagagtgtgtgtgagtcatggtggctctgaccagacacccgtgttcaaaatcaaaacccttattagctgtgtacccatcattgagttatctaa

SEQ ID NO: 270104 - DNA, 201 bp, Homo sapiens
gctcctgaacaatatctaagtgtccactgtaggctgctcgatgaagaggggtatactcatcttcatccctagtgttcacgtgagtggccttttcagaaagsagtctccgcactgtggtaagctgagaagaaaaaaaagaaatctttcaactcaactcaaaccaaaacaataactaaaacaaaattgtcttgtggtgttaga

SEQ ID NO: 270105 - DNA, 201 bp, Homo sapiens
tccccacctggagtgacatcatgactcctgagcagcaaagtctgtgtggggtgtgtgtgtgtgtgtgtgtgtgtgtgtgagagagagagagagagagagggagagagagaaagagaaagagtgtgtgtgagtcatggtggctctgaccagacacccgtgttcaaaatcaaaacccttattagctgtgtacccatcattgag

SEQ ID NO: 270106 - DNA, 201 bp, Homo sapiens
atccccacctggagtgacatcatgactcctgagcagcaaagtctgtgtggggtgtgtgtgtgtgtgtgtgtgtgtgtgtgagagagagagagagagagagggagagagagaaagagaaagagtgtgtgtgagtcatggtggctctgaccagacacccgtgttcaaaatcaaaacccttattagctgtgtacccatcattga

SEQ ID NO: 270107 - DNA, 201 bp, Homo sapiens
aaccatccccacctggagtgacatcatgactcctgagcagcaaagtctgtgtggggtgtgtgtgtgtgtgtgtgtgtgtgtgtgagagagagagagagagagagggagagagagaaagagaaagagtgtgtgtgagtcatggtggctctgaccagacacccgtgttcaaaatcaaaacccttattagctgtgtacccatca

SEQ ID NO: 270108 - DNA, 201 bp, Homo sapiens
ataaccatccccacctggagtgacatcatgactcctgagcagcaaagtctgtgtggggtgtgtgtgtgtgtgtgtgtgtgtgtgtgagagagagagagagagagagggagagagagaaagagaaagagtgtgtgtgagtcatggtggctctgaccagacacccgtgttcaaaatcaaaacccttattagctgtgtacccat

SEQ ID NO: 270109 - DNA, 201 bp, Homo sapiens
taccagaaataaaacataaccatccccacctggagtgacatcatgactcctgagcagcaaagtctgtgtggggtgtgtgtgtgtgtgtgtgtgtgtgtgtkagagagagagagagagagagggagagagagaaagagaaagagtgtgtgtgagtcatggtggctctgaccagacacccgtgttcaaaatcaaaacccttat

SEQ ID NO: 270110 - DNA, 201 bp, Homo sapiens
ataccagaaataaaacataaccatccccacctggagtgacatcatgactcctgagcagcaaagtctgtgtggggtgtgtgtgtgtgtgtgtgtgtgtgtgtgagagagagagagagagagagggagagagagaaagagaaagagtgtgtgtgagtcatggtggctctgaccagacacccgtgttcaaaatcaaaaccctta

SEQ ID NO: 270111 - DNA, 201 bp, Homo sapiens
ttaaagccttatggtgtcaatgtgtaactaatattatttaataccaagtacttccagaggtaggacaggcagttcaccctctaaaaccattcactctatggactctggatgtgttgggtttgctaatttatagcataaatagatttctcaggtacataccagaaataaaacataaccatccccacctggagtgacatcatg

SEQ ID NO: 270112 - DNA, 201 bp, Homo sapiens
ttgatctttacaagtctaaggggtaagaaattatttcctactgttgttttcagttcatactacttttttttactaatgagtctgcctaatttttatgtttwtaaatcatttgtatttatatgaaacacatggtcattttgtttggccacattttctctttcgagtagggtattggtctttctctttttttttttttttttt

SEQ ID NO: 270113 - DNA, 201 bp, Homo sapiens; identical to SEQ ID NO: 53359

SEQ ID NO: 270114 - DNA, 201 bp, Homo sapiens
gttttgcccataagaacttctgtcttgtttcagtgaagcagggaacaatcactaatacaacatttgtatctcatttcaggatgatgatgatgatccttttrtgaacactagttctttaagaagaaatagaagataatatatttaatggcactgagaaacatgcaagatacaggaaaaatgaaaatgttacaagctaagagt

SEQ ID NO: 270115 - DNA, 201 bp, Homo sapiens
ctgatttcttatgttctacctcaatttgaggtgggttgataccctctttcaaaatataataccaggcactatcaatagtgaagaagtgacccacagaatgrgagaaaatatttgcaaatcatacatctgataagggattaataagcagaatatatttttaaaacttctaaagctcaacagtaacaataacaaaaaaaccca

SEQ ID NO: 270116 - DNA, 201 bp, Homo sapiens
agtcttacccacagtcgttagtttacctggcctctgatttcttatgttctacctcaatttgaggtgggttgataccctctttcaaaatataataccaggcrctatcaatagtgaagaagtgacccacagaatgagagaaaatatttgcaaatcatacatctgataagggattaataagcagaatatatttttaaaacttct

SEQ ID NO: 270117 - DNA, 201 bp, Homo sapiens
ataagagacatttgtgtaaggaagatatttattgaattatttttcctaggtgcccattttataaatgaggagacagaccagactcaaggtcatggagtggsgctagaatttgaacatatttctgactccaagtgtagacttttctatcatcctgtgtcctatcaaaattttagattattataatattaattcggtgcattg

SEQ ID NO: 270118 - DNA, 201 bp, Homo sapiens
gcagtgaactatggctgcaccaccacactctagcctgggcaacagagtgagaccctgtctctaaaataaataaataaaaataaataaaacccatttaattktatgtgtgtggggatatatacaacaaaagcccctattactcaaaataatatctctttgttagcagagcatcttatagataaaatcttatcttactgagct

SEQ ID NO: 270119 - DNA, 201 bp, Homo sapiens
ttgattatagattccatgagagcagctttttgtctgttttgttaataactgtattctcagtttctacgataatatatggcacattgaaggtgctcagtaartatgtgctgagtagattattaaataaatgggcttaaagaacatatacatagctgtataataagagccttgtgagcaggaaccattaaaaaagaaacctgt

SEQ ID NO: 270120 - DNA, 201 bp, Homo sapiens
atctttgcatgtttctatgattgtttttttaggataaattcctggaagtggaattgctgggttaaatgtgtggaatcatccagtcatataatgaagatacyttaccttgtaggtttcaacctacaggactcagctgcttatttctccttccctcttttgtagttggcctctattactgctttagcaacctgtctgatgccc

SEQ ID NO: 270121 - DNA, 201 bp, Homo sapiens
ccccgccccggcctttgggacgggtggggctgtggatggggatgggaattggaattgagcaattgggaggaggcgctgccgcaggcgttttctgccccatwccgctccctatatcctcttcctctcttccccagacccccacctctccctcctccttccccagtcgttcgccggaaagcatttgtctcccacctcttcata

SEQ ID NO: 270122 - DNA, 201 bp, Homo sapiens
atatctacaggcttttgtgtgaatatagtctttatttctctgggataaatgtactggagtggcactactcaattatatggtagtcatatgtttagttttcragaaaactgccactcatttccagaatggctgtaccattttatattctcaccaccaatatatgagtaatgcagtttcttcacatcctcatcaatgttgtca

SEQ ID NO: 270123 - DNA, 201 bp, Homo sapiens
tccattttcatttgttttaagaaatttttaattttacttctaattttttttttctttttacttattggtctttcagaagcacattgtttaattttcatgtwtttgtacaacttccaaagttcctcttattattgatttctagttttattccagtgtggttgggcaatatacttgatatgattttgacttttttgaatttct

SEQ ID NO: 270124 - DNA, 201 bp, Homo sapiens
tctgaccactccattttagtcttgacacatagacctgacttgtgcctacttccttgcaagttgatcatactttaggccaggcttggatactagtattagcyttgaccctgtctggtgtttttgctagctcctacgtcctttatgattccctctcatcataaaatatgaaaattaagtaaattgaaggtgttcaatatcttg

SEQ ID NO: 270125 - DNA, 201 bp, Homo sapiens
tcatatggtctgacttgaaaagtgttccatatgtgatgacaagaacatgtattctgcagtagttggatgaaatgttctataaatgtctgttagatctgttkggtctaaagtatagtttacctctgatgtttctttgatgatctggatgatccgttcactgccaaagtgggttgttgaagacccctaatattactgtattgc

SEQ ID NO: 270126 - DNA, 201 bp, Homo sapiens
ttagttgacccgacagccccattgggatttggaaaagaaaaaagtttatagccattcagttgaagtttaaatttagggctcgaaattgtgttgattcagtsgtgacttctatttttcctcttaatgcctttcacttcttctttttttttttttttcctttttaaagagaggaggtctggctctattgtccaggctggagtg

SEQ ID NO: 270127 - DNA, 201 bp, Homo sapiens
gcaggtgcagaccaccaagcctgcataattttaaacagttttttgtggagatggggttttgctgtattgctcagattggtcttgaactcctggcttcaagygatcctccctccttagcctctgaaattgctggggcttgcacttctggtctcaatgtttatttcctgcttccccccctccgcccctgccaccccatatagt

SEQ ID NO: 270128 - DNA, 201 bp, Homo sapiens
cagattgttacatttttccattcctcattagtataattttatgaaggcaaaataaaaggaatataaaagtcagggctatgggccacatgcagtggttcacrcctgtaatcccagcactttgggaggctggggtgggtggatcacttgaggctgggagtttgagaccagcctggccaacatgatgaaaccctgtctctacta

SEQ ID NO: 270129 - DNA, 201 bp, Homo sapiens
atgttgcccaggctggtctcaaactcctgggctcaagcaatcctccctcctcagcctcccaaagtactggcattacaggtatgggcttccatgcccagccyacttttgtttcttgatcccaatctgttaggcttctttctcagaccctctgaatgagcaaatattgatgttagataatcaaggaatgcaagagcatctgct

SEQ ID NO: 270130 - DNA, 201 bp, Homo sapiens
tatatgttaagacatagaggcaggatgatgaatgatagtataagatgtctttagaactatactagcaggatgtttagtgcttggaaagaatgataataatkgccaatatttacttaatgtttattatatgctaggtactcttctaagtgctttacaggcattaattatatttgttttcagaacacttttatgaagtagata

SEQ ID NO: 270131 - DNA, 201 bp, Homo sapiens
tctttgaactcctgggctcaagtgattatcccacctcagcctcccaagtaggtaggcctattgacatgagccatcatacccagttaattttttaacttttkgtagagacggggtcttgctgtgttgcccaagctggtctcaaattattttcctgcctcagcttcccaaagcactgggattacaagtgtgagccatcatgcc

SEQ ID NO: 270132 - DNA, 201 bp, Homo sapiens
cctcagcctcccaagtaggtaggcctattgacatgagccatcatacccagttaattttttaactttttgtagagacggggtcttgctgtgttgcccaagckggtctcaaattattttcctgcctcagcttcccaaagcactgggattacaagtgtgagccatcatgcctggctccttaaattttaacaacatatttgaact

SEQ ID NO: 270133 - DNA, 201 bp, Homo sapiens
tcggactcctaaagtgctgagattataggcatgagccactgcacccggctcatttccttatgagaaaagcagtgctttagttgagacaagcatggagatasaagtaaacagacttatggtagtgtaaaatgattttcatggcataatatctgatgttaaactgatttttcattgagtaatgctgaatttctcaatggtgta

SEQ ID NO: 270134 - DNA, 201 bp, Homo sapiens
atgcctccaggataatagccattttaacaggagagatatctcaatgtggtatctcaatgtggtaatatgcatttccctgctgattagtcatgttgaactattttttttttttttttttggagacagagtctcactctgtcgcccaggctagagtacaatggtgcgatctcagctcactgcaacctccacctcctgggttca

SEQ ID NO: 270135 - DNA, 201 bp, Homo sapiens
aaattccataactggtttgatgaccgagcctggtaccctttgggacgaatcattggaggaacaatttacccaggtgaggagaccagatgtgtttttttttwtaaaaaaaaaacagaaatatttgtatgctagagaaccagtttcttttatttctaatagctttgtcttgtgacacttgtaatttcatcctgattacaggtt

SEQ ID NO: 270136 - DNA, 201 bp, Homo sapiens
aattccataactggtttgatgaccgagcctggtaccctttgggacgaatcattggaggaacaatttacccaggtgaggagaccagatgtgttttttttttwaaaaaaaaaacagaaatatttgtatgctagagaaccagtttcttttatttctaatagctttgtcttgtgacacttgtaatttcatcctgattacaggttc

SEQ ID NO: 270137 - DNA, 201 bp, Homo sapiens
aggttcctaaaagtgcatcttacataaacaggagtacatttgtagtagagtggagatgggtggtttttatacattctagacttctgattgaatccttaggrgagaaatttataggcttactgcagttgctatgttagtatttctggtgatttgtcaagacttacatagtcactttattgtatctgggattttccctttctt

SEQ ID NO: 270138 - DNA, 201 bp, Homo sapiens
ttggtctacgtgtgtatctgtattccagtatcggtctgttttggttactatagctttgtagtataatttgaagtcaggtggtacgatgtctccagctttgttttttttttttttttggtttctgtccttgattctattgatgttgatatgtcatgtttattgatttgcatatgttgaactacccttacatccctaggatga

SEQ ID NO: 270139 - DNA, 201 bp, Homo sapiens
ccccatcattgcttctgtgtctgagcatcagcccacaacctggtcctcatactattttgacctgcagctcctcgtcttcatgtttccaggtatgtggcctygtgttctgaaatggccttgttcataagaatcacaatttgattccaaatttgcaagctaccctcattcgtgttttgtttttctttgcctgtttatgttgtg

SEQ ID NO: 270140 - DNA, 201 bp, Homo sapiens
tgttcatgatagtctctaatgatcttttgtgtttctgtggtaccagttgtcatttttcctttttcatctctgattttatttatttgggtcttcattccccyttttttttttttttttttttttttgtagtctaggtaaagatttcttgaatcttgttgatcttttccaaaaaacaactttttgtttcatttatcttatgca

SEQ ID NO: 270141 - DNA, 201 bp, Homo sapiens
attcatttggatcagatgtttgtttgaagagtgtgtgtggaatatttattgcctctttgctgctaggaaaaatatctccctggacggggcgtttctactcrctgctggatccctcttatgctaagaacaacatccccatcattgcttctgtgtctgagcatcagcccacaacctggtcctcatactattttgacctgcagc

SEQ ID NO: 270142 - DNA, 201 bp, Homo sapiens
tgctacagatttcctttttagcactatttttgctggatcccatagattttgatgtatgtcatgtttccattttcatttgttttaagaaatttttaattttmcttctaattttttttttctttttacttattggtctttcagaagcacattgtttaattttcatgtatttgtacaacttccaaagttcctcttattattgat

SEQ ID NO: 270143 - DNA, 201 bp, Homo sapiens
acgatctcagttcactgcaacctctgcctcctgggttcaagcaattcttgtgtctcagcctcccaagtagctggaattacaggtgcatgccaccacgcccrgctaatttttgtatttttggtagagatggggtttcaccatgttggccaggctggtctcgatctcctgacctcaaatgatccacccacatcagcctcccaa

SEQ ID NO: 270144 - DNA, 201 bp, Homo sapiens
tctgtctttaactggtattctgctggagtctgtatatctttttttttttttttttcaggctaaaaagactccatcagacacacaggaaatttgcaggtctycctcttcgtattctttgttttcagcacacagtgaggaaacaagagaaaatgggataaatgatataaaaacttgcttttatttttataccaggccctgtgg

SEQ ID NO: 270145 - DNA, 201 bp, Homo sapiens
gtaattttattagagacggggtttcaccatgttggtcaggctggtctcgatctcctgaccttgtgatccgcccacctcagcctcccaaagcgctgggattacaggcgtgagccactgcacctggcctgaaactacaccctttcttgatactctctgcttctgacaaggtcttccccactgctcatctactcctctggatcc

SEQ ID NO: 270146 - DNA, 201 bp, Homo sapiens; identical to SEQ ID NO: 53457

SEQ ID NO: 270147 - DNA, 201 bp, Homo sapiens
taattttattagagacggggtttcaccatgttggtcaggctggtctcgatctcctgaccttgtgatccgcccacctcagcctcccaaagcgctgggattacaggcgtgagccactgcacctggcctgaaactacaccctttcttgatactctctgcttctgacaaggtcttccccactgctcatctactcctctggatcca

SEQ ID NO: 270148 - DNA, 201 bp, Homo sapiens
ttctagacttctgattgaatccttaggggagaaatttataggcttactgcagttgctatgttagtatttctggtgatttgtcaagacttacatagtcactytattgtatctgggattttccctttctttttcccttaagttctggtaagacaacctaatggagtttcttcttcctgttacaggtttaatgatcacctctgc

SEQ ID NO: 270149 - DNA, 201 bp, Homo sapiens
ttttttgtttcaaagatagagtctcgctctgttgcccaggctggagtacagtggcacaatcttggctcactgcaacctccgcctcccgggttcaagtgatyctcctgcctctgcctcccgagtagctgggattacaggtgcatgccaccatacctggctaatttttgtatttttagtagagacagggtctcgccatgttgg

SEQ ID NO: 270150 - DNA, 201 bp, Homo sapiens
tcttaaatcagcattgtcagttacagagaagccttgagacagatgattggaagcgggtatagatctgagcagtcgttacagtctgatatatgggatgagarcacagtggatctgtgtttgggtacctccacctctttttgagtgcatgattgtacctgcattagttatcaggtatgctgttagttgacccgacagccccat

SEQ ID NO: 270151 - DNA, 201 bp, Homo sapiens
aagttgatctgattgtaaatattaaactgacatctttatgttgcaggtaaaggacctggataatcgaggcttgtcaaggacataaatgtcacgtccagctytgatatgcttcgcactgagcacatcacatttaggacgttgaagatttttttttttttttttttttaatatgcagtttgtaagaacaaaactggatggcat

SEQ ID NO: 270152 - DNA, 201 bp, Homo sapiens
tgaaactgaaacaaaaggaagtaaataatttgcctaaaattacactattacttggtagtagatccaggcagtctgttccagaacagtattcttaatgactrtactagcctggcctcttgttgaatttttggtgtgtcctttctgcagggattgccatcttttgcatgctactcacctactacatgtggatcaaggcagtaa

SEQ ID NO: 270153 - DNA, 201 bp, Homo sapiens
aaatggtaactgggtgagaatattagaaatgggcaggaacggatcttggacaagctcatgttctcttcccatcatcctttccagaaaggtagttggtaacytttcttacaagtctttggttcatctctgcactcataaaatagttaactattgttttaacattataatcatttgctttattttcctacataaagggagtgg

SEQ ID NO: 270154 - DNA, 201 bp, Homo sapiens
gcaagactgtctcaaaaaaaaaaaaaaatcgcttcttagccttttggctaagatcaagtgtagtatctattcctatcagtttaagtgccttaatttctctyccactttttggacaggtagttttgctggatatagaattcttattagcttttgtctttcagcactttgattatgccactactgccttctagcctttgtggt

SEQ ID NO: 270155 - DNA, 201 bp, Homo sapiens
ccttaaatattctttatctgatattaatctagccccacttgctttcttttggctaatatttatatgattttcataaaggatttattaacaaaaaaaaaaargaaaaagtttgcatggcataacttttttgagacggagtttcactcttgttgcccaggctggagtgaaatggcgcgatcttggctcactgcaacctccgcc

SEQ ID NO: 270156 - DNA, 201 bp, Homo sapiens
agcttaggacagtcagttacacaagcacatatagtatgggattaatgctcttaaaagtatatgagtagaacatgtatatatgtgatgtggcttagaattayctcaatctattttatgaagcgtttattaaatgacttgtgtgacagcataatgacgtctttggagggttagctattgtatttcacattttagaaaagagta

SEQ ID NO: 270157 - DNA, 201 bp, Homo sapiens
cttaaatattctttatctgatattaatctagccccacttgctttcttttggctaatatttatatgattttcataaaggatttattaacaaaaaaaaaaaaraaaaagtttgcatggcataacttttttgagacggagtttcactcttgttgcccaggctggagtgaaatggcgcgatcttggctcactgcaacctccgcct

SEQ ID NO: 270158 - DNA, 201 bp, Homo sapiens
catataatttcctttcctttggatcagtagtgggattgctggaacatataggtagttttatttgtagttttttgagaaacttctattctgttcttcatagkgggtttactagtttattatctactcacccatgtggcttaaccttatttttgttgccttaggttactatatcaacaactgataggagaaacaataaactca

SEQ ID NO: 270159 - DNA, 201 bp, Homo sapiens; identical to SEQ ID NO: 53455

SEQ ID NO: 270160 - DNA, 201 bp, Homo sapiens
ctcagactctctactttgaagaaaaaaattactgtggtttgttgaattttggtgtgtcttcacatattttcttctgccaactgggtttgtttgctgctgaraaagttgtgcctaacatactactgatgtttccttcctgccctccaccctacctgatgaggggccttgctttactttcatctcaggtttagagtgctcttt

SEQ ID NO: 270161 - DNA, 201 bp, Homo sapiens
ctttttcattttagctgatcgtcgtgtgttgccacccattcatgtcaagatgactaagtttggatttttgcgattgtcctatgagaagcaggacacacttytgaagcttctcattctgtcaatggctgctgtattatgtgagtgtgcatgtgaacctctctttctttggggatagaaagaagaaagtctagaaaaaaattg

SEQ ID NO: 270162 - DNA, 201 bp, Homo sapiens
taacggtaatttttactccggttttgttttgttttgtttgagtacttctgtcgtactccttcccctttacccttgtttttcctcttggaagtattgaagtmccataatgagtactgctgattgtaaagcctcatcaatctcttatcttctggccaatccagatgtgttttagaatttaccggtgttagtggtctttttctc

SEQ ID NO: 270163 - DNA, 201 bp, Homo sapiens
aatgatgaaccctaaaagagatatcatgagttgatgatagtgtcaatatttattaagcatgggagtgtgtttgacacagaaatgttgacttctcatatacmtgctttggaggtctataattttgcagctgttggtcaagaatgagaagactcatgtcttgtctacctttttggtaaagctactactctttagatcagtcgt

SEQ ID NO: 270164 - DNA, 201 bp, Homo sapiens
aaaatgagttggctataaaaatgtagatttatttctgggttctctattctgtttcattggtctacgtgtgtatctgtattccagtatcggtctgttttggktactatagctttgtagtataatttgaagtcaggtggtacgatgtctccagctttgttttttttttttttttggtttctgtccttgattctattgatgttg

SEQ ID NO: 270165 - DNA, 201 bp, Homo sapiens
attttattttattaaatgtatgtttctttctgtcttaatgcctcagtgaagaaaatgtgaagtactccagttctcagccagaaccccgcacaggtctttcyttatgggataccagcccctcatacattgataaattggtacaagggatcagcttttcccagcccacatgtcctgatcatatgcttttgaatagtcagttac

SEQ ID NO: 270166 - DNA, 201 bp, Homo sapiens
gaaaccacttccttggtttctcctttgtggaaaaagtaatagaggtaaaatcgttttggatgagtcatgtttaatctttggaagttttagaagaaatggarttctgtaatgttaaaactcttttcctttttagagttcaacttgctgtgaatagagtaactgaagaagcagtcgcagtgaagattgtagatatgaagcgtg

SEQ ID NO: 270167 - DNA, 201 bp, Homo sapiens
tgcgtctaatgctagtgttggcacctgttatgtgcattctctctggcattggagtctcccaggtgctgtccacatacatgaagaatctggacataagtcgyccagacaagaagagcaagaagcaacaggattccacctaccctattaagaatgaagtgagaagcaatgttaagagtagacttgggaaactctgtgtgtgtg

SEQ ID NO: 270168 - DNA, 201 bp, Homo sapiens
ggcatgagtattatatgttaagacatagaggcaggatgatgaatgatagtataagatgtctttagaactatactagcaggatgtttagtgcttggaaagartgataataatggccaatatttacttaatgtttattatatgctaggtactcttctaagtgctttacaggcattaattatatttgttttcagaacactttta

SEQ ID NO: 270169 - DNA, 201 bp, Homo sapiens
ttctctattctgtttcattggtctacgtgtgtatctgtattccagtatcggtctgttttggttactatagctttgtagtataatttgaagtcaggtggtaygatgtctccagctttgttttttttttttttttggtttctgtccttgattctattgatgttgatatgtcatgtttattgatttgcatatgttgaactaccc

SEQ ID NO: 270170 - DNA, 201 bp, Homo sapiens
aaggacttgattttcctgtttaaaaaaaaaaatcagttatttgaactctttaagccatttggcataaataaagttatagttactataagtgttctttaaaragtcacaggtgatatcctacaatatagtggtggtggtctgaggaggcatactcagaggaactgtttttttctattccatcataggtctcgtcatggggag

SEQ ID NO: 270171 - DNA, 201 bp, Homo sapiens
gaagcaggaggattgatcacttcagcctaggaggtcaaggctgcagtaagctgtgatcacatcactacactctagtctgggcagcagagtgagacactttytcaaaaaaaaaaaaaaaaaaaaaaaaaagggtaatcacagtagctacctcctaagtcagatagaggtaaacatttcattggtttacatattgtgtgaatg

SEQ ID NO: 270172 - DNA, 201 bp, Homo sapiens
ggagtcccagctacttggaaggctgaagcaggaggattgatcacttcagcctaggaggtcaaggctgcagtaagctgtgatcacatcactacactctagtytgggcagcagagtgagacactttctcaaaaaaaaaaaaaaaaaaaaaaaaaagggtaatcacagtagctacctcctaagtcagatagaggtaaacatttc

SEQ ID NO: 270173 - DNA, 201 bp, Homo sapiens
aactgggtgcagtagctcatgcctgtaatcccagaggctgaggtgggacgattgagtgattctaggagtttgagaccagcctagacaacatagaccctgtytttatgaaaaattaaaaaaaaaaattagctagacatggtggtgcacacctggagtcccagctacttggaaggctgaagcaggaggattgatcacttcagc

SEQ ID NO: 270174 - DNA, 201 bp, Homo sapiens
cctcggcctccccaagtgttgggattacaggcatgagccactgtgcctggccaggacaagccttttgatcaggtcattttagagggtcagatcggcttaaratagtttgtaaatgaggtttattctgctcccacctggacctatgccttaaatatgaactgttattttcaaggctgctactgagtgaggagcaggggataa

SEQ ID NO: 270175 - DNA, 201 bp, Homo sapiens
ttcattggtttacatattgtgtgaatgtacttgatttttaaagaaatcagtcccctattttgagacatttaagttgtttctaacttataaaataggacagkgatggcttctatcaatttgtgtaaaaggccaatataaaaattgcgtcatgctataatattttttatgctataatattttttatgccattagcctttttgt

SEQ ID NO: 270176 - DNA, 201 bp, Homo sapiens
tttccgcttcttgtcacatgacgggagtcagtgggccgcgccttcccactgcgactccccgtgggtccgcaaaccgacacgtcactcctcggccctcaacyaaactgcttggggcacgttctttccgcgctcttgactcctacgcgccggcctatgacagctcggcgggagcatacagacctgcctctagactgctaagtg

SEQ ID NO: 270177 - DNA, 201 bp, Homo sapiens
cccggccaatttttatactttttgtagagattgggtttcgccacattgcccaggctgttcttgaactcctgtgctcaagtgatccgcccatctcagcctcscaaaatgctaggattacaggtgtgagccatcacacccagccattcctattattttcactcttccattcatagagcttatgaggtttttgcttcagacata

SEQ ID NO: 270178 - DNA, 201 bp, Homo sapiens
ctttttgtagagattgggtttcgccacattgcccaggctgttcttgaactcctgtgctcaagtgatccgcccatctcagcctcccaaaatgctaggattayaggtgtgagccatcacacccagccattcctattattttcactcttccattcatagagcttatgaggtttttgcttcagacatacctgccaggcagctaca

SEQ ID NO: 270179 - DNA, 201 bp, Homo sapiens
tctgtactagggagaatttctgacatgaatgcaggtctttgacttctggtaggcttttttctctgatccatgcaagggttgctagtgtattagaggctctraatgacaatcctcaggaatagagggccttggaagtcggctccctatgtctgtcttatcagagataagacattgactggcaagcatcatcttgcatagaac

SEQ ID NO: 270180 - DNA, 201 bp, Homo sapiens
tgttttcatttagtgtttttatggcttcatttttccatttaaatctttggtccattaggaaataatcttcacataggaagatacgtgaattttttctcaaraaaattaagataccttaggatggttagttagattactgtctcttaaaaagttattggtaagtaaatgttcattataaaactgtgtgaataaggaggtcac

SEQ ID NO: 270181 - DNA, 201 bp, Homo sapiens
tctcacttattcatgacacaggaatgaccctttactcaaaactcttgtggttgttcaaaggtgagcttctttttcccttagtcttagcctatgtgttgctrttgtatattgttaccaagttcaactacctaattttgaagctctttccaaataagatacaaattaaaaggggaagcattgccagtaacaggtccctagaga

SEQ ID NO: 270182 - DNA, 201 bp, Homo sapiens
tatcacaacacttatctctcctgtgtatcatgtaaacatttgtgaaaacaagactagggcaagaaatgattcatctgttttttggtttttttttttttgaracaaagtcttgctctgtcgcccaggctgcagtgcagcagtgtgatcttggctcactgcagtcttgacctcttgggttcaagtgatcctctcactttagcc

SEQ ID NO: 270183 - DNA, 201 bp, Homo sapiens
agtctctagtcagtgcttgtgtattcacagccctaaaccaggctgcagaacccaacataatcctgcccactctgggtgaatccattttagtagaaaatttmtccaaagttgatctgattgtaaatattaaactgacatctttatgttgcaggtaaaggacctggataatcgaggcttgtcaaggacataaatgtcacgtcc

SEQ ID NO: 270184 - DNA, 201 bp, Homo sapiens
aaaactgcatgaaattaaagcagtaatttagtagctttaattctttctcttccccaggaataatatttagacataagtaggctaacagaaaatgtgtttcytacctcaagccataggcttctctaacatgattctttcgtgaatgttgtcgtaatgtttgtttttagctctgctgcataaaatcttagttgagaatccatc

SEQ ID NO: 270185 - DNA, 201 bp, Homo sapiens
cagagcacatggcagcctttggggtctttggtctctgccagatccatgcctttgtggattacctgcgcagcaagttgaatccacaacaatttgaagttctyttccggagcgtcatctctctggtaggctttgtccttctcaccgtgggagctctcctcatgctgacaggtagggaaggctcacagcttttttccttttttc

SEQ ID NO: 270186 - DNA, 201 bp, Homo sapiens
ctctgtctattgttttatattttgtattaaaggagtcattcattactccaagatcatgaagattttcttgtatgtaatcatgtaatcttcttaaaagcttyatggcttttgctttttttttttttttttttttttttaagagtcttgttgtgtctccaaagctggagtgcagtggcacaatcacagctcactgcagcctca

SEQ ID NO: 270187 - DNA, 201 bp, Homo sapiens
gacttctcatatacctgctttggaggtctataattttgcagctgttggtcaagaatgagaagactcatgtcttgtctacctttttggtaaagctactactytttagatcagtcgtgcccactgtctaatagaaataatgggaaccacattatcattttaagctttatattagtcacatcaaactaagtataaagaaacagg

SEQ ID NO: 270188 - DNA, 201 bp, Homo sapiens; identical to SEQ ID NO: 53447

SEQ ID NO: 270189 - DNA, 201 bp, Homo sapiens
gtgatgggcatgaaaccacatcagaattatttgtgtaacaattttctcttccaggatatttggtcttcataaacagaccgaaaagaaaatggtagctagayatacctaaagatgtttgtctcttgttaccactacaaagagattgattttaggacagaattttgtttttgtttttgttttgacataattttttaatactat

SEQ ID NO: 270190 - DNA, 201 bp, Homo sapiens
tgtccaatagtgtcatatttaactactgaaaagataatcaactgggtgcagtagctcatgcctgtaatcccagaggctgaggtgggacgattgagtgattytaggagtttgagaccagcctagacaacatagaccctgtctttatgaaaaattaaaaaaaaaaattagctagacatggtggtgcacacctggagtcccagc

SEQ ID NO: 270191 - DNA, 201 bp, Homo sapiens
ccagcttagccccgacaacccctttaggcctaggcacgctctttcacaaaaccaggggctgtgaactctgtcaaggttcccaggtccatcgcagttaccarggcacagtaaaagctcgagtcaactatcaggcacatcctgcaaaagacgaactgtctggaccagtccgcgtttgagttttaattgagaataaataggtag

SEQ ID NO: 270192 - DNA, 201 bp, Homo sapiens
gagaagcttgttatttccatttcccattctactttcaggatgcgaaggtcatgtcctggtgggattatggctatcagattacagctatggcaaaccgaacrattttagtggacaataacacatggaataatacccatatttctcgagtagggcaggtaagataaagggatgatctttgagtgtttggtgtacaaggtctaa

SEQ ID NO: 270193 - DNA, 201 bp, Homo sapiens; identical to SEQ ID NO: 53463

SEQ ID NO: 270194 - DNA, 201 bp, Homo sapiens
agaattaccattccagacatcaaaaaagatagatggtacaacaaacccctcaagaaaggtaatatccttaaactacaagtttgtttgtttttctgtggaaraaaaggtaattgcaaagttattatcacaagtcaacaacacatgatagctatgatctctgtcctcatggagattataatgtccagtagaaaaaaatacaga

SEQ ID NO: 270195 - DNA, 201 bp, Homo sapiens; identical to SEQ ID NO: 53465

SEQ ID NO: 270196 - DNA, 201 bp, Homo sapiens
ttcagttgaagtttaaatttagggctcgaaattgtgttgattcagtggtgacttctatttttcctcttaatgcctttcacttcttcttttttttttttttycctttttaaagagaggaggtctggctctattgtccaggctggagtgcagtggtgtgatcctagctcactgcagcctccaactcctgcctcatcctcctga

SEQ ID NO: 270197 - DNA, 201 bp, Homo sapiens
atactggtcattgttttgtgatcttaggcaagcttcttaatgtcattgtgtacctctccttcactacctttagggtggcaataatcgcatctaccccatargagcttaggacagtcagttacacaagcacatatagtatgggattaatgctcttaaaagtatatgagtagaacatgtatatatgtgatgtggcttagaatt

SEQ ID NO: 270198 - DNA, 201 bp, Homo sapiens
tctgaaaaatcaaggaaattttggagacttcgtatatttggaaatcacaagtctcattttgcaatacaagtgcggatcaggtagagaaatctgacctaggkgcaagcctagctcactatatgtataagaataatttttttttttttgatacaggctcactgtgttgtccagtctggggtgcactgtattatcacagttcac

SEQ ID NO: 270199 - DNA, 201 bp, Homo sapiens
agcatttgagggaatgagttgtaagttgttgatcctttccaggaacgtatgggacactcatacattctggttgtggggtccaactttcttggattcgtaaytttgtattatagaagcatttttgcactttgttggataatatgaccctgggtgtcttaaaacgggagatgatatttttttcttgaaggcttgggagtatta

SEQ ID NO: 270200 - DNA, 201 bp, Homo sapiens
cagccttagcctcccagagtgttgggattatagacgtgagccaccatgcctggccaagaatagtttaaaataatcctttaatggattaataaagggaagtycctgtggaataccctggaccttagtcttgtcctgttcactctttttttatgtatgacgtggataaaaatgtaagaaatttagttatattttctgaatgtc

SEQ ID NO: 270201 - DNA, 201 bp, Homo sapiens
gttaatactgtattgtttagggaacaatgacaagaaaaaagagaggagagattttatatattgtagtaaaatagtgtttctcatatttttttggtctcaamccacagttatgaaatatactttatatcattattcaagacacacatgcatatgtacatgcatataattgaaacaaagtttaagaaatacatactaatactg

SEQ ID NO: 270202 - DNA, 201 bp, Homo sapiens
agtgatggcttctatcaatttgtgtaaaaggccaatataaaaattgcgtcatgctataatattttttatgctataatattttttatgccattagccttttkgtcccacttacacactatttcatgttagtatgtatagatataccttgttgattgttttcaaaacctacctccacattttccattgtacaaatttggacat

SEQ ID NO: 270203 - DNA, 201 bp, Homo sapiens
  misc_feature (1)...(201): n = A,T,C or G
gttatgaaatatactttatatcattattcaagacacacatgcatatgtacatgcatataattgaaacaaagtttaagaaatacatactaatactgcaactntttcaagtattttctctttcactttttgtggaggtcatgtttgatgaaaacccctaaattgatgtcttgatctactaataggctgaaatctgtaaattgt

SEQ ID NO: 270204 - DNA, 201 bp, Homo sapiens
tttcatgttagtatgtatagatataccttgttgattgttttcaaaacctacctccacattttccattgtacaaatttggacatttatttacaaataatatkgctatgaatattcttatgtttatgaatttgtgggattatttctatggatatagaagtgggaattgctagttcaaagagtgaatgtttcacagtttagtat

SEQ ID NO: 270205 - DNA, 201 bp, Homo sapiens
caggattccacctaccctattaagaatgaagtgagaagcaatgttaagagtagacttgggaaactctgtgtgtgtgtgtgtatgtgtgtatgtgggcagcrgggggtgggaggagtaaagtagagcactgtcctaggtggtcagaattaactcatatagcctctgacttattttgatcaatctcatctatatgaatgtgtc

SEQ ID NO: 270206 - DNA, 201 bp, Homo sapiens
ttgccaaattgccctctgataatagagggccttttctaactcttaagactgggttacattcctttgctctaagatcctatagtgctctatatttttataamcttcataacagttttctattgtcagtcttcactaatttatctattacctgcattggctggcatagtgtctgtcactaagttacagtagatattcactaaa

SEQ ID NO: 270207 - DNA, 201 bp, Homo sapiens
tgatgttgaacatcttttcatgtactcatttgtcatctatgtatctttggtgaaatatctcttcatgtcttttgttcgtgttccaattagatttgtttacmttgagtttttaaagctacttatgtagtcgagatactagtcctttgtcaaatatgtcatttgtgaaaaaaaaaaaacaaatatgtctcccattctgttgct

SEQ ID NO: 270208 - DNA, 201 bp, Homo sapiens
aggtgaagatttgggaggggtgggaattgtgggttaggggcaaaggggaagacatttgatgttacagtgaatcatacagcttttagatgggtggaaagctkggtgaaactggaactttgcaactctagtcttgaatgagccttaaaggtgaacctccattcaattctgggatcttttgtagttactcttactagtaattat

SEQ ID NO: 270209 - DNA, 201 bp, Homo sapiens
gatgcacaccatcacgcccagctaattttatttattttttgtagagatggggtctcactatgttgcccaggctggtcttgaactcctgggctcaagcagtscttctgcctcagcctcccaaagtgctgtgattacaggcctgagctgccatgcctatcctgattcatctatctttgaagtgcctctaaagtttccaagttg

SEQ ID NO: 270210 - DNA, 201 bp, Homo sapiens
tttccctagtgggtaatgatgttgaacatcttttcatgtactcatttgtcatctatgtatctttggtgaaatatctcttcatgtcttttgttcgtgttccmattagatttgtttacattgagtttttaaagctacttatgtagtcgagatactagtcctttgtcaaatatgtcatttgtgaaaaaaaaaaaacaaatatgt

SEQ ID NO: 270211 - DNA, 201 bp, Homo sapiens
cctgtagtcttagctactcaggaggctgaggcaggagaatcgcttgaactcgggagggagaggttgcagtgggctgacattgcgccattggactccagtckgggcagcagagtgaaactgtttcaaaaaaaaaagttaaacagttctgaaggtttataataaaaagtgatagttcactgcccaaaaatctaagccccctta

SEQ ID NO: 270212 - DNA, 201 bp, Homo sapiens
gctatttcttctagtacttacatgcatatttctaaatactgtgtatacagtttcccctccatatccgtgggttctgcatctgtgggttcaaccaaccacaratggaaaatatttgtgaaaaaaaatcataatacaacaataaaaatcatacaaataaaaaatacagtataacaactatttacatagcatctacactgtatt

SEQ ID NO: 270213 - DNA, 201 bp, Homo sapiens
ggcagaagaatcgcttgaacccaggaggtggatggaggttgcagtgagccgagatggcaccactgcactctagcctggcgacagagcaagactccgtctcaaaaaaaaaaaaaaaaaaaagatagtagtactgtcttatacaagaataactaacctatggtagattagtgctatattgctatataaataattcatatctgt

SEQ ID NO: 270214 - DNA, 201 bp, Homo sapiens
tttttttttcctttttaaagagaggaggtctggctctattgtccaggctggagtgcagtggtgtgatcctagctcactgcagcctccaactcctgcctcakcctcctgagtagctgggactgcaggtgcagaccaccaagcctgcataattttaaacagttttttgtggagatggggttttgctgtattgctcagattggt

SEQ ID NO: 270215 - DNA, 201 bp, Homo sapiens
ccacgcctggctaatttttgtattttttgtagattgggtcttgtcatgttacacaggctggtctcaaacttctgtgctcaagcgatccatccacctctgcytcccaaagtgctgggataacaggcattaactactacgccggcctcttatttatttttatttgttattattattaattttttttgagatggagttttgctc

SEQ ID NO: 270216 - DNA, 201 bp, Homo sapiens
ctgcttcccaaagtgctgggataacaggcattaactactacgccggcctcttatttatttttatttgttattattattaattttttttgagatggagtttygctcttgttgcccaggctggagtgcaatggcacaatctcagctcaccacaacctctgcctcccgggttcaagcgattctcctgcctcagcctcctaagta

SEQ ID NO: 270217 - DNA, 201 bp, Homo sapiens
gtgccatgataaaaatttgaacagagtacttcaggaatgtagtggaaggagagatttggggctgagcttggtggctcacgccctgttatccagtactttcrgaggctgaggtgtgtggatcatttgagctcaggagtttgagaccagcctgggcaaccctgtcactataagaaatacaaaaattagctgggcatggtagtg

SEQ ID NO: 270218 - DNA, 201 bp, Homo sapiens
aggtggcaagtgggatgatactggtcatggctttctttctcatcacctacacctttcattcaacctgggtgaccagtgaggcctactcttctccgtccatygtactatctgcccgtggtggggatggcagtaggatcatatttgatgacttccgagaagcatattattggcttcgtcataatactccagaggtgaagattt

SEQ ID NO: 270219 - DNA, 201 bp, Homo sapiens
ttcctttgggaggcattcaggttcatgggtttcagattcaaatttcagtcagctctcagtgatagagatgtgctttcagtacatttaagggaaaaaaaaamccttaaattcttccaaaggagataattatctccttttaagacgtatgtgttggagtccagcacagtggctcacacctgtaatcccagcactttgggaggc

SEQ ID NO: 270220 - DNA, 201 bp, Homo sapiens
ttgtctgactccagagactgtagtcactgtgttatattgcctaaagttaaggcttataacaaatttggagggccaaaatcataggttcttgaaatattatkggtatcttaaaaatagtatattcaatcttgtggagtattgattgaaaatgcctgcatctatttgcaaatttataattttgttttgtgtagatatttgaaa

SEQ ID NO: 270221 - DNA, 201 bp, Homo sapiens
ttgttgtatttttttttagaaacagggtctctctatgttgcccaggctgatcttgaactcctgagctcaagtgatccacctgccttggcctactaaagtaytgggattacaggtgttatctacctcacccagccttatttctttttaaataagaaacttaaggacttacatattttgggcctaaagaactatctttccatt

SEQ ID NO: 270222 - DNA, 201 bp, Homo sapiens
taattatcttaaaaatccaatctgacagtatttgtttttcaatggaccattgattccatttgctttcactgtaattactgatatatttggatttatttctrtcatcttactttggttccactggatttgcattcttttctaccattttttttttgccttaaaaaattttttttcttgcttagtattttatttttgagacag

SEQ ID NO: 270223 - DNA, 201 bp, Homo sapiens
ggagatgggtggtttttatacattctagacttctgattgaatccttaggggagaaatttataggcttactgcagttgctatgttagtatttctggtgattkgtcaagacttacatagtcactttattgtatctgggattttccctttctttttcccttaagttctggtaagacaacctaatggagtttcttcttcctgtta

SEQ ID NO: 270224 - DNA, 201 bp, Homo sapiens
aacataaagaaaaaaacatttaaaatgcaaaatgtgaggtttggattttgaagtcctcacaatgtaagggagaggaaaaaaaaactacatgaaacattccmaaacggttagtttttcctaccaggaatgtactcagcaattatttgttgatttaaaaaaaatttttttttattttaaaattcttaagccatttggcttccg

SEQ ID NO: 270225 - DNA, 201 bp, Homo sapiens
tctgagcatttgagggaatgagttgtaagttgttgatcctttccaggaacgtatgggacactcatacattctggttgtggggtccaactttcttggattcrtaactttgtattatagaagcatttttgcactttgttggataatatgaccctgggtgtcttaaaacgggagatgatatttttttcttgaaggcttgggagt

SEQ ID NO: 270226 - DNA, 201 bp, Homo sapiens
gtgagttaagccccatatgtgttagtggactcctgaatcttttgttggcatttgcttctgtttgcctaagcacatttgtaaatgtctaagcttcaaattargaagctatgtggttgctacctgattatatttagtcaataaacttactttcatatttgttttagagccagacataggcatgcctgaaccagatgctcagag

SEQ ID NO: 270227 - DNA, 201 bp, Homo sapiens
tatccagtactttcggaggctgaggtgtgtggatcatttgagctcaggagtttgagaccagcctgggcaaccctgtcactataagaaatacaaaaattagstgggcatggtagtgtgcgcctatagtcccagctactctggagactgaagtgggaggatcgcttgagcctgggaggttgaggctgcggtgagctgtgattg

SEQ ID NO: 270228 - DNA, 201 bp, Homo sapiens
ctttgcatgcacacttttattgatatgatgattttaacatgaggtagaacatcccagttataaaagaagaaaaaagttatagataaataatacatgttcastttagaaaaatcagaaaattgaatcaagaagaaagatataaatcttgtgtaaagtgatcaccttatgataactgcttttaacattttaatttatatcttt

SEQ ID NO: 270229 - DNA, 201 bp, Homo sapiens
gcagtccttctgcctcagcctcccaaagtgctgtgattacaggcctgagctgccatgcctatcctgattcatctatctttgaagtgcctctaaagtttccmagttgggattcttagtgtgaaaaccatattgaattaattcaaaggaaacttttcatggatttatattattatttttccttgaaatctttataataagaac

SEQ ID NO: 270230 - DNA, 201 bp, Homo sapiens
ggggatatataagttagactttttattttttaaagaagataatacgataaccattaaaaaacaatgcagaggccgggtgcgatggctcatgcctgtaatcygagcactttgggaagactcttgaggtcaggagtttgagaccagcctgcccaacatgatgaaaccccgtctctactaaaaaaatacaaaaattagccacat

SEQ ID NO: 270231 - DNA, 201 bp, Homo sapiens
ttcatgttcgttgtagataaaatagtaactataagtaaaaaattaaggaaaaaataactctttagtcccagaactctgcaatagatttttaaaaatatttkggggagtgtatattcagagcaacttgaatctgctcttagatggctttttacttaaagttttcatatgtgctatactttgttgcaaatacactcgtttgtt

SEQ ID NO: 270232 - DNA, 201 bp, Homo sapiens
gacattgactggcaagcatcatcttgcatagaacttaagctagggtaacacttgatttgcccttactacctcatgcccttttttgcaggctctactctcamcaaattgcaggctgaggaataatcatcaattagtagatggtttcctgaatccatatactgtctctctaggaaattagcactgtagaaagaagtgtgttct

SEQ ID NO: 270233 - DNA, 201 bp, Homo sapiens
tcagggaagactactccaagatacagcagcagagaaaaactgcatgaaattaaagcagtaatttagtagctttaattctttctcttccccaggaataatayttagacataagtaggctaacagaaaatgtgtttcttacctcaagccataggcttctctaacatgattctttcgtgaatgttgtcgtaatgtttgttttta

SEQ ID NO: 270234 - DNA, 201 bp, Homo sapiens
gtacacctgtagtcccagctactcgggaagatgagattggaggatcacttgggcctgggaggttgaggctacagtgaactgtgattgtgccactgtactcyagtctgggcgacagtgaaatcttgtctaaacaaaaacaatttaactgggaagcacagtggtccttgaggacatttaatatcaggacaaagagcctatgaa

SEQ ID NO: 270235 - DNA, 201 bp, Homo sapiens
caccaccatctcctccatactaactgcctctatgctcatgtactctctttcatcctgtattgctgtagataaattgctctggatgtaagccaggtctttcycttacccactcaatgactttgtctagcaatttttctccctctcctacattattaatttttccttctctaccggatctttctcatcagcatatctacatgc

SEQ ID NO: 270236 - DNA, 201 bp, Homo sapiens
tgggtgagatttagcctcaagatttgatttactatatgtaagtacattacttgatttctataaagaatctttagtggaagaggttattctgaattatttawcaatatgattaataccagttagaaattattaatgatcttcctttatactatacataggataacttttaacttgtcgctacagttgttgctctgaggatct

SEQ ID NO: 270237 - DNA, 201 bp, Homo sapiens
taaattgctctggatgtaagccaggtctttctcttacccactcaatgactttgtctagcaatttttctccctctcctacattattaatttttccttctctrccggatctttctcatcagcatatctacatgctttttctcccattttaaaatcaaatcataatggtaataaaatttctcttaactccacttttccctacca

SEQ ID NO: 270238 - DNA, 201 bp, Homo sapiens
ctctgtctctactaaaaatacaaaaattagctgggtgtggggtacacaccctgtaatctcagctactggggaggctgaggcatgagaattgcccaggaggyggaggttgcagtgagcagacatcatgccactgcactccaacctgggagacagagcaagactgtctcaaaaaaaaaaaaaaaaaaaaaaaagagtgggacc

SEQ ID NO: 270239 - DNA, 201 bp, Homo sapiens
tcaatgactttgtctagcaatttttctccctctcctacattattaatttttccttctctaccggatctttctcatcagcatatctacatgctttttctccyattttaaaatcaaatcataatggtaataaaatttctcttaactccacttttccctaccattccatcttcttcacaattgaatattcctaaaattgcttct

SEQ ID NO: 270240 - DNA, 201 bp, Homo sapiens
attgaaaggtctgtttgtagggggtgtagatggggattaataatgtgggtttcaatctactgtgatctggctgggctgttacattgggaaatccatgataytgatttttagatttttatcttttgcataggtaagattcccttgagaaggcttgcatattctcttactcaaggatgtaagccaggcagtcagctttctggg

SEQ ID NO: 270241 - DNA, 201 bp, Homo sapiens
gcaactgcattattcttattatgcagatcagaaactttggaatcatccttcatttttctcattctcttttacttcacatccagtacaccagctaattctgktaacctctatctttaaaaaaatcttagaatctgattaccttttttttttttacctctactgttaccctatcattccaaattaccatgatatctttccaaa

SEQ ID NO: 270242 - DNA, 201 bp, Homo sapiens
agacagagtctcactctgtcgcccaggctagagtacaatggtgcgatctcagctcactgcaacctccacctcctgggttcaagcaattctcctacctcagyctcccaagtagctgggattacaggcacccgccactacgcctggctaattttttgtatttttagtagagacagggttttaccacgttgaccaggctggtct

SEQ ID NO: 270243 - DNA, 201 bp, Homo sapiens
ttgggaaatccatgatactgatttttagatttttatcttttgcataggtaagattcccttgagaaggcttgcatattctcttactcaaggatgtaagccargcagtcagctttctgggagtagagtagggaaagaagttgtaacaggctcaaccttcagtggataaaacttaaacttaatccctccgttttcagtaaggtg

SEQ ID NO: 270244 - DNA, 201 bp, Homo sapiens
tactgttaccctatcattccaaattaccatgatatctttccaaaatgttctgatttaaaagtgaattagaatatatcactattctacccaaatcctccaakgctttagttctcacgtgtagtgtaagctaaaatcagttcatgacctgtgagttcttacacaattttgttccttacattacctctccaacctcagttctgc

SEQ ID NO: 270245 - DNA, 201 bp, Homo sapiens
gagacagagtctcactctgtcgcccaggctagagtacaatggtgcgatctcagctcactgcaacctccacctcctgggttcaagcaattctcctacctcakcctcccaagtagctgggattacaggcacccgccactacgcctggctaattttttgtatttttagtagagacagggttttaccacgttgaccaggctggtc

SEQ ID NO: 270246 - DNA, 201 bp, Homo sapiens
aagactccatcagacacacaggaaatttgcaggtcttcctcttcgtattctttgttttcagcacacagtgaggaaacaagagaaaatgggataaatgatayaaaaacttgcttttatttttataccaggccctgtggctcgcttctgtaatcccagtgacttgggatgctgaggtaggaggatcacttgagctcaggagtt

SEQ ID NO: 270247 - DNA, 201 bp, Homo sapiens
ctacctccttggtgactacgatgcccactagcatttgagaaccaccgatctaaggcaaagaatgattaagtgctagaagagaactaatgtgatatggaacrtagagaggagtgattgatttcagtttggcagattgggaagagatgatatttgagttggaccttgaatgatgagaattttagtggatgggaatttggggaa

SEQ ID NO: 270248 - DNA, 201 bp, Homo sapiens
caagagaaaatgggataaatgatataaaaacttgcttttatttttataccaggccctgtggctcgcttctgtaatcccagtgacttgggatgctgaggtargaggatcacttgagctcaggagttccaggctgcagtgagctaagactgcccaattgcactccagcctgggtgacagagcaacacaccctgtctccaaaaa

SEQ ID NO: 270249 - DNA, 201 bp, Homo sapiens
gctgacagtctaagagaaaggaaataaataacagaggatcaagatccctaaggaggtagaagggtatgggctccagagcacaagtagagagatgaacattygatgggagaatggaagggatgaaaagatgtataataatacaaataacttagctttggtagggataagttgatgtagtttctgtctaatggctttattttt

SEQ ID NO: 270250 - DNA, 201 bp, Homo sapiens
gaagttcttttccggagcgtcatctctctggtaggctttgtccttctcaccgtgggagctctcctcatgctgacaggtagggaaggctcacagcttttttycttttttctttttttttaagatggagtttcgctcttgttgcccaggccggagtgcagtggtgcgatctcggctcactgcaacctccacctcccaggttca

SEQ ID NO: 270251 - DNA, 201 bp, Homo sapiens
  misc_feature (1)...(201): n = A,T,C or G
aattatctcaatctattttatgaagcgtttattaaatgacttgtgtgacagcataatgacgtctttggagggttagctattgtatttcacattttagaaangagtagtgtgtgttgagaacatagcagaaaccacttccttggtttctcctttgtggaaaaagtaatagaggtaaaatcgttttggatgagtcatgtttaa

SEQ ID NO: 270252 - DNA, 201 bp, Homo sapiens
aaataacagaggatcaagatccctaaggaggtagaagggtatgggctccagagcacaagtagagagatgaacattcgatgggagaatggaagggatgaaargatgtataataatacaaataacttagctttggtagggataagttgatgtagtttctgtctaatggctttattttttctctgaaatgggaggtggtagtat

SEQ ID NO: 270253 - DNA, 201 bp, Homo sapiens
taaaaaataacttttaccttttttttttttttttttttttgagatagagtcttgctctgttgcctaggcttcagggcagtggtacaatctcagcttactgyggcctctgcctcctgggctcaagccatccttccacctcaccctcctgagtagctgggactacaggtgcacaccaccatgcccagctaatttttgtatttt

SEQ ID NO: 270254 - DNA, 201 bp, Homo sapiens
gataatatgaccctgggtgtcttaaaacgggagatgatatttttttcttgaaggcttgggagtattacccagtgctagattgttagaggagggatttgaattttttttttttttttttttttttttttttttgagacagagtttcactcttgttgcccaggctggagagcagtggcgtggtcccggctcaccacaactgcc

SEQ ID NO: 270255 - DNA, 201 bp, Homo sapiens
taattttgtatttttagtagagatggggttttccatgttcgtcaggctgatcttgaactcccgacctcaggtgatccacccgccttggcctcccaaagtgytgggattacaggcgtgagccactgagaatacacacattctcttatatactttaaatcatctctagattgtaatactaataactaatactaggtaaatggt

SEQ ID NO: 270256 - DNA, 201 bp, Homo sapiens
ctgagattttataattgtatataaatggaagaccaggtgccaggatttattttctggtttgacatgcattactttgtgaagaaattgattagttagccagrtgtcacttctgtcagaccaaagatgccttctctgttgcatttgatttttagagacagtgagaagcttgttatttccatttcccattctactttcaggatg

SEQ ID NO: 270257 - DNA, 201 bp, Homo sapiens
gacctcaggtgatccacccgccttggcctcccaaagtgttgggattacaggcgtgagccactgagaatacacacattctcttatatactttaaatcatctytagattgtaatactaataactaatactaggtaaatggttgttaatactgtattgtttagggaacaatgacaagaaaaaagagaggagagattttatatat

SEQ ID NO: 270258 - DNA, 201 bp, Homo sapiens
tcagaatcaaaaaagaaatgtcagctgtatgaggcagtagtttttgtctggtttaatgctttattcttagtattagaatagtgcttaacaaatggtcagcttttttttttttttgaaacagagtcttgctgtgttgcccaggctggagtgtagtgacatgatctcggctcactgtaacctctacctctctggttcaggtga

SEQ ID NO: 270259 - DNA, 201 bp, Homo sapiens
actagtgagcagaaagcttcgtcctccaaccttagcctttatctgtgatgctcagtgtctccatgcaggatggtcaagacctccacttgtccattatcccwtctctttctcttctatttgcttcctctgggaacttgccccccatcagttgcccactcctttcttatattgtcagtccgtttctatggactccttttttgg

SEQ ID NO: 270260 - DNA, 201 bp, Homo sapiens
agaaatgtcagctgtatgaggcagtagtttttgtctggtttaatgctttattcttagtattagaatagtgcttaacaaatggtcagctttttttttttttkgaaacagagtcttgctgtgttgcccaggctggagtgtagtgacatgatctcggctcactgtaacctctacctctctggttcaggtgattcttgtgcctta

SEQ ID NO: 270261 - DNA, 201 bp, Homo sapiens
tgcatagttattaaatatcacaacacttatctctcctgtgtatcatgtaaacatttgtgaaaacaagactagggcaagaaatgattcatctgttttttggtttttttttttttgagacaaagtcttgctctgtcgcccaggctgcagtgcagcagtgtgatcttggctcactgcagtcttgacctcttgggttcaagtgat

SEQ ID NO: 270262 - DNA, 201 bp, Homo sapiens
tgtgagcatttctagcatttctaacatctcacatctaccttcgaaattgttggactgttttctgggctcattataaacagaatggactagtggatcctctrttctttctcagcattgtattggtgttaatgtcttattaccctttttttcttacaggatgcaggggctgggcttcttgctgctgccatgattgctgtagtt

SEQ ID NO: 270263 - DNA, 201 bp, Homo sapiens
caccccgtctctactaaaaatacaaaaaattagccgggcgaggtggcggtcgcctgtagtcccagctactcgggaggctgaggcaagagaatggcgtgaaccccggggggcggagcttgcagtgagccgagatcgcaccactgcactccagcctgggcaacagcgagactccgtctcaaaaaaaaaaaaaaagaaattcat

SEQ ID NO: 270264 - DNA, 201 bp, Homo sapiens
attttgagtagagacagggtttcaccatgttggccagactggtctcaaactcctgacctcaagtgatcccccaacctcagcctcccaaagtgctgtttttkgggttttttgttaaatgaccagatgttgtgagatattgtgtctgttttttgtttttttgtggttttttttgagacagggtctcactctattgcccaggct

SEQ ID NO: 270265 - DNA, 201 bp, Homo sapiens
gcctcccaaagtgctgggattacaggcatgagccaccgcacccagcctgttattttatatatgaggaaattgaggtacaaataggttatttaactgcctagtgtcacataactaatggcagagtcaggattcaaactgacaaagagtggctccaaattctgtgcttttgaccgttactttttattgtccttaagggtatta

SEQ ID NO: 270266 - DNA, 201 bp, Homo sapiens
tagatattggcaagttcagcctcacagttttctgttcatttgtcatttgtgttataagttaaaatttaacggtaatttttactccggttttgttttgtttkgtttgagtacttctgtcgtactccttcccctttacccttgtttttcctcttggaagtattgaagtcccataatgagtactgctgattgtaaagcctcatc

SEQ ID NO: 270267 - DNA, 201 bp, Homo sapiens
ttttgcttatttttctaattgccttttctttttcttaataatttcagttcttcatatgttcagcatactagtcctttgtcaatttacatgtattgaatatrtatactctcccattctgcggcttattgttccattcttcatgaacatttgtaattttaatgtcctatttagacctttcctctgtctattgttttatatttt

SEQ ID NO: 270268 - DNA, 201 bp, Homo sapiens
tgaacaatgggctctccttgatgcagttcctatcatcatcatcattattgtttttgagacagagtttcactttgtcacccaggctggagttcagtggcackatgtctgctcactgcagcctctgcttcccatgctcaagtgatcttcccacctcagcctcctgagtagctgggactacaggcacacaccaccatgcccggc

SEQ ID NO: 270269 - DNA, 201 bp, Homo sapiens
taatcacttgaaaatgtaaaaagaataaaaatgcggtcatagtccttaaggaagttttggtcttcttacagggaaagaaatacaggcagctgtctatatcygataggctacagttctggaagtgtggttcttgaatcatcatcactagcagcagcagctagaaacttgttagaaataaatgcaaattctagagccccaaca

SEQ ID NO: 270270 - DNA, 201 bp, Homo sapiens
aacttaaaatgggtttatggggatataacccaatcataagttgaaaagcatttgtatatgcagtttgctaatcacttgaaaatgtaaaaagaataaaaatrcggtcatagtccttaaggaagttttggtcttcttacagggaaagaaatacaggcagctgtctatatctgataggctacagttctggaagtgtggttcttg

SEQ ID NO: 270271 - DNA, 201 bp, Homo sapiens
tttaggtaacaatgacaagaaaaaagtctatccatcttcattacagatgcagtcatctgtttttttgttttgtgaatatttttgattagaggtttgttgartttatggatgtcaaacccacagatatggaaggccaactgttttggttaatttgttacactgaatttatttttcaaggtcaaattattcattgggctttac

SEQ ID NO: 270272 - DNA, 201 bp, Homo sapiens
gataatgatagtgtatcttatgctttagggggctgcaaatattctgtagaaaatatggctggtgaattaaacccttccctagattggccctgattccttcrgggcctcagaactcatttgaccatttggtttgaactagataagaataatgcaggcctgcactggacttactcattttttttccttagtattaacatacat

SEQ ID NO: 270273 - DNA, 201 bp, Homo sapiens
cattgagtagaaaccgtacttccagtacccatacaagcattctgtttttcacttacagtacggtagtcaataaattacatgagattctcaacactttattrtaaaataggctttgtgctagatgattttgcccaactgtaggctaatgttaaatgttctgagcatgtttaaggtagtctacgctaagctgtgatgttccat

SEQ ID NO: 270274 - DNA, 201 bp, Homo sapiens
cgtgacttaggattttttggctttagaatggtgtgaaagtgatctgcattgagtagaaaccgtacttccagtacccatacaagcattctgtttttcacttwcagtacggtagtcaataaattacatgagattctcaacactttattgtaaaataggctttgtgctagatgattttgcccaactgtaggctaatgttaaatg

SEQ ID NO: 270275 - DNA, 201 bp, Homo sapiens
  misc_feature (1)...(201): n = A,T,C or G
gcagaaaccacttccttggtttctcctttgtggaaaaagtaatagaggtaaaatcgttttggatgagtcatgtttaatctttggaagttttagaagaaatngaattctgtaatgttaaaactcttttcctttttagagttcaacttgctgtgaatagagtaactgaagaagcagtcgcagtgaagattgtagatatgaagc

SEQ ID NO: 270276 - DNA, 201 bp, Homo sapiens
attgtcagtcttcactaatttatctattacctgcattggctggcatagtgtctgtcactaagttacagtagatattcactaaacataagttaagtcctgcytgcagtttttgtgtgttgaagatgggaagttagggtggaagttgggtcttctgatattttttttttgtacagagtttgtcctctttttctcagactctct

SEQ ID NO: 270277 - DNA, 201 bp, Homo sapiens
cactttgcttcctgtgtcactgggaaatgaaagccacaagagaacttaggcaagctcccaccaccatctcctccatactaactgcctctatgctcatgtaytctctttcatcctgtattgctgtagataaattgctctggatgtaagccaggtctttctcttacccactcaatgactttgtctagcaatttttctccctct

SEQ ID NO: 270278 - DNA, 201 bp, Homo sapiens
gcctcatcctcctgagtagctgggactgcaggtgcagaccaccaagcctgcataattttaaacagttttttgtggagatggggttttgctgtattgctcarattggtcttgaactcctggcttcaagtgatcctccctccttagcctctgaaattgctggggcttgcacttctggtctcaatgtttatttcctgcttcccc

SEQ ID NO: 270279 - DNA, 201 bp, Homo sapiens
gaagtttaaatttagggctcgaaattgtgttgattcagtggtgacttctatttttcctcttaatgcctttcacttcttctttttttttttttttccttttwaaagagaggaggtctggctctattgtccaggctggagtgcagtggtgtgatcctagctcactgcagcctccaactcctgcctcatcctcctgagtagctg

SEQ ID NO: 270280 - DNA, 201 bp, Homo sapiens
actcattatgtttattgttggtatacttgatgtgccacagttcttagactctgttcatttttctttattcttctttctttatgtttctcagggacagtttkggttgctgtttttcctttataagggccatactttgtttccttacatgctttgtaattttttgttgaaaactggacatattgtggcaatatgtggcaactc

SEQ ID NO: 270281 - DNA, 201 bp, Homo sapiens
ttaattttttaaaagtaatggcagctctttattttttattgtcttaaagtccttttttaatgtgtaaatcttagatatataacttttaaatcacatgtatwcttttttggtcaaggaagaaagagaggagggaggccttcatgcaaaataattttaagtcagactaaatagctatgatattactgtctttagtcctaatgg

SEQ ID NO: 270282 - DNA, 201 bp, Homo sapiens
ccacagttcttagactctgttcatttttctttattcttctttctttatgtttctcagggacagttttggttgctgtttttcctttataagggccatacttkgtttccttacatgctttgtaattttttgttgaaaactggacatattgtggcaatatgtggcaactctagaaagtcagattttcccctcttgccagtgttt

SEQ ID NO: 270283 - DNA, 201 bp, Homo sapiens
tatcaatgcctgaaagagacttgtgagaagttgggctatcaatggaagaaaagttgtatgaatcaggtgtgtttcattgattttcattataccttttcctraagaagaatttaaatatttgagtaaaagctatcattagtatattttttaaatataggctgtggctcacacctgtaatcccagctttttgggaggctgggg

SEQ ID NO: 270284 - DNA, 201 bp, Homo sapiens
cttctcagctctttcctaagcatatgtactgccctggtcatgggtgtgtctttttagattcccaggtatatgttggaccttttcagagtcctattccccaraaacatctcactccctaacctcttcttccaaacttcttgggtagtctgtttgcaccagttgctttcattgcttcaggcaacagagactaaagcattttcc

SEQ ID NO: 270285 - DNA, 201 bp, Homo sapiens
tcagtactttattcctttttatggctgaataatattctgttgtgtgtatgtattacatttcgtttatccattcatccactcatggacatttgggttgtttstactttttcatcattatgaataatactgctgtgaacaatcttgtaccagtttttgtgtgaccatatgttttcaatttcttagatatatatggaggaatag

SEQ ID NO: 270286 - DNA, 201 bp, Homo sapiens
ttgaagtttaagagcttaattcagatgtgttgagttgaatatcttgtattaattttcccagaacatagtgggttatttcagtgctgcacagtcgtggtatrgttgtgtgttttcatagtttcttgaagtaagaattattacaaaaacttttgtaatttgggctgtgttttttgggcaaatctgctgatctcgctcgggctt

SEQ ID NO: 270287 - DNA, 201 bp, Homo sapiens
atatatggaggaatagaattgttggagcatatggtaactcttcatttaactttttgagaaactgtgaaatgatttttccaaagcacctgtaccattttacrttcccatcagtaatgtaagagggttccaatttctctacaaccttgccaacacttactgcctcccctttttgctatggccatcctagtgtgtatgaagtct

SEQ ID NO: 270288 - DNA, 201 bp, Homo sapiens
ccgtctctactaaaaatacaaaaaattagccgggcgaggtggcggtcgcctgtagtcccagctactcgggaggctgaggcaagagaatggcgtgaaccccrgggggcggagcttgcagtgagccgagatcgcaccactgcactccagcctgggcaacagcgagactccgtctcaaaaaaaaaaaaaaagaaattcatgggt

SEQ ID NO: 270289 - DNA, 201 bp, Homo sapiens
tctctactaaaaatacaaaaaattagccgggcgaggtggcggtcgcctgtagtcccagctactcgggaggctgaggcaagagaatggcgtgaaccccgggrggcggagcttgcagtgagccgagatcgcaccactgcactccagcctgggcaacagcgagactccgtctcaaaaaaaaaaaaaaagaaattcatgggtttt

SEQ ID NO: 270290 - DNA, 201 bp, Homo sapiens
atgagaacatgttgtatttggttttctcttctcgcattaggtcacttagtataaaggcctcctgctctatccatgttgctgcaaaggtcattatttcattmtttttcatggctgcatattattccttgtaaatgattcctctctattgtaaatgagattgtgctcttgaattggttctcagctggaacactattggtttat

SEQ ID NO: 270291 - DNA, 201 bp, Homo sapiens
ctaacatggtgaaaccccatctctcctaaaaatacaaaaaaaaaaaaaaaaaaaattagctgggcgtggtggcgggtgcctgtagtcccagctactcaggrggctgaggcaggagaatggcgtgaaccctggagacagagcttgtagtgagccaagatcgcgccactgcactccagcctgggtgacagagcgagactccgt

SEQ ID NO: 270292 - DNA, 201 bp, Homo sapiens
ctcaaaaacagaccttgtctgttgtccagggtatagtgcagtagcacaatcatagctcactgcagcctcaaatccctgggctcaaggaattctcctgcctyagtctctgggtaactgggactataggcgcatgtcaccatgaccagatacttttttaaaaaatagtttttagagagggggtcttgctgtgttgcccaggct

SEQ ID NO: 270293 - DNA, 201 bp, Homo sapiens
atttgaaaaaaactataacggacattattggaacaattggggaaatttgaatatggactgtatattaattaggtaatgtttttgtatcagcgtcagatttyttgggtgtgataatactgtggtttgtaggagaatgcccttgttcaaaggagaacaagtgtcaaagcaaagttgaagtgaagtgatattttcattcagctt

SEQ ID NO: 270294 - DNA, 201 bp, Homo sapiens
tttttttgacaaattctttaggttttttaatatattaagattacattatttggcagggcgtggtggctcacgcctgtaatcccagcactttgggaggccgwtgcgggtggatcatgaggtcaagcgtttgagacctgcctggcccacatagtgaaaccccgtctctactaaaaatacaaaaaattagctgggcgtggttgt

SEQ ID NO: 270295 - DNA, 201 bp, Homo sapiens
atgcgggtggatcatgaggtcaagcgtttgagacctgcctggcccacatagtgaaaccccgtctctactaaaaatacaaaaaattagctgggcgtggttgygggcaccggtaatcccagctactcgggaggctgaggccggagaatcacttgaacctgggaggcggaggttgcagtgagccgagatgacgccactgcactc

SEQ ID NO: 270296 - DNA, 201 bp, Homo sapiens
ctatacctagtagactattatttatcttctcccttcaaaaaaaaaagttattagtgttgacaatgttggcaggctttcatttcccttctggccaagttgaraattcatttaggattttagttcctgctttggggattttatttttgtatactattttatctaggggtatgagtataagttcaaaataattttccttcagaa

SEQ ID NO: 270297 - DNA, 201 bp, Homo sapiens
tattgtggcaatatgtggcaactctagaaagtcagattttcccctcttgccagtgtttgttaccgcttgatgtagttgtttgttttttttagtggtgtttktttttttttttttttgagacggagctttgctcttgttgcccaggctggagtgcagtggcgtgatcttggctcactgcagcctccacctcctggcttcaag

SEQ ID NO: 270298 - DNA, 201 bp, Homo sapiens
tcctatcctgtatagatgattcagtaacattgtgtgtgaaaaaaatgatttaagcattatgaactgctgcaatatatagcaaataaggaatcattatactrttatcattatgttagtagtggactactgaagactagaaactctcaagagccaaagaagagttgagtttttgtatgccataataaatggaagagtgtgtag

SEQ ID NO: 270299 - DNA, 201 bp, Homo sapiens
aggaggcatactcagaggaactgtttttttctattccatcataggtctcgtcatggggaggttatgtgttcctgatcaacttaattcctctccacgtcctsgtgctgatgctcacaggccgtttctctcaccggatctatgtggcctactgtactgtttactgcctgggcactatactttctatgcagatctcctttgtgg

SEQ ID NO: 270300 - DNA, 201 bp, Homo sapiens
cctccacctcctggcttcaagtgagtctcctgcctcagccttccaagtatctgggactacaggcacctgccactgtgcctggctttttgtatttttattaragatggggtttcatcatgttggccaggctggtctcgaactcctgacctcaggtggctgggattacaggtgtgaggcaccatgcccggccctagtgatttt

SEQ ID NO: 270301 - DNA, 201 bp, Homo sapiens
ctccatgcaggatggtcaagacctccacttgtccattatcccttctctttctcttctatttgcttcctctgggaacttgccccccatcagttgcccactcstttcttatattgtcagtccgtttctatggactccttttttggtttacaaggatgctcaggttaccccaaatttaaaatactttctcttaatcgtgctact

SEQ ID NO: 270302 - DNA, 201 bp, Homo sapiens
gtgatttttcttatataattttttaaagttggtattgtttgtcatgcatggctgtacaatttctgtcccattagttttagtggtcagctaatgattggacagagatttccttaaattctgtataccaaaaacaaaaaatctgcagagtgttctgtatttgtgttggggcacacctgcaatactcaaccaagaagtttacaa

SEQ ID NO: 270303 - DNA, 201 bp, Homo sapiens
tttgctaggattaaaaattttttccttccctttaaaaaaaaaagttttctttgtagagagctggaagggacacgaagttattgtttccatgcccacaaatkgcttctcagggtttaagcattgcggttaatgagcaaatgagcagactctggagattgcctgcctggtttcagatccttgctctatcacatactggtcatt

SEQ ID NO: 270304 - DNA, 201 bp, Homo sapiens; identical to SEQ ID NO: 53449

SEQ ID NO: 270305 - DNA, 201 bp, Homo sapiens
gaaaataaaaataattctaaattttcagtgatcacattaatatttcgaagcattttaatatttttcttaatttatgtcttttaataaaaattatgatttgwtacaaatatttcattataatttaatgaacctttaccagttataataattctgtgattgctattttatgcatagatttttttgttcatatttctgatgatt

SEQ ID NO: 270306 - DNA, 201 bp, Homo sapiens
atcatcttactttggttccactggatttgcattcttttctaccattttttttttgccttaaaaaattttttttcttgcttagtattttatttttgagacarggtctcactctgtcacccaggctagagtgcagtggtaccatctcagctcactgccacctctgcctcctgggtgcaagtgattcttgtgcctcagcctccc

SEQ ID NO: 270307 - DNA, 201 bp, Homo sapiens
ttttatgaagtagatactattacttcttcttacatgaaactgaaacaaaaggaagtaaataatttgcctaaaattacactattacttggtagtagatccargcagtctgttccagaacagtattcttaatgactatactagcctggcctcttgttgaatttttggtgtgtcctttctgcagggattgccatcttttgcatg

SEQ ID NO: 270308 - DNA, 201 bp, Homo sapiens
ttttttaatactatttctaatatagggtgatggattggagttcaagagacacttcctgaagattaaagggaagctgattgatattgtgagcagccagaagrtttggcttcctgccacatgatcggaccatcggctctggggaatcctggtgaatatagtgctgctatgttgacattattcttcctagagaagattatcctg

SEQ ID NO: 270309 - DNA, 201 bp, Homo sapiens
gcgtgagccactgcgcctggcctggcataactttttatctttttacttttacttttctaaatcatataaaatgtccctcttttaattatcttaaaaatccmatctgacagtatttgtttttcaatggaccattgattccatttgctttcactgtaattactgatatatttggatttatttctatcatcttactttggttcc

SEQ ID NO: 270310 - DNA, 201 bp, Homo sapiens
tcacttcccaaagtccccatttcccaatactatcacattgggaattgggtttcagtatattaatttgtctggaggggaatacgagcattcagactacagcrgttacataaataaaatcacatagtattgtaccttttggaactggcttttttcactcaacataattctctggagattcatccaggttgttagcctgtatca

SEQ ID NO: 270311 - DNA, 201 bp, Homo sapiens
tacaggcgtgagccaccgcgcccaaccttgcttagtattttttaaaaatcactgtatttatcctcctctcctaatttggaatctatatgcttttttttttkgagggttactctagctattacaatatgcatacttgttatagtctgaagtcagtctcttgtcctctttctgacaatcaaagatctttacacttttataatt

SEQ ID NO: 270312 - DNA, 201 bp, Homo sapiens
aagaagagtacgacttattcacagcctttatattgaactacttgtgttagttgaagcaacagaattactggtcattaaagtttgcatccaggagtctgctmatatttgctccgtggagtttgaattccatggctcttactttggctttaagtttgtgggaaggggagggatatttagttgagttgagtttagatgagtgat

SEQ ID NO: 270313 - DNA, 201 bp, Homo sapiens
ctagctattacaatatgcatacttgttatagtctgaagtcagtctcttgtcctctttctgacaatcaaagatctttacacttttataatttatatacaatkgtctattttgataatatatatgtgtttctatgtgaatatatgtacatacatatctttgaagagatagtagatttgcatgtagttgtaagagttaatactg

SEQ ID NO: 270314 - DNA, 201 bp, Homo sapiens
cacttttatgaagtagatactattacttcttcttacatgaaactgaaacaaaaggaagtaaataatttgcctaaaattacactattacttggtagtagatscaggcagtctgttccagaacagtattcttaatgactatactagcctggcctcttgttgaatttttggtgtgtcctttctgcagggattgccatcttttgc

SEQ ID NO: 270315 - DNA, 201 bp, Homo sapiens
cacctggagtcccagctacttggaaggctgaagcaggaggattgatcacttcagcctaggaggtcaaggctgcagtaagctgtgatcacatcactacactytagtctgggcagcagagtgagacactttctcaaaaaaaaaaaaaaaaaaaaaaaaaagggtaatcacagtagctacctcctaagtcagatagaggtaaac

SEQ ID NO: 270316 - DNA, 201 bp, Homo sapiens
acaatatgcatacttgttatagtctgaagtcagtctcttgtcctctttctgacaatcaaagatctttacacttttataatttatatacaattgtctatttkgataatatatatgtgtttctatgtgaatatatgtacatacatatctttgaagagatagtagatttgcatgtagttgtaagagttaatactgagacatcct

SEQ ID NO: 270317 - DNA, 201 bp, Homo sapiens
ttacacttttataatttatatacaattgtctattttgataatatatatgtgtttctatgtgaatatatgtacatacatatctttgaagagatagtagattkgcatgtagttgtaagagttaatactgagacatcctgtgcacctttcactcagttttccccactggtatccaataaaataatataacgaggatattggcat

SEQ ID NO: 270318 - DNA, 201 bp, Homo sapiens
tgatttttcttatataattttttaaagttggtattgtttgtcatgcatggctgtacaatttctgtcccattagttttagtggtcagctaatgattggacagagatttccttaaattctgtataccaaaaacaaaaaatctgcagagtgttctgtatttgtgttggggcacacctgcaatactcaaccaagaagtttacaac

SEQ ID NO: 270319 - DNA, 201 bp, Homo sapiens
ggcattgataaggtcaagataggacatttccatcagcaccagaattcctcatgatacccttttatagcaacattcactttcctcccacttctggcaactaytaatcttttctctgttcctgtaattttgtcattataagaatggtatcttagcctgtttaggcttctagaacaaaaacactgtaaactgtgtggcttataa

SEQ ID NO: 270320 - DNA, 201 bp, Homo sapiens; identical to SEQ ID NO: 53462

SEQ ID NO: 270321 - DNA, 201 bp, Homo sapiens
tttttttcaaatgacattttccttattataaaagtttttgccaggcgtggtggctcatgcctgtaatcccagcactttgggagtccgagacgggtggatcwcgaggtcaggagtttgagaccagcctggccaacatagtgaaaccccatctttactaaaaatacaaaaaattagccaggcgtggtggcgggtgcctgtaat

SEQ ID NO: 270322 - DNA, 201 bp, Homo sapiens; identical to SEQ ID NO: 53464

SEQ ID NO: 270323 - DNA, 201 bp, Homo sapiens
ttttttcaaatgacattttccttattataaaagtttttgccaggcgtggtggctcatgcctgtaatcccagcactttgggagtccgagacgggtggatctygaggtcaggagtttgagaccagcctggccaacatagtgaaaccccatctttactaaaaatacaaaaaattagccaggcgtggtggcgggtgcctgtaatc

SEQ ID NO: 270324 - DNA, 201 bp, Homo sapiens
gagtccgagacgggtggatctcgaggtcaggagtttgagaccagcctggccaacatagtgaaaccccatctttactaaaaatacaaaaaattagccaggcrtggtggcgggtgcctgtaatcccagctacttgggaggctgaagcaggagaatcatttgaacctgggaggcggaggttgcagtgagccgagatgacgccac

SEQ ID NO: 270325 - DNA, 201 bp, Homo sapiens
tactaaaaatacaaaaaattagccaggcgtggtggcgggtgcctgtaatcccagctacttgggaggctgaagcaggagaatcatttgaacctgggaggcgraggttgcagtgagccgagatgacgccactgcactccagtctgggtgacaatacaagagactctgtctcaaaaaaaagaaatttctgcttttgtgaaaaat

SEQ ID NO: 270326 - DNA, 201 bp, Homo sapiens; identical to SEQ ID NO: 53442

SEQ ID NO: 270327 - DNA, 201 bp, Homo sapiens
tttttctaataaaatttgtatcaactttggggcatattaggttgaggccttggctcctgcctgtagtcccagctacttaggaggctgagagaggaggatcrcgtgaacctggaagtttgaggctgtagtgagctatgattgcaccagtgcactccagcttggatgacagagtaagaccctacctctaataaaaatttttaa

SEQ ID NO: 270328 - DNA, 201 bp, Homo sapiens
taatacttttgccttaaatattctttatctgatattaatctagccccacttgctttcttttggctaatatttatatgattttcataaaggatttattaacaaaaaaaaaaaagaaaaagtttgcatggcataacttttttgagacggagtttcactcttgttgcccaggctggagtgaaatggcgcgatcttggctcactg

SEQ ID NO: 270329 - DNA, 201 bp, Homo sapiens
tagtagagacagggtttcatcgtgttgtccaggctggtctcaaactcttggcctcaagttatctgcccgccttggcctcctaaagtactgacattacaggmgtgagccaccgcgcccaaccttgcttagtattttttaaaaatcactgtatttatcctcctctcctaatttggaatctatatgctttttttttttgagggt

SEQ ID NO: 270330 - DNA, 201 bp, Homo sapiens; identical to SEQ ID NO: 53471

SEQ ID NO: 270331 - DNA, 201 bp, Homo sapiens
gtgaggtagtatgatgcctccaggataatagccattttaacaggagagatatctcaatgtggtatctcaatgtggtaatatgcatttccctgctgattagycatgttgaactattttttttttttttttttggagacagagtctcactctgtcgcccaggctagagtacaatggtgcgatctcagctcactgcaacctcca

SEQ ID NO: 270332 - DNA, 201 bp, Homo sapiens
agaatgataataatggccaatatttacttaatgtttattatatgctaggtactcttctaagtgctttacaggcattaattatatttgttttcagaacactwttatgaagtagatactattacttcttcttacatgaaactgaaacaaaaggaagtaaataatttgcctaaaattacactattacttggtagtagatccagg

SEQ ID NO: 270333 - DNA, 201 bp, Homo sapiens
tgaccttccaaagagctgggattacaggtgtgagccaccacacccagcctcattttctttttaaatagacttctatttagtgtagtttgaaaaatcagatktatgacgatgacacacttcattccgaatctagaaaaatgcatttaaataaaagtattttacagtagagctatgaatatgaaacttttaaacaattagagt

SEQ ID NO: 270334 - DNA, 201 bp, Homo sapiens
tttttttttttttttttttttttttgaggcagagtcttgctctgtcgcccaggctggagtgcagtggcacgatctcagctcactgcaagctccgcctcccrggttcacgccattctcctgcctcagcctcccaaataactggtcctacaggcacccaccaccacacccggctaattttttgtattttagtagagacggggt

SEQ ID NO: 270335 - DNA, 201 bp, Homo sapiens
cagcaagttagaaatagagaaaggtgagaagtaaaacttacagtagagctttaggacataacagcaaaggatagagcagccataaagaaagaagaaaaacmttacatttgacccttgaacaaggcagaggttaggggaactgacccccctcgggggtcagttgaaagtataactttttgactctccccccatttttttttt

SEQ ID NO: 270336 - DNA, 201 bp, Homo sapiens
aatttttgtaaaataaattgaactcattttaagtgtaagccatggggttttttgtcattgtttttcattgttttttatagctttagggggtacaggtgcarttttgttacctggctatattgcatagtggtgaagtctgggcttttagtgcacccaccaaccagccatggtttttaaaaggagtgtttttctcaaattttt

SEQ ID NO: 270337 - DNA, 201 bp, Homo sapiens
ttaaaaaatcaactttgttataataatttttgtaaaataaattgaactcattttaagtgtaagccatggggttttttgtcattgtttttcattgttttttrtagctttagggggtacaggtgcaattttgttacctggctatattgcatagtggtgaagtctgggcttttagtgcacccaccaaccagccatggtttttaa

SEQ ID NO: 270338 - DNA, 201 bp, Homo sapiens
ccttgtgacagaatatgccaaaaatggagaaatttttggtaagctttttcctttaaattttctattaatttgaaaaattcactaatctgcatgaatggggkattttctgttaattttctgcttatttaagtgttggtaatataagtgaaaaaaaattaagtgttagaaaatattcagtaacctaaaatatgaaatataact

SEQ ID NO: 270339 - DNA, 201 bp, Homo sapiens
gtgaaccttgagaaaatctaccgagaagtacaaataatgaaaatgttagaccaccctcacataatcaaactttatcaggtatgactcagcctaacactatstccattcattccacaagatagttctctatttcgtatcatgatttttcttcttatatttgtttttctaatcaatgaaagaaaataaatgtatgctatttgt

SEQ ID NO: 270340 - DNA, 201 bp, Homo sapiens
ttgatatagctactaatttaatcaaataaagattttattttttcagtttgtacaggagaaaaaagacattaccattgtactgaaagagaaacatgttttcraattattcttcatagcacactaaagacactgccaaacaacatctactgccttacacatggtattagtttaagaaatatttgttgaatgaatgaacattga

SEQ ID NO: 270341 - DNA, 201 bp, Homo sapiens
gaagtcacagtttctgaaataaaattccttttacaaagttaaattttagtgcagttactaacattttagtttttgcacttcaatttttaaaagaaagtccmattgtattttctcatgtaatgagttttaatattttatattcagctttttgtctgtattctttgaaacttatcacttgcttttctaggaaaatagtatttc

SEQ ID NO: 270342 - DNA, 201 bp, Homo sapiens
agtacttgttatataaagtaataaataattgctggggaggaagggacaatatgacttagagatgactctgttcttgagccagagcctgagaagataggggkggcattaactcagttgctcaggaggaagatgtggatcttgatccaaggagagaggctgaggctagaaatttgggaatcatccagaggttgagatgaatgg

SEQ ID NO: 270343 - DNA, 201 bp, Homo sapiens
ttttgctgagagtgctctgcatcctggtgccctgcacagcacccatgccgactgtcaggtggaattagaacccaaaggagcagttgtttctctgttccctyaatatctgggaaagctggcaggctagagatgtgaacatttgggaagcaactttattttcaaggttttaagagggtgggactgcaaaaacaagaggaaaaa

SEQ ID NO: 270344 - DNA, 201 bp, Homo sapiens
ggattcatcccattttattgtatatatcaacatataatttctttttattgcaagtagtattatattatatgaatataccccagtttgcttattcattcatctatctattgatagacatttgggttggtttcagtttttggctattatacataagttactatgtacattcgtatacaagtctacacagtctaccttcaggta

SEQ ID NO: 270345 - DNA, 201 bp, Homo sapiens
tctatttttcattttcttcagaattgtctttctgaatcacaaacgtaatcatgttgcttttatttattttctgagttttctagtaatgaccattaactacaaaaaaaaaaaaagtaattttgaaaacaaggtaatggcctgcaaacagttttcagtaggattaatgctcagtgtactgtactctgttatcatgtactttat

SEQ ID NO: 270346 - DNA, 201 bp, Homo sapiens
gttgtggtgagccgagatcacgccactgcactccagcctggcgacagagcgagactccatctcaaaaaaaaaaaaaaaaagaaagaaagaaaaaagaaaagaaagagaaatccgaaatccttattttcctgaaaggagtaaagccaaaggaaactttttttacatttaaaaaaaaaggtttttttcaaatgtaaaatttga

SEQ ID NO: 270347 - DNA, 201 bp, Homo sapiens
aaatacaaaaaatacgccaggcatgttggcattgagactgcagtggccatagtcacatcactgcactctagcctgggtggcagagggagaccccatctcgaaaaaaaaaaaaaaaaaaaggctgaacacggtggctcacagcctgtaatcccagcactttgggaggctgaggcaggtagatcacgaggtcaggagatcgag

SEQ ID NO: 270348 - DNA, 201 bp, Homo sapiens
atgcatggtatgatttcatttgggtttttaaatatattattactatttactatttaaagcagtttattttaatgccttagttctcttgagctgctataacaaaataccttaaactgggtaacataagcaacagaaatttatttctcgcagttctggaggcttggaaatcctagatcaaggtgccaatggtgtctggtaagg

SEQ ID NO: 270349 - DNA, 201 bp, Homo sapiens
atggtatgatttcatttgggtttttaaatatattattactatttactatttaaagcagtttattttaatgccttagttctcttgagctgctataacaaaataccttaaactgggtaacataagcaacagaaatttatttctcgcagttctggaggcttggaaatcctagatcaaggtgccaatggtgtctggtaaggaccc

SEQ ID NO: 270350 - DNA, 201 bp, Homo sapiens
ggtatgatttcatttgggtttttaaatatattattactatttactatttaaagcagtttattttaatgccttagttctcttgagctgctataacaaaataccttaaactgggtaacataagcaacagaaatttatttctcgcagttctggaggcttggaaatcctagatcaaggtgccaatggtgtctggtaaggacccac

SEQ ID NO: 270351 - DNA, 201 bp, Homo sapiens
gtatgatttcatttgggtttttaaatatattattactatttactatttaaagcagtttattttaatgccttagttctcttgagctgctataacaaaataccttaaactgggtaacataagcaacagaaatttatttctcgcagttctggaggcttggaaatcctagatcaaggtgccaatggtgtctggtaaggacccact

SEQ ID NO: 270352 - DNA, 201 bp, Homo sapiens
agtctttctaaaaccttccattatgtttatggttgaaaaaatagaagaatcttggtgactaccccttttttttttttttttagcaatgagccatgtagttwaaaaaaaaaaaacaactcatcttccccctcttcatttcccttatttaaaaaaaaataataactggtagtcctcaaactaatatacccctgttcttctgga

SEQ ID NO: 270353 - DNA, 201 bp, Homo sapiens
tatgatttcatttgggtttttaaatatattattactatttactatttaaagcagtttattttaatgccttagttctcttgagctgctataacaaaataccttaaactgggtaacataagcaacagaaatttatttctcgcagttctggaggcttggaaatcctagatcaaggtgccaatggtgtctggtaaggacccactt

SEQ ID NO: 270354 - DNA, 201 bp, Homo sapiens
aacacttagagggttgttacttaggaaacactgcactcagttgccttcaagggttatatatctggggtaatggcagccagtcactcagttgtgtttaggtraatgtcttagagctttactcatttgtttctttccttatagaccatttaagataaagagctctttagcagtcatcaggtaattgaaattctaagattatca

SEQ ID NO: 270355 - DNA, 201 bp, Homo sapiens
tagtagagacagcgtttcaccatgttggccaggctggtctgaaactcctgacctcaaatgatcagcctgcctcggccttccaaagtgttgggattacaggmatgagccacagcgcccagcctgactcccccaaaatttaactaatagcctactgttcactggaagccttaccaataacagaaacagtccattaacacatat

SEQ ID NO: 270356 - DNA, 201 bp, Homo sapiens
gcctacagctggactgtttctatgccacccttgcatttaggtgtggtcatatgcggagttctaactaatggaatgaacagaagtaataggcaccacttccrgccctggcccataaaatcacccatgaagatccctcagagttcttttttccttctgtctagctggaatggagaccgccttcaggttaaccttggaagccac

SEQ ID NO: 270357 - DNA, 201 bp, Homo sapiens
tttctgacagtcattttggaaagtggactgtggagctgagctgaggttacattgtaaagagagaacttctccctggcaccacctttgcctcacactcctgrataccaaaggcagaccacagtgttgttcaccaggtttagactgtatctgaagctctttccccagatgtaccctcttttctctcctaaaccttgaagctcc

SEQ ID NO: 270358 - DNA, 201 bp, Homo sapiens
cagtggctcacgcctgtaatcccagcactttgaggggccaaggcgggcggatcacgagggcaggatttcgagaccatcctggccaacatggtgaaaccccrtctctactaaaaatacaaaaattagctgggcatggtggtgcatgcctgtaatcccagctactcaggaggctgaggcaggagagaatcgcttgaaccaggg

SEQ ID NO: 270359 - DNA, 201 bp, Homo sapiens
acctcaaggagttaatcaaataagaaccagacctttaagttaatataacacaaaaagatcattgttttcagggacatgaggctaggagaaagactaactcwgtctggaagaatcagggaaattattagctaacacttgattaacaagaaggtatttgtggcaggattggggatcggggagacagagaaagaaagagggaga

SEQ ID NO: 270360 - DNA, 201 bp, Homo sapiens
cagtaatcccatactttttggaggccaaggcaagaggattacttgagcctaggagtttgagaccagcctgggcaacatggtgaaacccactctcgaccaartgtgtgtgtgtgtgtgtgtgtgtgtgtgtgtgcacacctgtagtcccagcttcttgggaggctgaggtgggaggatcatttgagcctgggaggcagaggt

SEQ ID NO: 270361 - DNA, 201 bp, Homo sapiens
aatttttttgtcctttgacccatttaattgcattgtcttttttgttgatttgtttaaatactttttaagataggggattatttttaatcacttctttaatmatcttaaaaattctcagtttaatttttgtgagtatataactatcggaccatttaccttttcccccaatctgtttttcctacccactattataaaagtcaa

SEQ ID NO: 270362 - DNA, 201 bp, Homo sapiens
tgattgacactttgaggttgacaattcaaatggtgtccgttttaaactaatatatcttaaagagctagggggcactatggagtaataccgtggtttggctrtcagagtgagatcaatgcattcatttgtaattggaacaagcaccggtcagatcgtgaaagaggacttagatcctaaatcgtgtgtgtagtatatatgtgt

SEQ ID NO: 270363 - DNA, 201 bp, Homo sapiens; identical to SEQ ID NO: 53491

SEQ ID NO: 270364 - DNA, 201 bp, Homo sapiens
gtaacatgggcttaattaattccataggcgtggaagagctattaagaatatttaaataaaaaatgaccttcttgaagttctgctttagaaagatgattttwatttacttatttattttttcatttttattttatttatttatttatttatttatttatttatttatttatttatttttgagacagagtcttgctctgtcac

SEQ ID NO: 270365 - DNA, 201 bp, Homo sapiens
tggccacaatgactgtaccatgtgagattatagtaccagtaaagacatactttccaaaacttgaacctaatggatttaatatccaagctgtgaagttggctttttttttttttttttttttttttagttcttgttttgtttaagagatgaggtcacactgtagtttcccaggctggatttgaactcctggcctcaagtgat

SEQ ID NO: 270366 - DNA, 201 bp, Homo sapiens
ggccacaatgactgtaccatgtgagattatagtaccagtaaagacatactttccaaaacttgaacctaatggatttaatatccaagctgtgaagttggctttttttttttttttttttttttttagttcttgttttgtttaagagatgaggtcacactgtagtttcccaggctggatttgaactcctggcctcaagtgatt

SEQ ID NO: 270367 - DNA, 201 bp, Homo sapiens
gccacaatgactgtaccatgtgagattatagtaccagtaaagacatactttccaaaacttgaacctaatggatttaatatccaagctgtgaagttggctttttttttttttttttttttttttagttcttgttttgtttaagagatgaggtcacactgtagtttcccaggctggatttgaactcctggcctcaagtgattc

SEQ ID NO: 270368 - DNA, 201 bp, Homo sapiens
ggcggaccacttgaggtcaggagttggtgaccagcctggcctacatagtgaaagcctgtctctactcaaaatacaaaaattagctgggcatggtggcacaygcctgtagtcccagctactagggaggctgaggcaagagaatagcttgaacctgggaggcgaaggttgcagtgagccaagatcgcgccactgcactgcagc

SEQ ID NO: 270369 - DNA, 201 bp, Homo sapiens
aaattttgaaggtttttcgcactttattttgccagtatgaacctaagttttaattcttttttttttccacttattattaaccagcgtcccaggtcagtatkgcttaaatctgtccttacttctccaacatcttctatcatggctttaattcagattgccatcatttctcacttgaatcacttcaacacctaagtccttttt

SEQ ID NO: 270370 - DNA, 201 bp, Homo sapiens
taaagaccagttgtgggaaaccttaagtattaggagtaggagaaggggttaggatctttattagaatggccatctgagagccaggaagtgatgatgcctayaagggagttttttaggaagataaatccagcagtggtgtgtcagctgaattagaggaggagaaaagaagccatttaggagtactttaattgtttagatgtg

SEQ ID NO: 270371 - DNA, 201 bp, Homo sapiens
ttctatagtctgtgattttttttttctaatgggattgcctgaataagacaaaatgtttttaagttaatttgttatattcatttgtgtgtgtgtgtatgtgtatatatatatatatatcacacatatacacgtatatataaagatttatatcaatttgtcatttttgttgtgaaaatgtgatgcacaaaattagaatacttt

SEQ ID NO: 270372 - DNA, 201 bp, Homo sapiens
tctatagtctgtgattttttttttctaatgggattgcctgaataagacaaaatgtttttaagttaatttgttatattcatttgtgtgtgtgtgtatgtgtatatatatatatatatcacacatatacacgtatatataaagatttatatcaatttgtcatttttgttgtgaaaatgtgatgcacaaaattagaatactttc

SEQ ID NO: 270373 - DNA, 201 bp, Homo sapiens
cttgaagttttctgccttccagtcacatttttggagcagctttcatcttgagacactttgtttttcaccctatttttaagagcacacaatttctttcctcttttttttttaggcatgtgtagatcattgcattggtctttacagttctttgcctttaccacttgttttttatttcagtctttgcagaacaagagctataac

SEQ ID NO: 270374 - DNA, 201 bp, Homo sapiens
gtatttgtcctaaggctctccctccccgcctcccctcacccccaaagaggcccccatgtgtgatgttcccctccctgtgtccatgtattctcattgttcamctcccacttatgagtgagaacatgtggtgtttggttttctattcctttagtttgctgaggatgatggtttccagcttcatccatgtccctgcaaaggaca

SEQ ID NO: 270375 - DNA, 201 bp, Homo sapiens
cccaggggttgaggacccctcttttaaagtaagggctatgtgtatacacatgtgtgtgtaccttgggatatttgtgatacacatgcagattattacatacagtgtgaggcagtgtatgataagtgacaaggtgttgagagaacaggttatttctgtttgaagtgaagagggacttaaggtcaaggtggcatttaattagag

SEQ ID NO: 270376 - DNA, 201 bp, Homo sapiens
tatacatgggatgctttgtgcttatgcttagtgctaagcattgcagagtacaaaagagaataatatggttcctgtcttcaggaagcttaaatgaagttgtmtttaatacttcaaaacactatgtgttagagccgcagtccccaaccttttaaatggcaccagtgaccaaataagtggaggacaatttttcccaggttgggg

SEQ ID NO: 270377 - DNA, 201 bp, Homo sapiens
aaattatatactaaattgtatatgtgcatgtgtatctatgtatcatttttattagactttcagtagggtctgtgagcagaaggcccaaggccagactgttmaggtatctcttgactggggtaatgaaaggcaccctgagacaggcactaaatgagaagattatgaaaaagaaccaacatcattcagctaagaataaagcag

SEQ ID NO: 270378 - DNA, 201 bp, Homo sapiens
aatattgaatctgcaaacccaactctatgaagtcatgtctttttgctgaatatgaatcttttaaaggccacagaagaaaaccttgctcaagactacctgtwcctctgttagtcagagtcattatcactaagttcttagaaccagcaagttttagaaccattgtcagtttcttttgctgttgttgaaagcaacatttattaa

SEQ ID NO: 270379 - DNA, 201 bp, Homo sapiens
tatgctgaaaacatcctattataattattctcctccgactattttgaactgtacattggattattgtaaattatagtcaccccactgatctatccaacacyaggtctcatttcatctctcaaacggtgggtttgtgctcattaatcagcctctcttcatccctcctccctgctgccacttttgcgcctttaatctatgtgt

SEQ ID NO: 270380 - DNA, 201 bp, Homo sapiens
tgatagataattcaagaaggaaatgtataaaatgaaagttttaaagagaacaagaattacagttaactcctttactatgactcacatggtccttttctctrtgcttccaagcagatctcattttgactagaatacaactaaactggttaagagtttggacagggtgagagagagagtgtgtgtgagcatgctagaggaaat

SEQ ID NO: 270381 - DNA, 201 bp, Homo sapiens
acaccttaggtctgagctatgaccagtcacacttcattatattttataatttttgagtcctcatctattttgatcaaattaaagatgtcttcagtttccgrtcatatgggagcttattgtgccatggtaacaactttggcttgtagtccgagtgacgtgggaagccattggaggattattggcagaggactgatagaactg

SEQ ID NO: 270382 - DNA, 201 bp, Homo sapiens
caggctggtttcgaactcctgacctcaagtgatccacacgccttggccccacaaagtgctgggattacaggcgtgagccaccgcgcctggcccaattgttwcttaaagtattccatgggagtaacaattccattgttaatgatgttttttacagcagttatttatccttattcgttcattcactggataaatgtttgtgtg

SEQ ID NO: 270383 - DNA, 201 bp, Homo sapiens
atgcaattttcagtttttgtttatagtaaataatacgcagtgaatatttttgtgcctataactgagtgtgcattttacattttttttagggaggagaaatkgctggtaaagtcctaaaaggaaatttcctaagtaacaaggtattatttttacattaaagagtagtgtatttttattaccaaatctgtcgtgtttattatt

SEQ ID NO: 270384 - DNA, 201 bp, Homo sapiens
ggctgaggcaggcggatcacgaggtcaggagatcgagaccatcctggctaacatggtgaaaccccatctctactaaaaatgcaagaaaaattagccgggcktggtgatgggcgcctgtagtcccagctactcgggaggctgaggcaggagaatggcgtgaacctgggaggcagagcttgcagtgagctgagatctcaccac

SEQ ID NO: 270385 - DNA, 201 bp, Homo sapiens
ggtgactaccccttttttttttttttttagcaatgagccatgtagttaaaaaaaaaaaaacaactcatcttccccctcttcatttcccttatttaaaaaawaataataactggtagtcctcaaactaatatacccctgttcttctggaaaccactaaaaaagttgtttattgtaataatgatgactcagagaaacctgggc

SEQ ID NO: 270386 - DNA, 201 bp, Homo sapiens
aagcactggattacaggtgtgagccactgcaactggcctactttcatttattttagctgactaatttaaacctaccttcatttccctaaataatgtgcttrtactggtatttctggatttttttttctattttagacacaatcttttgaatctcttggattcttcccctatccctatatgtaagaggcatattttagagag

SEQ ID NO: 270387 - DNA, 201 bp, Homo sapiens
ctttcactcaccttcctattgctcattggataaaatccaaactcctcagtttgcaaatagggtagctgccctaagtgaatggatgtgtccaactattcctygcataggtctatttatttaatattatccgtaggtatggacaaccaaattgccgagtatagtgtctgcttcattataaaccaaccttcctttctttctgtt

SEQ ID NO: 270388 - DNA, 201 bp, Homo sapiens
tattttgtaataaaagacataattcctcttgtagtctagatgagaaaataaatgtataaactgacaatttaagtaaaaccgtaaattcaggggtactgccrggtattttgtgtgactcagtaaaaatattaaggataaaaaaagaacctgcatgaaaagaaacactgaacagacaacccacagaatgagagaacatttttg

SEQ ID NO: 270389 - DNA, 201 bp, Homo sapiens
gagcaggaattcttacagtgaggagggtggagatattcagagggaatggtaagggctctatgtaggaagctcttctcagtatggaataactaaagtaaggrgtgtgtgtgtgtgtgtgtgtgtgtgtgtttgtgcacacgcatgcatgtccatccacatgcacaagggaaagagagacacttccgtgtaaatgcttaagga

SEQ ID NO: 270390 - DNA, 201 bp, Homo sapiens
tgatactctgaaattagtcttgaaggatgagcaggaattcttacagtgaggagggtggagatattcagagggaatggtaagggctctatgtaggaagctcytctcagtatggaataactaaagtaaggagtgtgtgtgtgtgtgtgtgtgtgtgtgtttgtgcacacgcatgcatgtccatccacatgcacaagggaaaga

SEQ ID NO: 270391 - DNA, 201 bp, Homo sapiens
gaaagaaaaagaaaaaaaaaaagaaaagaaatattggaaaagcactaaacctatggttctgttttccatggactttggttctccatgcattgctctctaarttactagaccaccgttaagggtcagaaccttggagagttccaggcagtagacgctttacaatgtgtgtgactactgcactagcatgaaatggacaggatg

SEQ ID NO: 270392 - DNA, 201 bp, Homo sapiens
gtgggggtgcttctgaggttggaggaaagtagagacagcgaaaccctgtctctactaaaccttgagctcaggagatcaaggctgcagtgaccgtgattgcrtcactgcactccagccagggtgacagagcaagaccctgtctcaaaaaaagaaaaaaaaaggaaaagaaatatcggggctgggcgtggtggctcacgcctg

SEQ ID NO: 270393 - DNA, 201 bp, Homo sapiens
gcctgtagtcccagctactagggaggctgaggcaagagaatagcttgaacctgggaggcgaaggttgcagtgagccaagatcgcgccactgcactgcagcrtgggcgacagagcgagactccatctcaaagaaaaagaaaccaggtattctttcagggttaattctgacagttttttgaaacattctattccccccatcac

SEQ ID NO: 270394 - DNA, 201 bp, Homo sapiens
ggtaaactggtagtgggcagactggagtgtgggagagcatgaaataagaaccaggtattcggccaggcacggtggctcacacctgtaatctttgggaggcygaggcgggcggaccacttgaggtcaggagttggtgaccagcctggcctacatagtgaaagcctgtctctactcaaaatacaaaaattagctgggcatggt

SEQ ID NO: 270395 - DNA, 201 bp, Homo sapiens
cagggtaaactggtagtgggcagactggagtgtgggagagcatgaaataagaaccaggtattcggccaggcacggtggctcacacctgtaatctttgggargccgaggcgggcggaccacttgaggtcaggagttggtgaccagcctggcctacatagtgaaagcctgtctctactcaaaatacaaaaattagctgggcat

SEQ ID NO: 270396 - DNA, 201 bp, Homo sapiens
gtgtggagaacagactggagtggagctggagtagagagaggagactggttaggagcattgccacagtccaggcatgagacgatggtgtcttggccttaggkggtcatggtgcaggtggtaggaagcaagagcttcggggtacgttttcaaggtaggagttgacagaaatggatgacaccatgctccagattttaagtgttt

SEQ ID NO: 270397 - DNA, 201 bp, Homo sapiens
ccaaagtatggaggtggggtaggcggcacaggagccttccgtcctcccttactatcatgtgtgcccacagcctcgctagtagaagcagcttggccaaggtrgacctaccctaatcaatccatcaactgcagacacctgcagaggccaaggtgtgattatctccccttctagcctctccagaagggaaatcatcctctcatt

SEQ ID NO: 270398 - DNA, 201 bp, Homo sapiens
tggtagagacttggaattttgtactgagtgagactggaagccagtggagcattttgagcagagccgtgtcatggaaagactcattttttcagtggttactytgacttctgtgtggagaacagactggagtggagctggagtagagagaggagactggttaggagcattgccacagtccaggcatgagacgatggtgtcttg

SEQ ID NO: 270399 - DNA, 201 bp, Homo sapiens; identical to SEQ ID NO: 53493

SEQ ID NO: 270400 - DNA, 201 bp, Homo sapiens
aattgtagttatattttctgtgtgcttttttttaattactaagaaaaaaattggtgagttcagtagctttggtattatgagtgcaaatcataatagctccmatgtgaaaaaaaaaatcaaaagtataacttgtcacttaatgttagaaaattgcctaaaatgcagtgtaataaataatctctgtaccaaatagtaatttaa

SEQ ID NO: 270401 - DNA, 201 bp, Homo sapiens
ttgtagaaagggcaagattatttgcttatatctgaagggaggtgggtggttttgctggatgtttggtctgaaagagttacttttgataaagttaatctaaytgtagttatattttctgtgtgcttttttttaattactaagaaaaaaattggtgagttcagtagctttggtattatgagtgcaaatcataatagctccaat

SEQ ID NO: 270402 - DNA, 201 bp, Homo sapiens
ctgcattttgatggggagcaaggggggaccccccctgtaggagtatcggcctctcccctgccccctaccctctctcgtggaccaaagtctccagcagaagrgactcatcataagactgacgactcccccacctccacccacacaccgagtgtcatcagtcctaaaggcagggaaacgctcacagaattctgcccacgggtt

SEQ ID NO: 270403 - DNA, 201 bp, Homo sapiens
  misc_feature (1)...(201): n = A,T,C or G
gtgtttgctcagccctgtctgatcacctgtgctgctctgtccctaactagtgacccatggaagcttccaagcagttttctcttcatcactactaacaaacnaaacactaagaaggcttagtatcgctctttttctgcggggctactctgaagtactgacttgctttccagtctgattcacgttagcagtgtgtacactact

SEQ ID NO: 270404 - DNA, 201 bp, Homo sapiens; identical to SEQ ID NO: 53490

SEQ ID NO: 270405 - DNA, 201 bp, Homo sapiens
gcggagccttgagcagcagctgcaggaacataggtgagaaggggactttggccaaagaagttgcttccttttctggaagccttgagaacactgaatgtgtkgtccttttcctctcacattcgccactactaggaaaataggttttctgcgtgtgtcacaggccctctgagcacgattactaagaggatatctcagtatcca

SEQ ID NO: 270406 - DNA, 201 bp, Homo sapiens
tcttgagataacaaaaaacacatagaacttcaagtcttgtcattagatacactaaatctgtgggaaattggcaatgaaaaagttatgaccaaaatgaattrcttctgagtttttagccatttttttcagtcagttgggacattcatatgtgaggattatggaatgtaaggaatgacagaaattggtagagcagcgaaatct

SEQ ID NO: 270407 - DNA, 201 bp, Homo sapiens
atgcagatgtaagtctgtacttctgttattgtgctaatacagagtctctgtgatggcataggtggcagtgatgtcatgatggtggtgggagtccagaaggragatactgcaaatacttttttcaacatcactttctcataactaacaagatcttttctccagaatagctctatttttttaaaaaaattaattgtgctagga

SEQ ID NO: 270408 - DNA, 201 bp, Homo sapiens
aatatttattaagcactaactatatgacaagcattgttccagatccaggggatacagagagaaaacagttcaaaatccttgtccacattcacatcctaagmgagggaaaaaaacagtaaaacagacacatatataaaatggcaagtggtgaagagtaccaaaaagagaaacagagcagggtaaaggggccaggtgcggtgg

SEQ ID NO: 270409 - DNA, 201 bp, Homo sapiens
tttaaaactctagccttgagtctgtgcataactcccagcagcttgccactttcaatttctcttctactcttagcacagttgccttaaccgtgccctgctamttccaggaaggccttaggtctttgcacttttctcttctacttcttgaatagagaggcttcctgtgccatctggttttcttgctccatctgactaggctta

SEQ ID NO: 270410 - DNA, 201 bp, Homo sapiens
cagtttacctcccaccaggtccctcccatgacatgttgggattatgggagccacaattcaagatgagatttgggtggggacacagccaaaccatatcagtstgtaataaataactcaaatttctttaatcctatattttccaaactttcttagtcaccaaatgtctcttttcacatacatcttttaacatcttgcagggca

SEQ ID NO: 270411 - DNA, 201 bp, Homo sapiens
aaaaaattgttgcctatatatgaaatatatagggaagaaaaagcatagtaaactgtagattcaggtaggcacaagcacggaatggtctggtagccagcccrtttctgacatggagcccatgaagatattaaaatagaaatgagaagattccatccaaataacattaatcaagtagtgaaaaatatgtacattagtcccccc

SEQ ID NO: 270412 - DNA, 201 bp, Homo sapiens
gtaccagtaaagacatactttccaaaacttgaacctaatggatttaatatccaagctgtgaagttggctttttttttttttttttttttttttagttcttsttttgtttaagagatgaggtcacactgtagtttcccaggctggatttgaactcctggcctcaagtgattctcctgcctcaacctcttgagtagctgggat

SEQ ID NO: 270413 - DNA, 201 bp, Homo sapiens; identical to SEQ ID NO: 53489

SEQ ID NO: 270414 - DNA, 201 bp, Homo sapiens
cttgactttgtcatacagcttgaagcccagcagaactcatgatcttttttttttttttacaaaactatttctctcttttcccttacttggcttaaactggraaccttgatgtcagtattgattccttttccttcctacctgaatgaggttttgaatcctgcctattctacttcctaagtatttctctaggaggtccccatc

SEQ ID NO: 270415 - DNA, 201 bp, Homo sapiens
aaacctgattcaaattggctaagaaatgaggaaatgtattatctcctgtaacaggaaatccaaaggaggggcaacttttagagttgattggagacgcaacmgtgtcaaggagacacaggttctttgcatctcctcactctgccagcctcagctttatctttagtaaaatggctacagcaatttcaggtgtcacatccagat

SEQ ID NO: 270416 - DNA, 201 bp, Homo sapiens
ctcggagtcagagaaaatgcattcctgctcacgttagtactgaaggatcatcagaactggggggcaaaacatgagattaggtttaagagacccaacacaaytggttcccattcccacttgtttttgctgacatgagagagacttaagtagaagactgaagctagtgactggtattgcatttacattaaaattgccatcact

SEQ ID NO: 270417 - DNA, 201 bp, Homo sapiens
tgtttttatttgccttgactttgtcatacagcttgaagcccagcagaactcatgatcttttttttttttttacaaaactatttctctcttttcccttactkggcttaaactggaaaccttgatgtcagtattgattccttttccttcctacctgaatgaggttttgaatcctgcctattctacttcctaagtatttctcta

SEQ ID NO: 270418 - DNA, 201 bp, Homo sapiens
aagctctttcagctcagttccacacagctcactggcagcttccgtctttgtctctcattttcccaagaaagggaatctgattcacccacctcacttttcartccaagtcacagaatccttcctgagccattagcctttcagctaaaagtaataaaaacctgattcaaattggctaagaaatgaggaaatgtattatctcct

SEQ ID NO: 270419 - DNA, 201 bp, Homo sapiens
caatttgtttttatttgccttgactttgtcatacagcttgaagcccagcagaactcatgatcttttttttttttttacaaaactatttctctcttttcccytacttggcttaaactggaaaccttgatgtcagtattgattccttttccttcctacctgaatgaggttttgaatcctgcctattctacttcctaagtattt

SEQ ID NO: 270420 - DNA, 201 bp, Homo sapiens
cttgatccagatacctttgtattaatactatctatagaacatctttgccagttacatgatttgctgtcttttaatggccagtttgtgtgatactgattacrtgatcattttttcatttttatttactttcataatcttctttattaagttttactatcattggagctattctttagtctcttatctgttattgtcggtgcc

SEQ ID NO: 270421 - DNA, 201 bp, Homo sapiens
tccctccctaagacctctttcttggggcccataaataagtgcacacacacacacagaaaaacttatcagagacacagttccctttttattgagactgcctsatgtgcatttactgtaacacccatttgttgttttctgattgatgcttcatagctgcatgtattgatacttgcatttctcctctcaactggggacaggtat

SEQ ID NO: 270422 - DNA, 201 bp, Homo sapiens
tttagctagcagcatcttgactgatgctataataggctgttatgggctttgaagctaagcaaatctgatttacaatgccggctataccatattaattgttmacattactttgggcaggtttctttccttttcttccctttttcctctttattcattttatttttcttgcctttctttcctatttcttacattcacttattc

SEQ ID NO: 270423 - DNA, 201 bp, Homo sapiens
aattttctaaaaactgtatttattcatcaaaaatacataagcagatatgagagctatctggctgtgacatctgtcaccccactgatcgccagggttgattyggctgatctggctggctagatggctgtccccttcctccctcacccctccatgtgtgtccctcccaaaactgcatgctcgttcgaagaggacaaccatccc

SEQ ID NO: 270424 - DNA, 201 bp, Homo sapiens
ttcactgtgaagttggcattgtgctctcacagttgaagaagataagtttcagagaggttaggaaacctgattaaggtcacacaatttgtacgtgatggagmcaggaatcaaactcaggtcttggtagaggagaagctagaatctcataccattttgtccctttgatttgtttgagtttaaaattcaccatcctgtatccct

SEQ ID NO: 270425 - DNA, 201 bp, Homo sapiens
acccctccctactaaaaatacaaaaattagctaggtgtggtagtgcatgcctgtaatcccagctactaggcaggctgaggcaggagagtcacttgaactcrgaggcggaggctgcagtgagccacgaccgcaccactgtactttagcctgggcaacagagtgagatttcatctcaattaaaaaaaaaaaaccttacatcag

SEQ ID NO: 270426 - DNA, 201 bp, Homo sapiens
gctggcaggctagagatgtgaacatttgggaagcaactttattttcaaggttttaagagggtgggactgcaaaaacaagaggaaaaaattacctaagaacrgagacatagtgtctctcaatttagcatccagatgccattctccagcccaaaataatcaacagaaagttctccacatactttaaccattcacttcagagtt

SEQ ID NO: 270427 - DNA, 201 bp, Homo sapiens
attgttttttaagcagctttattgaagaataattcatatgtagtaaattacacgtatttaatgcgtacaatttaatgttttgatacacgtttgtgaaacaktcaccacagtcaaaatatccatcacttccagaagtttctttgtgccctctttgtaactcttttgccccatctgacacccaaaaaaccactgacctgtttt

SEQ ID NO: 270428 - DNA, 201 bp, Homo sapiens
ggcctcaagcgatccgcctgccctggcctcccaaagtgctgggattacaggcatgagccaccatgcctggccagagtagaagtaatagatttttatttctrcaaggatggaagagaattggtggggggaggtggggagtaagtgtcagatgaaagtaacagcatgagctccagagtacagaaagttatgaggtttatatga

SEQ ID NO: 270429 - DNA, 201 bp, Homo sapiens
ggccggaaatcaggatgagggtgccatgagggttgctacctggtgaggcctatcttcttggcttgtagctggctgtcttttcactggcttttttctctgcscaagtgtggagagaaagatctctggtgtctctccctcctcttataaggatacccgctgtgtgggatcagggccccaacctcaggacctcatttaacctta

SEQ ID NO: 270430 - DNA, 201 bp, Homo sapiens
ttttaaaaaccataatcccttttttccatcttcttctattagatggttgtgacccatctcattataaaagctttttcctgggggcagggggtgctgatatmtagactcactcctgaaattgtagggtaagacattttcttcaaaatatgcatgtccgtgaaacttgatgtgatcttcctaaggaatattgaggatattcaa

SEQ ID NO: 270431 - DNA, 201 bp, Homo sapiens
tggtaatataagtgaaaaaaaattaagtgttagaaaatattcagtaacctaaaatatgaaatataacttatttccttgtatttattatattaaaggtactrcttctgtcatctctattagagactggagaatcaaacatatggaggaacttttagtcatattgcaaaggatattttctttctttttatcttcctttttacc

SEQ ID NO: 270432 - DNA, 201 bp, Homo sapiens
agaagattattatgagtatgaaatctgatttcagaatacattacaatcattctcttgacagaaaatttaatcagaatatttaaagcattgttctacaatgmagcaatttgtcagttttatcagtagattcttcaaataaatatataaattttaaaatttttcaaaaaaatgtttttctctggctgggcacagtggctcatg

SEQ ID NO: 270433 - DNA, 201 bp, Homo sapiens
agttttttaaaattgttttcatcattcacaatgttgagaattactatcactagcctttacattcaattccatttaacaaatttttattacagatttaccaygtgcgagcttctattcttaggcactgttgggggtaagatatataaactacagtcactgccctcagagacatcgcgctataaaaatgaaataagacaagat

SEQ ID NO: 270434 - DNA, 201 bp, Homo sapiens
ttttagttttctgacctcgtggagaatagtcttaaacctacatcttagaacaaaattaattttcttcctttcagtagatagcagttaagagtattacagakaaacactctaaaaattgttcatcttgaatctaaacactcattttctttttattctatttgtatttatttttatatatttattttttttgagacatagttt

SEQ ID NO: 270435 - DNA, 201 bp, Homo sapiens
actcgctttgggaagaaaacttgattcatttacacattcattcagcaacattccttgagtactatttgctagtcattgtgctaatgccagggaaacatcacaagataagatgccatcccagtcctcacagtaaatagtagtgatattgttaatatagcatattagaaaatttattacagagaaatgcagtatagtttgaga

SEQ ID NO: 270436 - DNA, 201 bp, Homo sapiens
agttaccttgaaacaataacataaggctaaattatgtttagaataccctttgatataacttgaagtacattttagagttttttcaaaacagataattaaaktggggtgattcccaattatctgaaaaatttatttaaatcagaatgctttattttccaaccaaatatctactaattttaataaattagttctttttaattg

SEQ ID NO: 270437 - DNA, 201 bp, Homo sapiens
cagcacattgtcacgctcatgttgtttttctgctcttccagaagcccagccttctgtcaaaggcccagaacacctgtcagctttattgcaaagaaccaccrcggagccttgagcagcagctgcaggaacataggtgagaaggggactttggccaaagaagttgcttccttttctggaagccttgagaacactgaatgtgtt

SEQ ID NO: 270438 - DNA, 201 bp, Homo sapiens
tagtagagatggggtttcaccatgttgtccaggctgatcttgaactcctgacctcaggtgacccacccaccttggcctcccaaagtactgggattacaggygtgagccaccacacccgacctggaatttttttatagaacttatcttcagagcaatgtatgaaagacaagagcagtatcagccgggcgcggtggctcacgc

SEQ ID NO: 270439 - DNA, 201 bp, Homo sapiens
cagctcctggatctccttcatacagctgcttgaggaagttgatctcatcagtcaacccttccaggtgagactccagctctgctttgttcatgtaagcttcrtccacatccttcttgatgaagacaaattcgttttccttctctgtatgcttgttgatctcatcctcctactttttcttgaagtcctcaagctgcccctgcg

SEQ ID NO: 270440 - DNA, 201 bp, Homo sapiens
ccgcctggctttggggaagaggccgccttcaggtgacagtgcagctgtccaggtggccgtgcactgaaccaggctgagggagacaaaaaccccgcagaccygcctgcctttcagcgtccagttaactgcagaagtttaggctcacctcaaagatgtctagtttttccaagttacaatacagcagtttcctacagaacaccc

SEQ ID NO: 270441 - DNA, 201 bp, Homo sapiens; identical to SEQ ID NO: 53492

SEQ ID NO: 270442 - DNA, 201 bp, Homo sapiens
aaactctttcatcccattaaatatgacactcaagatatttacattataaaattgtctcatgataggaatcatgctgggtttttaaaaaccataatcccttytttccatcttcttctattagatggttgtgacccatctcattataaaagctttttcctgggggcagggggtgctgatatctagactcactcctgaaattgt

SEQ ID NO: 270443 - DNA, 201 bp, Homo sapiens
gaagggagaattatatcatttgagttattttgttaagaaatgttaaatgagatttataatttttattaaaatttaattagataacattttaaactttttartatatgtcatatatttttcactttttcattgttgaggccaacattccaaaagggtataaaaaaggagctttctctgggtaataccttgctttaattgata

SEQ ID NO: 270444 - DNA, 201 bp, Homo sapiens
attccagccaggaggactttgcaagctctatagcttttttcttggtgagctgataattttaatggaagtcatttgctactccaaaagctttgcatgaatgytgcataggaataattagaagctgtaacaaggagtcaattctttgtacaaatatttatctcacataactttatatgattgaagataatacatcggtgcttc

SEQ ID NO: 270445 - DNA, 201 bp, Homo sapiens
aaggggcttgttacaagtaacaaaagatattcctgtcacttaggaataccataggttttagaagctctctgtttggaagtggagacaaagaccaaatatakattcttattgttgcaactctataattccctcacccttattttcaccaggcaaaatttcttcgttttttttatagctcagttcagatttcactttatttgt

SEQ ID NO: 270446 - DNA, 201 bp, Homo sapiens
aaaagaagaaaagttaccttgaaacaataacataaggctaaattatgtttagaataccctttgatataacttgaagtacattttagagttttttcaaaacwgataattaaagtggggtgattcccaattatctgaaaaatttatttaaatcagaatgctttattttccaaccaaatatctactaattttaataaattagtt

SEQ ID NO: 270447 - DNA, 201 bp, Homo sapiens
caagtcaataaatacattcctataaaattattttttaactgttatagtagtccatcaattaaacatgccataatgtatttaaccaattctttgttgatggrcatttagattacttccagttttttcactattataaacagcattaccatgaatatccttgaaactaaatctttgaacatgttcttaattatttctttaaga

SEQ ID NO: 270448 - DNA, 201 bp, Homo sapiens
cctgtcacatagtaaagcacttttaagaggtgggaacaacatattcatctagcagatctttatcgagcagctgttgtctgcagatgatatgctgagagctrggagtacagaatgttgtcccccattccctgctcccgaggaacttagtctgatgggatagacagataagtaaaataataaataataatagcaatgatagct

SEQ ID NO: 270449 - DNA, 201 bp, Homo sapiens
aaagggaggattgcttgaggccaggaattcaaggccagcctggtcaacataatgagaccccatctgcattaaaaaaaaaaaaaaaagaagaaaagttaccytgaaacaataacataaggctaaattatgtttagaataccctttgatataacttgaagtacattttagagttttttcaaaacagataattaaagtggggtg

SEQ ID NO: 270450 - DNA, 201 bp, Homo sapiens
tttcctacccactattataaaagtcaaatcaattttttttttgggggggggacagggtctcactctgtcacccaggctggagtacagttgcgagattacasctcactgcagcctccacctcccaggctcaagtgatcttcccacttcagccttccaagtagctggaactacaggtgcacaccaccatgcctggctaatttt

SEQ ID NO: 270451 - DNA, 201 bp, Homo sapiens
ggtatttcaacagtgagattttttttgtttccaagttctttagtttgttctttttcctgtttcctgttctattctgtaaaatatatgtgatatagtctctyatctctgggaagatagtaaacatatatatttatctctagatgttccttttttcttatgtttttctttaaatacttgaacatagttgtaataactatttta

SEQ ID NO: 270452 - DNA, 201 bp, Homo sapiens
ataacactcttttttcaacttcttaagcattttactttttttatttttatttttttagtctaaaatttattgcctaaaggctttaaattcttggatacatrtgcaggatgtgcagatttgttacataggtaaacgtgtgccatggaataacacccttatcttatctgatcattttgtaatatctttttttttttttttttt

SEQ ID NO: 270453 - DNA, 201 bp, Homo sapiens
aaggagtacccgttaattttcaccaggaagaactcatattttgcaggaatattattttctaaatctctgccaacttgatagcagaaaataatattcttcaytacttttaaattttttttctatttttatttttaattaacaaatacatgtttacattttgttacttcaatttgcatttctttaattactttgtacagtttt

SEQ ID NO: 270454 - DNA, 201 bp, Homo sapiens
ccacttttgtaaaagtattcttttatttctatcagagcaatacattatttattgagggcctgttatgtgtcacacatggtactaggtgctaagaaatcatmagttaacaaagtctctgccttctttgagtttatactttagtgagagtgttttaagttgtgggattaaaagaaaatatgtgatgtcagtgtttcaaagaca

SEQ ID NO: 270455 - DNA, 201 bp, Homo sapiens
ggccaatgcagatgggttgcttgaggccaggagttggagaccagcctggtcaatatagcaagacccagtctcattaaaaagaaaaaaaaaaaaaaacttayaaataaatgaaaagaattccccataaaatcacaaccccaaagataaccataactagttattttcagaccttttctataatagataacttgagttttcctc

SEQ ID NO: 270456 - DNA, 201 bp, Homo sapiens
gctgaagaccttttatttctgttgtatttattttcttgtatttctgaaaatgcctttgttttactctcatatgtgaatagtctaattattgctactgctcyattacccacttttgtaaaagtattcttttatttctatcagagcaatacattatttattgagggcctgttatgtgtcacacatggtactaggtgctaagaa

SEQ ID NO: 270457 - DNA, 201 bp, Homo sapiens
ctgtgtgtggtagtcctagttccgccattgacttctactataaacatccttgattaagccacataatgtttctgaacctcagtgtgttctaaaaatgaaargggtatatgagtttagtaagtgatttatgtgctggggaaaaaagaaagaaagagaaagagaaaagagaagagaagggaagggagggaagaaagggagaaa

SEQ ID NO: 270458 - DNA, 201 bp, Homo sapiens
aaaattagccaggcatggtggcgtgagtctatggtcccagctgcttggaaggctgaggcaaaaagatcacttgagcctgggagatgaaggctacaatgagytgtgattcacaccactgccctccagcctgggcaacagagcaagaccagtctcaaaagaatatataaatataacatttgaagtgctttgacaaggttatag

SEQ ID NO: 270459 - DNA, 201 bp, Homo sapiens
atgaatatcgttttacctaacaattcccttattaatgaatattatgcaattttcagtttttgtttatagtaaataatacgcagtgaatatttttgtgcctrtaactgagtgtgcattttacattttttttagggaggagaaattgctggtaaagtcctaaaaggaaatttcctaagtaacaaggtattatttttacattaa

SEQ ID NO: 270460 - DNA, 201 bp, Homo sapiens
gcctaacaccaaagtcttccttaacccattcttcagatgattacaaatacagtgtttggcagagggcagtggctcacacctgtaatcccagcactttgggkgctgaggcaggagggtcacttgagccgaggagtttaagaccagcctacacaacatagtgagaccttgtctctacccaaaaaaaggaaaagaaaaaaggaa

SEQ ID NO: 270461 - DNA, 201 bp, Homo sapiens
atatataactttataaaaacatttttgttagctgcatggtgttctaccttgtggatgaatatcgttttacctaacaattcccttattaatgaatattatgyaattttcagtttttgtttatagtaaataatacgcagtgaatatttttgtgcctataactgagtgtgcattttacattttttttagggaggagaaattgct

SEQ ID NO: 270462 - DNA, 201 bp, Homo sapiens
tgtttattatatataactttataaaaacatttttgttagctgcatggtgttctaccttgtggatgaatatcgttttacctaacaattcccttattaatgartattatgcaattttcagtttttgtttatagtaaataatacgcagtgaatatttttgtgcctataactgagtgtgcattttacattttttttagggaggag

SEQ ID NO: 270463 - DNA, 201 bp, Homo sapiens
agagcgagactccatctcaaaaaaaaaaaaaaaaagaaagaaagaaaaaagaaaagaaagagaaatccgaaatccttattttcctgaaaggagtaaagccmaaggaaactttttttacatttaaaaaaaaaggtttttttcaaatgtaaaatttgaaaaaattgtggccgtaaaatacagccacaggcacgtatctcgttt

SEQ ID NO: 270464 - DNA, 201 bp, Homo sapiens
gtattatacatatttctgggaagtacttgatagagagctccattgttaagaaattacttggatgagtttggcagactgctagctgatcattgaaaactctrctgtttcctcttctttctgggcctacagctggactgtttctatgccacccttgcatttaggtgtggtcatatgcggagttctaactaatggaatgaacag

SEQ ID NO: 270465 - DNA, 201 bp, Homo sapiens
aagtgtgtctctagtatctccacgcaactgatacactggtccctgtaaggcaaacagcatgttagcccgacaggaagagggggcccactttcacattcccrgtgacactgaccgtccccagctgccccctcgccacctctgcctgcactgccttctgtcaccgtgggaaaaggaggctgatggttctctacaccatccacc

SEQ ID NO: 270466 - DNA, 201 bp, Homo sapiens
acataaaagtctttctaaaaccttccattatgtttatggttgaaaaaatagaagaatcttggtgactaccccttttttttttttttttagcaatgagccawgtagttaaaaaaaaaaaaacaactcatcttccccctcttcatttcccttatttaaaaaaaaataataactggtagtcctcaaactaatatacccctgttc

SEQ ID NO: 270467 - DNA, 201 bp, Homo sapiens
taatcccagcacagtgggaggccaatgcagatgggttgcttgaggccaggagttggagaccagcctggtcaatatagcaagacccagtctcattaaaaagaaaaaaaaaaaaaaacttacaaataaatgaaaagaattccccataaaatcacaaccccaaagataaccataactagttattttcagaccttttctataata

SEQ ID NO: 270468 - DNA, 201 bp, Homo sapiens
aatcccagcacagtgggaggccaatgcagatgggttgcttgaggccaggagttggagaccagcctggtcaatatagcaagacccagtctcattaaaaagaaaaaaaaaaaaaaacttacaaataaatgaaaagaattccccataaaatcacaaccccaaagataaccataactagttattttcagaccttttctataatag

SEQ ID NO: 270469 - DNA, 201 bp, Homo sapiens
atttataaatctttctagttaacttgtagagagactagtaaccacatgaaagagccagcatgattcatgattcagaaaattgttattgttctccctcccayctttgtttaaattgggtcggacattaaaagaaaagtcaggagtaagctgtgtgtggtagtcctagttccgccattgacttctactataaacatccttgat

SEQ ID NO: 270470 - DNA, 201 bp, Homo sapiens
gtcagacaatttgggcactgttcaaacaattaaaccggcagttagcagattctggcctggtaattaaattacccagggtctttatttacagatttctgctycttgatatgctgtgtctttctaggctgagcatatgcctggggtttattgattcatttcctgtctttctctttcagtggtaacatactaggatgccagctg

SEQ ID NO: 270471 - DNA, 201 bp, Homo sapiens
cctacattctttagaactatttcttatattcatccatgtggtcatgtgcagtaaatggcacaaagatcttagggtgatcacctcgtcagacaatttgggcrctgttcaaacaattaaaccggcagttagcagattctggcctggtaattaaattacccagggtctttatttacagatttctgcttcttgatatgctgtgtc

SEQ ID NO: 270472 - DNA, 201 bp, Homo sapiens
aaattctataacagtcaacactaatggatagtaatgaaagctggaaagttgcctccagggagaggggagaactgactggagagggacaagagagaactatsttgggtgatggaaatggaaatgttttatttttgttttgaatggtggttatacagaatatacaattacctcatatagttaaccatctaagagtttgcatct

SEQ ID NO: 270473 - DNA, 201 bp, Homo sapiens
ctgatttggtgtctggctagcttgatctcttgcctggggcatttccatttaatgccccagacaatagaactggttaaaatggtcatctctgcatttgcacrgtgggtggattggtcttctacttgtctagggttgtcactgtaccaggtgtgcattctggctgtaatacgcattctttaaaccatatcagattctgcctct

SEQ ID NO: 270474 - DNA, 201 bp, Homo sapiens
ccccatcacgcaacaattcaattcctaggtatttgcccaagaaaaatgaaaacaagtgtccataaaacgattttgagaagaatgcaaatttttatagcagscttttttcacagtcacgcaaagtcggatcaacccaaatgtccatcagtgggaaaatgtatccagaacaaatcgtagtatagtaatacaaaggcagatgat

SEQ ID NO: 270475 - DNA, 201 bp, Homo sapiens
gcactatatttttgttgggtactgtctaaagtacttgatttattttttaaaaccttacaaaaaacttacaaggtaggtactgaaagattcagtaatttgtycaaagtcacacagcaaataagcaacagactctggatttgaaccaggcaatcctagagcctgtactgttagtaattatactttagcacctgtcaagaattc

SEQ ID NO: 270476 - DNA, 201 bp, Homo sapiens
tgggttaagatgttagttgtcagaatcatgagaaaaggttttaagcaagaggcatttctaattctaaaaataacaactactgttatttattgagcactatmtttttgttgggtactgtctaaagtacttgatttattttttaaaaccttacaaaaaacttacaaggtaggtactgaaagattcagtaatttgtccaaagtc

SEQ ID NO: 270477 - DNA, 201 bp, Homo sapiens
gtttataacttcagagtcagtctttatttaactttacaagtattcctttattgcttactctgtgctgggagggtgttatgttcccaatgtttttttcattsttagttttgtatttagttggccagcagatcatactctgttcttgcaaaatgacttgaaattaaatccttctgtttccccagtcatcaccctgccctaagc

SEQ ID NO: 270478 - DNA, 201 bp, Homo sapiens
ctgcctttcagcgtccagttaactgcagaagtttaggctcacctcaaagatgtctagtttttccaagttacaatacagcagtttcctacagaacacccccytcctcaattgccaaggggccgcatcgcacggcatcaggccaccactgcaggccagcagattccaccccaggaacggtcatgaactcagcctttgtctcaa

SEQ ID NO: 270479 - DNA, 201 bp, Homo sapiens
acctgtaatcccagcactttgggaggctgaaaagggaggattgcttgaggccaggaattcaaggccagcctggtcaacataatgagaccccatctgcattwaaaaaaaaaaaaaaagaagaaaagttaccttgaaacaataacataaggctaaattatgtttagaataccctttgatataacttgaagtacattttagagt

SEQ ID NO: 270480 - DNA, 201 bp, Homo sapiens
ggctcacacctgtaatcccagcactttgggaggctgaaaagggaggattgcttgaggccaggaattcaaggccagcctggtcaacataatgagaccccatytgcattaaaaaaaaaaaaaaaagaagaaaagttaccttgaaacaataacataaggctaaattatgtttagaataccctttgatataacttgaagtacatt

SEQ ID NO: 270481 - DNA, 201 bp, Homo sapiens
actagggaaaagaaaatgttaagaaaataacaaggaaaatacatttattactcattaagtgaagtggatcataaaggtctccatcctcattatcttcacaytgagtgggctgaggaggaggagaaagaagagaagttggtcttgctgtcttagtggtggaagaaaatttgtgtatcagtgaacccacacagttaaatccca

SEQ ID NO: 270482 - DNA, 201 bp, Homo sapiens
gttaattttcaccaggaagaactcatattttgcaggaatattattttctaaatctctgccaacttgatagcagaaaataatattcttcactacttttaaattttttttctatttttatttttaattaacaaatacatgtttacattttgttacttcaatttgcatttctttaattactttgtacagttttatatgatgatg

SEQ ID NO: 270483 - DNA, 201 bp, Homo sapiens
tgtgtgtgtgcacacctgtagtcccagcttcttgggaggctgaggtgggaggatcatttgagcctgggaggcagaggttgcagtgagctgagatcgcgccmctgcactccagcccaggcaacagagtgagaccctgtctcaaaaaaaaaaaaactacacataaatctttgtcctcatttcagattatttccttcaaataac

SEQ ID NO: 270484 - DNA, 201 bp, Homo sapiens
catgttacaaggaacatgttaactcatgctctgctttttctttagagaagcataatcctctcctgtaatagccttagaaacaagggatagcaatgggatawatatatatatatatatttatgatcataggatcatagatggataaagtctgtgacccaagataaaattgaagggagaattatatcatttgagttattttgt

SEQ ID NO: 270485 - DNA, 201 bp, Homo sapiens
aagaaaaaccttacatttgacccttgaacaaggcagaggttaggggaactgacccccctcgggggtcagttgaaagtataactttttgactctccccccatttttttttttttttttgacagagtctcgctctgtcgcccagactggagcgcagtggcacgatcttggctcattgcaacctctgcctcccaggttcaagcg

SEQ ID NO: 270486 - DNA, 201 bp, Homo sapiens
cactttgggaggctgaaaagggaggattgcttgaggccaggaattcaaggccagcctggtcaacataatgagaccccatctgcattaaaaaaaaaaaaaaragaagaaaagttaccttgaaacaataacataaggctaaattatgtttagaataccctttgatataacttgaagtacattttagagttttttcaaaacaga

SEQ ID NO: 270487 - DNA, 201 bp, Homo sapiens
cctggctaatttttgtattttttggtagagacggggttttgccatgttggccaggctggtgtcgaactcctgacctcaagtgatctgcccaccttgacctyccaaagagctgggattacaggtgtgagccaccacacccagcctcattttctttttaaatagacttctatttagtgtagtttgaaaaatcagatttatgac

SEQ ID NO: 270488 - DNA, 201 bp, Homo sapiens
gggattcatcccattttattgtatatatcaacatataatttctttttattgcaagtagtattatattatatgaatataccccagtttgcttattcattcatctatctattgatagacatttgggttggtttcagtttttggctattatacataagttactatgtacattcgtatacaagtctacacagtctaccttcaggt

SEQ ID NO: 270489 - DNA, 201 bp, Homo sapiens
aaatgcaaatccctgaggcagcagtgtgcttggtgtgtccaaggggtaacagggaggccagtatggctcaagaggagcaagcaagagagaagagcaaggadgaagaacagtagaagaggaggtcagagggtaaatgagaggcaggagtagggcagatttgggggcattgtgtaggccattagaaggattttgactcttaca

SEQ ID NO: 270490 - DNA, 201 bp, Homo sapiens
gaattatttagtcctttcaaatgtgttattaatttaaggtattttaaagagaaagaaccatatgcacttctatagttttgaaaaatacactatttgcagtwggattctaaataaatagttctgactaaactcattgtatttcagaaaagttgtctgtttccctcttttgcttaattttttcttttatatgctactacttaa

SEQ ID NO: 270491 - DNA, 201 bp, Homo sapiens
ttcacgccattctcctgcctcagcctcccaaataactggtcctacaggcacccaccaccacacccggctaattttttgtattttagtagagacggggtttyaccgtgttagccaggatggtctcgatcacctgacgtcgtgatccgcccgcctcagcctcccaaagtgctgggattacaggcgtgagccaccgcacccggc

SEQ ID NO: 270492 - DNA, 201 bp, Homo sapiens
gaaaaatgcatttaaataaaagtattttacagtagagctatgaatatgaaacttttaaacaattagagtactttgtaacaatattaaagtatagtacaagkaatatcacattgtgccagattagctaggctaccaaccaggtaaactaaagtactctatttttttattcttttaatcggaatctaccatgataacatagga

SEQ ID NO: 270493 - DNA, 201 bp, Homo sapiens
gatctcagctcactgcaagctccgcctcccgggttcacgccattctcctgcctcagcctcccaaataactggtcctacaggcacccaccaccacacccggstaattttttgtattttagtagagacggggttttaccgtgttagccaggatggtctcgatcacctgacgtcgtgatccgcccgcctcagcctcccaaagtg

SEQ ID NO: 270494 - DNA, 201 bp, Homo sapiens
tgctgtgtgcactgagagaacactggacaatagtttctatccactgactcttatgggcctcaactttgcccataatttcagcccaccaccacattaaaaaycttcatgtaataatagccaattataataaaaaataaggccagacacagtagctcatgcctgtaatcccagcacattgggaggtcaaggtgggaggatcac

SEQ ID NO: 270495 - DNA, 201 bp, Homo sapiens
actggaccaactttgccaaaacagggtaagacgtgggttgagtgcagggcggagggccacagccgagaagggcctcccaccacgaggccttgttccctcayttgccagtggagggactttgggcaagtcacttaacctccccctgcatcggaatccatgtgtgtttgaggatgagagttactggcagagccccaagcccat

SEQ ID NO: 270496 - DNA, 201 bp, Homo sapiens; identical to SEQ ID NO: 53501

SEQ ID NO: 270497 - DNA, 201 bp, Homo sapiens
tactgaaccgtagcactggggcccagcctccagctccactattctgtaccccgggaaggcctggggacccattccacaaacacctctgcatgtcagccttrccagcttgctacgctaaggctgtccctcactcattcttctatggcaacatgccatgaagccaagtcatctgcacgtttacctgacatgagctcaactgca

SEQ ID NO: 270498 - DNA, 201 bp, Homo sapiens; identical to SEQ ID NO: 53512

SEQ ID NO: 270499 - DNA, 201 bp, Homo sapiens
ccctctccccacccccaggttgcagaagatcattcaccgcaatgacggggcagagaattcctgcacagaacgggatgggtggtgcctccccaagaccagcracgagctcagggacaccatgtccctcatgatccggcagaccatccgctccaagaggcctggtaagagccgcttggggtaaagggggtccaggatgcctgg

SEQ ID NO: 270500 - DNA, 201 bp, Homo sapiens; identical to SEQ ID NO: 53513

SEQ ID NO: 270501 - DNA, 201 bp, Homo sapiens; identical to SEQ ID NO: 53514

SEQ ID NO: 270502 - DNA, 201 bp, Homo sapiens; identical to SEQ ID NO: 53515

SEQ ID NO: 270503 - DNA, 201 bp, Homo sapiens; identical to SEQ ID NO: 53517

SEQ ID NO: 270504 - DNA, 201 bp, Homo sapiens; identical to SEQ ID NO: 53520

SEQ ID NO: 270505 - DNA, 201 bp, Homo sapiens
agcacattgggaggtcaaggtgggaggatcacttgaggtcaggagtctgagactagtctggccaacatggcaaaaccccatctctactaaaaatacaaaarttatccaggcatggtggtgcatgcctataatcctagctactcaggaggctgaggtagcagaattgattgacccagggaggtggaggttgcagtgagccga

SEQ ID NO: 270506 - DNA, 201 bp, Homo sapiens
atatggtgtttagagaccccagtctggtcaccaggggtggggcttgctcctgggattttgttactgctagggctttggaagagacagagccaggaaataakttttttttttttttttttgccaattttaaaaaaataaagtatgaggctgggcacggtggctcatgcctgtaatcccagcactttgggaggctgaggcggg

SEQ ID NO: 270507 - DNA, 201 bp, Homo sapiens
cgtagcactggggcccagcctccagctccactattctgtaccccgggaaggcctggggacccattccacaaacacctctgcatgtcagccttaccagcttsctacgctaaggctgtccctcactcattcttctatggcaacatgccatgaagccaagtcatctgcacgtttacctgacatgagctcaactgcacgggctgg

SEQ ID NO: 270508 - DNA, 201 bp, Homo sapiens
agtggcaggacacagacaggagggactggggcaggggcaggagaggtgcatgggcctgaccatcctgcccccgacaaacaccaccccctccagcaccacaycaacccaacctcctggggacccaccccatacagcaccgcacccgactcagcctcctggggacccacccactccagcaaccaacgtgacctagtctcctgg

SEQ ID NO: 270509 - DNA, 201 bp, Homo sapiens
ggcaggagaggtgcatgggcctgaccatcctgcccccgacaaacaccaccccctccagcaccacaccaacccaacctcctggggacccaccccatacagcmccgcacccgactcagcctcctggggacccacccactccagcaaccaacgtgacctagtctcctggggacccaccccctccagcaccctacccgacccagc

SEQ ID NO: 270510 - DNA, 201 bp, Homo sapiens
ggcttgagtctgggggctgcaaagctgaacttccatgaaatcccacagaggcggggaggggagcgcccactgccgttgcccagcctggggcagggcagcgscttggagcacctccctgtcttggccccaggcacctgctgcacagggacaggggaccggctggagacagggccaggcggggcgtctggggtcaccagccgc

SEQ ID NO: 270511 - DNA, 201 bp, Homo sapiens
gtgtggagagcaggcagacgggtggagagaagcaggcaggcagtttgcccagcatggcacagctgctgcctcctattcctgtgcaggaagctgaaagccgrgctactccacacccgggtccgggtccctccagaaagagagccggcaggcaggagctctctcgaggcatccataaattctaccctctctgcctgtgaagga

SEQ ID NO: 270512 - DNA, 201 bp, Homo sapiens
gcaggagaggtgcatgggcctgaccatcctgcccccgacaaacaccaccccctccagcaccacaccaacccaacctcctggggacccaccccatacagcamcgcacccgactcagcctcctggggacccacccactccagcaaccaacgtgacctagtctcctggggacccaccccctccagcaccctacccgacccagct

SEQ ID NO: 270513 - DNA, 201 bp, Homo sapiens
ccgcctgcggtgtctcaggccctggggactcctgtctccacctctgctgcctgctctccacactccctggccctgggaccgggaggtttgggcagtggtcytgggctcctgactcaaaggagaggtcaccttcttcttgggcgagctcttcttggggtgctgagaggccttcggcaggtcatcacgacccctccccatttc

SEQ ID NO: 270514 - DNA, 201 bp, Homo sapiens
atcgtggtcaccttcaactaccgtgtcggcccccttgggttcctcagcactggggacgccaatctgccaggtgcgtgggtgccttcggccctgaggtgggscgaccagcatgctgagcccagcagggagattttcctcagcacccctcaccccaaacaaccagtggcggttcacagaaagacccggaagctggagtagaat

SEQ ID NO: 270515 - DNA, 201 bp, Homo sapiens
gtagcactggggcccagcctccagctccactattctgtaccccgggaaggcctggggacccattccacaaacacctctgcatgtcagccttaccagcttgstacgctaaggctgtccctcactcattcttctatggcaacatgccatgaagccaagtcatctgcacgtttacctgacatgagctcaactgcacgggctgga

SEQ ID NO: 270516 - DNA, 201 bp, Homo sapiens
tggcttgagtctgggggctgcaaagctgaacttccatgaaatcccacagaggcggggaggggagcgcccactgccgttgcccagcctggggcagggcagcsccttggagcacctccctgtcttggccccaggcacctgctgcacagggacaggggaccggctggagacagggccaggcggggcgtctggggtcaccagccg

SEQ ID NO: 270517 - DNA, 201 bp, Homo sapiens
ctggccagtctcaattgcacagggatcacgccactggcacaaggagacacagatgcctcgcaggggatgcccacgatgcctgcatgtgttgcttctggttsctttcctccagttccaaccgccgcactctcccacaccagtgtgacagggggcccatcaccctagacttcagagggctgctgggaccctggctgggcctgg

SEQ ID NO: 270518 - DNA, 201 bp, Homo sapiens
gaggtcaggagtctgagactagtctggccaacatggcaaaaccccatctctactaaaaatacaaaaattatccaggcatggtggtgcatgcctataatccyagctactcaggaggctgaggtagcagaattgattgacccagggaggtggaggttgcagtgagccgagattacgccactgcactccagcaggggcaacaga

SEQ ID NO: 270519 - DNA, 201 bp, Homo sapiens
tcgtggtcaccttcaactaccgtgtcggcccccttgggttcctcagcactggggacgccaatctgccaggtgcgtgggtgccttcggccctgaggtggggsgaccagcatgctgagcccagcagggagattttcctcagcacccctcaccccaaacaaccagtggcggttcacagaaagacccggaagctggagtagaatc

SEQ ID NO: 270520 - DNA, 201 bp, Homo sapiens
gctgctgggaccctggctgggcctgggggtgtagggccaccctgcccttccccacctggaacctggcacaggtgacagccagcaagcaatgacctggtccyaccatgcaccacgggaagagggagctgctgcccaagatggacaggaggtggcactggggcagacagctgcttctcaacagggtgacttcaagcccaaaag

SEQ ID NO: 270521 - DNA, 201 bp, Homo sapiens
aaattatccaggcatggtggtgcatgcctataatcctagctactcaggaggctgaggtagcagaattgattgacccagggaggtggaggttgcagtgagcmgagattacgccactgcactccagcaggggcaacagagtgagactgtgtctcgaataaataagtaaataaataataaaaataaaaaataagttaggaatac

SEQ ID NO: 270522 - DNA, 201 bp, Homo sapiens
atggccctgttctggattggctggttgcttctgtgtggtgctgaacctgctcctctctcccctgtatttcctggggacaggtggaggctcagccagattcrggttcaaggtctcttcctaggctgcgtcagtctgcatgcacgggaggtctgcttactaggattgaccagcaggtttaggtgttgtcagcctgatgtgttg

SEQ ID NO: 270523 - DNA, 201 bp, Homo sapiens
ttgagcgcagaagttcaagaccagcctgaaaatcactgggagacccccatctctacacaaaaattaaaaattagctggggactgggcgcggcggctcaccyctgtaatcccagcacgttgggagcccaaggtgggtagatcacctgaggtcaggagtttgagaccagcctgactaaaatggagaaacctcttctctactaa

SEQ ID NO: 270524 - DNA, 201 bp, Homo sapiens
ccgtcagggacagagggtggatgagcaccaacctccaggcccctcgtgggggtggacagcttggtgcacagaggccattttcatggcacagggaagcgtgkcgggggtgggaggtgtggtccctagggggttctttaccagcagggggctcaggaactgtggggacttgggcatggggccatcgactttgtgcccagccag

SEQ ID NO: 270525 - DNA, 201 bp, Homo sapiens
tgggtggtctctcccctccaggagtgccaagacctacgcctacctgttttcccatccctctcggatgcccgtctaccccaaatgggtgggggccgaccatrcagatgacattcagtacgttttcgggaagcccttcgccacccccacgggctaccggccccaagacaggacagtctctaaggccatgatcgcctactggac

SEQ ID NO: 270526 - DNA, 201 bp, Homo sapiens
aggtcaggagtttgagaccagcctgactaaaatggagaaacctcttctctactaaaaatacaaaattagccaggcgtggtggcgcttgcctgtaatcccayctactcgggaggctgaggcaggagaatcgcttgaactcaggaggcggaggttgcggtgagccgagatcatgccactgcactccagcctggagaacaagag

SEQ ID NO: 270527 - DNA, 201 bp, Homo sapiens
cagagggtggatgagcaccaacctccaggcccctcgtgggggtggacagcttggtgcacagaggccattttcatggcacagggaagcgtggcgggggtggkaggtgtggtccctagggggttctttaccagcagggggctcaggaactgtggggacttgggcatggggccatcgactttgtgcccagccagctaggccctg

SEQ ID NO: 270528 - DNA, 201 bp, Homo sapiens
gggtggtctctcccctccaggagtgccaagacctacgcctacctgttttcccatccctctcggatgcccgtctaccccaaatgggtgggggccgaccatgsagatgacattcagtacgttttcgggaagcccttcgccacccccacgggctaccggccccaagacaggacagtctctaaggccatgatcgcctactggacc

SEQ ID NO: 270529 - DNA, 201 bp, Homo sapiens
ccgctccacgggccccaggaaaagctcgtacagataaggtcagccacatgagtggagggcctgcagcatgctgccctttctgtcccagaagtcacgtgctyggtcccctctgaagcccctttggggacctaggggacaagcagggcatggagacatggagacaaagtatgcccttttctctgacagtgacaccaagccctg

SEQ ID NO: 270530 - DNA, 201 bp, Homo sapiens
catgaagccaagtcatctgcacgtttacctgacatgagctcaactgcacgggctggacaagcccaaacaaagcaacccccacggccccgctagaagcaaarcctgctgtgctgggcccagtgacagccaggccccgcctgcctcagcagccactgggtcctctaggggcccgtccaggggtctggagtacaatgcagacct

SEQ ID NO: 270531 - DNA, 201 bp, Homo sapiens
gaggccattttcatggcacagggaagcgtggcgggggtgggaggtgtggtccctagggggttctttaccagcagggggctcaggaactgtggggacttggscatggggccatcgactttgtgcccagccagctaggccctgtgcagggagatgggaggagggaaaagcaggccccacccctcagaaaggaggaaggttggt

SEQ ID NO: 270532 - DNA, 201 bp, Homo sapiens
ctctcccctccaggagtgccaagacctacgcctacctgttttcccatccctctcggatgcccgtctaccccaaatgggtgggggccgaccatgcagatgasattcagtacgttttcgggaagcccttcgccacccccacgggctaccggccccaagacaggacagtctctaaggccatgatcgcctactggaccaactttg

SEQ ID NO: 270533 - DNA, 201 bp, Homo sapiens
ctgctgtgctgggcccagtgacagccaggccccgcctgcctcagcagccactgggtcctctaggggcccgtccaggggtctggagtacaatgcagacctcscaccatttttggctgatggactggaacccagccctgagagagggagctccttctccatcagttccctcagtggcttctaagtttcctccttcctgcttca

SEQ ID NO: 270534 - DNA, 201 bp, Homo sapiens
aggccattttcatggcacagggaagcgtggcgggggtgggaggtgtggtccctagggggttctttaccagcagggggctcaggaactgtggggacttgggsatggggccatcgactttgtgcccagccagctaggccctgtgcagggagatgggaggagggaaaagcaggccccacccctcagaaaggaggaaggttggtg

SEQ ID NO: 270535 - DNA, 201 bp, Homo sapiens
tcccctccaggagtgccaagacctacgcctacctgttttcccatccctctcggatgcccgtctaccccaaatgggtgggggccgaccatgcagatgacatycagtacgttttcgggaagcccttcgccacccccacgggctaccggccccaagacaggacagtctctaaggccatgatcgcctactggaccaactttgcca

SEQ ID NO: 270536 - DNA, 201 bp, Homo sapiens
gctgtgctgggcccagtgacagccaggccccgcctgcctcagcagccactgggtcctctaggggcccgtccaggggtctggagtacaatgcagacctcccmccatttttggctgatggactggaacccagccctgagagagggagctccttctccatcagttccctcagtggcttctaagtttcctccttcctgcttcagg

SEQ ID NO: 270537 - DNA, 201 bp, Homo sapiens
caagacctacgcctacctgttttcccatccctctcggatgcccgtctaccccaaatgggtgggggccgaccatgcagatgacattcagtacgttttcgggragcccttcgccacccccacgggctaccggccccaagacaggacagtctctaaggccatgatcgcctactggaccaactttgccaaaacagggtaagacgt

SEQ ID NO: 270538 - DNA, 201 bp, Homo sapiens
agaagccacagaaaccccaagccccacaggaagccggtgtcggtgcccggcccagtccctgcccccagcaggagtcacacaggggaccccagatcccaacsacgctgttctgccgcctgcggtgtctcaggccctggggactcctgtctccacctctgctgcctgctctccacactccctggccctgggaccgggaggttt

SEQ ID NO: 270539 - DNA, 201 bp, Homo sapiens
catgctgtgtgcactgagagaacactggacaatagtttctatccactgactcttatgggcctcaactttgcccataatttcagcccaccaccacattaaaratcttcatgtaataatagccaattataataaaaaataaggccagacacagtagctcatgcctgtaatcccagcacattgggaggtcaaggtgggaggatc

SEQ ID NO: 270540 - DNA, 201 bp, Homo sapiens
tcccccgacaggcaactccgagtctgcccccgtccctgcaacgggtgactctcaggatgcccctgtgcccctcacaagtgactctgaggctgcccccgtgyccccctcaggtgactctgaggctcccccgtaccccctacgggtgactctgaggcccgtgcccaccttgggtgacactgaggctgccccatccccgctacg

SEQ ID NO: 270541 - DNA, 201 bp, Homo sapiens
ctaccccaaatgggtgggggccgaccatagagatgagatccagtacatctttggggagccctttgccaccccactccgggctaccggccccaagacaggayagtctctaaggccatgaccgcctactggaccaactttgccaaaacagggtaagacgtgggttgagtgcagggcggagggccacagccgagaagggcctcc

SEQ ID NO: 270542 - DNA, 201 bp, Homo sapiens
gtgggggccgaccatagagatgagatccagtacatctttggggagccctttgccaccccactccgggctaccggccccaagacaggacagtctctaaggcyatgaccgcctactggaccaactttgccaaaacagggtaagacgtgggttgagtgcagggcggagggccacagccgagaagggcctcccaccacgaggcct

SEQ ID NO: 270543 - DNA, 201 bp, Homo sapiens
tggcagggctgggcaaggacaaacctgaatataaaattcagtgtgtctgctgcccaccagtcctttatgcttggagaagagagagatgtttctctttttcytctcttctatctattaaacctccgctcctaaagtcctcgtgtttgtccctgtcctaaattttcctggtgcatgacaacaaaccccgggtatgtagaccag

SEQ ID NO: 270544 - DNA, 201 bp, Homo sapiens
ctctcccctccaggagtgccaagacctacgcctacctgttttcccatccctctcggatgcccgtctaccccaaatgggtgggggccgaccatagagatgasatccagtacatctttggggagccctttgccaccccactccgggctaccggccccaagacaggacagtctctaaggccatgaccgcctactggaccaactt

SEQ ID NO: 270545 - DNA, 201 bp, Homo sapiens
ctaaggccatgaccgcctactggaccaactttgccaaaacagggtaagacgtgggttgagtgcagggcggagggccacagccgagaagggcctcccaccaygaggccttgttccctcacttgccagtggagggactttgggcaagtcacttaacctccccctgcatcggaatccatgtgtgtttgaggatgagagttactg

SEQ ID NO: 270546 - DNA, 201 bp, Homo sapiens
caagacctacgcctacctgttttcccatccctctcggatgcccgtctaccccaaatgggtgggggccgaccatagagatgagatccagtacatctttgggragccctttgccaccccactccgggctaccggccccaagacaggacagtctctaaggccatgaccgcctactggaccaactttgccaaaacagggtaagac

SEQ ID NO: 270547 - DNA, 201 bp, Homo sapiens; identical to SEQ ID NO: 53524

SEQ ID NO: 270548 - DNA, 201 bp, Homo sapiens
tgaggatgagagttactggcagagccccaatcccgtgcacgtgcacagccagtgcccagtatgcagtgaggggcatggtgcccagggccagctcagagggyggggatggctcaggcgtgcaggtgcagagcagggcttcagccccctgggagtccccagcccctgcacagcctcttctcactctgcagggaccccaacatg

SEQ ID NO: 270549 - DNA, 201 bp, Homo sapiens
cccaagacaggacagtctctaaggccatgaccgcctactggaccaactttgccaaaacagggtaagacgtgggttgagtgcagggcggagggccacagccragaagggcctcccaccacgaggccttgttccctcacttgccagtggagggactttgggcaagtcacttaacctccccctgcatcggaatccatgtgtgtt

SEQ ID NO: 270550 - DNA, 201 bp, Homo sapiens
acccacatcctctgggtgcagggagtgaagtctgtgttctaactggggtctggggaacccgcctgggaaaagaaagggattctgctcctccagccggatgyaagtggaagaaagaataacacatcacaccagaaggttggaagcagaggatggggagggtgctgggcagtaggcgctgggtggtgggcctctggggggtgc

SEQ ID NO: 270551 - DNA, 201 bp, Homo sapiens
gcccccctcaggtgactctgaggctcccccgtaccccctacgggtgactctgaggcccgtgcccaccttgggtgacactgaggctgccccatccccgctaygggtgactctgaggccgcccctgtgtcccccacagatgactccgaggaagctcagatgctgcagtcattagtttctagtgtcccatcagccttggtctca

SEQ ID NO: 270552 - DNA, 201 bp, Homo sapiens
ccccacccttgaatgagacggctttatgctgctctgggacccgcacccagcttggactgcttgctccatggccccaggaaaagctcgtacagataaggtcmgccacttgggtggggggcccacagcatgtcaccctctctgtcccagaagtcacgtgcttggtcccctgtgaagcccctctggggacctaggggacaggca

SEQ ID NO: 270553 - DNA, 201 bp, Homo sapiens
aaagctcgtacagataaggtcagccacttgggtggggggcccacagcatgtcaccctctctgtcccagaagtcacgtgcttggtcccctgtgaagcccctytggggacctaggggacaggcagggcatggagacaaagtatgcccttttctctgacagtgacaccaagccctgtgaacaaaccagaaggcagggcactgtg

SEQ ID NO: 270554 - DNA, 201 bp, Homo sapiens
tgccctgctcagccctgcaccccatggtccttcccactggagagttcttgagctaccttccatcccccatgctgtgtgcactgagagaacactggacaatrgtttctatccactgactctcatgggcctcaactttgccaccttacaaaataatttcagcccaaggcctcattaaagaccttcatgtaataatagccaatt

SEQ ID NO: 270555 - DNA, 201 bp, Homo sapiens
cccatggtccttcccactggagagttcttgagctaccttccatcccccatgctgtgtgcactgagagaacactggacaatggtttctatccactgactctyatgggcctcaactttgccaccttacaaaataatttcagcccaaggcctcattaaagaccttcatgtaataatagccaattagaaggaaaaataaggccga

SEQ ID NO: 270556 - DNA, 201 bp, Homo sapiens
tccctgcaacgggtgactctcaggatgcccctgtgcccctcacaagtgactctgaggctgcccccgtgcccccctcaggtgactctgaggctcccccgtaycccctacgggtgactctgaggcccgtgcccaccttgggtgacactgaggctgccccatccccgctacgggtgactctgaggccgcccctgtgtcccccac

SEQ ID NO: 270557 - DNA, 201 bp, Homo sapiens
attgtaaggctgtggccttctgtgcttgtggatcctcagtctcagtggccttcctcttccccccaccccaactcctgtgttgcgtgtttaacacacctacscccaaccgggacataactaaatcctagactgtggacaaagaatacagtcacctcagggggctgcgagctctaaaggctcagggcccagctacccctttag

SEQ ID NO: 270558 - DNA, 201 bp, Homo sapiens
gaaggttggaagcagaggatggggagggtgctgggcagtaggcgctgggtggtgggcctctggggggtgcccaatggctctggcagagttgacggggcagsggcagagggcagaaggcagagtcaggagtactcctgcctctgctgggtctaagcccaggcacatcactgagcacttgaccagcctgacctcaccatggcc

SEQ ID NO: 270559 - DNA, 201 bp, Homo sapiens
acaggcaactccgagtctgcccccgtccctgcaacgggtgactctcaggatgcccctgtgcccctcacaagtgactctgaggctgcccccgtgcccccctyaggtgactctgaggctcccccgtaccccctacgggtgactctgaggcccgtgcccaccttgggtgacactgaggctgccccatccccgctacgggtgact

SEQ ID NO: 270560 - DNA, 201 bp, Homo sapiens
gatggctcaggcgtgcaggtgcagagcagggcttcagccccctgggagtccccagcccctgcacagcctcttctcactctgcagggaccccaacatgggcsactcggctgtgcccacacactgggaaccctacactacggaaaacagcggctacctggagatcaccaagaagatgggcagcagctccatgaagcggagcct

SEQ ID NO: 270561 - DNA, 201 bp, Homo sapiens
cgaggcccagggggagggccacccagaggctgatgctcaccatggggcgcctgcaactggttgtgttgggcctcacctgctgctgggcagtggcgagtgcygcgaaggtaagagcccagcagaggggcaggtcctgctgctctctcgctcaatcagatctggaaacttcgggccaggctgagaaagagcccagcacagccc

SEQ ID NO: 270562 - DNA, 201 bp, Homo sapiens
gctaatcctggtgattccacctaccaacctctctgttgttcccattttacagaaggggaaacgggcccaggggcagggagtgtggagagcaggcagacggstggagagaagcaggcaggcagtttgcccagcatggcacagctgctgcctcctattcctgtgcaggaagctgaaagccgagctactccacacccgggtccg

SEQ ID NO: 270563 - DNA, 201 bp, Homo sapiens
ctggggactcctgtctccacctctgctgcctgctctccacactccctggccctgggaccgggaggtttgggcagtggtcctgggctcctgactcaaaggasaggtcaccttcttcttgggcgagctcttcttggggtgctgagaggccttcggcaggtcatcacgacccctccccatttccccaccctgaggccctcagga

SEQ ID NO: 270564 - DNA, 201 bp, Homo sapiens
ttcggcaggtcatcacgacccctccccatttccccaccctgaggccctcaggatggacaagcccaaacaaagcaacccccacggccccgctagaagcaaarcctgctgtgctgggcccagtgacagccaggccccgcctgcctcagcagccactgggtcctctaggggcccgtccaggggtctggagtacaatgcagacct

SEQ ID NO: 270565 - DNA, 201 bp, Homo sapiens
aaattatccaggcatggtggtgcacacctgtgatcccagctactcaggaggctgaggcagcagaatcagttgaacccaggaggtggaggttgcagtgagcmgagattacgccactgcactccagcaggggcaacagagtgagactgtgtctcgaataaataagtaaataaataaataataaaaattaaaaataaattagca

SEQ ID NO: 270566 - DNA, 201 bp, Homo sapiens
cacggccccgctagaagcaaagcctgctgtgctgggcccagtgacagccaggccccgcctgcctcagcagccactgggtcctctaggggcccgtccagggstctggagtacaatgcagacctcccaccatttttggctgatggactggaacccagccctgagagagggagctccttctccatcagttccctcagtggcttc

SEQ ID NO: 270567 - DNA, 201 bp, Homo sapiens
gatgcccgtctaccccaaatgggtgggggccgaccatagagatgagatccagtacatctttggggagccctttgccaccccactccgggctaccggccccragacaggacagtctctaaggccatgaccgcctactggaccaactttgccaaaacagggtaagacgtgggttgagtgcagggcggagggccacagccgaga

SEQ ID NO: 270568 - DNA, 201 bp, Homo sapiens
atgtttactgtcacaggggacatgtttcagcactttcattgtaaggctgtggccttctgtgcttgtggatcctcagtctcagtggccttcctcttcccccsaccccaactcctgtgttgcgtgtttaacacacctacccccaaccgggacataactaaatcctagactgtggacaaagaatacagtcacctcagggggctg

SEQ ID NO: 270569 - DNA, 201 bp, Homo sapiens; identical to SEQ ID NO: 270533

SEQ ID NO: 270570 - DNA, 201 bp, Homo sapiens
ctataaatttcccccaagcactgctttcgatttcaccgcatgctgtaagttttggtatgttgtgtttttgttttgtctcaaggtgtcttctaatttccctygtgacttccttttagacccattggttgtttaagagtgtgttaagcctgggcacggtggctcacgcctgtaatcccagcactttgggaggctgaggcaggt

SEQ ID NO: 270571 - DNA, 201 bp, Homo sapiens
cccagctactcaggaggctgaggcagcagaatcagttgaacccaggaggtggaggttgcagtgagcagagattacgccactgcactccagcaggggcaacagagtgagactgtgtctcgaataaataagtaaataaataaataataaaaattaaaaataaattagcaatctgaaaaagataggaagataaaagtataccta

SEQ ID NO: 270572 - DNA, 201 bp, Homo sapiens
ccagctactcaggaggctgaggcagcagaatcagttgaacccaggaggtggaggttgcagtgagcagagattacgccactgcactccagcaggggcaacagagtgagactgtgtctcgaataaataagtaaataaataaataataaaaattaaaaataaattagcaatctgaaaaagataggaagataaaagtatacctag

SEQ ID NO: 270573 - DNA, 201 bp, Homo sapiens
accagctgtggtggtgcacacctgtaatcctagctactcaggaggctgagacaggagaattgcttgaaccttggaggtggaggttgcagtgagctgagatygtgccacggcaccccagcctgggcgatggagcaagactccgtctggagtcggggaggggaagagtgttaagatccttttgtagttgatgaacaatgatga

SEQ ID NO: 270574 - DNA, 201 bp, Homo sapiens
tgggtggtctctcccctccaggagtgccaagacctacgcctacctgttttcccatccctctcggatgcccgtctaccccaaatgggtgggggccgaccatrgagatgagatccagtacatctttggggagccctttgccaccccactccgggctaccggccccaagacaggacagtctctaaggccatgaccgcctactgg

SEQ ID NO: 270575 - DNA, 201 bp, Homo sapiens
gggtggtctctcccctccaggagtgccaagacctacgcctacctgttttcccatccctctcggatgcccgtctaccccaaatgggtgggggccgaccatasagatgagatccagtacatctttggggagccctttgccaccccactccgggctaccggccccaagacaggacagtctctaaggccatgaccgcctactgga

SEQ ID NO: 270576 - DNA, 201 bp, Homo sapiens
gcaccctgcccggccccaccatcccccttaccacccgccaccttgccacctgcctctgctcccaggtaagtggtaacctgcacaggtgcactgtgggtttkgggaaaactggatctccctgcacctgagggtgtagaggggagggagtgcctgagagctcatgaacaagcatgtgaccttggatccagctccataaatacc

SEQ ID NO: 270577 - DNA, 201 bp, Homo sapiens
ttcttaaaccaggcattttgttccctagagatgtaacttgagtatcaagttttgggaaagttctttggactgaaaccaagccaggattttatgatgaaccrgtcatgagctcatttaaggtagaaggccagaactttataccagtagcacatgatccagcataaaggcagtcttgaaatactgcattatccagggacaggg

SEQ ID NO: 270578 - DNA, 201 bp, Homo sapiens
cccacttggtgtggcacggagacattgagatggactagagccccgggcggccgagagcggaatgcgttgttcccggtgtcgcagggctgggtgtcgcaggsctggagcaccgcagtgcggggctcggagccctagcgtctctcgggcttgctgggggccgctccagaggccttgtgagcgacgagttctgagcccgcccct

SEQ ID NO: 270579 - DNA, 201 bp, Homo sapiens
tgttagccaggctggtctgagctcctgaccgcacccggcccttcccacccttaaatacattcttaaaccaggcattttgttccctagagatgtaacttgartatcaagttttgggaaagttctttggactgaaaccaagccaggattttatgatgaaccagtcatgagctcatttaaggtagaaggccagaactttatacc

SEQ ID NO: 270580 - DNA, 201 bp, Homo sapiens
ccgggcggccgagagcggaatgcgttgttcccggtgtcgcagggctgggtgtcgcaggcctggagcaccgcagtgcggggctcggagccctagcgtctctygggcttgctgggggccgctccagaggccttgtgagcgacgagttctgagcccgcccctgttgcttctagagcctgtggggccgcgactcagaggagtcat

SEQ ID NO: 270581 - DNA, 201 bp, Homo sapiens
atgttagccaggctggtctgagctcctgaccgcacccggcccttcccacccttaaatacattcttaaaccaggcattttgttccctagagatgtaacttgmgtatcaagttttgggaaagttctttggactgaaaccaagccaggattttatgatgaaccagtcatgagctcatttaaggtagaaggccagaactttatac

SEQ ID NO: 270582 - DNA, 201 bp, Homo sapiens
aggttttagtgggtgtaaagtggtcgcagtccttaatttgtgtctcttagagacgggggcaatgatacatgcttcttgctttcattgggagttgctgagcragcattcagctcaatatggtagtggccttgaattcagcttagccatctggaaacaagtacagtagcagtgtcgcagcgaggtactaggactgcaattctg

SEQ ID NO: 270583 - DNA, 201 bp, Homo sapiens; identical to SEQ ID NO: 53592

SEQ ID NO: 270584 - DNA, 201 bp, Homo sapiens
agctggcccacaagtacagaccagagacaaagcaagagaagaagcagagactgttggcccgggccgagaagaaggctgctggcaaaggggacgtcccaacraagagaccacctgtccttcgagcaggtgagtaggccccaccttagggtgaacactgggggcgggctgttgcagtgatgtaaaatttcttggcctgaaatt

SEQ ID NO: 270585 - DNA, 201 bp, Homo sapiens
ctttcattgggagttgctgagcgagcattcagctcaatatggtagtggccttgaattcagcttagccatctggaaacaagtacagtagcagtgtcgcagcraggtactaggactgcaattctgctgtacttcgtggcaccttggcttcttgttagatgaggaaaagcatcgtgctctttgttctcaggtgtttgtgtgcag

SEQ ID NO: 270586 - DNA, 201 bp, Homo sapiens
gtctcgggcttagccttgctctggccactcggggttcccggggctgcatgcttgtgcggctgaatgtgagatgctcctgtcgaggggtggtgctggggggytgcagaaagctgctcgccagcttagttcaggcaggtgctgtcagcgtcccttgttttggaggagccagcctgagccctacccccgacgaagcgagtggag

SEQ ID NO: 270587 - DNA, 201 bp, Homo sapiens; identical to SEQ ID NO: 53565

SEQ ID NO: 270588 - DNA, 201 bp, Homo sapiens
ccgcccctgttgcttctagagcctgtggggccgcgactcagaggagtcatgagtccggggtgtctcctgggtgggcgacgcgaagagagcgtggtctcggkcttagccttgctctggccactcggggttcccggggctgcatgcttgtgcggctgaatgtgagatgctcctgtcgaggggtggtgctggggggttgcagaa

SEQ ID NO: 270589 - DNA, 201 bp, Homo sapiens
ggggctcggagccctagcgtctctcgggcttgctgggggccgctccagaggccttgtgagcgacgagttctgagcccgcccctgttgcttctagagcctgyggggccgcgactcagaggagtcatgagtccggggtgtctcctgggtgggcgacgcgaagagagcgtggtctcgggcttagccttgctctggccactcggg

SEQ ID NO: 270590 - DNA, 201 bp, Homo sapiens; identical to SEQ ID NO: 53588

SEQ ID NO: 270591 - DNA, 201 bp, Homo sapiens
ctgttgctttaaatccgaaatcccgtgccggtatcaactctcgcgatctccgaggccgcatacatattacccacaattccctttcctttctctctcctccygccgcccaagatggtgagtgagctgtagttccgtggcactatagccaggttccggctgtatccgctgccatcctcctccaggcgcggcctcggagggcct

SEQ ID NO: 270592 - DNA, 201 bp, Homo sapiens
agctgctcgccagcttagttcaggcaggtgctgtcagcgtcccttgttttggaggagccagcctgagccctacccccgacgaagcgagtggaggcggcggyttaactgacgttttctttctgcccagccgaaaggaaagaaggccaagggaaagaaggtggctccggccccagctgtcgtgaagaagcaggaggctaagaa

SEQ ID NO: 270593 - DNA, 201 bp, Homo sapiens
aaatccgaaatcccgtgccggtatcaactctcgcgatctccgaggccgcatacatattacccacaattccctttcctttctctctcctcccgccgcccaaratggtgagtgagctgtagttccgtggcactatagccaggttccggctgtatccgctgccatcctcctccaggcgcggcctcggagggcctcctgctcctc

SEQ ID NO: 270594 - DNA, 201 bp, Homo sapiens
ctccgaggccgcatacatattacccacaattccctttcctttctctctcctcccgccgcccaagatggtgagtgagctgtagttccgtggcactatagccrggttccggctgtatccgctgccatcctcctccaggcgcggcctcggagggcctcctgctcctcctggcgctaggagagccccactcggtgtggcacggag

SEQ ID NO: 270595 - DNA, 201 bp, Homo sapiens
aaatatttcatgggatttctgaaatacaaatttacttggggggggggtgggtcctgattttgatttacttaatctggcaaacctatgcccaactacaacamccaacctgcccctcgccccatatgctacaaacaaactttgtatataatcctcccagagagagtgatatatttaaatttttgaaatgacaattaattcagt

SEQ ID NO: 270596 - DNA, 201 bp, Homo sapiens; identical to SEQ ID NO: 53599

SEQ ID NO: 270597 - DNA, 201 bp, Homo sapiens
gcttccatttgtttgtaacctttggttagggtttaaattcaacttagtgcctgcctcctaggtacccttatataaaaggcaaaaagagtttctaaatgttyttttctcagttgggaaaactgccccaggcagttcactggagagtttttattgcataataagagaatatacagtagtcagaccttattagccccaacaaac

SEQ ID NO: 270598 - DNA, 201 bp, Homo sapiens
catgtcctttgcagtaacatggatgcagctggaggccattatcctaagtgaattaatgcaggaacagaaaatcaaatactgcatgttctcacttataaatrggagctaaacactgggtactcatggacatgaagatggcaacagtagacactggggactactaaatgggggaaggatggagggggacaagagttgggaaac

SEQ ID NO: 270599 - DNA, 201 bp, Homo sapiens
ttacaaataatcccatgtaaatacaaaagatcctcagagactattatgaacaactctagatgcagaaactagaagatctagaggaaatggatacattcctsgaaacaaacattctcctaaaattgaattaggaagcaattgaaaccctgaacagaccaacattaagttccaaaattgaataagtagtgaaaaacctaccaa

SEQ ID NO: 270600 - DNA, 201 bp, Homo sapiens
gtgaacttccctcttagcactgcctttgctgtatgccagaggttttgggaggttgtgtcattatttgggaggtatgtgtcattcagtttgaagaatttttwaatttccatcttgattttgtttttgacccagtgatcattcaggaacaggttatttaatttcatgtatttgcatgattttgaaggttacttttggagttga

SEQ ID NO: 270601 - DNA, 201 bp, Homo sapiens; identical to SEQ ID NO: 53598

SEQ ID NO: 270602 - DNA, 201 bp, Homo sapiens
agaatcccattacggggtatatattcaaatgaaaacaaattgttctaccaaaaaaccacacgcacttgtatgttcatcacaacagtatttacaacagcaaygacatggaatccatgtaggtgcccatcaacagtggattggataaagaaagtgtggtaaatatatatgatggaatcctgtgtagccatacaaaagaatgaa

SEQ ID NO: 270603 - DNA, 201 bp, Homo sapiens
aatagctgcaaaaaaatacctaggaatacatctaatcaagggggcaaaagatctctacaaagagatctgcaaaacacagctaaaagaaataataaatgacmcagtagaaaaacatttcatgtgcatggattggacgaatcaattttggtaaaatggatacactgcccaaagcaatctatagatccaatgctattcctctca

SEQ ID NO: 270604 - DNA, 201 bp, Homo sapiens
actccttcctagaggactgcgaactctcccggcagatcggggcgcagcttaagctgctgcctatgaatgatcagatacgggagctacagaccatcatccgkgacaagtaagccaagagcggaaggggaaagggaagtggagggtcttgcaggctgtgggcggggattggaagtaaaagggctaagagacagtgttcttggc

SEQ ID NO: 270605 - DNA, 201 bp, Homo sapiens
ctagatatactttaatttctaaatggatttaaaatgaatagtatggatctgaagtccgtctatacagcaggaaataggtaagtaattacagcttgcagtaragttacttggagtggtaaatgattttattggaggtcaaatagctgtcaagagataacagctcatattaggttctcacagtgtgtaccttttttggaatat

SEQ ID NO: 270606 - DNA, 201 bp, Homo sapiens
gagtgcttgccatgactgttgtcacttgctggagttttgtgtccctcatagtctggactgacagaatgagaatcagaaggaatattggagccttttggtgrcaatcatggcctatctgaggttggatacctagcagcaagtagtatggcatttggatctatccctgtatctaacacatgatagggggccccttactgcctc

SEQ ID NO: 270607 - DNA, 201 bp, Homo sapiens
ggactgcgaactctcccggcagatcggggcgcagcttaagctgctgcctatgaatgatcagatacgggagctacagaccatcatccgtgacaagtaagccragagcggaaggggaaagggaagtggagggtcttgcaggctgtgggcggggattggaagtaaaagggctaagagacagtgttcttggccttggcaaacttt

SEQ ID NO: 270608 - DNA, 201 bp, Homo sapiens
aaaaaaaaaaagattcttgtatcccatctcggatctacagaatcacaatctcaaaaatgagccgtaagaacctgcattttaacaagctctacaattattgkggtacatactgatgtttgaaaagtactgccctaaacactcttacctcaggccgttatagtgagtccatacacttaaaaataagcgtctttccaagtactt

SEQ ID NO: 270609 - DNA, 201 bp, Homo sapiens
ggaaaagtttatctgctttcacattaaatctgaatctaatttgggtaattataacttgtgtttgtcatctgtaagcttagtgataacattttataccattytaatgttcaaatgcaaatggagaagtatgaactaaccccatttaaaagaattgcaattgttttcctggtttggcctgcaaatgactcaaaggttcctatt

SEQ ID NO: 270610 - DNA, 201 bp, Homo sapiens
tagatgctcaattactagagtttttttgtagctcttaaaattacatttatgaaactatactattttactctttttaatgaatcaatattgaaaactactgkggttatgttatctaatagacaaaatagtgatcctaaaaaataggaggcataggtttgctgtagttgtggtagggtaggggcagccaaaataaatcttaca

SEQ ID NO: 270611 - DNA, 201 bp, Homo sapiens
atcatgtttttggaaaatattgaatggcatccaaaaatgtacatggtaaatgtaaaaaagcagtataaaaataacagcattagaatagggtaaagtgttaycaccaagcttggagatgaccagtacaaattatgactattttaattacaaaaatcagagttggatttaatatggaacctaataaatctttccttagcatga

SEQ ID NO: 270612 - DNA, 201 bp, Homo sapiens; identical to SEQ ID NO: 53600

SEQ ID NO: 270613 - DNA, 201 bp, Homo sapiens
tttttttgtgggggagggtgtgaaaggtggtaaaatgtttgattccaaagtaaaataacagatttgggcgactctgattacttaacctaatatactgtttmtctgtaataaagtgatatctaactgttcagaaattaaaactgacatttcaggtgtctcctataatatataacaccgcatatgtctttaagtcaaatccag

SEQ ID NO: 270614 - DNA, 201 bp, Homo sapiens
gacaaatctgctgttaatctgataggttttcataggttatctggtgtttttgtctcacagctcttaagattctttccttcatcttaactttggatagcccracgaaaatgtgcctaggctatgacctttttgtgatgaattttccaggcattctttgtgcttctcatatttggatgtctatgtctctatcaaggctgggga

SEQ ID NO: 270615 - DNA, 201 bp, Homo sapiens
tttctgtaagaacagattcccactgttcctacctatgattcagcaaaactacagccaagggaatgggcttggcggagtcattgggaaaagaagaccctgtygagcttgactctagtctggcatggtagagagacatgagaaatgtagaataagcaggaggccccaggggttggggatgatctccaaggggctctggctttt

SEQ ID NO: 270616 - DNA, 201 bp, Homo sapiens
aacatacacagagggagaagactatgcaacagagaacatatgtggcctgcagaccctaaaatatataccgtcagatcctttaaataaaaagtttgccaacycctgccctgtggtatccaaactcaaagataacacagaaagccctgcatggtcttccttttacttttccagcttctttttgtcagttcttccattcctttc

SEQ ID NO: 270617 - DNA, 201 bp, Homo sapiens; identical to SEQ ID NO: 53638

SEQ ID NO: 270618 - DNA, 201 bp, Homo sapiens
atggtgcccagccttaacaaaaaattttttttttgagacggggtctcgctctttctcccagtctggagtgcagtagcacgacctcggccccaaagtgctakgattacaggcgtaagccaccacacctggcccttaacaaatttttttgagagcctgcaatgttctaggtgatttggacatatagtgaataaaacaaagatc

SEQ ID NO: 270619 - DNA, 201 bp, Homo sapiens
gcatttggggagaaagtttggaaaatctgtagacaaagttacagcgattggggctgggctggggtcagcatgggagggtggggaagttgaccagcttaggrttaagagagaaaatggaatgcctttaatctggggatgcagtcttcagtttaccccatctccactccttccctgatgcctttcactccaccagccagtttc

SEQ ID NO: 270620 - DNA, 201 bp, Homo sapiens
atgttctaggtgatttggacatatagtgaataaaacaaagatctttctcctagtgaagcttactgtttggaggtgggtagggaagacataatatacaagamaataagttatatagtatattagaggatgataaatgcaaggaaaaaatgtattgggttaagaggagcattgagagttccactagagctgggggttacactt

SEQ ID NO: 270621 - DNA, 201 bp, Homo sapiens
ccagtctttcctgggatattggcatttgctgttcatttcagtcagcgtttaacagggaaagagtccttgggacttctttctgcctactttaatgaacctgrgatagcttcagttcagattttgctattttggatgtacagaaactgatcactttcctgggggtagcaaaaactttgttgaaacagagagaattggcatacc

SEQ ID NO: 270622 - DNA, 201 bp, Homo sapiens
tctttctcctagtgaagcttactgtttggaggtgggtagggaagacataatatacaagaaaataagttatatagtatattagaggatgataaatgcaaggmaaaaatgtattgggttaagaggagcattgagagttccactagagctgggggttacactttgagctagggtggtcagagtcggcctcaatgaaaagatgat

SEQ ID NO: 270623 - DNA, 201 bp, Homo sapiens
acatctcttagtgctatttctcatgtgtaagaacatactaagcctattaatatttcttgactggatggacaaatgggcttcagttaaagaaacattgaagktcaggtgtggtggctcacgcctgtaatcccagcactttgggaggccgaggtgagtggatcacttgaggccaggagttcgagaccagcctggccgacatgg

SEQ ID NO: 270624 - DNA, 201 bp, Homo sapiens
ggaatgtcaaatatagggactgctgaagcaaaaagattgaatattgagttctttataaaaacttatttttacagcattggttggattttaggtagaaactwttcagacatgagcaagatgatttcaatcactccattgtggttataatcatataaatgtttaccctttctattgttcctggttttcttttttttttttttt

SEQ ID NO: 270625 - DNA, 201 bp, Homo sapiens
caattctcttgcctcagcctcctgagtagctgggattacaggcatgcaccaccacacccagctaatttttagtagagatggggtttctccatgttggtcargctggtcacgaactgttcctggttttcaaagggacctttctacactttcctggctaggtagcatgtattagtgagacattctagacttgagctgacacct

SEQ ID NO: 270626 - DNA, 201 bp, Homo sapiens
cagagcatcttttcatatgctcatttgccatctgagtatcttcttcagtgaggtgtttgttaagtctttgggcattttttaatccggttgttcattttctwagtgttgggttttttgtttgtttttgagacagggtctcgctctgtcacccaagctggagtacagtggtgtagtcatagcttactgtaacctctaactcct

SEQ ID NO: 270627 - DNA, 201 bp, Homo sapiens
tattttaatgaagtccatcttctcaattcttttttcataaatcatgcctttggtgttgtatctaaaaagtcattgccaaacccgagttcatttagattttstcctgtattatcttctaggagttttatactttcagttttgttgttgttgtttctttttttttttttttttttgagatggagtcttactctgtcacacacg

SEQ ID NO: 270628 - DNA, 201 bp, Homo sapiens
atcttctcaattcttttttcataaatcatgcctttggtgttgtatctaaaaagtcattgccaaacccgagttcatttagattttctcctgtattatcttckaggagttttatactttcagttttgttgttgttgtttctttttttttttttttttttgagatggagtcttactctgtcacacacgctggagtgcagtggca

SEQ ID NO: 270629 - DNA, 201 bp, Homo sapiens
aggggacagcagatctcaaacaaccttcctggtaacaggggaatgccttcagagaattttcatttcccataaattgtgttcagggcatgattttcacaacsacctgttgagaaggaaagaatcatttgggtaaagagctgaagaggtacagttcatgtgtaaagtatagtgaagacagcatgaggtttgcagacctgtgaa

SEQ ID NO: 270630 - DNA, 201 bp, Homo sapiens
tctattgtgccttcattttttatttgagaaaactgtgacaacatgagacctgggcctggaaagttccccagctctgaggggacagcagatctcaaacaacyttcctggtaacaggggaatgccttcagagaattttcatttcccataaattgtgttcagggcatgattttcacaaccacctgttgagaaggaaagaatcat

SEQ ID NO: 270631 - DNA, 201 bp, Homo sapiens
catctttgtgtaggggcttgggctttagttaagaaagttcaacacagcctgaaggaacaagggaaccgaaggtttctgcagggaagtgatctaatgagtamccgtgaccttaagttggtaaggagggaagttgggggaaagcactgggagagtgggagacagtgaaaggtggtaggatcatggatgggtgttcaagacatt

SEQ ID NO: 270632 - DNA, 201 bp, Homo sapiens
ctccacacatctttgtgtaggggcttgggctttagttaagaaagttcaacacagcctgaaggaacaagggaaccgaaggtttctgcagggaagtgatctamtgagtaaccgtgaccttaagttggtaaggagggaagttgggggaaagcactgggagagtgggagacagtgaaaggtggtaggatcatggatgggtgttca

SEQ ID NO: 270633 - DNA, 201 bp, Homo sapiens
ttatacctgcagagcaggcttcatgctggaatggctatggcccttcctgccttttaaatttcctgtggcttacagtgcgacattaatgagcagtataattwaagtgagaatctcatcttactcatctctggctctcactaactgttctcccttccaggatatcacgggccccttgatttgtatccagaattttaccgaatt

SEQ ID NO: 270634 - DNA, 201 bp, Homo sapiens
atgaaccttctccacacatctttgtgtaggggcttgggctttagttaagaaagttcaacacagcctgaaggaacaagggaaccgaaggtttctgcagggargtgatctaatgagtaaccgtgaccttaagttggtaaggagggaagttgggggaaagcactgggagagtgggagacagtgaaaggtggtaggatcatggat

SEQ ID NO: 270635 - DNA, 201 bp, Homo sapiens
cagaatttattatgtgtttggaaggaagacattctgaatgctgcttaaaagctaagtattaaattaataacatatgtcagccattgtggctgctggatagyctcagttatgaccaaattttacttagctgtgggcaaactgtctaaacagttttttcagctttaatcctcccacttgcctaggagtttacagggcagttga

SEQ ID NO: 270636 - DNA, 201 bp, Homo sapiens
atttatttaactccccgctctgtttctctgttaaatagtttacccattgcctttgatttgctggtcatgaaacacaggtggaagagtttctttcattggtygctgatggccctcatactatttctggtgagttttcttttttacttgctttgtcctaaagttgtaatgaaagcaactttgatgtgaaaaaaggaacatcag

SEQ ID NO: 270637 - DNA, 201 bp, Homo sapiens
catagcttactgctgtcttgacctcctgggctcaagcaattttcctgcctcaatctcctgagtagctaggactattggtacataccaccatgcccggctartttttaaatttttgtggaaacagagtctcactgtcttgcctaggcttatctcaaattcttggcctcaagctatcttcccactttggcctcccaaggtact

SEQ ID NO: 270638 - DNA, 201 bp, Homo sapiens
ctcctgacctcaggtgatccacctgccatggtctcccaaagtgctgggattacaggcatgagtcaccatgcccggcccatcattttctttttatttgggcmcagtttcctgagaaatcttaaagatttcttttttgaggcaccagaatgcaaagtatattctggtttcgcccaagtgaaagcatccaagtaaagcagatag

SEQ ID NO: 270639 - DNA, 201 bp, Homo sapiens
gatacataatttctaggagtgccatttctacataatgggaaatagtgcttcttcttaacaacagcaacaaaaattttttttgagatagtctcactctgtcrcgacgctggaatgcagaggcacaatctcagctcactgtaacctctacctcctgggctcaagcagtcctcccacctcagcttcccaaggcacctgccacca

SEQ ID NO: 270640 - DNA, 201 bp, Homo sapiens
attgcccaagctggttttaaactcgtaagctcaagctatccgcccacctcagcctcccaaagtgctgggatgacccatggtgcccagccttaacaaaaaawtttttttttgagacggggtctcgctctttctcccagtctggagtgcagtagcacgacctcggccccaaagtgctaggattacaggcgtaagccaccacac

SEQ ID NO: 270641 - DNA, 201 bp, Homo sapiens
ttgcaataggccaggcaagagatgagggttcttcagatcagggagagggcaatggagatagtgagcggtggttatgctgaggatatagagaaatgcactgwatttgaggtgtgaaagaaaggagtcaaagatgatcctagggattttgatccaaggaactggaaaaatgaacttgctattaactgagatgggagagactgc

SEQ ID NO: 270642 - DNA, 201 bp, Homo sapiens
tgtatttttggaggttgctccatatagtcaaaatcatgaatatttattgaacatcaagggtctattgaacatgcctgctgaaagtaaaatatcatactggkcacatggataatgctgattcagcaaattctgtgtaaacggccacctgcggggtatattgccattatacaattatgggaccttttgcagtatattttcttt

SEQ ID NO: 270643 - DNA, 201 bp, Homo sapiens
cctgcggggtatattgccattatacaattatgggaccttttgcagtatattttctttagcaacacgccttccatgcccccttgcactctgacatcccatgrgccaccacagccccccagctccccactctagacttctgctttgctctgccccacgtaatggctttaggattgaattgcttaggaagagaacagaaaaaaa

SEQ ID NO: 270644 - DNA, 201 bp, Homo sapiens
cctcagcctcccaaataattgggattacaggcgcacgccaccacagccaactaattttgtatttttaggggtttcaccatgttggccagactggtctcgarctcctgacctcaagtgattcacccgccttggcctcccaaagtgctgggattacaggcgtaagccactgtgtctggccaaaggaggtaacttttaagctga

SEQ ID NO: 270645 - DNA, 201 bp, Homo sapiens
ggttttcactgtgttagccaggatggtctcgatctcatgaccttgtgatcctcccgtctcggcctcccaaagtgctgggattacaggcgtgagccaccgcrcccagccactttatatcccttttaatttaatattgtaacattctctgtgcttatcattttagtagctgtagaatgttctgagttggatataatatatagc

SEQ ID NO: 270646 - DNA, 201 bp, Homo sapiens
attaactgtacattttttgtctatttttgttgtttttttcttttaatggatgctgataaattaaggaagccttaaacttaaaatgcaaatttgggctaacwtttcatgattatattctttcttataatcattgtttggatccataatattaaaaatatgctcaaggaaaatgaaggtaaaaagaagaaggagcatagagag

SEQ ID NO: 270647 - DNA, 201 bp, Homo sapiens
tagcctttgccttttacgtttgaaatagttttatagataaagatatgtttgagggttactccggaacaaagtatttctcccatagtgtgttctcagtgccrtatattacatttcattctttttctctacacctgataatttgctttatttgataagtctctctgcccacatagtaattgacaataagcattggcacttctc

SEQ ID NO: 270648 - DNA, 201 bp, Homo sapiens
aacaaatgaacagtaaagactgtttccatactgaatgccagggagcagcctctgtcagggccatgatcttctccctacttgtctttacacattctgagatmccatgcgaattttacttcagttcctttgaaagatgacacttttgacatttgatacctgtgaaatctttgataatgaaaaaggtaagaagtaataaagata

SEQ ID NO: 270649 - DNA, 201 bp, Homo sapiens
tcatatataatggtcatttacgtcttagaccctagataagatggggctgcacacctcactattctctagctctttctgagaaaagaaaaaggttttaatargcctatgacacatagccacatgatttgtttagaaatgtaagtaggttaatttctcaaatgtttaagttcctaaaatctaaccctgctttttttatggttt

SEQ ID NO: 270650 - DNA, 201 bp, Homo sapiens
ctaactgatggacatttcaatcatttatactttttggctattaggaataatgctgctatgaaccttctccacacatctttgtgtaggggcttgggctttarttaagaaagttcaacacagcctgaaggaacaagggaaccgaaggtttctgcagggaagtgatctaatgagtaaccgtgaccttaagttggtaaggaggga

SEQ ID NO: 270651 - DNA, 201 bp, Homo sapiens
tttaatccttcactaactgatggacatttcaatcatttatactttttggctattaggaataatgctgctatgaaccttctccacacatctttgtgtagggrcttgggctttagttaagaaagttcaacacagcctgaaggaacaagggaaccgaaggtttctgcagggaagtgatctaatgagtaaccgtgaccttaagtt

SEQ ID NO: 270652 - DNA, 201 bp, Homo sapiens
atcactgcagtaagatacctcattcccactgccgtctccgggcatcccgctaatctattctctgcttctatagattgccttttctggacatttcatataaktgcaatcatatgtggagtttagtgtctggcttctttcactcagcctgtttttgaggttcattcatgttatagcatttatcagtagttgtctgtttttatt

SEQ ID NO: 270653 - DNA, 201 bp, Homo sapiens
gactccagaaagacgaagtaagcacaggtactaggtgtaagcctgaggaaacagaatattgatcaggataccaagacaggaaatgaaatatggagagaaargcatgggtccctaattactgaaactgaggtataaggctggttcttcacgagtaagcaagaatccagttgttctgagtgagttcaattagagctggactag

SEQ ID NO: 270654 - DNA, 201 bp, Homo sapiens
ctatctttgccaggtatcgatgtacgtttcggtgtggactgcacccagctggcagatgtctttgaactgcacgagagagaatttgatcaaatttatttcawcttcccgcattgtggacgcaaagctggcgtagctaagaacagggaactgcttgccaaatttttccaaaggtgaggaaaggagcgccctcacaaggaaaat

SEQ ID NO: 270655 - DNA, 201 bp, Homo sapiens
actactgggctcaagcagcctgcttgccttgccctcccaaagtgctgggattataggtgtgaggcatcgtgcctggcttgcctttgtttttaatatttctrctcagaaacttcacttgcatctgcttaacagagatttttggccagtataaccctgaatctatctgttttgtatttttagacacactacctcatctatggg

SEQ ID NO: 270656 - DNA, 201 bp, Homo sapiens
ctggaagcaatcacaattgatcaagaggtgagtctctggtatagttttgagaaaaggacaaaatgaattggaagttaaaagggaactttttttgaagaagratcatttatccaattcaccattcaacaagcattaatgaaacaacttttatttggtagacactgtattaagtgctgtggctataacagtaaccaagcccct

SEQ ID NO: 270657 - DNA, 201 bp, Homo sapiens
gcagtagccagtctttcctgggatattggcatttgctgttcatttcagtcagcgtttaacagggaaagagtccttgggacttctttctgcctactttaatraacctgagatagcttcagttcagattttgctattttggatgtacagaaactgatcactttcctgggggtagcaaaaactttgttgaaacagagagaattg

SEQ ID NO: 270658 - DNA, 201 bp, Homo sapiens
agacacacaaatagataattacaggacagtgttttatgtgctacaggggaaagatagggaatcataggagcatgtccttctggtggtgtcaagaaaggtgyggctcttgagctgagcctggaaggaagagtaggagtgtccttagtaaatgcaagaggggtacatttctgacaaatggaatgtcaaatatagggactgctg

SEQ ID NO: 270659 - DNA, 201 bp, Homo sapiens
aatttgggctaacttttcatgattatattctttcttataatcattgtttggatccataatattaaaaatatgctcaaggaaaatgaaggtaaaaagaagamggagcatagagaggggcaagaaagccaattattttttgcagaatagggcctctgctgtaaccgtgttcccagctagagagacattttatacctgcagagc

SEQ ID NO: 270660 - DNA, 201 bp, Homo sapiens
ttagaagggaacttaaaatgtagtctgtgatctttttattttatggatgaaagaactgagatctagagagattataacttgataaagattagccctaggakaaaaggcttggtttcaggattcttcaatattattttcataccacctctttcttgtttttgtgtgatagctaatcattctttgatgttacaaggccaaata

SEQ ID NO: 270661 - DNA, 201 bp, Homo sapiens
caactaattttgtatttttaggggtttcaccatgttggccagactggtctcgaactcctgacctcaagtgattcacccgccttggcctcccaaagtgctgkgattacaggcgtaagccactgtgtctggccaaaggaggtaacttttaagctgagactttaaaaatgagatggactcagtcatgagaaaaacagggtggaa

SEQ ID NO: 270662 - DNA, 201 bp, Homo sapiens
aatttatctactcatatatatttgaaatttttaatcatagcaaatggaaaaccaagtagattgtttgtgaaacaagcaaataaatgaataacatggtgtawagtacaaagtaaaagtcctctgctctatcatagagactgcataatttttgttttaattggtactgctaaaactgcctttctaggtggctgtgcaggctta

SEQ ID NO: 270663 - DNA, 201 bp, Homo sapiens
tcctcatcagtgtttgagactgtcaggctttttaacttttccaaacctgattattgaaaattgtgtctagtcttgcatttccctgattcctggtaagattsatcattatttcatgtttatcaaccatttgcatttctcttctgtaatcatatcttttgtcattttttcctgtggaattgtcttactgatcgcaggaacagt

SEQ ID NO: 270664 - DNA, 201 bp, Homo sapiens
ggcttttatcttagagtttggagtaggtacctcactgttggcaaatgctcagatccctaatagaacctcttttttggcttcgctcttgatgttactgtgaygtcttgtaattatgtatattctacaaattatattttcttttatcagcacagttttctgtacttccagaaatgttaccactttgtgtttcaacgatatcgc

SEQ ID NO: 270665 - DNA, 201 bp, Homo sapiens
agaccctggtcagccaatcttatcagtgagtgggttgaacatttaatttatgcttctatttacttccagctactttctttgcattttttgaggtctaataratttttgcacataggtatgattggattttaattatttcacaggcaaaccatgtgtatgttgccaactcctgtggtaatttctgcttgtttatgataatta

SEQ ID NO: 270666 - DNA, 201 bp, Homo sapiens
cacttgcctttccacaggcagaaacaaagccaataatgcagcattgaaggatgacatcccaggtaactaccctcataccatctgcctttgtgaagacagaygcatgcactgatgttaccaaacaacatgatgaccagagtagctggtgccacaaagtccaatgggcctggtactcatactggagatctaggtgtaactgtc

SEQ ID NO: 270667 - DNA, 201 bp, Homo sapiens
cttggcctcccaaagtgctgggattacaggtgtgagccaccgcgcccggctgtatatattattttgataaacctaaaggtgaatttagaaaaggacataartcttgccctcagagtctagtagaagaaacaaacttaaaatgttattaaacagtgtactgagtgccataatgtgcatagagaaggtgagaaaactcttcgt

SEQ ID NO: 270668 - DNA, 201 bp, Homo sapiens
agagtaaatacaaataaggagttagatgttgaacctttagctggtatggcaggagaggggccttttctagtcaaagggcaagttggggactgtgctgatawcatatacgcttattatgttctttcagtgcctacataggattctcagtggccactgaactttagctgttctggggactttactaagaccatggctctcctt

SEQ ID NO: 270669 - DNA, 201 bp, Homo sapiens
ccagttgcccatcagggtacggtttgaataggtattctcattagtggtgcatcgccatccatactggaaaaacttggacatattattccaatctgtccacrcttcaccatggccatctgcattaacaaggctgccacagtgtgggtttgtgaggaaacaggcgaggttctgtctctgggaaaagacaagaatagaaaagct

SEQ ID NO: 270670 - DNA, 201 bp, Homo sapiens
gctgtgacaatatttattactacccagctctccttagctcactcttcccccgacaaaatacacatcttttattattgggatctcaacctctgtttcaggcyttctatttcctttgagaatgtgtagttttgtttacatctggagtggtattaaattgttatccttaacatatgcttgtttataagatgtaaacaatgtgat

SEQ ID NO: 270671 - DNA, 201 bp, Homo sapiens
aagtgattttgtaagatgttttttgtaataaataatgttttaatttcatcatggaaaaaaaataactgtaatgggggctgtcactgtgaaatctttgatayccctaccaagaagatctgtggtggacttgagcaacattcagtgtgttttcagttgacctcgagtttctcttccttgaacataaggactttcaactcaaaa

SEQ ID NO: 270672 - DNA, 201 bp, Homo sapiens
agtgattttgtaagatgttttttgtaataaataatgttttaatttcatcatggaaaaaaaataactgtaatgggggctgtcactgtgaaatctttgatacycctaccaagaagatctgtggtggacttgagcaacattcagtgtgttttcagttgacctcgagtttctcttccttgaacataaggactttcaactcaaaat

SEQ ID NO: 270673 - DNA, 201 bp, Homo sapiens
accttcaaaattactaatgaagagttggcctttctccatttcagattgatatcagtaaatgccattatttagtggatttggacaccatgagagaaacaccycgggagccaaaatattcatccaataaagaagaatggatcagcttggcctatagaccattccttgatgcttctaggtatgtggctttaatcctatgggata

SEQ ID NO: 270674 - DNA, 201 bp, Homo sapiens
aagttggactggggaatcaggagggtactgctgtttttcataataagcttcttgtactaagtttttttttgtttttttttttaaactctggatatattgtktattttgtcatccaggctgagtgcagtggtacagtcacagctcactgcagcctcgacctccctgactcaaacaatcctcccacctcagcctctcaagtag

SEQ ID NO: 270675 - DNA, 201 bp, Homo sapiens
ttgtactaagtttttttttgtttttttttttaaactctggatatattgtttattttgtcatccaggctgagtgcagtggtacagtcacagctcactgcagyctcgacctccctgactcaaacaatcctcccacctcagcctctcaagtagctgggactatggacctgcaccaccatacccagctaattttttatttttttg

SEQ ID NO: 270676 - DNA, 201 bp, Homo sapiens
agattgttcttgatcgtcccacggatattcacataaagccggctttgtgcccagacttgggctggtctgcacggtttaagttaggaagagtttttctgttycatgtcttgaggcatcctcctgtctatattttgcgcccccaaactatctttgccaggtatcgatgtacgtttcggtgtggactgcacccagctggcagat

SEQ ID NO: 270677 - DNA, 201 bp, Homo sapiens
agtgattactgtaaagggcaaattagccagaagcatttgttccagctattgctgtgtaacagtcatccatacttagtggcgtaaaacaacaatagttgatkattgtttcttctcgtggttctgggagttgatgggctcaactggccagttcttactcaggatctgtaatgcattagccatcagatagtggctggggctgga

SEQ ID NO: 270678 - DNA, 201 bp, Homo sapiens
aaatgcctcgtcatctcattagtgacacacatgagtggaccatttctgtaagaacagattcccactgttcctacctatgattcagcaaaactacagccaasggaatgggcttggcggagtcattgggaaaagaagaccctgtcgagcttgactctagtctggcatggtagagagacatgagaaatgtagaataagcaggag

SEQ ID NO: 270679 - DNA, 201 bp, Homo sapiens
actcatcagcctccagaactgtaaggaagtaaatttcttttctttataaattatcctgtctcagatattctgttatagcaacacagattggactaagacarttgctcttaagtgtgattcttctgtttatttcctttggattctgtaatccctttcccaatagcaggaatgcagtcatggatctgaatagagtcatatatt

SEQ ID NO: 270680 - DNA, 201 bp, Homo sapiens
cacatgttgcccaatgtacgcgactataagtggttgagcatatcaaggggaaagatgctagaatgtaaatgggacaagcagatgaaaacaaaatgggagakgcctgaatagctcaaactaagttccttatttttatttttatttgagacagggtctcactgtgtcgcccaggctggagtgcagcggcacgaccacagccca

SEQ ID NO: 270681 - DNA, 201 bp, Homo sapiens
acaattcaaaatgccccagttatgcttagtatattaaagcttttgatgataaaataatctagaacagcagctggaatgttagaaatgaagaattcaagccwgcttgttcttttggttaaaaagaaaatcacaggccgtgtgcagtgactcatacctgtaatcctagcactttgggaggccaaggtgggaggattgcttgag

SEQ ID NO: 270682 - DNA, 201 bp, Homo sapiens
tttatacctgcagagcaggcttcatgctggaatggctatggcccttcctgccttttaaatttcctgtggcttacagtgcgacattaatgagcagtataatwaaagtgagaatctcatcttactcatctctggctctcactaactgttctcccttccaggatatcacgggccccttgatttgtatccagaattttaccgaat

SEQ ID NO: 270683 - DNA, 201 bp, Homo sapiens
taagctggtcatagttttgaacagcgtggtgttggaagttgtccagcatcctggtgtggctggtcaccattctttccttccgcaaatactttttgactgcytgagatatgccaggtactgtaccaggcaccaggtgtattgtgcttataaagacagattcagttcttgccttcacagagcttacaaggttcagctataaga

SEQ ID NO: 270684 - DNA, 201 bp, Homo sapiens
caagtagctaggactacaagtgcgagccaccacactgagccaatttttaaaaaaaatttttttgtagagacgagctgtcactatgttgctcagattgggcmttgatatctttctaagacctttactttaaatggaatttgcttagggatgatatgataaatgaagcctaatctgactgatacagttgcatattaattagtt

SEQ ID NO: 270685 - DNA, 201 bp, Homo sapiens
aagacctttactttaaatggaatttgcttagggatgatatgataaatgaagcctaatctgactgatacagttgcatattaattagttaccacccacatccstggtaggccttgtacccgacaccaaatctagataaccagacctgtagtgtgcctggccagaaaaagccacgttgaggtcaagtattaaaatgtcatactg

SEQ ID NO: 270686 - DNA, 201 bp, Homo sapiens
tttggacatatagtgaataaaacaaagatctttctcctagtgaagcttactgtttggaggtgggtagggaagacataatatacaagaaaataagttatatmgtatattagaggatgataaatgcaaggaaaaaatgtattgggttaagaggagcattgagagttccactagagctgggggttacactttgagctagggtgg

SEQ ID NO: 270687 - DNA, 201 bp, Homo sapiens
gaactcaacctagaatcagaccagccaaagcttacctatggctgaatgagtgtgcctctcccccacaagagcctgaatactcttatctgagtggagagagyataggcaacattgtctgaagacttggatgtttgttcctccaaagctctgtaaatttttaggattgcaattgctgttctctaccctgaagggaccttcaaa

SEQ ID NO: 270688 - DNA, 201 bp, Homo sapiens
aaaggctgtggcataaggaagaaacaggaggccagtgaggctggagctgagcaagagtgaagaatagcaggtggtgtggtcagagtgcagtaggggtgagwgtgcaggttataaagagctttgtaggctattgaaaggcctttactctcaattaaatggggagccactgtagggttttgagcagagacttgatataacttt

SEQ ID NO: 270689 - DNA, 201 bp, Homo sapiens
gatcaaatttatttcaacttcccgcattgtggacgcaaagctggcgtagctaagaacagggaactgcttgccaaatttttccaaaggtgaggaaaggagcrccctcacaaggaaaatgtttaagatgtccataacatagttactgtacccaaacataaggcacacgtgcaagctactatgatatgtttagaagagactata

SEQ ID NO: 270690 - DNA, 201 bp, Homo sapiens
agatttggttatggttagacaagttgcttttcctgcttagcgtaccttggaatattggatgaataaaatgaaatgatgtgctacatgtttattaaatgctrcttatacacttacctacccagccctcagcatttgacctcccgcctgaatgtttgcattatcactttgaacttctgtgtcagctgtttagaatttaccata

SEQ ID NO: 270691 - DNA, 201 bp, Homo sapiens; identical to SEQ ID NO: 53603

SEQ ID NO: 270692 - DNA, 201 bp, Homo sapiens
cactacgttgatagccatgactggatggtatatggacaagacttccattgctgtgctgggagtagcagctggggctatcttaggctggccattcagtgcasctcttgggtaagaaactaacagttctcctcccatatatcgctgggcatatagtaaatcttaatgttggattagctccatattgtctgcatagaatctgaa

SEQ ID NO: 270693 - DNA, 201 bp, Homo sapiens
cagttttatttaaatgaatcatctcatttaatcctcattataactctttgaggtaagtgatgttatctttattatcagaagaagaaaatgaggtataagaraaaagattgtgagtcactcagccagtctgtggtagaacccaggcctgaatctaggccggctgactttgaactccttttctaataaccttagttgttcttg

SEQ ID NO: 270694 - DNA, 201 bp, Homo sapiens
tgtgcacctgttgtcccagctacttaggaggctgaggtagtaggatcacttgagcctggggaggtcgagactgcagtgagttttgttttttattttttttwgagtcagagtctcgctctgtctcccagcctggagtgcagtggcgtgatcttggctcacagactgcagtgagttgtgatttgcactactacactccagccc

SEQ ID NO: 270695 - DNA, 201 bp, Homo sapiens
gtgtgcacctgttgtcccagctacttaggaggctgaggtagtaggatcacttgagcctggggaggtcgagactgcagtgagttttgttttttatttttttwtgagtcagagtctcgctctgtctcccagcctggagtgcagtggcgtgatcttggctcacagactgcagtgagttgtgatttgcactactacactccagcc

SEQ ID NO: 270696 - DNA, 201 bp, Homo sapiens
tttatcagtagttgtctgtttttattgctgaatactgttccattgtttaatccttcactaactgatggacatttcaatcatttatactttttggctattargaataatgctgctatgaaccttctccacacatctttgtgtaggggcttgggctttagttaagaaagttcaacacagcctgaaggaacaagggaaccgaag

SEQ ID NO: 270697 - DNA, 201 bp, Homo sapiens
tgatatcaagcaatcctaccacctcagcctcccgagtaatgaggattacaggtgcacaccaccatacctggcttgtgtgtgtgtgtgtgtgtgtgtgtgtycgcgcgtgtttggagacagggtctcactatgttcccaggctggtcttgaacccctggccttaagtgatcctcctaccttagcttcccaaaggattacagg

SEQ ID NO: 270698 - DNA, 201 bp, Homo sapiens; identical to SEQ ID NO: 53636

SEQ ID NO: 270699 - DNA, 201 bp, Homo sapiens
tgcctcagctaccgagtagctgggattacaggtgtgtgccaccatgcctggctaattttttgtatttttagtagagacagggtttcaccatgttggccagsctggtctcgaactcctgacctcatgtgatccacctgccttggcctcccaaagtgctgggattataggcgtgagccactgtgcctgggcatcttttttgtt

SEQ ID NO: 270700 - DNA, 201 bp, Homo sapiens
ccctgcatttcaaatggccactacatttcttttgccaacagaaggaaacaaacaaacaaaaaagacaaagttagattacctgggaaggcaagggtttgggstgcacgatattcctcaggtcatatctttcctggttccagttgcccatcagggtacggtttgaataggtattctcattagtggtgcatcgccatccatact

SEQ ID NO: 270701 - DNA, 201 bp, Homo sapiens
agtatcttcttcagtgaggtgtttgttaagtctttgggcattttttaatccggttgttcattttcttagtgttgggttttttgtttgtttttgagacaggktctcgctctgtcacccaagctggagtacagtggtgtagtcatagcttactgtaacctctaactcctgggctcaagtagttctctcgcctcagcccccgaa

SEQ ID NO: 270702 - DNA, 201 bp, Homo sapiens
agcttataggagtttgctctattttgcatctttctgttctaccctttacccttcaccttatttgtgcagtgtagatgaaaagagtaacttttttttttttkggacaatgtctcactctgtcacccaggctggagtgtagtggcatgatcacagctcactgcagcctcaacctcctgggcttatggtctcatgccatactac

SEQ ID NO: 270703 - DNA, 201 bp, Homo sapiens
ctgtaatcccaacagtttgggagaccgaggcaggaggattgcttgagcccaggagttcaaggccagcctgggcaaaatagtgagaccctgtctcttggggraaaaaaaaaaaagaaagttgaaaactaaaattgggtccactggaccctgaggttatactaaggactgagttgaccagaaatatacaatgactatattaat

SEQ ID NO: 270704 - DNA, 201 bp, Homo sapiens
aattcacttggactttgaattcctcattgagagtaggaggaaccaccattgtgttcctggcatttaactcattgcttgacatggagctcattcacttgtarttaaactaaattgaattaaactcatatctcatatgtgtgatatccctctctcgctgtcttcagcagtccatccattcatccttccttccatccatccaac

SEQ ID NO: 270705 - DNA, 201 bp, Homo sapiens
tatggaagataagacgactggagtgattactgtaaagggcaaattagccagaagcatttgttccagctattgctgtgtaacagtcatccatacttagtggygtaaaacaacaatagttgattattgtttcttctcgtggttctgggagttgatgggctcaactggccagttcttactcaggatctgtaatgcattagccat

SEQ ID NO: 270706 - DNA, 201 bp, Homo sapiens
ggcacggtggctcatgcctgtaatcccaggactttgggaggccaaggcgagcggatcataggtgaagagattgagaccatcctggccatagtgaaaccccrtctctactaaaaatacaaaaattagctgggcgtggtggtgcatgcctgtagtcccagctactcgggaggctgaagcaggagaatcacttgaacccgggag

SEQ ID NO: 270707 - DNA, 201 bp, Homo sapiens
tatttcatctctgtaaagcttaccagaatcatttgctgatgtgacccctaatccttctatttgtcacataaaagaagcccaaatgagggtccgaagagcakggacgaaaactctctcgaacattggcatcctctccacaggactgatgaatgggacatagagtacctttatatctaagtagctgtgagatgggaaaaaaga

SEQ ID NO: 270708 - DNA, 201 bp, Homo sapiens
aaaatctaaccctgctttttttatggtttttctcagatcatttgttctttcttccattgtctgtctgtccacccatcactcatctccagttagcaaatatytattgaacattgccaggcactatgataaatcataggtagacagggataaataacagtacataccaggtcgctgtcctcttggaccttacgatacaatggt

SEQ ID NO: 270709 - DNA, 201 bp, Homo sapiens
ctaaaatctaaccctgctttttttatggtttttctcagatcatttgttctttcttccattgtctgtctgtccacccatcactcatctccagttagcaaatmtttattgaacattgccaggcactatgataaatcataggtagacagggataaataacagtacataccaggtcgctgtcctcttggaccttacgatacaatg

SEQ ID NO: 270710 - DNA, 201 bp, Homo sapiens
gttatgatgttatgccagatgttggccaaggccacaaatcagtggaatgatccactctgtataccagtctcacgatgccacgattccagtttgtgcctcastaaacttcctagtcattacacataatgtatttttggaggttgctccatatagtcaaaatcatgaatatttattgaacatcaagggtctattgaacatgcc

SEQ ID NO: 270711 - DNA, 201 bp, Homo sapiens
gttgttgtttctttttttttttttttttttgagatggagtcttactctgtcacacacgctggagtgcagtggcacactcttgactcactgcaacctccacytcccaggttcaagcgattctgctgcctcagcctcccgagtagctgggattacaggcacccaccaccatgcccagctcattttggtatttttagtagagac

SEQ ID NO: 270712 - DNA, 201 bp, Homo sapiens
cagccttaacaaaaaattttttttttgagacggggtctcgctctttctcccagtctggagtgcagtagcacgacctcggccccaaagtgctaggattacasgcgtaagccaccacacctggcccttaacaaatttttttgagagcctgcaatgttctaggtgatttggacatatagtgaataaaacaaagatctttctcct

SEQ ID NO: 270713 - DNA, 201 bp, Homo sapiens
ggatataccacattttaatggtatggatataccacatgaatctatctgttgatgggcatttgtcaataaaattctatcctttttttttttttttttttgaracagagtcttactctgttgcccaggctggagtgcagtggtgtaatcttggctcactgcaacctccacctcccaggttcaaacaattctcctgcctcagcc

SEQ ID NO: 270714 - DNA, 201 bp, Homo sapiens
ccgggagtccgtggaggccatggcccctcggcgcctcctgttggttggggaggggaatttctccttcgccgccgctctgagcgaaaccctggatcagagcrctcaacttaccgccacctgcctccagcgcccggccgagttggctcgggatccactggcctgggagaatctgcagtgcctgcgcgagcgaggtagcgagcc

SEQ ID NO: 270715 - DNA, 201 bp, Homo sapiens
agtggagtggagggaaaaaaagtaaagctagtgctgcctttgaggattgtaaccgtaaattccgtaaattggtctttatatgggtttgggcctgaattcaratcacctatgtggtccttcaagccctaagctgagaatttactttaatatattttatttattttattttatttttgagactgtcacccaggctggagtgca

SEQ ID NO: 270716 - DNA, 201 bp, Homo sapiens
aaacttgatttctccctaaatcctcatgaccaatcccattctcttccatctcgctcttgtgcttcttttgtgtagcttagcatgggaagagtgggctgtgsactctcattcccatgaggcataggatcatcagtgttattccaacaaagaacattatatgtcaagcaccgtaataggtgttaaaggcatccactaatgatt

SEQ ID NO: 270717 - DNA, 201 bp, Homo sapiens
accagtctcacgatgccacgattccagtttgtgcctcagtaaacttcctagtcattacacataatgtatttttggaggttgctccatatagtcaaaatcaygaatatttattgaacatcaagggtctattgaacatgcctgctgaaagtaaaatatcatactggtcacatggataatgctgattcagcaaattctgtgtaa

SEQ ID NO: 270718 - DNA, 201 bp, Homo sapiens
aggtagagagagaagagaaaaacagaaagagaggagaggagaagagaagagaggagaaggaagacaggacaagatgtgggccaggcatggtggctcatgcstgcagtcccactatttgggaggctgaggccacaggattgcttgaagctttaagaccatcctgggcaacatagtgagactctgtctctataaataataata

SEQ ID NO: 270719 - DNA, 201 bp, Homo sapiens
accaatttgatttccttttttcaataacaatacaatataacaattcaaaatgccccagttatgcttagtatattaaagcttttgatgataaaataatctakaacagcagctggaatgttagaaatgaagaattcaagccagcttgttcttttggttaaaaagaaaatcacaggccgtgtgcagtgactcatacctgtaatc

SEQ ID NO: 270720 - DNA, 201 bp, Homo sapiens
atttcttagaaacctggatgtgaaactagtcaatattaagatcttatacacatcctgagtgatgcccaatttaaggctttgaatagctattcatgtaagtkgacttttctgtgcatttgtatcggggaggatccagttcaggttgatgtcctgggaaccagtgaggctctcgcttaaatcctgagggaagaaaaaaaaagg

SEQ ID NO: 270721 - DNA, 201 bp, Homo sapiens
tgtcgcttctgtcgtaaataagggtctgcatgtacctgcatctgatctaggctctttgttctatttcattggtctgttgatctattcctcactgtattaawttctttttttttttttttttttttttgagacagagtcttgctctgtcaccaggctggagtgcagtggtgcaatcttggctcactgcagccactgcctccg

SEQ ID NO: 270722 - DNA, 201 bp, Homo sapiens
tgaatgtttatatttcgccaattctcctgaaatacaagtgcttctttacaaaagcattttagaagggtagcttctaaaaagagagaaagggtacctttatkgaatattcctattgtgacttgcttttagagggtcggacctagcccaggaggccttctgaacaagtttgggtcagaaagcctctcctccaggtgtgaggag

SEQ ID NO: 270723 - DNA, 201 bp, Homo sapiens
tatcacccttcaaatacattcaacaaattcaatactcaaaagtgtaaaatcatagtgcccaacaactaatcaaaactactaaattgtgaagaggcaagaaratgtaacctaaaaccaagaagatttattttgatatcatttggtggatactgctagttcattgcttactggggactgtgaatggttaacattgtaatcctt

SEQ ID NO: 270724 - DNA, 201 bp, Homo sapiens
atctagtattgtgcttgttgttagagtttagatctcttgggagagctaaggagtatattcttctctccttttgatgcctttatggcattggagaaagtgtraatacaagagtagaaacattctatggagtgtcctagggcatactcctaaatttgagatcaagataacactaaaactaaatatgttgttttgttctaatat

SEQ ID NO: 270725 - DNA, 201 bp, Homo sapiens
ttgagtggttgtctctgggaagttggactggggaatcaggagggtactgctgtttttcataataagcttcttgtactaagtttttttttgtttttttttttaaactctggatatattgtttattttgtcatccaggctgagtgcagtggtacagtcacagctcactgcagcctcgacctccctgactcaaacaatcctccc

SEQ ID NO: 270726 - DNA, 201 bp, Homo sapiens
ctgccagccttggcctcccaaagtgctgggattacaaacgtgagccaccacgtccggactcatctcttatctttaggcaccttttttttttttttttggakacagagtctctctctgtcacccaggccagagtgcagtggcataatctcagctcactgcaacctccacctccctggttcaagggatttttgtgcctcagct

SEQ ID NO: 270727 - DNA, 201 bp, Homo sapiens
atgtagcctttgctttggctctcctagtcctaccactgacttctcttatggaatacctgctgcagagatttcatggtgagtggcataagagatggtaggtrttttgggaggaaagagcaagtaatggtgtataccaagaactgaaggaaaatcctacttactttattttccacattcttcctatggaaatggttggcttac

SEQ ID NO: 270728 - DNA, 201 bp, Homo sapiens
ataagacaaagtagaagtaggtaagattagtcataaatagttgatgctgggtaatgatacatgggagttcattagactagcctgtctacttttgttttacrtaaaattctccataataattttaaaaagttacgtttgtttttgtagtcctcaagaggggatgttcactaaggtcacagcaaagttgcactatacgactct

SEQ ID NO: 270729 - DNA, 201 bp, Homo sapiens
aacctaacaaaaactcctcccagcatttttgtatatcatataccaaggtttgttatagttgtaataataagtatacatgtaactttatatccccccccccctttttttttttttgagacggaatcttgctctgtcgcccaggctggatggagtgcagtggcgcaatctcggctcactgcaagctctgcctctcgggttcac

SEQ ID NO: 270730 - DNA, 201 bp, Homo sapiens
gtgctttgatgtcccttgccctttttgtcctttctatctagatttaggtcttctgattagcaggtccttcctgacatgctttttttttttttttttttttkgcttttgaacaggttatctgggaacaaagcaggacaagtctgggcacctgaaggatctactgctttcaagtgtctgctttcagcaaggttatgtgctgct

SEQ ID NO: 270731 - DNA, 201 bp, Homo sapiens
gagaaaggagcttaagggatgaggtgataagagatttgaggagaaagaaggtgtgaaataattgaggagagcgagagacacagaagctacagaaatatagygtgattggaagacaggatccagaatccgttggagccttaaacggggccatgtagttgctttttctcttcttcacttttgtatagttacagcttcactgtg

SEQ ID NO: 270732 - DNA, 201 bp, Homo sapiens
tcaaattcttggcctcaagctatcttcccactttggcctcccaaggtactaggattacaggtgtgagccaccatgcccagcctgttcttcttttttaagartgccttggctattcttgtctttctgcctttccatacacattttagaatccgcttgttgagtttcaaaaaagtctgttaggattttgattgacattatatt

SEQ ID NO: 270733 - DNA, 201 bp, Homo sapiens
tataccaatttacagtgttattgacaataaatgagagtggttcatgtttatgagtttttctagctcatatctgtgacttctgttttctttttctgggtttyttttagattcttgtgttttactttttgcgatgtcttctggcttttgtgagctgtatttgtgaactttacttttacaagtgagtataaaaactttgcttct

SEQ ID NO: 270734 - DNA, 201 bp, Homo sapiens
acaggcctgagccaccgtgcctggccattaacttctccttgactggggtaggtgcttcctcttcctgttcattttatttataggagccctgctttgtctcrtgtctcttctccaaacctcctttctctatcaaagcccttgatagagttcactgttgaagtgaagtgaatcttacagagcacagggcactgccagcgtcct

SEQ ID NO: 270735 - DNA, 201 bp, Homo sapiens
gtttttgagacagagtttcagttttgttgcccaggctggagggcaatggtgtgatctcggctcactgcaatctccgcctcccgggttcaagcgattctccygcctcagcctcctgagtagctgggattacaggaatgtgccaccgtgcccagctaatttgttgtatttttagtagagacgaggtttctccatgttggtcag

SEQ ID NO: 270736 - DNA, 201 bp, Homo sapiens
tagcatgggcaacagagcgagaccctgtctcaaaataaataaataaaaataagtataatttatctttgttctttggaagactctaaaaagaataaaattaygaactaccaatcctcccaaatagtaaggaattgctacaaaaagaaagtaaaaacctgggacaggcgaggtcgcttgcgcctgtaatcccaacagtttggg

SEQ ID NO: 270737 - DNA, 201 bp, Homo sapiens
gtaatagcataggtttaagccttctgcgttttcatctctctcactaatgataacaaaatctcatagacagactcaataggccctgccaattaattgattcrgtctctaaaaatacttgcttattttaataatgacagacttcatattggtgtctattttgccaggagtcaagataagtcctttcatgtagaaggtgctttg

SEQ ID NO: 270738 - DNA, 201 bp, Homo sapiens
aaaactattttctgctctgttttaggtgcctgtggtggtcattgacagctactattatgggaagttggtgattgcaccactcaacattgttttgtataatrtctttactcctcatggacctgatctttatggtaaggctttgtgaaatttgggcaagtgttaggagatagcttaatttgcctgaacttcagcattttaatt

SEQ ID NO: 270739 - DNA, 201 bp, Homo sapiens
gcagagcttgcagtgagccgaaactgcacgactgcactccagcctgggcgacagagggagaccctgtctcaaaaaaaaaaagaaagaaagaaagaaagaaacattgaataaattgcttttgagcattaatcttgtttcatcatagtacttactgtctaattaggctgcagacacacaaatagataattacaggacagtgtt

SEQ ID NO: 270740 - DNA, 201 bp, Homo sapiens
atgacagacttcatattggtgtctattttgccaggagtcaagataagtcctttcatgtagaaggtgctttgaaccatatcttcaccaggagcttacctttygaaggttctcaacccagaatcttcaggatcaaactgggtaaccagtggttttcctttccagaaccagaagcacttgtaggaaagttgaacaggtaaccag

SEQ ID NO: 270741 - DNA, 201 bp, Homo sapiens
ggcagagcttgcagtgagccgaaactgcacgactgcactccagcctgggcgacagagggagaccctgtctcaaaaaaaaaaagaaagaaagaaagaaagaaacattgaataaattgcttttgagcattaatcttgtttcatcatagtacttactgtctaattaggctgcagacacacaaatagataattacaggacagtgt

SEQ ID NO: 270742 - DNA, 201 bp, Homo sapiens
tgtttgtttttgagatggagtctcactctgtcgccaggctggagtgcagtggcacgatctcggctcactgcaacctccgactcccaggttcaagtaattcycttgcctcagcctcccgagtagctggggttacagttgcccgccaccatgcctggctaatttttttgtatttttagtagagatggggtttcaccatgttgg

SEQ ID NO: 270743 - DNA, 201 bp, Homo sapiens
aggcagagcttgcagtgagccgaaactgcacgactgcactccagcctgggcgacagagggagaccctgtctcaaaaaaaaaaagaaagaaagaaagaaagaaacattgaataaattgcttttgagcattaatcttgtttcatcatagtacttactgtctaattaggctgcagacacacaaatagataattacaggacagtg

SEQ ID NO: 270744 - DNA, 201 bp, Homo sapiens
tattatctcttcatggacctgttcgtgaatttctctgaagtgtacactcaggagtgagatcccacaagtaggcccattttttttgtttgtttttgagatgragtctcactctgtcgccaggctggagtgcagtggcacgatctcggctcactgcaacctccgactcccaggttcaagtaattcccttgcctcagcctcccg

SEQ ID NO: 270745 - DNA, 201 bp, Homo sapiens
gaggcagagcttgcagtgagccgaaactgcacgactgcactccagcctgggcgacagagggagaccctgtctcaaaaaaaaaaagaaagaaagaaagaaagaaacattgaataaattgcttttgagcattaatcttgtttcatcatagtacttactgtctaattaggctgcagacacacaaatagataattacaggacagt

SEQ ID NO: 270746 - DNA, 201 bp, Homo sapiens
tgggggcactttctaggctagttagctgggatgtaaagtgtgcataggaaagtagtgggagataagattggaacggtaagttggggctggagttcatgaakaccaaatgctagaataaggagtttgtactttatttggtaggcaataggaaaacatccggtggttttttattaaggaagtgccccagagtagtgctttgga

SEQ ID NO: 270747 - DNA, 201 bp, Homo sapiens
gcacctggcctcatttctggtttttttttttgaacttgtcaaaggaaagataataaagggtgaagggctcagcagaaaactaacaatgtgctatgcagagsgtttttatttccatttggctatctagtatcacttcaaattttacatgttcaacacagaattcttcctcttctctaatcctgttacatcactgatgtgcac

SEQ ID NO: 270748 - DNA, 201 bp, Homo sapiens
ttaggcagttgttccttgatggcaggatttgtgtgcctttacctcatctttgaatttggtaaaagaaaaaaatttttgtctgatttttttttttttttttttttttttttttttttttgagacagtatctcgctctgtcacccgggctggagtgcagtggtgcgatctctgctcactgcaacctctgcctcccggattcaa

SEQ ID NO: 270749 - DNA, 201 bp, Homo sapiens
atgaatttgagatgagtgatccctgtggagatgctattgtgttagtcctacgtagacagggagggacctgcattagacttaaatgaaaaggaggagatggrtatatgagatacagttaggctgggtgtagtggctcacgcctataatcccagcattctgggaggctgaggtaagtggatcacttgaggccaggagttccag

SEQ ID NO: 270750 - DNA, 201 bp, Homo sapiens
ttgttcttttccccccaagtctgttatgtaaagccactgcaaggttttcagacaaaagagaggtatgattgcatttacattttagaatgatcagaaaggtrgcacctgcagaaagtgacaaaatactgtccctcccttccctatccggtatctcatttccatttttttgtttgtttgtttgtttggtttgtttttgagacg

SEQ ID NO: 270751 - DNA, 201 bp, Homo sapiens
agagtcattgaacttcatttttttaaaaaagaatatcactttgctgtcctttctaatatagcatttccccaattatgtacctgtttattgacattttatartgtaggtaaatttttaatcagtttttaattgatacctaattaacctcgagctcttgtcctcctgccttttttcacttctttactcttgcagcattccttc

SEQ ID NO: 270752 - DNA, 201 bp, Homo sapiens
ttggggttctgctatgaagcaggttaagattatatctatctgtactcctgtcaatttaagtcttgtcactagccatgtccatcatttgcctgtgccattttgccaatagaaccaacagattgaataaggagatttaaagtaagaatatgaatgagatttacttgagtcttctggaattttgggaatattatcattctaggt

SEQ ID NO: 270753 - DNA, 201 bp, Homo sapiens
ggctgaggcaggaggttccattgaacactggagttcaaggatacagtgagctatgaccatgccactgcactccagcctgagcgacagagagtatgactctrtctcggagtgggaggaggaggggaagaaaggaaacgaaaggaaaccaaccaaccaaaaaaacggaatttatcattaacagattcttattgaaataacttc

SEQ ID NO: 270754 - DNA, 201 bp, Homo sapiens
gtttcaccatgttggtcaggctgttctcaaactcctgaccacgtgatccacccgcctcagtctcccaaagtgctgggattacaggtgtgagccaccgcacrtggcctcttttcttttcaagtgcaaggtcttgctcttcacctaggcaggttagagtgcagtggcacaatcgtagctcactgcagccttgaattcctgggc

SEQ ID NO: 270755 - DNA, 201 bp, Homo sapiens
gcactccagcctgggcaacagagcgagactctgtctcaaaaaacagagatgggggctcattatgtcaccgaggctggtatttaactcctaggctcaagcgrtcctctcacctcgccttccaaagtgttgggattacaggcgtgagccactgggcctggccagtaacatgttttcacttttgtattctaagcggatgattta

SEQ ID NO: 270756 - DNA, 201 bp, Homo sapiens
taactgaatacttcacatctcactatgtagatttctttaatcactttctatttgttttttcatttaaataggggagctgagaggtggttttttttttttttgagaatggagaatgctgaaaagtgacggaaaagagggttggagggaggtaggaatggctagagttagaagcaggtggatgggacagccctgatgaagaaa

SEQ ID NO: 270757 - DNA, 201 bp, Homo sapiens
tggtgggtcgtgggtcagcggggcctgactgaaaacttcttgcttttatttattgttctcttctttttctttttttaatttttatttttcaatagtttttrgggtacaggtgggttttggttacatggataagttctttagtggtgatttctgagattttgatgcacccatcacctgtagctcctgatattaaatctgaag

SEQ ID NO: 270758 - DNA, 201 bp, Homo sapiens
ataagctccacctcccaggttcatgccattctcctgcctcagcctcccgagtagctgggactacaggcacctgccaccacgcctggctaatttttttttttgtatttttagtagagacgaggtttcaccgtgttagccaggatggtctcaatctcccggcctcgtgatctgcctgcgtcggcctcccaaagtgctgggatt

SEQ ID NO: 270759 - DNA, 201 bp, Homo sapiens
aagtggaggttagcaacacacctgtggccccaaaggacaaccatcttgttaactattgattccagtgacctgactccctgcaagtcatcgcctgtaacatktgtaataaaggtcttctgacatgaatactggaatctgggtgctctgggctagtcaaagtctatttcaaagtctaatcaaagtcacatttgctccctgtgt

SEQ ID NO: 270760 - DNA, 201 bp, Homo sapiens; identical to SEQ ID NO: 53606

SEQ ID NO: 270761 - DNA, 201 bp, Homo sapiens
ccagcgcccggccgagttggctcgggatccactggcctgggagaatctgcagtgcctgcgcgagcgaggtagcgagcccgcccctctgcgaaaccccgccyagcggccggcgcgtcccaaagtggaaagggtgggggcgtggggatgtaacccacgtggagattgttcttgatcgtcccacggatattcacataaagccgg

SEQ ID NO: 270762 - DNA, 201 bp, Homo sapiens
caggggttggggatgatctccaaggggctctggcttttggtgctgctctggggacagtgccaagtaggatgtttgactggggcagtacacctgtcaaacastaatgcaggtgtgttaaggtgagctcaaggaggacagaagcctcccgtggagcagaaggggaaaagcccacttgatcttgtacaaatacagagcatgaaa

SEQ ID NO: 270763 - DNA, 201 bp, Homo sapiens
ctcgggtatcaaggcaagcagattcaaattgctgtaatatatacagtgcaattagattagagtctactaagaatttaattggagaatgttcaaaatacttytctaaagttaatttttttagtattcattatgttggcatttagaaattaattgatgtttccatgatctataatgattgaatgaacaaaaatttttacctgt

SEQ ID NO: 270764 - DNA, 201 bp, Homo sapiens
gccttcaggcctcttcttaagtcattttagtcatatttaatactatctttgctactctttccacaaattatatcttgattacttcaaaaaaatagatgtgrtttaccaatttacaagctccaaggaacgctttttgttagaaacctaggactaaagaggatgccgcagtgcacaaggcaagtacgttattaaactcttcca

SEQ ID NO: 270765 - DNA, 201 bp, Homo sapiens
tacaggtgtgagccaccgcgcccggctgtatatattattttgataaacctaaaggtgaatttagaaaaggacataagtcttgccctcagagtctagtagargaaacaaacttaaaatgttattaaacagtgtactgagtgccataatgtgcatagagaaggtgagaaaactcttcgtacttcagcctcacataagaggtag

SEQ ID NO: 270766 - DNA, 201 bp, Homo sapiens
ttacatggttagaattgtataattgggttggtacctaaaaaaacaggaaggagaggccaggtgcggtggttcacgcctgtaatcccggtactttgggaggycgagacaggcagatcacgaggtcaagagctcgagaccagcctggccaacatggtgaaaccccgtctctactaaaaatacaaaaattagctgggtgtggtg

SEQ ID NO: 270767 - DNA, 201 bp, Homo sapiens
tggagaacagggatcatgtctagctttctcctgtcgtttgtttctaatgtaaattgacagaggttggtatttggcagatttgtgtcctcactggtttcctrtcaagtttgatatgttgcaggaagatggaatacttttcttttagctatgataggtctatttcacacagatgtttccgaattctctgttcagggtcattta

SEQ ID NO: 270768 - DNA, 201 bp, Homo sapiens
gtaaaaacaattcctaattttcttctccgctagctcaatcctcaaagatagtcactgctaatagtttggtatatgtctttccagaaaaattatgctgtgtrtataaatatttgtatacatacctatctacattcttaaaacaaatggaattattctgtatatatataggtattctacatattaaatttatataattgttta

SEQ ID NO: 270769 - DNA, 201 bp, Homo sapiens
tgacattgaatccaagctcagtggaagagtgccacaattgattggtgatgtggaatgtgaacagtgggaagggaaacaaccattggagctttctttatttrccatcacctaacttcaggatagatctgtgtggtgatctaggctctgtagataagacatgtgaccttttcccaagtcagactttttatattgctaaagctc

SEQ ID NO: 270770 - DNA, 201 bp, Homo sapiens
gaaattgagtctttggccaggcacagtagctcacatctttaatctcaggattttgggaggccaaggcagaaggattgcttgaggccagaagtttaagaccmccaacctgggcaagaaagtgagacccccatctctaccaaaaaaaaaaaattagccaggcatggtggcatatgcttgtggtcttagctgcttcagaggctg

SEQ ID NO: 270771 - DNA, 201 bp, Homo sapiens
attgagtctttggccaggcacagtagctcacatctttaatctcaggattttgggaggccaaggcagaaggattgcttgaggccagaagtttaagaccaccmacctgggcaagaaagtgagacccccatctctaccaaaaaaaaaaaattagccaggcatggtggcatatgcttgtggtcttagctgcttcagaggctgagg

SEQ ID NO: 270772 - DNA, 201 bp, Homo sapiens
tttgtaaaaactttttaaaaaaactttttaatctcagagggataagagaagatacagcagccacaaaacaagaacaaagaggcaatgaaagagattatttraagaataagaaagagcccttggatattgaaatttttacctcggaaatgttaaatattcagtaaaggagttagaagatataaattcaaggaactcttctat

SEQ ID NO: 270773 - DNA, 201 bp, Homo sapiens
ttaatctcaggattttgggaggccaaggcagaaggattgcttgaggccagaagtttaagaccaccaacctgggcaagaaagtgagacccccatctctaccmaaaaaaaaaaattagccaggcatggtggcatatgcttgtggtcttagctgcttcagaggctgaggcaggaggattgctctagccgaagagttggaggcca

SEQ ID NO: 270774 - DNA, 201 bp, Homo sapiens
cgctaagagcagggatctagaggggatggttctgttaggagagctaagaaaaggaagggcagaaacgtgaaagtaaatcaattcggcctcattacatgtgktgttgttctcagtggagtatttggaagtcaacagaaatgtttaaggatgggtgagcttttttgaacgttgactttgctttctgtcctagacggattctaa

SEQ ID NO: 270775 - DNA, 201 bp, Homo sapiens
cattatctaccattcattatgttttatctcttgtatacatgtaaagcagtttcaaactctaacctgtatcccctaagaaacaaatttaccacctaaaataytgtttatgtacagtatactgattcattttttttttaaggatgaaatgtctgtgtgttggagataatattgacaattgattgacttatacaagattgtgct

SEQ ID NO: 270776 - DNA, 201 bp, Homo sapiens
ctctctcatttgtcttctgttagattttgaagatgtaactgagtttctggaagaggtcattgaagccttgatattggatgaggaagttagaacatttccasaagtcatgattccagtgtttgatattttattgggccgaataaaagatctagagctctgtcagatccttttgtatgcatatctggatattcttctctattt

SEQ ID NO: 270777 - DNA, 201 bp, Homo sapiens
agaaaagggctcatgaattcatttccactgagatgtaaatattagagtaggctaagccggatatttccaggtttggaattttaaataggcagatagatgawtccttaagccaaggaaggaatctctaattaattttcaagcatccacaggagaccagtatgtctcttctattgtattcactatgtctactttcgttccaga

SEQ ID NO: 270778 - DNA, 201 bp, Homo sapiens
aagtcaacagaaatgtttaaggatgggtgagcttttttgaacgttgactttgctttctgtcctagacggattctaagatacttccgctttaatccgagggraattttaggtggaaatggacttcatggatgagtatccatgccccgagaagcataggacgggatccgtataaacaataatctttgttacgaagcttagcat

SEQ ID NO: 270779 - DNA, 201 bp, Homo sapiens
caggtgcacgccaccatgcctggctaattttttgtgtgttttaagtagagatggggtttctccatgttggtcaggctggtcttgaactcctgacctcatgrtctgcccgccttggcctctcaaagtgctgggatcataagcatgaaccactgtgcccggccttcttgatagtcttaagagcttctctgtcatatgtcctat

SEQ ID NO: 270780 - DNA, 201 bp, Homo sapiens
gggatagtctgactccagaagcccgccgagaaaaggaggctggcctacagatgtttggacagctggcacgtttccataacatcatgtccaatgaaacaatyggtacccttgcctttctcacatcaggtaaggacatgaagtactgcttccccccaaaaaagtaatggccaagatcagcttcacttgggggatcagcccagc

SEQ ID NO: 270781 - DNA, 201 bp, Homo sapiens
gaggccggagcgctatcattgcattatcttttgacttaactttctctagaacgtgccccgggcgggtggatctccctccttcccgcgaatcccttatggarcatggaaggataaaatataaagagtagataacaaataggcagatgccaagaagataagattaatcgtgagtcgtaagcaaaccagttcaatgcatacgtc

SEQ ID NO: 270782 - DNA, 201 bp, Homo sapiens
cattttgtgtcattactgttcatatatttacttgaataaaaatttaaattgacttacatttaaaggagattttacatttattgacttaacgaccatctctwgtaccaacaaaacatttagggttttttttaaccttcattaagtagggtgaaaggaatttaaatgttgtttattagtacagatatacagatgtttggctaa

SEQ ID NO: 270783 - DNA, 201 bp, Homo sapiens
ttctaattttgtcacctgggtagaaataattagcccattttatgtcttagtttcctaagagtcttaaacctagcaaaaaagtgaccatttttattgggaawttttttttcctttcctatattagatagtatactaaaatatgatggcttgctttgctgagtctgtacttttttcatctggagtcctgagattgtccccaat

SEQ ID NO: 270784 - DNA, 201 bp, Homo sapiens; identical to SEQ ID NO: 53655

SEQ ID NO: 270785 - DNA, 201 bp, Homo sapiens
gcttgatcatgtggttatactatgtttaactttttgaggaatcatcaaactgtttttccaaaaagtctggactatttaacattgccatcagcaacgcatasggtttcaatttctccacatctgccaacaattactttcctttttttttatagtagccatcctagtaggtattaagtggtatctcatgattttttttttcat

SEQ ID NO: 270786 - DNA, 201 bp, Homo sapiens
tattgcctatcacttgaaacaatctatagtagtattccttttaatttttggtgatttcatgaaaaagatttaactgtatttctgtagacggtgagaaaccmaaagatatattcagacaaagaactaatatgacaagatatgtttttaagaagatatcactgctaacagtatggaaattgaatgagtgtaagaggagactgg

SEQ ID NO: 270787 - DNA, 201 bp, Homo sapiens
aacaatctatagtagtattccttttaatttttggtgatttcatgaaaaagatttaactgtatttctgtagacggtgagaaaccaaaagatatattcagacmaagaactaatatgacaagatatgtttttaagaagatatcactgctaacagtatggaaattgaatgagtgtaagaggagactggagaccaagacatttacc

SEQ ID NO: 270788 - DNA, 201 bp, Homo sapiens
agaaagtgagacccccatctctaccaaaaaaaaaaaattagccaggcatggtggcatatgcttgtggtcttagctgcttcagaggctgaggcaggaggatkgctctagccgaagagttggaggccacagtgagctatgattgtgcaactgtactccatcctgggtgacagagtgataacctgtttcttaaaaaaaaaagag

SEQ ID NO: 270789 - DNA, 201 bp, Homo sapiens
atgtttttaagaagatatcactgctaacagtatggaaattgaatgagtgtaagaggagactggagaccaagacatttaccctcttttttttttttaacttytttgaggtttggacaaagaaacctgtttgatcccagctgtgcaggagccgaagtttccacagaactacaaccttgtaacagagaaccttgctctgacaga

SEQ ID NO: 270790 - DNA, 201 bp, Homo sapiens
agtgactctaattatgcaaataataccctcctccattctcccttctccatccacttttgaattatggcatttacaacagaactgttgccagatggatgttrtatctgatgtatttcttttcctcctaacatttaaacccatttccagtatgactgccagcagctgagccaacctaaaggtccagagttggggctcaatgct

SEQ ID NO: 270791 - DNA, 201 bp, Homo sapiens
tgtgtaaataaggacagaaaagctagaaggacaaaatgttaaattagcaagatgttaacagtgtttatctctggatggtagtttttgtcttttctgttttktgtttggttttggttttttgcttgtctatattttctgcagtgaaaatgaattacttagttttttaaaaaagtagttccttcaaaatgtttagaaataaaa

SEQ ID NO: 270792 - DNA, 201 bp, Homo sapiens
aactgtattttaatatagccattctatggatttaatatggtattttattatggccttaatttgcatttccctagatactaaccatgctgagtgtcctgtcwtgtgtttattaaccattcatatatttttagtgaaatgtgtatcaaatcttttgcccatttttaagttgacttatttgtttgtcttcttactattgggttg

SEQ ID NO: 270793 - DNA, 201 bp, Homo sapiens
tgaatcccccacttttcctccgctttcttaacctgctaatgaatgatgccatcttccttttggatgaagccatacaggtaaaaaaaaaaaaaaaaaaaaaratttaacttctccataccatcaaatcatcagcagtacatacattttaccttttaatcataatagagcagtccttatgcccctagtaccagacttgaacac

SEQ ID NO: 270794 - DNA, 201 bp, Homo sapiens
tctgacaacaggatagtgttgtatctctgtatggcagttgaaaataggaaaaaaaatacatacatatatgtatgtatatatgtgtgtgtgtgtgtgtgtgttatttttttttttttttttttgagacagagtctggctctgtcacccaggctctgctctggagtgcagtggcacgatctcagctcacggcaacctccatct

SEQ ID NO: 270795 - DNA, 201 bp, Homo sapiens
tgacaacaggatagtgttgtatctctgtatggcagttgaaaataggaaaaaaaatacatacatatatgtatgtatatatgtgtgtgtgtgtgtgtgtgttwtttttttttttttttttttgagacagagtctggctctgtcacccaggctctgctctggagtgcagtggcacgatctcagctcacggcaacctccatctcc

SEQ ID NO: 270796 - DNA, 201 bp, Homo sapiens
ccagaaattgctccccttctcctctctccgaaaagaataatagtgtttttcttttgagagaaggagaagtgtttgcattttccctttattttgtttatttaaaaaaaaaaaaaacactcaggtgcatagctgacttttggcctttcagttagaaagggctgaagaaaaaagaggtaaaggcaagacagataagtgattgat

SEQ ID NO: 270797 - DNA, 201 bp, Homo sapiens
tgaggcaggagaatggtttaaacccaggaggcggaggttgcaatgagccgagatcataccactgcactccagcctggacaacagagcaagactccgtctcaaaaaaaaaaaagaaaaaattacaaagccttgccaaataaaagttgttactccctcctctgggtacctagaataatcagcctctgaatctcttgtgggaat

SEQ ID NO: 270798 - DNA, 201 bp, Homo sapiens; identical to SEQ ID NO: 53654

SEQ ID NO: 270799 - DNA, 201 bp, Homo sapiens
agcagtgaatgaaggtgatgcatgaataaatatttgtgtccagcccacacatctgcttctttcggtctctagtgagttcatcctggttttttgttttgttktgttttgttttccagctgctgtgacttactcgaagcctcgattggccacattttggtactacgccaaggttgagctggttcctcccacccctgctgagat

SEQ ID NO: 270800 - DNA, 201 bp, Homo sapiens
gtttatgttccttgctaccagaatatcactacttctaggtcctctcatttgacaggaatatagatatgtatcagtatagatgtgtgtatgtgtatatacawgcatactaagccatgtatatacatgcatatatgtatatataattatttctgtgtctgtcagtctgtgtatatattaagctaaacctgagtccaactctaa

SEQ ID NO: 270801 - DNA, 201 bp, Homo sapiens
catattacacagtagacctgaccgttggaattcgtgtttcttcagtattattttaagaaatcaggtaaacagtgaaggttagatatagcatgaagcaaagmccatttaatttttagtggaagaaatatcagtatttttaagcctagaaataaatagattgcttaatctatgttaaaaacccacaacatacagctgaactgc

SEQ ID NO: 270802 - DNA, 201 bp, Homo sapiens; identical to SEQ ID NO: 53672

SEQ ID NO: 270803 - DNA, 201 bp, Homo sapiens
cgcccagccagaatttttaaaagacagatgtttgagagaaaaaaaaaaacacctggtagcttttaaatgttgtactttagtgagaccttctctctggattkggcagccttgcatattcattcattcatagtttataaaaatgaataaagcagagtcctcatcctttttgaactcaggctccagaaggcagatatattaact

SEQ ID NO: 270804 - DNA, 201 bp, Homo sapiens
cagagtgagagtccatctcaaaaaaaaaaatcaaaggatgggagcagattttgaggacagaagtttaaaaaaaaaaaaatcgaaggaatttcatcaataaraaaaaaataacaagaaagaataaaaaggtacaaaagatgtgacatgcaacttataaccaaatgattaaaaaatttattctcatcaatcattagagaagtg

SEQ ID NO: 270805 - DNA, 201 bp, Homo sapiens
agatggtgtcactgcactccagcctaggcgacagggcgagaatctgtctcaaaaaaaaaaattaattaaaaaaaagaaaaagaccaagttctactctacaratagagacaaaagtggcaaatattaaggaaatgtttataagggagctaatgagatcaataggaccacaaaagacattagataaagaagattctagaaatg

SEQ ID NO: 270806 - DNA, 201 bp, Homo sapiens
ctatccacaaatcaagccaccgagtccagctggtaggtttgtaaccattttgccaaaaatgtcttgagtttggggacaggaattggaaaatcttaacccamagtattttaaaatgtattgtatttgagaaatgggaaaagaaacaaccacaggtatattacagctattgtgtcatctgccctcttgtgtctaatacctgtc

SEQ ID NO: 270807 - DNA, 201 bp, Homo sapiens
agaatgtatgacttccaaaaacagttctggttctggctattcattattctgtaatttgttttcctctgatttagctgattatgacaggtataagtagaggragaaaacagcaactcagtcatagaaagggacactaagaatagcaatttttaatgccttctcaagatacctgaattgatgcagagcatttttcaaaactac

SEQ ID NO: 270808 - DNA, 201 bp, Homo sapiens
aactatctcttagagctttgtgtctgcttaaaggtatgcccatatccccaaacacagaagatgagggagatagtaattcagaaatactcaaatggaggccrttaatatgaggaaaacaccaagagccttgggtaatctgtctttgaacagtagacactttatgggctttcatgctatttttattacgtttctcttgtaatt

SEQ ID NO: 270809 - DNA, 201 bp, Homo sapiens
cccccggtgagcctgcacaccgtgcttccggcgcggagatgaacttccacatgccccggcgcttgttgatgacgtaacttccggttgctgtgctgagtcgraagtgggaacccttcggccgctgagattctgtcgtgtcgtcgctgctggcacttcaggctctggtaagacaggcaatagcttcaggggacggggtcgttg

SEQ ID NO: 270810 - DNA, 201 bp, Homo sapiens
attcagggtatgtccttggcctctggtgagggcttttgtgctgcctcacaatgtggtggaggaagtcaccaaaggacacataccatgaggacgcatgcaargaggagaaaacctgagaggtgtcctggcttaataagaacccgctctggagggaatttgtccattcctatgagaattaatccagtcttgtgagagcaagaa

SEQ ID NO: 270811 - DNA, 201 bp, Homo sapiens
tcccttgagcccaggagtttgaggctgtagtgtgctataatcacacctgtgaatagccactacactccaggctgagcaaaaaaacaagacccccagctctaaaaaaaaaaaaaaaagaattattgaaagtaaagagctagtgtgtaaaggcatataaaaattcttgtgccctcctttctctctcatttgtcttctgttaga

SEQ ID NO: 270812 - DNA, 201 bp, Homo sapiens
gttactgaaaacagtaagtttcagaatatgtaaaatatgatcatttttgtttaaaaaatgtctgtgtgtgtgtaaataaggacagaaaagctagaaggacmaaatgttaaattagcaagatgttaacagtgtttatctctggatggtagtttttgtcttttctgttttttgtttggttttggttttttgcttgtctatatt

SEQ ID NO: 270813 - DNA, 201 bp, Homo sapiens
ccagtggagtttcatagtttgatccgtatttggatatcaaagaaatgtcaagccattacttattgaatacctactatatgccaggcttgatgataagtgctttttttttttttttaacattatcccattgtcaccattggaaaagtttcactctattatccctgttttatttattttttattttttaattattcttgtttt

SEQ ID NO: 270814 - DNA, 201 bp, Homo sapiens
aattcttagctatatggtgaaacaaaggtttcacaaagtataaaatgcagctgggtgcctctcagctccttcagtgtattatttccttaaccttccctggkggaactgcttacttctcccataaaaacttggctgtctgtagagcaaaacttcccttacctgtgatgggtataggatggacaaggcactgacctaaaggga

SEQ ID NO: 270815 - DNA, 201 bp, Homo sapiens
aatctgtatgaagccacaatttctttttttcctgaaagttcttttgagcttcagccttatgctgagaaataaaggctcatgtcttttacatggtccctcgttttcccagcttagttgactggattttgaataggacctcttaaatgtcacgtcccttcaactgcacctttcttctctgatatatcccatctctggtttctg

SEQ ID NO: 270816 - DNA, 201 bp, Homo sapiens
ggctaacatggtgaaacgccgtctctactaaaaatacaaaaaattagctgggcatggtggtgggcgcctgtagtcccaactacttgggaggctgaggcagsagaatggtttaaacccaggaggcggaggttgcaatgagccgagatcataccactgcactccagcctggacaacagagcaagactccgtctcaaaaaaaaa

SEQ ID NO: 270817 - DNA, 201 bp, Homo sapiens
tcacccaggaggcagaggttgcagtgagcagagataacgccactgcactccatcctgggtgccactgcaccagcctgggcgacagggcaagactgtctccmaaaaaaaaaaaaaaagaaagaaagaaatagacaaagtagctacaaaaactcctgaatcatcttgttctcactctttctaaccccaactcggcatttgact

SEQ ID NO: 270818 - DNA, 201 bp, Homo sapiens
ggcttcattcttaagatgcgacgcccaggtgttctgtttttggcttagaatgttagaacttatggaaataaccctatttccctttctctctttgtcccagwgaccaaacagatccctttaaccgtagtcccctcaccatggaccagatccggccaaacacagaactaaaagaaaaaatccaacggtggcttgcagagagga

SEQ ID NO: 270819 - DNA, 201 bp, Homo sapiens; identical to SEQ ID NO: 53647

SEQ ID NO: 270820 - DNA, 201 bp, Homo sapiens; identical to SEQ ID NO: 53648

SEQ ID NO: 270821 - DNA, 201 bp, Homo sapiens; identical to SEQ ID NO: 53650

SEQ ID NO: 270822 - DNA, 201 bp, Homo sapiens; identical to SEQ ID NO: 53651

SEQ ID NO: 270823 - DNA, 201 bp, Homo sapiens
gatgttcactaattagatgattagcttgttttacatctgaaattatcatcttcttggttacatttattatttttggtagcatgcttggttctctcttaaargggtgtaacatttaacagtatacattttctggcagatgaactcccagctagcccagatgactcggataatagcgtgtcagagagcctggatgaattcgat

SEQ ID NO: 270824 - DNA, 201 bp, Homo sapiens
accgagtccagctggtaggtttgtaaccattttgccaaaaatgtcttgagtttggggacaggaattggaaaatcttaacccaaagtattttaaaatgtatygtatttgagaaatgggaaaagaaacaaccacaggtatattacagctattgtgtcatctgccctcttgtgtctaatacctgtcctttgaacagcctctccc

SEQ ID NO: 270825 - DNA, 201 bp, Homo sapiens
ctttctaaccccaactcggcatttgactcaaagttataatgcactctggcttcattcttaagatgcgacgcccaggtgttctgtttttggcttagaatgtkagaacttatggaaataaccctatttccctttctctctttgtcccagtgaccaaacagatccctttaaccgtagtcccctcaccatggaccagatccggcc

SEQ ID NO: 270826 - DNA, 201 bp, Homo sapiens
aagcagagccagaatgaaaacgtaggtcttttgactccaaatcctacactcttcctttattatgacccagcctgtggagctctagtaatacctttggtatktcaaaagcagtataagcctcagatttttagctcctgacctgatttttcagagtaatcaagaacctgttggctacacagtttgggatattgtctgtgaaga

SEQ ID NO: 270827 - DNA, 201 bp, Homo sapiens
tcatcttgttctcactctttctaaccccaactcggcatttgactcaaagttataatgcactctggcttcattcttaagatgcgacgcccaggtgttctgtktttggcttagaatgttagaacttatggaaataaccctatttccctttctctctttgtcccagtgaccaaacagatccctttaaccgtagtcccctcacca

SEQ ID NO: 270828 - DNA, 201 bp, Homo sapiens
gcagagccagaatgaaaacgtaggtcttttgactccaaatcctacactcttcctttattatgacccagcctgtggagctctagtaatacctttggtatttsaaaagcagtataagcctcagatttttagctcctgacctgatttttcagagtaatcaagaacctgttggctacacagtttgggatattgtctgtgaagaat

SEQ ID NO: 270829 - DNA, 201 bp, Homo sapiens
aaaagaaaaaaaaaaaaatttaagaaacctcaactagaagagaagaatgtgcacatttatgtaagatgtttttatgaaaacgtttatgcacagtgttaccmatagattttaaaagctagggtgttaatgcagaataactttttagaaaaaaaaaaagatgagtagttttcagtcattaatttttatttggattgtctctat

SEQ ID NO: 270830 - DNA, 201 bp, Homo sapiens
agaggtaaaggaataatccccattgaatactgtattgtcctcttgggtatgacttcagcatgtgggccagagttggatcagtctttatttcaatttatatrtgtcatagtatgtctagaagtgaatatcagggacactaaagcttttatatcaatttatatatgtcatagtatgtttagaacactggatatcagatgcact

SEQ ID NO: 270831 - DNA, 201 bp, Homo sapiens
agtctgaatgagatcagcaatcacacagaatagtagatttcacatctaagtttaatcactgatctcagcaccattcaacaaatagtcttttaatgcctacyctatgctggggctatactagacacttgaggcttgatttaggataactttatatatgccataattttctaaaattttctaaagtaaaaatatacagggccc

SEQ ID NO: 270832 - DNA, 201 bp, Homo sapiens
tatgagcaatgttgagcaggtaatattcttacgttcctaatgtgtgcccttagcaaaaattagctatgcggctgaattctgctcactgttctccaacttaygcttgtgtccatatgtccatccctctctctttttttttttttttttttaccagtagaaggccaagtaacctggatgtgcatctctaacattgtggtgttc

SEQ ID NO: 270833 - DNA, 201 bp, Homo sapiens
tagccaggaatttcaaaaccctatatttaacttccctgacttgagatgttcactaattagatgattagcttgttttacatctgaaattatcatcttcttgrttacatttattatttttggtagcatgcttggttctctcttaaaggggtgtaacatttaacagtatacattttctggcagatgaactcccagctagcccag

SEQ ID NO: 270834 - DNA, 201 bp, Homo sapiens
cagtgccacattgttattacaattagtaggtgagttctctctttgacttcaataattctttctacttaacctgttttcttaaaggtattgcaaataaaagyatatcaacagattaatgcattccagctgaacgttttagcctttttagtttcagctatccacaaatcaagccaccgagtccagctggtaggtttgtaacca

SEQ ID NO: 270835 - DNA, 201 bp, Homo sapiens
ttacttgagtcagatttgcagttcaagagtgatgctgtcaagatcagttgtctgtataaaacagaagcattatccttaacctatcatattaaaaccatttyccaggtgatcccagcttgaaaagcgggaatggcatccctagccgttgtgtgtatttggaagaaatggcagtagagctagaagatcaagactggcttgata

SEQ ID NO: 270836 - DNA, 201 bp, Homo sapiens
atttatatgtagctgagaaatatccatccccagccctaagtcatagaagtcccttgtcctcaccccagtgaatgagaactagactgccagcttaattcttkggaaatccataattcttgtcttattatttttcagtgccacattgttattacaattagtaggtgagttctctctttgacttcaataattctttctacttaa

SEQ ID NO: 270837 - DNA, 201 bp, Homo sapiens
ctgcctcagcctcccagggtgctgggattgcaggcatgagccactgcacctggcccacattagcttttgttgatatgatcctgtgaggagtcttgcctcartaaaccaaaggtagaccaaatgttctttttttcttcctttatacccctactcccgctatttctaaggtctctgtccttatagcagttcaagatccttatg

SEQ ID NO: 270838 - DNA, 201 bp, Homo sapiens
agaacttcaaaaaaaatgtaatactttctagcctattttgctgtgtttgagtttggtttgggtattttctttttctttctttctttttttttttttttttycctagaagacagggactcactctgtcgcccaggctggagtgcagtgcagatcacagctcactgcagcctccacctcctaggctcaagcgatcctcccacc

SEQ ID NO: 270839 - DNA, 201 bp, Homo sapiens
tgtctgtcagtctgtgtatatattaagctaaacctgagtccaactctaacccagtactgtgggatttattcttgctgcttttcttgtttacctgtaacatsactcaacctccactgagaaatctagctcccattatctaccattcattatgttttatctcttgtatacatgtaaagcagtttcaaactctaacctgtatcc

SEQ ID NO: 270840 - DNA, 201 bp, Homo sapiens
cccacaatccgatgccaaggccacttcttgccacttcctgcccgcctccagcccgcccctaacaagctagcgcatgcgctgtaggactatttgcgcgccgktccccccggtgagcctgcacaccgtgcttccggcgcggagatgaacttccacatgccccggcgcttgttgatgacgtaacttccggttgctgtgctgagt

SEQ ID NO: 270841 - DNA, 201 bp, Homo sapiens
accactgcattccagcctgggcgacgaagcgaggctaggtctcaaaaaaaaaaaataataatgctggacactgtggctcacgcctgtaatcccagcacttkgggaggccaaggcaggtggattacctgaggtcaggagttagacaccagcctcactaatatggtgaaacctcgtctctactaaaacagaaattagccgggc

SEQ ID NO: 270842 - DNA, 201 bp, Homo sapiens
tggcttgtttttgagaaaatgaagctcacgtgtgtcactgtcactgtcaagggttattaatgacctgtttttttatttttgagatggagtcttgctctgtsattgagcacgctgaattcagctacactgtgaattcactttaactaccagatgttgtatactcagtctcttgcagacctccaacaacaggaagaggaaacc

SEQ ID NO: 270843 - DNA, 201 bp, Homo sapiens
agttagacaccagcctcactaatatggtgaaacctcgtctctactaaaacagaaattagccgggcatggtggcaggcgcctataatcccagctactcgggragctgaggcaggaaaatctctttaacccaggaggcggaggttgcagtgagccaagattgcgccactgcactccagcctggcgacagagcgagactccgtc

SEQ ID NO: 270844 - DNA, 201 bp, Homo sapiens
aatatggtgaaacctcgtctctactaaaacagaaattagccgggcatggtggcaggcgcctataatcccagctactcgggaagctgaggcaggaaaatctytttaacccaggaggcggaggttgcagtgagccaagattgcgccactgcactccagcctggcgacagagcgagactccgtctaaaaaaaaaaaaaaaaaaa

SEQ ID NO: 270845 - DNA, 201 bp, Homo sapiens
gcctctcccactaggtctggatggaggataccttaaagtgaaatgacagaccaggagaataacaacaacatctcaagtaacccctttgctgctctttttgsctccctggctgatgccaaacagtttgcggcaatccaaaaagagcagctgaagcaacaatctggtaagtggaggagccaatagcagcaaataagatgacct

SEQ ID NO: 270846 - DNA, 201 bp, Homo sapiens
ggtgctgtttatgttccttgctaccagaatatcactacttctaggtcctctcatttgacaggaatatagatatgtatcagtatagatgtgtgtatgtgtawatacatgcatactaagccatgtatatacatgcatatatgtatatataattatttctgtgtctgtcagtctgtgtatatattaagctaaacctgagtccaa

SEQ ID NO: 270847 - DNA, 201 bp, Homo sapiens; identical to SEQ ID NO: 53649

SEQ ID NO: 270848 - DNA, 201 bp, Homo sapiens
cagaatatcactacttctaggtcctctcatttgacaggaatatagatatgtatcagtatagatgtgtgtatgtgtatatacatgcatactaagccatgtawatacatgcatatatgtatatataattatttctgtgtctgtcagtctgtgtatatattaagctaaacctgagtccaactctaacccagtactgtgggattt

SEQ ID NO: 270849 - DNA, 201 bp, Homo sapiens
aagcccaggagtttgaagctgcagtgtgctatgatcatgcctgtggatagccactacactccagccttggcaagatagcaagaccccatctcctaaaaatmcatgcaaaaaaaatcagattgtcacctcagctgtgctgatttttactctatttcagggagaaaaagagcattaccaagagaaaatataaacagatggttc

SEQ ID NO: 270850 - DNA, 201 bp, Homo sapiens
tctaggtcctctcatttgacaggaatatagatatgtatcagtatagatgtgtgtatgtgtatatacatgcatactaagccatgtatatacatgcatatatrtatatataattatttctgtgtctgtcagtctgtgtatatattaagctaaacctgagtccaactctaacccagtactgtgggatttattcttgctgctttt

SEQ ID NO: 270851 - DNA, 201 bp, Homo sapiens
gtcctctcatttgacaggaatatagatatgtatcagtatagatgtgtgtatgtgtatatacatgcatactaagccatgtatatacatgcatatatgtatawataattatttctgtgtctgtcagtctgtgtatatattaagctaaacctgagtccaactctaacccagtactgtgggatttattcttgctgcttttcttgt

SEQ ID NO: 270852 - DNA, 201 bp, Homo sapiens
ccacattttggtactacgccaaggttgagctggttcctcccacccctgctgagatccctagagctattcagagcctgaaaaaaatagtcaatagtgctcaractggtagcttcaaacagctcacagttaaggtaaccacgggctaaatgaaaacggatgtgcataacagaaaatgtcttcccttgggatttttctgattgt

SEQ ID NO: 270853 - DNA, 201 bp, Homo sapiens; identical to SEQ ID NO: 53666

SEQ ID NO: 270854 - DNA, 201 bp, Homo sapiens; identical to SEQ ID NO: 53653

SEQ ID NO: 270855 - DNA, 201 bp, Homo sapiens
aacgttttagcctttttagtttcagctatccacaaatcaagccaccgagtccagctggtaggtttgtaaccattttgccaaaaatgtcttgagtttggggwcaggaattggaaaatcttaacccaaagtattttaaaatgtattgtatttgagaaatgggaaaagaaacaaccacaggtatattacagctattgtgtcatc

SEQ ID NO: 270856 - DNA, 201 bp, Homo sapiens
cggagatgaacttccacatgccccggcgcttgttgatgacgtaacttccggttgctgtgctgagtcggaagtgggaacccttcggccgctgagattctgtygtgtcgtcgctgctggcacttcaggctctggtaagacaggcaatagcttcaggggacggggtcgttgactttgcgttgtgatattttctgctggtccaat

SEQ ID NO: 270857 - DNA, 201 bp, Homo sapiens
ggtgttgttctcagtggagtatttggaagtcaacagaaatgtttaaggatgggtgagcttttttgaacgttgactttgctttctgtcctagacggattctragatacttccgctttaatccgagggaaattttaggtggaaatggacttcatggatgagtatccatgccccgagaagcataggacgggatccgtataaaca

SEQ ID NO: 270858 - DNA, 201 bp, Homo sapiens
gagcaaacacttggcgataactctaggcctttagaaactccagggcagattttgttagtagccttaacacactcaaaagcaaatgactacaaagcaaatgrctacacataagcataaactcttcctcttatggcaccgcctttgctgatatttcgctcttgccttactccaggagacccccatcaatttgaacagaagttt

SEQ ID NO: 270859 - DNA, 201 bp, Homo sapiens
ttgcctacgtttatgaaatgtgaatagaaagcagaacttcaaaaaaaatgtaatactttctagcctattttgctgtgtttgagtttggtttgggtattttytttttctttctttcttttttttttttttttttcctagaagacagggactcactctgtcgcccaggctggagtgcagtgcagatcacagctcactgcagcc

SEQ ID NO: 270860 - DNA, 201 bp, Homo sapiens
atcattagagaagtgccaattaaaacaaccattaaattgtttttttacctatgaaatttgtgaagattcaaacaggcactctctcatatactgttgggttkgcatgtaaatcagacagtctctttgagggtaacttggtagtaaatgttaacttttttttttttttttttttgagacgaagtcttgctctgtcaccgaggc

SEQ ID NO: 270861 - DNA, 201 bp, Homo sapiens
aaattagctatgcggctgaattctgctcactgttctccaacttatgcttgtgtccatatgtccatccctctctctttttttttttttttttttaccagtaraaggccaagtaacctggatgtgcatctctaacattgtggtgttcctcttttggaatcttttcatctaccatggccacatgcccaaatctacccatcctct

SEQ ID NO: 270862 - DNA, 201 bp, Homo sapiens; identical to SEQ ID NO: 53696

SEQ ID NO: 270863 - DNA, 201 bp, Homo sapiens
cagcactgtgatgtattattttcaatgaggtgcctttcttaactgaccaaatgctgccttgtttggcccctaaatcaataaaatatgttaaaatttgaagaaaaaaaaaaaaagaccgtaagagaggcacaagggttaggacttgctttataacaacttgcttatgataactaagccactcccacagtaacaaaattaatc

SEQ ID NO: 270864 - DNA, 201 bp, Homo sapiens
aaagatacttgtcttagtccattttttgttactataacagaatacctgacactgggtaatttttaatgaacaaaaatttatttagctcacagtttgggagsctgggaagtccaggagcatagtgccagcatctggcaagggtcatcccatggtagaagggcagaaggtacaagtgagcacaaaggacagagagagaggcac

SEQ ID NO: 270865 - DNA, 201 bp, Homo sapiens; identical to SEQ ID NO: 53698

SEQ ID NO: 270866 - DNA, 201 bp, Homo sapiens
cctgtgaaattaaacaaattatctgtttccaaactataatgatgggacaggcatagaacagatattcccattctaaaagggtaaaataggcaagaacaaaraagcgaaagtccccaagtaagtccaaaacccaacctgaaataacattaaggcttaaagatggagaataatctcctttgacttcgtgtcctgcatcctagg

SEQ ID NO: 270867 - DNA, 201 bp, Homo sapiens
tgaaattaaacaaattatctgtttccaaactataatgatgggacaggcatagaacagatattcccattctaaaagggtaaaataggcaagaacaaaaaagygaaagtccccaagtaagtccaaaacccaacctgaaataacattaaggcttaaagatggagaataatctcctttgacttcgtgtcctgcatcctaggcaca

SEQ ID NO: 270868 - DNA, 201 bp, Homo sapiens
gcactgtgatgtattattttcaatgaggtgcctttcttaactgaccaaatgctgccttgtttggcccctaaatcaataaaatatgttaaaatttgaagaaraaaaaaaaaagaccgtaagagaggcacaagggttaggacttgctttataacaacttgcttatgataactaagccactcccacagtaacaaaattaatcca

SEQ ID NO: 270869 - DNA, 201 bp, Homo sapiens
agaacataagaccaaaagagagggacctgtgaggtgtgcgaactggtggcagtgagagacttcggcggacatggctcccagcgtgccagcggcagaacccragtgtcctaaaggctgtgctgctggggcctcccagggccggtaaaggcacccaggcacccagattggctgaaaacttctgtgtctgccatttagctactg

SEQ ID NO: 270870 - DNA, 201 bp, Homo sapiens; identical to SEQ ID NO: 53701

SEQ ID NO: 270871 - DNA, 201 bp, Homo sapiens; identical to SEQ ID NO: 53702

SEQ ID NO: 270872 - DNA, 201 bp, Homo sapiens
agtcttggggcagttccacccttgtggctttgcagggtatagcccccttctgtctgctttcatgggctggcattgagtgtctgtggctttcccaggtgcayggtgcaagctgttggtggatctacctttctggggtctggaggacggtgatcctcttctcacaagtctactaggcagtgccccagtagggactctgtgtgg

SEQ ID NO: 270873 - DNA, 201 bp, Homo sapiens; identical to SEQ ID NO: 53703

SEQ ID NO: 270874 - DNA, 201 bp, Homo sapiens; identical to SEQ ID NO: 53704

SEQ ID NO: 270875 - DNA, 201 bp, Homo sapiens
tagctagatacagagtgtcgattggtgcattcacaaaccctgagctagacacagggtgctgattggtgtgtttacaaaccttgagctagatacagagtgcygattggtgtatttacaatccctgagctagacataaaggttctccaaggtcccaccagagtagctagatacagtgtcgattggtgcattcacaaaccctga

SEQ ID NO: 270876 - DNA, 201 bp, Homo sapiens; identical to SEQ ID NO: 53705

SEQ ID NO: 270877 - DNA, 201 bp, Homo sapiens
ggacccagaagttcaggccccagcccctcctccctcagacccaggagtccaggcctcagcccctcctccctcagacccaggagtccaggcccccagcccgtcctccctcagacccaggagtccaggcccccagcccctcctccctcagacccaggagtccaggcccccagaccctcctccctcagacccaggagtccaggc

SEQ ID NO: 270878 - DNA, 201 bp, Homo sapiens
gggttttgccatgttgcccaggctggtcttgaaatcctgacctcaggtgatccgcccgccttggcctcccaaagtgctgggattacaggcatgagccaccrcgcccggccatgtactttatgttaaaatgggatcatattctagatcagcattatccagtagaaatttaaatttttaatacagggccaggcacggtggctc

SEQ ID NO: 270879 - DNA, 201 bp, Homo sapiens
tcctccctcagacccaggagtccaggcccccagcccgtcctccctcagacccaggagtccaggcccccagcccctcctccctcagacccaggagtccaggyccccagaccctcctccctcagacccaggagtccaggcccccagcccctcctccctctaaccatctgtgctttctccccagggacttgtacagcaaaagca

SEQ ID NO: 270880 - DNA, 201 bp, Homo sapiens
atctcagtcccccccaccagagtggggcgtgaccacaggaacagccgcctccagtcagcctgccacatgacaccccctcaatgttccaggtctctggacaytatgggcacacgactcctcccagctctgtttcttgtcctcctggtattgggatttggtgagtgtgggcttccggggagggaagccttggggaggggaatg

SEQ ID NO: 270881 - DNA, 201 bp, Homo sapiens
cctcagacccaggagtccaggcccccagaccctcctccctcagacccaggagtccaggcccccagcccctcctccctctaaccatctgtgctttctccccwgggacttgtacagcaaaagcacagcagccatgagcacttacacaggcatttttactgaccaagttctttctgtgctgaagggagaggagtaacagccaga

SEQ ID NO: 270882 - DNA, 201 bp, Homo sapiens
gaagaacagaggctgccaagtgcagggggtggtggggaggggaagaccctggagtaacaatccctgctgtgtccacttggttcccacggactcaagccaarccaaagcactgcccggaccagttcggcttccaaccaatcctggtgctggcctcagactcctcctttctttctcagaaccccattcccctcagggccccca

SEQ ID NO: 270883 - DNA, 201 bp, Homo sapiens
gactactgacacaaggtgaagagatggcccagccggacggggtggctcacatctgtaatcccagcattttgggagcccgaggtgggtggatcacttgaggycaggagttcgaggccccaacatggcaaaaccccatctcttctaaaaatacaaaaattagccgggcatgatggcagatgcctgtaatccctgctactcggg

SEQ ID NO: 270884 - DNA, 201 bp, Homo sapiens
tccaggcccccagaccctcctccctcagacccaggagtccaggcccccagcccctcctccctctaaccatctgtgctttctccccagggacttgtacagcmaaagcacagcagccatgagcacttacacaggcatttttactgaccaagttctttctgtgctgaagggagaggagtaacagccagaccccccatcagtgga

SEQ ID NO: 270885 - DNA, 201 bp, Homo sapiens
ggcaaagatcgataaagcaggaattttaagaggcacaatattagaagcccgtgttggaaccatgactgtgtgtgtgtgtgtgtgtgtgtgtgtgtgtgtgwgagagagagagagagggagatggagtctcgctatgtagcccaggctagactcaaactcctgggctcaagcaatcctcctgcctcagcctccccagtagct

SEQ ID NO: 270886 - DNA, 201 bp, Homo sapiens
ctctccccctgcagaggtccaggggacccaacagccccagcaagatgagatgcctagcccgaccttcctcacccaggtgaaggaatctctctccagttacygggagtcagcaaagacagccgcccagaacctgtacgagaagacatacctgcccgctgtagatgagaaactcaggtagcacctgcccctggagaaatgggg

SEQ ID NO: 270887 - DNA, 201 bp, Homo sapiens
ccacgggctctcctgacacactctccccctgcagaggtccaggggacccaacagccccagcaagatgagatgcctagcccgaccttcctcacccaggtgamggaatctctctccagttactgggagtcagcaaagacagccgcccagaacctgtacgagaagacatacctgcccgctgtagatgagaaactcaggtagcac

SEQ ID NO: 270888 - DNA, 201 bp, Homo sapiens
gcccaggcccttcttacctctgcctctgccctctcctcttcttccttcctcctttccccctgctgcagccccacgggctctcctgacacactctccccctscagaggtccaggggacccaacagccccagcaagatgagatgcctagcccgaccttcctcacccaggtgaaggaatctctctccagttactgggagtcagc

SEQ ID NO: 270889 - DNA, 201 bp, Homo sapiens
gactcagtccagccaacatttaatgagcacctactttatgtatggagctctaacccatgggtccatgggaataaagcagtgaatagtaacaataaataatygtaacagcaattagagactaatctttattgaagtccggctttctctcttttatttttttattttttgagacagggtttcactctgtcacccaggctggac

SEQ ID NO: 270890 - DNA, 201 bp, Homo sapiens
gttaaaatcaggagtagaatcacagaatgttggaaagtgaggcccaagaagggggctgtgtccaagtccatgcatgggaaacttgactgggacaccgagcwcacacagagcaggatctcagtcccccccaccagagtggggcgtgaccacaggaacagccgcctccagtcagcctgccacatgacaccccctcaatgttcc

SEQ ID NO: 270891 - DNA, 201 bp, Homo sapiens
ggctgggcagctgagtccagtaaaaaacaggggccctggagagggactgtgggcaatgcccccgagtccccggggcctgggaagaacagaggctgccaagygcagggggtggtggggaggggaagaccctggagtaacaatccctgctgtgtccacttggttcccacggactcaagccaagccaaagcactgcccggacca

SEQ ID NO: 270892 - DNA, 201 bp, Homo sapiens
ggatcgcttgagcccaggagttccagaccagcctgggcaacaaaacaagtctcccatctctacaaaagaataaaaattagcagctgggcatggtggctcaygcctgtaattccagcactttgggaggccaaggcaggcaaatcacttgaggttaggagttcaagaccagcctggccaacatggtgaaaccccatctctact

SEQ ID NO: 270893 - DNA, 201 bp, Homo sapiens
ccccaccagagtggggcgtgaccacaggaacagccgcctccagtcagcctgccacatgacaccccctcaatgttccaggtctctggacactatgggcacaygactcctcccagctctgtttcttgtcctcctggtattgggatttggtgagtgtgggcttccggggagggaagccttggggaggggaatgagctccaagca

SEQ ID NO: 270894 - DNA, 201 bp, Homo sapiens
ctgggctcagtggctcacacctgtactcccagcaccctggggaggccgagatgggaggatcgcttgagcccaggagttccagaccagcctgggcaacaaarcaagtctcccatctctacaaaagaataaaaattagcagctgggcatggtggctcacgcctgtaattccagcactttgggaggccaaggcaggcaaatcac

SEQ ID NO: 270895 - DNA, 201 bp, Homo sapiens
gctcaagaaagccttctaggctgggctcagtggctcacacctgtactcccagcaccctggggaggccgagatgggaggatcgcttgagcccaggagttccrgaccagcctgggcaacaaaacaagtctcccatctctacaaaagaataaaaattagcagctgggcatggtggctcacgcctgtaattccagcactttggga

SEQ ID NO: 270896 - DNA, 201 bp, Homo sapiens
ggttgcagtgagccgagatcgcgccactgcactccagcctgggtgacagagcgagactccgtctcaaaaaaaaaaaaaaaattagccaggagtggtggcgygctcctgtaatcccagctactcgggaggccgaggatgcagtgagccgaggttgcagtgagccgagatcgcgccattgcactccagcctgggggagagtga

SEQ ID NO: 270897 - DNA, 201 bp, Homo sapiens
cccagcctacccaagttgccctctggttccacctagcatgccagccagaggcccaggaaggaaccctgagccccccaccaaagctaaagatgagtcgctgragcctggtgaggggcaggatgaaggagctgctggagacagtggtgaacaggaccagagacgggtggcaatggttctggtgagggtgtgctgggctgggtg

SEQ ID NO: 270898 - DNA, 201 bp, Homo sapiens
ggcctgggaagaacagaggctgccaagtgcagggggtggtggggaggggaagaccctggagtaacaatccctgctgtgtccacttggttcccacggactcragccaagccaaagcactgcccggaccagttcggcttccaaccaatcctggtgctggcctcagactcctcctttctttctcagaaccccattcccctcagg

SEQ ID NO: 270899 - DNA, 201 bp, Homo sapiens
gcatggagggaaagggagaaggggattctagggtcccagcctacccaagttgccctctggttccacctagcatgccagccagaggcccaggaaggaacccygagccccccaccaaagctaaagatgagtcgctggagcctggtgaggggcaggatgaaggagctgctggagacagtggtgaacaggaccagagacgggtgg

SEQ ID NO: 270900 - DNA, 201 bp, Homo sapiens
tgaggtagatattattaccccgttctacaaaaggagaaacagtcctggggagacaggataagtcaccggccaaggcacacagctagctacatgtggccccygcgtgacggctggtctctgtaggcgaggctttgtccagatgcgtgggtagaaggtctggcccggaaagaggaactgacagcaaggctaagccaatgtctg

SEQ ID NO: 270901 - DNA, 201 bp, Homo sapiens
ccagcaagatgagatgcctagcccgaccttcctcacccaggtgaaggaatctctctccagttactgggagtcagcaaagacagccgcccagaacctgtacragaagacatacctgcccgctgtagatgagaaactcaggtagcacctgcccctggagaaatggggtctggcccataccaccgactgcatccaggacccaga

SEQ ID NO: 270902 - DNA, 201 bp, Homo sapiens; identical to SEQ ID NO: 53718

SEQ ID NO: 270903 - DNA, 201 bp, Homo sapiens
cccacccaccccctccgcagttctgttggccaggactttggcctagacaaaggatgggggttgtggctgtggagcggaagtgggtctcaaccactataaakcctctctgtgcccgtccggagctggtgaggacagcctgccagagtctggtaagaaagggactcagggtgcggggacaggggggcgtcagcagggagaggg

SEQ ID NO: 270904 - DNA, 201 bp, Homo sapiens
gggcctccactgtgatgtcctctctcctgtaggagcccgagcaccttccggggcttcatgcagacctactatgacgaccacctgagggacctgggtccgckcaccaaggcctggttcctcgaatccaaagacagcctcttgaagaagacccacagcctgtgccccaggcttgtctgtggggacaaggaccagggttaaaat

SEQ ID NO: 270905 - DNA, 201 bp, Homo sapiens
aggacccagaagttcaggccccagcccctcctccctcagacccaggagtccaggcctcagcccctcctccctcagacccaggagtccaggcccccagcccbtcctccctcagacccaggagtccaggcccccagcccctcctccctcagacccaggagtccaggcccccagaccctcctccctcagacccaggagtccagg

SEQ ID NO: 270906 - DNA, 201 bp, Homo sapiens
agccgcccagaacctgtacgagaagacatacctgcccgctgtagatgagaaactcaggtagcacctgcccctggagaaatggggtctggcccataccaccractgcatccaggacccagaagttcaggccccagcccctcctccctcagacccaggagtccaggcctcagcccctcctccctcagacccaggagtccaggc

SEQ ID NO: 270907 - DNA, 201 bp, Homo sapiens
tttaaactaaattactgttttatgttgatctgcatatttctgtatatttgtcatgacagtgcttgcatcctatttggtgtactcagcaaataaacttttcrttttaaacaaaaacattcatttattgtgttgtgcattaaatgaaaactttattttttctagaccaggtcttgctctgtcatctgggctggagtgcagtgg

SEQ ID NO: 270908 - DNA, 201 bp, Homo sapiens; identical to SEQ ID NO: 53737

SEQ ID NO: 270909 - DNA, 201 bp, Homo sapiens
agaactttctagagaatgggcactccctttgtgtctgaagcccccagccaggactggcttcatggcatggtacctgtgcagggccccacacttagaagggmttcatgtttggtttactgcattgctgtcgcctatcgccatcttgaacttcttcacttttgagtaagggttcccacattttcattttgcactaaggcccac

SEQ ID NO: 270910 - DNA, 201 bp, Homo sapiens
agatttttattttttgtttgtttgttttgagatggagtctcactttgtcacccaggctggagtgcagtggcgcgatgtcagctcactgcaacccccatctsccaagttcaagcgattccggtatctccacctcccaagtagctgggattataggcgcaagccaccatgcccggctgtttgtgttcgtgttttttttttttt

SEQ ID NO: 270911 - DNA, 201 bp, Homo sapiens
aatatatacatacatatatatgtatacgtatatatgtatatatatgtgtatatatatgtatatatatatgtgtgtgtgtatatatatatatatatatatawtttttttttttttttttttttggggggacagggtctcactttgggttgccccaggctggagtgcaatggcccaatcacaactcactgcagccttgacaat

SEQ ID NO: 270912 - DNA, 201 bp, Homo sapiens
tgtgtgtgtgtgtatatacacacatacatacactaatgtatgtatatatatgtatacatatatacacacatgtatgtgtgtatacatatatgcacacgtatatatacacatatacacacgtatacatatatgcgcacacatacatgtatacatacatatatacgtgtatgtatatacacatgtatatacacatgtatacat

SEQ ID NO: 270913 - DNA, 201 bp, Homo sapiens
gtgtgtgtgtgtatatacacacatacatacactaatgtatgtatatatatgtatacatatatacacacatgtatgtgtgtatacatatatgcacacgtatatatacacatatacacacgtatacatatatgcgcacacatacatgtatacatacatatatacgtgtatgtatatacacatgtatatacacatgtatacata

SEQ ID NO: 270914 - DNA, 201 bp, Homo sapiens
gtgtgtgtatatacacacatacatacactaatgtatgtatatatatgtatacatatatacacacatgtatgtgtgtatacatatatgcacacgtatatatacacatatacacacgtatacatatatgcgcacacatacatgtatacatacatatatacgtgtatgtatatacacatgtatatacacatgtatacatatatg

SEQ ID NO: 270915 - DNA, 201 bp, Homo sapiens
tgtgtgtatatacacacatacatacactaatgtatgtatatatatgtatacatatatacacacatgtatgtgtgtatacatatatgcacacgtatatatacacatatacacacgtatacatatatgcgcacacatacatgtatacatacatatatacgtgtatgtatatacacatgtatatacacatgtatacatatatgc

SEQ ID NO: 270916 - DNA, 201 bp, Homo sapiens
gtgtgtatatacacacatacatacactaatgtatgtatatatatgtatacatatatacacacatgtatgtgtgtatacatatatgcacacgtatatatacacatatacacacgtatacatatatgcgcacacatacatgtatacatacatatatacgtgtatgtatatacacatgtatatacacatgtatacatatatgca

SEQ ID NO: 270917 - DNA, 201 bp, Homo sapiens
tcaccatattgcccaggctggtcttgaactcctgagctcaagtgatcctcccacctcagcctcctaagggctaggattacaggtgtgagccactgcacctggcccagcctcctttaaagccttatagactaacctcctcagagaatgtaatatctattgcaatgatatctcaccagtattgtttcatcaccttttgtgttt

SEQ ID NO: 270918 - DNA, 201 bp, Homo sapiens
tgtgtatatacacacatacatacactaatgtatgtatatatatgtatacatatatacacacatgtatgtgtgtatacatatatgcacacgtatatatacacatatacacacgtatacatatatgcgcacacatacatgtatacatacatatatacgtgtatgtatatacacatgtatatacacatgtatacatatatgcac

SEQ ID NO: 270919 - DNA, 201 bp, Homo sapiens
cccagctactcaggaggctgaggcaggagaatcgcttgaacctgggaggcggcggcgatcacgccattgcagtccagcctgggcaacaaaagtgaaactcaaaaaaaaaaaaaaaaagtaaaaacatccgagcagggccacaggggctgcacactatgggggaagtagactttacagttagttcagctaagtcactaaaca

SEQ ID NO: 270920 - DNA, 201 bp, Homo sapiens
tccactaatttaagcttgactgctgtcaccttgtgcttaggtgctgggtttttctcgggcgctcctgctccccattcagcaatcctttcacgcctgcataygagggaggtccttctccatgccctcaccccttccccagttggagactgctgctgtgtatcactcagtgctgggctcatggtaggagcaggtgaggttctc

SEQ ID NO: 270921 - DNA, 201 bp, Homo sapiens; identical to SEQ ID NO: 53734

SEQ ID NO: 270922 - DNA, 201 bp, Homo sapiens; identical to SEQ ID NO: 53736

SEQ ID NO: 270923 - DNA, 201 bp, Homo sapiens
ccaccacacctgcccaaaatattttcttcagtagctatactaaatgcacttagttcttatataagttgagtatcccttattcaaaatgcatgggaccagamgtgtttcagatttaggattttttctgattttagaatatttgcatatagatatctggttgaacatccctattccacaaatctgaaatgctccaatgaacat

SEQ ID NO: 270924 - DNA, 201 bp, Homo sapiens; identical to SEQ ID NO: 53738

SEQ ID NO: 270925 - DNA, 201 bp, Homo sapiens
aaattaacatttaatatactggtggccaaaagcgccgtgtttaaaaatgggtcagagactggtgtacttcacatgacactagtaaaaatgtgattttactrtgggttttactccttttcttccaggtgcgttatccagaacgcattacaatattgagaggaaatcacgaaagccgacaaattacccaagtatatggctttt

SEQ ID NO: 270926 - DNA, 201 bp, Homo sapiens
tttgaaaacaagaagttacagaagtaaattactagaaaatttatcaaactgactcaaatatagtctaattctgtcactaatattaaaccaattgaatcacrcatttacgtcttataaagaatacactaggtaccaaagtttatagcagtattccatagccaaaaaaggtggaaacaagccaaattccatcaacagattaat

SEQ ID NO: 270927 - DNA, 201 bp, Homo sapiens
cgggaggctgaggcaggagaattgcttgaacccaggaggcagaagttgcagtgagccgagatcgccactgcattccagcctgggcgacagagtgagactcygtctccaaaaaaagaaagctgaaggagtccactgaaatcaagaccagagtagtactagtaaaggcctattttgaggtagttgcaaaaataaaatctatcc

SEQ ID NO: 270928 - DNA, 201 bp, Homo sapiens
tcttgacctgtgttgattttcattgccaccaaccagccccaggcaaccactaatctacttctgtctacagatttactacttctggacagctcatatcagtrgaatcacataaattgtttttgtgcaggtttttcactagcgtgtcctgaagttcctccatgtcgtatttaacagttcattcttttattcctaagcagcttg

SEQ ID NO: 270929 - DNA, 201 bp, Homo sapiens
gtcacccattttcttttgtaagaaatgcaaaatgaatagatgtgccaatatgccttttctttggtaaatatacttcaaaggagttttttttatatagtggytatagaaccctgaaaagtagtggtgcctgttatgtgaaccacacagtactggaattaatagcagttgtgtgaagtatctttactcctgacttggtctact

SEQ ID NO: 270930 - DNA, 201 bp, Homo sapiens
tttgccatttacagccttcaatttgacccagcgcctcgtcgtggtgagcctcatgttacacggcgcaccccagactacttcctataaatttctcctgggamacctgcctttgtatgtggaagtatacctggctttttaaaatatatgtatttaaaaacaaaaagcaacagtaatctatgtgtttctgtaacaaattgggat

SEQ ID NO: 270931 - DNA, 201 bp, Homo sapiens
ttagctgggcgtagtgttgcactcccagctacttgggaggctgagacacaagaatccctaggaggcagaggttacagtgagcagtgatcataccgctgcaytccagcctgggtgacagaatgcagttttctcaaaaaaaaaaaaaaaaaaaaaaggccatgtaaagtcctaatgagaagtaagcacgcagtgaatgttaac

SEQ ID NO: 270932 - DNA, 201 bp, Homo sapiens
aaacgccagttgtactatcagctaaacattagaaaccttctcatcaggccaggtgaggtggctcatgcctgtaatcccagcactttgggaggccaaggcgrgcggatcacctgaggttgggagttcaagaccagcctggccaacatggagaaaccctgtctctactaaaaatacaaaattagccaggcatggtggcacatg

SEQ ID NO: 270933 - DNA, 201 bp, Homo sapiens
tgattcaaaactcagttattttataaaataataatattaagtggataaagaaacgccagttgtactatcagctaaacattagaaaccttctcatcaggccrggtgaggtggctcatgcctgtaatcccagcactttgggaggccaaggcgggcggatcacctgaggttgggagttcaagaccagcctggccaacatggaga

SEQ ID NO: 270934 - DNA, 201 bp, Homo sapiens
ctcatgcttaagaccccaactccctgatggtttacaggtaaggggttttttgtgtgcttttttttttttttttgaaacagagtttcactcttgtcacccaygctggagtgcaatggcgagatttcggctcactgcaacctccacctcccgatttcaagtgattcatctgcctcagcctcccaagtagccgggattacaggc

SEQ ID NO: 270935 - DNA, 201 bp, Homo sapiens
ggaccctggcctcctcggaccgtttctccgccaagccacgcgagggcgctgttctgctcctagggcgccgtgtcccggcggcgccgcctgctcgccttttmccggcggaaatgcccgagcgatgacggaaacccggagggaggggagagaaagagcgagagaaggggaaagacaagtcgggagaggccggtaggcgtgagg

SEQ ID NO: 270936 - DNA, 201 bp, Homo sapiens
agtctctctcttgacctgtgttgattttcattgccaccaaccagccccaggcaaccactaatctacttctgtctacagatttactacttctggacagctcmtatcagtggaatcacataaattgtttttgtgcaggtttttcactagcgtgtcctgaagttcctccatgtcgtatttaacagttcattcttttattcctaa

SEQ ID NO: 270937 - DNA, 201 bp, Homo sapiens
aataaacacgtcaaatgttaaccagtaagacctggttatgaataagcaagttttttattttgaaactgaaattaacatttaatatactggtggccaaaagygccgtgtttaaaaatgggtcagagactggtgtacttcacatgacactagtaaaaatgtgattttactatgggttttactccttttcttccaggtgcgtta

SEQ ID NO: 270938 - DNA, 201 bp, Homo sapiens
ttgggaggctgagacacaagaatccctaggaggcagaggttacagtgagcagtgatcataccgctgcactccagcctgggtgacagaatgcagttttctcaaaaaaaaaaaaaaaaaaaaaaggccatgtaaagtcctaatgagaagtaagcacgcagtgaatgttaactaaaggaaggctgaaagttttaatcataagtg

SEQ ID NO: 270939 - DNA, 201 bp, Homo sapiens
aagcttatttgaattaactttttagcatagttggattttttttaatatgcaggatacggtgtgtaggctgtagtttaattttgctcaaaatctcttttttkttgtttttttgtgatggagtctctctctctgtcatccaggctggagtgcagtggtgccatctcggttcactgcaagctccgcctaccgggttcatgccat

SEQ ID NO: 270940 - DNA, 201 bp, Homo sapiens
cgggcggatcacgaggtcaggggtttgagaccagtctggccaacgtggtgaaaccccatctctactaaaaatacagaaattagctgggtgtggtggcacgygcctgtaatcccagctacttgggaggctaaggcaggagaatcacttgaatccaggaggcggaggttgcagtgagctgagatggagatcgcgccactgcac

SEQ ID NO: 270941 - DNA, 201 bp, Homo sapiens; identical to SEQ ID NO: 53740

SEQ ID NO: 270942 - DNA, 201 bp, Homo sapiens
gtggtggcacgcgcctgtaatcccagctacttgggaggctaaggcaggagaatcacttgaatccaggaggcggaggttgcagtgagctgagatggagatcrcgccactgcactccagcctggacgacagagcaggactccgtctcaaaaaaaaaaaaaaattgtattttgtcttttcttggttgtataaattctccaaaag

SEQ ID NO: 270943 - DNA, 201 bp, Homo sapiens
gagatcgcgccactgcactccagcctggacgacagagcaggactccgtctcaaaaaaaaaaaaaaattgtattttgtcttttcttggttgtataaattctscaaaagttagccatttaaaaatgtttaaggtcttattttctactttgtgatatgtgtgtataatttttactgtgcaagttttagcatttttgtatagtct

SEQ ID NO: 270944 - DNA, 201 bp, Homo sapiens
atatatacatacatatatatgtatacgtatatatgtatatatatgtgtatatatatgtatatatatatgtgtgtgtgtatatatatatatatatatatatwttttttttttttttttttttggggggacagggtctcactttgggttgccccaggctggagtgcaatggcccaatcacaactcactgcagccttgacaata

SEQ ID NO: 270945 - DNA, 201 bp, Homo sapiens
agatcgcgccactgcactccagcctggacgacagagcaggactccgtctcaaaaaaaaaaaaaaattgtattttgtcttttcttggttgtataaattctcmaaaagttagccatttaaaaatgtttaaggtcttattttctactttgtgatatgtgtgtataatttttactgtgcaagttttagcatttttgtatagtctg

SEQ ID NO: 270946 - DNA, 201 bp, Homo sapiens
atatacatacatatatatgtatacgtatatatgtatatatatgtgtatatatatgtatatatatatgtgtgtgtgtatatatatatatatatatatatttwttttttttttttttttttggggggacagggtctcactttgggttgccccaggctggagtgcaatggcccaatcacaactcactgcagccttgacaataaa

SEQ ID NO: 270947 - DNA, 201 bp, Homo sapiens
cactgaagaggcagagaactgtctgtccctaaaattgtgctctctcccccaccagtctaagctgtcatctgcttttactttaagcttcatcctgtttgactttttttttttttttctgtgactgagttttgctctgtcgcccaggctggagtgcagtggcacgatcttggctcactgcaagctccgcctcccaggttcatg

SEQ ID NO: 270948 - DNA, 201 bp, Homo sapiens
tatacgtatatatgtatatatatgtgtatatatatgtatatatatatgtgtgtgtgtatatatatatatatatatatattttttttttttttttttttttggggggacagggtctcactttgggttgccccaggctggagtgcaatggcccaatcacaactcactgcagccttgacaataaatcagttttagaatattttc

SEQ ID NO: 270949 - DNA, 201 bp, Homo sapiens
tgtgtgtgtgtgtgtatatacacacatacatacactaatgtatgtatatatatgtatacatatatacacacatgtatgtgtgtatacatatatgcacacgtatatatacacatatacacacgtatacatatatgcgcacacatacatgtatacatacatatatacgtgtatgtatatacacatgtatatacacatgtatac

SEQ ID NO: 270950 - DNA, 201 bp, Homo sapiens
gccagtcactcattgtttgctctgaggttggctttctctggtctcctgccctgtctcagtcctcctgaacacctagtgaagggtgaggaggaagaactttytagagaatgggcactccctttgtgtctgaagcccccagccaggactggcttcatggcatggtacctgtgcagggccccacacttagaagggcttcatgtt

SEQ ID NO: 270951 - DNA, 201 bp, Homo sapiens
gtgtgtgtgtgtgtatatacacacatacatacactaatgtatgtatatatatgtatacatatatacacacatgtatgtgtgtatacatatatgcacacgtatatatacacatatacacacgtatacatatatgcgcacacatacatgtatacatacatatatacgtgtatgtatatacacatgtatatacacatgtataca

SEQ ID NO: 270952 - DNA, 201 bp, Homo sapiens
cctgtctcagtcctcctgaacacctagtgaagggtgaggaggaagaactttctagagaatgggcactccctttgtgtctgaagcccccagccaggactggsttcatggcatggtacctgtgcagggccccacacttagaagggcttcatgtttggtttactgcattgctgtcgcctatcgccatcttgaacttcttcactt

SEQ ID NO: 270953 - DNA, 201 bp, Homo sapiens
tgttggccaggctggtctcgaactcctgacctcaggtgatctgcccgcctcggcctcccaaagtgttgggaatacagatgtgagctaccacgcccaggtamtcccttagctttaatatttactcatctgtatctgcatgtgctgccccagacgatgatgatgatgattgagacatgatctcactctgtcacccaggctgga

SEQ ID NO: 270954 - DNA, 201 bp, Homo sapiens
gtgtggacaggatagctggaatcctagcatccagttttgaataccaggtgaccttgaagatgaaagccatgaactgagacaatgtccttatcagatttttwttttttgtttgtttgttttgagatggagtctcactttgtcacccaggctggagtgcagtggcgcgatgtcagctcactgcaacccccatctcccaagttc

SEQ ID NO: 270955 - DNA, 201 bp, Homo sapiens
tggcattgcatgcctgtagtcccagtcccagctacttgagaggctgaggcaggagaatcacttgaacctgagagagacagaggttgcagtgagccaagatygtatcacggcactccagcttgggtgacaaagtgagactccatctcaaaaaataaaataaataaatataaaacatataataaaactccataattcttaaat

SEQ ID NO: 270956 - DNA, 201 bp, Homo sapiens
ttcttttgttacttcgtgcattttgttcaattctctgttcaacacgccaagaaccttaacaactctatcaggtaaaagtcccagctactcgggaggctgasgtgggaggatggcttgagcctggggaggttgaagctgcagtgagctgtgattgtgccactgcgcttcagcccaggtgacaggcactgtctcaaaaaaaaa

SEQ ID NO: 270957 - DNA, 201 bp, Homo sapiens
caacccccatctcccaagttcaagcgattccggtatctccacctcccaagtagctgggattataggcgcaagccaccatgcccggctgtttgtgttcgtgtttttttttttttctttttttagcagagatggggtttcgccatgttaaccagcctggtctcgaactcctgacctcgagtgatctgtccacctcagcctccc

SEQ ID NO: 270958 - DNA, 201 bp, Homo sapiens
ccattcatcggttgatcaatatctggtggtttctactttttggctgttattaataatgctgccatgaacatgtataaactggatttcatttctcttgagtrtatacctaggagtggaactgctggattacatggtaattttaggtttaactttggaggaactgccagacagttttccacagcagctgcaccattttgcatt

SEQ ID NO: 270959 - DNA, 201 bp, Homo sapiens
cttcatatgcaaaaaatatgtggtgtgcagaatgtttgtggtgtattgggagctgttttgtggaataaacttggcttctggtaaaattattgtttaatttgtgatctcaggaaaagaaactgaagggtataaaggccttaagattacacaattagattaaaactgaagagaacccatgttttctggaagacttcattgcat

SEQ ID NO: 270960 - DNA, 201 bp, Homo sapiens
taactgggattacaggtgcatgcagccatgcactgctaatttttgtatttctagtagagatggggttttgccatgctggccaggctggtctagaactcctrgcctgaagtgatccctcagccttccaaagtgctgggattacaggcgcgagcctcgtgcacagcccctattgactttctaataattttaagatgaacttct

SEQ ID NO: 270961 - DNA, 201 bp, Homo sapiens
tcagcctcccaagtagctgggaccacaggcatgcaggcaccatgcacccagctagatccagctgtttcttgttgctagggtgagagcagcattctttacagatctctgtgtcctaagtggaagtctaaataagccatatgatttagagcttgttatttttagaatctcaatttcagctagcagagcaattacctgactaaa

SEQ ID NO: 270962 - DNA, 201 bp, Homo sapiens
agtgaagggtgaggaggaagaactttctagagaatgggcactccctttgtgtctgaagcccccagccaggactggcttcatggcatggtacctgtgcaggrccccacacttagaagggcttcatgtttggtttactgcattgctgtcgcctatcgccatcttgaacttcttcacttttgagtaagggttcccacattttca

SEQ ID NO: 270963 - DNA, 201 bp, Homo sapiens
tagttggattttttttaatatgcaggatacggtgtgtaggctgtagtttaattttgctcaaaatctctttttttttgtttttttgtgatggagtctctctstctgtcatccaggctggagtgcagtggtgccatctcggttcactgcaagctccgcctaccgggttcatgccattcacctgccccagcctcccgagtagct

SEQ ID NO: 270964 - DNA, 201 bp, Homo sapiens
ggtacttccatttttaatttccctcgaacaaaaattagtgccagctttggtggtccattgataaaatctaaaatgcagtgataaaatagctcctttcttastataatgaagaatggcatgattacagtgaaatagagggtcaagacccaattctagtgactgaacaaatcattgttttccttgctaagccagcctcttagt

SEQ ID NO: 270965 - DNA, 201 bp, Homo sapiens
ccagcttttgaagctaattgtgaatttgactcctcttgtgtgtgcagagaaattgcttctgtgattcattcctgcatcagcagtatgcagttattttagargattgtgtgccaagagagccaggctggcactgctcaggacactctgtgactagaactatatttaactgttgtctcagaaagagtaaaaattttaagctct

SEQ ID NO: 270966 - DNA, 201 bp, Homo sapiens
ccatcacacctggcctgctatcttgaaacgacataaaatctttcaaagcagggcaatgggacatggctatagtcccagctactcaggaggctgaggtggargatggcttgaacccaagagcttgagggcagcctgggcaacatagcaagatgtcatctctaaaaaataaaaaataggctgggcatggtggctcatgcctgt

SEQ ID NO: 270967 - DNA, 201 bp, Homo sapiens
ctcacttttgttccgagctttccaagcttagccgaaaatcagcttccttttttatgtatgtattgagacaggatctcacttgttgcccaggctggagttayggtggtgcaatcttggctcactgcaacttccgcctcctgggctcaaatgatcctcccacctcagcctcctgagtagctgggactacaggcatgcgccacc

SEQ ID NO: 270968 - DNA, 201 bp, Homo sapiens; identical to SEQ ID NO: 53763

SEQ ID NO: 270969 - DNA, 201 bp, Homo sapiens; identical to SEQ ID NO: 53764

SEQ ID NO: 270970 - DNA, 201 bp, Homo sapiens; identical to SEQ ID NO: 53765

SEQ ID NO: 270971 - DNA, 201 bp, Homo sapiens; identical to SEQ ID NO: 53766

SEQ ID NO: 270972 - DNA, 201 bp, Homo sapiens
tgacatggcatagatggtgtcagtgctgacagactctgtcagggtcttagcactggtgaaaagccataagtgaaagtaatgaagactagggcactcttcargtcagcccaccgggtccacccactcttctgcccttcacctccatcagtgagatcaaacaaaacatacccaatcagtgaagaagccaggccagtcccaaaa

SEQ ID NO: 270973 - DNA, 201 bp, Homo sapiens; identical to SEQ ID NO: 53768

SEQ ID NO: 270974 - DNA, 201 bp, Homo sapiens; identical to SEQ ID NO: 53769

SEQ ID NO: 270975 - DNA, 201 bp, Homo sapiens; identical to SEQ ID NO: 53770

SEQ ID NO: 270976 - DNA, 201 bp, Homo sapiens; identical to SEQ ID NO: 53771

SEQ ID NO: 270977 - DNA, 201 bp, Homo sapiens; identical to SEQ ID NO: 53772

SEQ ID NO: 270978 - DNA, 201 bp, Homo sapiens; identical to SEQ ID NO: 53773

SEQ ID NO: 270979 - DNA, 201 bp, Homo sapiens
gggatgttcattcacagcaccgagctctgtgggtactctttcattcacccacacctcatttattcctcctgcacgtttctgagcatcgactggcacgtccrtcctccactcatctgctgagtccactctcactttgggatcccagaccagctgatgctgtcacggtggggtttcctcctgggaaggagagggaggagcggc

SEQ ID NO: 270980 - DNA, 201 bp, Homo sapiens
ctggattccctcatcaaagagtcgaagattcgggactgtgaggaccccaacaacttctccgtctccacactgtccccatctggaaagctcggacgcaaggkagaggccaaaaaggtgacacccctgatgccgacaggcccccccgacagccagcctgtgggccagccagggcccccgaacgtatgctctgtgcgcactcac

SEQ ID NO: 270981 - DNA, 201 bp, Homo sapiens
caggcgtcgcatccggcctgggtttggcttctgccagctcctgggcctgcactgggaggggctgagcgtgggggcatgggggtgggcaggagcctggggaygttcattcacagcaccgagctctgtgggtactctttcattcacccacacctcatttattcctcctgcacgtttctgagcatcgactggcacgtccatcct

SEQ ID NO: 270982 - DNA, 201 bp, Homo sapiens
caggtctgaaagcttccacctccttcgagaggtgggtgtgggggcctgtggggcccagtgatgctggcaaggggagaaggtccaggcaggggcggggttgyggatccacagtgggatgcggggctgaacggttatgtcccggtaggtaggggctgcagaaagagccccgagggctggggagtcccggagctggaccacagg

SEQ ID NO: 270983 - DNA, 201 bp, Homo sapiens
ctctgcaggttccagaccaccaagcaaagctgtctggaaggtgatccatgccaccccacctccttggcctaggacagcctgtgcttgggggtctcagtgamgcctctggatgtgggggaccccagcgggggtgggggtggtggggcaaggtagcagctcagcctcctcagggcctgcccagcagctcagcaccaggaacag

SEQ ID NO: 270984 - DNA, 201 bp, Homo sapiens
cacctctgggcaggccaggtctccatgagggaggggtcttagcctctgcaggttccagaccaccaagcaaagctgtctggaaggtgatccatgccaccccrcctccttggcctaggacagcctgtgcttgggggtctcagtgaagcctctggatgtgggggaccccagcgggggtgggggtggtggggcaaggtagcagct

SEQ ID NO: 270985 - DNA, 201 bp, Homo sapiens
ctcggaagctgaaaccgaggcaccccacgaaggccccacaccgctggcgggaggcggtttctcagggctctgctcctggaggctgctgggagacagctgcmgcccggagactggtcagagcccgcgacccgagaacagggctcctagcccctcctcacagcagtggccacccagggggatatcacacttggacctttggtg

SEQ ID NO: 270986 - DNA, 201 bp, Homo sapiens
aaggagagatccagccagggctcacagccaaatccagccttagactgtggggacaggggcagcctctcagacccggaaggcaagaaccagtcccagaaagyggggctgaggagacacagctctgggcctacagggtggggaccctctgccctctgccctccaccctccggccaaggcagaagctgggtctggtcctcccag

SEQ ID NO: 270987 - DNA, 201 bp, Homo sapiens
cgctcaagctgctatgggaagagccagcagccaacccgcctccccttctggcctctcagcggagccagctcagctcccgccagagaccccagcccaggtgycctcccttcccactccagcagaggctgctgggcccgggctgggcagccaagggttaagtgggcggggctcccacgggaggggcggtcccagcggcggccc

SEQ ID NO: 270988 - DNA, 201 bp, Homo sapiens
aggtgcctggctggctcacatcccttctctggcccacgctggccctcgccccaagctcaggtgccttgtggctgccctgagagtctgccagagcccagatygagagggcaccgaggaggctttggcaggcccagccaggcgggatggacatgggaggctgcgtgggccgctggggaccccggaggataggccctccccaac

SEQ ID NO: 270989 - DNA, 201 bp, Homo sapiens
ggacacggtctcctggtgcacagagcctccttgcagacctcgaaggagccaggagctgtggccggcagatcccgcagtcctgctgcgggtggggcagagtrgggagcgtgggtgggccctacagaccctccacagggtgacagtgctggtgggcgcccatgctggggacacggtctcctggtgcctggagagccctaccgt

SEQ ID NO: 270990 - DNA, 201 bp, Homo sapiens
tgctcgggtggggggcaggtctgggggtgccaggggctggtaggctctggcttttggctctgggggctctcctggcccaaccccaccccagcccctgatcsaggttggcaaaggtggccctgagctgcagtcagcaccatggacaggggcagctgctgctttctctggggggcctgcagttgctgtgcgtcctcagggttc

SEQ ID NO: 270991 - DNA, 201 bp, Homo sapiens
actctggtgggactgtggaaccccctccagctctgccccagagagcagcacctgggtgagggctacaggaggctctttcagcaggcaggtcccaggcaccrtgatgcagccctgacttggggacggtggccacactgtcctgggagtaggtcccttccaccgctcagacctggcgacccaggaacacacctctgagggact

SEQ ID NO: 270992 - DNA, 201 bp, Homo sapiens
accgtgactgaccgtgtggacttagcaggtctcacagcttctctgagcctcagacccctcagtgcagcggcaacactccccacctgcagggcaacagctgygggttcgcctcttctctctctgcccttccttcagcaggcccttgaggctgggtgccagcctggtggcgtgggggctcaggagtgtgcccagtgcccctct

SEQ ID NO: 270993 - DNA, 201 bp, Homo sapiens
gaagaggtggggcccctgcccgtcccgtacacgctcgtgaagggaagaggttggtggaggggcatgtgcagtccccatgcccctgtcgtgggaggggctgmggtacccaaagctgccccgggtgtgtgtgtacatgccgggaggcctgtgggtgtgatttgtgggttttgttggaagattcaattattttccagccttccc

SEQ ID NO: 270994 - DNA, 201 bp, Homo sapiens
gccacccgccgggccaaatgctctcaaagacagaattctgcttaaatgcccagaaaagagatttaggagatcagaatcttaagcaaattaacatgtgcagygggcggcttttaatcaccgcctttaatcgcaggccgcggtgacggaaatcatctcctggctgagtggcgggcggggctggccctgaggatggattattcc

SEQ ID NO: 270995 - DNA, 201 bp, Homo sapiens
tctgtccctgcggtgccctccaggtgtgcctagggtggccccagccccacaggccccgggcacttgcccttggttcccctgcccttgctgggacccctcargcccagcctgactctgggatccctgggctcctagcacgaccactctggggtcctgcctgtggggagggctcgaggcaccgactcacactcctgataaaat

SEQ ID NO: 270996 - DNA, 201 bp, Homo sapiens
tgcttaaatgcccagaaaagagatttaggagatcagaatcttaagcaaattaacatgtgcagcgggcggcttttaatcaccgcctttaatcgcaggccgcrgtgacggaaatcatctcctggctgagtggcgggcggggctggccctgaggatggattattccttagaacctgaacctgggtttcaccggcctctggaagg

SEQ ID NO: 270997 - DNA, 201 bp, Homo sapiens
gctcagtgagggcagagaggcagccagggcctcagagaaaccagtgacttgtggcagggacaggagcctccagggacacacaatggggggggcactcgcgrtggggggaggaagctgtgaaatgggctattaatagggtccccttcctgatggggctgtcaagtgcgattaataccgctgctgtgagctgggctgccacca

SEQ ID NO: 270998 - DNA, 201 bp, Homo sapiens
aggacaggacgtttcctctggctcctgagaagtcactcaccgtggtggccgcaggcatggctccatgctagctgggtgaagaccccgagagggggccttgkggctgacggtcactggagacaacagtgagccactctggtgggactgtggaaccccctccagctctgccccagagagcagcacctgggtgagggctacagg

SEQ ID NO: 270999 - DNA, 201 bp, Homo sapiens
cccgccggccatggaagagcctgggcccccaggtgggctcagccaagaccaaggtaagggggcaggtgggatcccagaagggggttgtgatggtccccgtrgggagcccaggaccggacctgttcactggtgacccgcccaggaccggacctgttcactggtgacccactgaccccccgtgggcagtgcagagctcctccc

SEQ ID NO: 271000 - DNA, 201 bp, Homo sapiens
cctcccttcccactccagcagaggctgctgggcccgggctgggcagccaagggttaagtgggcggggctcccacgggaggggcggtcccagcggcggcccsgtcccgccttcccctcgccttcctcaccttcctcacgggcgggcgcggcagggcagcgtgtggggctgcgatcggcatgggctctgcgcgcggggtgccc

SEQ ID NO: 271001 - DNA, 201 bp, Homo sapiens
ggcagccccagaggacatggtgctgggcttctgtgcggtgggatcgctcggcagctggttgcgggtgtgaccaggccactggcctccctggcggcacaggrtgctgcccactgtccaagagagggctctggggctcagaagcagctgggctgtgggaagtcctgggggtggagtctctttccatggggttcgagtgttggc

SEQ ID NO: 271002 - DNA, 201 bp, Homo sapiens
gaacacactcagggcaccccttgctggcagccccagaggacatggtgctgggcttctgtgcggtgggatcgctcggcagctggttgcgggtgtgaccaggscactggcctccctggcggcacagggtgctgcccactgtccaagagagggctctggggctcagaagcagctgggctgtgggaagtcctgggggtggagtct

SEQ ID NO: 271003 - DNA, 201 bp, Homo sapiens
acctgtgggccgggacaggtgttctgtgttctgtgtggcatgggggcaggtggtcatgagacgaggctggtggtgggctgacatggcccctatgccacgcygtcctgcaggcttcaccaactacaccaggagccctgctggtgacatcttcaaccctgagcaccaccatgtgcaccaggacatgacgcagccgctgagcca

SEQ ID NO: 271004 - DNA, 201 bp, Homo sapiens
acagggcagggaggcgaggggctgggagagcacaggaaggggtgtagcagcacgcagggctgcagccgtcaccgtcaccatcaccaggagctactgctggractcggcctcccccaacgctggacgccccccagggcagccagtgaaatgtcacctcaatgacccttggcagtgctcagcccttcccagaggccctcctgg

SEQ ID NO: 271005 - DNA, 201 bp, Homo sapiens
tgaaggtgagtgagcccctgccctcctgggaccagctcacacagagtctcgggcctgcagcagtgccctgctccagacaggcaggggcatcatgccatccrtgggcatatctagggggctgagggctggccacgctcctgacctggcctccatctccccatggtggtcactctggctcaggcccctcatgcacatccaggc

SEQ ID NO: 271006 - DNA, 201 bp, Homo sapiens
gctgggcccgggctgggcagccaagggttaagtgggcggggctcccacgggaggggcggtcccagcggcggccccgtcccgccttcccctcgccttcctcrccttcctcacgggcgggcgcggcagggcagcgtgtggggctgcgatcggcatgggctctgcgcgcggggtgcccctgctcgggctggggctcaggggacg

SEQ ID NO: 271007 - DNA, 201 bp, Homo sapiens
gggggcaggtctgggggtgccaggggctggtaggctctggcttttggctctgggggctctcctggcccaaccccaccccagcccctgatcgaggttggcaraggtggccctgagctgcagtcagcaccatggacaggggcagctgctgctttctctggggggcctgcagttgctgtgcgtcctcagggttccctggagtta

SEQ ID NO: 271008 - DNA, 201 bp, Homo sapiens
ctctgtgcgcactcacacctgtgcacacacaaatctgcacacaagcatacctctgtacacacctccgcacacacctgcatgatccatacccacctaccagyggggtctcaaagcccagccagtcgttgagagctgcccagctggggggacatgattgccttccctgcccagcgcccctgcctagagctgcctgtggccacg

SEQ ID NO: 271009 - DNA, 201 bp, Homo sapiens
cagcccagctgtcctgggatgctggaggggcaacgagggcccaacctgtgggccgggacaggtgttctgtgttctgtgtggcatgggggcaggtggtcatragacgaggctggtggtgggctgacatggcccctatgccacgccgtcctgcaggcttcaccaactacaccaggagccctgctggtgacatcttcaaccctg

SEQ ID NO: 271010 - DNA, 201 bp, Homo sapiens
gccggccagacccttgagagctggaccctggacaccagtgtggacactggctcccgtcacctcctcagagcaggcctggtggccttagctgcctctgtccygcccgtccctccctgtccacctgtgtccagccagcgcctgctacgtgttggatcatggcctcacagggacagagcagggaggaggacttcgaggtccctg

SEQ ID NO: 271011 - DNA, 201 bp, Homo sapiens
gaagagcttcggaccaatttgtgtatcttctgttactctgcgcctaataggaccgcttcattagctgctgtcgcacccacagtgccgtctgtccgggaackgagggagcctggcccgagccccatgccagagccccaagagctgcctgccacctgctccagtgatgggcacgccgacgggaggggggctgaggaccagccc

SEQ ID NO: 271012 - DNA, 201 bp, Homo sapiens
ctgtcgtgggaggggctgcggtacccaaagctgccccgggtgtgtgtgtacatgccgggaggcctgtgggtgtgatttgtgggttttgttggaagattcaattattttccagccttccccaggggagaggcggagatgctgagccaccgctggccccttgttgatgacagccgcgaggcccatgctgcctgctgtgttagg

SEQ ID NO: 271013 - DNA, 201 bp, Homo sapiens
aaggcagcaagcgtcgggagaggagggggcttagaggcagccagggccacctctggacaggcctggaagaggtggggcccctgcccgtcccgtacacgctygtgaagggaagaggttggtggaggggcatgtgcagtccccatgcccctgtcgtgggaggggctgcggtacccaaagctgccccgggtgtgtgtgtacatg

SEQ ID NO: 271014 - DNA, 201 bp, Homo sapiens
tgccgtctgtccgggaacggagggagcctggcccgagccccatgccagagccccaagagctgcctgccacctgctccagtgatgggcacgccgacgggagsggggctgaggaccagcccagagggtccctcccgctgcctggctgggcttccacccccgtcctgcttccctgtccactgcagtcctagccagggtgctgcc

SEQ ID NO: 271015 - DNA, 201 bp, Homo sapiens
ggcaggtcccaggcaccatgatgcagccctgacttggggacggtggccacactgtcctgggagtaggtcccttccaccgctcagacctggcgacccaggarcacacctctgagggacttgagtggtcttgatttcacattgatcaggcccctggctgctccgactttcaggcccctgttgtggaggtttcgggcggcccag

SEQ ID NO: 271016 - DNA, 201 bp, Homo sapiens
tctcagcagtcccaggcacttctgcaagggtctgcatgtgcccctgacatcttagttgggggaggggtggcccaggccccagtcctcaaatggggaagggrtggcccaggccccagtcctcaaacgccagggtgttgggagtggggggtgggttgtagtgtcgccggggcccctgtcttggcttcttccagcgcctgggca

SEQ ID NO: 271017 - DNA, 201 bp, Homo sapiens
gccagagccccaagagctgcctgccacctgctccagtgatgggcacgccgacgggaggggggctgaggaccagcccagagggtccctcccgctgcctggcygggcttccacccccgtcctgcttccctgtccactgcagtcctagccagggtgctgcccctggctgccaggaaggggtggccattgggggcttggacatca

SEQ ID NO: 271018 - DNA, 201 bp, Homo sapiens
ccggtggtcctccttgcctgtggtctgtcttccttgggctgacactgagccagcgcttatctgaatgcagtgctggcgcgtggggaatacgctcctgagtmattcacacgcaggaccggccggccgtggacggcgggcagtgtttggaggccagtttctgctcagcgcctcatggtggggctgtttccttggcaccgtgag

SEQ ID NO: 271019 - DNA, 201 bp, Homo sapiens
cccctggggcatgactgtgaggccgaggggcccagggtcagcccaggtcagcaggaggtccaggggagggtctgtccaggaggcactccctcctgtactgyctcccatgcccctgccatgtcccctccagctcacctcctgcaaaggtgtgcacactcgaccctggcctccatcagagagggcagcatgagggctctgggt

SEQ ID NO: 271020 - DNA, 201 bp, Homo sapiens
ttcctggtggtcctccttgccggtggtcctccttcctggtggtcctccttcctggtggtcctccttcctggtggtcctccttcctggtggtcctccttgcyggtggtcctccttgccggtggtcttcctttccggtggtcctccttgcctgtggtcctccttgcctgtggtcttcctttccggtggtcttcctttccggtg

SEQ ID NO: 271021 - DNA, 201 bp, Homo sapiens
ggggcctgactttcaggccgcttctcctcggcagctgcctctgccccagggtggactgggaacggctgccacgggggctccccaacctgtccccgccctgmcctcccctcccgtctgccttactccagacctggctcaagcccacctcttccaggaaggccttctgggaccaccaggggctgtcccggcctccctgcctgg

SEQ ID NO: 271022 - DNA, 201 bp, Homo sapiens
tgctcctggctttgtgcccactccaacctggcaccaggggcgtctgacacccaagtcccagaccctgtcctcaaggattccaagttcatcaggggcacccrgggggctgcactggcagggaagggcgtccaacccagctcagaggctgccctgaagtctgcccctggccctgccatctcctgaggcacatggtggccagtg

SEQ ID NO: 271023 - DNA, 201 bp, Homo sapiens
ccttcctggtggtcctccttgccggtggtcctccttcctggtggtcctccttcctggtggtcctccttcctggtggtcctccttcctggtggtcctccttyccggtggtcctccttgccggtggtcttcctttccggtggtcctccttgcctgtggtcctccttgcctgtggtcttcctttccggtggtcttcctttccgg

SEQ ID NO: 271024 - DNA, 201 bp, Homo sapiens
ggttctccttcctggtggtcctccttgccggtggtcctccttcctggtggtcctccttcctggtggtcctccttcctggtggtcctccttcctggtggtcytccttgccggtggtcctccttgccggtggtcttcctttccggtggtcctccttgcctgtggtcctccttgcctgtggtcttcctttccggtggtcttcct

SEQ ID NO: 271025 - DNA, 201 bp, Homo sapiens
ttgcctgcctctgccaccccaccccaactgagcatccgccaaggtccctccaggcccgcctggcacctactgcctcagcattagtaaagttcttggcaacytggttgtgtgctggctttgcaggtccctgggctgaggcctcccccagggcagggtcacactgcgctcccagccacctggctcagagccctggggatgctc

SEQ ID NO: 271026 - DNA, 201 bp, Homo sapiens
tccagcctctggcagagctggctgtgggtggggaacagctgggggtacgggggagggtggggacaggttggcagcggcccctcctgtgggtgaccaggtasggaccctgcccagaggggggaggcagaggagctggtgggcaggagagaccccctacagaccctcctaggtggtggtgggggcctggcagcccggttcccg

SEQ ID NO: 271027 - DNA, 201 bp, Homo sapiens
ttcctggtggttctccttcctggtggtcctccttgccggtggtcctccttcctggtggtcctccttcctggtggtcctccttcctggtggtcctccttccyggtggtcctccttgccggtggtcctccttgccggtggtcttcctttccggtggtcctccttgcctgtggtcctccttgcctgtggtcttcctttccggtg

SEQ ID NO: 271028 - DNA, 201 bp, Homo sapiens
ccttcctggtggttctccttcctggtggtcctccttgccggtggtcctccttcctggtggtcctccttcctggtggtcctccttcctggtggtcctccttsctggtggtcctccttgccggtggtcctccttgccggtggtcttcctttccggtggtcctccttgcctgtggtcctccttgcctgtggtcttcctttccgg

SEQ ID NO: 271029 - DNA, 201 bp, Homo sapiens
tttcggtgccttggtgggctgcgagcccctcttctctgagcacggactcctgttccagaggcccccacattctctagggttgctccatgcagtgcccagcycctactcctgtccaagactgacttagacctcctctggccagctggacagctctgcccaaatctcaaattcatcatccctgaggactcaacctcagaccct

SEQ ID NO: 271030 - DNA, 201 bp, Homo sapiens
cgcgtgctgggagcggctcccagcccttggatgatctttcctcttgcctaatgggcaggctgctttcttttctgttttagacctgaaaaaaaaaaaaaaaagcatttgccagcatagcactgatggccacccggcccatgctgtccaccgggcgggtggtagggagggcagagagcaacgtgcgggcctcaggcaccaagg

SEQ ID NO: 271031 - DNA, 201 bp, Homo sapiens
tccccgggtcatggagggcttggctgggagggagcaggcttgggttatggcccggggtcactctgccaatttcggtgccttggtgggctgcgagcccctcytctctgagcacggactcctgttccagaggcccccacattctctagggttgctccatgcagtgcccagctcctactcctgtccaagactgacttagacctc

SEQ ID NO: 271032 - DNA, 201 bp, Homo sapiens
aagtgaagaggttggatccaggggcctctgggggcccgtcgaactcagacattccaaggtggtggaggagcagaatcagggacacatgggggacctcgctrtgtccccaggtcgccctggtgctggtaggcaggctgcagagcccctgcctgctgaagtttgctgaacggggctgcagccgagaatctgtttactgcagca

SEQ ID NO: 271033 - DNA, 201 bp, Homo sapiens
ctcgggccgtgccggtaactgggattggcacccgccggccatggaagagcctgggcccccaggtgggctcagccaagaccaaggtaagggggcaggtgggrtcccagaagggggttgtgatggtccccgtagggagcccaggaccggacctgttcactggtgacccgcccaggaccggacctgttcactggtgacccactg

SEQ ID NO: 271034 - DNA, 201 bp, Homo sapiens
acctctgagaggtaattaggacgttctgtgcacgatgaggaggctggggtgctcacctccagggggctgcagggccagtgcgactgttgtggaccagcccyggagggggagctgcagggtcagctgggctgtgagaccccgggcaagagtcccctgcctcagtttccctatctgaaaagtgaagaggttggatccaggggc

SEQ ID NO: 271035 - DNA, 201 bp, Homo sapiens
tcgctggggtggtttcacatggggccctgggggctgaggcagtaggggatctttgtgctggggacacagcagggccttagaggggcatcccttgccttackctgtgctcccaccccctagccactgcccaggacaggaggtcgctcagcccatcctggtgccaagatgtgtgtcggggtggtgggggtggatctggccctt

SEQ ID NO: 271036 - DNA, 201 bp, Homo sapiens
aggcatcttggtccatccggggcaactacggtcagtctgggtggcccgtggtcagtctggccaggtcctcactggtctgtcttcctcctcagccaggcgaygtgctcctctgtgaccttagagccccagaaccgagctctgggctctgggcatcgctggggtggtttcacatggggccctgggggctgaggcagtagggga

SEQ ID NO: 271037 - DNA, 201 bp, Homo sapiens
ccccaggcttgggggaaccaggagcagggctggggcctttgtttggggaatggcaccatggaaggtgggcagggcagctggggatgccagactcatccccacccagggcctctgcatctggccttccctggccatccacccgggaccccctgtcccatcagcttgtgtttgcttgagtcccactttcttggggctgcctcc

SEQ ID NO: 271038 - DNA, 201 bp, Homo sapiens
ggctctcggtcctcaccgcctcctcttatgaggcccccagcctcatgccctccccagggggcaacaaatgcctgccatgaagtggctccccctcttcccgyccagtcaggctgaattcaaggcccaggcccccgtgtcggaggccttcctcagcactgtctggggtctctttgaggtctcaaacctacaggcccagaagga

SEQ ID NO: 271039 - DNA, 201 bp, Homo sapiens
ttggtggccatggggcagtgttcgtcctgcaatcctgctcactggactccgtgccaggctggccaaggctctgcatggctgctgcatgcgggcacagaatstaggtcaggctgttgcaggggggtagggctgggcagccagggcagtgcctgctccctcagcgtccagtggggctctgcagcccggggctggacacctgac

SEQ ID NO: 271040 - DNA, 201 bp, Homo sapiens
caagcgctcttctgctccggcagtgactgtgctccagctggcgctgtccagccctgcccaggccctttctgccctccggttcctccccttgctgctctagsctggcctaagggaggggcccgtgcccccatgggactggcccttcatgtccccaggggccctgctgtccaggaaagcagcccattctctccagggcttttc

SEQ ID NO: 271041 - DNA, 201 bp, Homo sapiens
cctcaccactctgttcgctcccctctggcctgtttggctccaagcgagcaccctgagctgggacctgggccaagcgctcttctgctccggcagtgactgtrctccagctggcgctgtccagccctgcccaggccctttctgccctccggttcctccccttgctgctctagcctggcctaagggaggggcccgtgcccccat

SEQ ID NO: 271042 - DNA, 201 bp, Homo sapiens
ccggccggccgtggacggcgggcagtgtttggaggccagtttctgctcagcgcctcatggtggggctgtttccttggcaccgtgaggggccggtccatgcrgccagtggaagcgtccatcggcccctcaccactctgttcgctcccctctggcctgtttggctccaagcgagcaccctgagctgggacctgggccaagcgc

SEQ ID NO: 271043 - DNA, 201 bp, Homo sapiens
agccccgaatcctgctccccggtggctgggttgcacccatctggaggtggggctcaggaggcggccttggtgatgccaggtggtcagtgggtttttgccayccgccaggagcttcactgggcctcccgttggccctgcatgggacatggtgacaaatgccacgctggtgacaagccctctctggcttgtttattttgtctt

SEQ ID NO: 271044 - DNA, 201 bp, Homo sapiens
ccccagctccttgtgccgtggggccccttctctcccgggcacccacagggcctctggcaggggcgtatttcccccacgcacaggttccttatctgtctccwcagctgtatccagaatgcagtctggttgtggaaagcaaaattaaacactgcctttgtagacaaagcagctgccgccaggtgcgggcggcacaagctctgt

SEQ ID NO: 271045 - DNA, 201 bp, Homo sapiens
tgaggaggctctggctctgccctcagggacgctcccgcccagaccgcgcccatacaggcagcctgcccccagtatgggcagccccccaaagacccatctgyacagggatgatctcgaggccacgtttcattcccacttcagcctcctgtactcccgagtctcactggcttctaatctgcacttatgcaaccatggtaaaaa

SEQ ID NO: 271046 - DNA, 201 bp, Homo sapiens
aggagacccagcacacttggggtctgcagctggccagggaagggcctagtcttaggagggggcagtggtgggagtggctctgagcccaccctccgtgcctrcgtcctctgggcagagggaggggagccagcagaacagtccttacagactccacgtgccgccgaggacggagcagatgggccagtgtcctgggtccagccc

SEQ ID NO: 271047 - DNA, 201 bp, Homo sapiens
tggctgccacgagcctggctccctctgcagctcctctggggtgtcctggacggtggctgggggcaaggccgtgcacctgccttcagagagccccaggccargtgggtgcgatgcccctgctggccatgccctgctcagtgagggcagagaggcagccagggcctcagagaaaccagtgacttgtggcagggacaggagcct

SEQ ID NO: 271048 - DNA, 201 bp, Homo sapiens
gcctcgtgcatttaccaggcgtcagcttcgtgctgcctcctctgggactcacggccatggctgcccacagtgaggccaggccccactctgcagatgaggcrgtgaggaccccacaatgctggggctggcacctggctgccgactctctcatcttcctggctcacaccctcagccctgaagcggtgggcagtgatggggatg

SEQ ID NO: 271049 - DNA, 201 bp, Homo sapiens
aatgggctattaatagggtccccttcctgatggggctgtcaagtgcgattaataccgctgctgtgagctgggctgccaccagctggggatggctggggacrgcgagggggcaggaaggggagcccactctgggagggacccttactgagatggggacctggccctggctgtcccgaagaggccagagaaaggccagatgtt

SEQ ID NO: 271050 - DNA, 201 bp, Homo sapiens
ggctgtgctggcaggcatggcctgagggtcaggctagtcccttctcctagtgtcctggaaactggcactgagtgggcatatgcagccttgtcgtgggcacygtggctcctggagtctggtgaagagggcagggttggtcttcctgggccagggtaggtggggacctgcaggcaggggagggtgtgggcagcatggcccatc

SEQ ID NO: 271051 - DNA, 201 bp, Homo sapiens
ggctatgcaggctgtgctggcaggcatggcctgagggtcaggctagtcccttctcctagtgtcctggaaactggcactgagtgggcatatgcagccttgtygtgggcaccgtggctcctggagtctggtgaagagggcagggttggtcttcctgggccagggtaggtggggacctgcaggcaggggagggtgtgggcagca

SEQ ID NO: 271052 - DNA, 201 bp, Homo sapiens
cctcctcccttcctcccttctccctccacctttcctccttcctccctcctccctcctcccttcctccctccaaggtcagtggtgactccccagggcttagmcgtcacctgtggctctgtctcctgggaggcctggagaggcaggggtgggtggctatgcaggctgtgctggcaggcatggcctgagggtcaggctagtccc

SEQ ID NO: 271053 - DNA, 201 bp, Homo sapiens
actcccgagtctcactggcttctaatctgcacttatgcaaccatggtaaaaagtgactacatctggggatgtccccgtgcgctgtgatgtgtgcttggccrtctctgcaaacgggggcccgaggggctggtgctgcttctcagcagcctgggccacgccggtcttgcagcgtggctgctcctgggcactcttgagtcactg

SEQ ID NO: 271054 - DNA, 201 bp, Homo sapiens
cattcccacttcagcctcctgtactcccgagtctcactggcttctaatctgcacttatgcaaccatggtaaaaagtgactacatctggggatgtccccgtrcgctgtgatgtgtgcttggccgtctctgcaaacgggggcccgaggggctggtgctgcttctcagcagcctgggccacgccggtcttgcagcgtggctgct

SEQ ID NO: 271055 - DNA, 201 bp, Homo sapiens
agccctcagccgggacccatgacacaggaagggctggaggctgggctggacagtcccccttgggcactggcctggcctgacctggacatgccgagtggccrgggaacgggtgccaggctggcccgagtggccttcctgctttcacaggaactggcaggccgggtggacccagtgggtccagcaaggttggtgtgacccctg

SEQ ID NO: 271056 - DNA, 201 bp, Homo sapiens
gcaggcatccagctgccttggagcagatggcagagaccctggagcagggcactagcagggggctgggcacctacagcaggagccctcagccgggacccatsacacaggaagggctggaggctgggctggacagtcccccttgggcactggcctggcctgacctggacatgccgagtggccggggaacgggtgccaggctgg

SEQ ID NO: 271057 - DNA, 201 bp, Homo sapiens
gtggggactcagggcaggacaccgggctgcctggggcggggggactcctatcagtccccgtaaggccctgctcagtgcccggcccctgtgaggctgaggaygggacaagggtgtgtcctgccgtccagacactgggaccttgtgcaggcatccagctgccttggagcagatggcagagaccctggagcagggcactagcag

SEQ ID NO: 271058 - DNA, 201 bp, Homo sapiens
tggggacctctcctaccctccctgctgggcttcaggggcctttccagccatggctgggacctgtgagtggccaggggctggggggctgcatgctcccagtrgcctcgtggccgtgatcacaaggggctgagtgccctctgcctcagcttcctgccactgcagcttctcgccagggttccccagccgcctgctccccaatgt

SEQ ID NO: 271059 - DNA, 201 bp, Homo sapiens
gctgggtctgcggagagcaggtctcacagccacaaggggcttccaggtgggaagggaccccaggttcacaccatgactctggcactgtgaggggcgatcckcacctcctctaggccttaggcaggtcctctctgtccagccagggcccctacctgtcatctccattttcaaaggggcaagagccacctacctccagaaccc

SEQ ID NO: 271060 - DNA, 201 bp, Homo sapiens
gctcttggtgggaggtgcccacccttcctgagagaatgggcccacttggtaggacctttttctgccccttctagggccagcggaggggcccgtgctgggtmtgcggagagcaggtctcacagccacaaggggcttccaggtgggaagggaccccaggttcacaccatgactctggcactgtgaggggcgatccgcacctcc

SEQ ID NO: 271061 - DNA, 201 bp, Homo sapiens
ggcggccctggggggtgggtggcgctctagccacgcgctctggggctcgtcaaaaagacttaaattgccccttgctctcagctgtgccttaaaaagctgcrggtggtgactcagttgtcaccgtcactgtcaccgctgccggtgcttctggggacgcgtgaggtcaccggggtggctcgtcctgtgcagcccccgcccccg

SEQ ID NO: 271062 - DNA, 201 bp, Homo sapiens
gcagagaccagtgtggctggaagtaagggcgccactctgggaccacggtggctctcagggcaggactgggtgggcaagcgtggactgcatctgtcctgcayggggtcctgcgtctggctcgcccggtgccgtgctgtggggcccacgccaacggctgacctcatggtcctccgtggcctcgcctaggcttgcggcagccga

SEQ ID NO: 271063 - DNA, 201 bp, Homo sapiens
cgcaggtattgaaacagaagcagccggcgagccctccagaagtgggagccctccagaagtgggagccctccgggggtgggagccctccaggggtgggagcyggcttggactcgctggccctgagcaggtacctgggctctccctgtgggtgagagcagtgggcgggcaggctgggaacttagggctgtaggacctgctgag

SEQ ID NO: 271064 - DNA, 201 bp, Homo sapiens
cccgcttgtcccccaattccccacctgccccctaactcccccaccttccccctcactccccacctgccccccactcggcctgccctccaactccaactccscccctgccccccgctccctgtctgcccccctgctccccgcctgcccccctctccccgcctgcccccccgctccccgcctgccccccgctccccgcctacc

SEQ ID NO: 271065 - DNA, 201 bp, Homo sapiens
tcagctggagtccccgtcgctcgagagcctcctcccaggaaaacgccctttgctgcggcagctttctgttctccctggctccctgcacggaactgagcttyggtacagttcatcatttgtgctgtttcaacaaagaccttcttagggaaatggcctcttctctgctttaattctgagcacgcactggtgaaggacactgta

SEQ ID NO: 271066 - DNA, 201 bp, Homo sapiens
gagatgagccagcagtagtatgttatgggcagggctgtgtggctgcctgtaagctctgcctagccacctctcagggacagtggctgccccagcctcgcccygtcctgcccctgctccgtgacgctccctggaactcagtcattctctggggaaccaacagccctcagaactgagttgcagctgtagctgcagttgtctttg

SEQ ID NO: 271067 - DNA, 201 bp, Homo sapiens
  misc_feature (1)...(201): n = A,T,C or G
atcacacgccttccctgagcctggggtgggcagagtgctgtgaccctgggggttgtcattgccactactcgcagggctcgggacagatgccaacaggccgncctctggctcctgcaggcatccaccaatcgaaagcgtgtagaaaacactgctaagaggaaactggattccctcatcaaagagtcgaagattcgggactgt

SEQ ID NO: 271068 - DNA, 201 bp, Homo sapiens
aggaatgggtatcttggggagagaagccggtgggtaaggaggggccccacccccagaaagctgagcacaacccggtgagtgcttgtgcagccaacagcctygccccgtgaggacccttccctgagcaccccctcggggcccagaacccagcctccctgacagaggcagggctggggggcctgctgctggctgagaccctcc

SEQ ID NO: 271069 - DNA, 201 bp, Homo sapiens
cccctgggcgctggctcctacctgacctcatggccgctgagccccgcagggtcttggaggggctccagcccagcttgggaggcggggcggccctggggggygggtggcgctctagccacgcgctctggggctcgtcaaaaagacttaaattgccccttgctctcagctgtgccttaaaaagctgcgggtggtgactcagtt

SEQ ID NO: 271070 - DNA, 201 bp, Homo sapiens
gaaggatgctctgtggccaccatagctggagcagctgcctgtgggggatgccgacgcttgttccctggggtcctgggggtcaggcgggggcaggagcagtyagaagcttcagaggagcggccccagggcctttgctgcagatggaggcgggaggctcccaggtggcaaagcgcacctgctgcaggtgtgagagggcccagt

SEQ ID NO: 271071 - DNA, 201 bp, Homo sapiens
cggggcaggaggaccctcggccctgccaggccccctctgcatccctcggtgtgggtccccaaatttggcggttcacccactgttcccagggcctgtgctargttgggagacacccctcagggagagcacgtaggggcacagggtccccagagaagggcctactgggggcgcagggaggctggcagcccgccttcctgcagg

SEQ ID NO: 271072 - DNA, 201 bp, Homo sapiens
gcatgggaccctcggctgtgggagctaggacgggcgggcacctggaactggacgttggctgcgtgatggccagtctaggctgggtgctgcccagaggcccrgcaggtccctgttccccggcctggcctgagcaccaaggtgtcggggcaggaggaccctcggccctgccaggccccctctgcatccctcggtgtgggtccc

SEQ ID NO: 271073 - DNA, 201 bp, Homo sapiens
gtgcctgctctctgctgcctctttctggggtccttgttcctgtgtgcagcccctggacaccctctcctgactccagcagatgccagccctgggtccagccyggtgcctgtccccgtctcccggtggggagggctgctatggcttccagggtccccaggactttgggcaacggtggcgggggctgctggaggggcctggcct

SEQ ID NO: 271074 - DNA, 201 bp, Homo sapiens
ggactcctcaccacctccacccaggcctgggccgcccatcccccaccgtgctacaagcctcctgcctgtcccccgatcttccagtggggcagccgggacartttgccaaaacgcaagtctgccccccgacagcgccagtgcccccactgtgctcgagatgtggtctgtgggcgccgtgctccctggggcccttccccgtgt

SEQ ID NO: 271075 - DNA, 201 bp, Homo sapiens
gcccctcagtgctctcagagtcctggctcaccccgcccttccccgtggatccattcctggtcggggcgccccctcagtgctctcagagctgggactcctcwccacctccacccaggcctgggccgcccatcccccaccgtgctacaagcctcctgcctgtcccccgatcttccagtggggcagccgggacaatttgccaaa

SEQ ID NO: 271076 - DNA, 201 bp, Homo sapiens
cgcccctcagtgctctcagagtcctggctcaccccgcccttccccgtggatccattcctggtcggggcgccccctcagtgctctcagagctgggactcctyaccacctccacccaggcctgggccgcccatcccccaccgtgctacaagcctcctgcctgtcccccgatcttccagtggggcagccgggacaatttgccaa

SEQ ID NO: 271077 - DNA, 201 bp, Homo sapiens; identical to SEQ ID NO: 53782

SEQ ID NO: 271078 - DNA, 201 bp, Homo sapiens
acccaggatgctggagcttcagggagcaatccggaggttctccagaagccgctgaggcctgggtccccctgccgccccccatcccccggccctgcctggcrggtagcagccccgtggaagtatttcatcttggctgaaaggcagcagctgccgtcctggagtgagccccgtggaggggggcctatctggtggggatgggag

SEQ ID NO: 271079 - DNA, 201 bp, Homo sapiens
ctttgtcatccttcagaaatgccaaccctgtgaagtgaggtctgctctgccgtgggcctgtcggaggaggctgagcagagacttccgtctgggccccgagytttggcagtgcacgggaaggcgccccctccctctggcccgaggctcccttgctggtaggggcagcgggcagcccccactgcattgctgagcctggaacca

SEQ ID NO: 271080 - DNA, 201 bp, Homo sapiens
ccttccccctcactccccacctgccccccactcggcctgccctccaactccaactccccccctgccccccgctccctgtctgcccccctgctccccgcctrcccccctctccccgcctgcccccccgctccccgcctgccccccgctccccgcctaccccccgctccccgcctgctgactgttgcatcccaggttccagac

SEQ ID NO: 271081 - DNA, 201 bp, Homo sapiens
actgtcagtctggctcctagcgcctctcccggcagccgtggcaccaataaattcagaggaaaccggggctggcttttctggaggtggagagagacgagcaygtctgagagccatgtggacctggacaacctgggagcctcctgctgcagtgcacgtggggcctcgggctccagccagtgcagcctggtgacgggaaggccc

SEQ ID NO: 271082 - DNA, 201 bp, Homo sapiens
agtgagctgagatggtgctactgcactccagcctgggtgacatagtgagactctgtctcaacaaaaccaaccaaccaaccaaccaaccaaccaaccaaccagcaaaccagggtgtcaaggcccacacttgagggagtggtgtcaggtgaggtgggggaccaggtctgcagcagcctctgcctggcctgggtggggcagctc

SEQ ID NO: 271083 - DNA, 201 bp, Homo sapiens
cagtgagctgagatggtgctactgcactccagcctgggtgacatagtgagactctgtctcaacaaaaccaaccaaccaaccaaccaaccaaccaaccaaccagcaaaccagggtgtcaaggcccacacttgagggagtggtgtcaggtgaggtgggggaccaggtctgcagcagcctctgcctggcctgggtggggcagct

SEQ ID NO: 271084 - DNA, 201 bp, Homo sapiens
gcagtgagctgagatggtgctactgcactccagcctgggtgacatagtgagactctgtctcaacaaaaccaaccaaccaaccaaccaaccaaccaaccaaccagcaaaccagggtgtcaaggcccacacttgagggagtggtgtcaggtgaggtgggggaccaggtctgcagcagcctctgcctggcctgggtggggcagc

SEQ ID NO: 271085 - DNA, 201 bp, Homo sapiens
ctgtgttctgtgtggcatgggggcaggtggtcatgagacgaggctggtggtgggctgacatggcccctatgccacgccgtcctgcaggcttcaccaactayaccaggagccctgctggtgacatcttcaaccctgagcaccaccatgtgcaccaggacatgacgcagccgctgagccactacttcatcacctcgtcccaca

SEQ ID NO: 271086 - DNA, 201 bp, Homo sapiens
gaggagctgggcagtgggctgcagtggggcgccctggggccaggagggcagctggggcaggcaggctgtcccctcaccctctgggtctctcgtgggggccyggggccgcaggtctgggacgagtcaggtgctgggggcagccgaacccgccccagctcagccgcccctgctggtggtttctccgggatagcgtcctgccct

SEQ ID NO: 271087 - DNA, 201 bp, Homo sapiens
tgcagtgagctgagatggtgctactgcactccagcctgggtgacatagtgagactctgtctcaacaaaaccaaccaaccaaccaaccaaccaaccaaccaaccagcaaaccagggtgtcaaggcccacacttgagggagtggtgtcaggtgaggtgggggaccaggtctgcagcagcctctgcctggcctgggtggggcag

SEQ ID NO: 271088 - DNA, 201 bp, Homo sapiens
ccacagccctggatgctgccgggctgtcggctctcggtcctcaccgcctcctcttatgaggcccccagcctcatgccctccccagggggcaacaaatgccygccatgaagtggctccccctcttcccgtccagtcaggctgaattcaaggcccaggcccccgtgtcggaggccttcctcagcactgtctggggtctctttg

SEQ ID NO: 271089 - DNA, 201 bp, Homo sapiens
tgacggccgtgggctggcatctgctgtgggagatgggctgcacctgaggagcccccggggggatctctgggcaggggctgggaaggcctcttctgtgtccytcactgagcaatgggacaggccctcttttggtcgaagctcagcctgcctgggctcactgtggctaggcccctggggctgaccaaggcctgcccgcctgca

SEQ ID NO: 271090 - DNA, 201 bp, Homo sapiens
tagcagctcagcctcctcagggcctgcccagcagctcagcaccaggaacagctcccaccacatgaagtcaaagctgggggcctgcagccagcccaccccarcagggcctccgcaagccctgtgccctcctgccctctctacgatgctatgtgtggtctcaatcccacacctgggctgagggggaggacccccaggcgcctc

SEQ ID NO: 271091 - DNA, 201 bp, Homo sapiens
cccaggcctgggcttgttgggtgtatctggggtcttgggacctttaagtagaatggggggcagagcaggtgggggccctgggaggctgtgacctcatgacyctgctgacccacactgctccaggctacagacacgtgtacctagaagggatggaagaggcctccatcttcgtgcatgtggctgtcagtgacatcagcggta

SEQ ID NO: 271092 - DNA, 201 bp, Homo sapiens
gtgcgggtcggggctgagctgcctgggcttcatactcgggagcggaggctcggatcgcggtggcacgggcaggggtgcgggcgcgggactgtgggcgggaygggcggagcggtcttgagctctccggatggcctcaggtgcggggtgagggatctgggggccgcccctcggcaaactttccttccccgggcttctgcggag

SEQ ID NO: 271093 - DNA, 201 bp, Homo sapiens
cgggagcggaggctcggatcgcggtggcacgggcaggggtgcgggcgcgggactgtgggcgggacgggcggagcggtcttgagctctccggatggcctcakgtgcggggtgagggatctgggggccgcccctcggcaaactttccttccccgggcttctgcggaggtcgcactggggctgtgaccgtgctgagaatgaccc

SEQ ID NO: 271094 - DNA, 201 bp, Homo sapiens; identical to SEQ ID NO: 53780

SEQ ID NO: 271095 - DNA, 201 bp, Homo sapiens
cagacctcacccaccaactccctctggccttcttgctctctctaggtgtgtgatgcgctgctggcccaggctacaccccgacaagggacaccgggggcccygggagcagagagacctcagagcagcctcctcctgcctcctgtggacggccggccccagctggtgatcccagccagtcccagctttcagttgctgccccca

SEQ ID NO: 271096 - DNA, 201 bp, Homo sapiens
gtgggtggtggtggggggactgtgattcaggctgagctgtcacggatgcctgtcatcggcatgctggtggggaagtgtctgtttgcacagaaaacacgttytgagccccgggatctttgtcatccttcagaaatgccaaccctgtgaagtgaggtctgctctgccgtgggcctgtcggaggaggctgagcagagacttccg

SEQ ID NO: 271097 - DNA, 201 bp, Homo sapiens
cgcgacccaccaacatgtcctatcaccgtggagggcagccctgtgggagtctgcgccatgggtgggctgggggctctcgggggctctgacccctcagaggktcagccaccgttggcagcagggagcccttcccccagaccacagccctggtaatgggggcaggacaggccaatgggacccctccctgggggctgggcagcg

SEQ ID NO: 271098 - DNA, 201 bp, Homo sapiens
ctctactccagccccaggaactggctccaagggccaccgtgaggccagagagccgcgacccaccaacatgtcctatcaccgtggagggcagccctgtgggrgtctgcgccatgggtgggctgggggctctcgggggctctgacccctcagagggtcagccaccgttggcagcagggagcccttcccccagaccacagccct

SEQ ID NO: 271099 - DNA, 201 bp, Homo sapiens
cccctcccagctgggcccgtcccctgaggcttgtccaggaacaggcgccctgggcagaggtggcttcatccgttgctgtccccttcttggctgggcctcgrcgggggggcagatatcgggcacctcctcccaggagggagtttggtttttgtctgcaaaatgtgatccttcgagagctggttcaaacacccagccattccc

SEQ ID NO: 271100 - DNA, 201 bp, Homo sapiens
acagtgtctccctggctcccctggggtctcctgagccacctcaaggagccccggcccctcccagctgggcccgtcccctgaggcttgtccaggaacaggcrccctgggcagaggtggcttcatccgttgctgtccccttcttggctgggcctcggcgggggggcagatatcgggcacctcctcccaggagggagtttggtt

SEQ ID NO: 271101 - DNA, 201 bp, Homo sapiens
cctggggaagtgggtgaatgaagctgtttctctgcatacagtgtctccctggctcccctggggtctcctgagccacctcaaggagccccggcccctcccasctgggcccgtcccctgaggcttgtccaggaacaggcgccctgggcagaggtggcttcatccgttgctgtccccttcttggctgggcctcggcgggggggc

SEQ ID NO: 271102 - DNA, 201 bp, Homo sapiens
accccgatccctgccggatggtgccgcagggcaccctgtgtgggtccgggaggtgctgcgtggacttgccgcatggcacatctgcctgggctgcaggtgckcatctggggggagccggcctctccccacactagcaggtggggtgcagcgggcactgcccgggcaggcgggagctccggaggccctggggcggccctgctg

SEQ ID NO: 271103 - DNA, 201 bp, Homo sapiens
ctgctatgctgctgggcgccgggcgaggtcgaggactggcagtctgatgcccggtcaccggcgccacagcggcgtccagctggcaggtgtcgtccttcagygagaccaaggcccaccagattctgcagcagaagccggcgcagtacctacgcttcaaccagcagcagctctcccgcatctacccctcctcctaccgtgtgg

SEQ ID NO: 271104 - DNA, 201 bp, Homo sapiens
tccccaccatccagtctctccctgggtggggtcctggctccacaggtgaccaagaggggtactggaggcctggacgggcctcactccattcttagggagcrgctgctcctggttcccaaccacaagtcacatcactgctgccccggaaggcacctggggcctccagaatgctcgtttcgtcaaactgttgtacgtggctcc

SEQ ID NO: 271105 - DNA, 201 bp, Homo sapiens
gcagcctcctggctccccaccatccagtctctccctgggtggggtcctggctccacaggtgaccaagaggggtactggaggcctggacgggcctcactccrttcttagggagcggctgctcctggttcccaaccacaagtcacatcactgctgccccggaaggcacctggggcctccagaatgctcgtttcgtcaaactgt

SEQ ID NO: 271106 - DNA, 201 bp, Homo sapiens
tggcctcctctccacatagtgattctaggccagacccaggccccgagcccagctctcccctgctcagaaccttccagaagcccccacacctgccacgcttrgcaggccacgtcatcctccactgcacacagtgcctagggactttgcacctgctggtagctcccagccagcccacatcctgcccagcactcaggtttccgc

SEQ ID NO: 271107 - DNA, 201 bp, Homo sapiens
tgacaccaggctagcactggggcagggtccttcaggccttgtgggggatgtgggagcgatggtgcaggcctgtccacctactcccagggatacctgcctgygaggctggctgcgccagctccggggatgtccctccaggatgtgctggcctcagtcctgcacaggtgtgaaccttggagtcccattcacattgggtgaacg

SEQ ID NO: 271108 - DNA, 201 bp, Homo sapiens
cctgcacaggtgtgaaccttggagtcccattcacattgggtgaacgaggggcagacggcagatacgcggcagctgtgcaggggaggctagcgtgtggtggygggtgggcggggcacacacctggaaggtcaggtgctgaccagggcagccttgtgtcaccctcgcagttgccctgaactaccagtcagaggggcggatgct

SEQ ID NO: 271109 - DNA, 201 bp, Homo sapiens; identical to SEQ ID NO: 53789

SEQ ID NO: 271110 - DNA, 201 bp, Homo sapiens; identical to SEQ ID NO: 53790

SEQ ID NO: 271111 - DNA, 201 bp, Homo sapiens
ctctgtgcacgagcacggctcgtcatgggggcgcggtgggtgctgtctcgggggcatctggcatgtgagggcccctctggcctctgcgccctggagatgcrgctgcctccctctcagcagctgttctgcccaggcagggacctcctgggcccagctgtccaggaagattggctgtggccaggtgctggtgggctgggagtc

SEQ ID NO: 271112 - DNA, 201 bp, Homo sapiens
ccccagggttcaaccccacctgggaggagaccctggttttcatggtgcacatgccggagatcgcgctggtccgcttcctcgtctgggaccacgatcccatygggcgtgacttcattggccagaggacgctggccttcagcagcatgatgccaggtgggcaggagtggacacggtgccccccacactggccgagggccccag

SEQ ID NO: 271113 - DNA, 201 bp, Homo sapiens
cacctgccacagggcgacccggcagaagaagaccatgaagctgtcccgggccctctctgacctggtgaagtacaccaagtccgtggccacccacgacatakagatggagggtgagtggctcggggacctggggccacgggcggaggcctccctgtcccccatccctgctatgctgctgggcgccgggcgaggtcgaggact

SEQ ID NO: 271114 - DNA, 201 bp, Homo sapiens
ccagccgggctctgcccttagcacacatctgatccacgtgtgccgctgccacccggccgacacggaggcccccttggaccctggcctcctctccacatagygattctaggccagacccaggccccgagcccagctctcccctgctcagaaccttccagaagcccccacacctgccacgcttggcaggccacgtcatcctcc

SEQ ID NO: 271115 - DNA, 201 bp, Homo sapiens
gggactcttgtctccaatggcccctgggcacaagtggccctggattctggggttccattgccactcacccccctattcacttgtggctcagccctgcctgygatttgggggttgaggctggagttaagaccctgtagccaggtctcccggggctgggggtggggtggcccttgacagactggggccccaggcagaagcagg

SEQ ID NO: 271116 - DNA, 201 bp, Homo sapiens
aggcccagccaggcgggatggacatgggaggctgcgtgggccgctggggaccccggaggataggccctccccaaccccccagccttcgccaaggcctggcmtgggccagaggccctacagctcacacctctgccccccgcacagaagaagggcagcaagctgaagaaggcggccagcgtggaggagggagatgagggtcag

SEQ ID NO: 271117 - DNA, 201 bp, Homo sapiens
cacgagctcggcccagtgctcccacgctgacctagggctggcccctcgcggtcttcccttcccttgtcaaacacccctccctctgtctccagagtgccggygagctgggcgggctccactccctccatgaagctggcccctgagcgcagatgtgcaggctggcattcctgcccgctgtgagcatggaggggcctggcctca

SEQ ID NO: 271118 - DNA, 201 bp, Homo sapiens
tggttcaacacagggaaactgaagccggagaggcagtgaactcccatggggcacacagagtcgggcagagtcagggtgtgaactggggtctcctgagctgrccggagcactgcccttcccggctcctgtctacagtggcattttctggaacacactcagggcaccccttgctggcagccccagaggacatggtgctgggct

SEQ ID NO: 271119 - DNA, 201 bp, Homo sapiens
gctggctcacatcccttctctggcccacgctggccctcgccccaagctcaggtgccttgtggctgccctgagagtctgccagagcccagatcgagagggcrccgaggaggctttggcaggcccagccaggcgggatggacatgggaggctgcgtgggccgctggggaccccggaggataggccctccccaaccccccagcc

SEQ ID NO: 271120 - DNA, 201 bp, Homo sapiens
atagcgtcctgccctctctgggcctcaatctctccctcctgagagtggactctcttgtgggctgggtggccagtggggcctcaggccaggagggagagggmgcccctctgtgacatctttcctggagaggctgaggctcccacttctacctgccctcagggggcttcctgagccaggggataccagccaagggtgtggcac

SEQ ID NO: 271121 - DNA, 201 bp, Homo sapiens
ctcaggctcggctctgcaggaggcgttaggggctcagcaggccctgaggctgggcttggtgtcactgaagcccaagagggcaggggaagtggctgcctttktgtgcagagccagggcccggggagcaggtgtgcagtgtttccattgcacatcaaggaaactgaggcacaggggaagggggatcagctctgcccacctaca

SEQ ID NO: 271122 - DNA, 201 bp, Homo sapiens
caggccgagctatcggttgcaggtgccagggactgggccagaagcctgggctcggagctggtgggaacaggtgcctggctggctcacatcccttctctggyccacgctggccctcgccccaagctcaggtgccttgtggctgccctgagagtctgccagagcccagatcgagagggcaccgaggaggctttggcaggccca

SEQ ID NO: 271123 - DNA, 201 bp, Homo sapiens
agcggagcccacgcccggcccttgcgccggcagacgtgtcggggcacggctcctgcactcccactgccgcaggaactgctcaggaacctgccggtctccgrctgggacggtggctggatcagctcaagcctccagggccctgaggctgaggggctgagtgctcattccagccgcctcggggaacccgggctgggagacccc

SEQ ID NO: 271124 - DNA, 201 bp, Homo sapiens
ctgcagctgctggtggctcccctccccctccacacctggggccccgcatggcaggaggtggtcacaccttgaggtggcagcggctcagagagcccagaggyggccccacatcctcctgcccgggcctgcgtgcctgcctgccctgcccacatccggggctcagtgtccacacaagcctcccaggccgcactctgggatggg

SEQ ID NO: 271125 - DNA, 201 bp, Homo sapiens
aaagggttgcgcaagcaggcctggccgagcagtattccaggcacacaaacgcagttattacgtagtcaccactggtgggaaaaaaggattcagaacttaaygagtttaaaacaacacatgagagacgctgaggcaggtgtgagcgaatgtttccaccggggcctgactttcaggccgcttctcctcggcagctgcctctgc

SEQ ID NO: 271126 - DNA, 201 bp, Homo sapiens
ccctccttcctggggattgggtgcgaggagggaggcgaggtcaagggtgggggtcctacctgccagggctccttctagggccctggggagagagacatgcygacaggagcctgcccctcccagccctggctgttcttcccacctggcagagcatggctctgtgtgtttgagggcccaggactcctgatgtccatctgtgct

SEQ ID NO: 271127 - DNA, 201 bp, Homo sapiens
tgagggcccaggactcctgatgtccatctgtgctgggcaggctgggaagaatccaggcctaatggccaaggcctccacctggcccctgttaatcccctccscagggagggcactcacctccctgaggggcaggcaccaaggaaaaggtggccagaaaggctctgaaaggagctggcctgagagtgaggagttggcgggtga

SEQ ID NO: 271128 - DNA, 201 bp, Homo sapiens
gcaggctggctgccgctgcgtggagggtaagccctggaccttgggtgacggccgtgggctggcatctgctgtgggagatgggctgcacctgaggagccccyggggggatctctgggcaggggctgggaaggcctcttctgtgtccctcactgagcaatgggacaggccctcttttggtcgaagctcagcctgcctgggctc

SEQ ID NO: 271129 - DNA, 201 bp, Homo sapiens
ggggtccctggggaggacagaggtgggaatagttgctggctggcagggcccgagtgcagcgtgacacggctctcagagcccacagcacgcctggcctgttktgatctccaggaggggagactgggtttccagggtcctttgatggctgtggagtacagccagggtggagaagatgatgaactgtgggcagctggggtccag

SEQ ID NO: 271130 - DNA, 201 bp, Homo sapiens
agtgagaattaggggtttggagctcagccaagcggggctgcccttggcagacattaccagggagaccaaaggggccttgattcactgcatgggctgcgtgygtggtgaccaaaagggcttgagaccctggcctcaggagtgacactggtgagaccacagggctggagaaaggagaaagggctgcccgccatgcctgtggct

SEQ ID NO: 271131 - DNA, 201 bp, Homo sapiens
agggtcctgtggctctcctcccctgccctttggttcttcccacctgactcttcagacacagctacccagccccactgcgctggcctatttacctatgaggkgcagtgaagctgggctgcaatgcagcgcctgccagcaggggtcactgggcacacactgtgctccctcccccgagttatgcacctgcctggacagacctca

SEQ ID NO: 271132 - DNA, 201 bp, Homo sapiens
gttgctgcccccaccgacagtcctcagtccctccatgatggctcccccgacagccggcccccttcctggcccagctcttccgcctgaggacccagggccgkatccggagagcaggtggcttttcttgagcgccaacattctgcccgtgggtgagtgaggccctggctacccacaccaagccagagaacattgttcttctcc

SEQ ID NO: 271133 - DNA, 201 bp, Homo sapiens
tggccgggggctgctgaggcccatccgggccggtgtgctcctgtcccctggagtactccagcgggaggctgtggctcttggggttcagggctgctggagtrtgtgtccccgccattctcactgagctggagctggagcggctcagtctcggtgccttgaggctggcacaggtgggaacggtgtgtccgcacagcaggagcc

SEQ ID NO: 271134 - DNA, 201 bp, Homo sapiens
acattctgcccgtgggtgagtgaggccctggctacccacaccaagccagagaacattgttcttctcctgctgagtgcgtctctgtttcctggagcccaggracaatacggttcagggttcagttcagtgaccctgatgtcccgtgatgtcacctggggagaactggggctctgctagcaccccagggcaggtggggccgcc

SEQ ID NO: 271135 - DNA, 201 bp, Homo sapiens
ctggctgccgctgcgtggagggtaagccctggaccttgggtgacggccgtgggctggcatctgctgtgggagatgggctgcacctgaggagcccccggggkgatctctgggcaggggctgggaaggcctcttctgtgtccctcactgagcaatgggacaggccctcttttggtcgaagctcagcctgcctgggctcactgt

SEQ ID NO: 271136 - DNA, 201 bp, Homo sapiens
tgagcgtgtgtgcgtgtgtgcgtgtgtctgcctgcactcgtgagggtctgcacctgtgcctacatggtgtgtgcccaagtgcgtgtgtgtgtgtgtgtgtgctcatgctctgtgcatgcctgtgcctcacagaggtggctccggcttgtcaatgccacattctccagatatgcccagacaggtcttcgccatctgagggtg

SEQ ID NO: 271137 - DNA, 201 bp, Homo sapiens
gtgagcgtgtgtgcgtgtgtgcgtgtgtctgcctgcactcgtgagggtctgcacctgtgcctacatggtgtgtgcccaagtgcgtgtgtgtgtgtgtgtgtgctcatgctctgtgcatgcctgtgcctcacagaggtggctccggcttgtcaatgccacattctccagatatgcccagacaggtcttcgccatctgagggt

SEQ ID NO: 271138 - DNA, 201 bp, Homo sapiens
agcatttgccagcatagcactgatggccacccggcccatgctgtccaccgggcgggtggtagggagggcagagagcaacgtgcgggcctcaggcaccaagraggccgcacaggcaaggggctggtgggcgctgggctcactggtgcatccctgcagggctgactggccccaggctgtgtgtgtgagtgggggtgggccatg

SEQ ID NO: 271139 - DNA, 201 bp, Homo sapiens
cccaggcaagaaccatggcagtggtgagcgtgtgtgcgtgtgtgcgtgtgtctgcctgcactcgtgagggtctgcacctgtgcctacatggtgtgtgcccwagtgcgtgtgtgtgtgtgtgtgtgctcatgctctgtgcatgcctgtgcctcacagaggtggctccggcttgtcaatgccacattctccagatatgcccag

SEQ ID NO: 271140 - DNA, 201 bp, Homo sapiens
tcttccgcctgaggacccagggccggatccggagagcaggtggcttttcttgagcgccaacattctgcccgtgggtgagtgaggccctggctacccacaccaagccagagaacattgttcttctcctgctgagtgcgtctctgtttcctggagcccagggacaatacggttcagggttcagttcagtgaccctgatgtccc

SEQ ID NO: 271141 - DNA, 201 bp, Homo sapiens
cggagcagcaggggtggcggaagccccggggctgttcacagcaggagcttccgaggggcatcctgggcaggccccttcagcactggctggggcagggtctmcagctccccaaacacagcgctagctctgggccagaggggcagggtctccagctccccaaacacagcgctagctctgggccaggggcggggagaggaaaac

SEQ ID NO: 271142 - DNA, 201 bp, Homo sapiens
ctgaggatggattattccttagaacctgaacctgggtttcaccggcctctggaagggggctcaggggcctctgtccactccaaggaggcgtggctgggtcrggacctgcagcccgcacacccctctccctccttcccacccttgggcgtgtctgtggctttcgccttctgtctcctctccccacctcagtttctcccttct

SEQ ID NO: 271143 - DNA, 201 bp, Homo sapiens
cccagggagcacctcactggctcccaaaaggcaggagtgggagacagggcagccagcccagccccagggccagcttgagcagggaggtccagacagggacrgaacgactatacaagatcccagaaacttcaggcagggaagctcagagggccagctccatctccaggacaccctctctgtctgagactctctggcagagca

SEQ ID NO: 271144 - DNA, 201 bp, Homo sapiens
agatgccaccacactcccctctccacagatgctcaagggcaagatcctcgtgaaggtgagtgagcccctgccctcctgggaccagctcacacagagtctcrggcctgcagcagtgccctgctccagacaggcaggggcatcatgccatccatgggcatatctagggggctgagggctggccacgctcctgacctggcctcc

SEQ ID NO: 271145 - DNA, 201 bp, Homo sapiens
tccccctccttctctctcctgcccccatctcggaccctcaggctgttggttctgagttcgcctcccactccctccctgtccttgccaaccatgccagtgcmtgggatgagggcacccctgaggccggcgctccgagccagaatcccggatctgcttctaaatggcttcccagccactgtgaccaaatgcgtagatttggga

SEQ ID NO: 271146 - DNA, 201 bp, Homo sapiens
caggagctgaggacgggaggagagccagcctggggatctgcgggtcaggcaggggcatggcctgtgggggaggggccacccccaggaagaggtccctgcargctggtgcaatgccaatgggcttcctggaggaggtggggtagtgctgggcccacaggaggcagaggccccaggcctgggcttgttgggtgtatctggggt

SEQ ID NO: 271147 - DNA, 201 bp, Homo sapiens
cccttcagccccctactgtggccgtgtgctccaccccagcacccccgcccgaggcaggccctggagctcacgctgctgaggtcccacaggccccctggcgmagcctcctggctccccaccatcccccctggtgcagcctcctggctccccaccatccagtctctccctgggtggggtcctggctccacaggtgaccaagag

SEQ ID NO: 271148 - DNA, 201 bp, Homo sapiens; identical to SEQ ID NO: 53788

SEQ ID NO: 271149 - DNA, 201 bp, Homo sapiens
tgtctggagcaccacgacatggaggggtgtgtttcctgcagctgctgggaccggctgccgtgcactggccactaaaaacgccgcacgcttattctctcgcrgtcctggaggctggaagtctgaggtcagggtgtgggtggggccgcgctccctctgcaggctccccgggaggaacttcctggcctcctccagcttctggtg

SEQ ID NO: 271150 - DNA, 201 bp, Homo sapiens
tcccttcacgctgctgcagccacagggagctggccagtctggcccctgccccatggctgagatgccaaaactgagcttgagaaaaggcccctctccttggycggcggctctttgtgggtgccaggtactggcttcccagcattttctccagggcccctcccatcatgcacctcctcccccaggggaagaagctcccagcca

SEQ ID NO: 271151 - DNA, 201 bp, Homo sapiens
tgtgggtggagggcatggtgcccctggctgctgtggtcctttttccctggtggtggcctccaggcagccaaacccaggcaaaggtgacccttgtcaggaasgctttgctgacagctgggctgcccttgccctcctggagcgccaggtgccccgggtgtctggagcaccacgacatggaggggtgtgtttcctgcagctgct

SEQ ID NO: 271152 - DNA, 201 bp, Homo sapiens
gtgggcgcccatgctggggacacggtctcctggtgcctggagagccctaccgtgccctgtggcaccggctcgttctgcctgtccctgcagggaccttgctsttttcctaacccttggggagggtgggaaggtgacttctccctggccaagtgagggtgctgtgtccccttccaggaccagtatttttagactcaggtgttt

SEQ ID NO: 271153 - DNA, 201 bp, Homo sapiens
taccaggagagtcagtgagatcattcagaccaggctgtgccgcagtgcctgtgggtggagggcatggtgcccctggctgctgtggtcctttttccctggtsgtggcctccaggcagccaaacccaggcaaaggtgacccttgtcaggaacgctttgctgacagctgggctgcccttgccctcctggagcgccaggtgcccc

SEQ ID NO: 271154 - DNA, 201 bp, Homo sapiens
agcggtggtaacctggcctcactcctccctgatgtggcccggtctgcccacttcggggcagctgctctctgagtctttggggtctttccctcagcccaccrgggaccagccgaccgggaaccggggaatacagaggatgtattccctgaggatgcatgtgctctgcggcaaggcctgaggtctttccgtccctccctggct

SEQ ID NO: 271155 - DNA, 201 bp, Homo sapiens
ctctgggtcacttacattttctgaaagaatcatggctgccttttggtaaaaatccaagtaaaacatacacatggttaaaaatgaagctgaaaagcttatawttaaaagtccctgctatactccccattctgcactgtgcaggtaataaccatgttccaccagatggtgtgtgccaggcttatgtctccttctttatgggac

SEQ ID NO: 271156 - DNA, 201 bp, Homo sapiens
gagccccccaagttggctttagttttgatattacagggtgcgctctatggggcagccaagcaggtagggaaagtttgtggtttctcctccaggggcccctraatggcttggtcctgactgtgaacaccctgcgcctcccacagcttgaccatgcctcctgccttggtgttgagcatcttgtggactagggttctgtggccc

SEQ ID NO: 271157 - DNA, 201 bp, Homo sapiens
ggcagctccgactccgaccgccctccggattattcttaggtctgttgtgtaacaggcgcacattggaggcagagggaggaagggctcctggagatgtctcyggcggcagcagctagccagccgggagaacagcttttgtcctttccactcgcccagcacaaagggacaaaggaggctgcctcggctgcccagcccagctga

SEQ ID NO: 271158 - DNA, 201 bp, Homo sapiens
tgcaggcattcggggagcaaatgcaccgttcactccaccccaagctgccccagagagcagcagatgggcccagggaggggcttaaataattcacaggcccyggggacaggggatgctagcctagggttccccaaccagaggctgggcatgaacctcccttctggggcgcctggccacccagtcagccttggtcctgggagg

SEQ ID NO: 271159 - DNA, 201 bp, Homo sapiens
tgagagccccccaagttggctttagttttgatattacagggtgcgctctatggggcagccaagcaggtagggaaagtttgtggtttctcctccaggggccyctaaatggcttggtcctgactgtgaacaccctgcgcctcccacagcttgaccatgcctcctgccttggtgttgagcatcttgtggactagggttctgtgg

SEQ ID NO: 271160 - DNA, 201 bp, Homo sapiens
gcgctacctcatggccggcatcagcgacgaggacagcctggctcgccgccagcgcaccagggaccaatatccttgggcacctatcgggcaatgcagacccrgggaccggccccttggctgctcaccctgggggggcctgtcctttgccgggtcacacactggggaagtggccggtaggctggggtcccctattccttcctc

SEQ ID NO: 271161 - DNA, 201 bp, Homo sapiens
ggactttattgctgccatgggattcccatggcccctgtagcaccttgggtttctgctgggatgcccagcctccagcccagagtgtgttgttgacccccgtktgggggggcgctgacccccgtgtgggggtggcgctgacccccgtgtgggggtggcgctgacccccgtgtggggtggcgctgacccccgtgtggggtggcg

SEQ ID NO: 271162 - DNA, 201 bp, Homo sapiens
gcagctgggcaggtgtgaaacgagctgtcagggctgcccctgcctgaaatgttgaactctggaactctttgaagagcagggctaggcactgcgtccctttrggcctggtgttcctcgtgagtaggggctgagctggggtgtcacactggggccatgtcacctccaagcaggtcatgctctcaccctgccctgcccagccct

SEQ ID NO: 271163 - DNA, 201 bp, Homo sapiens
gagggtctgcacctgtgcctacatggtgtgtgcccaagtgcgtgtgtgtgtgtgtgtgtgctcatgctctgtgcatgcctgtgcctcacagaggtggctcyggcttgtcaatgccacattctccagatatgcccagacaggtcttcgccatctgagggtggagctgcgcctggggagctgcacacagcccctgccgggctt

SEQ ID NO: 271164 - DNA, 201 bp, Homo sapiens
cacgttcaacagcagtggcttccctttgtggaaagaaaagatgccacgtgactgtgtcaggggtgttctagggtggggctcaggccccgagggcctcactstccgagcatttttgttcctgctcagtggtgagtggctcaccctggcacatagccactctgtggagggggccgcatctctgcccagctcagccacaggccc

SEQ ID NO: 271165 - DNA, 201 bp, Homo sapiens
tgcctgggtggtggatgctgagggagggcagtcttgtgctgggtgctgggcctaccctcatcctgggggcctttctgggaggctccttcttggttgagccsgaatcgtgtccctttcctttgagtcggtgcctgcccccactgatgccagctcagttacctgtgcacattagggtggtggttggcaaggtgccccgggtgg

SEQ ID NO: 271166 - DNA, 201 bp, Homo sapiens
caaccaccctgatgttaggagttatgaaaatgcagccttcagctgagctgcggcctttattgtctgtaattggtttctgtttccggaaagcctgctgggcygggggagagaaactctgcccgtcagcaggtcctggttccgggtggtgctggctgagccagcaaaccaggccctggggccttgctgctttgctgcagcttg

SEQ ID NO: 271167 - DNA, 201 bp, Homo sapiens
ttccaccgctcagacctggcgacccaggaacacacctctgagggacttgagtggtcttgatttcacattgatcaggcccctggctgctccgactttcaggyccctgttgtggaggtttcgggcggcccagttctcaggggcagccctgtgcccttcctgggtcagctggtgtgtgggtgggggccgacccagggagcacct

SEQ ID NO: 271168 - DNA, 201 bp, Homo sapiens
gtcctgacccaccttcatgccaagccgtgggtgtagggcgtgtggcagccagggctctgccctggggacagggacaaaggggctgatggggccacctgacyggtgactcccctggctcagaggggatcccaggggagctggcaccaccacccctggccaccccagatcgtggccacgggaggaggcaaggctggtccccag

SEQ ID NO: 271169 - DNA, 201 bp, Homo sapiens; identical to SEQ ID NO: 53779

SEQ ID NO: 271170 - DNA, 201 bp, Homo sapiens
agctcttccgcctgaggacccagggccggatccggagagcaggtggcttttcttgagcgccaacattctgcccgtgggtgagtgaggccctggctacccacaccaagccagagaacattgttcttctcctgctgagtgcgtctctgtttcctggagcccagggacaatacggttcagggttcagttcagtgaccctgatgt

SEQ ID NO: 271171 - DNA, 201 bp, Homo sapiens
ccagctcttccgcctgaggacccagggccggatccggagagcaggtggcttttcttgagcgccaacattctgcccgtgggtgagtgaggccctggctaccbacaccaagccagagaacattgttcttctcctgctgagtgcgtctctgtttcctggagcccagggacaatacggttcagggttcagttcagtgaccctgat

SEQ ID NO: 271172 - DNA, 201 bp, Homo sapiens
gatccaagggacacagcgtgaggggccaccgcaggtattgaaacagaagcagccggcgagccctccagaagtgggagccctccagaagtgggagccctcckggggtgggagccctccaggggtgggagccggcttggactcgctggccctgagcaggtacctgggctctccctgtgggtgagagcagtgggcgggcaggct

SEQ ID NO: 271173 - DNA, 201 bp, Homo sapiens
agggttatgtgggccacactctggggagcagtgtctatggccccgtgtttggccaagcaccccgttctgatctttactttctccacctggcactaagcttycccttcttgcttctaacactgagtggggctccggggtgtcccccaccccatggcctcccaaagtccctggttcggggctgccgtgagcagcctcctgagt

SEQ ID NO: 271174 - DNA, 201 bp, Homo sapiens
gaggtcccttggcctgtgatgcctggggtggcctgggctgggccggactgtggtgctcagatctcttgggagggttagtgtgtgacggcttgggcagacartgggaggggctggatgagggggctgcctgtgcctgcctggctctgccaagggggcatgaagattcttgctctcctgtacccacccacacatggcctctgc

SEQ ID NO: 271175 - DNA, 201 bp, Homo sapiens
agtgggtgaatgaagctgtttctctgcatacagtgtctccctggctcccctggggtctcctgagccacctcaaggagccccggcccctcccagctgggccygtcccctgaggcttgtccaggaacaggcgccctgggcagaggtggcttcatccgttgctgtccccttcttggctgggcctcggcgggggggcagatatcg

SEQ ID NO: 271176 - DNA, 201 bp, Homo sapiens
ccctggtgccacgtgcactgatgatgtgcttcacctggaaatcgaggctccccgtggaaaccacccccgggcagaatcagctgtgggttgcgtatgtcctygggcgcccatgctgtacccaggctgcccaggagagctgagcccgcacgggaaggcaggcccctagaagtgtgtccccgtggcccagagctggcttctcag

SEQ ID NO: 271177 - DNA, 201 bp, Homo sapiens
cacctacctgctgcgtccggaggagccccgaccaccgccagaggcccacagcggcgccaaccccaccgagagcagagaagcccaggggaagggccccacccaccacctcaacactcacctctgtccctctaaggagtagctccctgacaaaggggaagactcccaaaatgatgtctattccactgttatctgcgaaaatta

SEQ ID NO: 271178 - DNA, 201 bp, Homo sapiens
gggctgcccgccatgcctgtggctcctcctcggggccgtgggggccccttgtgctgtgagggctggcaagtacctcctgtacccagcacagcaggaggggmtgggggggccggcctcagagacaccccaggcacctcttgctttgcaaatgtgctcctgggagactggctggtttctgtaaagcgactcctgttttgcctt

SEQ ID NO: 271179 - DNA, 201 bp, Homo sapiens
tgatcctctctccatgtctgtcgctggccttgcccggcccgcccggggatcttgcatgctgcgaccagggatcctctctccatgtctgtcgctggccttgsccggcctgcccggggatcttgcatgctgcgaccagggattcttgagcctctggctcaggatggagatttctttcacagtttccaatttgcgtttcggttt

SEQ ID NO: 271180 - DNA, 201 bp, Homo sapiens
ctctccatgtctgtcgctggccttgcccggcccgcccggggatcttgcatgctgcgaccagggatcctctctccatgtctgtcgctggccttgcccggccygcccggggatcttgcatgctgcgaccagggattcttgagcctctggctcaggatggagatttctttcacagtttccaatttgcgtttcggttttggcttc

SEQ ID NO: 271181 - DNA, 201 bp, Homo sapiens
atgccgccctcgcccaaccaccctgatgttaggagttatgaaaatgcagccttcagctgagctgcggcctttattgtctgtaattggtttctgtttccggwaagcctgctgggctgggggagagaaactctgcccgtcagcaggtcctggttccgggtggtgctggctgagccagcaaaccaggccctggggccttgctgc

SEQ ID NO: 271182 - DNA, 201 bp, Homo sapiens; identical to SEQ ID NO: 53778

SEQ ID NO: 271183 - DNA, 201 bp, Homo sapiens
ccgtgcctccgctgacggccgtgtttctcccgtgaggagtggccgtgcctccgctgacggccgtgtctctcctgcgaggagtggctgtgcctccgctgacrgccgtgtctctcccgtgtccagtggagcggtgcatgggtgccatgcaagaggggatgcagatggtgaagctgcgtggcggctccaagggcctggtccgct

SEQ ID NO: 271184 - DNA, 201 bp, Homo sapiens
tggctgggtatggctgggagggtggagtgtgtgtcttgtggtggcctgtggagggccccggtccgggctggcctgccagctctctgttccagcggcagacrgggtcctgtccaggctgccctgttgcaggcctctgcccgccccctgcccctgtgtcctgcctcacccctctcctaaatccctgcagccatacctgcgtct

SEQ ID NO: 271185 - DNA, 201 bp, Homo sapiens
ctggggtgcagccccgtctgcccgtctgtccacccatccgcccatctgggtgcatctgtgtgggaggcttctccaggcccagggctgaagccggccagacmcttgagagctggaccctggacaccagtgtggacactggctcccgtcacctcctcagagcaggcctggtggccttagctgcctctgtcctgcccgtccctc

SEQ ID NO: 271186 - DNA, 201 bp, Homo sapiens
cctcccagagctgctggtaatcccagctatcctgggttcctggtgaagacccctcctcattcaatggtttagatgacctgggatcttgcagaggtggggcytacccatcctctgaggccctggcctcatcctgctctttctgccttggggccacaggtacccagtgatcctgtccatcgaaaaccactgcagtgtcatcca

SEQ ID NO: 271187 - DNA, 201 bp, Homo sapiens
ggcgaggaccccctctcagtctgaaccactcatattagacccaaagaacaaagtccagggacccttgggtgcagaagcagcatggtgtgggtgcacggggytgccctagggtgaacgctgtggcttccctctaaggctggaggctggccttgtgggtaagctgggggctctgagtgcaggagcccttcttgttccagagtc

SEQ ID NO: 271188 - DNA, 201 bp, Homo sapiens
tcctccctggctcccagcttggtgcccatctcgggcctcatctcagactcagcctttcctctccctggcaggcagagctgacgggcccagggatgtgtgtktccttagtggcctgtgcccctttctcagctctggcgaggaccccctctcagtctgaaccactcatattagacccaaagaacaaagtccagggacccttgg

SEQ ID NO: 271189 - DNA, 201 bp, Homo sapiens
cagccacacctcagggcgcagggctctgtcagcccctcagggtagtgatgacagaggcttcactgcaggctcatggtcctgggcagaggctgctagagccmgcccagcctcagccagatgaaacatccgggaacacacacccggcacagagtctccagggctgtgtggagatggcactgcctggtgctcctggaaagcaga

SEQ ID NO: 271190 - DNA, 201 bp, Homo sapiens
cctgggcattaggtccctggtgtaggggtaagcagagaagctgcaggagccagcaccccgggagaggaagccagggtggagtctgggagtcccgtgggccrgtgtggccaagggagccaggaactagcctttccttggaggagaagccctggagctgccgcagggttcactgggggaggagcggctctctttgccttccat

SEQ ID NO: 271191 - DNA, 201 bp, Homo sapiens
ctgtattgactgctcaaataaacaactgagctgtatcagtaacatatgttgagtcctctagagccaaggaaaaccactcgaaatcatttgcctttttttttctttttctgagacagtcttgctctgtggcccaggctggagtgtagtggtgtgatcttggctcactgcaacttccacctcccgggttcaagcgattctctt

SEQ ID NO: 271192 - DNA, 201 bp, Homo sapiens
gggcaggccaaaaaggcaacatttgggctgaaaaatagggtcagctgttttcacttaggacaaacttaagggtggggcttagccaggatcccagcctttcygtcagtttgaccttaaaacctgcagcacattatatagccttactaggggggatgtgtgtgtgtacacacacttttttttcccacatactattattgaaca

SEQ ID NO: 271193 - DNA, 201 bp, Homo sapiens
attattcagtcacttcgaagtctgtattgactgctcaaataaacaactgagctgtatcagtaacatatgttgagtcctctagagccaaggaaaaccactcraaatcatttgcctttttttttctttttctgagacagtcttgctctgtggcccaggctggagtgtagtggtgtgatcttggctcactgcaacttccacctc

SEQ ID NO: 271194 - DNA, 201 bp, Homo sapiens
cataagcttgaaacactttattacattttatattttcataagttttattaatttgtccaattaataagcctttttctgttccacacacacatatatatataagtatttttgagagagtttcactcttgtcgcccaggctggagtgcagtggcgcgatctccgctgactgcaaccttcgcctcccgggttcaagcgattctt

SEQ ID NO: 271195 - DNA, 201 bp, Homo sapiens
ccataagcttgaaacactttattacattttatattttcataagttttattaatttgtccaattaataagcctttttctgttccacacacacatatatatataagtatttttgagagagtttcactcttgtcgcccaggctggagtgcagtggcgcgatctccgctgactgcaaccttcgcctcccgggttcaagcgattct

SEQ ID NO: 271196 - DNA, 201 bp, Homo sapiens
cagcttgtcatttcagaagctgccgagtgccctgacattttgaggatttgttgggcatcttgggtagtggtagtgccaactttgcattccaatgggtggtrgtgaagaatgggaccctaggggtggtaaaaaaaaaaaaaaaaaaaaagggtgcccgcgtcgtcttgtcattatccatttgggggaactttaaccctcttt

SEQ ID NO: 271197 - DNA, 201 bp, Homo sapiens
tcttttatagttttatcaccgtgtacattcttagacattatattttatttagtgttatgatgtcttttaaaccacagtttatgcctctatccctttttttyccttagtttttatgttgaagaacccagggagagttaaccaaagtttgaattttactgattgtacactcatgttgcatctttcttcattccttgtatattt

SEQ ID NO: 271198 - DNA, 201 bp, Homo sapiens
gtcagcctaccctatacttttcagatggaggtatttaaaattactaagaaaacatgcaacttattagtaacaaagtggaaaagatattgctgtgtttatgwtgaagcatattctctgttgtcaaatataaatttttatgcatactggaaaaattagttgtacaaaattgaatgtatgtgatacctttcttttttttttttt

SEQ ID NO: 271199 - DNA, 201 bp, Homo sapiens
tgttgcccaggctggagtgcagtggcagtctagctgtattttttagtttgtattattttttattgctttttttactgttttttttttcttgttttttttttcgcttgaatatttttgatccactgttggtagaacccagggatatggagggcctactgtgtatacgtatataatgtttatatatatgtatgtacatatata

SEQ ID NO: 271200 - DNA, 201 bp, Homo sapiens
taagtagctgagactgtaggcacctgctaccacacccagctaatttttatatttttagtagagatgggttttgctgtgttgcccaggctgttcttgaactsctgagctcaattgatctacctgccttagcctctcattgtgctaggattacagagccaccacacctggcctgttcttgttttttaatagagacagtgtctc

SEQ ID NO: 271201 - DNA, 201 bp, Homo sapiens
tacaggtgtgcacgaccacacctggctaatttttgtatttttagcagagacagtgtttcaccatgtcggccagagtggcctcgaacttctgaccccaagtratccacctgccttggcctcccaaagtgctgggattacagggtaagccaccatgcccggccacctttaaattgcttttaggcaagaaatggagaactcgct

SEQ ID NO: 271202 - DNA, 201 bp, Homo sapiens
gttttagctatcttttcatgagagaacatgcatgtctaagtgtaggtttttttttttttttttttttgagacccaatctctttctgttgcctaggctggartttaatggcatgatcttggctcactgcaacctctgtctccaggttcaagtgattctcttgtctcagcctcccgagtagttgggactacaggcacccacca

SEQ ID NO: 271203 - DNA, 201 bp, Homo sapiens
tcttttcagtttcctcatttgagtctagtgagtgctattttttaacctctattacagcatctttagattagtgcaatcgttttttttttttttttttttttaaacagtttcgctctagttgcccagactggagtgcagtggcacaatctcggctcaccgcaacctccgcctcctgggttttcaagtgattctcctgcctca

SEQ ID NO: 271204 - DNA, 201 bp, Homo sapiens
ttttttttgagactgagttttgctcttattgcccaggctggagtgcagtggagcgatctcggctcactgcaacctccgcctcctgggttcaagcgattctyctgcctcagcctcctgagtagctgggattacaggcatgcgccaccatgcccagctaattctgtatttttggtagagacgaggtttctccatgttggttag

SEQ ID NO: 271205 - DNA, 201 bp, Homo sapiens
gggatcaggcaggagcccaccactccaggccttatcctggaaaggagaggtaaacactacctttgccaggcccagaacctgcagacttgtttggtgcctgygatgatccagcatagccacctttggagtagtctcctgctgctgtcccctgggtcaggtcgtcataacctagcgtggcagggtacaagaggcaagtgtgag

SEQ ID NO: 271206 - DNA, 201 bp, Homo sapiens
agccaccacgcctggccttctaaatattttaaatgccgtttttcatttttaaaatttctagtttgttgttaactatcatacttctactgtggaagatgagratttctctcattactgtaacaccccatcccataaacgtattcattagctctccatatttccagtagttatagttttaatttagactaattttcagtgttt

SEQ ID NO: 271207 - DNA, 201 bp, Homo sapiens
gcctaaacaagatacactgggagaaatatataatgtaatagatttcctagcagagataattccttataaccaatactttttcaggtgaaaaaagggaaaayacccatgtttgctaaaatacaggagtataacagcatgacatgttaagggaattacaaatgcttgagtgtaaattctgatgtgggaaatattagaaaatta

SEQ ID NO: 271208 - DNA, 201 bp, Homo sapiens
taagggcaagtaggtaaaagaggtaaaacagtgaaaattagcaatatataaaacagccttcatgatttttgcccctctctgtctgtctgtctgtctgtctktctctctctctctctctctctctctcccactctccctccgtctttcctcagcctcctgaatagctggcattacaggcaactgccatcacgcccagctaat

SEQ ID NO: 271209 - DNA, 201 bp, Homo sapiens
aactccagtctgataatttagaaagtatttgttgtatacttaaagttttccttattaggaacatctttattagactcaacactgacatatatatatatatwttttttttttttgagactgagttttgctcttattgcccaggctggagtgcagtggagcgatctcggctcactgcaacctccgcctcctgggttcaagcga

SEQ ID NO: 271210 - DNA, 201 bp, Homo sapiens
cacgtgattcttagttttgggccatatagatgtaggatgggcaaagatagtttcttctgtccattctgaatactatacaatcttttttggccttactatctttttgtgtagtttcttattttgctacctaagcaagtcggaattttattgttactagaaaaataaattgtggatcaagtcagtagctaatgaagactttta

SEQ ID NO: 271211 - DNA, 201 bp, Homo sapiens
aaattagccaggcatggtggtaggcacatgtagtcccagctacttgggaggctgaggcaggagaatggcgtgaacccgggaggcggagcttgcagtgaacygatatcgaggcactgctctctagcctgggcgagagagcgaggctctgtctcaaaaaaaaaaaaaaaattagcgggtgtgatggtccgcacctgcagtccc

SEQ ID NO: 271212 - DNA, 201 bp, Homo sapiens
ccacgtgattcttagttttgggccatatagatgtaggatgggcaaagatagtttcttctgtccattctgaatactatacaatcttttttggccttactatctttttgtgtagtttcttattttgctacctaagcaagtcggaattttattgttactagaaaaataaattgtggatcaagtcagtagctaatgaagactttt

SEQ ID NO: 271213 - DNA, 201 bp, Homo sapiens
tcccagctacttgggaggctgaggcaggagaatggcgtgaacccgggaggcggagcttgcagtgaactgatatcgaggcactgctctctagcctgggcgasagagcgaggctctgtctcaaaaaaaaaaaaaaaattagcgggtgtgatggtccgcacctgcagtcccagctacttgggaggctgaggcaggagaattgct

SEQ ID NO: 271214 - DNA, 201 bp, Homo sapiens
tccacgtgattcttagttttgggccatatagatgtaggatgggcaaagatagtttcttctgtccattctgaatactatacaatcttttttggccttactatctttttgtgtagtttcttattttgctacctaagcaagtcggaattttattgttactagaaaaataaattgtggatcaagtcagtagctaatgaagacttt

SEQ ID NO: 271215 - DNA, 201 bp, Homo sapiens
acaatgataaccttagagcttttaagaatgatcggccaggcggtcgcctgtaatcccagcactttgggaggcaaacaacaaaaacaaaaagaatgatcttyataaaagcaaagctttttttttttttttttttgagacagagtctctgttacccaagctggagtgcagtggtacaatcttggctcactgcagcctccatct

SEQ ID NO: 271216 - DNA, 201 bp, Homo sapiens
atccacgtgattcttagttttgggccatatagatgtaggatgggcaaagatagtttcttctgtccattctgaatactatacaatcttttttggccttactatctttttgtgtagtttcttattttgctacctaagcaagtcggaattttattgttactagaaaaataaattgtggatcaagtcagtagctaatgaagactt

SEQ ID NO: 271217 - DNA, 201 bp, Homo sapiens
agccaatatggtgaaaccccatctctactaaaaatacaaaaagtagccgggtgtggtggcatgcgcctgtagtcccagctacttgggaggctgaggcaggrgaatcgcttgaacccaggaggtgcaggtttgcggtgagccaaaatcttgtgccactgcactccagcctgagcaacagaatgggactctgtctcaaaaaaa

SEQ ID NO: 271218 - DNA, 201 bp, Homo sapiens
gcaggcacccacctccacatttttttattttttgtagaagcagtttcactatgttgtccaggttggtcttgaactcctgggctcaagtgatccacccaccktagcctcccaaagtgctaagattatcaccatcaatgatgggcataagccaccattcctggccatgatagttaattcatatatttttctctgcattctctc

SEQ ID NO: 271219 - DNA, 201 bp, Homo sapiens
gccgtaggcaggtttggaggcttgagacttgggctgcagggagctgggctggctgcgctgacccgagccactctgaggaagaggagaagggaaggctgtcraggctggagcagaacccctggcccagagtagggtggctgcctccatcactgtactcacctgtgcatcctgcggaaggtggtggtgcagcagctgtgagtg

SEQ ID NO: 271220 - DNA, 201 bp, Homo sapiens
ttgggctgcagggagctgggctggctgcgctgacccgagccactctgaggaagaggagaagggaaggctgtcaaggctggagcagaacccctggcccagartagggtggctgcctccatcactgtactcacctgtgcatcctgcggaaggtggtggtgcagcagctgtgagtggggctgctggtgggctggcaagatgtgt

SEQ ID NO: 271221 - DNA, 201 bp, Homo sapiens
gcaccgggaaatcggagagcctctctggttagggtagtgtctacgggcggaggaggccgcctttgtttcccccgctgagggtgggtggaaagagcggtggyctatctgtgctttttcgttctccggtcggaacccctccctgcgcaggctggaactgccccagagggcagggtgacctgcaccgactggattggacttttc

SEQ ID NO: 271222 - DNA, 201 bp, Homo sapiens
ttcaaaatgccctttgtcctcaccatgccaccaagtttgccaacctttttttctacaggtagaagtatccacaaagggtggaacgagtcatgtagggagaytgatagcttcctactttcagagacaaaattgaaacctgctcaagtggttaactctagctaaaggggtggtctcacagatgacaagtatcatctgaggcga

SEQ ID NO: 271223 - DNA, 201 bp, Homo sapiens
actcagtctcaaaaataaataagttaaattaaaaataaataggctgggcaccgtggctcacgcctgtaatcccagcactttgggatgccaaagcgggcgartcacttgagattaggagttcggcaccagcctggtcaacatggcgaaacgctgtctcaactaaaaatacaaaaattagcctggtgtggtggcgcacgcctg

SEQ ID NO: 271224 - DNA, 201 bp, Homo sapiens
tctacccttctaaaggtggaaacctcagttttatgcttgaaattaggtcaactttgtaggaaatgggattgatacaggaatgtttaatattcactactgtrtatagtcactgagtacctaggaaaagcacgtttttagaatattatgtaagtgcggtacccctaccaactgttaggcttcatcttttgtggtcagcctacc

SEQ ID NO: 271225 - DNA, 201 bp, Homo sapiens
agcaacgtagtgagacccccatctctacaaagaaaaaagaaacagtggcttaaatcttaaaaaacagatttttaagtttacttgtaatcatacctgatatmtgcaataaggcaaaacaaaagagttttgttattcaaaagaatattttccttcttatgacttaatactttttgtttgtttgtttgagacagagtcttgctc

SEQ ID NO: 271226 - DNA, 201 bp, Homo sapiens
tcgaactccagaccctgtgatcaacccgcctctgcctcccaaagtgctgggattacaggcgtgagccactgcgcccggccatgatgccttttctgacaaarcattgtttagcaaaatctgctggctaatgttagtggaataaagtttgatttccaaaaagtgtcattgtttggtacaaccgatatttaaaataaataaatg

SEQ ID NO: 271227 - DNA, 201 bp, Homo sapiens
ttttattcatcctgctttcgcttatttaatatcgccaatccacgtgattcttagttttgggccatatagatgtaggatgggcaaagatagtttcttctgtycattctgaatactatacaatcttttttggccttactatctttttgtgtagtttcttattttgctacctaagcaagtcggaattttattgttactagaaaa

SEQ ID NO: 271228 - DNA, 201 bp, Homo sapiens
tagccgtgctggccataaccactggcctgctggaagggaggtgtgggagtgctgaggttcaccccatgttgcttggctgaggctggagggacctggggggrcaagcagatgaggtattagtgtaggaagaggcaagctgaggctggtcaggtacccctgccagagcctaaggcagcaggtgacatacccacaaccacaggg

SEQ ID NO: 271229 - DNA, 201 bp, Homo sapiens
tgtacatatatatatacatttttaatacattttacttttcctgcatggactgttttcttcacgttgagttgtattttaagtgtttcatggtaaactttccygagatgtttgctaatgttaatctgcttaatagtttttttttaaattgaggtgtatgtacatacaataaaatgtgtatatcttggctgggcatggtggctc

SEQ ID NO: 271230 - DNA, 201 bp, Homo sapiens
tagttggttttattacttcccaggaaatgcaagaaccgtacatttagctctttacctccttcttgtcctttgccctattgatggtatattttcttataaamctctaaagcaacagtattattgttttacatagttgctgtggtctggccagtcgtggtggttcacgcctgtaatcccagcactttgggaggccgaggtggg

SEQ ID NO: 271231 - DNA, 201 bp, Homo sapiens
tctgtattataatacatcggtgtatatttttccatgttaaaaattctggttctcaaggatagggaataatgaactagaatatcctcattattaattactcrcttgttttctcgtatattacacagtagtctcagaatagcaatactaataataccataaccaatgtgattgctgagaatagttgcataaattgtttcatgt

SEQ ID NO: 271232 - DNA, 201 bp, Homo sapiens
ttttggtagagatggggtttcaccatgttgtccaggctgatcttgaactcctgacctcaaatgatctgccttggcctctcagagtgctgggattacaggcrtgagccactgcgcccagcctacttcttgttttaacttttgtttaagacaggaagtttatagagatgtttgacattacttataattcagacaacctttgtt

SEQ ID NO: 271233 - DNA, 201 bp, Homo sapiens
tacctttgccaggcccagaacctgcagacttgtttggtgcctgcgatgatccagcatagccacctttggagtagtctcctgctgctgtcccctgggtcagrtcgtcataacctagcgtggcagggtacaagaggcaagtgtgagccaggcaagcctgtctaaccccatgtgtctctgtctgggaagtacccctcacctgta

SEQ ID NO: 271234 - DNA, 201 bp, Homo sapiens
agctttgacctcccaggctcaggtgatcctcccgccttagcctcctgggtagctgggactacaggcaggcacccacctccacatttttttattttttgtaraagcagtttcactatgttgtccaggttggtcttgaactcctgggctcaagtgatccacccaccttagcctcccaaagtgctaagattatcaccatcaatg

SEQ ID NO: 271235 - DNA, 201 bp, Homo sapiens
tgtagtatatcatgcagcagtgtgaagtgatgagaacaccacatatggtctcttgcaactgctaaactctgccattgtagcattaaagcagccacagatargttataaatgaatgagtatggttgttttccaataaaactttatttattgagttttatatagtttttatgtgtcacaaatattattcttttgattttaacc

SEQ ID NO: 271236 - DNA, 201 bp, Homo sapiens
agagcccaaaatgctaaataattctattgttattaacaattgaatcaactatttaaaaagttgttatgaaagtaataacatactttgaaccttttcaactmttctggaattactcccacatttctaaatattcttaatttactttttaagagatggtgtcttgctttgtcgcccagggtggagtgtggtgttgcagtcata

SEQ ID NO: 271237 - DNA, 201 bp, Homo sapiens
gacctctacaactgggaggtggccatcttcggaccccccaacaccctctacgaaggcggctacttcaaggtaccctcaccctcctcccggaccctgcttcygcggccgaggcctccggctccccgccgctttctgcagttcctgggaccaggagtatgagcacgggcgagtggagggggcttctcacccgtgcagccccct

SEQ ID NO: 271238 - DNA, 201 bp, Homo sapiens
caactgagtgaagtgatacagttagctcaatggctgacatatagtaagcacttaatgagtattatttatcactacttggatctgtcattgttcacttattycctcaatatagaaaactgagagttgtccttgaatttttctttctcctcaatcccaatattaaatcaattacagagtctcattgactatacttcctgtgtg

SEQ ID NO: 271239 - DNA, 201 bp, Homo sapiens
tggcctcaatacttggctcaagtagtacccctttgtaaattttacctgaatgtctcagccagaattaggcatttatttcactgtgctctttaagcaactartagagatttcatttgaggcacttaatttgtaatcatttatttgcatgcctgtcttttaattaaaacatagccattcaggcatagtgttctaaatatgttt

SEQ ID NO: 271240 - DNA, 201 bp, Homo sapiens
gctcttgggctcaagccatcctagcacctcggcctcccaaagtgctgggattacaggcatgagccactgcacccgtcccctaatggtgtaacttttttatraattgttttaactgtgtcccacaaaatgtagtgttttgacaaagtttcttagtttcctttatttttctttttaacacgagtcacttagtatgttttagtt

SEQ ID NO: 271241 - DNA, 201 bp, Homo sapiens
gactgctgctttagactgttgagagagaagtgatgatatcttcaactgtaattatgcatttttctatttttccatttggtggcaaaagtttttagttacakcattttgtgttctaaagctctgttgttaccagtgcacacacagttaatattatgtcttctttgtgaattgatccccttatgaaattaccctctttatctg

SEQ ID NO: 271242 - DNA, 201 bp, Homo sapiens
gaacccaggaggtgcaggtttgcggtgagccaaaatcttgtgccactgcactccagcctgagcaacagaatgggactctgtctcaaaaaaaaaaaaaaaaatcctacagagattcctgagtaaaatttaacctctttgattgtgttaatatcaactttattcagcaagaaattgttattcagagattatgcttatgtacct

SEQ ID NO: 271243 - DNA, 201 bp, Homo sapiens
ggcgcgtgccaccaggccaggctaatttttgtattgttagtagagactggattttgctgtgttggcaggctggtctctaactcttgacctcaggtgatccrcccgtctgagcctcccaaagtgctgggattgcaggcatgagccaccctgcctggccccttatgagtttatatgcttttttttttattccccttactgtca

SEQ ID NO: 271244 - DNA, 201 bp, Homo sapiens
agatgagtacttatgttcattctaatgttaaactgaaattagtgttgacttttatttatttatttattttgagatggagtctcactctgttgcccaggctrgagtgcggtggcactatctcagctcactacaacctccacctcccaggttcaggctgttctcctgcctcaacttcccaagtagctggaattacaggtgtgc

SEQ ID NO: 271245 - DNA, 201 bp, Homo sapiens; identical to SEQ ID NO: 53806

SEQ ID NO: 271246 - DNA, 201 bp, Homo sapiens
agtactccatactctactgtctcaggagagacaggagacaccttctgtcccgtctttacattctgatcagaaattaaagaaaataggaaggtagagaacartaagtgtattttgttaagcacttggttctttgaatatttgtaatctataatagagtatagatgttaattttttttttcctcagacggtgtctcactttgt

SEQ ID NO: 271247 - DNA, 201 bp, Homo sapiens
gccatgttgcccaggctggtcttgaactcctgatagagctcaagcactccacccaccccagcctcccagggttctgggattacaggcatgagtcaccgttrccaggccaatattaaatattttaattagagtcagtgctaaatcattgcattctactctaggactatgccaggtaatagtgtattctctttacatttcagt

SEQ ID NO: 271248 - DNA, 201 bp, Homo sapiens
tattttttaagacaaaaaatgttactttctttctaaattcaaataaatgtgtttttacacctcaccttgacaaccatcatccctctgaatgtttttttctyatatttctttttttttttttttttttaagacaggatcttgctctgtcgcccaggctggaatgaagcggcgcggtcacggctcagcacagcctcaacctcc

SEQ ID NO: 271249 - DNA, 201 bp, Homo sapiens
gctgggattataggcatgagccactgtgccctgctcatcacattatatttaatagtcatgtcttcatgggcaactcctctctctctctgtctctgtctctstctctctctctgtttctgtctgtgtctctgtctcttgtctttgagacagtgtcttcccgtcacccagactggtgtgcagcggtgtgatcacaggtcactg

SEQ ID NO: 271250 - DNA, 201 bp, Homo sapiens
attacaggcgtgagccaccacgcctagctgtcccacatctattttttttttttttttttttttaccatcagttgtaatgtttctttagcagattccatttmaggttgaactgaattagtgtttattcaagtttgaaaatattcttggtggtgttgttccaaacattcattagagaggctaattattcagtcacttcgaagt

SEQ ID NO: 271251 - DNA, 201 bp, Homo sapiens; identical to SEQ ID NO: 53805

SEQ ID NO: 271252 - DNA, 201 bp, Homo sapiens
ggtggtgcagcagctgtgagtggggctgctggtgggctggcaagatgtgtaggaatggtgggggtgcatagccaggggccgctcccgaggccaggggcccrgtggagcccaagaccgagggcaggctgaaaggtggaggcgtccctgcatgaaatccctgcttgtcaaaagtctacagggcaaagaagacaatggtgaagg

SEQ ID NO: 271253 - DNA, 201 bp, Homo sapiens
ttttcgttctccggtcggaacccctccctgcgcaggctggaactgccccagagggcagggtgacctgcaccgactggattggacttttcttttttgggggkgggggtgggggtggggtgggggaggggcaccagcttgtcatttcagaagctgccgagtgccctgacattttgaggatttgttgggcatcttgggtagtgg

SEQ ID NO: 271254 - DNA, 201 bp, Homo sapiens
gcataagttttgtacataagtgctatttgtcatataattttagtttaaaaatctattaagaggtattatcaaccttgcagtaaaaaagctgatttccaagkccatttagtattctataatgatagttgaggttacttcttcagaaaaatttgtcttgatcccaagctcaaaaaattgcagttaaaacatcactgccatcag

SEQ ID NO: 271255 - DNA, 201 bp, Homo sapiens
taccatcagttgtaatgtttctttagcagattccatttcaggttgaactgaattagtgtttattcaagtttgaaaatattcttggtggtgttgttccaaasattcattagagaggctaattattcagtcacttcgaagtctgtattgactgctcaaataaacaactgagctgtatcagtaacatatgttgagtcctctaga

SEQ ID NO: 271256 - DNA, 201 bp, Homo sapiens; identical to SEQ ID NO: 53803

SEQ ID NO: 271257 - DNA, 201 bp, Homo sapiens
ctcactcaccatccagggcctcgcactcctggacacacctggcccctgaggaaaggcaaagcccttgggctgtgcccgatcccagaaaggagccatcctgkctgggaatggcactcacaccctccaggaaacctcccggaaacccatagcagcctagaacccccggaagaggcagagctgggaacacacagagctgcacaa

SEQ ID NO: 271258 - DNA, 201 bp, Homo sapiens
ctactgtctcaggagagacaggagacaccttctgtcccgtctttacattctgatcagaaattaaagaaaataggaaggtagagaacaataagtgtattttrttaagcacttggttctttgaatatttgtaatctataatagagtatagatgttaattttttttttcctcagacggtgtctcactttgtcagccatgctgga

SEQ ID NO: 271259 - DNA, 201 bp, Homo sapiens
cctcaacaacaaagccttttatcttccaccccacctcccacgcattcactgcccaaatataccaagtttctcttttcttttttctttttttttttttttttgagatggagttttggtcttgttgcccaagctggagtgcaatggcacaatctcggttcaccacaacctccacctcccaggttcaagtgattctcctgcctc

SEQ ID NO: 271260 - DNA, 201 bp, Homo sapiens
tttcaccatgttagccaggatggtctcaatctcctgacctcgtgatccgctggcctcggcctcccaaagtgctgggattcagaaaaactctttttttttttggagacaagagtttcgcttttgttgcccaggctggagtacaatggtgtgatctcggctcaccgcaacctccgcctcccgggttcaagtgattctcctgtc

SEQ ID NO: 271261 - DNA, 201 bp, Homo sapiens
ggaggcagaggttgcagtgagctgagatcatgccactgtactccagcctgggcgacagagcaagactctgtcttgcagggacggggtggttgggggaagamgtgacaaatcatatttaggaattaaatttgatgttgtcaaaggaatcataagaaactcttctcacgtgactattaaccttcatagcagtatggaaatggt

SEQ ID NO: 271262 - DNA, 201 bp, Homo sapiens
agtccttcaacattttgatcttattggtgttttcgggggctgtgggatgttttgtacactttttggaacctcacctgtctggaatacctggtggtgctcaraactctgagcggaagtcaggaaagcactacctaatgagcagatgtggaatactttcgcttatcccttttgtttctgtgttcacttggttgtgagacaagg

SEQ ID NO: 271263 - DNA, 201 bp, Homo sapiens
aagcgattctcctgcctcagtctcctgagtagctgggattacaggaatgtgctaccacacccagctaatttttgtatttttagtagagactaggtttcacyatattggtcagtctggtcttgaagtcctgacctcgtgatccacccgccttggccttccaaagtgctgagattacaggcatgagccactgtgcccagcctt

SEQ ID NO: 271264 - DNA, 201 bp, Homo sapiens
ctttgctccagaaactgagctaacatcacctttaaattacttttattttatttatttatttgttatttgagatggaatctctgtcacccaggctggagtgsagtggtgcgatttcagctaactgaacctccacctcctgggttcaagcgattctcctgtctcagcttcttgggtagctgggactacaggtgtgcacgacca

SEQ ID NO: 271265 - DNA, 201 bp, Homo sapiens
gtggtcaggtgtggtggcttacgcctgtaatcctaacactttgggaggccgaggtaggcggaccacttgaggccaggagttcaggactagcctggccaacwcagtgaaatcccacctctactaaaaatagaaaaaattagctgggcatggtggcacacacctgtaatcccagttgcttgggaggctgaggcatgagaatcg

SEQ ID NO: 271266 - DNA, 201 bp, Homo sapiens
tggacctgggaggtggaggttgcagtgagctgaggtcacgtcactgcactccagcctgctgacagagtgagactccgtcttaaaaaaaaaaaaaaaaaaaaggcttttataaatatttgaaggggtgctgtaagaacttactaatgaccctggcactggggataacaaagtatgtctgagctactttaatctcaagagttt

SEQ ID NO: 271267 - DNA, 201 bp, Homo sapiens
actgcagaaagaaccagtgcttatgtatatgcactgtataactgcaaagtaaagatgataattccatatgtgacctaaacataagactccctaaggctatsaaacttcttaaggaagttcagttataactcatagatttcatatgtacacaatttcgaatgaaaaatatcctgtaatttatattaaaacttttttggggag

SEQ ID NO: 271268 - DNA, 201 bp, Homo sapiens
ctggagtgcagtggcgtgatcacagcttactgcagactcgacctcctgggctcaggtgattttcccacctcagcctcctgagtagctgggattacaggcaygtccaccatgcttggcgaatttttgtattttttgtagagatggggtttcaccatttgcccagactagtcttgaactcaagcaacctgcccacctaggcct

SEQ ID NO: 271269 - DNA, 201 bp, Homo sapiens
tgatccaaatctgacctggtcctagctgtggtttgctgccacctggtgacagttgtccacttgagtataaatataaatggggacaaatctggctaagactyccacacattggcagcaatttcaggtatggttagttgatgccaagttctttggcacaatcctgggagattgggcgaggagaatgctgtgaatgagaaagac

SEQ ID NO: 271270 - DNA, 201 bp, Homo sapiens
aagatggggtttcaccatgttggccaggctggctttgaactcctggtctcaagcaagcagtccttttgcctcagcctcctaaagtgctgggattacaggtrggagccaccatgtctggcctgattactaattttatctgctgatgttcatatatgtaagtatatgaggtgttaaagatacttcatcaataagggcagaaaa

SEQ ID NO: 271271 - DNA, 201 bp, Homo sapiens
gagggtacacttagtccattgtcagggtgagttgaaactttaaaaattaatttaaataggatatgcttgtgagtggttcaggcattttagggagaacataygtggtaatggtacagaaatgtattttggaggtacttgttctttttatttatttatttttaattctatttgcgatggactagaggaagtacttgttcttat

SEQ ID NO: 271272 - DNA, 201 bp, Homo sapiens
ttttgtgtttttgagatggagtctcgttctgtcacccaggctggagtgtggtggcatgatttcagctcactgcaacttctgcctcccttcaaggattcttytgccccagcctcctgagtagctgggactacaggtgtgcaccaccacacccagctaagttttgtatttttagtagagacagtgtttcaccatattggtcag

SEQ ID NO: 271273 - DNA, 201 bp, Homo sapiens
gaatcaaaactttaattaaattctattatagttttaagtagtcaggtttatggaggtataatttatacattaaaattaatctttttagttacatagttctrtgaattttgataaatgtatagtcacattcagttttttaaagaaaaagatgaccacagcagggcagtttttataccaaatttgtctatgtgagaagaaaat

SEQ ID NO: 271274 - DNA, 201 bp, Homo sapiens
atgctgctgttgttcagtggcatattgtcttctatatccttactgagtttttgtctccttgtactttaaaccaggggtgcctacccgatactgatctggtrcaactctgtggcctgttaggaagtaggccgcacagcaggaggtgagctcagcctccagtcagatcagctcaggcattagattctcaaggagtgcgaaccc

SEQ ID NO: 271275 - DNA, 201 bp, Homo sapiens
ggtagcttgctacctcttgggaaaaccagcatacttcttttgaaagaaaacatccacaggcctcctcctcccagaggcccaggattaaattggtggggctrgaggtggtggggagagtttcttcctgaattggaaagttttaaggagtaggcatttgtcagcaagaatggagttgggagttgccacacgtctttgattaga

SEQ ID NO: 271276 - DNA, 201 bp, Homo sapiens
cagagataattccttataaccaatactttttcaggtgaaaaaagggaaaatacccatgtttgctaaaatacaggagtataacagcatgacatgttaagggrattacaaatgcttgagtgtaaattctgatgtgggaaatattagaaaattaagcaagagaggcaccagggtcttcaaagacattgaagtcatgataagagt

SEQ ID NO: 271277 - DNA, 201 bp, Homo sapiens
aatcattatattgttctgtgaatataactgaaatggtatgagatcttatattcatatgttaatagcaagttatatcttatttcataaaatttcaaaaaggraagaaatttcagtgacaagttggctgaagtaggagtattaaatatgtgtatgaggtaatacataggtaactataggtcaccatatacatgtgaaatagta

SEQ ID NO: 271278 - DNA, 201 bp, Homo sapiens
gcatggtggagggcgcctctagtcccagctactcaggaggctgaggcaggagaatggcatgaactcgggaggcggagcttgcagtgagccgagatcgtgcyactgcactccagcctgggcaatagcgagactccatctaaaaaacaaataaaataaataagagttcgagaccagcctgaccaacatggtgaaaccccaagt

SEQ ID NO: 271279 - DNA, 201 bp, Homo sapiens
cttaattgagtgtatcattccagatgtcaattttcagtgcaaagtaggcatagaccattgtatagaagattcacaagtgaaaaatcttcttttttcagttwataaaaataataacatgtttattatatcagtcataaagaagttacaaagttctttaaatgccccattcttcctccgttgccctctgttcctgagctgatc

SEQ ID NO: 271280 - DNA, 201 bp, Homo sapiens
cttgaacttctgggctcaagcgatccgcctgccttggcctcccaaagtgctagggtttcaggcatgaaccagccactgtgcctggcctaaatttttttttyttttttggatggaatttcgttctgtcacccaggctggagtgcagtggcacgatctccgctcactgtaacctctgcttcccgagttcaagcaattctcctg

SEQ ID NO: 271281 - DNA, 201 bp, Homo sapiens
acatggtgaaaccccgtctctactaaaaatacaaaaattagccggacgtggtggcgtgcacctgtagtcccagctactcgggaggctgaggcaggagaatsgcttggacctgggaggtggaggttgcagtgagctgaggtcacgtcactgcactccagcctgctgacagagtgagactccgtcttaaaaaaaaaaaaaaaa

SEQ ID NO: 271282 - DNA, 201 bp, Homo sapiens
tggtgaaaccccgtctctactaaaaatacaaaaattagccggacgtggtggcgtgcacctgtagtcccagctactcgggaggctgaggcaggagaatcgcwtggacctgggaggtggaggttgcagtgagctgaggtcacgtcactgcactccagcctgctgacagagtgagactccgtcttaaaaaaaaaaaaaaaaaaa

SEQ ID NO: 271283 - DNA, 201 bp, Homo sapiens
gagcctgggaggtggaggttgcagtcagcagagatcacgccactgcactgctgcctgagcgacagagcaagactccgtcttaaaaaaaaaaaaaaaaaaargatctaatatcatagatactactttaacttaattaaatggacctgtaggtaaatgaaagtcatttttctctttaattttgtgctgctgtttttttccccc

SEQ ID NO: 271284 - DNA, 201 bp, Homo sapiens
tgaaaccccgtctctactaaaaatacaaaaattagccggacgtggtggcgtgcacctgtagtcccagctactcgggaggctgaggcaggagaatcgcttgracctgggaggtggaggttgcagtgagctgaggtcacgtcactgcactccagcctgctgacagagtgagactccgtcttaaaaaaaaaaaaaaaaaaaagg

SEQ ID NO: 271285 - DNA, 201 bp, Homo sapiens
tatttttataatgtactatgtttggggagaataggaaaccaaggaaagttatgatgagggtacattaaattaaaaagaggatcttgggaggagccaagaartatgagaacgagtgagtagaaaagttagagcattaggagacagtgaaattggagaaccccaggaaataaagtggttcaagaagacaaaatgataaatggg

SEQ ID NO: 271286 - DNA, 201 bp, Homo sapiens
attcaccacctaccttcagattcttgaccaaaatgtggcaccccaacatttatgaggtaaggagacatccatcataaatttctctgaagattttttttttwaaatcagtactttaaaatagcctatctcagcacactttgatacttaggcttttgtagccatagagaaatattaatgattttgcacttcagttaacagttt

SEQ ID NO: 271287 - DNA, 201 bp, Homo sapiens
agattacaggcatgagccactgtgcccagccttatttttatttttttgagatcgaatctcgctttgtcacctaggctggagtgcagtggcacactctcggytcattgccacctctgcctcctgggttcaagcgattctcctgcctcagactcctcagtagctggaattacaggctcatgccaccattcccagctaattttt

SEQ ID NO: 271288 - DNA, 201 bp, Homo sapiens
ccaccatgcccagctaatttttgtatttttagtagagatggggtttcaccatgttggccaggctgttcttgaattcctgacctcgtgatccacccacctcrgcctcccaaagtgccgggattacaggcgtgagccaccgcgcctggcctactattctaaaagtgtgtttttaaatatccaaatgttttggggattttgcag

SEQ ID NO: 271289 - DNA, 201 bp, Homo sapiens
ttccatctgaaaataattagtaggataacaaaacttatttaatactgcacattgggggttacctaaattttgctccaagtcagtttatacttggttttacmtagttacatatacaatgttttatttatttatttatttatttatttatttattttgagacagagtttcgctcttgttgcccaggctggagtgtaatggtgc

SEQ ID NO: 271290 - DNA, 201 bp, Homo sapiens
cctgacctcgtgatccacccacctcggcctcccaaagtgccgggattacaggcgtgagccaccgcgcctggcctactattctaaaagtgtgtttttaaatmtccaaatgttttggggattttgcaggtatctttctgttaggaacttccagttaaattccgttgtgatctgaaagcagacattgtatgatttctattttta

SEQ ID NO: 271291 - DNA, 201 bp, Homo sapiens
ccctgaactctgacagagtataaaatctctttaaatacacatggttatcatacttaactgaaatgtaattaacttttttttttttttgagacagagtcttrctccctcacccaggctggagtgcagtggcgtgatctcagctcactgcaacctccacctcccaggttcaagcagttctcctgtctcagcctcccgagtagc

SEQ ID NO: 271292 - DNA, 201 bp, Homo sapiens
tgaccacagcagggcagtttttataccaaatttgtctatgtgagaagaaaatgaagttactcttttttcttaaaatatgaggaaaatggctctgaggactmagagttattatttgtgtggtacaatgagtcctcactaatttggattctactaatttgaaaattatgaggtttttcttttttgagaaaggattttgctgta

SEQ ID NO: 271293 - DNA, 201 bp, Homo sapiens
tccctccctgctggaagataggtcccaggtttccacctgccagcaacccaaggccaggagacacagtcacaccctctgaaatactcacaaacatggtgggsccatactggaaggcactgggcatgcctgtgtagtagggaagaccagtgtagctatagccaggtggcagtgcaggattcacgaagggctgctgggctgtgt

SEQ ID NO: 271294 - DNA, 201 bp, Homo sapiens
agaacctgcagacttgtttggtgcctgcgatgatccagcatagccacctttggagtagtctcctgctgctgtcccctgggtcaggtcgtcataacctagcrtggcagggtacaagaggcaagtgtgagccaggcaagcctgtctaaccccatgtgtctctgtctgggaagtacccctcacctgtactgtagccgtgctggc

SEQ ID NO: 271295 - DNA, 201 bp, Homo sapiens
cgtgccaccacgcccggctaatttttgtatttttagtagagatggggtttcatcatattggtcaggctggtctcgaactcctgacctcaagtgatctgccygcctcggcctcccaaagtgctgggattacaggcgtgagccactgcacctggccagaaaaactcatttctacatttcccataggttgtttaaattgttatt

SEQ ID NO: 271296 - DNA, 201 bp, Homo sapiens
ttttgaggggaaaagtgtcctacgtagcaaattatgtatacatgaattatctcgatagactcaattttaaattagtattaaaaattctgagttgtaggccrggcgcagtggctcacgcctgtaatcccagcactttgggaggccaaggtgggcagatcacctgaggtcgggagttcaagactagcctgaccaacatgaaga

SEQ ID NO: 271297 - DNA, 201 bp, Homo sapiens
aaaattgaggggaaagttcagagaaaaaaattgctgattattttattaatagtgtgttgtagaacacagtatggagctttttataagttcctctatggggwtatacatttataggtttatctatatggtacattaggcatcatttagaatatattagtatttaggccactaaatttgtacttttcagagctgagctctggt

SEQ ID NO: 271298 - DNA, 201 bp, Homo sapiens
ggagttcaagactagcctgaccaacatgaagaaaccctgtctctactaaaaatacaaaattagctgggcatggtggcacctgcctgtaatcccagctactygggaggctgaggcaggagaattgcttgaacctgggaggcggaggttgcggtgagccaggatcgtgccactgcactccagcctgggcaacaagagtgaaac

SEQ ID NO: 271299 - DNA, 201 bp, Homo sapiens
atgtaccaccatggccccgtttaatttttgtgtttttagtaaagatggggtttcaccatgttggccaggctggctttgaactcctggtctcaagcaagcartccttttgcctcagcctcctaaagtgctgggattacaggtaggagccaccatgtctggcctgattactaattttatctgctgatgttcatatatgtaagt

SEQ ID NO: 271300 - DNA, 201 bp, Homo sapiens
agctctggtttgtaaataacttgtcacaagcaggattttatgcatatttatgtaattcttggatttacagatcttatccattttctcttaacattttaagrtatagggaaaaggtttcctaagtattgacatgcccaaatttggccatatatcagaatcatgtggagaagttattaaaaagaatcctggaaatttttattt

SEQ ID NO: 271301 - DNA, 201 bp, Homo sapiens
tgaaacgctgtctcaaaaaaaaaaaaagtctgagttttatgtattctatattactcaagagtatgtttgagggtgctacgtcttcagaagtaattgtagcrcattattttgacattataattagacaatgtgtataaaagtttttaaaaaatattttggatgatttgttgaaaaaattgcatccaaaaaaatccccagttg

SEQ ID NO: 271302 - DNA, 201 bp, Homo sapiens
cttgaacccgggaggcagaggttgcagtgagccaaaatcgtgccactgcactcctgcagcctgtgcaacagagcgagactccctcaaaaaaaaaaaaaaaagaagaagaaaagaaagaaagtacatgggtacatggtaagccgggcgtggtggctcacacctgtaatcccagcacttttggagcccagggcagattcatca

SEQ ID NO: 271303 - DNA, 201 bp, Homo sapiens
aatcacttcaacctgggaggcagaggatgcagtgagccaagatcatgccactgtactccagcctgggcaacagagcaagactcttgtctcaaaaaaaaaawatatatatatatatattcttgaggaagtgtgcctagcaggtaaattttttgaagctttattctaactttatacttgaaattacttggctgggtatagaat

SEQ ID NO: 271304 - DNA, 201 bp, Homo sapiens
atttgcagggagatcccttgagcccaagagttcgaagtttcagtgagctataatcatgctactgcaccagcctgggtgacagagcaagactgtatccttcrttcataaataaataagtaaataaataatcaattcaataacatttagtatgttcataatgttgtacaactattaatacctctatgtagtggtaaagcgttt

SEQ ID NO: 271305 - DNA, 201 bp, Homo sapiens
tgtgtcctttgcctgttttactgtagaagggtttgtctttatgtcttgatttagaaacactcatataacgctttgaaaaaaattttaaacatttcccccaytttgtggttttgcctttaacatataaacagtatgttttgttatatagaattgtttaacttttattttataaaattcatctattactttctttaaggtttt

SEQ ID NO: 271306 - DNA, 201 bp, Homo sapiens
gactggagtgcagtggcacaatctcggctcaccgcaacctccgcctcctgggttttcaagtgattctcctgcctcagcctcccgagtagcaaggactatargcatgtgccaccacgcccggctaattttgtacttttagtagagacagggtttctccacgttggtcaagctggtctcgaactcccgacctctggtgatccg

SEQ ID NO: 271307 - DNA, 201 bp, Homo sapiens
agattgcaccactgcactccagcctgagagacaaagtgagaccttgtctctttatgtcacccaggctggtctggaactcctggcctcaagcagtcctcccygctcagcctcccacagtggtggaattacaggcatgagccactgtacctggccttccctattattgaaatggatatctttttgttactgagttttaggaat

SEQ ID NO: 271308 - DNA, 201 bp, Homo sapiens
tgtataattcatctgttgatggatgcttgggttgttcccacctttgggttattgtgaatcatgccgttctcttttggatgctgtaaatgtttggtagactytagagtcccacagtagttactttagacaattcctaccagctcagtggttgtttaggtgtagtgacggattcttggagcttctttttttttttcttttttt

SEQ ID NO: 271309 - DNA, 201 bp, Homo sapiens
cagctgattgcagaagagcagtcactggccatctcagaccaaagacactatatggtactctgaggaagaggaagacagtataaaactccagggccacgtargcaacctccatgtcttgtgtcatatggtttttctttttaaaaaagagagagaaaacaagatggaggagggaagataaggaccaacatttaacaggggaca

SEQ ID NO: 271310 - DNA, 201 bp, Homo sapiens
gccaggatggtctcgaactcctggcctcaagtgatctgccagccccggccccccaaagtgctgggattacaggtgtgagccaccccgcctggccagatctrttcttttaaatgacaattatcaatggaattgttttcataatatcctattaggttatttttgctagtttataaaaataaaagtgactgagttttgattatg

SEQ ID NO: 271311 - DNA, 201 bp, Homo sapiens
ttggttatttaaatgtaggtttaatgtttaacatacagtccttgtggttatctaagccttttgtgtgtgtgtgtgtgtgtgtgtgtgtgtgtgtgtgtgtkagagagagagagagagagagagacaggatctctctctatgaccaggctggagtgcagtggcagtggtgcaatcagggctcactacagcttcaacctcctg

SEQ ID NO: 271312 - DNA, 201 bp, Homo sapiens
gtactctaggtacacagatatatctgaaaacaaagggatatatatttggctgcttctaagacaattgagtcttgatttattatgtttgtcttttttttttwaagatggagtctcattgtgttgcccaggccggagcactatcttggctcactgcaacctccgcctcccgggttcaagcgattctcctgcctcagcctcctg

SEQ ID NO: 271313 - DNA, 201 bp, Homo sapiens
tttggttatttaaatgtaggtttaatgtttaacatacagtccttgtggttatctaagccttttgtgtgtgtgtgtgtgtgtgtgtgtgtgtgtgtgtgtgtgagagagagagagagagagagagacaggatctctctctatgaccaggctggagtgcagtggcagtggtgcaatcagggctcactacagcttcaacctcct

SEQ ID NO: 271314 - DNA, 201 bp, Homo sapiens
ttgtctttttttttttaagatggagtctcattgtgttgcccaggccggagcactatcttggctcactgcaacctccgcctcccgggttcaagcgattctcytgcctcagcctcctgagtagctgggattacaggcgcgtgccaccacgcccggctaatttttgtcttttgtttttgtttttttgagacggagtctccctct

SEQ ID NO: 271315 - DNA, 201 bp, Homo sapiens
atttggttatttaaatgtaggtttaatgtttaacatacagtccttgtggttatctaagccttttgtgtgtgtgtgtgtgtgtgtgtgtgtgtgtgtgtgtgtgagagagagagagagagagagagacaggatctctctctatgaccaggctggagtgcagtggcagtggtgcaatcagggctcactacagcttcaacctcc

SEQ ID NO: 271316 - DNA, 201 bp, Homo sapiens
gatttggttatttaaatgtaggtttaatgtttaacatacagtccttgtggttatctaagccttttgtgtgtgtgtgtgtgtgtgtgtgtgtgtgtgtgtgtgtgagagagagagagagagagagagacaggatctctctctatgaccaggctggagtgcagtggcagtggtgcaatcagggctcactacagcttcaacctc

SEQ ID NO: 271317 - DNA, 201 bp, Homo sapiens
atgttcacttaggaatagattttcaagcctgaatccctactcttaacttatcctagttctactctggttctttattaccacctaacattagtgtcattcaytggttgcagttaataaacaatgttaattcattataagtaactgaagtccatacgctttcacatttcctttgtttttacctgtcgttgttttgctccaaaa

SEQ ID NO: 271318 - DNA, 201 bp, Homo sapiens
ttagttgatggggtttcaccatgttggccaggctggtctggaacttctgacctcaggtgatccacccaccttggccttccaaagtgctgggattacaggcstgagccaccgtgaccaagtgttgacttttaaattttaaattagaaagtgttactatgataaactatacttgaaagtcatatttagttatctgtaggttaa

SEQ ID NO: 271319 - DNA, 201 bp, Homo sapiens; identical to SEQ ID NO: 53804

SEQ ID NO: 271320 - DNA, 201 bp, Homo sapiens
tggtagagatggggtttcgccatgctggtctcaaactcctgacctcaggtggtccacccgccttggcctcccaagtgctaggattacaggcgtgagacacygcgcccagccccagtcaattttttatcaggattgtactataggaatagtaagtcttctcactagaaaatataccttggagattggtcgaaataaatatta

SEQ ID NO: 271321 - DNA, 201 bp, Homo sapiens
ctgtagaataatgtagctgtgtgtgtgaaagagtggctgattagactggcatggttaacctttatgcttttaagtatatagaaattgacagattgttgaayggcatgtgaactgttttgcctatagttctttgagagtttattgttcatttgtccttttttccccctatttcttttttcagctaagcttcttaagatggaa

SEQ ID NO: 271322 - DNA, 201 bp, Homo sapiens
gaggttgctctgagccaagattgcaccactgcactctagcctaggtaacagcgaaactccatctcaaaaataaaataaaatattctaattttttgctactrttttcccgtgagttaggtactgttgtgtgatgagtgtaatttggtaatgtctatgaatagtgtattttttttaggatagttacattgtcattgcataata

SEQ ID NO: 271323 - DNA, 201 bp, Homo sapiens
tttttgagacagaatcttgctttgtggcttaggctggagtgcaggggtgcgatcaaggctcactgcagcctcagcctcctgggctcaagcgatattcttayctcagccccgaccatgcacagtgctgtgattacaggtatgagccactgtgcccagcctcttattttcagtttaggcagctgctgcttctttttttttttt

SEQ ID NO: 271324 - DNA, 201 bp, Homo sapiens
aaaaacaaaccagacttagcctagatctggcaatgtcatttagatattttatttcttttttttctttttcttcttcttattaattttttttttttttttttagctgagtctcgctctgttgctcaggctggactgcagtggtgtgatttcggctcactgcaacctttacctcctgtgttcaagcagttctcgtgcctcagc

SEQ ID NO: 271325 - DNA, 201 bp, Homo sapiens
ttctattagaactgtaaaacccctttacttctgtccttccgtccttccatccatccatccgtctgtccgtccttccatccatccatccgtctgtccgtccktccttccttcctttcacttttttttttttttttttttttgagacagagtctcattctgtcacccaggctggagtgcagtggctcaatctcggctcactgc

SEQ ID NO: 271326 - DNA, 201 bp, Homo sapiens
tactcttaacttatcctagttctactctggttctttattaccacctaacattagtgtcattcattggttgcagttaataaacaatgttaattcattataastaactgaagtccatacgctttcacatttcctttgtttttacctgtcgttgttttgctccaaaatatttcatacatataaatatatatctatatatgtacg

SEQ ID NO: 271327 - DNA, 201 bp, Homo sapiens
tgttgtccaggttggtcttgaactcctgggctcaagtgatccacccaccttagcctcccaaagtgctaagattatcaccatcaatgatgggcataagccamcattcctggccatgatagttaattcatatatttttctctgcattctctcatttgttacttgacatattttgttactgtaatttctaggtcacaaacatgc

SEQ ID NO: 271328 - DNA, 201 bp, Homo sapiens
tgggctcaagtgatccacccaccttagcctcccaaagtgctaagattatcaccatcaatgatgggcataagccaccattcctggccatgatagttaattcrtatatttttctctgcattctctcatttgttacttgacatattttgttactgtaatttctaggtcacaaacatgcaggcttgtttgttatggttgtatctt

SEQ ID NO: 271329 - DNA, 201 bp, Homo sapiens
atgttgtccaggttggtcttgaactcctgggctcaagtgatccacccaccttagcctcccaaagtgctaagattatcaccatcaatgatgggcataagccwccattcctggccatgatagttaattcatatatttttctctgcattctctcatttgttacttgacatattttgttactgtaatttctaggtcacaaacatg

SEQ ID NO: 271330 - DNA, 201 bp, Homo sapiens
ttataaattttcttgtttttgatgacaattttggggggtactgatcaggtattttgtgcaatgtcccccagttgagatttttcttatgtgttttctcatgrttagtctagggttataggtttgggagagaaagaccagagaagtaatgtgccattttcattatgtcatatctgaagtatttactatcagtgtggcttatcc

SEQ ID NO: 271331 - DNA, 201 bp, Homo sapiens
ctatgttgtccaggttggtcttgaactcctgggctcaagtgatccacccaccttagcctcccaaagtgctaagattatcaccatcaatgatgggcataagycaccattcctggccatgatagttaattcatatatttttctctgcattctctcatttgttacttgacatattttgttactgtaatttctaggtcacaaaca

SEQ ID NO: 271332 - DNA, 201 bp, Homo sapiens
tggagttttgctcttgttgcctaggctggagtgcagtggtgcgaccttggctaactgcaacctctgcctcccgggttcaagcagttctgcctcagcctccygaatagctgggattatggcatgcaccaccatgcccggctaattttgtagttttagtagagacggggtttctccttgttggtcaggctggtctcgaactcc

SEQ ID NO: 271333 - DNA, 201 bp, Homo sapiens
ccacatctctactaaaaatacaaaaaattagccaggcatggtggcacgcacctgtaatcccagctactcaggaggctgaggcaggagaatcccttgaaccygggaggcagaggttgcagtgagccaaaatcgtgccactgcactcctgcagcctgtgcaacagagcgagactccctcaaaaaaaaaaaaaaaagaagaaga

SEQ ID NO: 271334 - DNA, 201 bp, Homo sapiens
tatttgcttccttggtttttgtgcatggggtcccactgccctcaacctgccaattccattctctgcagatgatacataatttgggcatttaaaaactgtasttgtattcctaccttgcattctcagggatacatcagtcagcagcagatccagcactgcacagaaggaggtgttatatttgttggttgctttagcagccta

SEQ ID NO: 271335 - DNA, 201 bp, Homo sapiens
tttttagtagagacaggatttttccgtgttagtcgggctgatcttgaactcccaacctcaggtgatccgcccacctcggcctcccaaagtgctgggattayacttgtgagccaccacacctggcataagcttagattttttggtttttaggaataagccctttctacttctcccatgctgtctggagggatgatatataca

SEQ ID NO: 271336 - DNA, 201 bp, Homo sapiens
gccaggcgtggtagtacaatgcctgtaatcccagctactcaggaggctgagacaggagaattacttgaacccaggaggcagaggttacagtgagctgagayggcaccactgcactccagcctgggtgacagagcaagaccctgtcaaaaaacaaaacaaaacaaaaaaacggccgggcgtagtggctcatgcttttaatcg

SEQ ID NO: 271337 - DNA, 201 bp, Homo sapiens
aatcttaacctcttaaatttgcctgcccctacaaatcctgccaatcgggattcctttttgccttcatattactgatttcaaacttgttttgttccttttttacatttaattgtttatttataaaaatagttcacatatatagttttaagagtaacatgtggtgtaagacttacaataaggaacaatcagttccctactctt

SEQ ID NO: 271338 - DNA, 201 bp, Homo sapiens
aagtaggataatgtgaaagaatgactagatggctgctttaaattgggttgtcaggccaggccttctctaaggtgatatttaagccttaatatctgaggccktgattctgagtgacaggaaggagccaggcatgtgtggggcaggggaagagcaactggtccagacagaaaaatcaacaaggtgtgtccgagatgccaaaaa

SEQ ID NO: 271339 - DNA, 201 bp, Homo sapiens
aatctaagggcaagtaggtaaaagaggtaaaacagtgaaaattagcaatatataaaacagccttcatgatttttgcccctctctgtctgtctgtctgtctstctgtctctctctctctctctctctctctcccactctccctccgtctttcctcagcctcctgaatagctggcattacaggcaactgccatcacgcccagc

SEQ ID NO: 271340 - DNA, 201 bp, Homo sapiens
tatgttctgtgtgtctccaacactgtgttctgtcctttttgcccttgttttctgtgcttcagtttggatttgacctgaaatttttttttttttttttttttgagacggagttttgctcttgttgcccaggctggagtgcaatgacgtgatcttggctcactgcaactctgcctcctgtgtttaatccattctgctactgca

SEQ ID NO: 271341 - DNA, 201 bp, Homo sapiens
ctggtcttgaactcctgacctcaaatgatccgcctgcctcgaccttccaaagtgctgagattataggtgtgagccaccaagccctgccttcattgccttgktttttaatcaactgttgatgttgcttacagtatcctcagcttgctgagcaactgttctcaccaaaaagctaataatcttatttcctctggacacattcct

SEQ ID NO: 271342 - DNA, 201 bp, Homo sapiens
attggccaggcttgtcttgatctcctgacctcgtgatctgcctgccttggcctcccaaagtgctgggattacaggcgtgagccaccacgcctggccttctraatattttaaatgccgtttttcatttttaaaatttctagtttgttgttaactatcatacttctactgtggaagatgaggatttctctcattactgtaaca

SEQ ID NO: 271343 - DNA, 201 bp, Homo sapiens
taagtctctagggacatgaccagaccagaagcccctgttctatatgaagacaaacaggtggccatacttgggtggagggataccgctgctattcccagatsaagatttggtggaaggagaccatgacagatgacaaacggaacagtttctcaaaaacagaggtatgaagtaattacacaggaaagaaaacaatttccaaag

SEQ ID NO: 271344 - DNA, 201 bp, Homo sapiens
acatatatgtacaggtgtagtaagattgccagttttctaagctggttgtacctgttctgcattcctataagcgctatatgagagttatggtagttttgcatctttgctagtctttttcattttaggtattttgcttttaatttgcatttccttgatgactaatgatgttgaacaccatattaactgaatttatttactggc

SEQ ID NO: 271345 - DNA, 201 bp, Homo sapiens
gttcacacaatgatgaaattgcctaatgatgcatttctcagaacatattcctgtcattaggcaacatatgactgtaattcagtggtttttagtcagaattktgcaatcatcaccacagtcaattttagaatattttgctgggcttggtggctcatgcctatgatcccagtactttgggaggcagaggcacgcagatcattt

SEQ ID NO: 271346 - DNA, 201 bp, Homo sapiens
ctcggcctcccagagtgctgggattccaggcgtgagccaccacacctggcttttttttttttttttttttttgagacagagtcgcccaggctggagtgcartggtgtgatatccagtcactgcaacctccacctcctgggttcaagtgattctcctgcctcagcctgctgagtagctgggattacaactgcttgccaccat

SEQ ID NO: 271347 - DNA, 201 bp, Homo sapiens
ggccccatagacccggagtgcacctgccccacgtgccaaaagtaggcaggatggcactgggagctggggcagggcatggaggggacagggcctggccgtgmtgagctgtcccctgccgctctacaggcacagccgcgccttcctgcacgcactgctgcacagtgacaacacggccgcgctgcaccacctcacggtccacaa

SEQ ID NO: 271348 - DNA, 201 bp, Homo sapiens
agtagctcaatccccaacaccattggtccacattgtctactggcacgtctgcctgccaataagatggtggaacttcgccaatgggcagagccaacgtgcctttttcggaaacacccccttcctctcttgacaacttgctttctgccgctattggctgttgcacaacagtgacggttcttttgtccaataagtcagcaagac

SEQ ID NO: 271349 - DNA, 201 bp, Homo sapiens
acctgcttcggcctcgcagagtgctgggattataggtgtgagccaccacgcctggcccaatatccccatttcttgataaagaaccatggcaacacagggtsaaaacccctcttcccctcatcattctaatagattgatgctgtagggaggaagaaatattttttcttcttagattcatggctgaagcccctataacaaaaa

SEQ ID NO: 271350 - DNA, 201 bp, Homo sapiens; identical to SEQ ID NO: 53814

SEQ ID NO: 271351 - DNA, 201 bp, Homo sapiens
tgggactacaggcacccgccaccaggcccggctaatttttgtatttttagtagagacagggtttcaccattttggccaggctggtttcaaactcctgaccktgtgatctgcctgcctcggcctcccaaagtgctgggattacaggcgtgagccaccgtacctggcctctttatttatttttgagacacggtcttactctgt

SEQ ID NO: 271352 - DNA, 201 bp, Homo sapiens
cccaggctggagtgcagtggtgtgatcttggctcactacaacctctgcctcccaggttcaagcgattctcctgcctcagcctcctgtgtagctgggaccamaggcgtgcaccaccacgcctggctacttttcatatttttagtagagacagggtttcaccatgttggccagattgttcttcaacaccagacttcaagtgat

SEQ ID NO: 271353 - DNA, 201 bp, Homo sapiens
tggctaattttgtatttttagtagagacagggtttctccatgttggttaggctactctcaaactcctgagctcaggtgatccgcctgcctcggcctcccaragtgctgggattccaggcgtgagccaccacacctggcttttttttttttttttttttttgagacagagtcgcccaggctggagtgcaatggtgtgatatc

SEQ ID NO: 271354 - DNA, 201 bp, Homo sapiens
gtactgtgactgggccacgtgtggaggaggccatgtacaggtgtgtatatgctgtgtgcatgtgtgggatatgtggtgggaggggatcctggtccctgtasccttgtctcctaccccctcaccaggcccctggggcttgtgactggggccctgttgcaggtcaatccgctggctggaccggtgcattgcagcccatcagcg

SEQ ID NO: 271355 - DNA, 201 bp, Homo sapiens
accatgttggcgaggctggtcttgaactcctgacctcagatgacctgcctgcctcggcgtccccaagtgctgggattacaggcgtagtcactgcgcccagycagcagagccctgctgatggacgtttggtttcccggtcttgctgtggcacgccacatagcaagggatccctttgtatattttaggattttattttgtgta

SEQ ID NO: 271356 - DNA, 201 bp, Homo sapiens
ttcgttcccagttcaattctgattcttcgctttagcgtgttgtgggtaggagttaaatgggcccccagccaggaccaggggttcaaatccgttgccatggtcccccgacgctttcccgggctccagaacggatcgcgtggtcacgtgacagcggccaacatggcgccgcccactgtgtggtacggcccacgtggttccgac

SEQ ID NO: 271357 - DNA, 201 bp, Homo sapiens
atgcagctggacgacgtggttagcagtactgtgactgggccacgtgtggaggaggccatgtacaggtgtgtatatgctgtgtgcatgtgtgggatatgtgrtgggaggggatcctggtccctgtagccttgtctcctaccccctcaccaggcccctggggcttgtgactggggccctgttgcaggtcaatccgctggctgg

SEQ ID NO: 271358 - DNA, 201 bp, Homo sapiens
gcctgtctgacagagaagggcatagttagatgtgcaggtggaacacagaaaatcaaatgacagactcactcctaaggagactttgtggggtggaaatgttytgctccgtaaatgttgtgtatttttgacctgcatcaaatatgctgagtttcttttttttttttttttttttttttgagacagagtctggctctgtcgccc

SEQ ID NO: 271359 - DNA, 201 bp, Homo sapiens
tagtacacaataagtatgggttgagcattcctaacttgaaattccaaaatccaaaatcctccaaaatctgaagcttttttgagtgccaacatgatgctgaraggaaatactcggagcattttggatttcggatttccagattagggatgctcagctggtaagtatagtgcagctattccaaaatctgaaaaaattcaaaag

SEQ ID NO: 271360 - DNA, 201 bp, Homo sapiens
tgtaatggctggcatgtatattgggattgggagttgggaactgttgcctgttggatgactgtgtttctctgagctatatgattttgtgacatacaaattarcttttacaggcagcagcacatgttgatatttattctgagctaggtagaccagttaacattccgactaaagtctgtcctacccatgggggaaatgacattc

SEQ ID NO: 271361 - DNA, 201 bp, Homo sapiens
gattattattgccaaatatgttttttattagtttccctttttattttgcaggtatgcaaggcagatgagaaatttaatcagctggtccattttcttcgcartcataagcaggagaaacacctggtcttcttcaggtactcctctggtctctgtggtagaggcatcagggattcagccagaatgtgcaggtgcatgcggcct

SEQ ID NO: 271362 - DNA, 201 bp, Homo sapiens
aggcagatgagaaatttaatcagctggtccattttcttcgcaatcataagcaggagaaacacctggtcttcttcaggtactcctctggtctctgtggtagrggcatcagggattcagccagaatgtgcaggtgcatgcggcctttgggttttggattccatctagcatggttctctccggaatgcttttggctgcaaataa

SEQ ID NO: 271363 - DNA, 201 bp, Homo sapiens
ctcttcctatgtgtcacctcatggattctggatgaccactattacaccctgtcatgtctccactgaagaaagataaggggggaaaggcagagggggcttakggcaatgttagctatatccatgccttttaatcaggagagcaaagagcttcttcagaaacccctctgccctagttgacttcagctgtgaattcatcttagg

SEQ ID NO: 271364 - DNA, 201 bp, Homo sapiens
tcatgtctccactgaagaaagataaggggggaaaggcagagggggcttagggcaatgttagctatatccatgccttttaatcaggagagcaaagagcttcytcagaaacccctctgccctagttgacttcagctgtgaattcatcttaggggccaaaagtgggtcacgtggtggcccctcacttcaagagcagcagagaaa

SEQ ID NO: 271365 - DNA, 201 bp, Homo sapiens; identical to SEQ ID NO: 53833

SEQ ID NO: 271366 - DNA, 201 bp, Homo sapiens
tggggcgctcatccctccagctggggctcttgccttgtctccagctgcccagactggcggaatgcggagctgcccggccagcgagccggcagaggggccgsgacccaccccgccctcgggtgctgtggtctcaagcctggttctcatcctggccctgctcgctgtagctgtgagacctcgggcaaatggcttaacctctcc

SEQ ID NO: 271367 - DNA, 201 bp, Homo sapiens
tattttttgacatgttacccaggctggtcttaaactcctgggctcaagtgatccttccgcctcggcctcccaaagtgctgggattacaggtgtgagctacygcgcccggccattttgcacatttttgtgctttatgttggtgattttggtttttgaaatggccccgtgatgtagtgcagtctagtgttcctgggtgcaaga

SEQ ID NO: 271368 - DNA, 201 bp, Homo sapiens
gtcaggtgaggacaacaaaagtgatttattttcacctagtcatcagagagttcacattggattaagaagctggctacaaatgtgaaaaaataggccagaakccgtggctcacacctgtaatcccagcactttgggagactgagtctggaggatcactggagtccaggagtttgagaccagcctgggcaacacagtgagact

SEQ ID NO: 271369 - DNA, 201 bp, Homo sapiens
gcaaggagcaaatccatttgtcctgtctgggtagaaactgtctgtggcttaaggccggacacggtggctcacgcctgtaatcccagcactttgggaggccraggcgggtggatcacgaggtcaggagatcaagaccatcctggctaacgtggtgaaaccctgtctctactaaaaacaaaaaattagtcgggcatggtggct

SEQ ID NO: 271370 - DNA, 201 bp, Homo sapiens
caacaaaagtgatttattttcacctagtcatcagagagttcacattggattaagaagctggctacaaatgtgaaaaaataggccagaagccgtggctcacrcctgtaatcccagcactttgggagactgagtctggaggatcactggagtccaggagtttgagaccagcctgggcaacacagtgagacttcatctctacaa

SEQ ID NO: 271371 - DNA, 201 bp, Homo sapiens
tgatccttccgcctcggcctcccaaagtgctgggattacaggtgtgagctaccgcgcccggccattttgcacatttttgtgctttatgttggtgattttgrtttttgaaatggccccgtgatgtagtgcagtctagtgttcctgggtgcaagaaggttatgacgtgcagagaaaatccccgtgctagagaagcacaagcta

SEQ ID NO: 271372 - DNA, 201 bp, Homo sapiens
tgctttatgttggtgattttggtttttgaaatggccccgtgatgtagtgcagtctagtgttcctgggtgcaagaaggttatgacgtgcagagaaaatcccygtgctagagaagcacaagctaaggcatgagttaatgtgctgttggccacgagttcaatgagaatgaatcaatagtatatgttaaatagagtcttttaagc

SEQ ID NO: 271373 - DNA, 201 bp, Homo sapiens
catgttttttaccttttttttttttttcttttttccctgagacagggttttgctctgtcacccaggctggagtgcagtggtgtgatctcatctcactgcarcctccacctcccaggcttaagctgtcctcctgcctcagccttccaagtagctgggactacaggtgtggaccatcatgtctgggtcattttttgtattttt

SEQ ID NO: 271374 - DNA, 201 bp, Homo sapiens
ggtcattgcgacctttacttcctgggcttaagtgatcctcccacctcagcctcctgagtcatctgggactacaggcacatgccatcatgcttttttttttwaatttttggcagagacaagatcccattatgttgcccaggttggtctcaaactcctgggctcaagagatcttcccatcccagtctcccgaagtgctgggat

SEQ ID NO: 271375 - DNA, 201 bp, Homo sapiens
gaggctagctcttcccaagcagagggaaggactctgcatagggtagtgtggagagcatgggcgctagagcaggactgcctggtgcatatcttggctttggcccctaccagatttaaccgatgaacttagaggtccttacttgtcaaatgggggccacagtagtatacagcttcgtagggttgctgcaggattaattaatta

SEQ ID NO: 271376 - DNA, 201 bp, Homo sapiens
ttagagttgaggtgggaggatcgccggatgccaggccaggagttcgataccagtctgggcaacatattgagagtctgtctcttgaaaaaaaaaaaagaagaaaaaaaaaggtaaataaataaaaatctaccctggagatggtgtaatggctggcatgtatattgggattgggagttgggaactgttgcctgttggatgact

SEQ ID NO: 271377 - DNA, 201 bp, Homo sapiens
atcgtgatactgtattggtagcaattaaaagtactttcaaatattatcagttcttgcagaaacacacaatagaatgtctaaatgaaaaaagcaatacatamcaccacatgtgaaaattacaattactttcttcaaagtcagcatatattcctaatacatgcttccacgcataggaaaatgcctataaacccccaagtgttg

SEQ ID NO: 271378 - DNA, 201 bp, Homo sapiens
ttgggattgggagttgggaactgttgcctgttggatgactgtgtttctctgagctatatgattttgtgacatacaaattaacttttacaggcagcagcacatgttgatatttattctgagctaggtagaccagttaacattccgactaaagtctgtcctacccatgggggaaatgacattccttaaaatttaatgctgaaa

SEQ ID NO: 271379 - DNA, 201 bp, Homo sapiens
tgggattgggagttgggaactgttgcctgttggatgactgtgtttctctgagctatatgattttgtgacatacaaattaacttttacaggcagcagcacatgttgatatttattctgagctaggtagaccagttaacattccgactaaagtctgtcctacccatgggggaaatgacattccttaaaatttaatgctgaaac

SEQ ID NO: 271380 - DNA, 201 bp, Homo sapiens
aaactgcaccctgctaggtgggatgttttctattctgttctactccagctgttaatttttttaaaatgctggtcgagacccactaaattgatttcagaacycaccaggtctgtgggttgtgaggcttagtgtgtgaaacaccacttcattacatactatgtgactcaaggtggaaaagagcggtcacagcacaggtggagg

SEQ ID NO: 271381 - DNA, 201 bp, Homo sapiens
tctaagccctctgtccctcttgcagcacctgtgcctgtgtggaatactatgggaaggctctggaagtgctggtgaagggcgtgaagattatgtgcattcayggaaagatgaaatataaacgcaataagatcttcatggagttccgcaaattgcaaaggtgggtgggcttcattgaaggtagcagctctcctgccacactgc

SEQ ID NO: 271382 - DNA, 201 bp, Homo sapiens
ttgtcattcccctagggagggcttgtagttaggttgcgtctgctgcagctattgctcactgttcccctctcccggttgtagaaggaccaaagtggccaatsactctaagccctctgtccctcttgcagcacctgtgcctgtgtggaatactatgggaaggctctggaagtgctggtgaagggcgtgaagattatgtgcatt

SEQ ID NO: 271383 - DNA, 201 bp, Homo sapiens
ggtaagttttagttccctcatctgcaaaaggatgggaagtcacttgggaatgcttccagttaaggaaaagggtccagggtgaactttattagaagggtgcygggtaaggagctcacagattcagagaatgttgagtgtccagctcccagggaaggaggctccctggcaggagttcatgggccatctctttagggcatatct

SEQ ID NO: 271384 - DNA, 201 bp, Homo sapiens
tctttagtagtacataaaaaataattttatatttatttatatatttatatttataatttcttttctatctgttatcctacaaataaaatgcaatattgacsatgacccacagtaagaagtacaatttggtacacacccaaacaagacaataaaacaaaggttttcatgaaactgcaccctgctaggtgggatgttttctat

SEQ ID NO: 271385 - DNA, 201 bp, Homo sapiens; identical to SEQ ID NO: 53825

SEQ ID NO: 271386 - DNA, 201 bp, Homo sapiens; identical to SEQ ID NO: 53828

SEQ ID NO: 271387 - DNA, 201 bp, Homo sapiens
acgcaataagatcttcatggagttccgcaaattgcaaaggtgggtgggcttcattgaaggtagcagctctcctgccacactgctctttcaggtccccaaaygccccattctctagtagcctgtgctgtccgcatgtgttgtctttcctgcctggaaccctcttccctctctaatctggttatcacatctctgtaaacaccc

SEQ ID NO: 271388 - DNA, 201 bp, Homo sapiens; identical to SEQ ID NO: 53815

SEQ ID NO: 271389 - DNA, 201 bp, Homo sapiens
ttaatttcaaatcattaagtagtttgagctttcaaattctaccacgtgattttattccagttctatctttgatcttaaaatgcactttccttcaagttttktttttttttttttttttgagacagggtctcactctgtcatccaggctagaatgcagtggcatgatttcgggtcattgcgacctttacttcctgggcttaa

SEQ ID NO: 271390 - DNA, 201 bp, Homo sapiens
tattggcatctgctcatagccttactttctagtgcaagagctagagaaaggataatttcagctgctggtaagtgttatgaaagaactaagacggttgtgawagtgtcgcgcgaggactgcagaggaggtgagatagggtgttaaggaaggcctctctgaggaggtgcattgagctgagacctcagtgattgagaaggagct

SEQ ID NO: 271391 - DNA, 201 bp, Homo sapiens
tatttatttatttattttttgaggcagggttttgctctgttacccgggctggagtgcagtggcacagtcacagctcacagtagcctcgacctccctgggcmtaggtgatcctcttaccttagcctcctgagtagctgggactgcaggcatgcaccaccacacccacataattaaaaaaattttctttgtagagacagagtc

SEQ ID NO: 271392 - DNA, 201 bp, Homo sapiens
ccaaagtggtgagattacaggcgtgagccaccgtgccaggccaataatttctttatggccagttttttcacagaaaggtggagagagagtaatatttttargttttatggctgactgtggagaaaagggattcctgtttctatgctccgtcatgggcaagagggattcttgagtttctatggctagcctcagagaatcaga

SEQ ID NO: 271393 - DNA, 201 bp, Homo sapiens
agtctcgctctgttgcccaggctgcagtgcagtggcgcgatctcggctcactgcaacctccgcctcctgggttcaagcaattctctgcctgaacctcccamgtagctgagatcacaggtgcctgccaccatgcccggctaattttttgtatttttagtagatacggggtttcaccatctcggccaggttggtcttgaactc

SEQ ID NO: 271394 - DNA, 201 bp, Homo sapiens; identical to SEQ ID NO: 53836

SEQ ID NO: 271395 - DNA, 201 bp, Homo sapiens; identical to SEQ ID NO: 53824

SEQ ID NO: 271396 - DNA, 201 bp, Homo sapiens
gtctggcaacctctacagtgcttaaaatgagagggtttatttgaatcatgattctgtgatactagagctggaagggaccctaaaacccaatgtcttcaacsccttcctggttcagagaggaaagtaggagcgacagggctagaattcaggactcccacctcccagctcagctcactgtccccacacgccgtccacatagac

SEQ ID NO: 271397 - DNA, 201 bp, Homo sapiens
agatcaagaccatcctggctaacgtggtgaaaccctgtctctactaaaaacaaaaaattagtcgggcatggtggctggcgcctgtagtcccagctactccrgaggctgaggcaggagaatggtgtgaacccaggaggcggagcttgcagtgagccgagactgcgccagtgcactccagcctgggtgacagagtgagactcc

SEQ ID NO: 271398 - DNA, 201 bp, Homo sapiens
tggaagtggaggttaggaaagaaaagactacagggacctgaggtttttattctttttttttttttttttgagatggagtctcgctctgttgcccaggctgsagtgcagtggcgcgatctcggctcactgcaacctccgcctcctgggttcaagcaattctctgcctgaacctcccaagtagctgagatcacaggtgcctgc

SEQ ID NO: 271399 - DNA, 201 bp, Homo sapiens
ctcagagccccttttgtggtgggacccactgtgaccttagctgcccattatgttcctagggcttcgggtctcacctgtgaattgatggcatcctttaaccrgtgctttgcaatctctctctttagtccgcaaccatccctctgttcatgcgaaacaaagatgtcgctgcagaagcggtgagtgcctcgggtatgtgcagcc

SEQ ID NO: 271400 - DNA, 201 bp, Homo sapiens
ctcgatctcctgacctcgtgatccgcccacctcggcctcgcaaagtgctgggattacaggcgtgagccactgcacccggcctcaattattttcattctaaytaaaatgaatgcattaaaccctttggttagaaaaaaattatattgtaagccattactgattgttctaatcctgttgagtgcgctaactctgatcttctga

SEQ ID NO: 271401 - DNA, 201 bp, Homo sapiens
gcagaaactcctggagcaacaaagaagagagaaaacagaaaatgaagggagaagaaaattcataaaaaataaagcttggtcaaagcagaaggccaaaaaaraaaagaagaaaaaaatgaatgagaaaaggaaaagggaagaggtaaagtttacttttacttacattaacttagaatcttgaacaaatttattgtagtagtt

SEQ ID NO: 271402 - DNA, 201 bp, Homo sapiens
taccatttcccaagaatgactggcgtgcgtatcaggtttcagagggaaagtcaagagttcttttttttgttttttgtttgtttgtttgtttttaacttttytgagacggaatctttctctgttgcccaggttggagtgcaatgacacgatctcggctcactgcaacttctgcctcccgggttcaagctattctcccatctc

SEQ ID NO: 271403 - DNA, 201 bp, Homo sapiens
ttctgcctcccgggttcaagctattctcccatctcagccttccaagtagctggggttacaggcatacaccaccacgcctggctaatttttgtgtttttagkagagacgggatttcgccatgttggccagactggtcttgaactcctgacctcaggtacgcccgccttggcctcccaaagtgctgggattacaggagtgagc

SEQ ID NO: 271404 - DNA, 201 bp, Homo sapiens
aactcctggagcaacaaagaagagagaaaacagaaaatgaagggagaagaaaattcataaaaaataaagcttggtcaaagcagaaggccaaaaaagaaaaraagaaaaaaatgaatgagaaaaggaaaagggaagaggtaaagtttacttttacttacattaacttagaatcttgaacaaatttattgtagtagttcttta

SEQ ID NO: 271405 - DNA, 201 bp, Homo sapiens
tgtcctgggcattgtaggatgtttaacaacatcactggaatctgtccatcagaggacatcacctcccaaccctggttgtattttatttatttatttatttwttgaggcagggttttgctctgttacccgggctggagtgcagtggcacagtcacagctcacagtagcctcgacctccctgggcctaggtgatcctcttacc

SEQ ID NO: 271406 - DNA, 201 bp, Homo sapiens
tcctggagcaacaaagaagagagaaaacagaaaatgaagggagaagaaaattcataaaaaataaagcttggtcaaagcagaaggccaaaaaagaaaagaaraaaaaaatgaatgagaaaaggaaaagggaagaggtaaagtttacttttacttacattaacttagaatcttgaacaaatttattgtagtagttctttaaat

SEQ ID NO: 271407 - DNA, 201 bp, Homo sapiens
gagtagctgggactgcaggcatgcaccaccacacccacataattaaaaaaattttctttgtagagacagagtctccctgtgttgcctggctggtctggaaytcctggccttaagggatctacccacctgggcctcccaaagtgctgtgattatagatgtgagccaccacgcctggcccaccctgggttttgacaaccaaaa

SEQ ID NO: 271408 - DNA, 201 bp, Homo sapiens
gatttctgttacgttggcgaccagggtggggaatttgctctatttgcagaagccaatctgagagcttatagttcttgagttaaaactgctggtttcactasaacactattgctgaaaaatttagtagtttattggtttcttctgcacttagggttctgatattgaagatgaggacatggaagaacttcttaatgacacaag

SEQ ID NO: 271409 - DNA, 201 bp, Homo sapiens; identical to SEQ ID NO: 53816

SEQ ID NO: 271410 - DNA, 201 bp, Homo sapiens
gcgctaactctgatcttctgattgaatcagatcttgattttgccagccttgctcgaggttttgccctgctgaggatgcccaagatgccagaattgagaggraagcagtttccagattttgtgcccgtggacgttaataccgacacgattccatttaaagataaaatcagagaaaagcagaggcagaaactcctggagcaac

SEQ ID NO: 271411 - DNA, 201 bp, Homo sapiens
ttgtgaatagagacccagtgttgccatactttgctaccagattaggattgtcatgtgaaatctgatttttaaattttcttttaaaaatttaacatactttmcagagcatgtgaaatatttgggttggagttgggcttcagacctcaacagttgaaaaggaattgtttcgcttttgtttttcttggttgtgatggggagccc

SEQ ID NO: 271412 - DNA, 201 bp, Homo sapiens
tactttcttcaaagtcagcatatattcctaatacatgcttccacgcataggaaaatgcctataaacccccaagtgttgatgattactcctgaggttattgstcattttcattttattctttgtatttttcattgtttcccagattttccactggggactatgtcccacctgtatgatcagagagaaagatacaagttttac

SEQ ID NO: 271413 - DNA, 201 bp, Homo sapiens; identical to SEQ ID NO: 53837

SEQ ID NO: 271414 - DNA, 201 bp, Homo sapiens
gccctggaggctgatctgattgggctgtgatcaggacagcaggagtgtacaggctctccaggtgattccagggtgcagccaaggctgagccacagctttarggtaaacccatgttcgattccacagattccttggttgctccttctacgtatgaaggccgaggtcggtgtttactaagcagcacaacctgagagaaattgc

SEQ ID NO: 271415 - DNA, 201 bp, Homo sapiens
gagcgtcttagaaatcacagtctcgggccccacgcaggccatttgaatccgcaccagcagtgactcatacgcacacttcttcaaagtttgaggagcactgstctttgccagttggtagatgtgcaatttaaaactgtcagcaaacacagctgctgtctgtagtgcacacagccatgaggcacggtcagccctggccctccc

SEQ ID NO: 271416 - DNA, 201 bp, Homo sapiens
acctgaagctggactacctggacctctaccttattcactggccgactggctttaaggtatgggatgcctggtgcagaccaggtcccttggggctcaggtgsaacctgtggtgtgttttgagctcccttagcagattacgtgtgggtgactttctgttcttgctgctcaaggtatagccagtggaccatcagcactggcatc

SEQ ID NO: 271417 - DNA, 201 bp, Homo sapiens
gagagcagctcaggggagtcctgatggcccaagagcctctgttctcactgagcaaagtggctctgccagggatgctctgtctttatccaagatctgtgccragcgcagcacagccatgggcctggggctcttgggcaggccccagcttaggtgagcagctgattttgcccaattccactgcccaaagactgtggccatagt

SEQ ID NO: 271418 - DNA, 201 bp, Homo sapiens
agaatctcgctcttgagcttcactgcctggacctgccctgcactggagctctgtcagctaccagctgcataaccctgggcaagtcgcttaactgctcgatscctcagcttccctatctataaaataatatccattttgagggttgttacgaagattaagtgatgcatcagagcacttcacatggtgcttaataccttagta

SEQ ID NO: 271419 - DNA, 201 bp, Homo sapiens
tagtgcctgcccccactactgcaagggtgactgccacgagggccagcgcttgttcattcatgtggaacctcatctgtacaaatgtaagagctcttagccgygcagggaatgttctttctcctgagtggtagtgtgcatttctagccagtggagggcctcatgtggtctcatgatatgcctgagacactgaagcgtgtggca

SEQ ID NO: 271420 - DNA, 201 bp, Homo sapiens
ttttgcagtggagactgagactctgtttctctctcactacccttattcttgtctgagctctgtgtttccacactctctcctttagtacttcctcttctaascaaaatgtgaacattccctaagatggggtgggctaccagctttccctttccagcgtctgtcccatctccctccccggagtttgcactgctggtggcttca

SEQ ID NO: 271421 - DNA, 201 bp, Homo sapiens
catgtaactcactttctgctttcaagaaggaacttctcattttgcagtggagactgagactctgtttctctctcactacccttattcttgtctgagctctktgtttccacactctctcctttagtacttcctcttctaagcaaaatgtgaacattccctaagatggggtgggctaccagctttccctttccagcgtctgtc

SEQ ID NO: 271422 - DNA, 201 bp, Homo sapiens
gctcaggggagtcctgatggcccaagagcctctgttctcactgagcaaagtggctctgccagggatgctctgtctttatccaagatctgtgccgagcgcascacagccatgggcctggggctcttgggcaggccccagcttaggtgagcagctgattttgcccaattccactgcccaaagactgtggccatagtgcctgcc

SEQ ID NO: 271423 - DNA, 201 bp, Homo sapiens
tgtaaaaccagacagtgtaggttggtttcactgctgtgcaggaccagagtcacaggcaattctgggcccagaatccatgcagctggagttgtgggattcakccacctatgggcttcacacagctactcagtcagcttctcaagtttctccaagccctggttgtgaatgcgaggcaatccaagggtgtgttcatggagggag

SEQ ID NO: 271424 - DNA, 201 bp, Homo sapiens
agcagctcctcagagaaaaatcaatcaaggcgccatcaagcctggagaaagttcagtgtgtcctgggcagtttcctgcctgggccccagttgttctttctkgggtagggatgtcctctgctctccctgctgtcatcagtggtggttgtgcccggacaccactcagggcctgtggtaaggcattctttctggaaattgagat

SEQ ID NO: 271425 - DNA, 201 bp, Homo sapiens
cccaaagccaagtccacactcaatacagctacacttttcactgatgggcgattcttcccggggaaacgtatcacccacggccatacagggctccagagctygcccatccttggctctctgttgaatggtcattccatctgggcccattgcttagagtcccgtgctgatgaggctgaggttgtggattggccctccctttcc

SEQ ID NO: 271426 - DNA, 201 bp, Homo sapiens
cattgctgtcttttacttttctagaaaaacctctcacaacttttttttcatgtcgtgccaacgcaagcttgattatcctagtctgtgctcttttggttccmaagaactgaaaaaccactttaatcttaagcaggaaaaaaaaaagtgtgtttggggtggggattgattgacttccccaaacaacagccgctgacattaggt

SEQ ID NO: 271427 - DNA, 201 bp, Homo sapiens
tgtggctggcaatgatgacatgtgccctctcgctggcttagctgtggtgcacgtaccatgagaagggcctggtgaaaggagcctgccagaagacactcagygacctgaagctggactacctggacctctaccttattcactggccgactggctttaaggtatgggatgcctggtgcagaccaggtcccttggggctcaggt

SEQ ID NO: 271428 - DNA, 201 bp, Homo sapiens
actaggaccgctgtcttgaaggaggtggtggaggactcaagggcagaggcttctcactgccatcacttggtgccatcagcccagagcatttcaagtcactrcccaacgtagagctttgcagagccagaagttctgggaggaatgggcatgcatggttttgcccatcaagggcacacagattagtggcaggatcgggttaga

SEQ ID NO: 271429 - DNA, 201 bp, Homo sapiens
agactctgcattctgcggggctcacgttctttctcctttcagtcccctccagggcaggtgactgaggccgtgaaggtggccattgacgtcgggtaccgccwcatcgactgtgcccatgtgtaccagaatgagaatgaggtgggggtggccattcaggagaagctcagggagcaggtggtgaagcgtgaggagctcttcatc

SEQ ID NO: 271430 - DNA, 201 bp, Homo sapiens
gtccattccattttgtgtcctctggtccttgtaagaggtctctgtgacctggtcatcctgcctgcctttggaaagttaggatccagtacgcagtggaaatsccctcacaaccattcacagcatcatggtaaagcaaatgggttttggggagaggagactgctctgtctttccagccaggaagctgccttgtggctggcaat

SEQ ID NO: 271431 - DNA, 201 bp, Homo sapiens
gtaccgccacatcgactgtgcccatgtgtaccagaatgagaatgaggtgggggtggccattcaggagaagctcagggagcaggtggtgaagcgtgaggagstcttcatcgtcagcaaggtatcgttccgcggtggggctggaaggggctctcggtcccatcatctgttggtgcatcagcccaaagccaagtccacactcaa

SEQ ID NO: 271432 - DNA, 201 bp, Homo sapiens
gatgtctggtgcccaccagtgtcttgttactgatagtgtttttaatctagttgaaaaattgttggaggtaaaagtcattgtaagtctcctatgtatgctcrcagaatactcctagggctgaaggtacaactatgtttctccatcttttgccatgatcactacctccctcccacctaggagccttgtgagacttttttttcc

SEQ ID NO: 271433 - DNA, 201 bp, Homo sapiens
tacttcctcttctaagcaaaatgtgaacattccctaagatggggtgggctaccagctttccctttccagcgtctgtcccatctccctccccggagtttgcrctgctggtggcttcagccaccgccccaggcagatgtttgcccagtctgcgtcctggacaataactctggccctgcttcaggcatatgcgtgcctggcaag

SEQ ID NO: 271434 - DNA, 201 bp, Homo sapiens
tttcccctcccacttgagacagagtggattgaagctttcagggctgaggaaacacagtggttttctcattgctccctttacagttaggctcctctgccctscagtattgtgctagaaacttctgttcgattatcctgttgcgtggcggtgagtgggaggaagaggctagccctgacatgctcaggtctcctagggagtttt

SEQ ID NO: 271435 - DNA, 201 bp, Homo sapiens
ctgtctttccagccaggaagctgccttgtggctggcaatgatgacatgtgccctctcgctggcttagctgtggtgcacgtaccatgagaagggcctggtgraaggagcctgccagaagacactcagcgacctgaagctggactacctggacctctaccttattcactggccgactggctttaaggtatgggatgcctggtg

SEQ ID NO: 271436 - DNA, 201 bp, Homo sapiens
ttcccctcccacttgagacagagtggattgaagctttcagggctgaggaaacacagtggttttctcattgctccctttacagttaggctcctctgccctcsagtattgtgctagaaacttctgttcgattatcctgttgcgtggcggtgagtgggaggaagaggctagccctgacatgctcaggtctcctagggagttttc

SEQ ID NO: 271437 - DNA, 201 bp, Homo sapiens
ctaccctgctggggaaagtacaacctgaatacccttttctgaccaaagagaagcaaaatctaccaggtcaaaatagtgccactaacggttgagttttgacygcttggaactggaatcctttcagcaagacttctctttgcctcaaataaaaagtgcttttgtgagcttggttttgtgagctttggttttttaaaacaatag

SEQ ID NO: 271438 - DNA, 201 bp, Homo sapiens
tgctgttgaaaattagtaaatataaggtaagaaaaaggtcatttgcatcagggagagtgtttcttggccagaatgatcagggtacgtgatttgtttcctcsaaaaactccagtggtgtctctaaggttgtaattgaattacaaccatgacaccaagctaatttccatctgttgcatgttatgctcttggaatggatgcaga

SEQ ID NO: 271439 - DNA, 201 bp, Homo sapiens
aagaagtaaaacgactttagagatagctgtatggtgaaaacgcccacttgtattcctgtggatgaggagatcaggttggtgtagaattgtacggtgggggyagcggggaatggtgggtcaaagtaatggtataaggatggacttggaatcaacttcctttttttttttaatgacttaaaacctttccctggggccgggcgc

SEQ ID NO: 271440 - DNA, 201 bp, Homo sapiens
tgagtgatcgtttcctgttccttgctccaggattatcagcacagcattctcatgcttcctactcaggaccgtttctttacccaaagtgaagtttcctttgscccctccccttatcctttgatttcagtagtaacacctgctaactagagaacatttcaaaaatgaagagttccctgttcccagagatccccgtggttaata

SEQ ID NO: 271441 - DNA, 201 bp, Homo sapiens
atcatctgaagctaagagcccttcggctctgggagtgtgtgtcagcctcttgtgggtctcacccagtggtgcctgcctgcctccctccctcccagcctccmtgccagctgagttctgtaccgtctgctgccttcatgcaggtggttctcttctcccagtatacctttcttgccctctctgtcaaaatcttatacttcttag

SEQ ID NO: 271442 - DNA, 201 bp, Homo sapiens
gtgatcataaccacagagcctgtagcagactctctttctgcacattctgtgatcatctgaagctaagagcccttcggctctgggagtgtgtgtcagcctcytgtgggtctcacccagtggtgcctgcctgcctccctccctcccagcctccatgccagctgagttctgtaccgtctgctgccttcatgcaggtggttctct

SEQ ID NO: 271443 - DNA, 201 bp, Homo sapiens
tgtgtaccagaatgagaatgaggtgggggtggccattcaggagaagctcagggagcaggtggtgaagcgtgaggagctcttcatcgtcagcaaggtatcgktccgcggtggggctggaaggggctctcggtcccatcatctgttggtgcatcagcccaaagccaagtccacactcaatacagctacacttttcactgatgg

SEQ ID NO: 271444 - DNA, 201 bp, Homo sapiens
gtaaagcaaatgggttttggggagaggagactgctctgtctttccagccaggaagctgccttgtggctggcaatgatgacatgtgccctctcgctggcttwgctgtggtgcacgtaccatgagaagggcctggtgaaaggagcctgccagaagacactcagcgacctgaagctggactacctggacctctaccttattcac

SEQ ID NO: 271445 - DNA, 201 bp, Homo sapiens
tgcataaccctgggcaagtcgcttaactgctcgatgcctcagcttccctatctataaaataatatccattttgagggttgttacgaagattaagtgatgcmtcagagcacttcacatggtgcttaataccttagtaagtgatcgagaaatgttgctgtgctgataagtccagggactgcaaaggaccctctgggccattta

SEQ ID NO: 271446 - DNA, 201 bp, Homo sapiens
tgtgcccggacaccactcagggcctgtggtaaggcattctttctggaaattgagattctctgttccttcaaccgtgcagagtggggaaggctgcaagagcmgcttctgaggtcctccagtcaaataagaggtcgccaggtcctctgagggtcgtcccctcttaacccacaccttcgatgagcatccccaccctgcctcgct

SEQ ID NO: 271447 - DNA, 201 bp, Homo sapiens
aggctctggtaacgggcttgttcaactgggcccctttcttccccaaagcctgttgaaaatagctgatgtcaaaacacagatgtctgcagctgctatggccytggggggtttttcttttcatttgtttctaccccagctctccaaaggaatgtgctctgttcattcaacagcccgctgcacatgtttattgctcagctctgt

SEQ ID NO: 271448 - DNA, 201 bp, Homo sapiens
ggctctggtaacgggcttgttcaactgggcccctttcttccccaaagcctgttgaaaatagctgatgtcaaaacacagatgtctgcagctgctatggccckggggggtttttcttttcatttgtttctaccccagctctccaaaggaatgtgctctgttcattcaacagcccgctgcacatgtttattgctcagctctgtg

SEQ ID NO: 271449 - DNA, 201 bp, Homo sapiens
atgtcaaataccatctcctcttcggctgtggttgttcagtttcccggctggaatccctttggaatacctctgcccttcctgtgctgttgagtgtcttatasagtgtgtgattagttatttgtattacagttgtagaaatacctctgccctttgtttgcttcataaaatagaggcaaagacacatcttacccataattatat

SEQ ID NO: 271450 - DNA, 201 bp, Homo sapiens
tggcctgaagtaactacatattttggctttccattcaatttttaaatcctagcagttcatctgaaactaggtgatcccaggtgaccctggatcaaactctkgaagaatttgcctgtgactttttgtcttaatgaccctaatgaaaggggtttggtcgggagcccctggggctgaggtttgagacagtcccggctctgacct

SEQ ID NO: 271451 - DNA, 201 bp, Homo sapiens
gtgtttccacactctctcctttagtacttcctcttctaagcaaaatgtgaacattccctaagatggggtgggctaccagctttccctttccagcgtctgtsccatctccctccccggagtttgcactgctggtggcttcagccaccgccccaggcagatgtttgcccagtctgcgtcctggacaataactctggccctgct

SEQ ID NO: 271452 - DNA, 201 bp, Homo sapiens; identical to SEQ ID NO: 53859

SEQ ID NO: 271453 - DNA, 201 bp, Homo sapiens
gacctgaagctggactacctggacctctaccttattcactggccgactggctttaaggtatgggatgcctggtgcagaccaggtcccttggggctcaggtscaacctgtggtgtgttttgagctcccttagcagattacgtgtgggtgactttctgttcttgctgctcaaggtatagccagtggaccatcagcactggcat

SEQ ID NO: 271454 - DNA, 201 bp, Homo sapiens
ggagcgtcttagaaatcacagtctcgggccccacgcaggccatttgaatccgcaccagcagtgactcatacgcacacttcttcaaagtttgaggagcactsctctttgccagttggtagatgtgcaatttaaaactgtcagcaaacacagctgctgtctgtagtgcacacagccatgaggcacggtcagccctggccctcc

SEQ ID NO: 271455 - DNA, 201 bp, Homo sapiens; identical to SEQ ID NO: 53877

SEQ ID NO: 271456 - DNA, 201 bp, Homo sapiens
tttctgctgccaaacctgattctgagtgatcgtttcctgttccttgctccaggattatcagcacagcattctcatgcttcctactcaggaccgtttctttrcccaaagtgaagtttcctttgccccctccccttatcctttgatttcagtagtaacacctgctaactagagaacatttcaaaaatgaagagttccctgttc

SEQ ID NO: 271457 - DNA, 201 bp, Homo sapiens; identical to SEQ ID NO: 53865

SEQ ID NO: 271458 - DNA, 201 bp, Homo sapiens
ctgaaactaggtgatcccaggtgaccctggatcaaactctggaagaatttgcctgtgactttttgtcttaatgaccctaatgaaaggggtttggtcgggascccctggggctgaggtttgagacagtcccggctctgacctggtaagccacatggctccaaaacaggccctccctctgagcagcaggcacctcagttcctc

SEQ ID NO: 271459 - DNA, 201 bp, Homo sapiens; identical to SEQ ID NO: 53867

SEQ ID NO: 271460 - DNA, 201 bp, Homo sapiens
cacatttttctgtgatcataaccacagagcctgtagcagactctctttctgcacattctgtgatcatctgaagctaagagcccttcggctctgggagtgtrtgtcagcctcttgtgggtctcacccagtggtgcctgcctgcctccctccctcccagcctccatgccagctgagttctgtaccgtctgctgccttcatgca

SEQ ID NO: 271461 - DNA, 201 bp, Homo sapiens
ctcaggggagtcctgatggcccaagagcctctgttctcactgagcaaagtggctctgccagggatgctctgtctttatccaagatctgtgccgagcgcagsacagccatgggcctggggctcttgggcaggccccagcttaggtgagcagctgattttgcccaattccactgcccaaagactgtggccatagtgcctgcca

SEQ ID NO: 271462 - DNA, 201 bp, Homo sapiens
ctccctctgtcctcagagcacttgccgttgcttctcttatcctttgagattcagtcacatacagacttttaacatccctttttttttttgaaatgggctcstactctgtcacccaggctggaatgtaatggcatgatcacagctcactgcagccttgacctcctgggctcaaatgatcctcccacctcagcctcccaagta

SEQ ID NO: 271463 - DNA, 201 bp, Homo sapiens
gctccctctgtcctcagagcacttgccgttgcttctcttatcctttgagattcagtcacatacagacttttaacatccctttttttttttgaaatgggctsctactctgtcacccaggctggaatgtaatggcatgatcacagctcactgcagccttgacctcctgggctcaaatgatcctcccacctcagcctcccaagt

SEQ ID NO: 271464 - DNA, 201 bp, Homo sapiens
atagtgcctgcccccactactgcaagggtgactgccacgagggccagcgcttgttcattcatgtggaacctcatctgtacaaatgtaagagctcttagccrtgcagggaatgttctttctcctgagtggtagtgtgcatttctagccagtggagggcctcatgtggtctcatgatatgcctgagacactgaagcgtgtggc

SEQ ID NO: 271465 - DNA, 201 bp, Homo sapiens
cacagtattttgtcttttatttttatttgcagagcttactggatttttttgtttgttttttaggtctttgactttgaactgagcagccaggatatgaccaycttactcagctacaacaggaactggagggtctgtgccttgttgaggtgagtgagccccagtgtgaggagcagttcccaggagatattcagatgctgcaca

SEQ ID NO: 271466 - DNA, 201 bp, Homo sapiens
cttagattaatagtgcctgcccccactactgcaagggtgactgccacgagggccagcgcttgttcattcatgtggaacctcatctgtacaaatgtaagagstcttagccgtgcagggaatgttctttctcctgagtggtagtgtgcatttctagccagtggagggcctcatgtggtctcatgatatgcctgagacactgaa

SEQ ID NO: 271467 - DNA, 201 bp, Homo sapiens
gggttttctcttttcctaccattacaataactaggtgacgcatgtaactcactttctgctttcaagaaggaacttctcattttgcagtggagactgagacyctgtttctctctcactacccttattcttgtctgagctctgtgtttccacactctctcctttagtacttcctcttctaagcaaaatgtgaacattccctaa

SEQ ID NO: 271468 - DNA, 201 bp, Homo sapiens
gggaggaagaggctagccctgacatgctcaggtctcctagggagttttcgctaactacacacacaccacccctctggcagataatgctttactgagcctgwcctgctgatgtcagtgtcactgtgggtatacaaaaaaggcagaccatggagaacttttgaataagagttacagactgtaagcacccagctcagattacat

SEQ ID NO: 271469 - DNA, 201 bp, Homo sapiens
gcgctcagtgtggcagctggagcagctcaggctacttggcgccacctccctccctgcctgcccttgcagcattggtggcgggggtgtgggggaggggggggcacgcccaaaggagagcagctcaggggagtcctgatggcccaagagcctctgttctcactgagcaaagtggctctgccagggatgctctgtctttatcca

SEQ ID NO: 271470 - DNA, 201 bp, Homo sapiens
tttagtagagacggggtttcaccgtgttagccaggatggtcttgatctcctgacctcgtgattcgcccgcctcagcctcccaaagtgctgggattacaggygtgagccaccgcgcccggcctgtttgctcttcttatctcattaaagccagcctggctttcgtctcactgtctcttagcttctgaaaggtctaattcactg

SEQ ID NO: 271471 - DNA, 201 bp, Homo sapiens
ccctgccctgtgctccctgccctgtttccaatataaaatcgccgaccgttgattgggctcacttcagcccccactgatacaaggaggctccctctgtcctmagagcacttgccgttgcttctcttatcctttgagattcagtcacatacagacttttaacatccctttttttttttgaaatgggctcctactctgtcaccc

SEQ ID NO: 271472 - DNA, 201 bp, Homo sapiens
acaggccctggtgagcttcccacaggctcatgctcctgtgtcacttggtgaagattagaaaagactaaaaagaacaattcagcctcaaggaagatgtttctgggggtgatctgcaaaacttcccctgagcctcttgctggttttcctggaagggttggagtttctagtagcaagacacctactctttttccaaagggttgg

SEQ ID NO: 271473 - DNA, 201 bp, Homo sapiens
gtagccacagtgctcccatcagctcttgtttttgcatttgcagattgagtgccacccatatctcactcaggagaagttaatccagtactgccagtccaaargcatcgtggtgaccgcctacagccccctcggctctcctgacaggccctggtgagcttcccacaggctcatgctcctgtgtcacttggtgaagattagaaa

SEQ ID NO: 271474 - DNA, 201 bp, Homo sapiens; identical to SEQ ID NO: 53857

SEQ ID NO: 271475 - DNA, 201 bp, Homo sapiens
ggtgcctgcctgcctccctccctcccagcctccatgccagctgagttctgtaccgtctgctgccttcatgcaggtggttctcttctcccagtatacctttsttgccctctctgtcaaaatcttatacttcttaggccatgtcaaataccatctcctcttcggctgtggttgttcagtttcccggctggaatccctttggaa

SEQ ID NO: 271476 - DNA, 201 bp, Homo sapiens
tgaaactaggtgatcccaggtgaccctggatcaaactctggaagaatttgcctgtgactttttgtcttaatgaccctaatgaaaggggtttggtcgggagsccctggggctgaggtttgagacagtcccggctctgacctggtaagccacatggctccaaaacaggccctccctctgagcagcaggcacctcagttcctcc

SEQ ID NO: 271477 - DNA, 201 bp, Homo sapiens
aggtgcccgccaccacgcccggctaatttttttgtatttttagtagagacggggtttcaccgtgttagccaggatggtcttgatctcctgacctcgtgatycgcccgcctcagcctcccaaagtgctgggattacaggtgtgagccaccgcgcccggcctgtttgctcttcttatctcattaaagccagcctggctttcgt

SEQ ID NO: 271478 - DNA, 201 bp, Homo sapiens
acgtgcacacaccaacccccatacacatgagtccctacccacgttctacatgcataccctgtcctgtggaggcccggtaactatttgcagtctagttgttkgcacaagaagaacttgagagttactttgtcttttgccttttttctagccactgcctcagttttctgctgtgagccaggttcaaagtgtgggtttagcttt

SEQ ID NO: 271479 - DNA, 201 bp, Homo sapiens
  misc_feature (1)...(201): n = A,T,C or G
aagaggtctctgtgacctggtcatcctgcctgcctttggaaagttaggatccagtacgcagtggaaatgccctcacaaccattcacagcatcatggtaaancaaatgggttttggggagaggagactgctctgtctttccagccaggaagctgccttgtggctggcaatgatgacatgtgccctctcgctggcttagctgt

SEQ ID NO: 271480 - DNA, 201 bp, Homo sapiens
atgtaactcactttctgctttcaagaaggaacttctcattttgcagtggagactgagactctgtttctctctcactacccttattcttgtctgagctctgkgtttccacactctctcctttagtacttcctcttctaagcaaaatgtgaacattccctaagatggggtgggctaccagctttccctttccagcgtctgtcc

SEQ ID NO: 271481 - DNA, 201 bp, Homo sapiens
agactgtaagcacccagctcagattacataactctggccttgcgtgagctgcccagctatctgtccagtgttcctgcctttatgttcctagcacagccatkggccctactagatggacagtgagtgagccttgacaaacacgtctgcacctgtgctccctgccatgtgctccctgccctgtgctccctgccctgtttccaa

SEQ ID NO: 271482 - DNA, 201 bp, Homo sapiens
catatattatctagcccaacatgcacatttcctgaatactaatatatcagcttttcctaagttcagtttatcttatcgctcctctctgctcaaagccatgsaagacatctgggtcctgcacagtattttgtcttttatttttatttgcagagcttactggatttttttgtttgttttttaggtctttgactttgaactgag

SEQ ID NO: 271483 - DNA, 201 bp, Homo sapiens
ccatatattatctagcccaacatgcacatttcctgaatactaatatatcagcttttcctaagttcagtttatcttatcgctcctctctgctcaaagccatsgaagacatctgggtcctgcacagtattttgtcttttatttttatttgcagagcttactggatttttttgtttgttttttaggtctttgactttgaactga

SEQ ID NO: 271484 - DNA, 201 bp, Homo sapiens
tgtttgtttgttttttattgtaatgacagcctgggaaggaatttttcccattggatgagtcgggcaatgtggttcccagtgacaccaacattctggacacrtgggcggtaagacagcccctggttggaccttgttttcgtgactggttccctcttcttcttagaagcaatctgcctgccatttctcacattgcattttgtt

SEQ ID NO: 271485 - DNA, 201 bp, Homo sapiens
gcacttcacatggtgcttaataccttagtaagtgatcgagaaatgttgctgtgctgataagtccagggactgcaaaggaccctctgggccatttagtccaytcaccagctctgcaaggagttcgtgtgatgatgggcagagcctagacctgtgtcaggactctggcgaagcgctcagtgtggcagctggagcagctcaggc

SEQ ID NO: 271486 - DNA, 201 bp, Homo sapiens
gttacagcttatctgggaaatagggtgtttgttatacatagttttctgtatggggtagggagggactttagcataggaagcttcatctgtgtcccatcagygtgtagccacagtgctcccatcagctcttgtttttgcatttgcagattgagtgccacccatatctcactcaggagaagttaatccagtactgccagtcca

SEQ ID NO: 271487 - DNA, 201 bp, Homo sapiens
ctgttccttgctccaggattatcagcacagcattctcatgcttcctactcaggaccgtttctttacccaaagtgaagtttcctttgccccctccccttatsctttgatttcagtagtaacacctgctaactagagaacatttcaaaaatgaagagttccctgttcccagagatccccgtggttaatattgcaaaatatcca

SEQ ID NO: 271488 - DNA, 201 bp, Homo sapiens
tgcttcaggcatatgcgtgcctggcaagcctgctgctgccacactgtggcctcacactcaaaataggccgcaaacagagcatgtcacaggcagccccaggscagtgccctttcagacatctctgttaatgctacttagccctagacattaaaatcatttttggatctagtggacaaggaggagaggagtgaatcagtcacc

SEQ ID NO: 271489 - DNA, 201 bp, Homo sapiens
caaggaatgatcagcagcttcttcgtgacctcttgcagtcattgctgtcttttacttttctagaaaaacctctcacaacttttttttcatgtcgtgccaasgcaagcttgattatcctagtctgtgctcttttggttccaaagaactgaaaaaccactttaatcttaagcaggaaaaaaaaaagtgtgtttggggtgggga

SEQ ID NO: 271490 - DNA, 201 bp, Homo sapiens
aagtgatcctctcgcttcagcctgggattacaggcgtgagccactgtgtctggcctgccttctcatattattacacaagatgtttaagaccacaaaatacwgtctggtcctgccagctagactgagttactggaaggcagaaatcgtgttgccgtcctgcacggcccaggcacagtgctgggcacatggggagggtggtgt

SEQ ID NO: 271491 - DNA, 201 bp, Homo sapiens
gttgggggatacgtgtccatgcagcctacctgggtgccagtgaagcgcgatgccatgtaggcacttcctcctcctcttcagtagccaggctccccacagcygttctggttactcagatggtcaggtggcttggccatggacacccattcagtcattttgccaggtcagccactaaccatttggtgatcttccatgatccac

SEQ ID NO: 271492 - DNA, 201 bp, Homo sapiens
acagtggccactgagggaaaggcatatcccaccagagatgcatcgtttgtttcgtatttcattttttaaggaattaggaaagaaaaaataaatgactaatstcaaaatgctaacctaattattttatttttgcatcttactgtatagcttttgcacatttttctgtgatcataaccacagagcctgtagcagactctcttt

SEQ ID NO: 271493 - DNA, 201 bp, Homo sapiens
agagcccttcggctctgggagtgtgtgtcagcctcttgtgggtctcacccagtggtgcctgcctgcctccctccctcccagcctccatgccagctgagttstgtaccgtctgctgccttcatgcaggtggttctcttctcccagtatacctttcttgccctctctgtcaaaatcttatacttcttaggccatgtcaaatac

SEQ ID NO: 271494 - DNA, 201 bp, Homo sapiens
cgccctggaggctgatctgattgggctgtgatcaggacagcaggagtgtacaggctctccaggtgattccagggtgcagccaaggctgagccacagctttwgggtaaacccatgttcgattccacagattccttggttgctccttctacgtatgaaggccgaggtcggtgtttactaagcagcacaacctgagagaaattg

SEQ ID NO: 271495 - DNA, 201 bp, Homo sapiens
tgattctgagtgatcgtttcctgttccttgctccaggattatcagcacagcattctcatgcttcctactcaggaccgtttctttacccaaagtgaagtttsctttgccccctccccttatcctttgatttcagtagtaacacctgctaactagagaacatttcaaaaatgaagagttccctgttcccagagatccccgtgg

SEQ ID NO: 271496 - DNA, 201 bp, Homo sapiens
tgtgctgttgagtgtcttatacagtgtgtgattagttatttgtattacagttgtagaaatacctctgccctttgtttgcttcataaaatagaggcaaagasacatcttacccataattatattcctcactgcaacttatcacaatagaagtgctcagtagtgttttttgaaatgaaataaaatgtatcatttccctgggag

SEQ ID NO: 271497 - DNA, 201 bp, Homo sapiens
gcccagagcatttcaagtcactgcccaacgtagagctttgcagagccagaagttctgggaggaatgggcatgcatggttttgcccatcaagggcacacagmttagtggcaggatcgggttagaaacatgtaggatttgtatgattgagctgtaattggagtgtttcatatactgcatttctacagctctcatcagtaatgg

SEQ ID NO: 271498 - DNA, 201 bp, Homo sapiens
ccattctcctgcctcagcctcctgagtagctgggactacaggtgcccgccaccacgcccggctaatttttttgtatttttagtagagacggggtttcaccrtgttagccaggatggtcttgatctcctgacctcgtgattcgcccgcctcagcctcccaaagtgctgggattacaggtgtgagccaccgcgcccggcctgt

SEQ ID NO: 271499 - DNA, 201 bp, Homo sapiens
tcagtagccaggctccccacagctgttctggttactcagatggtcaggtggcttggccatggacacccattcagtcattttgccaggtcagccactaaccrtttggtgatcttccatgatccacattccccctcgtttccctttaacttatttctctctgctgatacctctgaggggccatctcccgtgtctccacccctt

SEQ ID NO: 271500 - DNA, 201 bp, Homo sapiens
ggcacatatccaaggaatgatcagcagcttcttcgtgacctcttgcagtcattgctgtcttttacttttctagaaaaacctctcacaacttttttttcatktcgtgccaacgcaagcttgattatcctagtctgtgctcttttggttccaaagaactgaaaaaccactttaatcttaagcaggaaaaaaaaaagtgtgttt

SEQ ID NO: 271501 - DNA, 201 bp, Homo sapiens
tgttgcccaggctggagtgcagtggcacaatctcggctcactgcaagctccacctcctgggttcacgccattctcctgcctcagcctcctgagtagctggsactacaggtgcccgccaccacgcccggctaatttttttgtatttttagtagagacggggtttcaccgtgttagccaggatggtcttgatctcctgacctc

SEQ ID NO: 271502 - DNA, 201 bp, Homo sapiens
ccttgggccctgtgagtcctggtcttgagtccttcctgtatccacacattgcagtcagtggcggggctagtctctgtgaccaagtagtgtccatgtctccrtctgacagtctcagctccagcccgtttgataaagaagtgttggctatctgcctatttccttttcatagtggcacacagattatccctagccagctgtggt

SEQ ID NO: 271503 - DNA, 201 bp, Homo sapiens
tacgcgccgcggccaaggccgcaccgtactgggcgggggtctggggagcgcagcagccatggcaagccgtctcctgctcaacaacggcgccaagatgcccwtcctggggttgggtacctggaaggtaggtgctcgtgggggcgcgggcccggggctcgcctcacactctccgcgcggcctgtattggcgagggaccccgag

SEQ ID NO: 271504 - DNA, 201 bp, Homo sapiens
ctgtgctgataagtccagggactgcaaaggaccctctgggccatttagtccactcaccagctctgcaaggagttcgtgtgatgatgggcagagcctagacstgtgtcaggactctggcgaagcgctcagtgtggcagctggagcagctcaggctacttggcgccacctccctccctgcctgcccttgcagcattggtggcg

SEQ ID NO: 271505 - DNA, 201 bp, Homo sapiens
acccccagcgcaaccaatcagaaggctccttcgcgcagcggcgcgccaaccgcaggcgccctttctgccgacctcacgggctatttaaaggtacgcgccgsggccaaggccgcaccgtactgggcgggggtctggggagcgcagcagccatggcaagccgtctcctgctcaacaacggcgccaagatgcccatcctggggt

SEQ ID NO: 271506 - DNA, 201 bp, Homo sapiens
  misc_feature (1)...(201): n = A,T,C or G
gctggaaggggctctcggtcccatcatctgttggtgcatcagcccaaagccaagtccacactcaatacagctacacttttcactgatgggcgattcttccnggggaaacgtatcacccacggccatacagggctccagagctcgcccatccttggctctctgttgaatggtcattccatctgggcccattgcttagagtcc

SEQ ID NO: 271507 - DNA, 201 bp, Homo sapiens
ctgaggttctattttatttcttcagtgagacacatcatttctctgttgggagttgggtatagtcaaaatcacctcttcaaaaagcaactgttttctccttyctcctgacagctgtacctcccacaaggattaccccttccatgaagagttttgaagctgtggttgcctgctcgtccccaagtgacctatacctgtgtttct

SEQ ID NO: 271508 - DNA, 201 bp, Homo sapiens
cacttccatcccccgcgtctgaggctgatagtccagaatgctgctgaggaagtgcacgtggtctgtctttgctgaacaaagtggcaggctggtcagcaggkatcggtggctgccactgcccctcctccttgctgtgcagactctgcattctgcggggctcacgttctttctcctttcagtcccctccagggcaggtgactg

SEQ ID NO: 271509 - DNA, 201 bp, Homo sapiens
ggcctttgaataaacatcagtgatgtgcttaacttcatgataatctcccagaaccgcttgaaaacaagcgactgccggtatcagaagccatgcatgaaaaragagcgtaaggggcaggcattcactggctgaactggggagccacatgggaattggggtccataggacatctatttttgaaatattttgagatatttgaag

SEQ ID NO: 271510 - DNA, 201 bp, Homo sapiens
ctttctggaaattgagattctctgttccttcaaccgtgcagagtggggaaggctgcaagagcagcttctgaggtcctccagtcaaataagaggtcgccagrtcctctgagggtcgtcccctcttaacccacaccttcgatgagcatccccaccctgcctcgctgctccctctgaggtggagagtgagctccatgctaacag

SEQ ID NO: 271511 - DNA, 201 bp, Homo sapiens
tgcccggacaccactcagggcctgtggtaaggcattctttctggaaattgagattctctgttccttcaaccgtgcagagtggggaaggctgcaagagcagsttctgaggtcctccagtcaaataagaggtcgccaggtcctctgagggtcgtcccctcttaacccacaccttcgatgagcatccccaccctgcctcgctgc

SEQ ID NO: 271512 - DNA, 201 bp, Homo sapiens
gtgcccggacaccactcagggcctgtggtaaggcattctttctggaaattgagattctctgttccttcaaccgtgcagagtggggaaggctgcaagagcavcttctgaggtcctccagtcaaataagaggtcgccaggtcctctgagggtcgtcccctcttaacccacaccttcgatgagcatccccaccctgcctcgctg

SEQ ID NO: 271513 - DNA, 201 bp, Homo sapiens
aaaaattacttaacagtacttaacctatgtaggctgcatttcaatatttttttctattccatttttccaaaaattattgtcatacctccagaagctagttytgtgacccatcatttgaaaatcactactctagggtaaataaggagtaaaagtttatttttttttttttgagacaggggctcagtgtcacccaggctggag

SEQ ID NO: 271514 - DNA, 201 bp, Homo sapiens
aacggcgccaagatgcccatcctggggttgggtacctggaaggtaggtgctcgtgggggcgcgggcccggggctcgcctcacactctccgcgcggcctgtrttggcgagggaccccgagtgaccctgagcagctcgccccgcggacgcccggcgtgctgggagccacgcgcgggcttgcagggtccccagcgggctggggt

SEQ ID NO: 271515 - DNA, 201 bp, Homo sapiens
tttaaggtaagatcttggctggtcaggcctggccctcctccatggagtgggggatgggggaggcctctcatcctgtctctggagtgtcatctgtgggatcmccaccatcctctcttctgaggccagggagctgtggcgagcaagccaagactgagactgacacctcaccagtggagccgtgtgcaggggcaggccttgggc

SEQ ID NO: 271516 - DNA, 201 bp, Homo sapiens
tcatattattacacaagatgtttaagaccacaaaatactgtctggtcctgccagctagactgagttactggaaggcagaaatcgtgttgccgtcctgcacrgcccaggcacagtgctgggcacatggggagggtggtgtccctcacacatgtgctgcttgatgacagtagtggtagaggggtctggagggtgagttgcttc

SEQ ID NO: 271517 - DNA, 201 bp, Homo sapiens
agtggccactgagggaaaggcatatcccaccagagatgcatcgtttgtttcgtatttcattttttaaggaattaggaaagaaaaaataaatgactaatctsaaaatgctaacctaattattttatttttgcatcttactgtatagcttttgcacatttttctgtgatcataaccacagagcctgtagcagactctctttct

SEQ ID NO: 271518 - DNA, 201 bp, Homo sapiens
tgggcttggtggaatgaagatggagccccagtgctggagaagtgcaatggctacggcccccagagcaaggcacagtccagaaatggctctaatctcaagayggcgccatgctgcagcagcttggctcactaagggaagggtgtgtacacaccctgtgctcctaatccggagtgatacagctatatggattcccagaagctc

SEQ ID NO: 271519 - DNA, 201 bp, Homo sapiens
aaggaatgatcagcagcttcttcgtgacctcttgcagtcattgctgtcttttacttttctagaaaaacctctcacaacttttttttcatgtcgtgccaacscaagcttgattatcctagtctgtgctcttttggttccaaagaactgaaaaaccactttaatcttaagcaggaaaaaaaaaagtgtgtttggggtggggat

SEQ ID NO: 271520 - DNA, 201 bp, Homo sapiens
cttctgttgctcaccatacccattcacttctgttttctggcatacaggaggatgacacttccccatcccattgaagataggcctggctgggctctaccacmagatctggttaaaggattataggtagaagtgatgtgtgccacttccaggactgagcaattgattgctcatttgagactcttaggttctcttttgccttcc

SEQ ID NO: 271521 - DNA, 201 bp, Homo sapiens
agtttttccaagttggtttcttcacttataaagtaggatgataatactaatcgcagctaacatccattgaaccttagcttagaatgtgccagggtcctgcrcccttttccggtggtattatctcatttaatactcagaacaatccccaagctgtcaattctgctgttgtttcctacttcatgatgttgtgagagtggattg

SEQ ID NO: 271522 - DNA, 201 bp, Homo sapiens
  misc_feature (1)...(201): n = A,T,C or G
accttctcaaccagagttgttgttttgatggaactcagtttctctgtttttgttttttgttctttcctgcagatcctctcatttggaagactatcccttcnatgcagaatattgaggttgaatctcctggtgagattatacaggagattctctttcttcgctgaagtgtgactacctccactcatgtcccattttagccaa

SEQ ID NO: 271523 - DNA, 201 bp, Homo sapiens
aagagagcacaaatatgatagagtccaccagggaagaataccttctcaaccagagttgttgttttgatggaactcagtttctctgtttttgttttttgttytttcctgcagatcctctcatttggaagactatcccttcaatgcagaatattgaggttgaatctcctggtgagattatacaggagattctctttcttcgct

SEQ ID NO: 271524 - DNA, 201 bp, Homo sapiens
taaaggaggtggtgctaactttacttaaaatcttagataagtggtgaaaaaaagctttcactctggctgggcaggcattctaaatcatctctttacaagcwatactttctgaataatgtatctaattaaatgtatcaaaaagagttgtctggcatttattactgccagatctgtaattcaatgaggatttgaatctctttc

SEQ ID NO: 271525 - DNA, 201 bp, Homo sapiens
ttggcaacagtgcaagactgtctcaaaaacagcaacagagagcaggacgtgagacttctacctgctcactcagaatcatttctgcaccaaccatggccacrtttgtggagctcagtaccaaagccaagatgcccattgtgggcctgggcacttggaaggtaaatatgcaaatctttgcacacccttcttctctggaggggc

SEQ ID NO: 271526 - DNA, 201 bp, Homo sapiens
ttgatggctccatagaagggaactctagcactttaattggactataagaatcccagaaaaagggagcacattgtatacatttacatcctgacaacttctgrgcaggatctggaacatgtaatagatggctactaaatacatattgcactggaggctgctgctaacatgtatggtatctttgggcaagtttggaaaatgccc

SEQ ID NO: 271527 - DNA, 201 bp, Homo sapiens
tcagaatcatttctgcaccaaccatggccacgtttgtggagctcagtaccaaagccaagatgcccattgtgggcctgggcacttggaaggtaaatatgcaratctttgcacacccttcttctctggaggggcgtttgggtgttttctctttctgcattcagccaggaaagcctggaggtcgggcaggggttggagaggtaa

SEQ ID NO: 271528 - DNA, 201 bp, Homo sapiens
tgtgagagatcaagttttaagtgcttttttgcccccatcattggcttggctaggttagaacaaaatgtgataattctatttcccttcttttctttttttcwttcttttcttttctttccttcccttctttctctccctctctgtcattcccctccctctctctttctttttacaggagtggaaaacaaactctattcctat

SEQ ID NO: 271529 - DNA, 201 bp, Homo sapiens
gccagtattttttaaagctccctggtgattccaaattgcagccaaagttgagaagggctggataaagtgttccctgaacatgtcgtgcttatccctgcctytgagctttgctcctgccttcctgtgtcatatgctcatgttttttccctcttttctgtctttttttttttttttttttttttcttttgaggcccagcttat

SEQ ID NO: 271530 - DNA, 201 bp, Homo sapiens
tggatgtttatgtagacccacaaccagttcagtagaaacctcactgaccacattgaagcagagaggaggaaaaatgtataaagaagtcaagttctaatacwggaaaactaacctgacctatgtgcacaaaaacttttaaattatctaattgccccatctgaaattttgggaaacctaatgatttcacagcttctaaattct

SEQ ID NO: 271531 - DNA, 201 bp, Homo sapiens; identical to SEQ ID NO: 53884

SEQ ID NO: 271532 - DNA, 201 bp, Homo sapiens
tgtagtcccagccacttgggaggctgaggtggagattgagtgttgagcctgaggggtcaaggctgcaatgagcagtgattgtgccactgcactccagtctsggcaacagagtgagatccaagaaagcaagaaagagagaaagagagagagagaaagaaagagagacagagagaaacaaaatgcagagtctcaggctccaac

SEQ ID NO: 271533 - DNA, 201 bp, Homo sapiens
ggaattgaatgaaagaattatgaagggagctgtcttcaacacgtggggatgatagactaaaggattatgaacttagcagtggaggtgaagaagggtgtagygtagcggttgggggcacagggctgcttctgggtgcctggcagcagctcgtttcttgtccaggtggtagggtagctgtgcatctctgttttgtgtactgtt

SEQ ID NO: 271534 - DNA, 201 bp, Homo sapiens
gagagcctacagctgaggaagagactgagacaggtaaacaaatttcaaatctgtggccacatttacttcaatgatctgagacacgtatagagtactaggasagttgaaaaagtcaattgcttttaacacttaagacatgtcattgaggtgctgagccctggtgatgttccacactgtgtcgtggatcttaatcagctttgt

SEQ ID NO: 271535 - DNA, 201 bp, Homo sapiens
tttgttatctcacaattgaagaggtttaaaagaccattttgtgagagatcaagttttaagtgcttttttgcccccatcattggcttggctaggttagaacmaaatgtgataattctatttcccttcttttctttttttctttcttttcttttctttccttcccttctttctctccctctctgtcattcccctccctctctc

SEQ ID NO: 271536 - DNA, 201 bp, Homo sapiens
gaaactggagggcctgtaacgtgttgcagtaagtggcatggagttaactagaagcattgccaggagtttttctaaactaatagagggttagttggaaggaytggaaggctgctgggactacttgtgtcttcaaatactattttggggcaattttgaaagttaaaattggggtacctgggaatcactgtgagggacacatct

SEQ ID NO: 271537 - DNA, 201 bp, Homo sapiens
agcatctttctgcccctagggccaagccagaagacccttccctgctggaggatcccaagattaaggagattgctgcaaagcacaaaaaaaccgcagcccargtgccatatttttatttttcttgttatccaacaactcattcttccagtctcgtgtttcatatcctgtgttgtcctcaacaaactccttaaaggggaagaa

SEQ ID NO: 271538 - DNA, 201 bp, Homo sapiens
caaaggcctcatgaggctggtgctatttttttttccattttgcatacaaggtttacagagattgaatcacctgcttagacccacacacccagtaagtgatygaatccagattgatggtgtaatgaccattatccagatccttatcaccatttggggaaattgtctgaaaatcccttggggttatttagagtcaagctttca

SEQ ID NO: 271539 - DNA, 201 bp, Homo sapiens
caatgctatgccctgagtctcatctcaggggtcagtgatcaggacactttggggaggtgtgaggctgatctcacgggtgatttagcaagtatctcagtggrcaggtgtttggcctttgcttggtggactttttttgtgtgtagaactccctaggaacaatgcaaaacagagccggctttccccgtgatgaggattgtttgc

SEQ ID NO: 271540 - DNA, 201 bp, Homo sapiens
atcagcatctttctgcccctagggccaagccagaagacccttccctgctggaggatcccaagattaaggagattgctgcaaagcacaaaaaaaccgcagcycaggtgccatatttttatttttcttgttatccaacaactcattcttccagtctcgtgtttcatatcctgtgttgtcctcaacaaactccttaaaggggaa

SEQ ID NO: 271541 - DNA, 201 bp, Homo sapiens
gggtgaaccaggctttgcaaaatgctgaggcttcagagcccggggaaaggacccaagcttccaggtcctcctgcctgtctcccagatggagaggctctgaygatcagtcttgagaccctcattggagtggtgtccttctgtacatggtagccatggtgattattcacatcagcatctttctgcccctagggccaagccaga

SEQ ID NO: 271542 - DNA, 201 bp, Homo sapiens
ttcagttatccatgagattcgcatggatatgaatgaggccatgtgcctgatgctttctaatttcatcattgtgattttctagctcttctaatatcttcctyatcacctttggcttttgggtacatctgatactatttatatttcaaggctaatagtcttcaaataagactggaaatacaatgtaccccactttggggaata

SEQ ID NO: 271543 - DNA, 201 bp, Homo sapiens
caaaggagaccccagtgaggccttggtttggagaaactgggccttgtggggcagcctgttgaaggtggcctggggataagagaatatgatggttgctgagwgtggtgtaattccagctactcgggaggtgggagggttgcttgaacctgggagtgtgaggccagcctgggcaacacggcagggccccatctcttaaaaaaa

SEQ ID NO: 271544 - DNA, 201 bp, Homo sapiens
atccagatccttatcaccatttggggaaattgtctgaaaatcccttggggttatttagagtcaagctttcatctgggtcttcagaaagttgtagtggagcsgtctgcacccccacacacctgaagacatttcaggactaacctggatgaaaagggaactgacttttagctaggataggacataaggacataatcataaaat

SEQ ID NO: 271545 - DNA, 201 bp, Homo sapiens
cttcccttctttctctccctctctgtcattcccctccctctctctttctttttacaggagtggaaaacaaactctattcctataaggttttctatttctcytttttttctgaaacgatcattgtataatgatggcctctactgaaccttactgtgtgtcaggtaatgtgcaaaaagcttaatattcattgcagcatctcat

SEQ ID NO: 271546 - DNA, 201 bp, Homo sapiens
tttagagtcaagctttcatctgggtcttcagaaagttgtagtggagcggtctgcacccccacacacctgaagacatttcaggactaacctggatgaaaagrgaactgacttttagctaggataggacataaggacataatcataaaataattcactttccttcttttcttttgaaaagttttgtaaagtgtgtatcctccc

SEQ ID NO: 271547 - DNA, 201 bp, Homo sapiens
tgggctgggagtcgtgagcaccacccggctgtgttaacgacagctggcaaaatgtggtaaggcacatccaggactcagtgaggcaggttcccgagcctctsttaggctaagtttcaagttgttccatcaccacctccctctgccttctttgccatttccatccatgatagcactaccctaactagtgatgagaagcagtct

SEQ ID NO: 271548 - DNA, 201 bp, Homo sapiens
gaagtccttggcacccctttgcagatcacggtgtgagacttgggctagcagcatccctatgacctggaaacttgctagaaatgcaaactggccaggtgtgktggcttatccctgtaatcccagcactttgggaaatccagacgggagggttgcttgagcccaggagttggagaccagcctgggcaacatggcaagaatcca

SEQ ID NO: 271549 - DNA, 201 bp, Homo sapiens
acctgggagtgtgaggccagcctgggcaacacggcagggccccatctcttaaaaaaaacacatatgtgatgagcttttcttttgcctttcagtctcctctyggcaaagtgaaagaagcagtgaaggtggccattgatgcaggatatcggcacattgactgtgcctatgtctatcagaatgaacatgaagtgggggaagcca

SEQ ID NO: 271550 - DNA, 201 bp, Homo sapiens
gaagagactgagacaggtaaacaaatttcaaatctgtggccacatttacttcaatgatctgagacacgtatagagtactaggacagttgaaaaagtcaatkgcttttaacacttaagacatgtcattgaggtgctgagccctggtgatgttccacactgtgtcgtggatcttaatcagctttgttacaaatggcttgtggt

SEQ ID NO: 271551 - DNA, 201 bp, Homo sapiens
cgaagtccttggcacccctttgcagatcacggtgtgagacttgggctagcagcatccctatgacctggaaacttgctagaaatgcaaactggccaggtgtsgtggcttatccctgtaatcccagcactttgggaaatccagacgggagggttgcttgagcccaggagttggagaccagcctgggcaacatggcaagaatcc

SEQ ID NO: 271552 - DNA, 201 bp, Homo sapiens
tattcactggccacagggattcaaggtttaagacactctctttctcagcctctagtttctgagcaggtgccagaaaatagtagctgcaccagggctgtggrgtggtgtggactggggcaggaggccttgcatttcataattgggaatggcaggtggtcaggaagagaccttggagaagaaacacactggcctggaagggag

SEQ ID NO: 271553 - DNA, 201 bp, Homo sapiens
tggccggcagtctccagccacagctagaatggccttactgatgatgtattggaactcctacctttccaggtctttgactttaaattgagtgatgaggagayggcaaccatactcagcttcaacagaaactggagggcctgtaacgtgttgcagtaagtggcatggagttaactagaagcattgccaggagtttttctaaac

SEQ ID NO: 271554 - DNA, 201 bp, Homo sapiens
caggacccacaagtgaggcttctccgtatgctgcagcctcttcctgactaacacagcttgcccaggtttgggtgtgcaatgcacacacacaacagcagctccctgctatcatttggattcattaaaaattaaatcatctcataagcttacaaatgttgatttttatttactttttatttttttgcattacaaaactttcat

SEQ ID NO: 271555 - DNA, 201 bp, Homo sapiens
ccagtcactgatgggcacccaggccctggactaaaatttcctgtgaatgcttcggctaaccctgttacggtggatcctttagcaatttctgccccagggargactaaggcaagccagggtccctgtagtccctctagagctgcccataaggtattcctttctatgataggccatggaggagctggtggatgaggggctggt

SEQ ID NO: 271556 - DNA, 201 bp, Homo sapiens
gaacaaacctggactgaaatataaaccagtgactaaccaggtaaattctattcagtttaagggtaagggtcctgccctattacttcttaaacattgcgggrggaatgttcaatgctatgccctgagtctcatctcaggggtcagtgatcaggacactttggggaggtgtgaggctgatctcacgggtgatttagcaagtat

SEQ ID NO: 271557 - DNA, 201 bp, Homo sapiens; identical to SEQ ID NO: 53888

SEQ ID NO: 271558 - DNA, 201 bp, Homo sapiens
tgactaaccaggtaaattctattcagtttaagggtaagggtcctgccctattacttcttaaacattgcgggaggaatgttcaatgctatgccctgagtctyatctcaggggtcagtgatcaggacactttggggaggtgtgaggctgatctcacgggtgatttagcaagtatctcagtgggcaggtgtttggcctttgctt

SEQ ID NO: 271559 - DNA, 201 bp, Homo sapiens
cttcttaaacattgcgggaggaatgttcaatgctatgccctgagtctcatctcaggggtcagtgatcaggacactttggggaggtgtgaggctgatctcaygggtgatttagcaagtatctcagtgggcaggtgtttggcctttgcttggtggactttttttgtgtgtagaactccctaggaacaatgcaaaacagagccg

SEQ ID NO: 271560 - DNA, 201 bp, Homo sapiens
attccatttcaagattcaaccaaagccaactcatcaacaagaacatgtaaaagacagaaaaacccactaccggcaggctgaaacagatgctgtgacgtggmcctggcctgtcatggcgtgtcacagcatggcacaggcctatatcatgttccctagattgctgactaccaactagttacagctgactccaatcaggtcggg

SEQ ID NO: 271561 - DNA, 201 bp, Homo sapiens
aaattatcacttggggccttataggcttgataagggacctatcagataggtcagataaaggaccatctgctcccaaaggcctaagaatgcttgacatttaraagctacacacaattcctgctctcagagagcctacagctgaggaagagactgagacaggtaaacaaatttcaaatctgtggccacatttacttcaatgat

SEQ ID NO: 271562 - DNA, 201 bp, Homo sapiens
ggaggaatgttcaatgctatgccctgagtctcatctcaggggtcagtgatcaggacactttggggaggtgtgaggctgatctcacgggtgatttagcaagwatctcagtgggcaggtgtttggcctttgcttggtggactttttttgtgtgtagaactccctaggaacaatgcaaaacagagccggctttccccgtgatga

SEQ ID NO: 271563 - DNA, 201 bp, Homo sapiens
tcaatgctatgccctgagtctcatctcaggggtcagtgatcaggacactttggggaggtgtgaggctgatctcacgggtgatttagcaagtatctcagtgsgcaggtgtttggcctttgcttggtggactttttttgtgtgtagaactccctaggaacaatgcaaaacagagccggctttccccgtgatgaggattgtttg

SEQ ID NO: 271564 - DNA, 201 bp, Homo sapiens
ggcaccctgtaagtctactctctgagcgtccccacactggcttcctcccgttcttccaatgtatcttagtcgcttccaccccttggctcacactgttctgyccagaaacttctctgcactcccacaattcttggaattgttctttttcctccctgtttcagatatattagttgctgcttcctctgtttcttagagaaatgg

SEQ ID NO: 271565 - DNA, 201 bp, Homo sapiens
tgctatgccctgagtctcatctcaggggtcagtgatcaggacactttggggaggtgtgaggctgatctcacgggtgatttagcaagtatctcagtgggcasgtgtttggcctttgcttggtggactttttttgtgtgtagaactccctaggaacaatgcaaaacagagccggctttccccgtgatgaggattgtttgctgt

SEQ ID NO: 271566 - DNA, 201 bp, Homo sapiens
gctatgccctgagtctcatctcaggggtcagtgatcaggacactttggggaggtgtgaggctgatctcacgggtgatttagcaagtatctcagtgggcagktgtttggcctttgcttggtggactttttttgtgtgtagaactccctaggaacaatgcaaaacagagccggctttccccgtgatgaggattgtttgctgtt

SEQ ID NO: 271567 - DNA, 201 bp, Homo sapiens
ataaatacaaataaagaggcagccagtcattccaccggaatagaagaatacaatgtataggaagtagccaaaaaacaaaacaaaacaagaattggatctgrattttatcaagcctctaggtcttattagtgttgccaagatatttgggggatagagtgacatgataaatacatttctgggaatgcaataatcagcagaatc

SEQ ID NO: 271568 - DNA, 201 bp, Homo sapiens
tttgtgtgtagaactccctaggaacaatgcaaaacagagccggctttccccgtgatgaggattgtttgctgttgcaggttgagtgtcacccatacctcacrcaggagaaactgatccagtactgccactccaagggcatcaccgttacggcctacagccccctgggctctccggatagaccttggtgaggcttccaagtgg

SEQ ID NO: 271569 - DNA, 201 bp, Homo sapiens
ataagttactggaaagaaaaatgtgtgtaaggtaacacgtttggtacacacaaatgggatggcagtgggaaaaaatgggaattaaacaacaacaacaacamcaagggcgacatgcttgaccctctgggaatatttccagttcagccacccaagggtgaaccaggctttgcaaaatgctgaggcttcagagcccggggaaag

SEQ ID NO: 271570 - DNA, 201 bp, Homo sapiens
gtgttgagcctgaggggtcaaggctgcaatgagcagtgattgtgccactgcactccagtctgggcaacagagtgagatccaagaaagcaagaaagagagaragagagagagagaaagaaagagagacagagagaaacaaaatgcagagtctcaggctccaacccaggctacctaatgggcatctgcactttaacaagatcc

SEQ ID NO: 271571 - DNA, 201 bp, Homo sapiens
atggagaggctctgatgatcagtcttgagaccctcattggagtggtgtccttctgtacatggtagccatggtgattattcacatcagcatctttctgcccstagggccaagccagaagacccttccctgctggaggatcccaagattaaggagattgctgcaaagcacaaaaaaaccgcagcccaggtgccatatttttat

SEQ ID NO: 271572 - DNA, 201 bp, Homo sapiens
gatgatcagtcttgagaccctcattggagtggtgtccttctgtacatggtagccatggtgattattcacatcagcatctttctgcccctagggccaagccwgaagacccttccctgctggaggatcccaagattaaggagattgctgcaaagcacaaaaaaaccgcagcccaggtgccatatttttatttttcttgttatc

SEQ ID NO: 271573 - DNA, 201 bp, Homo sapiens
gatcagtcttgagaccctcattggagtggtgtccttctgtacatggtagccatggtgattattcacatcagcatctttctgcccctagggccaagccagargacccttccctgctggaggatcccaagattaaggagattgctgcaaagcacaaaaaaaccgcagcccaggtgccatatttttatttttcttgttatccaa

SEQ ID NO: 271574 - DNA, 201 bp, Homo sapiens
ttcccaccaccctatcattttccagcccagggagctagggtcagtagagctgagatgaatgacccatgggctaaggacatcctgggggcagtgcctggtamagccctatcaggtctgagcacagttgtgcctcacaccactgagaagaccctcagttgcccctgagcagctaggccctgggccacacacaagaacagactg

SEQ ID NO: 271575 - DNA, 201 bp, Homo sapiens
ctacctgctcactcagaatcatttctgcaccaaccatggccacgtttgtggagctcagtaccaaagccaagatgcccattgtgggcctgggcacttggaargtaaatatgcaaatctttgcacacccttcttctctggaggggcgtttgggtgttttctctttctgcattcagccaggaaagcctggaggtcgggcagggg

SEQ ID NO: 271576 - DNA, 201 bp, Homo sapiens; identical to SEQ ID NO: 53892

SEQ ID NO: 271577 - DNA, 201 bp, Homo sapiens
ttgagtgttgagcctgaggggtcaaggctgcaatgagcagtgattgtgccactgcactccagtctgggcaacagagtgagatccaagaaagcaagaaagaragaaagagagagagagaaagaaagagagacagagagaaacaaaatgcagagtctcaggctccaacccaggctacctaatgggcatctgcactttaacaag

SEQ ID NO: 271578 - DNA, 201 bp, Homo sapiens
gagactttgtggccaccagattatgaggaatgcatgtatttaattatttatttttgggacagagtctgtctctgtcgcccaggctatagtgcagtggcacsatcttggctcactgcattctccacctcccaggttcaagggattctcaggcctcccaagcagcggggactataggtacgtgccatcatgcctcgctaattt

SEQ ID NO: 271579 - DNA, 201 bp, Homo sapiens
agaatgggaaaaactcctgtggccagtttgtgctgtgaatgtgagctccctccctgctagaatggccggcagtctccagccacagctagaatggccttacygatgatgtattggaactcctacctttccaggtctttgactttaaattgagtgatgaggagatggcaaccatactcagcttcaacagaaactggagggcct

SEQ ID NO: 271580 - DNA, 201 bp, Homo sapiens
agtggcaccatcttggctcactgcattctccacctcccaggttcaagggattctcaggcctcccaagcagcggggactataggtacgtgccatcatgcctygctaatttttggatttttagcagagacagggtttcaccatgttggccaggctggtctcaaacccctaagctcaagtgatctacctgcctcggcctcccaa

SEQ ID NO: 271581 - DNA, 201 bp, Homo sapiens
tgtgctgtgaatgtgagctccctccctgctagaatggccggcagtctccagccacagctagaatggccttactgatgatgtattggaactcctacctttcyaggtctttgactttaaattgagtgatgaggagatggcaaccatactcagcttcaacagaaactggagggcctgtaacgtgttgcagtaagtggcatggag

SEQ ID NO: 271582 - DNA, 201 bp, Homo sapiens
tattaatgttgaagtagataatttaacaaacatcaatgaagtataagatttttcactcatagttgcaaaatatcatgccaattgccttctatgagctgtcrtaagccacagcctagagattcaattccatttcaagattcaaccaaagccaactcatcaacaagaacatgtaaaagacagaaaaacccactaccggcaggc

SEQ ID NO: 271583 - DNA, 201 bp, Homo sapiens
ctaaatcatctctttacaagcaatactttctgaataatgtatctaattaaatgtatcaaaaagagttgtctggcatttattactgccagatctgtaattcmatgaggatttgaatctctttcaatgtttctatagccaaaaacgatttttcaccttttaaaaatgatttcggctgggcgtggtggcccacggctgtgatcc

SEQ ID NO: 271584 - DNA, 201 bp, Homo sapiens
actccagaacttgaaaaagtggtatgcagatgtggtatttagcaagagtcaggatcctgaaaccttgttgaacagaaccaagtgtcctgatgcagattccrgtaaacttttcattctgtgttcacagtctggggatgaccttttccccaaagatgataaaggtaatgccatcggtggaaaagcaacgttcttggatgcctg

SEQ ID NO: 271585 - DNA, 201 bp, Homo sapiens; identical to SEQ ID NO: 53894

SEQ ID NO: 271586 - DNA, 201 bp, Homo sapiens
aaaaaaattagccgggcgtggtgacggtcacctgtggtccccgctactcaggaggctgaagcaggacaatggcacgaacctgggaggcggagcttgcagcragccgagatcacgccactgcactccagcctgggcgacagagtgagactgcgtctcaaaagaaacattaaaagccttaaggaactgagccccagatttcat

SEQ ID NO: 271587 - DNA, 201 bp, Homo sapiens
gtgtaaatgatggtggccctgtaagatggtaatggagcatatatagacatctgatatgtggcacttgacattggcattgcagatcgagtaggggaaatgaytgatattcagtaattgtgctgggatacttggctttccatatgaaaaaacataagtaacaatatgtataccatctaggtttgtgtaagtacattctatgtt

SEQ ID NO: 271588 - DNA, 201 bp, Homo sapiens
taaatgaatgagttgactggagttgtttcccttttttttctaattccaaagagtatacactaccgaattggggtttcttctttccttctcatcctgtagcraatctttctgtctctctgaccatctcttctggttttctaaaattcaaagattttgaacactttggagaaaatcaaagaacatctaaagccatttaatttg

SEQ ID NO: 271589 - DNA, 201 bp, Homo sapiens; identical to SEQ ID NO: 53899

SEQ ID NO: 271590 - DNA, 201 bp, Homo sapiens
ttttcttatctttctaggctagtcttctcctgcttccttattataccctatacttacagtggccatataattttccaaatgggacacttaagtgtgaaagrggccctagtagtaattatgttggggaaacaggcctaagacaatactgttctgtaataatgatgcatgtgcctctttctcctaactaccctctctgtcttg

SEQ ID NO: 271591 - DNA, 201 bp, Homo sapiens
cgtaagtgtcactgccttctaagtgttatattatgaggttacacacccatttcaaagatgcttcatgggtgtcaacaattctgagaagcttctttcagaayttacgtcagaaccagtgtataaaccatagcagaaaaataggcttattgctatatagaaaatatttcataaatccccaaagctaaggaaacaaatatgtgt

SEQ ID NO: 271592 - DNA, 201 bp, Homo sapiens
cacctaatttaagcatttctcctctaattcctcccttcattttactttattcccagctttcgcttctgctcatatcatcggcaaggtaggattgctttgaygggcctgagatctgtgccattatttatgagttagtcaaagtctgctccattctacctctcactttttggtagagtgcttcaccataatctcatttaatct

SEQ ID NO: 271593 - DNA, 201 bp, Homo sapiens
tcttgaaacatccttggaatgaaatctgatatgaaagatgtttatatgggtggcaggacaaaaagtattacttaataacaaaacccttctgctgaaacttrgccacaaatatgaggaaaacatactttgtaaaatataaattaaatgttaaccacttcattaaagcatttggattgcagaatattagtacttggtaagctt

SEQ ID NO: 271594 - DNA, 201 bp, Homo sapiens
tttctatgtttgcaagctaatcctcagcagtttctttgtaagtatccagcagttaagtgggaaaagtccgttgatagtactagggaggagagaggaaagtraccttttgttttcttgagatagacatactagtttagtactttatcatgtattcacctgcgtaaatgtattcctgtgcttcagagtgagggaaggatgcat

SEQ ID NO: 271595 - DNA, 201 bp, Homo sapiens; identical to SEQ ID NO: 53901

SEQ ID NO: 271596 - DNA, 201 bp, Homo sapiens
attgcatgtctaactttccacagctcaagttacagggtttgtgtgcttcttggtaacttaccaacctaaaagaaagcatttcattggatttagatgctaamttttcaagactcaaaaaattaagtgaatctcccctactgtttaggggggaaataaaggttttcttttataggaaggactgctttgccagttcatgtgtat

SEQ ID NO: 271597 - DNA, 201 bp, Homo sapiens
tgagggaggctttgaaactattagcaatttatttaattaatttaatcaaatggtgtacctgctttggaaaacaatctggcagttcctcagaagggctaaacatagagttaccatatgatccagcaatcccacgcctacccatatagctatattagcttcccagtgctgccgtaagaaaacaaccaaactgggtgggttaaa

SEQ ID NO: 271598 - DNA, 201 bp, Homo sapiens
aattgtgctgggatacttggctttccatatgaaaaaacataagtaacaatatgtataccatctaggtttgtgtaagtacattctatgttgtttgcacgacraaatcacctaatgatgcatttgccaggacatattcccttcattaagcaacacatgacgatacttgcaaatcacctcaatttgatttctttccttaagtcc

SEQ ID NO: 271599 - DNA, 201 bp, Homo sapiens
gcgtaaatgtattcctgtgcttcagagtgagggaaggatgcatatttgcatagtttttgtgactgcagtactgttcctctgttctggtgtgtgtgtgtgtktattttttttttagtaaaaagaaaacagaactttgttttaatgcagtaagcaaatataggagaataagataccacaaagcttggtggtgggtgcctgagt

SEQ ID NO: 271600 - DNA, 201 bp, Homo sapiens
aaatatcttccatttgcaaattaacacacttacacacacccctccgtgtgtgtgtgtgtgtgtgtgtgtgtgtgtgtgtgtgttcatcacctggtttctcrcaggtgaggggctctgaagcttgaactttgttagattcatgactattctgcccctgggcacaggcagtcatctggcaaaacactgcctagataccttttg

SEQ ID NO: 271601 - DNA, 201 bp, Homo sapiens
cacccctccgtgtgtgtgtgtgtgtgtgtgtgtgtgtgtgtgtgtgttcatcacctggtttctcgcaggtgaggggctctgaagcttgaactttgttagaytcatgactattctgcccctgggcacaggcagtcatctggcaaaacactgcctagataccttttgttcccttctctgttctgccaccctgatgcctcttct

SEQ ID NO: 271602 - DNA, 201 bp, Homo sapiens
tttatatcctgattggttattacactactgtatgcagttgtcaaaactcatagaactgtatgctaaaaagggtgacttttgctatatgtaaattatacctsaaaaaagacttgctttatccagtgaactcaccattgccttaattgggaccttaccttttgttcacaaaggtaatagactacattagtcaattaggagaat

SEQ ID NO: 271603 - DNA, 201 bp, Homo sapiens
acgtacacatgttgttttatgtaggaactagaacatggctctgaactcactggaaagctatggttcaatactgcgttttactttgctgtttagtatatccwggtcatattttttatttcatttgatcaatcattgatcactaagctgttttgcttaaagaaactgctttagtaaaaagaagcaaactattgatacacccat

SEQ ID NO: 271604 - DNA, 201 bp, Homo sapiens
  misc_feature (1)...(201): n = A,T,C or G
tactaaagaaaggtagaaactagatctagattccaatcaattttgccattgattgttattttactgtgggtgactcacagtttaagtgggagagaaaatcnccagttaatggaagttgccaagagtggcagaagaccaggctgtagtgctcgtataatctttacaacccagtgtgcaaaacactggaggagagatggagag

SEQ ID NO: 271605 - DNA, 201 bp, Homo sapiens
taattagttggcatcaagaactctactcaaaactcagttcactgaggctccacacacagttatcacctgggctttaaaacttttttctaaaaggtagcctytcccttgacctattctttgtttggaatactgtgttttaagaagctgagtcaagaacatccatggcaggtaaactataaaaaggtaatttaatgcaactaa

SEQ ID NO: 271606 - DNA, 201 bp, Homo sapiens
gaaggaattgttgaaatggccttgaaagtaaattagagtttttcaagtcaagtaaattatctagacttcagttttgctcacgttcttccaactttaaacartgattgctgttcctagacgtaggtttcctgagcagttcttttgtttcaaacttcttttcagaacaggcttagtcattgactggaagaaagttagggggaa

SEQ ID NO: 271607 - DNA, 201 bp, Homo sapiens
aacctggtacttaacaagaaaggaaaatcatcatcctaactgctgtagcctttcaacttcagtcatgcaccacctaatgatgtttcagtcaagcatggatygtgtaaatgatggtggccctgtaagatggtaatggagcatatatagacatctgatatgtggcacttgacattggcattgcagatcgagtaggggaaatga

SEQ ID NO: 271608 - DNA, 201 bp, Homo sapiens
tcatttcaaaacataatcatgccctttccaacagtcgcccaaagtcttagctcatttcagcatcaacccaaaagtccaaatccaaagtctcatctgagacraggcaagccctctctgcctatgagcctagaaaattgaaagcaagttagttacttcctagatacagtggggctacaggcattgggtaaatatacctgttcc

SEQ ID NO: 271609 - DNA, 201 bp, Homo sapiens
agaggcctcaggaaacttacaatcatggtggaagggaagcaaacatgtccttcttcacatggtggcagcaaggagaagtataagtgaagtgggggcaaagytccttataaaaccatcagacctcgtgagaactcactttctatcataagaacagcatgagggtaactgtccccatgaatcaattacctcccactgggtccc

SEQ ID NO: 271610 - DNA, 201 bp, Homo sapiens; identical to SEQ ID NO: 53900

SEQ ID NO: 271611 - DNA, 201 bp, Homo sapiens
ccaccccagacctactaaatcaagctctggaagtgggcccaagcaatctgtttaatttgattttgatatacattaaagtttgagaaccactggcctacagraactaacatttaagctgagctctaaagctgcatgatctagtgcggtagccactggtcacatgtggctatggagcacttgaaatgtggctggttcacattg

SEQ ID NO: 271612 - DNA, 201 bp, Homo sapiens
ctttccaataggcagagccctaggacctgcccacgtctggttcaggggctagaaaagagcgtcgatgccggcggcagtgatgagtcctaggaggcgctggstctttggcggctcggaggagcggctgctgctgctgctgctgctgctggtggcccctttgcaggtgagtggctttgttttagaaaatgttgcgaacgttta

SEQ ID NO: 271613 - DNA, 201 bp, Homo sapiens
ctctgagttagaaatcaagaacattggctttagtcctgaaactgttactatttgtgtgatcttaaacaaatcatttcaactgtgactcttaatttttgcattttttttttgagacagggtctcgctctgttgcccaggctggagggcagtggcgcaatctctgctcactgcaacctccacctctgcctcctgggctcaagc

SEQ ID NO: 271614 - DNA, 201 bp, Homo sapiens
gccgaggcgggcagatcacgaggtcaggagatcaagaccatcctggctaacatggtgaaaccctgtctctactaaagataacaaaaaaaattagccgggcrtggtgacggtcacctgtggtccccgctactcaggaggctgaagcaggacaatggcacgaacctgggaggcggagcttgcagcgagccgagatcacgccac

SEQ ID NO: 271615 - DNA, 201 bp, Homo sapiens
agatcacgaggtcaggagatcaagaccatcctggctaacatggtgaaaccctgtctctactaaagataacaaaaaaaattagccgggcgtggtgacggtcrcctgtggtccccgctactcaggaggctgaagcaggacaatggcacgaacctgggaggcggagcttgcagcgagccgagatcacgccactgcactccagcc

SEQ ID NO: 271616 - DNA, 201 bp, Homo sapiens
ctcagaaatattctctcccatcccacctctcttttactaatgaagtgctttctcatggtgtgaattactttgagttttaggtacacacacacacacacacrtactgaagatgaagacataattcttgttggattacatattcctcataggcctagcattgggccatgcctaaatgggatctgcaaaatgtttgaagaatga

SEQ ID NO: 271617 - DNA, 201 bp, Homo sapiens
tcagaaatattctctcccatcccacctctcttttactaatgaagtgctttctcatggtgtgaattactttgagttttaggtacacacacacacacacacgyactgaagatgaagacataattcttgttggattacatattcctcataggcctagcattgggccatgcctaaatgggatctgcaaaatgtttgaagaatgaa

SEQ ID NO: 271618 - DNA, 201 bp, Homo sapiens
gaaatattctctcccatcccacctctcttttactaatgaagtgctttctcatggtgtgaattactttgagttttaggtacacacacacacacacacgtactgaagatgaagacataattcttgttggattacatattcctcataggcctagcattgggccatgcctaaatgggatctgcaaaatgtttgaagaatgaatta

SEQ ID NO: 271619 - DNA, 201 bp, Homo sapiens
cctagatacagtggggctacaggcattgggtaaatatacctgttccaaatgggagaaattggccaaaacaaaggggctacagcaggccccatgcaagtccraaatccaatagagcagttgttacaccttaaagttccaaaatgatctcctttgactccatgtctgaatgatagcttttggacctataggattcatgtggct

SEQ ID NO: 271620 - DNA, 201 bp, Homo sapiens
ctccagtggggggttgaaggcagaagaccagggttgcagttccagtttgccatttactggccatatgtttttgaacaagtcaatcagaatctccatttttytctgtggagattatggccatccatgaacatactaaacttatagtacaaaagtacaaagtacagaactataatggataattattcttggctcctgttttga

SEQ ID NO: 271621 - DNA, 201 bp, Homo sapiens
aatattctctcccatcccacctctcttttactaatgaagtgctttctcatggtgtgaattactttgagttttaggtacacacacacacacacacgtactgwagatgaagacataattcttgttggattacatattcctcataggcctagcattgggccatgcctaaatgggatctgcaaaatgtttgaagaatgaattaat

SEQ ID NO: 271622 - DNA, 201 bp, Homo sapiens
tattctctcccatcccacctctcttttactaatgaagtgctttctcatggtgtgaattactttgagttttaggtacacacacacacacacacgtactgaasatgaagacataattcttgttggattacatattcctcataggcctagcattgggccatgcctaaatgggatctgcaaaatgtttgaagaatgaattaattg

SEQ ID NO: 271623 - DNA, 201 bp, Homo sapiens
ctgagatctgtgccattatttatgagttagtcaaagtctgctccattctacctctcactttttggtagagtgcttcaccataatctcatttaatctttctratagccccctgagaacagtagtttcatgatcctcatctttatagatatggaacctgaggttcaaagaatttaaataagttaagatcacattgtcagtcag

SEQ ID NO: 271624 - DNA, 201 bp, Homo sapiens
attctctcccatcccacctctcttttactaatgaagtgctttctcatggtgtgaattactttgagttttaggtacacacacacacacacacgtactgaagatgaagacataattcttgttggattacatattcctcataggcctagcattgggccatgcctaaatgggatctgcaaaatgtttgaagaatgaattaattgg

SEQ ID NO: 271625 - DNA, 201 bp, Homo sapiens
tgacgggcctgagatctgtgccattatttatgagttagtcaaagtctgctccattctacctctcactttttggtagagtgcttcaccataatctcatttartctttctgatagccccctgagaacagtagtttcatgatcctcatctttatagatatggaacctgaggttcaaagaatttaaataagttaagatcacattg

SEQ ID NO: 271626 - DNA, 201 bp, Homo sapiens
ttttaggaaactgaaacaagttcaatgcccaagagtagagaattggttggacagttctctactcttgtacataccacctggatgcacattcacgtaatggrattatatacggaagaaaaatattaaatgacattgggacatgttaataacaaattaagtagaaaagattgccacaaaacagtatatatactaagagtccag

SEQ ID NO: 271627 - DNA, 201 bp, Homo sapiens
gtatgaggcatgagcaccccccactagagagagaagcagtgtcacctgggaagaggtcgttttcagttcagatctttttcagtgcaattgacactcaaagytgagtgggagtttgaggacagagctaggaattctgcagggcaccagcaaatggtttggtgagggagggctgtaaaggtgggtcagggagaaggaagccca

SEQ ID NO: 271628 - DNA, 201 bp, Homo sapiens
cacttgatatgtgtgtgtgtgtgtgtttgtgtgtgtgcacgtgcgcatgtgcgtgggcacatgtgtatcttatttactcaactatataaaaggttctattyttgttcagaataattagatctttaacttcattattagtgatatataacttcatcattaatggaccatagtattttattgtttgaagaagagttgaggctt

SEQ ID NO: 271629 - DNA, 201 bp, Homo sapiens
ttctcccatataaaatgggctctttcaagggactggagtaatttttccctattttgtctctaaactgcttgacaagctaaaaaagttttacctactggggmggagtgtggtaacggatagcatcaatgacagcatactgtcctatcagaaaaatactttcttattgtttgaaaactagggtgggaagaatcatgaccccag

SEQ ID NO: 271630 - DNA, 201 bp, Homo sapiens
gcactctgtgaatgttggctactgtgactaatatgatcatcttcatagtactcttacaggtaggtaagaaaatgcagacacccaagaccaagatgtaaccrtggaagagctggaggaaatgctacaccaaaatcttagtgggttttttttcttgatggaagtagtctgttttagagaagtcatgagagaagatgatctcca

SEQ ID NO: 271631 - DNA, 201 bp, Homo sapiens
tatttattctaactatagttttgtacctgttaaccatcctcactttaaccccctcgctcctgttacctttccctgcctctggcaaccataattctgctatygcaatacattcaattttcaaaatttttagctcccacatatgagtgaaaacatgtgaaatttgtctttccatgcctgacttatttcacctaaccttaggct

SEQ ID NO: 271632 - DNA, 201 bp, Homo sapiens
acgctctagggtgtgtttttctacttccctaggcccaagcctgcccgctggcgtcgaagccaactccttactggttcaggtatgtgctcgtctctagagtraaccaatcagagccccacttcttactcctgggatttggtaaacggaagagacctctcctgttccgggagtaggccgggaccgtggatgagtgacagttcg

SEQ ID NO: 271633 - DNA, 201 bp, Homo sapiens
catatgtatatctcttcgccatgagtagggatctgcctggtatggttggttattcttgtaacaagcaatcagtaggaaatattagtagatgtaagattggkgaatgagagggttttagtgtctggaaaacacctgtaagtggtaacatttgctcctgtaaaatgatgttcttataactgcaagtacagatgaaaaagtttc

SEQ ID NO: 271634 - DNA, 201 bp, Homo sapiens
tccacagtggtgatgccatgcaggctggaacatgcaacatgccctgagcaaatgcacatctcattacatatgtatatctcttcgccatgagtagggatctkcctggtatggttggttattcttgtaacaagcaatcagtaggaaatattagtagatgtaagattggggaatgagagggttttagtgtctggaaaacacctg

SEQ ID NO: 271635 - DNA, 201 bp, Homo sapiens
gcaagaaagaacctgacatgctcaaggaaataaaacgaaagccttgcaggtcacatgaaggattctgaacattttctaagaccagtaggaagaattgaggktttaaaataagatactcaattttcaaggagtttaattgttagtttgcagttaataaatgagggcaagagaacttcaactgaatatagcaagactttcaac

SEQ ID NO: 271636 - DNA, 201 bp, Homo sapiens
tgtttttactttagacttttggaatttggtggacacagtttgtgttgataaaagctactaccctggggaagacaatgaccagagataggaaggaggggtcygtcatgagtgggtgttgtccacagtggtgatgccatgcaggctggaacatgcaacatgccctgagcaaatgcacatctcattacatatgtatatctcttc

SEQ ID NO: 271637 - DNA, 201 bp, Homo sapiens
ttcaaagaatttaaataagttaagatcacattgtcagtcagtagcagagctgggctcatatctaggttgtttttactttagacttttggaatttggtggamacagtttgtgttgataaaagctactaccctggggaagacaatgaccagagataggaaggaggggtccgtcatgagtgggtgttgtccacagtggtgatgc

SEQ ID NO: 271638 - DNA, 201 bp, Homo sapiens
gctacaggagtaggtcagcaggcctgacctacttcccaatgggtgaagaggaagtctaaagccaggggttctcaaaacatggtccttggaccagccatgtyaccatcacctgaggacttgctagaaatgcatattcacagtcccaccccagacctactaaatcaagctctggaagtgggcccaagcaatctgtttaatttg

SEQ ID NO: 271639 - DNA, 201 bp, Homo sapiens
taaaacgattctacagcccaaccacagctcattgtacacatcccctcctgctagtgcattgatgatttaactattttttactgttctttttgagggaaatyggaaagtttaacaaatgatggtaaagaagactataaccatggtgggggcaaagagagaattacatgtagaggttgtgtttagacatagcaaaacttactt

SEQ ID NO: 271640 - DNA, 201 bp, Homo sapiens
ttcctgttacccgaagcagcagttttcagactttagcaagcatcagagtcacctggagaggttggtgtatcacagattgtgggtcccaccctcagagtttyggaatcagtaggtctggggcgcaccctgagaatctgcatttcttagaagttttaggtgatgctgatactgctgattggggttccacactttgagaagcac

SEQ ID NO: 271641 - DNA, 201 bp, Homo sapiens
ctgcattttgccaagtgaaagaaattgggctaaaaaagctgtgtattgtatgattccatttatgtgccatttgggaaaatatagaactatcgggaaataamagattggtggggtaagagtaggctgctgggggcacaaggaaattttaaggggttgatagagctgttttatatcctgattggttattacactactgtatgc

SEQ ID NO: 271642 - DNA, 201 bp, Homo sapiens
  misc_feature (1)...(201): n = A,T,C or G
tttgccattgattgttattttactgtgggtgactcacagtttaagtgggagagaaaatctccagttaatggaagttgccaagagtggcagaagaccaggcngtagtgctcgtataatctttacaacccagtgtgcaaaacactggaggagagatggagaggccgggcgtgtaaaccaagcatgtgtcagtgcagatgtgtc

SEQ ID NO: 271643 - DNA, 201 bp, Homo sapiens
gtaaagtgtgtcaaaatgacagatgatatttttgaaggagattaacaggatgaatcctatagttttcccctatagttcaatcttgaacctattcctaaatratttagttaagcaaaagtcaagtactcagactgatttaaatgtcttcagtattgccttctgtgaggaataaaaacaattatgaatgggattccattactc

SEQ ID NO: 271644 - DNA, 201 bp, Homo sapiens
ctggtatggttggttattcttgtaacaagcaatcagtaggaaatattagtagatgtaagattggggaatgagagggttttagtgtctggaaaacacctgtragtggtaacatttgctcctgtaaaatgatgttcttataactgcaagtacagatgaaaaagtttctacaaagccttaggaaaagtaatagaccatggaaca

SEQ ID NO: 271645 - DNA, 201 bp, Homo sapiens
cagtgcatggtgggaagagcttagaacaaaggctaagagtcagactctggttttgtaactagctgtgcagtcttagaaaaattatctctcccagttttacyttcctcatctgtaaatggggacacatatgccaggagttttgtgaggatttactgatggagccctgatagtttggctgtgtccccacccaaatctcatctt

SEQ ID NO: 271646 - DNA, 201 bp, Homo sapiens
cgccactgcactccagcctgggcgacagagtgagactgcgtctcaaaagaaacattaaaagccttaaggaactgagccccagatttcatttcccttgagamctgttcctttttactttgttaaagacatggttctttttctctgtcctcaaataatagccagcccatcttctataaagttagattcctcttgcagtggggg

SEQ ID NO: 271647 - DNA, 201 bp, Homo sapiens
aatgacttatttatataatatctctgctcataaatcatatatgcttttgagattgctttacttttaatctgatgatagttaatgctttcggaagaagtcaraacaagacatacagaatattatatagtaaaaaaatgcctacttaagggactgctttactggcttttagaagtaccattattatgctaataagtccaggtt

SEQ ID NO: 271648 - DNA, 201 bp, Homo sapiens
gcatagtccagctgcactctgcttcacacagctgcctgcccattgcaggcatttgagtttgcaatccatgccttaaactttaaatcacactggctacagcrttgtgtgtttcttggtaaacactgggtaaatcagctcctgtggatgttgactgaagtttctatgtttgcaagctaatcctcagcagtttctttgtaagta

SEQ ID NO: 271649 - DNA, 201 bp, Homo sapiens; identical to SEQ ID NO: 53898

SEQ ID NO: 271650 - DNA, 201 bp, Homo sapiens
agacaggcgtgtgtttcattctctgtggttggcatagtcacttcctgtttgtttcctgctggcgcacgtccaaggaaaagccaggtaccaaactgaaacastggatgtagtctgcatcttgccagaggaaatggattgtttagtctgggtttaagcacaggacgaggcagtttcaagtttggagtaagagtgacacacaag

SEQ ID NO: 271651 - DNA, 201 bp, Homo sapiens
cattgattactaaccaataacaacttattctgccactctcaagtaaagacaaacccttggactcccctgaacttgtttcacctaggtcctttctgttaatrtagaacaggaagcatatagttagaatttagaagtctatgtgattaataaaggagtgtttttaaagtagataatttgaatactttcagttgtcttttagct

SEQ ID NO: 271652 - DNA, 201 bp, Homo sapiens
aaccagattattgtagaaaatttggagcataccgaagtataatgtggcagaaaaatgtcacttagaagcaactactgttagtgtttgggtagagcttttartctttcttcctcttttgcctgctgtggttggttgagattaagaggcacattttaagtaatgattgatgcacctaaattcacctggccttcatctttgtgt

SEQ ID NO: 271653 - DNA, 201 bp, Homo sapiens
ccctcagctgcttgcatttgatagcttattttgcatctggatttattcctgctgaaaactctatcttgaggtaggtgcaagattatttaggtacgtaccayatttggtgttaatgtctctttaaagcacttttaatttgtctgaatgttgaactgatgtgttttgcataccttagattttcttgtgtgttgtagcctgtgg

SEQ ID NO: 271654 - DNA, 201 bp, Homo sapiens
acctctttctgaaatttgtctgtactgtacctctgacaaagtccttagggtgttttcatatataggctttatgttttaggatttttaaattaacattttgktcttttttttttttttttgagatggagtctcgctctgttgcccaggctggagtgcagtggtgcaatctgggctcactgcaagctccacctcccaggttca

SEQ ID NO: 271655 - DNA, 201 bp, Homo sapiens
gtatttttattagagacggggtttcactgtgttagccaggatggcctcgatctcctgacctcgtgattgcctgcctcggcctcccaaagtgctgggattaygggcatgagccaccacacccagcctaacattttattccttatagcctttagttatatgtaaaaagtagattcacataataaatacagctgtaattactta

SEQ ID NO: 271656 - DNA, 201 bp, Homo sapiens
agatgtacagtgtacataacagtttgtctttggttcctgttcctgctatggtgacttaggggagggggttggtaggtgcaaatttgacttcctgaagttaktcctctatgcagaaaataaagttgtttgactttctccccaattttggccttgagctacttcctggacttattaccccaaactttcattatttcttcctta

SEQ ID NO: 271657 - DNA, 201 bp, Homo sapiens
gaccatggaacacttttaggtacagttgtgtttgaacttctaatagtgaacttgatttgggggaaggcatagtttgttaagacattaaaagccttggccgrgcacggtggctcacgcctgtaatcccagcactttgggaggccgaggcgggcagatcacgaggtcaggagatcaagaccatcctggctaacatggtgaaac

SEQ ID NO: 271658 - DNA, 201 bp, Homo sapiens
ttaaaagagtacctggcatgaaatatgaactcagaacatgttagctgtttattgttaaaagtacttataaagaatattattactaccactgctactacaastacagctcttctggtccaagttgaattacctgtaattcagttgtactttaaaaagggctaaaggtggcttgtgttttatatataccttccttttttagca

SEQ ID NO: 271659 - DNA, 201 bp, Homo sapiens
aaaccttttgcccatttttaaatttgatcatttgtctttttattattggagacagttcttatatctgataaggaacttgtatctagactatatatgatatrcaaatttttctcccattctctgggttgcctttttatgttcttaatagtgtcctttgaagcacaaacatttttaatttttatatacccagtttattttttt

SEQ ID NO: 271660 - DNA, 201 bp, Homo sapiens
tttaaaataagatactcaattttcaaggagtttaattgttagtttgcagttaataaatgagggcaagagaacttcaactgaatatagcaagactttcaacwttgaagctccccaactccctaggatggtgggggaggggcgatttggtcagtggaggaagcaggacgctgcccatcacctgaacctaaccctagggtatga

SEQ ID NO: 271661 - DNA, 201 bp, Homo sapiens
accacaatcaatgttggaacattttcactaccctaaaaagaaacccagtgccccttagctgttatcacccccccagttcctcccctattccacccagcccygggcaacaactaatctactttgtgtcactatagattcacctgttgtggacatttcatgtaaatggacttatgcagtaagtggtcctttgtgactggcttc

SEQ ID NO: 271662 - DNA, 201 bp, Homo sapiens
tcgttttcagttcagatctttttcagtgcaattgacactcaaagctgagtgggagtttgaggacagagctaggaattctgcagggcaccagcaaatggttyggtgagggagggctgtaaaggtgggtcagggagaaggaagcccagagcattatggggattagagggtctgtcctttgaaaggctgtgttgggcaataaca

SEQ ID NO: 271663 - DNA, 201 bp, Homo sapiens
accacgcctggctaatttttgtatttttagtagagacagggtttcaccatgttgcccaggctggtcttgaactcctgacctcaagtgatccacccacctcrgcctcccaaagtgctgagattagaggcatgagccactgcgcccagccctgtttactattttttaacatctttattgcgttataattcacatactatgcaa

SEQ ID NO: 271664 - DNA, 201 bp, Homo sapiens
gccacgatctagcctgcagaagaaatgttttgtttcactcacattttacaaatatacattagttgctaatatttaaatcagatatcagataaaaatacacrttttcattttttttttaattggaagatctagaaacctcagttgctcagtatcacagggcaatgggctggagctaagtagtaggtactcctttgatttttt

SEQ ID NO: 271665 - DNA, 201 bp, Homo sapiens; identical to SEQ ID NO: 53925

SEQ ID NO: 271666 - DNA, 201 bp, Homo sapiens
tgctagaaattttgattaggtatttacttggtttttgagtaacacaagtgtttttatctacctctgccagttagccatggaatctttgtcctagcctactrtaggtacttaagaattaatcacctatataagaaaaggcagtttattttggtttgctggtcgtttgtaagaaagagagggctgaagtagacctttgctacc

SEQ ID NO: 271667 - DNA, 201 bp, Homo sapiens
tatacctagcaaaaggggagtagagcacaatttccagaattttataaatgaagtgaaagaatgatatgggggagagtcctttggggccaaggagagagagyacagaccggaaagtaatacaagtagtaagaagggtgtgtgagttgtttaaggactattaatctctctcttcaggtctgtgatacatgatatggaacctaa

SEQ ID NO: 271668 - DNA, 201 bp, Homo sapiens
gaagatattctaagtgttcttatgtgctgtttggaatgaagttgatttcccactctgcttccctctacaaatataatattaagacatagaaatttgttctrgttaaaatcttggtttagctttttggtaagagccttatttcttctcccttagaaaagtgttgggttgtttttgttctttttgagtcctagaaacttacat

SEQ ID NO: 271669 - DNA, 201 bp, Homo sapiens
gaccagcccaaccaacctggtgaaaccctgtctccactaaaaatacaaaattagcctggtgtggtgatgcatgcgtgtaatcctaactactcgggaggctraggcagaagaattgtttgaacccgggaggcggaggtttcagtgagccgagatcatgccattgcactccagcctgggtgacaggagccaaactccgtctca

SEQ ID NO: 271670 - DNA, 201 bp, Homo sapiens
atcagttcctttcaacacagcatggatgaaaacccaggttagcgttagtgcttcttgaattggaagtattctaacctctatgtacctaccaatgtaagaaytgagggcccttttaagggaacttacattcctaaagttcaagtcaagttgtcatgaagagtacttaatgaggcatacttttaatctttgaatcgtagtgtt

SEQ ID NO: 271671 - DNA, 201 bp, Homo sapiens
acctattacattcattttatgatacagaaatggtcattcagttgcagatagtacatgactgttgggatcaggcccccaaatctggccataaactggccccmaaactggccataaacaaaatccctgcagcaccgtgacctgtttgtgatggccatgacacccatgctgaagattgtgggtttaccggaatgagggcaagga

SEQ ID NO: 271672 - DNA, 201 bp, Homo sapiens
gcccccaaatctggccataaactggccccaaaactggccataaacaaaatccctgcagcaccgtgacctgtttgtgatggccatgacacccatgctgaagwttgtgggtttaccggaatgagggcaaggaacacctggcccacccagggtggaaaaccgcttaaaggcgttcctgaaccacagacaatagcatgagcgatc

SEQ ID NO: 271673 - DNA, 201 bp, Homo sapiens
tagtagctgtagttatcattctttgcaatctttctttgttattattcatttactttatagaacattatgtcctgaaagaagaagccttctctgaccccagkcctccatattggatcaatgcccctagttatgatccctcctagcagcctgtacttctcctttatagttcttcccaccattggaattaaatagtgatggcat

SEQ ID NO: 271674 - DNA, 201 bp, Homo sapiens
aattagctgggcatggtggcgtgtgcctgtagtcccagctactggggagcctgaggcaggagagtcgcttgaacccaggaggcggaggttgcggtgagcckagatcgcaccactgcattccagcctggtgacagagtgagactcttgtctcaaaaaaaaaaaaaaaaggaaaatacatgtgtctaaagacagaaaactttg

SEQ ID NO: 271675 - DNA, 201 bp, Homo sapiens
aggatcacctgtgccccagaggtccaggctgcagtgagtcgtgtttgcaccactgcattctagcttgggtgacagagtgagaccctgtctcaaaaaaaaawttttttttaaataatttcaaattaaaattttcagaaacaaatttattattttttttgaaattcagcagatgtcttagtgtgtacccttttcaactaaaca

SEQ ID NO: 271676 - DNA, 201 bp, Homo sapiens
ttttttttaaataatttcaaattaaaattttcagaaacaaatttattattttttttgaaattcagcagatgtcttagtgtgtacccttttcaactaaacaracatttctcttttaggatttgtacacacagatatgacgaaagacttgaaagaagaacatttaaagaaaaatattcctcttgggaggtttggagaaactat

SEQ ID NO: 271677 - DNA, 201 bp, Homo sapiens
tatgatccctcctagcagcctgtacttctcctttatagttcttcccaccattggaattaaatagtgatggcatgattaattgtttaatgtctgtcttcctygccagattattttcccaacgaaaacaggcaccaggtctatcttaatcatagctgtattgacactggttcttgcttatagcaataaattccttttaagtga

SEQ ID NO: 271678 - DNA, 201 bp, Homo sapiens
gttataagtaattcttatttaactttgttgtgtaggagatcatttggcatttagctgtgatgttgctaaagaacatgatgttcaaaatacatttgaagagmtggagaaacatttaggtcgagtaaatttcttggtaaatgcagctggtattaacaggttggtcacagatttaaataagtttcttatatatatatttaaaac

SEQ ID NO: 271679 - DNA, 201 bp, Homo sapiens
accagcccaaccaacctggtgaaaccctgtctccactaaaaatacaaaattagcctggtgtggtgatgcatgcgtgtaatcctaactactcgggaggctarggcagaagaattgtttgaacccgggaggcggaggtttcagtgagccgagatcatgccattgcactccagcctgggtgacaggagccaaactccgtctcaa

SEQ ID NO: 271680 - DNA, 201 bp, Homo sapiens
tgaaaccctgtctccactaaaaatacaaaattagcctggtgtggtgatgcatgcgtgtaatcctaactactcgggaggctaaggcagaagaattgtttgarcccgggaggcggaggtttcagtgagccgagatcatgccattgcactccagcctgggtgacaggagccaaactccgtctcaaaaaaaaaaaaaaaaaaaaa

SEQ ID NO: 271681 - DNA, 201 bp, Homo sapiens; identical to SEQ ID NO: 53919

SEQ ID NO: 271682 - DNA, 201 bp, Homo sapiens
aatttaattagaaagctttggcctaataatccaaatggagatggtatcagtattacctgcagaatatttttaaaaataaatttgaaacatacatcaggagmccccctccctggaaatttgaataagtggtaggcagggtgagggaaatgtggagatacatttaagacacttatttatttatttaattaaattaatttattt

SEQ ID NO: 271683 - DNA, 201 bp, Homo sapiens
cctctgccagttagccatggaatctttgtcctagcctactgtaggtacttaagaattaatcacctatataagaaaaggcagtttattttggtttgctggtygtttgtaagaaagagagggctgaagtagacctttgctacctttccctttccggtcactaatggctccagcttggaccttacagttggtgttttctttggc

SEQ ID NO: 271684 - DNA, 201 bp, Homo sapiens
ttggcactgaagttgagccagcaggtatcagggatttatcaaaatatcctattaacccttttggtctatagtgtgtctttatttcaattcttttcttttcttttttttttttctcatagcaactagctacattcagacattctaaatctatgaatatttgataagtgactgtggttcagatacatctatttgctgggagta

SEQ ID NO: 271685 - DNA, 201 bp, Homo sapiens; identical to SEQ ID NO: 53920

SEQ ID NO: 271686 - DNA, 201 bp, Homo sapiens
gccgcggtccaggcgcctaaagaaaatctcctttgtaaaaagagcgggtctggcctttagggctctagggttactcgatgtagccgcgtgcaggcgctctyccgttccaagggtagaatgcgtctcgtgcagaaacccgcgatctccctatgcctcgcagaatgccggccacgcagcttgccgccgagggctgaacacttg

SEQ ID NO: 271687 - DNA, 201 bp, Homo sapiens
cgcggtccaggcgcctaaagaaaatctcctttgtaaaaagagcgggtctggcctttagggctctagggttactcgatgtagccgcgtgcaggcgctctccygttccaagggtagaatgcgtctcgtgcagaaacccgcgatctccctatgcctcgcagaatgccggccacgcagcttgccgccgagggctgaacacttggg

SEQ ID NO: 271688 - DNA, 201 bp, Homo sapiens
aaattagcctggtgtggtgatgcatgcgtgtaatcctaactactcgggaggctaaggcagaagaattgtttgaacccgggaggcggaggtttcagtgagcygagatcatgccattgcactccagcctgggtgacaggagccaaactccgtctcaaaaaaaaaaaaaaaaaaaaaaaaattagccaggcgtggtggtagccg

SEQ ID NO: 271689 - DNA, 201 bp, Homo sapiens
cgagctcttcctccttttcacggcgtcttgcattactattgtgcggctgcaggaggtgtcgagcggcgttatttttttttgcggtttgcctttttttttcttttttttttttttggaaccgcggttgtttaaaagcctgagggaacctggagaggggctcccactccctaccctctttcctccgagtttgtgactccgaga

SEQ ID NO: 271690 - DNA, 201 bp, Homo sapiens
gtgatgcatgcgtgtaatcctaactactcgggaggctaaggcagaagaattgtttgaacccgggaggcggaggtttcagtgagccgagatcatgccattgyactccagcctgggtgacaggagccaaactccgtctcaaaaaaaaaaaaaaaaaaaaaaaaattagccaggcgtggtggtagccgcctgttgtcccagctg

SEQ ID NO: 271691 - DNA, 201 bp, Homo sapiens
agggtctattgttaatgtaggtgagtcttcacctttgtgaatttatgattatcccataataccataccataaaaatatttaatccacgaatttgtgatttrttgtgaaacatgaatgaaatttatattatctgtggaaaaaaggatttaattaattgattaatgagtaaaataagaatcacacattcacatccctatagga

SEQ ID NO: 271692 - DNA, 201 bp, Homo sapiens
ctccttttattcttgcattccttctggccttctcattcttcttaaagatgagaggatatgaaggaaatattgctgacttttaaaataaatgtggtaagatkttatggcagagaagactgtatttcactgtgtaatttcacagtgaaacatacataatacaaaattagttttgttattccaggccttcattacagactatct

SEQ ID NO: 271693 - DNA, 201 bp, Homo sapiens
gacacttcattggtatttcagaaattaccactttttgacctgatgaacagtagtgcgtggcacgaatcaaagctgctaaagcagcttgtgtttttttttcwtttaaaagccactcatatttagcagttgggggttgtatactaactttagtgacactactgttaataggttctgataacccgctaccatcggaccagccct

SEQ ID NO: 271694 - DNA, 201 bp, Homo sapiens
gtgaaaccctgtctccactaaaaatacaaaattagcctggtgtggtgatgcatgcgtgtaatcctaactactcgggaggctaaggcagaagaattgtttgracccgggaggcggaggtttcagtgagccgagatcatgccattgcactccagcctgggtgacaggagccaaactccgtctcaaaaaaaaaaaaaaaaaaaa

SEQ ID NO: 271695 - DNA, 201 bp, Homo sapiens
attagagtgcatccccttcacgtagtgaatcaattcgcaagcacctgcattggcagttttgtatcagctgctttcagatgctattttctgtatgtatctgragcagacttggactcttaaatcttccgtaaatgactgatgacaatggttagaatttctaattttaacaaaggacaaggtgaagtgggttttacctttttg

SEQ ID NO: 271696 - DNA, 201 bp, Homo sapiens
tcttgtaacacagctaacaaacatcacagttaacaaatatgtgtccttttatgtcagttttcctggtcaccttcaaatggagtttccaattagcaggaaamcagtttaaaagcaaattataacaggaaaagcaaggaacaaggaaaataataaattaggctgcgattcattgcctaatactgttgactttttaaagatcaa

SEQ ID NO: 271697 - DNA, 201 bp, Homo sapiens; identical to SEQ ID NO: 53924

SEQ ID NO: 271698 - DNA, 201 bp, Homo sapiens
acagagaaacttcccctgctgtaaccttctcagctaatgggtgatgtgctgtgatagatgtattctcacccgggatagtggtgatattgtattaagagggraaaaaaataaataataaccttgaggtttaacctgaggtatgtgttgaataaaaagcccagcttatccatttacagtatatatacagtgagaaaagttgga

SEQ ID NO: 271699 - DNA, 201 bp, Homo sapiens; identical to SEQ ID NO: 53918

SEQ ID NO: 271700 - DNA, 201 bp, Homo sapiens
tgaccacttttgtgatgccttccttcccttgacactactttctacttttctatccctacctaagtgaaaattaatgtattctatgatattttatatatacytctatcaggatattcaccagacttctttacgttataatcgggtgtgcaagtgaccatttcctccacaaatcataggttccccaaagagtggaattttgtt

SEQ ID NO: 271701 - DNA, 201 bp, Homo sapiens
cctttatttcggcccatccctttgtttcccgtaaggaatacttttagttaatctatcatctatagaaagaatgcttatcactggcttgctgtcagtaaatwtgtgggtgaatgtctgtttgaggctctcagctctgaaggccgtgagacccctgatttcccactccacactatatttctgtgtgtgtctttaattcctcta

SEQ ID NO: 271702 - DNA, 201 bp, Homo sapiens
ttttttccccccgtggtttgtagttttagcatttttatagcttcctgtgttgtctcatctctcctgatggtcaggtttgaataatagtcgttataatataygtgccatagtgcatccgtagcacttaaaaagaagaaacccaagagttcccgttcagggccaaagaaactaattcaacaaaaacctgacagaattagacat

SEQ ID NO: 271703 - DNA, 201 bp, Homo sapiens
tatatatttaaaacttttattcctaatatgtctttgattggtataagttaatatgtttattttgcttctaactgggagaaaaaactattttaaaacttgtyaatccataaattattttcctttatattgagatacaacatataataaatgtccagttgagtcgattttaacattgtaatcatcacccatattgagccgtag

SEQ ID NO: 271704 - DNA, 201 bp, Homo sapiens
attagccaggcgtggtggtagccgcctgttgtcccagctgctggggaggctgaggcaggataattgcttgaacctgggaggcagaggttgcagtgagccgygattgtgccactgcactccagcttgggtgacagagccagactgtctcaaaagaaaaaaagcaaaaaagaaaaaacagaaaagaaacctcagagatctgtc

SEQ ID NO: 271705 - DNA, 201 bp, Homo sapiens
actcttaaaaatttaagggatccgttttcttatgtaagagattagtcaatgagtcaacctttgccttttaacacagccagataaggactttggatacttayaagcaggcaaacaggcctgtatctgtcacctgataacctgaggtatatttgtttaactctaaaatcttcttttttttaggtgtatttaaaaaacccatta

SEQ ID NO: 271706 - DNA, 201 bp, Homo sapiens
gtgatgcagtagcatcatttgttggacagtggcatctactggtagtctgtaaattttatagcctagtttgaaaggcattgttaatatatacctagcaaaargggagtagagcacaatttccagaattttataaatgaagtgaaagaatgatatgggggagagtcctttggggccaaggagagagagcacagaccggaaagt

SEQ ID NO: 271707 - DNA, 201 bp, Homo sapiens
gccgagatcatgccattgcactccagcctgggtgacaggagccaaactccgtctcaaaaaaaaaaaaaaaaaaaaaaaaattagccaggcgtggtggtagscgcctgttgtcccagctgctggggaggctgaggcaggataattgcttgaacctgggaggcagaggttgcagtgagccgcgattgtgccactgcactccag

SEQ ID NO: 271708 - DNA, 201 bp, Homo sapiens
tctctcacccactttacttttagtgcagagttcagtgatggctagcagctgtcccctgatatttgttattccaagtatccattcataggtctggggagagrttgtggcaagctttccctaaataaatcacacccttatcttctaagcttgagcagtggagggagacttttcattcgaggtgggtggctgaacatcatcatt

SEQ ID NO: 271709 - DNA, 201 bp, Homo sapiens
aatattctaatactgaacttgttgattctaatagagaaatgtttggaatgttttctttttttaaaattactttaaaaaaattttgtgaggtccttgattamtttttgtatcataagtacaggtcagtggtgcagaaaattacttccccacttctgttttgcaagagtttatttgcatatagttgatatttgaattaaaaat

SEQ ID NO: 271710 - DNA, 201 bp, Homo sapiens; identical to SEQ ID NO: 53922

SEQ ID NO: 271711 - DNA, 201 bp, Homo sapiens
ccttatgtctgtgttgtagaatcataaaattagtcagcttttgtctgactttttctggctttaacctctacctgctggaagcctttataaataccacagamttttcatcatatctgacctactcagagattagagtgcatccccttcacgtagtgaatcaattcgcaagcacctgcattggcagttttgtatcagctgctt

SEQ ID NO: 271712 - DNA, 201 bp, Homo sapiens; identical to SEQ ID NO: 53931

SEQ ID NO: 271713 - DNA, 201 bp, Homo sapiens; identical to SEQ ID NO: 53923

SEQ ID NO: 271714 - DNA, 201 bp, Homo sapiens
aaataccacagacttttcatcatatctgacctactcagagattagagtgcatccccttcacgtagtgaatcaattcgcaagcacctgcattggcagttttrtatcagctgctttcagatgctattttctgtatgtatctggagcagacttggactcttaaatcttccgtaaatgactgatgacaatggttagaatttctaa

SEQ ID NO: 271715 - DNA, 201 bp, Homo sapiens
ccaggtgatgcagtagcatcatttgttggacagtggcatctactggtagtctgtaaattttatagcctagtttgaaaggcattgttaatatatacctagcaaaaggggagtagagcacaatttccagaattttataaatgaagtgaaagaatgatatgggggagagtcctttggggccaaggagagagagcacagaccgga

SEQ ID NO: 271716 - DNA, 201 bp, Homo sapiens; identical to SEQ ID NO: 53932

SEQ ID NO: 271717 - DNA, 201 bp, Homo sapiens
aatatttaatccacgaatttgtgatttattgtgaaacatgaatgaaatttatattatctgtggaaaaaaggatttaattaattgattaatgagtaaaatargaatcacacattcacatccctataggagtcaggcaggtgttaaatgagtgacaccactgagtactagaaaaatgacagtaccagccatgtgataaatgat

SEQ ID NO: 271718 - DNA, 201 bp, Homo sapiens
atatacctagcaaaaggggagtagagcacaatttccagaattttataaatgaagtgaaagaatgatatgggggagagtcctttggggccaaggagagagakcacagaccggaaagtaatacaagtagtaagaagggtgtgtgagttgtttaaggactattaatctctctcttcaggtctgtgatacatgatatggaaccta

SEQ ID NO: 271719 - DNA, 201 bp, Homo sapiens; identical to SEQ ID NO: 53933

SEQ ID NO: 271720 - DNA, 201 bp, Homo sapiens
aaatagtgatggcatgattaattgtttaatgtctgtcttccttgccagattattttcccaacgaaaacaggcaccaggtctatcttaatcatagctgtatygacactggttcttgcttatagcaataaattccttttaagtgagttatttcattcactcattgattcatttgttaactcatttatttagcattcacaagcc

SEQ ID NO: 271721 - DNA, 201 bp, Homo sapiens
gtcacatactggcctagaactctagaacagctctgcccagtagaaatacagcatgagccacatgtgtaattgaaaattttcaagtggccacagttttaaargttaaaaaaggtgaaattaattttgtatccaaaatattatgtcagcatgcaatataaaaattattaatgagatcttatattattttcttcatactaagtc

SEQ ID NO: 271722 - DNA, 201 bp, Homo sapiens
ttagaaaacattggtttaggcattctaaatcttaccattggatccaaccatcagggagaaaaaaactgtattttcagggtgcacgttcgtttggccccttraagaaaatgcttttctgaaccgctttttggtgctggggttctgccttacatggaaggcactatggagacaaacataaaaaaacaggactttctggctagg

SEQ ID NO: 271723 - DNA, 201 bp, Homo sapiens
aatccttaccaacccctaccatccccttacccatgggatccacagtcagccaggtggttaacaacttccagacacagcaatgcaccaggtgctgtggagakaaataaaagaagtgaatccaaaccccttgcccctaaaggggcatttccgtttaatagaaggtagtagtttggtttgtggaagcatgccaggatgctgaaa

SEQ ID NO: 271724 - DNA, 201 bp, Homo sapiens
acatacttaagactatgctgtacatataagacaagacctgtctgggttaaagcacgaccttatgcccaagcatttactctggtgctgaataacgcgaactrctggaatcagcctcccccaactctgcgcgccccctgcccccctgctcctatcccattcttgctctcaaatggaccacaccattctcaactcgtttataaa

SEQ ID NO: 271725 - DNA, 201 bp, Homo sapiens
ctggcacctcagggcacctggtgggaaccagacctgaacaggacaccatcccatcgcagggcacactcacacacacaacacattcataacactgggacaatttttttttttttttgagacagtcttgctctgtcacccaggctggagtgcagtggtgcaatcccggctcactgcaacctccccctcccgagtagctgggat

SEQ ID NO: 271726 - DNA, 201 bp, Homo sapiens
cgtgaacccaggaggcagagcttgcagtgagctgagatcgcgccactgcactccagcctgggcaacaatgcaagactccgtctcaaaaacaaacaagcaarcaaacaaaaacaggactttctgtactagggggctgttgttgagtgtatcagtaccgatgttactacagtattacccatcataccctttaaggtggcacca

SEQ ID NO: 271727 - DNA, 201 bp, Homo sapiens
agggtttcaccatgttggccaggctggtcttgaactcctgacctcaggcgatccacctgccttggcctcccaaagtgctgggattacaggcatgagccacygcgcctgtccctaaactatttctacacaattacctctctcttttcttctttttctctctcttcccccttctctctctttttactataaatgacatcatac

SEQ ID NO: 271728 - DNA, 201 bp, Homo sapiens
aaggtaactgagtttgagggatctaccactgctgttgcttcttgctgtcacttggtgtcaccttgaagactggttcagtgaagataatatctacctcacaraggtgttgtacaaattaaatgagcaaatacatttaaagtgcttagtatatcgatggatacatggcactaagtaggtactcaaagatttagctattacctt

SEQ ID NO: 271729 - DNA, 201 bp, Homo sapiens
gaagttttaaaattttgtgtagtcgaatgtcaatgttttcctttatggtttctttctttgcttttatgctgacacccaaaggtatttctaaaacacagatytgatcagactccgcccttgattaaaatctttctgggtttcttgagtaggaaatccagtctccttgtggtgctctaggtccagaccattgccaccccatgg

SEQ ID NO: 271730 - DNA, 201 bp, Homo sapiens
gcattgaaagagacatcagagtttgtcattggccaagctggtgtgtgtgaaatataggagatggcgtgccacgcttctgagtatggcactctttccagccragtctcctgggtgtgggtgagtctaaatgtttgaagactgccctcggttgtgaaatgttcgaagctgggcattgtgactttccaagggcatgacttggcg

SEQ ID NO: 271731 - DNA, 201 bp, Homo sapiens
agtctccttgtggtgctctaggtccagaccattgccaccccatgggcatttggggttctggccacactaagcaacttagacttagtactccttacttagcrtgctctgtttagaaaggccatcctctactagcccccatggacccactccccatctccacccacctcttcctgggcattatcaaagacccagctgagacat

SEQ ID NO: 271732 - DNA, 201 bp, Homo sapiens
gtcaaagtgattatttagtatctgatagagaataaagccctggttatttcaataaattaaactgtctgttctttcaaattgaattcggtcaaccatccaarcatgtcaagccattttcaaaagttattgctcactctctttaaacggcgtttagataagccacttagctcaaggaaccgtgcaggcagttcggatgcactc

SEQ ID NO: 271733 - DNA, 201 bp, Homo sapiens
acttcaggaactgtcatgtggaactgcttgatgtggcacctttcgtccgcccaagcccgaggactggtatcctctcacttctttgagtgtgggccctggakctaaaccgcccaggtccaaatcctgcctctatctcttcctagttgtgggaccttgaacaagatatctaaccacactgtactcgcttacctcaactgtaaa

SEQ ID NO: 271734 - DNA, 201 bp, Homo sapiens
atgttggtgggggctgtggtcatctgaaggctcgactgggctggggctcccaggtggtacacttacgtggctggccttggatgctggctatgatcatggcrctcagttgcagttgccactggggcatacaggtggcctcttcatgttgcttgggcttctcacagcatggcagctgaaaggtaatatctagagagaaagcaa

SEQ ID NO: 271735 - DNA, 201 bp, Homo sapiens
catgtcaagccattttcaaaagttattgctcactctctttaaacggcgtttagataagccacttagctcaaggaaccgtgcaggcagttcggatgcactcrctgccttcctgtgacgacaaacctggctgcagttcagagatgaaatctaatgtgttgcatgggcgtgtagacaaatcacggaacctcagaggtgacaggg

SEQ ID NO: 271736 - DNA, 201 bp, Homo sapiens
agaaaaaaagaaccagtggtgactgtaatcttctgtcactacccctgaatatcactcggttccttactatacatagtcttggacaacacgggatgtggtaygagtgtaggtttgtgggctcaggagttttggggtagtggctctcctgcctgccttacctttttgttttgctgctgcctcagattgcaaagttaacagatg

SEQ ID NO: 271737 - DNA, 201 bp, Homo sapiens
tgttttgctgctgcctcagattgcaaagttaacagatgccttctctccaatttatctttagaagcagatgttccaggagaggagcagccggatgctgcagkccttatccccgaagcagagccctgtgagcagcccaacccggagccggtccccttcccgctccccatcgcccaccttctcatggcttccactcaaaacctc

SEQ ID NO: 271738 - DNA, 201 bp, Homo sapiens
tgggtgaaattgggcacctgtacattgcctgctgccaagcagtttaagcagtaataagatggtggtgtattttgaaataatacaggtcattagagggggartgagatggaacaaagatgaactcctgatctttagaagagaaattctgcccactaacctgaggtgatgaccctgggaaattatctaagaaaatccgtgatg

SEQ ID NO: 271739 - DNA, 201 bp, Homo sapiens
cagcctatgaggtcgccataatgtatctgaaaaagaacgaatagtgaacccaagtttcctgaatccttgtcccaagtcttggtttgcttccagagccctgraggagaaggtgagggctaagaaaatctcagataactgggaggcctccagacaacattgagcttctagggtggaagggactgcaatggggagaggggatgg

SEQ ID NO: 271740 - DNA, 201 bp, Homo sapiens
accaaagaggttagggagtggccttgcagtggtatgctagtaaaggtttaacagctggtcctctagcgggaaataagccctgatttgtagcatttgccaayttctgtcgtggaagcactctatcgtggctgacttcaggctaccaacgtgacctggagttgggaagaaaggttgtaaggtgagccatgtgaacagattcca

SEQ ID NO: 271741 - DNA, 201 bp, Homo sapiens
tgggcgacaagaatgaaacttcacctcaaaaaaaaaaaaagtgtgggacaagagaagtagttcttcctctggaaatagaagcagagagagtttgttctggyattttgagctggtatcaagctaactgggtgaaattgggcacctgtacattgcctgctgccaagcagtttaagcagtaataagatggtggtgtattttgaa

SEQ ID NO: 271742 - DNA, 201 bp, Homo sapiens
gcaaatcttttagtgatcactgtatcatacttctctgaaacaaaaatatgtatataaattagagcataactaaccaaagcaccacattatatacactttgrtaaataattgttaacatagacataaatttggacagcaatgtatctcttaatgagatgaatagtatgtacctggagatgtacttatggatgaatataactg

SEQ ID NO: 271743 - DNA, 201 bp, Homo sapiens
agcccccatggacccactccccatctccacccacctcttcctgggcattatcaaagacccagctgagacatgaccacctcttctaccctcttcttcccccmcttcctcctgtgtagcacctggtccccagaagatctctgtaacggtttgtaaaatgaataacccaaaggacaagcaaagcctaagatggtaaataggaga

SEQ ID NO: 271744 - DNA, 201 bp, Homo sapiens
ttagtagataccatgactaaacttttcctatgtatttaaagatagaaagggggcatatattattaaaaagtaattggtctggaggcagataataattttaytttttgttataaagaggtagaaaataaacattatagacaatgagatgaattaggatgacctgtaaatagaataaatattttatgatataagttgataaca

SEQ ID NO: 271745 - DNA, 201 bp, Homo sapiens
tctgttctatatatgctccaatatgtcatccccgggtgtatcccatgtgcaatatgagtatatagtggtggcattttataatagaccccactcctgcgctscaccataatactcctctgaaatccttggtctcaagaaacatctgttctcttgtgacttgggcactttgtcaagcttattccagattcctgtggaaacgtt

SEQ ID NO: 271746 - DNA, 201 bp, Homo sapiens
ccccgtctctactaaaaatacaaaaattagccaagcgtggtggcacacgcctgtaatcccagctatttgggaggctgaggcaggagaattgcttgaacccrggaggcggaggttgcagtgagccgagatcacgccactgcactccagcctgggtgacagagcgagactccatctcaaaaaaaaaaaaaagaaaagaaaaaa

SEQ ID NO: 271747 - DNA, 201 bp, Homo sapiens
tgagtgtgggccctggagctaaaccgcccaggtccaaatcctgcctctatctcttcctagttgtgggaccttgaacaagatatctaaccacactgtactcrcttacctcaactgtaaaatgggatgatgttggtatcttccttgtggacgtgttttgaagatctaagaggtaatcttagttaagcagttagaacactggct

SEQ ID NO: 271748 - DNA, 201 bp, Homo sapiens
tttctttgtgtttatataccacttatatatggaatctaaagaagctgatctcatggaaacagagagtagaacagtggttaccagaggctggggaaggtagrtgacgggggacagggagaagttcatcaacgagtaccaagttacagttaggaggaataagttctggtgttctattgcacattagggtgactatggttaaca

SEQ ID NO: 271749 - DNA, 201 bp, Homo sapiens
cgacctcctgggctcaggcgatcctcccacctcagcctctcaagtagctgggactacaggcacacaccaccatgcccagctaattttaaacttttttgtaragtttccctatgttgcccagactggtctcaaactcctgggctcaagtgatcctcccacctcggcctcccaaagtgctgggattatagctatgagccacca

SEQ ID NO: 271750 - DNA, 201 bp, Homo sapiens
cagtatttctctgagactcagtggatatatttgacttcttaatcatacctgtgtagccaacaggaataaaacttcagaggaagttagtgccaaaggaaagyttgtcagactgtattccctttctttttctcccttctagaccctgactgcacctgccccatttgctgatgaaaccaactgccagtgtcaagcaccccatga

SEQ ID NO: 271751 - DNA, 201 bp, Homo sapiens
catatatgtatatatatagctctcagtagcaacacacatagctcatgccccagcctgaggctgcaggaaggtttggaaggtcgaaatcaaggactctttamccagttttgcaatattccaggtgtttcaaaaacttccgaaacacaggccaggcacagtggctcatgcatgtaatcccagcactttggaaggccgaggcga

SEQ ID NO: 271752 - DNA, 201 bp, Homo sapiens
cctgtgtagccaacaggaataaaacttcagaggaagttagtgccaaaggaaagtttgtcagactgtattccctttctttttctcccttctagaccctgackgcacctgccccatttgctgatgaaaccaactgccagtgtcaagcaccccatgaaaaactgaccattgctcaggcccgcttaggaacaccaggtgaggctg

SEQ ID NO: 271753 - DNA, 201 bp, Homo sapiens
cagccccaaagagagtctagtgagcacttgaacgaaacaccttatgtctaggaccagtccagccctagtcaggtaatctgtgaattaaaatccgtggcccscaattgtgtactatgcctggcctcacagtcagacaggttgtgggctgaggaaatggatggcattggttaggtagcaagagtacctcagaataaccctgct

SEQ ID NO: 271754 - DNA, 201 bp, Homo sapiens
ttttactggttgcaagacagagagagaagaagtaggagtttgccctgcatctgtgcccatcgtgccctgattttcccctggtttttcatgacacgcaagtkttgggataaggcacaacagtctttggggactgaggacatgatctgaatcttaaaactgagaggaaatgtagagggtctccttgcctaaaatctgaacaac

SEQ ID NO: 271755 - DNA, 201 bp, Homo sapiens
gagtctcgctctgttgcccaggctggagtgcaatggcatgatctcgcctcactgcaacctccgcctcctgggttcaagtgattctcctgcctcagcctccygagtagctaggattacagacacccgccaccatgcccaggtaatttttgtatttttagtagagacagggtttcaccatgttagccaggttgctctcgaact

SEQ ID NO: 271756 - DNA, 201 bp, Homo sapiens
ttctgttggctaaaatagtgtgttccctggtttgatcttaagtttgttatgtttttgctctgctttgatgtcttcagaagaacccctttaaaatcaatttygtgcactgatatgaaactgatggtatgtagagattgtgtcttatccagaaagtttcttacgactgatagaaggtaactgggattcctcattctgcagttc

SEQ ID NO: 271757 - DNA, 201 bp, Homo sapiens
ccatgtgcaatatgagtatatagtggtggcattttataatagaccccactcctgcgctccaccataatactcctctgaaatccttggtctcaagaaacatytgttctcttgtgacttgggcactttgtcaagcttattccagattcctgtggaaacgttttatcccaaccaggaaattagtattttgttctcgtggcctcc

SEQ ID NO: 271758 - DNA, 201 bp, Homo sapiens
ttaccctttccacagggaccttttcaacggactatacttgcaaatatccctgtcactctaaaatgtccaagtccaaagaaaacttgtcatcatctgccatrtgcgtagcaggacatgacccattacatagcttgagaagataaccagtctttttaatctgtttggtagtcatgttccactgggaatatgttgacaaaatgc

SEQ ID NO: 271759 - DNA, 201 bp, Homo sapiens
ccagaacatccagtcttccttgtgcaggattctcaccagtcaagacaacagtgtgaggcaagcagagaagacatggtgacatgttagttttttgatttgtrtatcttaaggaggctttccataaaagcacagatgattcagtactcagggaaattaatatgggcagaagtttggagccaagaaataaagcagaagagaagg

SEQ ID NO: 271760 - DNA, 201 bp, Homo sapiens
tagagcattcaactgcagatcgaagtggctgtaccattttgcattcccaccagcaataaatgagagatcctattgcgtcatgtccttgccagcatttggtkgtatcaatgttttggacttttgtcattctaataggtgtatagtaggttgttttaattttcaatttcctagtgacatatgatattgaacatttttcatgtg

SEQ ID NO: 271761 - DNA, 201 bp, Homo sapiens
gcaagagcccttatgcaagcaaaaacactgtttcccaacagctacttgttggtaggaggtaagaagtgcattttctttttgtctagaaaactcttttattrtatgctttctgaaaagagcccctttcagagttccatcagtaaaaatctcacattgttaatgcttccaattcagcccatactggctcgcttgttcactgcc

SEQ ID NO: 271762 - DNA, 201 bp, Homo sapiens
ttccccccttcaaatctgcagacatgcacatccatcccagtggtgacatcactcttctctctcttcaacagattgactttgtggctcatgatgacattccktattcctctgctggctctgatgatgtttacaagcacataaaggaagcaggtgaggcattcccctgtgctcacctgtcaaccacatcacaataatcaggtg

SEQ ID NO: 271763 - DNA, 201 bp, Homo sapiens
ctcttcaacagattgactttgtggctcatgatgacattccgtattcctctgctggctctgatgatgtttacaagcacataaaggaagcaggtgaggcattyccctgtgctcacctgtcaaccacatcacaataatcaggtgcaataagagacatctgtctgccctgggacatctgcagtgtatacaaacagggagttacaa

SEQ ID NO: 271764 - DNA, 201 bp, Homo sapiens
tttctaaaggggtctctttcctgcccctgcccctggtatttgaacctgagtcagagcaagggacagaccgcactcctgttctctcatttctgctgtccgcytcccaatccctctctgcactcctcccctcaactcccagaggtgcttttcttcttcctggagagcagaaaactgccccttaattaatttcatgccttccca

SEQ ID NO: 271765 - DNA, 201 bp, Homo sapiens
gtggctcatgatgacattccgtattcctctgctggctctgatgatgtttacaagcacataaaggaagcaggtgaggcattcccctgtgctcacctgtcaascacatcacaataatcaggtgcaataagagacatctgtctgccctgggacatctgcagtgtatacaaacagggagttacaactttaggtgtcccccaggcg

SEQ ID NO: 271766 - DNA, 201 bp, Homo sapiens
ccacatcacaataatcaggtgcaataagagacatctgtctgccctgggacatctgcagtgtatacaaacagggagttacaactttaggtgtcccccaggcrgcttctacaagccactgttagcatgtgctaaggctcagttatggcacagataccatttaggtatttatataggaatgaacctgagcaccaaagtgctcaa

SEQ ID NO: 271767 - DNA, 201 bp, Homo sapiens
gagtgagtctctgtctcaaaaaaaaaaaaaataataataatataaaataaaataacatggcataactctatggtttctagttgccattgcagaaaacaaamaaaaaaaaaaacaaacaaaccaaacttaagagaatccatggaatgaagaacagtttgcttaacaataataatggatacttattaagtacttactatgtat

SEQ ID NO: 271768 - DNA, 201 bp, Homo sapiens
gcatttttacataattatgtcatttaatccagtgattctcaactggggtgagtttgccctgaggaacatttggcaatgtcttgagacatttggggttgtcwcagctagaggggtgctaccggcttctagtgggtaaaagctaagcatgtgccaatgcacaggacaactcccgacaccaaagaattctccagtcccgaatgt

SEQ ID NO: 271769 - DNA, 201 bp, Homo sapiens
tggggtcttcattcaggactgccacacccaaggatgaagccatttgccttttccattgagctcctcagttactcctgcctacgtgttccagctgggctgactctgccggctcaggcacctagactccactctgggtcaagagaactcctcagtgctctgtttttgtctcttctgttggctaaaatagtgtgttccctggtt

SEQ ID NO: 271770 - DNA, 201 bp, Homo sapiens; identical to SEQ ID NO: 53937

SEQ ID NO: 271771 - DNA, 201 bp, Homo sapiens
ggggtcttcattcaggactgccacacccaaggatgaagccatttgccttttccattgagctcctcagttactcctgcctacgtgttccagctgggctgactctgccggctcaggcacctagactccactctgggtcaagagaactcctcagtgctctgtttttgtctcttctgttggctaaaatagtgtgttccctggttt

SEQ ID NO: 271772 - DNA, 201 bp, Homo sapiens
ccatcaagtcttacacctctactgggggaaaaaagtactggtaagagactacataactgttttttaaagaattttgttaccttctgcaattaaaaaccackttgtttgtttgtttgtttgagacggaatctcactctgtcgcccaactggagtgcagtggtgcaatcttgactcactgcaacctctgcctcctgggttcaa

SEQ ID NO: 271773 - DNA, 201 bp, Homo sapiens
ttatacgaagaagagtatgatttttaaaaggcatgttattccttctctaaatattggcacacgtgtgtgtgtgagtgtgtgtgtgtgtgtgtgtgtgtgtrtatatatatcaaattctagtgtttgccttttgggaataatcaaataaatatgaaaaacagaaatagttatctttagtagataccatgactaaacttttcc

SEQ ID NO: 271774 - DNA, 201 bp, Homo sapiens
tcatttttctactaagcttttcaccttcttctttttgatttataagctctgtctatataccgagatctatcatttgtaggtaaactttgcaaaaaattccmctattttttgccttttatcttatttcatggtgttttttttttttttgaggtacagaagttttaaaattttgtgtagtcgaatgtcaatgttttcctttat

SEQ ID NO: 271775 - DNA, 201 bp, Homo sapiens
ttacttcccctagggaagacagaaagaaggggagaagaagcggggggatgggtggagggtagaggggagaaaaatacgtgacaaagaaaacattctctgcytgggaggagactctctgagggtgtagagctagagggagcattcactggccatgccagtagttaccactgatgctgagtcagaaacaggtatcccaaaatc

SEQ ID NO: 271776 - DNA, 201 bp, Homo sapiens
tagtttcttccattcttttaggtttgttctctcactacccctccaacccaatttgcctaatgctaaacccttatggaagaaataaacctaaatcaaatatrataggtagcttctgtgttttattttgatgatttagcatatagaaatcaaaagagtgcatgtatatgtcctcaatcaggcagtgaggaagatttaaagtat

SEQ ID NO: 271777 - DNA, 201 bp, Homo sapiens
tattcattatataaccattagaaagtaaagaagggactgaaaatcactcgcagtctcatcatccagagcagtctctctgttagcatttcgggttatcactyccatctgtttcccatctccgtatatgtacattccttctacaaacttgagatcatgcagaacatagtgttctaaaatcattttggctttgcagttgctcat

SEQ ID NO: 271778 - DNA, 201 bp, Homo sapiens
ttgctaatgatcttactttaataactaaggcacatgctaactacttaataaaaaagtttgttgatgaagagagtgagcagcaagtgaaaacatgaaattarcatttctttctctggtttttagtagtttctgttgatcttgtagctttgctagtgtcttcatatttcaaattgtataaattctgcatttctcccagcaccc

SEQ ID NO: 271779 - DNA, 201 bp, Homo sapiens; identical to SEQ ID NO: 53939

SEQ ID NO: 271780 - DNA, 201 bp, Homo sapiens
ttcttaataagagttaataagggttcaaaggaggcttagaacaacttcctaaaaagcacaaatacagaggaagttatattagagccctgtgggcttttttyccctatgcttctatttttaaaaatgttttctcttagggcagtttaatagtaactgtgccctagcactttagccacttactgaatgacatacacagtgcag

SEQ ID NO: 271781 - DNA, 201 bp, Homo sapiens
taagcttgctacttggggttaaagtccagcaatgggtcaggctgtagtcccaaaactcttacatctttagctggtgccccacacaaagcttctcagtgacygttagggaaataaatgcaggaaaataattatcccatcagatcactggggggaagaatgaaaaggaaaaaaaagcaaggaaggtagaaacaaactaagtca

SEQ ID NO: 271782 - DNA, 201 bp, Homo sapiens
caggaaaataattatcccatcagatcactggggggaagaatgaaaaggaaaaaaaagcaaggaaggtagaaacaaactaagtcattgcaagctaggcctaytttcttccaataatctcccaggtaacagcctctaccttgctaggatctgattacccgttgctggcctcagaccatagcattattgttttaacattcctac

SEQ ID NO: 271783 - DNA, 201 bp, Homo sapiens
ctctgagggtcaggaaccaggaagcagcccagctggatggttctgactcggtctttcatgaagttgcagttaagacgtcagctggtggccaggcacagtarttcacgcctgtaatcccagtactttgggaggccgaagcaggtgaatcacctgaggtcaagagttcaagaccagcctggccaacgtggtgaaaccccatct

SEQ ID NO: 271784 - DNA, 201 bp, Homo sapiens
gcaaggcccggacctgagaagaagcattcaagaaactgcaaggccggggagctgggatacactaggagactggtcagggaggcaaggagtgggcagaggcrtaggtcttgtcagccactggaggactttggttttactctgaatgagacaggaagggttctgaatttgggaatgacacagactgacaagcttcaacaggct

SEQ ID NO: 271785 - DNA, 201 bp, Homo sapiens
cacaaggcagggagtgttgagagtctaggctctgtaacttcatataagccgggcaacaaaatgtcaggaaatgtcggaaaatgtcaggtttgagtggcacyggaacaagtggctgaacataattcagtcaaagtgattatttagtatctgatagagaataaagccctggttatttcaataaattaaactgtctgttctttc

SEQ ID NO: 271786 - DNA, 201 bp, Homo sapiens
cacttcagcctcccaaagtgttgggattataggcatgagccatcgcacccagactggctcacacttcaacgcccttagagcagtgcctggcacctgtgtcrggcaccgtgtaagggttagttgttattgatttggccagaactgaagcatgggcccttttctctccttgagtttcatcttgcttacccaagggccaaacca

SEQ ID NO: 271787 - DNA, 201 bp, Homo sapiens
gttgggggcaggcagtgctattggtgatgcgcctgtggccttaatagttccttaccaatgtcattattgtaacacctgcccttccgcctgatctccttgcrtgggttacatgagttctttcttcctactgtgatgcttttttatgataaaagtaatatatattcattatataaccattagaaagtaaagaagggactgaaa

SEQ ID NO: 271788 - DNA, 201 bp, Homo sapiens
ttttcaccttcttctttttgatttataagctctgtctatataccgagatctatcatttgtaggtaaactttgcaaaaaattccactattttttgccttttwtcttatttcatggtgttttttttttttttgaggtacagaagttttaaaattttgtgtagtcgaatgtcaatgttttcctttatggtttctttctttgctt

SEQ ID NO: 271789 - DNA, 201 bp, Homo sapiens
gctggaataacaggcatgagccaccgcacccggccgatgttaagtacttcttaaaagggaaaacttcataggagagaaatagaaaactactttcgtatggwcaggactataaatgggattattttcttgagggaaaacattataaatggaaacctcttaatacagtgagagactgaatttaaatacctttactcttggaaa

SEQ ID NO: 271790 - DNA, 201 bp, Homo sapiens
gtaaactttgcaaaaaattccactattttttgccttttatcttatttcatggtgttttttttttttttgaggtacagaagttttaaaattttgtgtagtcraatgtcaatgttttcctttatggtttctttctttgcttttatgctgacacccaaaggtatttctaaaacacagatttgatcagactccgcccttgattaa

SEQ ID NO: 271791 - DNA, 201 bp, Homo sapiens
tgtggctggcatatttcacttagcatgatgtcttcagggttcatccatgttgtagcatgtgtcagaattttctttcttttgaaggctgaatgatattccaytttatgtgtacatcacatcttttttatccattgttccattgatggatgtttgggttgatgtgaacattggtgtttgagttctgctttcaattcttttggg

SEQ ID NO: 271792 - DNA, 201 bp, Homo sapiens
cctgctcccagccccacttgctatcctctcgccctctttttctcacagaccacagatccatctgacataccatattttgtttattgtgtgattcctcctcrtatctgtgagggtatgaggtcaggggttttgttttctgccacccctccagtccgtaggtcatgactacttgcctggctagtcagagacactcagttaaat

SEQ ID NO: 271793 - DNA, 201 bp, Homo sapiens
catcagatttttaaaaaagaaatagctcatgaggcatttgcaacttctcctctctagacttctttctagttttcctctgttgtgtcactgcgatgtgtccmgggacaaagccataagtagagcatacatacttaagactatgctgtacatataagacaagacctgtctgggttaaagcacgaccttatgcccaagcattta

SEQ ID NO: 271794 - DNA, 201 bp, Homo sapiens
gaacattcaaaaagtcttagattggttttgaaatcatattgcatggcccataaagaattcctgtttatggggtcaaaaactaatatagtcaataaatcaayacatagttattatggccctactacctgtccctcctgcccaccttcccccccacctctgggcataatgggtgatttaaagacaggcagagctcttgactca

SEQ ID NO: 271795 - DNA, 201 bp, Homo sapiens
tttatcatagaggtttttgttttattgttattgcattatggcctggctttgggcttctagtgatgttagtgatgtgttaaatataaaaattataaataaavcatatgaagaccttaattgctttatacttagccttcggattggcttttcaaagtactcatcccttaaatggaaatgttatagtctccacaggtaaaatta

SEQ ID NO: 271796 - DNA, 201 bp, Homo sapiens
gttgtgttactcttccgttgtccttgtaatgaactcccacagatgtagaggcttaaataatgcaaatttattatctgacaattttggaggtcagaaacctraaatgagtcttcccgggtgttagggtttgaattgtgtctcctctttcttctcctgagtctctgttgcctcatctgtgaggtgaggatagtactactcacc

SEQ ID NO: 271797 - DNA, 201 bp, Homo sapiens
tgagatttggaggggacaaacatccaaaccatttcatcttttaaaagaaaaaaaaagtgaatatttgaacacatatacattcaactaaattagatgggttwttttgtgtgtttttttgtatgtttgtttgtttttggctgtgaatagtaggagaatcatggactaatatcacatttgtgcaaaaagagtcagagtaaaact

SEQ ID NO: 271798 - DNA, 201 bp, Homo sapiens
catgagatttggaggggacaaacatccaaaccatttcatcttttaaaagaaaaaaaaagtgaatatttgaacacatatacattcaactaaattagatgggkttttttgtgtgtttttttgtatgtttgtttgtttttggctgtgaatagtaggagaatcatggactaatatcacatttgtgcaaaaagagtcagagtaaaa

SEQ ID NO: 271799 - DNA, 201 bp, Homo sapiens
gaggatcacttgaacccaggagtttgaaactagcctgggcaacatagtgagaccttgtatctatttaaaaaaagatatacacacacacacacacgcacacmtgcacacatacatatacatatatacattaatgacttggcatttatagtgcttaataaattagagttctattaatagaatgtttggactagggctacagga

SEQ ID NO: 271800 - DNA, 201 bp, Homo sapiens
aggctggaggatcacttgaacccaggagtttgaaactagcctgggcaacatagtgagaccttgtatctatttaaaaaaagatatacacacacacacacacrcacacatgcacacatacatatacatatatacattaatgacttggcatttatagtgcttaataaattagagttctattaatagaatgtttggactagggct

SEQ ID NO: 271801 - DNA, 201 bp, Homo sapiens
aatctcccaatcctaaacaaggaacgtctgtgttattttcccacagaagaaactcttctcgccctttttcctatttttcattcattcattcattcattcatttactcattcattccttcacttaaacttttttttttgtatccactgtatgcccaggactgcacgaggcactgagtacttagaaatagtctcctgccaaaa

SEQ ID NO: 271802 - DNA, 201 bp, Homo sapiens
gagtgcagtgacagcctgaggaactccctggctatagaacaataaatgatggagaagagaaccagtcagctccccttgattaagggcagaggcacaaaccrcatagcagacttgcatctggtgatggcactttaccttgcattcattaccgataagcagagcattaagcacagattttaatcttgtttaactccttcggaa

SEQ ID NO: 271803 - DNA, 201 bp, Homo sapiens
tatcttctgatttagccacatattattctatcttttcactgcatggatgtctcacacactaacaggtgaaagtggagatacaacaaattcaccctggattrttttaatgcaactgttaataagcttaaatgtacagttggtacacagtttaataataggtaatacatgttaatgcaacttgttgattaaaatgaaagggaa

SEQ ID NO: 271804 - DNA, 201 bp, Homo sapiens
aaatctcccaatcctaaacaaggaacgtctgtgttattttcccacagaagaaactcttctcgccctttttcctatttttcattcattcattcattcattcatttactcattcattccttcacttaaacttttttttttgtatccactgtatgcccaggactgcacgaggcactgagtacttagaaatagtctcctgccaaa

SEQ ID NO: 271805 - DNA, 201 bp, Homo sapiens
gggtttggacgtaagataggatgaggaggagagcgtactatggcagtcatcttcgttgcaatgtttcccttgattttttgctcacatttgctcaggtagtrtaacaaacttttagttacattagaagtttgagtagtgtgctacagttttaaaaaatgggtttgtgtgtacctatgtgtatataaaatgtttacatgaaaa

SEQ ID NO: 271806 - DNA, 201 bp, Homo sapiens
taaatctcccaatcctaaacaaggaacgtctgtgttattttcccacagaagaaactcttctcgccctttttcctatttttcattcattcattcattcattcatttactcattcattccttcacttaaacttttttttttgtatccactgtatgcccaggactgcacgaggcactgagtacttagaaatagtctcctgccaa

SEQ ID NO: 271807 - DNA, 201 bp, Homo sapiens
ggtgatgagaagagtaggtgcaaaggtcccaaggtgggaaggctttgcggacactggagaattagaggaaggccagggaaactgcagctctgtgagtgagkgggggatgagtgaggtgggaggtgaagctcagagcttgcctggggccacgtgaagctgggcctcattggccatggaaaagcattttcacattacctaaag

SEQ ID NO: 271808 - DNA, 201 bp, Homo sapiens
atggctgggaggttgaataatagagaactagaacgtgtccattggtttcagcaaacgtggaggctgctggatccagaagggaaaagttagcgggaaggagrgtgtgttagctgctggccaaagggaaacagactcttgatggacatttaattcctgagtggttaccttgaactcatttttatctgtctcggaatatttgat

SEQ ID NO: 271809 - DNA, 201 bp, Homo sapiens
aacatgttataaagaacttcatccgtgagatcagacttcaaagcacagaaatggaaaatttggccattgcggtgaagaggtattgaagtccttcctttatwagtggcctgtgggtgctttaacttgctctctgacctgggtggcaaatggactgaactgcattgtcacactatgatataggtggacttcctgagcctgagg

SEQ ID NO: 271810 - DNA, 201 bp, Homo sapiens
ttgaactcatttttatctgtctcggaatatttgataaagaacatttggtagcatgtgttttgactgttggaaataaaaaccttcaaacatgaaatattctrtttttttaatgtaaagtaaaagtcctccaactaggaacttttcctggagtaactatgcttaaaccattttctttgtaagtactggaactctgaattcagt

SEQ ID NO: 271811 - DNA, 201 bp, Homo sapiens
cttgtatctatttaaaaaaagatatacacacacacacacacgcacacatgcacacatacatatacatatatacattaatgacttggcatttatagtgcttrataaattagagttctattaatagaatgtttggactagggctacaggataaactgttgccctcacttaagagaatcaggaaatggactttgggagtcctgc

SEQ ID NO: 271812 - DNA, 201 bp, Homo sapiens
ctttactggtattcatgattctgtagtatattaataaatcatttggagattttagaatgacaagcaaatccttatcttttgtagaagctatggtgagttayctatgtatgcaatatgttgtctttgttgatcgccatagaatcatgtaatttaatttatttttggaactcacatatatgttattaacaaatataaataata

SEQ ID NO: 271813 - DNA, 201 bp, Homo sapiens
tgtggcagggttggcagatgccctgtattcacactcaagagtcttcgaacatttccctctttgacatcagtccaggagagagagtcacctccccctacaasactggaaatcatttttgtttaaagcaaaaacagtgctaaccttgaatgtgacctagcacattttttccttttgcattaggctgttttgtgcatctctata

SEQ ID NO: 271814 - DNA, 201 bp, Homo sapiens
aactgaagtaggagatctgcaggtgaccattaaaaagctaagaaaggtaggcatgtggcagctggacttgtaggaacagcctcagcatctcagggtatctragccattaacaaccaaaaacatttggaatcctattgaagtggcagatagatcagatttcagatttgttttgagactgagtcttgctctgtcacccaggct

SEQ ID NO: 271815 - DNA, 201 bp, Homo sapiens
acagcttgctgagttttcagatggaatgcttgaataaatcagaatgcaggtgaagaaacagaacattttactacattgcagaagcccagggtccccccccmccaatcactgcagacccctctttccagagaagttattgtcctttgcttctgttttgatgttacatacataggttcatacaatgcatttggcttctttcag

SEQ ID NO: 271816 - DNA, 201 bp, Homo sapiens
cctggtttgcaaaagaattttgataactaggttatttcagctgcataatggataggttatagttattttaaaaagctttagacaagtaaagaaataagatragcttcttgcgaatcatttatcatagaggtttttgttttattgttattgcattatggcctggctttgggcttctagtgatgttagtgatgtgttaaatat

SEQ ID NO: 271817 - DNA, 201 bp, Homo sapiens
ttattggcttttgcttcatctaaagaaggcttgaaagtaaaaagccaatggaattatttacatcgtgctctccactctcacattccttttcaggagttgayttccaaatgaaaaccctcattgtggatggagaacgaacagttctgcagctctgggatacagctggtcaggagaggcaagtgcattccgcagcgctatggg

SEQ ID NO: 271818 - DNA, 201 bp, Homo sapiens
tgttcttcatactcaaaattctataattataacatactttataattatatgcataattacatgtataattataaaatgtattataactttaaaatgcttayattctcgcacatctccttcatttacctatgactcctgtgagaagaggatctttaagcttcttttgagctgatgttcagttgagacagagagtgccctttg

SEQ ID NO: 271819 - DNA, 201 bp, Homo sapiens
tataaaatgtattataactttaaaatgcttatattctcgcacatctccttcatttacctatgactcctgtgagaagaggatctttaagcttcttttgagcygatgttcagttgagacagagagtgccctttgctaacatgagaggcagcatttttgagtgcagtgacagcctgaggaactccctggctatagaacaataaa

SEQ ID NO: 271820 - DNA, 201 bp, Homo sapiens
agaaaatgaatatcaatttgaaccttatatctaattttcaaaagttattaggccatgcatactatgcttacattacagaattgaacagacgaatcttctgyttatgctagagccacaaattcactgagtcactgccctgacttatttctgtggcttcccaaatctttaaaggaatgtctacaagaagagatgcagcgactg

SEQ ID NO: 271821 - DNA, 201 bp, Homo sapiens
agagttttataaataatgcaataatatattggcaatatattttcattgttattgttattaatagtatatattaacaataaataaatattaaaatatattamcaatatattttattgttattgttattaacagtatattaacacacacacgcacacatgcacacacgtagctagctatatagattgagttatgatataaaat

SEQ ID NO: 271822 - DNA, 201 bp, Homo sapiens
tatgcctctataaagaaaaatggccctgagcactcagctttctctgagttctgtaccgtgagtttttttttttttttttgagacagagtcttgccctgtcrcccaggctgaagtgcagtggtgcaatctcggctcactgcaagctctgcttcctgggttcatgccattcttctgcctcagcctcctgagtagctgggacta

SEQ ID NO: 271823 - DNA, 201 bp, Homo sapiens
aaaattctataattataacatactttataattatatgcataattacatgtataattataaaatgtattataactttaaaatgcttatattctcgcacatckccttcatttacctatgactcctgtgagaagaggatctttaagcttcttttgagctgatgttcagttgagacagagagtgccctttgctaacatgagaggc

SEQ ID NO: 271824 - DNA, 201 bp, Homo sapiens
tccagtgtgtctttattatgcctctataaagaaaaatggccctgagcactcagctttctctgagttctgtaccgtgagtttttttttttttttttgagacrgagtcttgccctgtcacccaggctgaagtgcagtggtgcaatctcggctcactgcaagctctgcttcctgggttcatgccattcttctgcctcagcctcc

SEQ ID NO: 271825 - DNA, 201 bp, Homo sapiens
agtgtgtttgtggagtcgcagaaggagaggaggctgctgaggccacagaggcccagagcaggagcacgggaaagatagaaaactgtggccaaggacactcrtctttgaaaaaggtgggaaagggtctgggagggtaggtatacgtgaggcaggacttgacacctaattctcactcaaacataaaatacaattttacaggga

SEQ ID NO: 271826 - DNA, 201 bp, Homo sapiens
gatatgtccagtgtgtctttattatgcctctataaagaaaaatggccctgagcactcagctttctctgagttctgtaccgtgagtttttttttttttttttgagacagagtcttgccctgtcacccaggctgaagtgcagtggtgcaatctcggctcactgcaagctctgcttcctgggttcatgccattcttctgcctca

SEQ ID NO: 271827 - DNA, 201 bp, Homo sapiens
gagagtatatatatatttataatctcaaaacacagagcccacgtcatatatatatatatatatatatatatatatatatatatatatatatatatatgagatgagaacttcaaatttagttgggaaaaaaagcaaaaagattatagggtttaacaacagaagagctaaaaaatatcagaagtagtgccactaacgtagtca

SEQ ID NO: 271828 - DNA, 201 bp, Homo sapiens
tacctcacagctaccctttgctacccttaggtggtaggttatacccactttatggttgaagaagctgaagctggagaggtgaagtgtttggctctgagtcrtaaagcagatgtggtggaggaagcatttaaatctacccaggtcattccacttatcctgtgctgtattcatttatgactgcagaagccccagttgttttga

SEQ ID NO: 271829 - DNA, 201 bp, Homo sapiens
ggagagtatatatatatttataatctcaaaacacagagcccacgtcatatatatatatatatatatatatatatatatatatatatatatatatatatgagatgagaacttcaaatttagttgggaaaaaaagcaaaaagattatagggtttaacaacagaagagctaaaaaatatcagaagtagtgccactaacgtagtc

SEQ ID NO: 271830 - DNA, 201 bp, Homo sapiens
aaacgtgatgaggaaccaaacagttatctttccatgataccaataataattcagaattaaatgccaactatttaataatcagtggtaggtattcaatatayaatcagtgctaattcaggaaatatatttgctattgaatgaacaagtagaatgcacttatatattccagaatgtactgatttcgaaagagaaattgttctt

SEQ ID NO: 271831 - DNA, 201 bp, Homo sapiens
agagacttcttttgtcttgactgactaatgcttatgacttgatccttaatctttctttccctagtgtttgccaagtacacctgtaaacagatctgcatggwatttgagagtgcaagtgtaattgctttagatgaggccctgggtccttgatgaattcaaaatgctttcaagccttgtcactacttgtcacccttctcagca

SEQ ID NO: 271832 - DNA, 201 bp, Homo sapiens
atgtcggaggcggggcagagactcacaggagaaagcacaggatgtgagtgtgtttgtggagtcgcagaaggagaggaggctgctgaggccacagaggcccrgagcaggagcacgggaaagatagaaaactgtggccaaggacactcgtctttgaaaaaggtgggaaagggtctgggagggtaggtatacgtgaggcaggac

SEQ ID NO: 271833 - DNA, 201 bp, Homo sapiens
aactactacactcttgtgagggaacaaaaattatcttggcaccaagtaatggtgccaagtttattgagttgagaaatccacaggtatttagctgcccaggmgaggcacagaatataaatcttacgtagagggaccaggtactatcttttgctatgatgaagtattttttgttttgttgtgtttttccttttcctatcaggt

SEQ ID NO: 271834 - DNA, 201 bp, Homo sapiens
gaatgtatagaaatacatttgatttttgagattggtctcgtattctgtagcattgcttacattgtttatatgcagtgcctttttgttggtagattttgtcrttttctaggatgattatgaaatatattaataaaaacattttatttttctttccaatttgaatgaagctttttatttttcttgccttattgcactggtaag

SEQ ID NO: 271835 - DNA, 201 bp, Homo sapiens; identical to SEQ ID NO: 53952

SEQ ID NO: 271836 - DNA, 201 bp, Homo sapiens
tcatactcaaaattctataattataacatactttataattatatgcataattacatgtataattataaaatgtattataactttaaaatgcttatattctygcacatctccttcatttacctatgactcctgtgagaagaggatctttaagcttcttttgagctgatgttcagttgagacagagagtgccctttgctaaca

SEQ ID NO: 271837 - DNA, 201 bp, Homo sapiens
aacagccacagaaaactcaatacacagaactcagataaagagtggcaggggataggaggggagggatttccctgtgactggagtattcagggccgactttsagaggtgacttttgggaaagccttgactgatttgtagcatttggcttctagatagcatatatgaaaggcttagattctgatcaaagactgagattaaaat

SEQ ID NO: 271838 - DNA, 201 bp, Homo sapiens
actgcacacagcctcacaggagtctttaataaggtctacatgttaatcaagtatgagaaatattctaatgggacttgaaatcctcaagaactatataggayggaaaacataagtgtttcatttctcaatgtgtatttatctcctctgtcatttaaattgagggcataacactatggaaaaagtaaatgttaaatctcccaa

SEQ ID NO: 271839 - DNA, 201 bp, Homo sapiens
aattacccagtcttgggtatttctttatagcagtgtgaaaatggactaatacacccactgttatgacgataaaggctgaaacatgtcttatcaggggtggrtgaaacatggaattaagtaactgattaaatgttacctaatttttctgtaaatttatatatctttctattaaaattaaaaaatacacagcaggaacaacaa

SEQ ID NO: 271840 - DNA, 201 bp, Homo sapiens
aagggaggccataaatatttggttaacaacctgaactactctgcattttcttagaaaatctttcaatcccaggaagagtttctcctaggaatgcaatttcyatatagtgctgataggtcatctttcataaccattgtcccattagtaagtaaattttccatcaccagaaccacaggctttaaacattttgcagtagattca

SEQ ID NO: 271841 - DNA, 201 bp, Homo sapiens
tagcagtgtgaaaatggactaatacacccactgttatgacgataaaggctgaaacatgtcttatcaggggtgggtgaaacatggaattaagtaactgattwaatgttacctaatttttctgtaaatttatatatctttctattaaaattaaaaaatacacagcaggaacaacaacaaaatccttccttattagtcccttgc

SEQ ID NO: 271842 - DNA, 201 bp, Homo sapiens
  misc_feature (1)...(201): n = A,T,C or G
acacagcaggaacaacaacaaaatccttccttattagtcccttgctgtgcattttcactgtcctcgcaggccccatctcctattgtggggaaaaatccaancatatctcctgactgctgtcttcccttccttccgttcattctgtgattgctggtttttctttccttagttcttcatttatgtttctctttcttaaaagcc

SEQ ID NO: 271843 - DNA, 201 bp, Homo sapiens
tgatgttagtgatgtgttaaatataaaaattataaataaagcatatgaagaccttaattgctttatacttagccttcggattggcttttcaaagtactcawcccttaaatggaaatgttatagtctccacaggtaaaattaccatttgttgaagttttacaaccttgggaaatttatgtataatgcaaaacatatatgttc

SEQ ID NO: 271844 - DNA, 201 bp, Homo sapiens
tggatgatgtcatgggtgagccctgcacactgcccaccacatggtgggtgctcagcagtgctgctttgactctctctactctctagccctcctcacttggmcctccccctttgaactgaaagccaaagaactattaaactcttactctaatacagtccatttaagccatagctagcttacataggatatctttttggtgtt

SEQ ID NO: 271845 - DNA, 201 bp, Homo sapiens
ttaacaacctgaactactctgcattttcttagaaaatctttcaatcccaggaagagtttctcctaggaatgcaatttccatatagtgctgataggtcatckttcataaccattgtcccattagtaagtaaattttccatcaccagaaccacaggctttaaacattttgcagtagattcaagttcaagaggcatttaattat

SEQ ID NO: 271846 - DNA, 201 bp, Homo sapiens
tgagtagtgtgctacagttttaaaaaatgggtttgtgtgtacctatgtgtatataaaatgtttacatgaaaattacatgaactaacaaatgattacttctrtattacagcatataaataatatctcaccagggaatacaatttctagaagcagtcccaaattcattggtcattcccctcaacctctaggctatgacaggta

SEQ ID NO: 271847 - DNA, 201 bp, Homo sapiens
gaggactcttcaccaccaacctggatcactggcttgctgtttaaatgttggtaatctcagggtctctgactgtcctctctttcttttcactctctgtctgyctaatgtcttccatccacacagcttctggaaccatctctacctggtaacttccagtttttgtatttttaacccctcacgtctttttaaaattccataagc

SEQ ID NO: 271848 - DNA, 201 bp, Homo sapiens
  misc_feature (1)...(201): n = A,T,C or G
tgccttttagtcttttcattaacctaaggatggggcattatatagaggcaagcgttatggagttagtttggatccaggccctgacccttataccttcttanttaacctctctgaatttcagttttctcttctgtgaatgggaaaatgtatggctgtttttagagatactttgaggtttaaagatatcctctatataggatt

SEQ ID NO: 271849 - DNA, 201 bp, Homo sapiens
ctttcttgcgtccaaccccacattggtgtcttactgaaaacacagagtcccagctccttagcatgtggctgatagcccatcacagcctgatatggtttggytgtgtccccacccaaatctcaacttgaattgtatctctcagaattcccatgtgttgtgggaaggaccccgggggaggtaattgagtcatgggggccgatc

SEQ ID NO: 271850 - DNA, 201 bp, Homo sapiens
gccctgacttatttctgtggcttcccaaatctttaaaggaatgtctacaagaagagatgcagcgactgatgaggcccaagtggtctgaacagtaagaaagsccatgtgtcaggagacctgaatccttgtcaaaactgtacccatttttccctgaagcacctcggatagttcacatcatctttctgatttttagtttctgat

SEQ ID NO: 271851 - DNA, 201 bp, Homo sapiens
gtggtcaggtagctctcctgagcagttttccaccatgtggtgattcagggatccaagcacattctatcacgaggcttagccatattggagtttttcacttyggtgatgaggatgagggagaaagtgggagagagtgaaaagagggagaaaggtggaaaagggagaaagaaggagaaggtggaaaggagagagagagaaatt

SEQ ID NO: 271852 - DNA, 201 bp, Homo sapiens
gtatattcaaggatagtcctaaacttaaccaaagcaattcaaagtgagtttgtaagcacacaacttttatttggtctttcagctcgaagaacaatcaaaaygcgtaagtcaaaaggaagatgtggctgcattgaaaaaacaaatttatgatttatcaatggtaagaattaccttttcacttacagaaatgcacttcctgtt

SEQ ID NO: 271853 - DNA, 201 bp, Homo sapiens
gtttgttttgtttacttagaagtatatttttcttaggtttttttccctctccccaagtagaaatatacccactctgtcagctttatgactaggttatagcrgttccatcctctgaaggtcttccccacaaaacctacccctctccttcccctttcttttctacccatgctgcattgtcttctggtttcagttcccctcaat

SEQ ID NO: 271854 - DNA, 201 bp, Homo sapiens
gatgttctaggaatctagagataggtgtgtaagatgggatctttggcctgaaagagtttagacttgtgagtattctttatgccagtgagatgctcagaatrggagccttggatttcaaaccctcctacagaaatcagcttagctcatttggaactttaaggacctctcccagactgcatttgtcataagacctcttatccc

SEQ ID NO: 271855 - DNA, 201 bp, Homo sapiens
acctcctgattgaacagtggttgctgttttgatatagcaccagtgtgagcagaagattacttgaagaagcctctgatatcaagaaggaatcccaaggactrtaattccagcactttgggtagtcaaggcaggcagatggtttgagccgaggagtttgagatcagtctgggcaacatagtgagaccccatctgtacaaaaaa

SEQ ID NO: 271856 - DNA, 201 bp, Homo sapiens
aggagtttgagatcagtctgggcaacatagtgagaccccatctgtacaaaaaatacaaaaattacccaggcatgttagtatggacctctagtcccagctgsttgggaggctgaggtgggaggatcacctgagccctaggaggtcgaggctgaagtaagccgtgattgtgctactgcactccagcctgagtgacagagcgag

SEQ ID NO: 271857 - DNA, 201 bp, Homo sapiens
tatagcctaggtgtgaagtaggctttaccagctgggttggtgtaaatactctttatgatgcttacacaatgacaaaaatctcctaaagacacatttctcakaatgtatactagttgttaaggaatgcataactgtatctagttttaaaatcattttacaccaaaatggtcgaattgccaatctcattttattatgtagaag

SEQ ID NO: 271858 - DNA, 201 bp, Homo sapiens
tactgggataataaaggtacttcatgatgttgtggtgagcatttgaagagaggatgcatatacatttccttacacattaccaggaatatggtgactactcrctacgtataactatttttattacaattataaattgtattctatctgactgtcttcttttccaattgtgagatggctgtctgcatggcttttcagttactg

SEQ ID NO: 271859 - DNA, 201 bp, Homo sapiens
gatgaggaggagagcgtactatggcagtcatcttcgttgcaatgtttcccttgattttttgctcacatttgctcaggtagtgtaacaaacttttagttacmttagaagtttgagtagtgtgctacagttttaaaaaatgggtttgtgtgtacctatgtgtatataaaatgtttacatgaaaattacatgaactaacaaatg

SEQ ID NO: 271860 - DNA, 201 bp, Homo sapiens
cattcctttagcatgtattgggaaagagagggcattgtgcttgtcacagttcttgtgtgttgtgccacacggatgctccttgctgtcgtgtgctccaccargagctcccaagacgctgtgcaccctgctggtttctgcctggagcttatagatgcagcccttttaataggaggctgccctgtctacataggggcgggtgac

SEQ ID NO: 271861 - DNA, 201 bp, Homo sapiens
tagcctccttagaaaatgaatatcaatttgaaccttatatctaattttcaaaagttattaggccatgcatactatgcttacattacagaattgaacagacraatcttctgtttatgctagagccacaaattcactgagtcactgccctgacttatttctgtggcttcccaaatctttaaaggaatgtctacaagaagagat

SEQ ID NO: 271862 - DNA, 201 bp, Homo sapiens
ttcctcctttctttgcccctttttgccagataatcattgttctattttctgtcgctgtagattagtttgaagttttcagaactgtatagaagtggaatcaygcaatatatgctatttcttctctggcgttttccactcaacataattgttttgagacttatccgtgtaattaatagtttgttctttttcattgccaagtag

SEQ ID NO: 271863 - DNA, 201 bp, Homo sapiens
tagtttgttctttttcattgccaagtagtattctattacgtaggggtaccacagtgtttagccattcatctgtagaaggacatttgagttatttccagttkttggctattgcaaattaaggtgccatgaatatgcatgtacaagtctttatagaggcatatacttttattcctcttgagtaaattcctggagtggaatggg

SEQ ID NO: 271864 - DNA, 201 bp, Homo sapiens
cattttacagacaaggagactggagcggaaagctgcagagacttgcctgacctcacacagccagtgggtccagctggtggagggctgggtctcagacttgmctctgccacactcatctcacattctgtgagcttcactgtgactgtgggaccctgtgacaattgcataggctgacatgggaggcttatcttagaatccatt

SEQ ID NO: 271865 - DNA, 201 bp, Homo sapiens
aaaaaagttcatttcacaacaaaacccctttttcaaatgtttaaattatttagaacaaaatttcaaatccttatggattttatgtagtttaatgatttatraagttgcataatgttgaaaattggtgacttctagaattctcatatgtatattcaaggatagtcctaaacttaaccaaagcaattcaaagtgagtttgtaa

SEQ ID NO: 271866 - DNA, 201 bp, Homo sapiens
ttaattttggagtctataaaatttcagttttttttttttttttttttttttttttttgagatggagtcttgctctgtcaccaggctggactacagtggcaygatcttggctcactgcaacctccatctcctgggttcaagtgattctcctgcctcagcctcccaagtagctggaactatagatgcgcaccaccacgccccg

SEQ ID NO: 271867 - DNA, 201 bp, Homo sapiens
gcctcagcctcccaagtagctggaactatagatgcgcaccaccacgccccgctaaatttttgagttttaatagagacagggtttcaccgtgttggccaggrtggtctcaatctcttgacctcatgatcacccgctttggcctcccaaagtgctgggattataggcgtgagccaccgcacctggcaaaatttcagttcttat

SEQ ID NO: 271868 - DNA, 201 bp, Homo sapiens
ttatttttggaactcacatatatgttattaacaaatataaataatattttgttaaaaatgcccccacatttattattgaagtatattcaaaatatattcargatttgatacattggtttagccattcagctgatgttgagattgcagcaacctcagcccacaaaaacacaaacctgaggtggagtgtattcatccattttt

SEQ ID NO: 271869 - DNA, 201 bp, Homo sapiens
tagttcagaagaggtgaagaactgtattgaagaggtgatgctggaggtgagcctaggtagaaagatagctctgtgctgggaaaggggagagaggcagccargatggcaacatcagcaactcagagctggtggcactgctgcctgccaggcactgtcctggtccttcgcaagcattaactgatccagtccacagaacatctg

SEQ ID NO: 271870 - DNA, 201 bp, Homo sapiens
ctcctattgtggggaaaaatccaaacatatctcctgactgctgtcttcccttccttccgttcattctgtgattgctggtttttctttccttagttcttcayttatgtttctctttcttaaaagccccctgcagagttgcctttaaaattttataattggtttaatttttatttatttatttggcagagaagagcaagttag

SEQ ID NO: 271871 - DNA, 201 bp, Homo sapiens
gctcctaaaacctttggaatctccagaatgatgagtgtcttttgtatggtagtgagaaggctggtagctggggacccctagaccttcaggatgggggctgracatgattaagattaagaaagactgacgtgattagaaggttggaactttcagccccatccctgacctctggggaggagagagaagctgaagattgaggta

SEQ ID NO: 271872 - DNA, 201 bp, Homo sapiens
tggataatgacattcttgtagagttatttgtttttcttggattttctggttgatttttttggtttcttcttgcaaaaagcactaccattttcatgatatcmctgataccttaagacttatttagtctttccaatgcatgaaatttgtttagtttttctccttgaaaatattaattttggagtctataaaatttcagttttt

SEQ ID NO: 271873 - DNA, 201 bp, Homo sapiens
gattctgtagtatattaataaatcatttggagattttagaatgacaagcaaatccttatcttttgtagaagctatggtgagttatctatgtatgcaatatrttgtctttgttgatcgccatagaatcatgtaatttaatttatttttggaactcacatatatgttattaacaaatataaataatattttgttaaaaatgcc

SEQ ID NO: 271874 - DNA, 201 bp, Homo sapiens
acagatttgttacatgagtatattgcataatgctgagtgtgcctatattttcaatttagagtctagatgtttattcaggtgaattcttaattcagaacttsatgttttctttgctccttgtcaaaatacaagtaggcttaaaataaatcataaccagtaatgaagacatggaactgaagtagtttgtagtatattataatt

SEQ ID NO: 271875 - DNA, 201 bp, Homo sapiens
ctgtcaacactggcaaaatatctttactaccaaacaaaagaggtgcatctgaggtgtcattgacatttctgaaaaatgtcaccacaaagctaatagttgasgtgtatgaatcatttccaggaagcagattttatacacaagggactattatgaatacaactgtctattatgatattttcccgggcaaaaggggaaaaagaa

SEQ ID NO: 271876 - DNA, 201 bp, Homo sapiens
cttaggaaataacattctacattagatttttccctcctacctggttttctgctataaatgaaaagattattctttactggcctagagggattaaatatcamaaaaaggaaaaaaatcaaaatgtgcaatacaaatttcagagcaatcatctttaattgcagacaaagttaaaatataactttaggcatgtcattctttttc

SEQ ID NO: 271877 - DNA, 201 bp, Homo sapiens
atgtgagtgtgtttgtggagtcgcagaaggagaggaggctgctgaggccacagaggcccagagcaggagcacgggaaagatagaaaactgtggccaaggayactcgtctttgaaaaaggtgggaaagggtctgggagggtaggtatacgtgaggcaggacttgacacctaattctcactcaaacataaaatacaattttac

SEQ ID NO: 271878 - DNA, 201 bp, Homo sapiens
aacatatctcctgactgctgtcttcccttccttccgttcattctgtgattgctggtttttctttccttagttcttcatttatgtttctctttcttaaaagycccctgcagagttgcctttaaaattttataattggtttaatttttatttatttatttggcagagaagagcaagttagtaccttgtaccaaaacatcaacc

SEQ ID NO: 271879 - DNA, 201 bp, Homo sapiens
ttagtacctgggtgatgatgaaataatctgtataacagagcctcatgacacgagtttacctatgtaacaaacctgcacatgtacccctgagcttaaaataagagttaaaaaataatctgaaaaagtgtttaaacatgaaaatataggattttgcagggttttttttttttttccgaaggtgaaggaagcttaatggaggtg

SEQ ID NO: 271880 - DNA, 201 bp, Homo sapiens
cttagtacctgggtgatgatgaaataatctgtataacagagcctcatgacacgagtttacctatgtaacaaacctgcacatgtacccctgagcttaaaataagagttaaaaaataatctgaaaaagtgtttaaacatgaaaatataggattttgcagggttttttttttttttccgaaggtgaaggaagcttaatggaggt

SEQ ID NO: 271881 - DNA, 201 bp, Homo sapiens
atctcccaatcctaaacaaggaacgtctgtgttattttcccacagaagaaactcttctcgccctttttcctatttttcattcattcattcattcattcatttactcattcattccttcacttaaacttttttttttgtatccactgtatgcccaggactgcacgaggcactgagtacttagaaatagtctcctgccaaaag

SEQ ID NO: 271882 - DNA, 201 bp, Homo sapiens
ctttatcccgggaggtagtagaatgatatccccagggatttgtggagatggtggttcagcttagcattttaagttaccgtgtggagtgtttgtccttgccrtcaggctgccaaatgacattttactattctcagtacttccttccttcctgggtcttttgtctgttgaagttttggaaaacaaattatcagatacattaga

SEQ ID NO: 271883 - DNA, 201 bp, Homo sapiens
ttatcctgtgctgtattcatttatgactgcagaagccccagttgttttgaggctgtgcctgcagtaaagcgtcagcatgatgcttcctgctgtttctatcytcctgcctccattggtgaactcccagtaactaaatatcagtgattgaaaataggaagcaatttgtaatctggattgttcctagacattgaatggatctag

SEQ ID NO: 271884 - DNA, 201 bp, Homo sapiens
tctccctcacttataaaatcttcagagtttcactaatggtaagatctatagaagtcaggagttccagcctttatctgaggcacctccctccctatgaaacrtctcccagaggggtgtttccagacggtgtgtcaacatttagtggcagaaaacttacgtgtcaaatcatacattccagtcatgtttctaattgcttatttt

SEQ ID NO: 271885 - DNA, 201 bp, Homo sapiens
aggtaggcatgtggcagctggacttgtaggaacagcctcagcatctcagggtatctaagccattaacaaccaaaaacatttggaatcctattgaagtggcrgatagatcagatttcagatttgttttgagactgagtcttgctctgtcacccaggctggagtgcagtggcaagatcttggctcactgcaacctccgcctcc

SEQ ID NO: 271886 - DNA, 201 bp, Homo sapiens
ttattcagcatgtatttcctgagtcccactaaaaacaagatgctgttgtaggtacaaacgatacaccatgaagaaggctgacaatcccagcctgcactgcmcttacatcccagtggagggaaaaggtacaaaaaagaagtttagggagaggtgcggttttacgcagggtggccaggaaaaccctttctgctgaagtatttg

SEQ ID NO: 271887 - DNA, 201 bp, Homo sapiens; identical to SEQ ID NO: 53950

SEQ ID NO: 271888 - DNA, 201 bp, Homo sapiens
acaccatgaagaaggctgacaatcccagcctgcactgcacttacatcccagtggagggaaaaggtacaaaaaagaagtttagggagaggtgcggttttacrcagggtggccaggaaaaccctttctgctgaagtatttgatgttgacaaagtgacaatatggattgccactttgtcattatggtcaaaatcatagccagat

SEQ ID NO: 271889 - DNA, 201 bp, Homo sapiens
taaaaaatatttgtggttgacatgactgtatttaaaatacttataaaatattgcactgggtttcaagttagggcatgtgtgttgaggtgttctcttcccamggtgaatctcctgacccccatgtatgtaaagtcctggtatgttacagcgttccacactggtagttcctccacccacccacaatactccctaaccaccacc

SEQ ID NO: 271890 - DNA, 201 bp, Homo sapiens
gcatgtgtgttgaggtgttctcttcccaaggtgaatctcctgacccccatgtatgtaaagtcctggtatgttacagcgttccacactggtagttcctccayccacccacaatactccctaaccaccaccaccaccaaaaataagtattctctagttcgtatctccttccagcctcctctgtgtcccacatgtgggttctgg

SEQ ID NO: 271891 - DNA, 201 bp, Homo sapiens
aatctcctgacccccatgtatgtaaagtcctggtatgttacagcgttccacactggtagttcctccacccacccacaatactccctaaccaccaccaccascaaaaataagtattctctagttcgtatctccttccagcctcctctgtgtcccacatgtgggttctggtagcttgttgctgaggttgaaatttttggaaac

SEQ ID NO: 271892 - DNA, 201 bp, Homo sapiens
aaggtaaaacagccacagaaaactcaatacacagaactcagataaagagtggcaggggataggaggggagggatttccctgtgactggagtattcagggcsgactttcagaggtgacttttgggaaagccttgactgatttgtagcatttggcttctagatagcatatatgaaaggcttagattctgatcaaagactgaga

SEQ ID NO: 271893 - DNA, 201 bp, Homo sapiens
tgtatgggagctctcttctcttctcaaccttattctggtagtgatttgggatctttagatgtctcaaggtactaccgaaataccagttgatattttaaacrtgggcatagcttctgtgctttctgtggttaaataagatgatgtctttcacctaaggaacattcctgtcctctggtttcatggtaaataatttttaaaagt

SEQ ID NO: 271894 - DNA, 201 bp, Homo sapiens
atggccttagaagtgcccttgaaaacagttatagcaagttcaacagatctttggtatgccacatagttttaccatgtatttcattctttctagtggtggartattttggtgttgatgaaaataatgtaatttcttaaaggagagcctcaagtaagtccttataataatgagaagatctttccataaaataaaacgaggcag

SEQ ID NO: 271895 - DNA, 201 bp, Homo sapiens
gccgtgcagacattcagcatggctatttttatttctacagaaccatctgtggcttagtttttatacctcagtaatcctctctctctctctctctctctctstctctctctatctctgtctcagagaagtgaaaaagagaactgacaaggatgacagcagatccattaccaatctaaccgggaccaattccaaaaagtcacc

SEQ ID NO: 271896 - DNA, 201 bp, Homo sapiens
cacaacaaaacccctttttcaaatgtttaaattatttagaacaaaatttcaaatccttatggattttatgtagtttaatgatttatgaagttgcataatgktgaaaattggtgacttctagaattctcatatgtatattcaaggatagtcctaaacttaaccaaagcaattcaaagtgagtttgtaagcacacaactttta

SEQ ID NO: 271897 - DNA, 201 bp, Homo sapiens
cctgtaaattctggtgtaacttaattgaattttaaagaaaaagttttaactacagagactgactgacattccattgttctacgtccctgagggagaagtamcttaattgaattttaaagaaaaagttttaactacagagactgactgacattccattgttctacgtccctgagggagaagtacaggccaaaatgaagagca

SEQ ID NO: 271898 - DNA, 201 bp, Homo sapiens
acctttttatctcaggcaaccttcttatcattattgataaacttcaccagatctgaaacgcttagccactcacctgcctacacacttacctttgaaaactsttgtcacccaacgagcttgaagttcagcagttgggaaaatggaacctaggggctggatgagaccaatgcacgcgagggttgacttgtccaggtgagcggg

SEQ ID NO: 271899 - DNA, 201 bp, Homo sapiens
ttgctcaaaggagatgcttaatatttgcttgttaaattactaaagtacctggcagtctggatggcgtatagtagatactcaatcaatcttaggtaaatttraatttgaacatgagaaaactctttacacctgatgtaagccccaaatcaactttccaagggtactcgatcactgttgaacctcattttacctcatcacaaa

SEQ ID NO: 271900 - DNA, 201 bp, Homo sapiens
caggttgtaatttcaagttttgcagatgcgcctagttccgttcctagcatgtatagctcctgtaaagtctctggttagtcttttcacagaaggcttgagastatattactctgtgtaagaggttttatcatagttatagatttatgttgttactctaataaatattgaagagattagtgcagatgaatgagtataatcctg

SEQ ID NO: 271901 - DNA, 201 bp, Homo sapiens
cagtatggcatccccacttcctcccctccaggtacatggtaagcagagagcatcacacctgagcagcattcttactcagctcaacagcaatatctgagccygagtttcccattccaatcaccaggatgcgttttccctcaaatccatctggatgcttgtattggcggctatggaaatattggcctttgaacctctccatac

SEQ ID NO: 271902 - DNA, 201 bp, Homo sapiens
aaagggggcatctagtggcatttacactgatagagggagatggaaacaaagtcttttgcactctgtgcaaaagattgtttaagaagctgtaaggcatgcawatagagccaaggtagtttcttaatattgaatctcacaccataagtcttcctgtagggcaagacccatacaaggaactggttcttgccatctaagatttga

SEQ ID NO: 271903 - DNA, 201 bp, Homo sapiens
ttatatggaaaatcatctggtcaaaagttcccattttaaaaatgagggagccatctcccagagaagtgaaatgaatcactctaggattcatggctggttaktgacagagctaggaggtaaagtggtttcttgacttccagattttctatgatgccacaatgcgctaccaaccaactagttaatgaggattggagccgcgat

SEQ ID NO: 271904 - DNA, 201 bp, Homo sapiens
aggtagaaacaaggcctcttggctgggtgtggttgtgcatgcctgtaatcccagcactttgggaggctgaggcgggcagattgcttgagttcaggagtttkagactaccctgggcaacatggcaagaccctcatctctacaaatatatgaaaattagctgagtgtggtgtggcatgtgcctgtagtcccagctactcagga

SEQ ID NO: 271905 - DNA, 201 bp, Homo sapiens
gaaaggatgtttagtgattttcccttctttgcctgggtctgtccttgcagaaggagtttagtttttgctattcctgaccaccactatcagcagcatcatcrtgtaatgaatgtttgactctttggcagctcagctggtgtcattcctgagcaggtgcaaagaagacagtggttagaaggcctcaggaagcacctaaatatc

SEQ ID NO: 271906 - DNA, 201 bp, Homo sapiens
aaagcaaaataactctacttgttttgaggctcaaggccataattttcatggttgaaccaccgattcatctgttgttctatcatccattttacagctgttcrtggcagtacattgcggagcatagaacgaaaccgggtgtggaacactgagtcccaaggatagccatcttcagagatacggctcatgacccaggtgccatgc

SEQ ID NO: 271907 - DNA, 201 bp, Homo sapiens
gagggaatactttgggaaaggatgtttagtgattttcccttctttgcctgggtctgtccttgcagaaggagtttagtttttgctattcctgaccaccactrtcagcagcatcatcgtgtaatgaatgtttgactctttggcagctcagctggtgtcattcctgagcaggtgcaaagaagacagtggttagaaggcctcagg

SEQ ID NO: 271908 - DNA, 201 bp, Homo sapiens
ctgaaagagctagggtaagagtgattgggcatctggttcaggccttcttgagagggaatactttgggaaaggatgtttagtgattttcccttctttgcctrggtctgtccttgcagaaggagtttagtttttgctattcctgaccaccactatcagcagcatcatcgtgtaatgaatgtttgactctttggcagctcagct

SEQ ID NO: 271909 - DNA, 201 bp, Homo sapiens
cgtgaagtagtctaggatggatcttcacttggctgactgctatattagctcctcacatactgccccattacacactgttcctaaggctttgcgggtattcstagcatgaaagagcctagagctggtactctcattttccagctctgctcttctccaggctgtcacagttcctgcctcctcacttgttcttcacactgaggt

SEQ ID NO: 271910 - DNA, 201 bp, Homo sapiens
atagagtctcacagccagtttaggatctttgaacaagagagagcagaaatctggcttcgcacctatctctaaggcgagctcgtccaagtagtcaacataaktggtctgcaacgtctggctctggctttctccaaaccttagtgaagaaagtaaaaagggaatgttcacagaatgttctaagttttctagaatattaggcat

SEQ ID NO: 271911 - DNA, 201 bp, Homo sapiens
ctgcagcctcgtaaagaggtgcattccgtcatgattgttagtttcctgaggcttccccagccatgccaaactgtaagtcaattaaacctcttttctttatraattacccagtctcgggtatgtctacatagcagcgttgagaatggactaatacaatgatgcagcaccatcccatatgatcttgagtggtgcttttggatt

SEQ ID NO: 271912 - DNA, 201 bp, Homo sapiens
aaatgactaatatggtttggctgtgtgtccctacccacatctcaccttaaattataataatccccacgtgtcaagggcaggaccaggtggagataattcartcatgggggaggtttctgccatgctgttctcctaatagggagtaagttctcacgagatctgatggttttataaggggttccccagtcgctctcattcttt

SEQ ID NO: 271913 - DNA, 201 bp, Homo sapiens
ttcagggcccgagtcttgagtggcttcagtattctttgtttctgggtgaagatggcatttctggctccttcccattgcccaggcccaaccaggcgatactrataggagttgcagggtccgaaatagagtctcacagccagtttaggatctttgaacaagagagagcagaaatctggcttcgcacctatctctaaggcgagc

SEQ ID NO: 271914 - DNA, 201 bp, Homo sapiens
gtattcacagcactactgtccacctggtttccaatgccagagatctgtaagtcctcctagattcctctctatttctctgactttcccacattgaaccaatyataatgtcatgctgatttttcccttaatgatttctcacatttatggcttcctttccactttgtatctctgccctggcccaggatgcatcatattttagca

SEQ ID NO: 271915 - DNA, 201 bp, Homo sapiens
ttcaagctactatcaccaccactgtctcatcctattccctctctaaccacagagtgtaggtggcttgagaagttatggaatctgacataggcatcatatamaactgaaatgaaattaagccaaggagaagtgctctgatttggtacaattcttatctttaagtatttggttcttaacctagtatgtataagaatcgcttag

SEQ ID NO: 271916 - DNA, 201 bp, Homo sapiens
tggaaagtttgagtttatcataccaggaggctcatatctcagattgagaatacgccctcaaataaagagccatgaattcatggatgctctagaaatgtgayaagattggtaaccattgtttggcattttttaagcggtggcaaatctccaggcaagtacatgctagccagggcggctgcaggaattcatgagataatgcat

SEQ ID NO: 271917 - DNA, 201 bp, Homo sapiens
ctttccatctatttatctctctctcatttgcactctgtttctctctctctctctgtcatcccgtttccttttcccctcctgagttctctcgctcccaccamcggcagggtcaggccacggcacgggccccacccctgcgcatacattgccatctgtttctcctgtttttgtttgtttgtttgttttccgatttcccttttt

SEQ ID NO: 271918 - DNA, 201 bp, Homo sapiens
tgtctctaaatgaagcaaactataacctaatatatataaataaagcataatatatgttatatgtatgttttatatatatacattatatatgtatataaacmtatatatatatatatatatatatatatatatatatatatatatataaacctaccttgagactacattcttgtaacaagcaactgagtctcagttaactgt

SEQ ID NO: 271919 - DNA, 201 bp, Homo sapiens
acctgcctacacacttacctttgaaaactcttgtcacccaacgagcttgaagttcagcagttgggaaaatggaacctaggggctggatgagaccaatgcaygcgagggttgacttgtccaggtgagcggggaatatgtatttatacagtgagaccatattattctctactttaacgagtgaatcttcaaggaagggaaaag

SEQ ID NO: 271920 - DNA, 201 bp, Homo sapiens
ctcagggttttgagtctcgtattcacatctttttactaagaagggctcctccagactcctggtgtatatttgttggaggccttaaggtaaagatgaccagrgaagtttttccccagaggcagatggtatcctagacatagacactttcctaagaccatagaataagatttctctgtcatcacgaaagccttatttctcccc

SEQ ID NO: 271921 - DNA, 201 bp, Homo sapiens
atgtctacatagcagcgttgagaatggactaatacaatgatgcagcaccatcccatatgatcttgagtggtgcttttggattgtggtagagggtgctgtawccttatgaaggtgaatttcttttaacagagcagtgcacactcagaattttggtgagttcaggttgtaatttcaagttttgcagatgcgcctagttccgtt

SEQ ID NO: 271922 - DNA, 201 bp, Homo sapiens
ttaaggtaaagatgaccagggaagtttttccccagaggcagatggtatcctagacatagacactttcctaagaccatagaataagatttctctgtcatcaygaaagccttatttctcccctttccccctagttttctgctgtctgaatcacttccttttccttaaaggaaaatccacgggagcataatctgtgtgtggctt

SEQ ID NO: 271923 - DNA, 201 bp, Homo sapiens
aactttttagaatgttagtcttgtgagagcagccaaggttgtcaaactttttcttggcaacctttttatctcaggcaaccttcttatcattattgataaayttcaccagatctgaaacgcttagccactcacctgcctacacacttacctttgaaaactcttgtcacccaacgagcttgaagttcagcagttgggaaaatg

SEQ ID NO: 271924 - DNA, 201 bp, Homo sapiens
ttctacaaggttgccaggctgcaggagcagaaaatcagtgtcttggctgcagctgatcacaatgatgagtgctaggggtaactgtgtccagtagagagccrggtcataaatatttgtgtgaaaaggctagctgtcattgatcttttacatctccacaaggtatgacagagcaagcattaaaggtaatggtctgaggtgagt

SEQ ID NO: 271925 - DNA, 201 bp, Homo sapiens
ataggcatcatatacaactgaaatgaaattaagccaaggagaagtgctctgatttggtacaattcttatctttaagtatttggttcttaacctagtatgtrtaagaatcgcttaggaagaagataaaaatgcaactttttagcctcacacacggagtttctgattcaatcatctgggctatagcccagaaatttgcatttt

SEQ ID NO: 271926 - DNA, 201 bp, Homo sapiens
aggaggtaaagtggtttcttgacttccagattttctatgatgccacaatgcgctaccaaccaactagttaatgaggattggagccgcgattatatggctgrggttctccagtatggcatccccacttcctcccctccaggtacatggtaagcagagagcatcacacctgagcagcattcttactcagctcaacagcaatat

SEQ ID NO: 271927 - DNA, 201 bp, Homo sapiens
ggtctgtcttagatctcttatttttacaacagacagcttagttttattattagatgtaggagcaactggtgtgggatctagaactgaggctactgaagaargggaagatgggagaatcatgcatactttaaaaatacttaggggtcttttccatttatgtcaatcttcataccatagaagcaactaagggctggcctagag

SEQ ID NO: 271928 - DNA, 201 bp, Homo sapiens
ctgaaaggcaggtcgtaatctcttgaaacagttttctccaatgttagataactctgggtattagaaagttctcccctagttttgctttctggagcagcttrtaacacttctgcttcatcttcttaagtattttttaaaggcatacagaacaaatttagaagctaaactccaggacctataagatactcatattgttagatt

SEQ ID NO: 271929 - DNA, 201 bp, Homo sapiens
tccttgaaccttcacaccaaccccttcctaatttattctgatggggattctctaacttttcacagctattcaagctactatcaccaccactgtctcatccyattccctctctaaccacagagtgtaggtggcttgagaagttatggaatctgacataggcatcatatacaactgaaatgaaattaagccaaggagaagtgc

SEQ ID NO: 271930 - DNA, 201 bp, Homo sapiens
caacaacagcaagaaggcccaggattttcaacagaaaagaaactgagaaattagatgaatccttcagggcccgagtcttgagtggcttcagtattctttgyttctgggtgaagatggcatttctggctccttcccattgcccaggcccaaccaggcgatactaataggagttgcagggtccgaaatagagtctcacagcca

SEQ ID NO: 271931 - DNA, 201 bp, Homo sapiens
attgcataggtatctttcattgtaaattccttcagatgctttttagatctagctgaaatataaatcaaaaattataaataaaagtaatttggtcatatttrgcaaaaagaatgctgttttctatgtaaagggcctcccaaagtagcagatgtatgggtataaataagataaactgttagtaaattctttataaataatgaa

SEQ ID NO: 271932 - DNA, 201 bp, Homo sapiens
gaccagtatacttccttttaccaaatgttagaggttacatattgtttatttagctttttgccttagttatctgtaagactggagttagatacaagtgtcartcattataatgctttgcatctacttgaaagatacactttttttcctcaattcttatttttccaaaatgtcaaagattatcctaaatgttattgcataggt

SEQ ID NO: 271933 - DNA, 201 bp, Homo sapiens
ctctttttaactgtttataatttttgctaaagagcaggttagtgctttaagaaaaatctattgtgcttttattttaatgtccagttcacagaaaaactggwtgatacctctttaactttagccattatgtttacacacagaatttcctttacaattaacattttaaaacttgcttaaacttttaaaacaaaatatatattt

SEQ ID NO: 271934 - DNA, 201 bp, Homo sapiens
atattatatttaaagttattttatttttctaggccatctggctgataggtcctaattgcttaggtatctctttgatggtgtcctcagtgtaatttatgaakcgttgctgattgtaatagatatagtttatttagcctacttttttttatagttacttactagaacaatgtggatttaaattctgcagctaattgattttgt

SEQ ID NO: 271935 - DNA, 201 bp, Homo sapiens
ttaatggcatttatgtaaacctgaggattaaaggactcataaggagtttcctttggcctgaggtgttttgtttttacctttttagattgatgaattgctasggtgaaagggatagcgaattggattagagcacaagtactgttctaattatttggcagagtgtctaataaaggtcttctacagtactactatacatttgct

SEQ ID NO: 271936 - DNA, 201 bp, Homo sapiens
agtatggcatccccacttcctcccctccaggtacatggtaagcagagagcatcacacctgagcagcattcttactcagctcaacagcaatatctgagcctragtttcccattccaatcaccaggatgcgttttccctcaaatccatctggatgcttgtattggcggctatggaaatattggcctttgaacctctccatacc

SEQ ID NO: 271937 - DNA, 201 bp, Homo sapiens
caggaattcatgagataatgcatatgaaagcatagcttggtgtcttgctcaaaggagatgcttaatatttgcttgttaaattactaaagtacctggcagtmtggatggcgtatagtagatactcaatcaatcttaggtaaatttgaatttgaacatgagaaaactctttacacctgatgtaagccccaaatcaactttcca

SEQ ID NO: 271938 - DNA, 201 bp, Homo sapiens
agagaatttacttacctcttcctcactggttcagattttgctatatggcctgtctccctcctaccttctgaatagcttttcctgaaagttcccattgtatytttcataaccagaggccaaagcaatcaataaccaaaattagcacaaaccttgaaatagatggagataagttagtttccttggaggaaatgttcctgtggg

SEQ ID NO: 271939 - DNA, 201 bp, Homo sapiens
ccaataacaacagcaaatgaggtgagaattgaagttaaaatttctttttatctactgaacaaatgttttattactttagaaaaagggttatttattttattatttttggcaagtttattggatagggtttttaattcttgtagcacttttgttataattctgtcaggggcagtatttttaggaacaaaggtataacattaa

SEQ ID NO: 271940 - DNA, 201 bp, Homo sapiens
cagctaggtggttcttgtaagtagttagatcactgtactttgagaaacactgcttcatgtaaagaattaaaaaaaattcttacaggtcaattcttttttcmttccttttgataatgtccatcatcatagttctctctgagggcaggctacacaagcctaaggaataaaaggttggtttgaatagtaagtttgagtcaatat

SEQ ID NO: 271941 - DNA, 201 bp, Homo sapiens
taagatttctctgtcatcacgaaagccttatttctcccctttccccctagttttctgctgtctgaatcacttccttttccttaaaggaaaatccacgggascataatctgtgtgtggctttatcaaaagcttatgccctaaaaagaaatgagagcaattgttgggtttgtaggctaatgccaccatatcagaaaacaattt

SEQ ID NO: 271942 - DNA, 201 bp, Homo sapiens
accaataacaacagcaaatgaggtgagaattgaagttaaaatttctttttatctactgaacaaatgttttattactttagaaaaagggttatttattttattatttttggcaagtttattggatagggtttttaattcttgtagcacttttgttataattctgtcaggggcagtatttttaggaacaaaggtataacatta

SEQ ID NO: 271943 - DNA, 201 bp, Homo sapiens
ctataatttataatctaagctccatagcatgtcttacaaaattcctgtgtcctgtctccttcttctccaagagtaatggctcatctctctctgcctcataygtcatgctctagcaatgtcaaatagcatgtgcccttccatatgcatcattgactctatgcttttgttcaggcaatccccttttctgcccctgagaaatgc

SEQ ID NO: 271944 - DNA, 201 bp, Homo sapiens
gggttatttataataaacagaaatttatttggcttagttgtagaggctaggaaattcaagaccaaggggccagcatctgatgagggccttcttgctgtgtycacccacggcaaaggtgaaggcagaagggaaaaagagtgtgtgaggaaaagagggagccaaacttgcttttataaccaacacactcctgagataatggga

SEQ ID NO: 271945 - DNA, 201 bp, Homo sapiens
attctctactttaacgagtgaatcttcaaggaagggaaaagagaaactatatcctgttgcaaaaatgatgacatcaatgttctcctccactgttccatccycaaagatggcagaagtttctgtgagctctttcactgtagatttcaccttgatggctccacagagtagacgacttgggacatcatcatttagtacaggttc

SEQ ID NO: 271946 - DNA, 201 bp, Homo sapiens
caccaataacaacagcaaatgaggtgagaattgaagttaaaatttctttttatctactgaacaaatgttttattactttagaaaaagggttatttattttattatttttggcaagtttattggatagggtttttaattcttgtagcacttttgttataattctgtcaggggcagtatttttaggaacaaaggtataacatt

SEQ ID NO: 271947 - DNA, 201 bp, Homo sapiens
aatcagggtccctaaggatccatcagatgattttcatatgtagccatatttgggaagaactgatctataatttataatctaagctccatagcatgtcttamaaaattcctgtgtcctgtctccttcttctccaagagtaatggctcatctctctctgcctcatacgtcatgctctagcaatgtcaaatagcatgtgccctt

SEQ ID NO: 271948 - DNA, 201 bp, Homo sapiens; identical to SEQ ID NO: 53956

SEQ ID NO: 271949 - DNA, 201 bp, Homo sapiens
acaccaataacaacagcaaatgaggtgagaattgaagttaaaatttctttttatctactgaacaaatgttttattactttagaaaaagggttatttattttattatttttggcaagtttattggatagggtttttaattcttgtagcacttttgttataattctgtcaggggcagtatttttaggaacaaaggtataacat

SEQ ID NO: 271950 - DNA, 201 bp, Homo sapiens
aatgtatgtaaaaacctatatttttatgcctccttataatcctgttattaaaaatatattttatttttcttacataccttgtaaataaactgtttttcaartaattttacattcaggaggcctacttactttttaaattatacaatatttctggcataaattccttttcataacttttcttacaactttcacaatcttcaa

SEQ ID NO: 271951 - DNA, 201 bp, Homo sapiens
tacaccaataacaacagcaaatgaggtgagaattgaagttaaaatttctttttatctactgaacaaatgttttattactttagaaaaagggttatttattttattatttttggcaagtttattggatagggtttttaattcttgtagcacttttgttataattctgtcaggggcagtatttttaggaacaaaggtataaca

SEQ ID NO: 271952 - DNA, 201 bp, Homo sapiens
acatacagaagaaaaacattctgaaggatcatttgctgaggaatcttgaaccctcttgatatttttggggtacggctctgaaaataaaagggcttttcaawtatctgtaaaactctaacttaactggttgtctgtgcaaatccttattttctgacttaattctcatgtcacaaatatctcttgtcaataaataagggaaaa

SEQ ID NO: 271953 - DNA, 201 bp, Homo sapiens
gtccttccatgatgttctgtgtccacctgcattcgttcatgtgacagtattcttatttcagtcctgccatgagcaggcacagtgagtgcccggtctcctcyctgctcttgcttatgggaaggggatgctggggagcctggtggcccaactgagcttcgccggtttcccatccatccagctgccctacttgattgatggggc

SEQ ID NO: 271954 - DNA, 201 bp, Homo sapiens
ccagcccacatattcttggccttctgcagatcacttttgtagattttctcgtctatgatgtccttgacctccaccgtatatttgagcccaagtgcttggaygccttcccaaatctgaaggacttcatctcccgctttgaggtgatgcccccatcctcctttctctttgatgccccttgttccgttacctcctttcagatgt

SEQ ID NO: 271955 - DNA, 201 bp, Homo sapiens
gaaacaaggtaaaggaggagtgatatggggaatgagatctgttttgcttcacgtgttatggaggttccagcccacatattcttggccttctgcagatcacytttgtagattttctcgtctatgatgtccttgacctccaccgtatatttgagcccaagtgcttggacgccttcccaaatctgaaggacttcatctcccgct

SEQ ID NO: 271956 - DNA, 201 bp, Homo sapiens
tagggtctggcactcagtcagagtctaataaatgctgatgtatccaattgaagcctgggcactgccccagttccagcttggggaagatggctgcttgcccrtggccagcctgggccgtccacagccccggggaggccacgtctgtgcagggagcttttgtccgagggtggtgacagctgttttctgcctcaggagaaactg

SEQ ID NO: 271957 - DNA, 201 bp, Homo sapiens; identical to SEQ ID NO: 212600

SEQ ID NO: 271958 - DNA, 201 bp, Homo sapiens; identical to SEQ ID NO: 37558

SEQ ID NO: 271959 - DNA, 201 bp, Homo sapiens; identical to SEQ ID NO: 53968

SEQ ID NO: 271960 - DNA, 201 bp, Homo sapiens; identical to SEQ ID NO: 212601

SEQ ID NO: 271961 - DNA, 201 bp, Homo sapiens; identical to SEQ ID NO: 37559

SEQ ID NO: 271962 - DNA, 201 bp, Homo sapiens; identical to SEQ ID NO: 212603

SEQ ID NO: 271963 - DNA, 201 bp, Homo sapiens; identical to SEQ ID NO: 37560

SEQ ID NO: 271964 - DNA, 201 bp, Homo sapiens; identical to SEQ ID NO: 37572

SEQ ID NO: 271965 - DNA, 201 bp, Homo sapiens; identical to SEQ ID NO: 212606

SEQ ID NO: 271966 - DNA, 201 bp, Homo sapiens; identical to SEQ ID NO: 212608

SEQ ID NO: 271967 - DNA, 201 bp, Homo sapiens; identical to SEQ ID NO: 37599

SEQ ID NO: 271968 - DNA, 201 bp, Homo sapiens; identical to SEQ ID NO: 212610

SEQ ID NO: 271969 - DNA, 201 bp, Homo sapiens; identical to SEQ ID NO: 212611

SEQ ID NO: 271970 - DNA, 201 bp, Homo sapiens; identical to SEQ ID NO: 37604

SEQ ID NO: 271971 - DNA, 201 bp, Homo sapiens
tgtggcgaggccaggtagcaaaggctcctggtgggagtgggctccagccagtgtgggagccgtgggcagagcacacgaggggatatctggagccaggcgtrgaatgggggcaggggacctggcactaaggcaggtgaggccgcggcattcgctctggttaggagtcacaggcagggcaggagtcctgctgggtgggcgtcc

SEQ ID NO: 271972 - DNA, 201 bp, Homo sapiens
agcatgatgcttgactggcaggcagggaaggtggcagggctggtcccaacccacctggcaggctggcaagtggggagcaggaagcggctgcatggggcagsctgaggctgcaggggtgggccctgagggctgcctcttggtgcccgaccctgtgggtctggcatgggccagaggttccaggagaggcccctgagctctggc

SEQ ID NO: 271973 - DNA, 201 bp, Homo sapiens; identical to SEQ ID NO: 37570

SEQ ID NO: 271974 - DNA, 201 bp, Homo sapiens; identical to SEQ ID NO: 37601

SEQ ID NO: 271975 - DNA, 201 bp, Homo sapiens; identical to SEQ ID NO: 212615

SEQ ID NO: 271976 - DNA, 201 bp, Homo sapiens
catacatctgtttgcattaaccctgtttgcatgtgtgtctgagcatgcacgtgtacatgtgtatgcatgtgtgtgcatgggtatctgcatatgcatgtgcrtgttcatgcatgtgcacgtgtgtgcatgtgtacacatgtgaatctgtgggtatgtatctgagtgtgtgtgcacatgtgaatgtgtgtggctctgaggggt

SEQ ID NO: 271977 - DNA, 201 bp, Homo sapiens
ccgtgtctccctggactcctcttggtttcggcagcctcctgggtctccttgtatggggtgtcctcactgtctggatgaacactggccggatgttctgtagsatgccccttgggtgggatccctttcaccctcatgtttccttatgagtcttcagggggatgggttttgggaggaataccatggagttgacgtgaccttccc

SEQ ID NO: 271978 - DNA, 201 bp, Homo sapiens; identical to SEQ ID NO: 37573

SEQ ID NO: 271979 - DNA, 201 bp, Homo sapiens
gagcgtcgccttagaagtatgccccagtaaggactggtgtgggaagcaggtgcctcaaagttgattttgaccctgcgtgtggtgggcctcggtttcgtctytgcatgaaagaggtcggtcctgaggccccgggctgggtcctgctctgctgtctttgggctcatggccccttcctgtctcaggcttgctctgctctttacc

SEQ ID NO: 271980 - DNA, 201 bp, Homo sapiens
ttaaatcactatgagagttttcattttaaaaggacagatcttccttgacgtaattacatgacactgtgctttggcagtgaattgtgtcttactcagattcytccataaggaacatagtcaaatttcagcagtacagaaaatttaagttatttcttgaaacagaaaaaactgaacaatggtatgttgatttatacagtgatt

SEQ ID NO: 271981 - DNA, 201 bp, Homo sapiens
aaaaccccctgtttgtacttaggaagtgatgtgtgtatgtgggacaggtatgtaaactagcaaaaagaatagatattttaaaaccacagagtcaaactcckcagcttaggaggtggagtagaatcaggaggagcagttttgtgtattttatgaacttcttcatatgcttctatactatttcaattttaacagagagctggt

SEQ ID NO: 271982 - DNA, 201 bp, Homo sapiens
tttcttaaattatttaaaaaatatttttatctttatactggggaaatattggtttttcaattgacacctaattctaggtggcagccctgatacatactagkcgagctactttaggcagattacttaatcccttattcttgatttctttatctgtaaaatagagctagtaatacatattccataggatgctgtgaagattaa

SEQ ID NO: 271983 - DNA, 201 bp, Homo sapiens
agcttctgcacagcaaaagaaactaccatcagagtgaacaggcaacctacaaaatgggagaaaattttcgcaacctactcatctgacagagggctaatatscacaatctacaatgaactcaaacaaatttacaagaaaaaaacaaccccatcaaaaagtgggcaaaggatatgaacagacacttctcaaaagaagacattt

SEQ ID NO: 271984 - DNA, 201 bp, Homo sapiens; identical to SEQ ID NO: 53975

SEQ ID NO: 271985 - DNA, 201 bp, Homo sapiens
tttggtagtgattatggtaaaaacataatacagttaacttttagaagtcttttattttgtatcacttcagttttctaatattagtgggaaaattttaggtrgaattattaaacaacatgttattagtaaggtttaattattttacctccttttttaatacctaaaatgttacagaatcactcaaaacaatgttatagaaaa

SEQ ID NO: 271986 - DNA, 201 bp, Homo sapiens
ttggcaaacagaataatgtcagatgaaagttgtgttggtttctcagtggtttttcctaagcaaggaggcccagaatagctgcattaggttataaccctcarctggaaaggaaaacagtctcagctcagctgctacacaggcagaaacccttccagctctattttaagaaagtaaaagtgagcttttgcttgcagggctctc

SEQ ID NO: 271987 - DNA, 201 bp, Homo sapiens
gttagacctaaaaccataaaaaccctagaagaaaacctaggcattaccattcaggacataggcatgggcaaggacttcatgtctaaaacaccaaaagcaayggcaacaaaagccaaaattgacaaatggtatctaattaaactaaagagcttctgcacagcaaaagaaactaccatcagagtgaacaggcaacctacaaaa

SEQ ID NO: 271988 - DNA, 201 bp, Homo sapiens
taattcaagatggattaaagacttaaacgttagacctaaaaccataaaaaccctagaagaaaacctaggcattaccattcaggacataggcatgggcaagracttcatgtctaaaacaccaaaagcaacggcaacaaaagccaaaattgacaaatggtatctaattaaactaaagagcttctgcacagcaaaagaaactac

SEQ ID NO: 271989 - DNA, 201 bp, Homo sapiens
tcttgaaaattcatcactctcgctatcatgtgttcttttgccagcattcagatttctgttgaatgcagttttcagtttgtgatttttttttttttttttttgagatggagtctcgctctgtcactcaggttggagtgcagtggtgcgatcttggctcactgcaatctctgcctcctaggttcaagtgattctcctgcctca

SEQ ID NO: 271990 - DNA, 201 bp, Homo sapiens
ttcttgaaaattcatcactctcgctatcatgtgttcttttgccagcattcagatttctgttgaatgcagttttcagtttgtgatttttttttttttttttttgagatggagtctcgctctgtcactcaggttggagtgcagtggtgcgatcttggctcactgcaatctctgcctcctaggttcaagtgattctcctgcctc

SEQ ID NO: 271991 - DNA, 201 bp, Homo sapiens
ttgagtctgtcttgctaaaattttgttaaaaaacccctgtgccaatattgaaagagaaacactattgaggattgtctgaatagactttctacactgtcatctgttgttttgtgatatctgagctgagcttctttcttgaaaattcatcactctcgctatcatgtgttcttttgccagcattcagatttctgttgaatgcag

SEQ ID NO: 271992 - DNA, 201 bp, Homo sapiens
ataatcctgaaggagttggattctccagtacctggatatcagcatacaattcttacatattcctggtgtagaatctgcaaacaggtaaatagaccctattmctatattttgtttgccatttatttctttatttgtatgttttttttttttcctgaggagaaggtttcctatatggtactggattcgttatttgttatagag

SEQ ID NO: 271993 - DNA, 201 bp, Homo sapiens
tttgagtctgtcttgctaaaattttgttaaaaaacccctgtgccaatattgaaagagaaacactattgaggattgtctgaatagactttctacactgtcatctgttgttttgtgatatctgagctgagcttctttcttgaaaattcatcactctcgctatcatgtgttcttttgccagcattcagatttctgttgaatgca

SEQ ID NO: 271994 - DNA, 201 bp, Homo sapiens
gctactcaggaggctgaggcaggagaatggcctgaacctgagaggcggagcttgcagtgagctgagatcgagccactgcactccagcctgggtgacagagygagactccatctcaaaaaaaaaaaagaaaatgttattttttgaaaaagagattctcaatatgtgattaggtaaactatttttgctgaattccaggtaaca

SEQ ID NO: 271995 - DNA, 201 bp, Homo sapiens
ttttgagtctgtcttgctaaaattttgttaaaaaacccctgtgccaatattgaaagagaaacactattgaggattgtctgaatagactttctacactgtcatctgttgttttgtgatatctgagctgagcttctttcttgaaaattcatcactctcgctatcatgtgttcttttgccagcattcagatttctgttgaatgc

SEQ ID NO: 271996 - DNA, 201 bp, Homo sapiens
tctattggtccttgtattttcttctcagttattctcccattcggcttcttgaagtatgtgttccactccccaaaatattcattaagcgtcaggccccattraaagtgtcccttcttcaggatctgaaggacttctttcaaaagtaagttcagtttcttttatcatctttttttgtttatttacagctattttaaagtatca

SEQ ID NO: 271997 - DNA, 201 bp, Homo sapiens
agattgtatctccaaggaaattgacaggagaagcacctgcagttgacaaaaatatgaccccttttgaacctccctgatttcaatactttttttttttttttcttctaagagacagggtctgactctgttgcccaggctggagtgcagtggcgcgatcttggctcactgcaacctccgcctcctgggttcaagtgattctcc

SEQ ID NO: 271998 - DNA, 201 bp, Homo sapiens
aaacaaacaaaaaacaatggtatactgatgaatatatgtttttttactttagggaagtggaaattatttgaagatttaacttcaaaaaaagatatactttyactcttggtttatgtaatttgatacaatatataggttatatatatacacacacacacatatataaacatatatatacatatacacacacaggcacacaca

SEQ ID NO: 271999 - DNA, 201 bp, Homo sapiens
ctcacagactgagttagaaagtatttcctctgattctatcttcaggaaaattttgtggagaattgacataatttatttcttaaatgtttggtagaattcaycagtgaatgcatctgggcctggtgctttctgttttggaaagttaccagttattgattcaatttctttaagagaaataggtctgtttcgattttcatttct

SEQ ID NO: 272000 - DNA, 201 bp, Homo sapiens
agaactgaactgtttgatcctattgcttacctgtttgactttagagaccaagctaagttaaccctccttgattgctttttcttctgctaaatttctagcaygcatttattataggttggaccaaagggcttaaggagtcattaatgaattttggaccatttaagtgatgttcccattccaggcctgaaaaccatcaatggt

SEQ ID NO: 272001 - DNA, 201 bp, Homo sapiens
agaaacgataccaaccgtgggggttcaaatatgtgtttgtctttttaaatgcttgcctctgctatttgagacgattccatttcaacttaggttttggagtytcttgaggaggagcattatttcccaattagtgtttaccctttgcttagaatgttcccaacaaaaggatgagaatggaatgtgttggaaacttttaggact

SEQ ID NO: 272002 - DNA, 201 bp, Homo sapiens
ttcaaaaaaacagaaagctcattactaatgagggaatcagaaaaaggcttaaactgaaggacttgaactggaccttgagagatggaatcattttggatagrcagtgaggaaggtgaatcttatttaaaggtatgaagaaagatacagaggtaagaataagcatgacattttccatggccagaagtaggattttttaactgg

SEQ ID NO: 272003 - DNA, 201 bp, Homo sapiens
ttagtctactggctgaaaaataatagtgaccatattcaaaagatatttggtgtaaaaggagaaagaggtaaacattactaaaatctaacatagcagcacataagaaatgcctgtttttaaaatggatgatgaggtttactttattgggtataattaaaagccaatttaaattatagtcctatcatgggattgtgtaaaagt

SEQ ID NO: 272004 - DNA, 201 bp, Homo sapiens
tgaaagatatttttgaaaggctttctagataattccccatatttttatattaatctagctgagtgttaaccttctatctttttttatgtttttattaatargggtttttgttaaaaagggtgcttgattacgcaaaaacaacatgtgaaacaataagtaacaacatgaaggacaatgtgcaaacaaaagtatttgcattac

SEQ ID NO: 272005 - DNA, 201 bp, Homo sapiens
tcaaggaaaaaggaaaggacaaaatgaactgataattactcaaaaccttggctttactaatgatattaaaccttttagatgaagtagatggaggagatacrcaaaagaagcaactcataaatcctcatgtggaacttcgtaagtatgagatattatatcattggtttggggagagggactacagttgagccatctctatta

SEQ ID NO: 272006 - DNA, 201 bp, Homo sapiens
cctggtcttggctcactgcaacctccgccttccgggttaaagtgattctcctgtcttagcctcccaagtagctgggattacaggctcctgccaccatgccyggctaatttttgtatttttagtagagacagggtttcaccctgttggtcaggctggtctctaactcctgatctcaggcagtccgccaacctaggcctccca

SEQ ID NO: 272007 - DNA, 201 bp, Homo sapiens
ggctgccggctgagcaaggaagggcagagaatctggctttagaattagcttgtcctccctattccccggctgccttgtctggcgagtggggacggaagccrggtggggcccttgagatttccttggaaacatttgaagttcctttgcctctctctcgacccttacgcctgaacttaattaggaggggaagagtacagttac

SEQ ID NO: 272008 - DNA, 201 bp, Homo sapiens
ctcaagcagtccgcctgccttggcctcccaaagtgttgggattacgggtgtgcaccaccatgcctggcctacatgcataatttaataaaactgagtactaygtaatagtagtcttaaaatgaaaaagtaaaaggccattttggtagtgattatggtaaaaacataatacagttaacttttagaagtcttttattttgtatc

SEQ ID NO: 272009 - DNA, 201 bp, Homo sapiens
tatatagatatttatagacagatacatctatatagatatatatagatataatacttaggattatcccttacacctaataatcttgtatagatctatatctrtctatagatctatctagatatatatcaatctatctagatatatctatctgtctatcgatctatctatctagatagatagatatatctatacctagatgct

SEQ ID NO: 272010 - DNA, 201 bp, Homo sapiens
tgtaactagtatataattttatgttttaaaattatgttttataaaataatattttatgcatattttatatagcttagtacatgataaagcattgcaaactmttggggaaacattattctacacacatggggaaaatagtcataataaagaagccatggaagttcttggtataagaactgagttactgtattgccactgtag

SEQ ID NO: 272011 - DNA, 201 bp, Homo sapiens
aagcattgcaaactcttggggaaacattattctacacacatggggaaaatagtcataataaagaagccatggaagttcttggtataagaactgagttactrtattgccactgtaggaatcattcagttgtaagaaaaagtattcaacctaaattctctatttttctaatttaaaaactgaaattccaaaaaacatacattt

SEQ ID NO: 272012 - DNA, 201 bp, Homo sapiens
actgtaggaatcattcagttgtaagaaaaagtattcaacctaaattctctatttttctaatttaaaaactgaaattccaaaaaacatacatttttattgtratcatttagacagtttaattgtatatcttatgcttgcttgatagtgacttgagtaggatatttttacttttaatttgctaagtttttttgttacatcaag

SEQ ID NO: 272013 - DNA, 201 bp, Homo sapiens
aaatatttcatttcattctttttgcttgtgtggcttctgaggagaagtcagatgtatttattatctttgatactctacaggtaaggtttttttttttttttctttaaatagagatggggtcttgctgtgttgcccaggctggtctcaaactcctggcctcaagcgatcctcttgctttggcttcccaaagtgcagggatta

SEQ ID NO: 272014 - DNA, 201 bp, Homo sapiens
atttggacaggactgcaccctcaaaaaatacatatttagaaatattaaccttgtttgtcctctcaagaatatttcatttctatccttttttttttttttttcccagacagtttcgcttttattgcccaggctggagtgcagtggcacagtcttggctcactgcaacctctgcctcccaggttcaagcgattctcccaccgc

SEQ ID NO: 272015 - DNA, 201 bp, Homo sapiens
gctattataaaaagtgttacaatgaacatacgagtacatgtgccttttgatagaatgatttattttcctttggatatatacccagtagtgggattcctgartcaaatggtagcagttctgttttaagctctttgagaaatcttcaaaccgtcttccacagtggctgaactaatttacattcccatcagcagtgtataagca

SEQ ID NO: 272016 - DNA, 201 bp, Homo sapiens
cttgtgtcaaagtagaatgtaggctgttttccaggggtggttgttacggccatcacattatcgtttctctccagagctcttttttttttttttttttttttccctaaataaaatagagatgaagtctcgctatgttgactaggctggtctggaactcctggcctcaagcgatcctcccgtctcagcctcctaaagtgctgg

SEQ ID NO: 272017 - DNA, 201 bp, Homo sapiens
aaacatttgaagttcctttgcctctctctcgacccttacgcctgaacttaattaggaggggaagagtacagttacttttccctctgagtgcatgagttctkagtttgtcagaggcgcatccgtaggctggaaaagaaagttcatgagctgcagaaacgataccaaccgtgggggttcaaatatgtgtttgtctttttaaat

SEQ ID NO: 272018 - DNA, 201 bp, Homo sapiens
ggaaagataataaaaaagaagccaaactcttttagacataacaacttaaaattttgaagtacatccttttaggtcttatttactctgcaaaactgtatgtmattcttaattaggtaaaacataatttcaattacattttgcatgtagcttttttttctatttatgtgagatagaaaatttgattcaccctttctaaagtgt

SEQ ID NO: 272019 - DNA, 201 bp, Homo sapiens
atttctttggtagaaaattcaaaagttaattattgattaaaaattattgattaaaaatcaaaaattaataatagcagtttcttttggggtatgtctgtatrgtgtctgtctcctgaagttgtttctgttccttgtagatggaagaaggtgagttcaagaactggattgagaagatgcaagcaaggctcatgtcttcctctg

SEQ ID NO: 272020 - DNA, 201 bp, Homo sapiens
cagaaggaggccagggagaacagcagcctttgagtggaagttggaccagccctcagctcccttcgaggacacagtctgttaggtcacccacaccttataaraagcagcttaatgaggaactccagcggcgctcttcagcattaggtaaaacagtgttcttatttcattcccttctatatgctagatttttccacagtcatt

SEQ ID NO: 272021 - DNA, 201 bp, Homo sapiens
cgtagatactctttatcatgttggggaagtttcctctattcctagtttactgagagtttttataatgaaggagtgttggattttgtcaaatgctttttctrtatcaatgacatgattacataattattcttctgtaacttgatgtgatgggttatattaattgatttttgaatgttgaaccagccttgcatgcctgggata

SEQ ID NO: 272022 - DNA, 201 bp, Homo sapiens
atttattgtaacagctaaaaattatttttgtgattgttttaaaatacgattttatagaaacttttcctcttatgcctcataggatatagttgaacatcatsatacagctctattcaagatattaagctatttttcattttctattggtccttgtattttcttctcagttattctcccattcggcttcttgaagtatgtgtt

SEQ ID NO: 272023 - DNA, 201 bp, Homo sapiens
tctgagtgcatgagttctgagtttgtcagaggcgcatccgtaggctggaaaagaaagttcatgagctgcagaaacgataccaaccgtgggggttcaaatawgtgtttgtctttttaaatgcttgcctctgctatttgagacgattccatttcaacttaggttttggagtctcttgaggaggagcattatttcccaattagt

SEQ ID NO: 272024 - DNA, 201 bp, Homo sapiens
tgatcttacattaggaatatttttagagagatactgtttcaggtaagaacatatttcttccttctgttccattacacatttttgatgctcaaaatttcaasctaaaacgtaaacatgagtcggatgttaagtgactgttacatgatcctcactttcatagtgcatatcagagtatatcattcaaagaagtaataatctatt

SEQ ID NO: 272025 - DNA, 201 bp, Homo sapiens
tcattaggacctgtatttaggtacacagcacactgctggtcatatatgaattgatagaacttttaaacttgtgaagtaaatatgaaaatacatgtttgttmatgagtagaagtaaatgagagtatattaagagtgaaaaaagtgtgagggatagaagaggaatttgtattggttgactttcccttatctgaaatgcttggg

SEQ ID NO: 272026 - DNA, 201 bp, Homo sapiens
ttaggatgtgttgaatgactcctcaaaggcaggctaaaaaaatcagtttggcagactgcatgcagatttgtgaaatatttcttctcctatgctatttttgkttttgtcttgagtctgctggcttatgtgttactttaatatgtatgaagcagaattgtaatgaaactgggtttcagggttttaaggtgagcttataataag

SEQ ID NO: 272027 - DNA, 201 bp, Homo sapiens
ttgtatattaatcttgtatcctgccaccttgctataatcacttactaatttcaggagttcgttagttcttttggattttctatataaacagtcttgtcatygaacaaagttttgtttcttccttcccaatcagtgtactttttatttccttttcctgtcttatttcattagctaaaacttctagtccaatgttgaaaagga

SEQ ID NO: 272028 - DNA, 201 bp, Homo sapiens
acgtataatgattgtgcttctataatgcaaaacttactctaaagcttatgatttacttttaaagaagaagttaatgtttaacgtttttcaacctatttctrccctaagttgtaaagaataccgaaatgccttagaggaattgtctaaagcgactcagtggaacagtgccgaagaagggcttccaacaaataggtgattcat

SEQ ID NO: 272029 - DNA, 201 bp, Homo sapiens
ccttcttcagagggacagcagggaaaagccccgatctctcttcccagaagagagagaccttacgtggagcagatagtgcttactaccaggttgggcagacrggcaaggaggggaccgagaatcaaggcgttgagcctcaaggtgtgttaaagaagagtaaatgtgcttattctatgctttgatttatttattttagttgca

SEQ ID NO: 272030 - DNA, 201 bp, Homo sapiens
ataaatgtcccagttcttgaaatgaatattaagtctttatgctgacatgaggtatatttaatcaacagtttataaaatataaatttaatttataaagaaayttaatcaaaagtataatttatttgtaaattatgctcttatttctaatagttaaacatttacttattatgtaatctagagccacagaattttgacagttgc

SEQ ID NO: 272031 - DNA, 201 bp, Homo sapiens
aaatagggatttggatctaacatgcaaaatgccatcatgaagaaacttaagtggttgcatttggccagggtagggagtgagggagcggaggaggaaagatrttttctgagtcataaagctttttaaaaaaacttctgttgtttatagaattttcagatgctaatgccaagttttactgtcggctctactatgcgggagagt

SEQ ID NO: 272032 - DNA, 201 bp, Homo sapiens
tctttactactggaaatagagtcattagtgcctttaaatctaatcagcttagataaccaattccagaaatgtaagaaccaattcagaaaacttacccttargattctgttgctctaaagccattcttggtaccaaaatatgtattaaggttctccagagaaacagaaccagtaggatacacaaacacacatttatatagag

SEQ ID NO: 272033 - DNA, 201 bp, Homo sapiens
tgtttatagaattttcagatgctaatgccaagttttactgtcggctctactatgcgggagagtttcataagatgcgtgaagtgattctggacagcagtgargaagatttcattcgttccctctcccactcatcaccctggcaggcccggggaggcaaatcaggagctgccttctatgcaactgagggtgagcctttctcat

SEQ ID NO: 272034 - DNA, 201 bp, Homo sapiens
tttgatttaattaatgaacagaagtcattgagattattaatttctaatgtagccttctgtgagaagaagaatgcctgtacaatatgtattcatatttccamgtgaaattagattttttttccttctgaaggtatatgtcatgtttttctgtaagtatactgcactgctacttcatgtttttttgtaagtatactgcactgc

SEQ ID NO: 272035 - DNA, 201 bp, Homo sapiens
tagcaggacttaactttcctgctatttggaatagtaagatactatttgaaatagtcaggtactgtttagagtaaataaaactcttacctcggtagtgaaaraatttattgacacctgaaaaaattcttaaacgtctcattaaactttaatttaggcaaggcacagatttcttgactattttttgattaattacttgcttgg

SEQ ID NO: 272036 - DNA, 201 bp, Homo sapiens
gggaagaaagcaaggtatgaaatgtagtcttgtctttggtccttaatcaatagaaatatagttagtttcatttataatacttagcagggatagtttaataygtactttagtaatgatatccagtagggttttccattttgaatttgtgaggtttcaaggaactatgacctggattacttttatgttataacctgaaataaa

SEQ ID NO: 272037 - DNA, 201 bp, Homo sapiens
aatgtatgtaaatgactcatttaagattgtgtttttctttagaggatcgcttcttaacaactttgtccagccagagctccaccagttctactcatctccarttgcctacgccacctgaagtcatgtctgaacagtcagtgggagggccccctgagctagatacagccagcagttccgaaggtagaggttaagtcactttta

SEQ ID NO: 272038 - DNA, 201 bp, Homo sapiens
ttggtctgtagaatatactacaggttgtactggtcctggtactcaagtcccctgtcctttgagtgcattgcttttcctaccacccaaatattcctgtgttrtgctcttctacattgctgtaagtaattgtccagagtttggtatcaaaactatgtttcttaagactatttgcatctctctctcttttttttttaacactgt

SEQ ID NO: 272039 - DNA, 201 bp, Homo sapiens
tctatgataagataaggaacgtgtgctagaatgtaattcagttcactgctttcttcattgagaacaccttctatgagaaaaatgtcagctgaactaaacartatacttaataatgtaattgatttatattctggcactagttccctaatgttgtagtgagccaggagcaactgaccagcattggtctgtagaatatactac

SEQ ID NO: 272040 - DNA, 201 bp, Homo sapiens
tatgctattgaggtattataggattcagagatcttaaactatatatttcctgcgtttgttagtgaggaaccaagtgatcttgagcaagttgcctttaattmgtttatataaaaaatcacttaagacattaagactggatgaaattaggtgcacattcagtagttggtaattttgctgagactgaaatttgaaacgtgtatt

SEQ ID NO: 272041 - DNA, 201 bp, Homo sapiens
taaaaaaacttctgttgtttatagaattttcagatgctaatgccaagttttactgtcggctctactatgcgggagagtttcataagatgcgtgaagtgatyctggacagcagtgaggaagatttcattcgttccctctcccactcatcaccctggcaggcccggggaggcaaatcaggagctgccttctatgcaactgagg

SEQ ID NO: 272042 - DNA, 201 bp, Homo sapiens
aataagtactatctggcaatgatttactacttatgatctctgaaatacaaatttagatatttttgtatgccctctttatacgtgttttgcttttcttcgtygattcttgtctcaagtgtaagttcaaggtattgaattagaaacttttagaagctctttggtctatgcaaaaaggagaatctgcttcctagaagagctttc

SEQ ID NO: 272043 - DNA, 201 bp, Homo sapiens
acatatgaattttgtgggggctgggagggtaaacattcattctgtagcaattccctcatagcacttaccacagagattatatttatttatttattggattrtctgtttctttacccccactacactataaaccctatggtgccaatttttttttttcgccattgtattgttaacatcttacacatgtaagatccttaaaaa

SEQ ID NO: 272044 - DNA, 201 bp, Homo sapiens
aactgttattggtatagtatacatatgtccatattccgaaaggaaaagaaccaaagtcagcagtttatacttcttattctctgtgaatattaatatataartagactatttttcattttagatgtgtttgatgggcatttgctgggatccacagacagccaagtgaaggaaaagtcaaccatgaaagccatctttgcaaat

SEQ ID NO: 272045 - DNA, 201 bp, Homo sapiens
gtggctgacacttgtgattacacttttggagctgaaggcaggaggattgcttgaggccaggagttcaagaccagcctgggtaacatagtgagactctgttyctacaaaaaatagaaaaaattaggcaggcatggtgatgtgtgcctgtagtcctagaagggtgaagcaggaggattgcttgagcccaggactttgaggtca

SEQ ID NO: 272046 - DNA, 201 bp, Homo sapiens; identical to SEQ ID NO: 53987

SEQ ID NO: 272047 - DNA, 201 bp, Homo sapiens
tccagaattggggaggatatttattgtaacagctaaaaattatttttgtgattgttttaaaatacgattttatagaaacttttcctcttatgcctcatagratatagttgaacatcatgatacagctctattcaagatattaagctatttttcattttctattggtccttgtattttcttctcagttattctcccattcgg

SEQ ID NO: 272048 - DNA, 201 bp, Homo sapiens
gtcatgtctgaacagtcagtgggagggccccctgagctagatacagccagcagttccgaaggtagaggttaagtcacttttaccatatttcattgtatctragactgaaagatatatcattgatttacatgaattacagccatttctctaaggacagatatttgcttcataataacagattcatgccttgctttctgttta

SEQ ID NO: 272049 - DNA, 201 bp, Homo sapiens
actttaaaattgctatttaactcgggtgtaatagccacagtgcttcagagatgtttaaaaaaaacaagtgtcccttggagtccatgctgtgtatgcttcastgttgtttcctgttttatcccatagtggtcttttcccttgatcagaaattttaaactgttattggtatagtatacatatgtccatattccgaaaggaaaa

SEQ ID NO: 272050 - DNA, 201 bp, Homo sapiens
atgagtggaggacagacaaatcgtacaacagaaacagaaccacaaccaagtaagattacacatggaggaatatttataattagatttacctataattatgrtttgaaaaagaaaatacataaaaacaaataagtactatctggcaatgatttactacttatgatctctgaaatacaaatttagatatttttgtatgccctc

SEQ ID NO: 272051 - DNA, 201 bp, Homo sapiens
cgtggagcagatagtgcttactaccaggttgggcagacaggcaaggaggggaccgagaatcaaggcgttgagcctcaaggtgtgttaaagaagagtaaatrtgcttattctatgctttgatttatttattttagttgcatatatttcttatagccttaaatagataattcttagtgctgaaactggggcattccctctgtt

SEQ ID NO: 272052 - DNA, 201 bp, Homo sapiens
aggttaatcacaaatgggataatatagtggtctccaacctttttggcaccagggaccggttttgtggcagacagtttttccatggactggtgtgggggacrggggatggttttaggacgaaactattccaccttaggtaatcaggcattagattctcgtaaggaacgtgcaatctagatccctcacatgcgcagttcacca

SEQ ID NO: 272053 - DNA, 201 bp, Homo sapiens; identical to SEQ ID NO: 53970

SEQ ID NO: 272054 - DNA, 201 bp, Homo sapiens
tagtacattagagaacaggggatgggaaaacagagtcatgcagagatgccattgatcgttggttgaaaggaagtattatttcctgaaattttttgttcttrtttgattacataatagtttaaaaaaaatggaaagaaataatagcgtacatctaactagattctaagcatgttatcattgaattttattgttttcttaatt

SEQ ID NO: 272055 - DNA, 201 bp, Homo sapiens; identical to SEQ ID NO: 53971

SEQ ID NO: 272056 - DNA, 201 bp, Homo sapiens
acaggggccaattctaggaagttgtttttctccccacattatcttgtggtaatccatgatgcttaagtgcatttttataatgttattaatatgagtaaggyttcagtgggcatatattgattactaagcaactaagtgtagaagaatccagaataaaaaaattcatcatatatttattaaaaaggaaatttgtgaatgtta

SEQ ID NO: 272057 - DNA, 201 bp, Homo sapiens
agctgctacacaggcagaaacccttccagctctattttaagaaagtaaaagtgagcttttgcttgcagggctctctccccagggaggcacacccgcatctytgtgtggttcttggtagctttgctgctcagagctccatttctagttgtagcgttgcaatagtttttgtgcatttaattttacttgaggcagcctcatgcc

SEQ ID NO: 272058 - DNA, 201 bp, Homo sapiens
gtaacatgtgactgttcaaggatataaggaagaaaaagtgaaaatccaaatactaatttccctttcccacttaatccactgatttactgtgggaatttctygaacttaccagatttctaatggaatctctggtttgtaatacagtctatgctactaaaacatatttctagaacatcaattagcttatatgtagttggcaaa

SEQ ID NO: 272059 - DNA, 201 bp, Homo sapiens
gctgtttgttttatcatcagaattattgtctctggcagtattaactatgcaaacttctttcttataatatttttgtagttcagctaatcataaccacatgrtggcactactccagcagttgctccatagtgactcactgtcatcatcttggagggacatcatcgtgtcattggtctgccaggttgttcagacagtccgacc

SEQ ID NO: 272060 - DNA, 201 bp, Homo sapiens
ttcttagtggaagatattcagatttcatttatatgcaaaatccttaaggtacagatataatgaaagaatgatattgacctagaaaatcttatctgtgagcygtaattgaaatgtttatttctttgtaggctgtttgttttatcatcagaattattgtctctggcagtattaactatgcaaacttctttcttataatatttt

SEQ ID NO: 272061 - DNA, 201 bp, Homo sapiens
aaaaaacaaaagccccaaactgtgcttgtctgtccccattttacgtgttaaaatttcatttcagtcaattgcaggggacttcttagtggaagatattcagrtttcatttatatgcaaaatccttaaggtacagatataatgaaagaatgatattgacctagaaaatcttatctgtgagccgtaattgaaatgtttatttct

SEQ ID NO: 272062 - DNA, 201 bp, Homo sapiens
ctagagtacttagttaacttatgtattttaaaaatttgcatagtgatccagataaacactacttaatgtatgaacatgaacgagtgcccattgcagtctgygagaaggaacccagctccatcattgcttttgctctcaggtattattcatgggactttgacttatgatgatatctatgtattttatgtatgtctattaatc

SEQ ID NO: 272063 - DNA, 201 bp, Homo sapiens
atcgagccagaggaggaagaattcagcccaaaaattcagacccttttgctcattcaaaggatgcatcaagtacttcaagtggcaaatcaggaagcaaaaaygagggtgatgaagagagagggcttattctgagtgatgctgtgtggtcaacaaaggtgagccagaccactttctgatgctcctgtgcatttaggatgtgtt

SEQ ID NO: 272064 - DNA, 201 bp, Homo sapiens
tagaatgctggccgattatcgagccagaggaggaagaattcagcccaaaaattcagacccttttgctcattcaaaggatgcatcaagtacttcaagtggcmaatcaggaagcaaaaacgagggtgatgaagagagagggcttattctgagtgatgctgtgtggtcaacaaaggtgagccagaccactttctgatgctcctg

SEQ ID NO: 272065 - DNA, 201 bp, Homo sapiens; identical to SEQ ID NO: 53984

SEQ ID NO: 272066 - DNA, 201 bp, Homo sapiens
tctttaggattgtaacaatggaattttatggaaagaatgatcttacattaggaatatttttagagagatactgtttcaggtaagaacatatttcttccttstgttccattacacatttttgatgctcaaaatttcaacctaaaacgtaaacatgagtcggatgttaagtgactgttacatgatcctcactttcatagtgca

SEQ ID NO: 272067 - DNA, 201 bp, Homo sapiens
aggtaggcattgtggtataatggatagcgtgttggataggagtcagtcttggttgacagttgcggtactgctaccaggatttgattgtagtcaagtcatayataatctttctggatttttgtgtccatttctatgacatgagctatatgacctagatgatttttaaaaagtaaaaattctaccttttaggaagtaggcata

SEQ ID NO: 272068 - DNA, 201 bp, Homo sapiens
aagtaacaacatgaaggacaatgtgcaaacaaaagtatttgcattactcagattgattagcttcatatagtggttacaactaacaaagaaatgagctgaamatttttatttttcatctgtagtgacctgtacttaaaattaatatgttacttcttatttttagccaaaaaggcttctggaatgttgtccttcttcagaggg

SEQ ID NO: 272069 - DNA, 201 bp, Homo sapiens
gaagtagatggaggagatacgcaaaagaagcaactcataaatcctcatgtggaacttcgtaagtatgagatattatatcattggtttggggagagggactrcagttgagccatctctattatttgagaattctagcttcatactaaataaatgtcccagttcttgaaatgaatattaagtctttatgctgacatgaggtat

SEQ ID NO: 272070 - DNA, 201 bp, Homo sapiens
cctgaaaaccatcaatggtctcagacaatgcttgtcttaggcagccttgactcgcttgtaaaacagcattttacatgagaagaaatactttcagtagcctyttacccttataaagacttgttttaactctcaattcatataaccgggtgggagaacataattatatgccaacaataagaggcagtttccatcacatatata

SEQ ID NO: 272071 - DNA, 201 bp, Homo sapiens
cttgtattaataatgttagacgtttcaaaggcacccatccaactaactttatttacattccatatacttaaaaactttttaaaattgtcatttcggcattytatattcttaaaagccatgcactgcaaaaactatcattcataccatttacaccctaattaaaggaagaacaaaaatgacacataatctcattattgcaag

SEQ ID NO: 272072 - DNA, 201 bp, Homo sapiens; identical to SEQ ID NO: 54018

SEQ ID NO: 272073 - DNA, 201 bp, Homo sapiens
ttattaatgcaagtctgcttaagtttagtatgaagtgcatagaacaagtataaagaggcattttgacccaaagctttcttgaatttgccgggcagtgatgkgtttagtatgagtaatattttgtgtgtgggcgtattctctatataattatgctgacatgttatagtcatatgtctctacttttgttcctcctctctgttg

SEQ ID NO: 272074 - DNA, 201 bp, Homo sapiens
atttagatcaagcttgtcccactcgtggcctgtgggctgcatgcagcccaagactgctttgaatctggtccaacaccaattcataaacttcttaaaacatkatgacattttttgcgattttttttttttaacttttgtatgtctcgttctttttttttaattattattatactttaagttttagggtacatgtgcacaatg

SEQ ID NO: 272075 - DNA, 201 bp, Homo sapiens
gcaaaatgccatcatgaagaaacttaagtggttgcatttggccagggtagggagtgagggagcggaggaggaaagatgttttctgagtcataaagcttttyaaaaaaacttctgttgtttatagaattttcagatgctaatgccaagttttactgtcggctctactatgcgggagagtttcataagatgcgtgaagtgatt

SEQ ID NO: 272076 - DNA, 201 bp, Homo sapiens
tatttaatagtcataatatattaataggtaagaaaggtaagagagtcaaccaaatcaaaagtattttttgtactattaggaagtaaggattctagctgagwtcatcttttttcaatgtcttagaaaaacaatacatcctaacatgcctctcttgttgcatgacatttatctaaagcagggttcctaaactgctaacctaag

SEQ ID NO: 272077 - DNA, 201 bp, Homo sapiens
gatggctgggtcaaatggtatttctagttctagatccctgaggaatcaccacactgacttccacaatggttgaactagtttacagtcccaccaacagtgtmaaagtgttcctatttctccacatcctctccagcacctgttgtttcctgactttttaatgattgccattctaactggtgtgagatggtatctcattgtggt

SEQ ID NO: 272078 - DNA, 201 bp, Homo sapiens
ctgagtgttatagtcaagatgaacactgattatcagaaaataaagatttccagggagactggtagttacgtgaaaaaataatagaattcttttgcctctgkttttcattccctttgtataaatacaaatgggaatggtttttatctttacattgaaattaaaggtagtacttattaaatattttcttatggattgtcctat

SEQ ID NO: 272079 - DNA, 201 bp, Homo sapiens
aaaggtggggttttgccatgttggccaggctggtcttgaactcctggccccaagtgattcacctgccttagctttcctaagtgctgggattacaggcatargccactgtgcctggccctcaatcctttaaaaagattatctatcaaagttgtaagtggcaactttcgtaggagaatgaatctgaaagagggggcagcactt

SEQ ID NO: 272080 - DNA, 201 bp, Homo sapiens
agtatttggaatagttggttttcaagagaaaaagttatgtttggaattagatgagctgagttcaagctgttcccacgtatatgacatttgtattaaattgwgtgagttagctaccataaagaaatccaagttaggtttccttttatgagtctaaaaatcacaggaaaacatctgaaaaggtatatagcatttttctcaagg

SEQ ID NO: 272081 - DNA, 201 bp, Homo sapiens
taggcagtgaggaaggtgaatcttatttaaaggtatgaagaaagatacagaggtaagaataagcatgacattttccatggccagaagtaggattttttaaytgggagagagtttaagtaggagtctgggggcaatgagaaaggaaagttatttgggactacctggtggaaggcaatgaattctgtacttacaggtgtagat

SEQ ID NO: 272082 - DNA, 201 bp, Homo sapiens; identical to SEQ ID NO: 53982

SEQ ID NO: 272083 - DNA, 201 bp, Homo sapiens
ctactacaatgtttacttactaggaaatacctattaatagtgggtaagtgaggataggcaactgtgatcttattcatgtaagagtttttcttttacagatrttaagagagtgaattaattctatttgtacttctggattgccacctccaccatcttaactttctgtttgtttttgtttgtagaacaaaccaagacactgat

SEQ ID NO: 272084 - DNA, 201 bp, Homo sapiens
agtattaagaaagaaaagccattttttgaagaattttgcattgttctgaacatattatttgctttgaaaaaatttaataccgtaaaagaactaaatgagartatattaatactaatatgagatacattaagttagtaggaattatgaacaatatagatttaaagttataattaaaggagggctgtaaaatgcaaaccttta

SEQ ID NO: 272085 - DNA, 201 bp, Homo sapiens
tactatgcgggagagtttcataagatgcgtgaagtgattctggacagcagtgaggaagatttcattcgttccctctcccactcatcaccctggcaggcccrgggaggcaaatcaggagctgccttctatgcaactgagggtgagcctttctcatcgtttattgattggttcagtagtcttcatctctttacctcagaaaat

SEQ ID NO: 272086 - DNA, 201 bp, Homo sapiens
atacctgtttttttacagtgattcaaatgagaggtaaaatgttggaatcatctagacctcagtttaagtcttagcatcatcactcgccacttatatgacaragcactttactagtcccctttatagggaataacaatccctagaattatcagaaggtaaaaggaaatgttttaaaattgtttggcaaatagaaggtgctta

SEQ ID NO: 272087 - DNA, 201 bp, Homo sapiens
ttatagggaataacaatccctagaattatcagaaggtaaaaggaaatgttttaaaattgtttggcaaatagaaggtgcttaacaaatggaaactatcaccrtgctgtagctgaagacgatgttcagctgcaggcccagagcagcatgagtaccttgtgcagattgttcactagtcatgctgcactttgacagtggttctga

SEQ ID NO: 272088 - DNA, 201 bp, Homo sapiens
ttgttattttaccttccagtgctgtatgttcaatctagtattcgttttttgaagatcccatcttaggaatgtatcagtcattaaataaaatacaagtgccytatacagtaaagtatcttgaggttgtatcatgacatatctcaattttgtttattcattcaacaaacatttagcaccatttatgtgccagatactgtgcta

SEQ ID NO: 272089 - DNA, 201 bp, Homo sapiens
gctcaagcagtccgcctgccttggcctcccaaagtgttgggattacgggtgtgcaccaccatgcctggcctacatgcataatttaataaaactgagtactrcgtaatagtagtcttaaaatgaaaaagtaaaaggccattttggtagtgattatggtaaaaacataatacagttaacttttagaagtcttttattttgtat

SEQ ID NO: 272090 - DNA, 201 bp, Homo sapiens
gtcttcatctctttacctcagaaaatgcagcaggaaggatattgcttaataagaactttcataactatgacttactagttttaacagaggtgtttataaarttttatttagtagttttaaaaagtagatcttctagaactgaacttagatgtgttattgacaaaagtagagggtttttgactatataaatccacaggatcc

SEQ ID NO: 272091 - DNA, 201 bp, Homo sapiens
taagggtattggactatgtgaagcatttagctactggaaccttttgtacctttggttcttaaatatagtgaatcagagagtaacatcttattttatagtamatatttaactttggttactaggccatatttaacttttgacttgctcagccttggagaaagaatgaagaggaattattcttgtggagtggtcttaaaatac

SEQ ID NO: 272092 - DNA, 201 bp, Homo sapiens; identical to SEQ ID NO: 53992

SEQ ID NO: 272093 - DNA, 201 bp, Homo sapiens
tctaggcaggagctagtctttttaaacagaaactcgtaccaggtaggactttgtcccatggcatgtggcacaacagataacctttcctgcccactcagackgcttctgcatgtgtatctttatggcagtttatatgaaagaacatggtcagttgacttcagttgcccaatcaattatataacagctttttcccccttttct

SEQ ID NO: 272094 - DNA, 201 bp, Homo sapiens; identical to SEQ ID NO: 53973

SEQ ID NO: 272095 - DNA, 201 bp, Homo sapiens
gggaatcagaaaaaggcttaaactgaaggacttgaactggaccttgagagatggaatcattttggataggcagtgaggaaggtgaatcttatttaaaggtrtgaagaaagatacagaggtaagaataagcatgacattttccatggccagaagtaggattttttaactgggagagagtttaagtaggagtctgggggcaat

SEQ ID NO: 272096 - DNA, 201 bp, Homo sapiens
ttctactgacaaaatagcataatgtaataatatttgaggacaatattttaaatataggtctactagtgagaagaaaggaattctttttttggtcataacaytttgcttatttgggcgtcaaaattggtgttcccttcatcagattgattgcattgcagatatttaactataaaaccttcttagttcatgggctatacagaa

SEQ ID NO: 272097 - DNA, 201 bp, Homo sapiens
atactttcttaaattatttaaaaaatatttttatctttatactggggaaatattggtttttcaattgacacctaattctaggtggcagccctgatacataytagtcgagctactttaggcagattacttaatcccttattcttgatttctttatctgtaaaatagagctagtaatacatattccataggatgctgtgaaga

SEQ ID NO: 272098 - DNA, 201 bp, Homo sapiens
tgatagagaagtagaatgtatggataatgcacccattggaaaagagattaaattaagaaataatagcaagctttcactgaaagactatgccaagaaataamtaaccaattatttttaaaaattgcttatcggctatttgatatcagtgatttcctgttaactgacactttgctaaacctgtgaatactttcttaaattatt

SEQ ID NO: 272099 - DNA, 201 bp, Homo sapiens
tctccttcacttttgaagggtatcatcagggtacagaattgtaggttgatggcttttttctctcaacatcttaaatatttcatttcattctttttgcttgygtggcttctgaggagaagtcagatgtatttattatctttgatactctacaggtaaggtttttttttttttttctttaaatagagatggggtcttgctgtg

SEQ ID NO: 272100 - DNA, 201 bp, Homo sapiens
gtctaagaaaggctttacttctccttcacttttgaagggtatcatcagggtacagaattgtaggttgatggcttttttctctcaacatcttaaatatttcrtttcattctttttgcttgtgtggcttctgaggagaagtcagatgtatttattatctttgatactctacaggtaaggtttttttttttttttctttaaata

SEQ ID NO: 272101 - DNA, 201 bp, Homo sapiens
tcttcaattttagacagactaaaatatgcttttaaagttgcttatttcttggagtttgtgaagtaacctgtcattaaatactgctccctccgtgcacactsagggcatgatgtctcttcttacaacatcagaaataaaaaaaaaagttaaagagtatagaagatcaaagtagtattaagaaagaaaagccattttttgaag

SEQ ID NO: 272102 - DNA, 201 bp, Homo sapiens; identical to SEQ ID NO: 53977

SEQ ID NO: 272103 - DNA, 201 bp, Homo sapiens
ttttcggataggcttctttcacctactaatatgcatttaagttttctctatgtctttccatagcttgatagctcatttctaagtgatgaataatatcccaytggctggatacactatagtttatctactcacctactgaaggacatcttgattgcttctaagttttatcagttacgagcaaggctgttataacatctgagt

SEQ ID NO: 272104 - DNA, 201 bp, Homo sapiens
ttactaatgatattaaaccttttagatgaagtagatggaggagatacgcaaaagaagcaactcataaatcctcatgtggaacttcgtaagtatgagatattatatcattggtttggggagagggactacagttgagccatctctattatttgagaattctagcttcatactaaataaatgtcccagttcttgaaatgaata

SEQ ID NO: 272105 - DNA, 201 bp, Homo sapiens
ttagggagacagggtttctctagtaggctggagtccttccagaggcttagcattctaaaactgatagctcttctagtgctcggctacagaactgtcagtcytcttctgttatccttctcaccttatatctttgtagcactagcacaaaggagtggagtgagataacctggggtattaaggagactctgagttcctaaggtg

SEQ ID NO: 272106 - DNA, 201 bp, Homo sapiens
gcaaggaataacaaggaatcctatgataatggagtagagcagtcttagagttaattataaggactctgtcatttactctgagtgagatgggaagctgttgragagttttacattttttgtcgttaatttttaattgctttgaaaaaatgtcaaacatgcagaaaagttgcgagaatagaaaaatatatcttcatgtatttt

SEQ ID NO: 272107 - DNA, 201 bp, Homo sapiens
aagaagggcttccaacaaataggtgattcatgattgagtagaaactattttaatttagttatgttatcattttctatatgcttgtacttcagttttattayagcatttatcatcataaaaatttctaggattcagatagtggcactcatatttcagccaataattgagacaacaaagctcaaatatagcaaaagaacttaa

SEQ ID NO: 272108 - DNA, 201 bp, Homo sapiens
cctttgactcctgatcaagatgagcccccttttaaatcagcttatagttcttttgtaaatctctttcgttttaacaaaggtaagacttattaaagataagrggtttgattcaggtctgattgtttgaaatgctcctttgtctccagtggctcaccatgatcatatagtggttagtactctgttcagctttaatgctgggtc

SEQ ID NO: 272109 - DNA, 201 bp, Homo sapiens
ttttatgtataaaaatatgttttaagtatattaatatataattgtattatatgttaattatgtatgttatataattatatatgttataggctaataaagtkatatattatgtaactagtatataattttatgttttaaaattatgttttataaaataatattttatgcatattttatatagcttagtacatgataaagcat

SEQ ID NO: 272110 - DNA, 201 bp, Homo sapiens
aattagaaacttttagaagctctttggtctatgcaaaaaggagaatctgcttcctagaagagctttcagtttaaaatatacaacctaagatgcaagatacrtttttttcctttctagttttacagtattactggcactatgaaaataaattttcatacattccctcctttaatccccctagtaaccacataagaattattt

SEQ ID NO: 272111 - DNA, 201 bp, Homo sapiens
ttatttactgtttgttttcatagtctgacttttcacagaataggattttctggatatttcgatgctgtttggaatcaacttttgagcttcctgaggaattkagatttttgcttgtttcttttgtttttcagactcatgaaatggccacagatgataagacgtccccaacactggactctgctaatgatttgcctcgatctc

SEQ ID NO: 272112 - DNA, 201 bp, Homo sapiens
ttcttacatattcctggtgtagaatctgcaaacaggtaaatagaccctattactatattttgtttgccatttatttctttatttgtatgttttttttttttcctgaggagaaggtttcctatatggtactggattcgttatttgttatagagctctatttgtcattgttattttaccttccagtgctgtatgttcaatcta

SEQ ID NO: 272113 - DNA, 201 bp, Homo sapiens
tgtccccattttacgtgttaaaatttcatttcagtcaattgcaggggacttcttagtggaagatattcagatttcatttatatgcaaaatccttaaggtasagatataatgaaagaatgatattgacctagaaaatcttatctgtgagccgtaattgaaatgtttatttctttgtaggctgtttgttttatcatcagaatt

SEQ ID NO: 272114 - DNA, 201 bp, Homo sapiens
gtttttgttaatttgtttatttttataaaattcaattgttaggttcatagaaatattggactacaatttatttatagtgtgacagcctcaacattgttgcyattgaaggccaattgcttggatcctgtcttcatcctttcagagtacagaattttctgagacgccttctcccgacagtgactcagtgaactccgtggaagg

SEQ ID NO: 272115 - DNA, 201 bp, Homo sapiens
ggaagtattatttcctgaaattttttgttcttatttgattacataatagtttaaaaaaaatggaaagaaataatagcgtacatctaactagattctaagcrtgttatcattgaattttattgttttcttaattgttccattagatcccaggtggaaagaagtttgattctgtggttgtcaatggctttgtttgtaccaaga

SEQ ID NO: 272116 - DNA, 201 bp, Homo sapiens
ctatgtaataagagagcttaactcttagatcccatattgctatttaagctttgaagcatgtttgttatacacatgtaacacttttcagacatttaatactmtatgtttatatgaaataatcagttgcttattgaatttatctgtgcataaaatactgtgttcaattctaagagtgactcagagaaatggaaggtatggctg

SEQ ID NO: 272117 - DNA, 201 bp, Homo sapiens
tgtattaaattgtgtgagttagctaccataaagaaatccaagttaggtttccttttatgagtctaaaaatcacaggaaaacatctgaaaaggtatatagcrtttttctcaagggtaactacttgctgttaatgtgattgcaggacagtgtgcagttaaaagacctgtggaaaaaaatctgccatcacagcagtggaatgga

SEQ ID NO: 272118 - DNA, 201 bp, Homo sapiens
agacttatttgtggatgaagaaaatttagtctaagattgataatagtcaagctatcttgatatatatatatatatatttttttattacactttaagttctmgggtacatgtgcacaatgtgcaggtttgttacatatgtatacatatgccatgttcgtgtgttgcacccattaacttgtcatttacattaggtatatctcc

SEQ ID NO: 272119 - DNA, 201 bp, Homo sapiens
gtaacatctctctgataagttaatttctcagttaacccttaaggaattgagaaattagtatgtaatgaatttaaatagaagtaaaaaatgaattaattacmgctacattcaatatgtatgaatctcagggacataaagtggagtagaaaagaaaatcatctaatcatgtcaccaggaaaatttaattaatataaaatttaa

SEQ ID NO: 272120 - DNA, 201 bp, Homo sapiens
atctttcttgtcactgttctaccccaggcaccaagaacagcgcatggcatgtatataatcttgataatatttgttgaacaggcaacaaattgagatttttratttaattaatgaacagaagtcattgagattattaatttctaatgtagccttctgtgagaagaagaatgcctgtacaatatgtattcatatttccacgtg

SEQ ID NO: 272121 - DNA, 201 bp, Homo sapiens
tacttattggtgtctacaagaccaaaagtgaaatggacattagttaatcactaggtatttgttgatccttcgtttttgttggagaattgctcaagcagaaracgttctctcccttgaaaagtttaccctgtgcagaacaggggccaattctaggaagttgtttttctccccacattatcttgtggtaatccatgatgctta

SEQ ID NO: 272122 - DNA, 201 bp, Homo sapiens
ttaggtcccacatgtcaatttttgtttttgttgcagttgcttttgaggacttagtcataaattgtttcccaaggctgatgtccagaatcatgcttcatagrttttcttctaggactttcatagtttgaggtcttatatttaaatctttaatccatcttgaattaattttcgtatatgatgaaacataggggccagttttat

SEQ ID NO: 272123 - DNA, 201 bp, Homo sapiens
actggaagaaagtataattgattatgtaatacttattggtgtctacaagaccaaaagtgaaatggacattagttaatcactaggtatttgttgatccttcrtttttgttggagaattgctcaagcagaaaacgttctctcccttgaaaagtttaccctgtgcagaacaggggccaattctaggaagttgtttttctcccca

SEQ ID NO: 272124 - DNA, 201 bp, Homo sapiens
ttatattctaggatcccatttgtcataccacattacacttagttgtcataagacaataaaatttctatttagcaaatgtttattgggtacctcctttgtaytgggaactgttttaatagtgtaagggatctgtccagtaaacagacccaaaaaatccctgccttcatatgaagcttgcattttgtttcctttaatatgctc

SEQ ID NO: 272125 - DNA, 201 bp, Homo sapiens
catgaactcatccttttttatggctgcagagtattccatggtgtgtatgtgccacattttcttttttatttttattttattttttattttattattattaktagtagtatactttaagttttagggtacatgtgcacaatgtgcaggttagttacatatgtatacatgtgccatgctggtgtgctgtacccattaactcgt

SEQ ID NO: 272126 - DNA, 201 bp, Homo sapiens
tactcccatacccagttttcctcatgttaacattttacattagtctggtacatttgttacaattaatgaactgttattgatagattattaactaaattacrtattttatttagatttcttgagtttttaccagttgttctttttatattctaggatcccatttgtcataccacattacacttagttgtcataagacaataa

SEQ ID NO: 272127 - DNA, 201 bp, Homo sapiens
ctgtgtttgcattaatttgcttacagacttatttgtggatgaagaaaatttagtctaagattgataatagtcaagctatcttgatatatatatatatatatttttttattacactttaagttctagggtacatgtgcacaatgtgcaggtttgttacatatgtatacatatgccatgttcgtgtgttgcacccattaactt

SEQ ID NO: 272128 - DNA, 201 bp, Homo sapiens
aggactttgaggtcacagtgagctatgacggcacctctgcactccagcctgggtaacagaatgagaccctgtctcttaaaaaaaaaaaaaaaaaaaaaaaacttagaaattgcttttattttgggagttgtgaggttaggtttttttgttgttcttgtttttttttaacctctgaactagctaattggattcttggctttt

SEQ ID NO: 272129 - DNA, 201 bp, Homo sapiens
gcgtcggccgggctgggaggagccggcccccgggaaagatttcggactgggggacaggaaaacagagggcggagtcttggggggggaagcgagaagccgcrtcaaccatgtaagcagcttcgcttcctgccgcaaccgtccgcggcctgaggagcccaccgccgctctcgggggccgacttccgggggctgagccgttgaa

SEQ ID NO: 272130 - DNA, 201 bp, Homo sapiens
ctatcagtaaaaatgatgggttttgactagacattttagtagagaactctaaagaaataaagggaaatacttcttttttctttttcttttcttttcttttctttttttttttttttttgagacgaagtctcgctcttgtcccccaggctggagcgcaatggtgcaatcttggctcactgaaacccccgcctcccaggttca

SEQ ID NO: 272131 - DNA, 201 bp, Homo sapiens
ctgtgctatcagtaaaaatgatgggttttgactagacattttagtagagaactctaaagaaataaagggaaatacttcttttttctttttcttttcttttsttttctttttttttttttttttgagacgaagtctcgctcttgtcccccaggctggagcgcaatggtgcaatcttggctcactgaaacccccgcctcccag

SEQ ID NO: 272132 - DNA, 201 bp, Homo sapiens
ggtgagtcactgttttcggaactgtttgccagtttggggtccataaacttggtcagcctgaaacctcaattgctattctgcctgtggctttaagcacacgrttagggtatattatttgggtctctgcttcttgagatgctttcagattttctttttgaacttcatgtttcctatttcagcttgccaccttaatgattgttt

SEQ ID NO: 272133 - DNA, 201 bp, Homo sapiens
gatttaaagttataattaaaggagggctgtaaaatgcaaacctttaaacactttaacaaactgttcattttttgtagatgaattcttgtattaaaaacccyaaaattcttctgttgaagtgttccattgagtatctctacagagaagaaactaagtttacttgcattgatcctattgtgcttcaggtaagaatttactact

SEQ ID NO: 272134 - DNA, 201 bp, Homo sapiens
aaccttggaggcgaaggttgcagtgagctgagatcacgccactgcactgcagcctgggcaacagagcgagactccgtctcaaaaaaaaaaaaaaaaaaaaagtaggcacttcaggtgtttccagtgtcatttgttggtccttgcattttgagataccatttatctatagtagtgttctcaaaccttgctgtgcttcagaat

SEQ ID NO: 272135 - DNA, 201 bp, Homo sapiens
cctgtcattaaatactgctccctccgtgcacactcagggcatgatgtctcttcttacaacatcagaaataaaaaaaaaagttaaagagtatagaagatcaragtagtattaagaaagaaaagccattttttgaagaattttgcattgttctgaacatattatttgctttgaaaaaatttaataccgtaaaagaactaaatg

SEQ ID NO: 272136 - DNA, 201 bp, Homo sapiens
cagtgagtgtttttaattttctattgtattttaaaaaaatcacagcttttaaatttatatgcacgtatggtaggtatacaagaatctttttttctttgctrttctatttgtattgaaagtgggacagaagatatggcacctatttcattaagattcagaatttcagactggaactggaagaaagtataattgattatgtaa

SEQ ID NO: 272137 - DNA, 201 bp, Homo sapiens
gtgttttcatgggaatttttatcttcttatttccaaagccgagtataatttttgtgtagataacctttagaagtaattctaagactctttaggcagaatgycatctctgcctctgacattacttgtgtcaaagtagaatgtaggctgttttccaggggtggttgttacggccatcacattatcgtttctctccagagctct

SEQ ID NO: 272138 - DNA, 201 bp, Homo sapiens
ttttgcatgtctttgttgccacattacacaatggactatcagtgttctctttactactggaaatagagtcattagtgcctttaaatctaatcagcttagakaaccaattccagaaatgtaagaaccaattcagaaaacttacccttaggattctgttgctctaaagccattcttggtaccaaaatatgtattaaggttctc

SEQ ID NO: 272139 - DNA, 201 bp, Homo sapiens
atattgcaatactgtaagaactcagccctaatataatcttgttgcttaagctgtgactgcctttgaaagatatttttgaaaggctttctagataattcccyatatttttatattaatctagctgagtgttaaccttctatctttttttatgtttttattaataagggtttttgttaaaaagggtgcttgattacgcaaaaa

SEQ ID NO: 272140 - DNA, 201 bp, Homo sapiens
tttgcctaagggcatagagctagaccagattttctctctgggtttctttcatcttcagccaacatctgtgattctcttggttccaagaagggtctcactcrtcctttttcagcggatgatgctattactactttcttatattcctaattggctaaatgccagggacttcacaagtttttgcctgctgcacggaagcacagc

SEQ ID NO: 272141 - DNA, 201 bp, Homo sapiens
gcactgaacctgcaggagataaggatttctttcaaggaagacctagaaactttcagataatttatacagttcttgagctgggaatttgaatccctaaggtwatccatttctttttttacttttgtctaatgcaattaggaggaaccagcccatgtcattatagttgttagcttgacaaaaccattctaagatattaaatac

SEQ ID NO: 272142 - DNA, 201 bp, Homo sapiens
gcatgttctttagatatatttcaatagcaaaatgaagcagtaatgtattatttctatcaccagaaaagagttaactatacattatatatacaaacacccaygcacaaatacataagacatgcacatccctgtatatgaccatatctacaggatcttacatggtctcttacctgtattcgagcttaataagtgtttcctatt

SEQ ID NO: 272143 - DNA, 201 bp, Homo sapiens; identical to SEQ ID NO: 54020

SEQ ID NO: 272144 - DNA, 201 bp, Homo sapiens
taatgtgtattctgttgttgttggatggagtgtcctataaataaaaattttctatctataacattttctacaaatgttgattagatcttattgattaatgrtgctcttctacactcttgttgattttctttctagttatcctatggattgttgcgagagaggggttgaagtctccaacagtatttgtaaatttgactattt

SEQ ID NO: 272145 - DNA, 201 bp, Homo sapiens
atataaatttgtttgtctgtaaaatgtaaataattttaccacccgtgtgattatattatatatttcgcatgtagtagatttcacatgtaatatggtttggyggtgtccccacctaaatctcatcttgaattgtagttcccataatccccacacatcatgggaggaacccggtgtgaggtaattgaatcatgggggcagtta

SEQ ID NO: 272146 - DNA, 201 bp, Homo sapiens
ggcatcaggatcatctgagggtttttaaaaggcaaactccaaagtgacttctgacaggctgattctcaggggagacccagaagtccgcatgcttcacatgytctcacgtgtacacattcactgagtcactctgatgataagggctgctgcggcaggttgggagcctctagaactagacactcttccatcttggagagccca

SEQ ID NO: 272147 - DNA, 201 bp, Homo sapiens
aatggggtggaaggatgactgtggttgacacatgagtgttctcgtcagggacagaagagctgccagcaaggaggacacacacactgggtgtgttgagtttygccatggatgtgggagagggaccctccttgggtaggctgggtaggaatcctcacacctggctgggcatcaggatcatctgagggtttttaaaaggcaaac

SEQ ID NO: 272148 - DNA, 201 bp, Homo sapiens
aatcccagcactttgggacgccaaggcaggtggattgcttgagctcaggaatttgagaccagcctgggcaacatgatgtaactccatctctacaaaacatrcaaaaattagccaagtgtaacttgtagtcccagctactctactcgggaggctgaggtgggaggatcacttgggcctgggaggtggaggttgcagtgatcc

SEQ ID NO: 272149 - DNA, 201 bp, Homo sapiens
cacacagcaggtgggcaaattcagtgattgtgtggagcgtgggtggcgggcatctgctggtatgcttcacagacagcatgcagaggctcccttggcaaggycacgggggcctggccttgtcattgtcccccagttaggccacagaggacagccaggagacgttctgagggtttgtccgacgccccgtctaccctcctatgg

SEQ ID NO: 272150 - DNA, 201 bp, Homo sapiens
cgggggaccactgccaccaatgcgcggagaccggtagtggccctgaatgtctggctgtgctgttgtttattggatacaaagcaaaaggggcagggtagagmgtgtgagtcatcttcaatgataggtaaggtcacgtgggtcacgtgtccactggacagggggcccttccctgcctggtagccgaggcagagagagagagga

SEQ ID NO: 272151 - DNA, 201 bp, Homo sapiens
cttcgaggtaccctggtcaccccaggggaacccctctgcccagccaggccaagctccagaggcgagcagcagggccactgagcccctgccccacaccgccsgggtcccgaagggaaggagaggtgtcaggccttgatctgctggctcctgccagggtccttaggtgggaaggctggggtggtgcaggggccttgggctccc

SEQ ID NO: 272152 - DNA, 201 bp, Homo sapiens
ttcgactactccctatctgcgcccttcgaggtaccctggtcaccccaggggaacccctctgcccagccaggccaagctccagaggcgagcagcagggccaytgagcccctgccccacaccgcccgggtcccgaagggaaggagaggtgtcaggccttgatctgctggctcctgccagggtccttaggtgggaaggctgggg

SEQ ID NO: 272153 - DNA, 201 bp, Homo sapiens
cattttccctagtcatatgtatcaaaagagcaacagagtttctaaataaaaagattttgagaaggggtcacgtacacacatttgtacctaaggactgactygtacgtacaccaccaccatcagtggcaggggatcgagccctatttagagatttcctgcaaattccctgtaattcatactggggaccattggaaaatgggg

SEQ ID NO: 272154 - DNA, 201 bp, Homo sapiens
atacctcctccagctccaagccacagggaaacaagagaagaaacagctgtgtctgagggctgggcgctctaggaggtttcgggagtttggcaaagccaggrgagctggaggggaggtgtggagccagggccctcctggctgctgcggaatatcaggttcagccgcggcagaggatcggcaatgggatgaagggcctctgca

SEQ ID NO: 272155 - DNA, 201 bp, Homo sapiens
gcaagctttatagacattttttagaagacattttttaattgttcacaaaaatagaaatgcttgtggtattattagacacctatatattcttaaaaatgaamctggacaacatagtgagaccccatctctacaaaaagttaaaaaattagctgggcatggtggtgcacacctgtagtcccagctactgaggaggctaatgtg

SEQ ID NO: 272156 - DNA, 201 bp, Homo sapiens
tgtaatcccagcactttgggacgccaaggcaggtggattgcttgagctcaggaatttgagaccagcctgggcaacatgatgtaactccatctctacaaaamatgcaaaaattagccaagtgtaacttgtagtcccagctactctactcgggaggctgaggtgggaggatcacttgggcctgggaggtggaggttgcagtga

SEQ ID NO: 272157 - DNA, 201 bp, Homo sapiens
agagggaagggaaatgagtctgccaggagagggcttcaggctaggcccatccaggcccactcaggccttggagcccaccctggcctccttgctgatgcccrcatccctgcaggccctctgtttgcagggtcgctatgcaggggtcccctttgtcatgatgccgggctcctgcagccttccacttgccctagtacccccagc

SEQ ID NO: 272158 - DNA, 201 bp, Homo sapiens
ttaaatgtttggtggaattcagcagtgaagccatcaggtccttgacttttctttgatgggtgatattttattactgcttcaatctcattgcttgttattgktctgttcagcttttctgtttcttcatggttcaatcttggtaggttgaatgtgtccaggaatttatctgtttcttctaggttttccagttcacaatatttt

SEQ ID NO: 272159 - DNA, 201 bp, Homo sapiens
ccaaaggaaggatgacgtattcatggtacacatactgcccagtagaaacagcccagggctgacagcatcaacctcagctctggcggcagaatccttcccamggtggtgctccaggcaggcaccaccattcgccttgctggtgcttgggaagagctctatttgcaattctagctcagcatagaatgaggcctttctgttccc

SEQ ID NO: 272160 - DNA, 201 bp, Homo sapiens
ctctgtggaggctcccccaaaaggcaagctatagtcgttgccatcaaagagcttgggccaggcatggtgcctcacgcctgtaatcccagcactttgggacrccaaggcaggtggattgcttgagctcaggaatttgagaccagcctgggcaacatgatgtaactccatctctacaaaacatgcaaaaattagccaagtgta

SEQ ID NO: 272161 - DNA, 201 bp, Homo sapiens
tggctcatggagaggggtgtggggagtactccctcacgaagacttccttaaccttggcagtgagtgaggccgacccttacgtgatcctacagctgtcgacygcacctggaatgaagtttaagaccaagacgctcaccgacaccagtcatcctgtgtggaatgaggccttccgtttccttatccaaagtcaggtcaaggtga

SEQ ID NO: 272162 - DNA, 201 bp, Homo sapiens
gtgtggtccaggagactcagcccagcctgagggaggtgcagggcctggggctgtgcccaggggttccactcctcttctctctgacctcctgcattgccccmccacagggcgccagtgccagcagacgacagggtgggtctgctcatttctctcttcctgccgaacacccaggatcacgggcaaggatactctggaccccag

SEQ ID NO: 272163 - DNA, 201 bp, Homo sapiens
tctggaccccagctggggagacccaacccccttaagctctcttgggccacatctcccaagatgggcacggggcagcacagagcctctcacaaaacttcctrgcaaacgtgtgccctgggcctctccaccggaagaaggatggcccagagcctctggggtccctgcgcaaggttcagagtggctgagaccctcagcagggag

SEQ ID NO: 272164 - DNA, 201 bp, Homo sapiens
ctttcattgttattattgcatttaatcttcaccacactcgaggtagattcccttattgtccatttaagactgtgtagacattgaggtcgagatactatttytacctaaagctagcattacctccctacgccctcaccccgcagcatgacgaggtgcagcatcccgctgttagagattcattcctttgagtcttattgaaat

SEQ ID NO: 272165 - DNA, 201 bp, Homo sapiens
ggtcagtccaggactgcccattcctcacatctgctgcattggtgccaggcacagcagggctcaggcctgctgggggcaggggcagtgtctttcgccagagstggggactcccgcaatccactcccctcacactcctgcctctccttcccaccccattagagtgggttgagttctccccctatgaggtcggtttcctgaagt

SEQ ID NO: 272166 - DNA, 201 bp, Homo sapiens
cgctggagattcatagtacacagcctgcatgccctgtccagcgaccctgcatctagggctgttcagaacacaggggcaggagtgggaactgacccacatayggtccccagaccccacgggaggagctgcctcctcacccccagccaggtcccccatcctgcccctgtcctggtggagccactgcctccagggtactcccag

SEQ ID NO: 272167 - DNA, 201 bp, Homo sapiens
acctactcccctcccacatactccaccccccaaaccctctgcaccccgacagcccccagagaattcatgctggaagctccgcacagattgcccaatgttcyggaagggcagtggtgctgaggggctcagggcatctctctgtgcttgagagtgggtagtgcttgagggtgtggaccaagggctgggaggggtgtggtcagt

SEQ ID NO: 272168 - DNA, 201 bp, Homo sapiens
gtgtcaatttctaattttttaaagactttagataaaaacaggtatttattacctctataatgtaataatctaaaataccaaaaatcacttacaatgtcagratatataactccatttatgaccaatcacaatttcattaatattaataaatatcataccctgaaactttgctcagaatgactttattagtctacatacatc

SEQ ID NO: 272169 - DNA, 201 bp, Homo sapiens
ggggcaggagtgggaactgacccacatatggtccccagaccccacgggaggagctgcctcctcacccccagccaggtcccccatcctgcccctgtcctggyggagccactgcctccagggtactcccagcctcacttaggccctgatgccctctggccccaggtgatggatcagaagctgtcaggacagagagccgccctg

SEQ ID NO: 272170 - DNA, 201 bp, Homo sapiens
tagaattggtattagttctttaaatgtttggtggaattcagcagtgaagccatcaggtccttgacttttctttgatgggtgatattttattactgcttcaatctcattgcttgttattgttctgttcagcttttctgtttcttcatggttcaatcttggtaggttgaatgtgtccaggaatttatctgtttcttctaggtt

SEQ ID NO: 272171 - DNA, 201 bp, Homo sapiens
attaatattaataaatatcataccctgaaactttgctcagaatgactttattagtctacatacatctttaatattgattaggtttttataaaaacccgctygtaaaatacactagctataatcagtgcttctcaaactctcatctcttcgaaacttttttcttcagtcttttgctggcaagtactgaactgcttagaagct

SEQ ID NO: 272172 - DNA, 201 bp, Homo sapiens
tattaaaattaatttttacaggcttgtatatctttttaatgtggttactaggaaatttaaaattccgtgtgtggctcacatcgtattaatattggacagcrctgatctagaaggagagaaagccctgagacccatttaccagatcggcagagccttggtggcaggagccacgtgtcaggagaagctgccgagtgggaagca

SEQ ID NO: 272173 - DNA, 201 bp, Homo sapiens
aaggaggaagacttcgagcgcctgctgcggctcagtgactacaacgtgcagaccagccagggtgccatcctgcaggccctgaggaccgcgctgaagcaccrgactctagaggcgaggcctccaagggcacagacctgaggttgctcagaggctgcaggaccctccagggcctgcgggcataacctgatctgtagctgggct

SEQ ID NO: 272174 - DNA, 201 bp, Homo sapiens
gaaatattttcattttattactatgtgctatgtagtctttggatctactgtttaagttcatattcagttttgatggtgttgtgttttaataactgactttyctgctgagtggcagcaattagttactacagaatgggagaagctgttttaacagttcactttacaaggtgctagaaaacgcagtttgatcctaggctgtaa

SEQ ID NO: 272175 - DNA, 201 bp, Homo sapiens; identical to SEQ ID NO: 54025

SEQ ID NO: 272176 - DNA, 201 bp, Homo sapiens
tacattcctgggcaaaggacacagagagctgggaggaaagcaggggcccctccagcgggggcagccctccctgtgcgccgctgccaggctgtagaagcccyggcgtcctgctcctgacacccctcctacccctgggcaggtgtccagcgcagccccgcagagctccagggtggccaagtggatctcaccggggccacctgc

SEQ ID NO: 272177 - DNA, 201 bp, Homo sapiens
ccatcacattccttcctatcttctcttctcaccaactggtcagaattttatttccttctggtgggaaaaactcattgctgcctttgtgcgatattcccagytttccagttcctaccatcattctagatctcccagctttcctctgaacatgctcagcccacatctgagaattctaaagaaccttcatctctcagcaagttc

SEQ ID NO: 272178 - DNA, 201 bp, Homo sapiens
cagaagtccgcatgcttcacatgctctcacgtgtacacattcactgagtcactctgatgataagggctgctgcggcaggttgggagcctctagaactagayactcttccatcttggagagcccaaaggaaggatgacgtattcatggtacacatactgcccagtagaaacagcccagggctgacagcatcaacctcagctc

SEQ ID NO: 272179 - DNA, 201 bp, Homo sapiens
ttccccagagcgcctggcgagctaccgccgggagctggagctgcgggctgagcagggccaccccacgacctttgtggacctgtgggcgctagtgctggagwccatgctgcacggccaggtagggcgcctgcgcacgtgggggagacgcgtgtgtgcaccgcgggggcgaaggcagggctcccaagcggctgacatgcgcgt

SEQ ID NO: 272180 - DNA, 201 bp, Homo sapiens
agtttgaaaaaaatagaaattacatcaataactgtatttactacttgttgaaatgatatttttgaatatagcgaattaaataaaatattaaaattaatttktacaggcttgtatatctttttaatgtggttactaggaaatttaaaattccgtgtgtggctcacatcgtattaatattggacagcgctgatctagaaggag

SEQ ID NO: 272181 - DNA, 201 bp, Homo sapiens
cgaggtagattcccttattgtccatttaagactgtgtagacattgaggtcgagatactatttctacctaaagctagcattacctccctacgccctcacccygcagcatgacgaggtgcagcatcccgctgttagagattcattcctttgagtcttattgaaatgcgactttgaggagtaaaagaagaggaaacgcctcaga

SEQ ID NO: 272182 - DNA, 201 bp, Homo sapiens
tcaaggttctctatgacatctcagaagtcctccctggcaagctgctccggaaaaccttctcccagagtccccaggtgggtgggtgggtggggaagtccccrtgggccccacttcttccaactccaagctgaggaagtagctatttctcccacctgttgggaggctgctggggtgaactcattcacagaaaaatctaaaccc

SEQ ID NO: 272183 - DNA, 201 bp, Homo sapiens
tttcacccacagcacccactgctccctgtgatggctggatgctcttggagtttcctcattcataccccttacagtgcagatagctgagatccagggtagcrcctgtggactgggctgctgaggctcaccctcccttaagtcatatgcctgcttcccgtccggaagggctgaggggtgggcagtgctggcagcagggtcacc

SEQ ID NO: 272184 - DNA, 201 bp, Homo sapiens
tctaactcccttgggagctccatcctgagctgagagccattgcttccagaggagggctggacccagctctaaccctgactctatcaggacccaactatgcrgtcccttccctggagacaaggagcggggcagggccctgggtgagacaggaggcagctggcccctttccttgttaatccagcctgtctgtgtgtggtccag

SEQ ID NO: 272185 - DNA, 201 bp, Homo sapiens
ggaggagagggcttctttggcagctcattgtgggcttggccagccagtggctgagctatgcaggtgtcccctgacccctggatcctccattgccacagccstgaggagctggccgtgcacctgggcttcaatctctgtgcagaggagcaggccttcctgagcaggaggaagcaggtggtggccaaggccctgaagcaggcc

SEQ ID NO: 272186 - DNA, 201 bp, Homo sapiens
aggggtggcgggggggatgcattgtaggggtagccctcgccccactcccattttccatcagtacctgagggtggggccgctggctggggcctgaggctgayctcttttggtgttcctcagccatctggagcaacattttctccctgaacctgctggatgcctggtatgacctcaccagttctggggagtcctggaaacagc

SEQ ID NO: 272187 - DNA, 201 bp, Homo sapiens
atctgctttctggaaggtgagggtggtggctctgaaggccctgggcagccctgggccaggtgtctgaatggacatgggtcctgtagctcaggtggggcagracctcaggacaagggggaggggtggcgggggggatgcattgtaggggtagccctcgccccactcccattttccatcagtacctgagggtggggccgctgg

SEQ ID NO: 272188 - DNA, 201 bp, Homo sapiens
tgtgtgtggtggatttgggacagtgggtctcagagggttgaggttaaggggacctcagcttaccctgcagaggcccctgcccatgatgtggtcttccccargcccgagagctgtcatgcctggatgtgcatctggacagcacagggagcaccgctgtggttgcaggtgagaccagcttagaaccaggcctggactctgcct

SEQ ID NO: 272189 - DNA, 201 bp, Homo sapiens
aacgtgcctcccttggagaccgcttgagaggatgagatgacacctgtaaaagaactgtgtcaactctgaagacacaggtatgtgctgatgacttgctcatsctctctgatttcagggagaggaggagctggatgtggagttcctgatggaagaaacgtgagtaatgtcacacagcccagggagtgtctcaggactcaggct

SEQ ID NO: 272190 - DNA, 201 bp, Homo sapiens
accctctgcaccccgacagcccccagagaattcatgctggaagctccgcacagattgcccaatgttccggaagggcagtggtgctgaggggctcagggcakctctctgtgcttgagagtgggtagtgcttgagggtgtggaccaagggctgggaggggtgtggtcagtccaggactgcccattcctcacatctgctgcatt

SEQ ID NO: 272191 - DNA, 201 bp, Homo sapiens
attttgttctgtagtccctagggagtaattactgaaggttttgtaaactggactgacatgagccaggttacgactccaccactatctgcatggccttaggsaggtcaccaaactttcctagacctagaccttatagtcatcttttttaaagagagagagagagagtgatttggaccagatgattttgaatattgctctcct

SEQ ID NO: 272192 - DNA, 201 bp, Homo sapiens
ctatacagaggggattcaggtatcacattggtagttgccctagatttgataaccactaaagtaccacgtcaaatcaaggaggggatcgattgttccatgamttgtaaaagtttggtttatatttaagtacagtttaataaagctaagttaaaaacaaggaatgagagcagttctgagttggcaacgtatttgtgacacttg

SEQ ID NO: 272193 - DNA, 201 bp, Homo sapiens
cagctactccactaagtgcttaatgaaatggacatgccttggcccctggcagccctgcatggctgtaggcttatcctctattgtacagatgggaagttgartagtttcatggaagccagagaaaagaaagtttccagaaagaagggatgggcagcagtggggcaggtcctggtgaggtgagatgtggttctagagtccctg

SEQ ID NO: 272194 - DNA, 201 bp, Homo sapiens
catcttcttggattcagactgcaaagatgacaccagccgcgacagcgccattgagtggtaaaccctcagcccgagttatgagcacttgcatctcttcaagraacagaatcgcataggctaaggatgtgcatctcttccttatgtatatgtctgtctgttggcagggagcaaacatttgtagtaaatgtggtctgggaattt

SEQ ID NO: 272195 - DNA, 201 bp, Homo sapiens
cggcaatttcatcttcttgagcacagggactgcatcgcagttacctctcagcccttctccagggcgtcctaacatgacacactcccagggacagtgccccrgcacgcacagagattgtcacacgtgtttgtccacagtgttccagacgagagctcagccttggaagaccggggcttggcctcgtccccggaggacagggac

SEQ ID NO: 272196 - DNA, 201 bp, Homo sapiens
tgaattatgagacaggacctgaaatgaactatttccatttcttcatttcaccaataagaaaatcaagactgaggaagattaaatgactttcccaaggatgyttagaaacaagactaggatccgagtctcttgagttcctcatccagcatccagtctcttttctcatgatggataaggtgttgcagttgtatctatttgggg

SEQ ID NO: 272197 - DNA, 201 bp, Homo sapiens
caggcacctgacaccacgcctggctaatttttgtatttttagtagatattggctttcgctatgttggccgggctggtctcgaactcctgacctcatgaggktgatccacccgcctcagcctcccaaagtgcttggattacaggcgtgagccgctacacctggcctttggctgattaattttaaaagcaattttagtttgat

SEQ ID NO: 272198 - DNA, 201 bp, Homo sapiens
aattttgttctgtagtccctagggagtaattactgaaggttttgtaaactggactgacatgagccaggttacgactccaccactatctgcatggccttagscaggtcaccaaactttcctagacctagaccttatagtcatcttttttaaagagagagagagagagtgatttggaccagatgattttgaatattgctctcc

SEQ ID NO: 272199 - DNA, 201 bp, Homo sapiens
ggaggtgagtcatggacgatctagaatatggaaaacattgattgtgtgttcgatgcttcaagaaaatgtcccatctttctataaaaatcctctgttgagtrtgttttatgaacctgccagccatcactgcatggttcccagagataatgttgaatgtgtctccagagaagaatctcatttctttgggattctctcagttag

SEQ ID NO: 272200 - DNA, 201 bp, Homo sapiens
cttgccaacaggactatgatgcgatggtgaagctggtggaaacactggagatgctgcctacgtgtgatttggccgatcagcataacattaaattccactaygcgtttgcactgaataggtaagaacgataatgtacgtacaggttttgaaacatgccacccattgaattgtgcttccttctttcattcaacatcgggtatg

SEQ ID NO: 272201 - DNA, 201 bp, Homo sapiens
gtaagatgtttagcaacatccctcgtctttacccactagatgccaataccactccccccacacctcacccaatgtaacaaccaaaaatgtctctagacatwgataaatgtcccataggggacaaaaatcccttctggttgagaccactgatttacagggaggcatttgaggtatagaaaaagtgcacgctttgacatttgc

SEQ ID NO: 272202 - DNA, 201 bp, Homo sapiens
gtgtgggaggatctacaaggacatcttcttggattcagactgcaaagatgacaccagccgcgacagcgccattgagtggtaaaccctcagcccgagttatsagcacttgcatctcttcaaggaacagaatcgcataggctaaggatgtgcatctcttccttatgtatatgtctgtctgttggcagggagcaaacatttgta

SEQ ID NO: 272203 - DNA, 201 bp, Homo sapiens
ttcaaattcttaaggtgtccggctgaacagtttgttgggaagaaaagggagcttggagaaaatgaacaattactgggatgtgggtcagttcttcagcgtcrgcatgctggcccatgatgtcgggaaagccgtccaggcagcagagaggttgttcaaactgaaacctccagtctggtgagttgtgtctgtgtgttgtcatca

SEQ ID NO: 272204 - DNA, 201 bp, Homo sapiens
gagctggataactctctgtcatgggggctgtcctatgtatagtaagatgtttagcaacatccctcgtctttacccactagatgccaataccactccccccrcacctcacccaatgtaacaaccaaaaatgtctctagacatagataaatgtcccataggggacaaaaatcccttctggttgagaccactgatttacaggga

SEQ ID NO: 272205 - DNA, 201 bp, Homo sapiens
ctcccagggacagtgccccggcacgcacagagattgtcacacgtgtttgtccacagtgttccagacgagagctcagccttggaagaccggggcttggcctygtccccggaggacagggaccagggcctcttcctgctacgcaaggacagtgagcgccgtgccatcctgtacaaaatcctctgggaggagcagaaccaggtg

SEQ ID NO: 272206 - DNA, 201 bp, Homo sapiens
gctgggattacaggcgcccaccccacacccagctaattttttgtatttttagtagagacgggatttcaccacgttgggtaggctggtctcaaactactgayctgaggtgatccacccacctccgcctcccaaagtgctgggattacaggcgtgagccaccgcgcccggcctgaaacatataatttttaatgtagataagta

SEQ ID NO: 272207 - DNA, 201 bp, Homo sapiens
tgtctgtccttcctccggcaatttcatcttcttgagcacagggactgcatcgcagttacctctcagcccttctccagggcgtcctaacatgacacactccsagggacagtgccccggcacgcacagagattgtcacacgtgtttgtccacagtgttccagacgagagctcagccttggaagaccggggcttggcctcgtcc

SEQ ID NO: 272208 - DNA, 201 bp, Homo sapiens
agctctgttggcttgaagcactgactctgaagacagctgtgtttgtttcccaggggtggtctcctctgcagactctggagtgcggtctcccagtacagaarggctcaggaggcctcagaaaccaaagacaaggcttgataccaatcagctaagctgtggcagagtgtcccaccacgctacatgttttgttaaagcttctgt

SEQ ID NO: 272209 - DNA, 201 bp, Homo sapiens
atgggtcatgtgggcatggagtcttcatgcagctgatattaatacctcagctccaacctctctagaggtcgaactgatacagtgtggcccagggccccgamgatgaatcatatcgttagcatagactatctgggatggcccaaggtcccagataaacagagatgctcttagctggcagtatatcccaagggcttagaggtg

SEQ ID NO: 272210 - DNA, 201 bp, Homo sapiens
ataagctctgacctcaacactaaaacctatttccttgtaggatttccagtgcagttagggatgtgattcctaaggaaaggcatttgaaagatgtggggatragcatttaaagtggtagacctaacatgtcaaattccaaactaactgaaggtatcctagatgaggaggctttctagaaagtgaatctcagaattatgaatt

SEQ ID NO: 272211 - DNA, 201 bp, Homo sapiens
gttttattgccacgttggtttgaatagtataatgaaatcaccaccctaaaaatgttttaaaaggatcttggccttggaaatgttgccaaggttatcctgtrcccttgagtgcactccaagctgcccatccctccagacctatggcattgtggtttgagaaaccgtgacctagactcaggacaggcccttggtcccccacct

SEQ ID NO: 272212 - DNA, 201 bp, Homo sapiens
ggatctgatctttgtttcagattgttgaagagggttatacactttcggatattcttaatgagatcactaaggaagatctaagataccttcgactacggtargagcctcaaaacagtttgtataagagaatacaactttttatgtgtgaatatgcttcaagagcagaaaacaaagggctgggcctccccccaaactctggag

SEQ ID NO: 272213 - DNA, 201 bp, Homo sapiens
cagcccaactgggacaacatcctgggcccgctgtgcatgcctttggtggacaggttcattagcctccttaaggacatccacgtgacctcatggtaattccyatctgccaccagtaacccctggagactcaccaagatgtccccatttctttcagggaagcggtacaccttcaaatgaacagagttgctggagaacccacta

SEQ ID NO: 272214 - DNA, 201 bp, Homo sapiens
tccctaatgatggaggaacgtgaagttgtatgccagttaatatggggcaaaagtttcttgccacaaacggaaaagaagtgggatggaattctacttccttstgtcccatttatgtactgaagtctcctgatttggcttaaaagttcctgaaattacatagttttattgccacgttggtttgaatagtataatgaaatcacc

SEQ ID NO: 272215 - DNA, 201 bp, Homo sapiens
tgtttaacttctgaattatgagaatatatgagagagtatcatcacagatgagagacagtaggtttttccattttgtgtgtgtgtgggcatgtgtgtgtgtrggcatgtggtgaggtgtgggggtgggggagtgtgtgtgtgtgtgtgtgtgtgtgtgtgtataaaaacattaaaacaaatacaggttggtttgttttttta

SEQ ID NO: 272216 - DNA, 201 bp, Homo sapiens
tttaggcagcctgtattctatcccagttctcctcctaactagctgggtatctgtgggcaagtcactttacttcccaggaattagtagaagtggacatacaraagacaagaaataaaaagggccaagcacagtggcttgcacctgtaatcccagcaactcctgaggtcaggagtctgagaccagcctgagcaacatagcaag

SEQ ID NO: 272217 - DNA, 201 bp, Homo sapiens
cacttgaggtcatgagtttgagaccagcctaaccgccatgatgaaaccccatctctactaaaaatacaaaaattagccaggcgtggtggcgcatgcctgtrataccagctgctcgggaggctgaggcaggagaatcgcttgaacgtgggaggcagaggttgcagtgagccgagatcatgccactgcactccagcctgggca

SEQ ID NO: 272218 - DNA, 201 bp, Homo sapiens
ctacacttccacataagttactttctggaacatctttgtttcttttttccaggcatccagtggaaattattatttcatcccatacatcgtgacaccgtgcrctgattatttttgctgcgagagtgatgcccagagacgagcctccgagtacatgcagcccaactgggacaacatcctgggcccgctgtgcatgcctttggt

SEQ ID NO: 272219 - DNA, 201 bp, Homo sapiens
caggcgtgggccactaccacccggctacttgtatttttagtagagacaggttttcaccatgttggccaggctggtgttgaactcctgacctcaaatgatcyacccgcttcggcctcccaaagtgctgggattacaggtgggagccactgcacctggcctctactccattgtcttgattgattcatttgtgaccttataaca

SEQ ID NO: 272220 - DNA, 201 bp, Homo sapiens
tactgcatttcttccacagttcatagggtaattttaatcaaatcattccttactttacctaacaggctgatgacagaaatacacattgctatagctcctcrctggtgatcaccagtgagtagatgaagtagacagatcatctcccctaatcctgtcctctccttgttcattgcagatgttgctgtggtagacatgagcgat

SEQ ID NO: 272221 - DNA, 201 bp, Homo sapiens
cgtcaccacactggctaatttttctacttttagtagtgacgaggtttcactatgttggccaggctggtcttgaactcctggcttcaagtgatccacccacstcagcctcccaaagtgctgggattacaggcatgagccaccatgcctggcccctaatttttcttaataaaaacttttaatacatgtctagagtcataatct

SEQ ID NO: 272222 - DNA, 201 bp, Homo sapiens
tatgttggccaggctggtcttgaactcctggcttcaagtgatccacccacctcagcctcccaaagtgctgggattacaggcatgagccaccatgcctggcycctaatttttcttaataaaaacttttaatacatgtctagagtcataatctaggtctccccccaccccaaaacagcccctgagatacgaatttgggggcag

SEQ ID NO: 272223 - DNA, 201 bp, Homo sapiens
agaaagtgtatgttcttcattacctgctgggactttgagctgtaaccttctgggtgactccttctgatctgggtcgatgttccatggaccaccagtaatckttttgctggagtcaatacctcccatacttcccaagcagagtttccctaatgatggaggaacgtgaagttgtatgccagttaatatggggcaaaagtttct

SEQ ID NO: 272224 - DNA, 201 bp, Homo sapiens
ccaggaggcagaggttgcagtgagccgagattgcaccactgcagtcccgcctgggtgacagcaagacactacctcaaaaaaaaaaaaaaaaaaaaaaaaaaggaaaaacactaaacttctcatatctttaagacagtaggtagttttggagtgaagccaccatcaaagttagaaacctaccttcctatttctgggagagca

SEQ ID NO: 272225 - DNA, 201 bp, Homo sapiens
aggtctgggccgaggtccctatgtgttagcctaagtcaggtcaatgagaaccatttttgggcgcaagacagtcctgggtgcgtgcagatgtgactggaggwttttgtgtttttctttctatagtgtttattacaaagaaaccttgttaaatgacatccggaaagccagagagaaataccaaggtgaggaactggcgaagga

SEQ ID NO: 272226 - DNA, 201 bp, Homo sapiens
tccttcctcaattagggattcgttagaaggcacattccctgccaagacctctccctctgttacagcagcaagagcccataggggatattgtgtcatcggaygttcccttcttggggctctgggatttcctaacagggcatcaagtgtaatgcgctgccatgttgcccaactctgcaactcactgaacatttccccgccagg

SEQ ID NO: 272227 - DNA, 201 bp, Homo sapiens
tctagttagctttgaagaaacatttgaggttatcttctgttaatccaggactccagtagattctagactacttctcaatcataaaaagggactactgatasattcaacaacatggctgcattgtaaatgcagtatgctaagtgaaagagctagattcacagccagcaccgtagctcgtgcctgtaatcccagcactctggg

SEQ ID NO: 272228 - DNA, 201 bp, Homo sapiens
gagtagatatccgtgggctggtctgctaccttactggctgtgttattatctgttactaggacaaaatgtattttcagttccctgcagtgaacttccaaacrtagttttggaatacgagccataaactgttttaaaagtcttctatgtatctggctttgaaataggtgctgtttcaatcccggccaaataacatggttggaa

SEQ ID NO: 272229 - DNA, 201 bp, Homo sapiens
tctccctgcaggcagcgacctgtggtcaggagctgggtgttgtctttttctccctaatcaccagctgcaggaaggagaggacaggggcagggaaagttgtyacttgactagcactgttggaagctggctttgcgtgctgtgggcctggctgatgtttagttatcttccctcgctggctccctctggatgtaactcctgtgt

SEQ ID NO: 272230 - DNA, 201 bp, Homo sapiens
cctagtagatggatttttggatcgtttctactttctggctattatgaataataccactgtgaatattcgagtgcaaatctttgtgtgggcacatttttttwttcctcttggatacatacctaggaatggaattgccaagtcatatggtaaatataggctttttttttttttttttgagctggaatctcactctgtcgccca

SEQ ID NO: 272231 - DNA, 201 bp, Homo sapiens
ccattccctagtagatggatttttggatcgtttctactttctggctattatgaataataccactgtgaatattcgagtgcaaatctttgtgtgggcacatkttttttttcctcttggatacatacctaggaatggaattgccaagtcatatggtaaatataggctttttttttttttttttgagctggaatctcactctgt

SEQ ID NO: 272232 - DNA, 201 bp, Homo sapiens
atggcatgtctcacccacagaaatggtaaggaggaaaaatcacaagcaatttaatcagttttcaaataggagagtctagatggtagtatttgaaggaaaasgcacccatgtttaacttctgaattatgagaatatatgagagagtatcatcacagatgagagacagtaggtttttccattttgtgtgtgtgtgggcatgtg

SEQ ID NO: 272233 - DNA, 201 bp, Homo sapiens
gggttttttgttttgttttgtttttgagacaaggtcttgttacattgtccaggctggtctccaacacctgggctcaggtgatcctcctgcctcagcctccygagtagctgggactacaggccacttagtttctgagcaatatggtacccacagcctgtttgtttgttttccaaataggcaccctgcagtacatggcacctg

SEQ ID NO: 272234 - DNA, 201 bp, Homo sapiens
acgctgcagagaaccaaatggaacagtctcttctccatttgtaaagtcagcagtcccctaatggagcatggcacgggctgggccagcttctgaacagcccsgtttgctgacctgggtgtctgcgaccccaggccccactggcctggtttgctcaccattgtcatgtcttgtgtgatttgcagagctccgagcccactttga

SEQ ID NO: 272235 - DNA, 201 bp, Homo sapiens
tattattttttttttttttaggtaaataaaattttgaggaaccacttaattaggccccactggatgttcgcgatggacaacatcatccgccgagcggtgcwggccgcggtcaccattctcatcccaggtgagcgccccctttgtggtcaaggtcagctttaggccgtgaaaagataagaaatatcctcttcattcaacagt

SEQ ID NO: 272236 - DNA, 201 bp, Homo sapiens
gtgagccaccgtgcctggccagctagctgattttaatagcagttgctactagggatgataatgattaggtcttgtctcccaggacaagaacatgggaatgrcttttcttgaagcctttcttccctcgagctgctgctttttgtccttcccttcatgtatcccttcttttcataaccttccattcatgctcaaaggtgggcc

SEQ ID NO: 272237 - DNA, 201 bp, Homo sapiens
ggaaagtttcaaaatacaatacaaagaatttccatatacgtttcacacagaatttctcagggtttaccccttaccacattggttttacattctcgctctaygcatatggttattttttctgaactgtttaaaagtaagttgtagacaatgctccattacctgtaaatacttgagtgtatttcgtaaaaacaaggatactga

SEQ ID NO: 272238 - DNA, 201 bp, Homo sapiens
tcctagagacttgtgacggtttcccaaggtccagatctgtttcatatgagttcgtttcagcctgtcttttaagcacttgatgatgttattttccgaagggygataatgttctggtgaacacctacagcggagtggtgaaaatctccgattttggaacctcgaaacgtcttgcgggtgtgaacccctgcacagagactttta

SEQ ID NO: 272239 - DNA, 201 bp, Homo sapiens
atcctctgggaggagcagaaccaggtggcttccaacctgcaggagtgtgtggcccaggtatttgcccgagggagggcaccgactcttcccgctccctctgyccaggtcccagtccccagacaggtccaatcaggacctcagttcctgccgccctggaacatctgcatagttacggtgatcactgtaaatgtttccctaacg

SEQ ID NO: 272240 - DNA, 201 bp, Homo sapiens
agtctccccattcggtgtctggctgtccccctacagaaggtccccgcggtgtcgtcctggccctgcccacacagggagagcccatggccaccagcagcagygagcacggctctgtctccccagactccgacgcccagcctgacgcactctttgagaggacccgggcgcccaggcaccaccttggccacctcctcaggtaca

SEQ ID NO: 272241 - DNA, 201 bp, Homo sapiens
ggcggtgggtgggatttcacccagcatttagtgttcttcgaatccgtaactcctgagctgggcagcctggccaggaggagcgctgtgttggaaacagcacrtggccgtgactgccaggtcaagggccttggggacaggaagtggggaggcctggccctctacactctgcagcaccctgagctcactcggcggggattgtgg

SEQ ID NO: 272242 - DNA, 201 bp, Homo sapiens
taatgaaaagggcctaagctaagcactgtgacttgcctgacagtcaaataatgttatttatattttttttagttgctagacaactctgggggccttagagkgcttctccgctacaagttgtatgcttttttgtccttttgtttttccttcttcagtatgagtatgaccatgatgcaaatggtgagagagttgtcttgggga

SEQ ID NO: 272243 - DNA, 201 bp, Homo sapiens
ggtttaattcactcacagttcagcatggctggggaggcctcaggaaacttacaatcatggtggaagggggagccgcaggcaagataccttcttcacaaggyggcaggaaggagaagtgcctagcgaagggggaagagccccttataaaaccatcgggtctcatgagaactcactcactatcaggagaacagcatgggagaa

SEQ ID NO: 272244 - DNA, 201 bp, Homo sapiens
tgtgagccaccacgcccagcctctgctgatgttgttaactctcctacactcagctgtttcctggctgctggcctcatttacttttgttgcctttggatgcytcatgccctttgatagcagggattccttctctgttcttctctctctcatccatcttattttctggtctttttccctcctattaaaggctacaagtaactt

SEQ ID NO: 272245 - DNA, 201 bp, Homo sapiens
gtgatcctcttgccttggcctccaaaagtgctgagattataggcctgagccactatgcctggccccatttcagcttcttaatgggacgacagtattactgyttggcagtgtcctacctccacttaaaaattcctatggaaaatagacaagatattttaaatcaatctatggttgttgtaactcaacttatgtataccaagt

SEQ ID NO: 272246 - DNA, 201 bp, Homo sapiens
atattttattcccctttctgttgcccgtatgctttgcttagcactgaattatattaagagtaagttcatattaaggtcagttgataaatacaaactcaaayataagcaagataaatgtctctggtatttaaatttcatagagaaataaaaggcagactcggggggtgtttgtttaaaacattaatgaatctttcaggaatt

SEQ ID NO: 272247 - DNA, 201 bp, Homo sapiens
acaaatgaagtcactaatggactcagatttccagtaagatatgctaaatccatttttttttaagattaggaaaaaaactagggattggtgctatttaactrttgaatactctgaactgaagaaaactgtagagtaattttaaatgttgggataaacatcaatcttatgtgaaatcagtaagtgatagatcagctcactcat

SEQ ID NO: 272248 - DNA, 201 bp, Homo sapiens
aaagcatcttctgtttgctggtgcagggaggctcaggtctgggccgaggtccctatgtgttagcctaagtcaggtcaatgagaaccatttttgggcgcaakacagtcctgggtgcgtgcagatgtgactggaggtttttgtgtttttctttctatagtgtttattacaaagaaaccttgttaaatgacatccggaaagcca

SEQ ID NO: 272249 - DNA, 201 bp, Homo sapiens
atctgcccaggctggagggcagtggcgtgatctcagttcactgcagccccaacttcatgggctcaggtgatcctcccacctcagccttccaagtagctgaractacatgtgcacaccaccaaccctgactaattttttgtacttttttagtagagatggggtttcgctgtgttgcccaggctggtctcaaactcctgggct

SEQ ID NO: 272250 - DNA, 201 bp, Homo sapiens
gtagaaagcatcttctgtttgctggtgcagggaggctcaggtctgggccgaggtccctatgtgttagcctaagtcaggtcaatgagaaccatttttgggcrcaagacagtcctgggtgcgtgcagatgtgactggaggtttttgtgtttttctttctatagtgtttattacaaagaaaccttgttaaatgacatccggaaa

SEQ ID NO: 272251 - DNA, 201 bp, Homo sapiens
gatgggaagttgaatagtttcatggaagccagagaaaagaaagtttccagaaagaagggatgggcagcagtggggcaggtcctggtgaggtgagatgtggktctagagtccctgggatttggcaggtgaccctggctctgtttttcccaataggtattctcagcctctgcacgaggagatagccctgcacaagtaccttaa

SEQ ID NO: 272252 - DNA, 201 bp, Homo sapiens
ggggttgacagaacactgcatgtctgtccttcctccggcaatttcatcttcttgagcacagggactgcatcgcagttacctctcagcccttctccagggcrtcctaacatgacacactcccagggacagtgccccggcacgcacagagattgtcacacgtgtttgtccacagtgttccagacgagagctcagccttggaag

SEQ ID NO: 272253 - DNA, 201 bp, Homo sapiens
ttaatttatttcagcaatattttgtagttttccatgtacaggtctttcactttcttggttacacttactcctgtgtattttattcttttggatactcttgygaatggaattgttttcttaatttctttttcaaggttgactttaaaaaaacacctgtcacaaaaatcttcaacactacatttcacttcatatttcagtatt

SEQ ID NO: 272254 - DNA, 201 bp, Homo sapiens
  misc_feature (1)...(201): n = A,T,C or G
tgtgcaacttcctttaggcttttgtcacttcctcctttgtttaccaccatacatcagtgacagggagaacaggagtagcagaaacacattcaggacccagngaatgtagatgtttattctgagacaagcatcagaagctactggagagttctgagactggtcttttggtctgtggttccgtgaaggaaattgagcgtttcc

SEQ ID NO: 272255 - DNA, 201 bp, Homo sapiens
atgagagagtatcatcacagatgagagacagtaggtttttccattttgtgtgtgtgtgggcatgtgtgtgtgtgggcatgtggtgaggtgtgggggtgggrgagtgtgtgtgtgtgtgtgtgtgtgtgtgtgtataaaaacattaaaacaaatacaggttggtttgtttttttatagttaaaccttagggaagtgggtaga

SEQ ID NO: 272256 - DNA, 201 bp, Homo sapiens
agaatgagctgtctttgggaggtaatgagttctctgttgctggaggtactcaagcatcaattggtcaaccagttggtggagatactatacagaggggattsaggtatcacattggtagttgccctagatttgataaccactaaagtaccacgtcaaatcaaggaggggatcgattgttccatgacttgtaaaagtttggtt

SEQ ID NO: 272257 - DNA, 201 bp, Homo sapiens
cgtgagccgctacacctggcctttggctgattaattttaaaagcaattttagtttgatatttccatcactaattttttttttttttttttttgagacagagtctcactctgtcgcccaggttggagtgcagtggtgtgatctcagctcactgcaacctctgcctcctcggttcaagcgattctcctgcctcagccccccga

SEQ ID NO: 272258 - DNA, 201 bp, Homo sapiens
gcgtgagccgctacacctggcctttggctgattaattttaaaagcaattttagtttgatatttccatcactaattttttttttttttttttttgagacagagtctcactctgtcgcccaggttggagtgcagtggtgtgatctcagctcactgcaacctctgcctcctcggttcaagcgattctcctgcctcagccccccg

SEQ ID NO: 272259 - DNA, 201 bp, Homo sapiens
gtactcctagtgagaacttcttgggttattataatagagtagctttgctcatattcagcagactaaactcacttgtgccattttttttaaagaagtgatcrgtaggaagagaagatgtatcttttttgagccaaagatgttcaagtgctcagtgactctgagaactgaagccaggagatgattagtggcaacactcgggtt

SEQ ID NO: 272260 - DNA, 201 bp, Homo sapiens
gattacaggcgtgagccgctacacctggcctttggctgattaattttaaaagcaattttagtttgatatttccatcactaattttttttttttttttttttgagacagagtctcactctgtcgcccaggttggagtgcagtggtgtgatctcagctcactgcaacctctgcctcctcggttcaagcgattctcctgcctca

SEQ ID NO: 272261 - DNA, 201 bp, Homo sapiens
tccaatatattgctgtttgtgatttttccaggtacctgcgatcattagttcagaacttgttactaattcggcgcttcaagaaaaccattattgaacactcrcccaggcaagagcggctgaacttctggttagatataatttttgaggcaacaaatgaagtcactaatggactcagatttccagtaagatatgctaaatcca

SEQ ID NO: 272262 - DNA, 201 bp, Homo sapiens
aatatataacaaattgccaatcgttacaggtattacagagaacccagcaggcccctacgggcagagaacagataaagagcttatagactggttgcggctgsaaggagctgatgcaaagacaattgaaaaggtaaatttacaacaaagaaattcttatgctgttgttacacagctgctcagctcttaaggatctgatctttg

SEQ ID NO: 272263 - DNA, 201 bp, Homo sapiens
cacatttctacaggatcctgggtgcctgggcggttcacctgggcttgaggggctgccagggactcagctccaccccgtccctctctgagtctccccattcrgtgtctggctgtccccctacagaaggtccccgcggtgtcgtcctggccctgcccacacagggagagcccatggccaccagcagcagcgagcacggctctg

SEQ ID NO: 272264 - DNA, 201 bp, Homo sapiens
ggattacaggcgtgagccgctacacctggcctttggctgattaattttaaaagcaattttagtttgatatttccatcactaattttttttttttttttttttgagacagagtctcactctgtcgcccaggttggagtgcagtggtgtgatctcagctcactgcaacctctgcctcctcggttcaagcgattctcctgcctc

SEQ ID NO: 272265 - DNA, 201 bp, Homo sapiens
cctcaaattatttgcccactacctcagctagtctctgtctagttttgttgctgttgctggctgattaatatttatttatttatttatttatttatttattkatttatttatttttgagatggagtttcgctcttgtcgcccaggctgcagtacaatggcatgatctcagctcactgcaatctctgcctcccgggttcgagc

SEQ ID NO: 272266 - DNA, 201 bp, Homo sapiens
gacgagcctccgagtacatgcagcccaactgggacaacatcctgggcccgctgtgcatgcctttggtggacaggttcattagcctccttaaggacatccaygtgacctcatggtaattcccatctgccaccagtaacccctggagactcaccaagatgtccccatttctttcagggaagcggtacaccttcaaatgaacag

SEQ ID NO: 272267 - DNA, 201 bp, Homo sapiens
ttttcctcaaattatttgcccactacctcagctagtctctgtctagttttgttgctgttgctggctgattaatatttatttatttatttatttatttattkatttatttatttatttttgagatggagtttcgctcttgtcgcccaggctgcagtacaatggcatgatctcagctcactgcaatctctgcctcccgggttc

SEQ ID NO: 272268 - DNA, 201 bp, Homo sapiens
acatcatcattaacttactcctgtcctaccgtgatatccaggtatgaaatccacctagccgaggctcacgtatgctacgttcttccttggcttgaggaacktcttgtgaagtatttgtatactcagtatgtggtgaagtggctgggttttgttcttcttttttgttttcttttttgagatggagttttgctcttgttgccc

SEQ ID NO: 272269 - DNA, 201 bp, Homo sapiens
caaattttcctcaaattatttgcccactacctcagctagtctctgtctagttttgttgctgttgctggctgattaatatttatttatttatttatttattkatttatttatttatttatttttgagatggagtttcgctcttgtcgcccaggctgcagtacaatggcatgatctcagctcactgcaatctctgcctcccgg

SEQ ID NO: 272270 - DNA, 201 bp, Homo sapiens
tttgtttgttttccaaataggcaccctgcagtacatggcacctgagataattgaccaagggcctcgcggatatggtgccccagccgatatctggtccctgrgctgcaccatcattgagatggccaccagcaagcctccgttccatgagcttggtgagccgcaggcagccatgttcaaagtaagtcatgcttcgtgattgag

SEQ ID NO: 272271 - DNA, 201 bp, Homo sapiens
ttatattagtcagggtccaggcagaaaaacaaaaataaccccagttatttccatggagagaatttaatagaaataactgtttgctggttaccaaaaaccaraaaggcagaaagggaggccctgaggtatcaggaagcctgtacccctggggcttgggggtcaaatgggagggtgagattagaacttgttcggagggagtgt

SEQ ID NO: 272272 - DNA, 201 bp, Homo sapiens
ctagagagctgcatgtggctgttggtaaaggtggtggtgggaggcgaggggaatgggcaacaacaaatttagagaaagaaaacttttcatgagaaagttgstttataccattatttaaacattttttgttgtaatataataatactttggtggttctgtaattataggtatcgcaaagggtttgaactccagtcatccctc

SEQ ID NO: 272273 - DNA, 201 bp, Homo sapiens
taaaaaaatcaccactgcaggtaaaatagcagaaatgattgaccatagaatgaaacaaaaaaaatcatttgctttaaaaaactcaaactattgacttctgkctttgataacttgcagaaacagatgcacgaatggaattttacagcctcttccataaagggaataaggtaagaacataggagaaaatggagttactatttt

SEQ ID NO: 272274 - DNA, 201 bp, Homo sapiens
aaacctaaatgtattaaaacagtttagggtgatagggtagccagtaagtaggatgggaagattgtaattttaagttgagtgctcagagaagaccacacctrttagaaagtgacatggagcaaagatcagaaagaggcaagggaacataccatgtggtatgtgggggaagatcatttcaggtagagggatcagcatgtggaa

SEQ ID NO: 272275 - DNA, 201 bp, Homo sapiens; identical to SEQ ID NO: 54039

SEQ ID NO: 272276 - DNA, 201 bp, Homo sapiens; identical to SEQ ID NO: 54040

SEQ ID NO: 272277 - DNA, 201 bp, Homo sapiens
ctctgaggagcgaggcgccaggccctggcagccctcctgacctgggtccgttgctggccccctcagatgtggtgggaggtcctggtgacctctggaggaaygctgtgctcaggtacctgggctaggcctggcctgatgggtctgtggccgcccctcgtcttcacagggaagagtcttctgtgaaatgcctcagtctcccca

SEQ ID NO: 272278 - DNA, 201 bp, Homo sapiens; identical to SEQ ID NO: 54041

SEQ ID NO: 272279 - DNA, 201 bp, Homo sapiens; identical to SEQ ID NO: 54042

SEQ ID NO: 272280 - DNA, 201 bp, Homo sapiens; identical to SEQ ID NO: 54043

SEQ ID NO: 272281 - DNA, 201 bp, Homo sapiens
gatgtgtgtagcccccagtcacgttcctcacgcttacttgatctattatgacccttttacgtggaccccttagagttgtaagctcttaaaagggctaggartttctttttcggggagctcggctcttaagacgcgagtctgccgacgctcccggccgaataaaaacctcttccttctttaatccggtgtctgaggagtttt

SEQ ID NO: 272282 - DNA, 201 bp, Homo sapiens; identical to SEQ ID NO: 54045

SEQ ID NO: 272283 - DNA, 201 bp, Homo sapiens; identical to SEQ ID NO: 54046

SEQ ID NO: 272284 - DNA, 201 bp, Homo sapiens
ttcacagatgtgtgatattggtcacaggagccctggaataggtatgtctcaggataagagccctatatcttcggcgaaaaaaaagcttacagttacatgtsaaaagtggttcatgttaaaatttagcttttcctaagacatacttgatacatctgaagtcctcctttgggtaaagaacaaaatcattctcagttacaaaaa

SEQ ID NO: 272285 - DNA, 201 bp, Homo sapiens
cctccttttcctttcctcctgtgcttgtacccagggaacacctgagccagatgccttacgccacaatgtgcatcaaggaatgcctccgcctctacgcaccrgtagtaaacatatcccggttactcgacaaacccattacctttccagatggacgctccttacctgcaggtcttaaaacaactttttttttttttaacaatg

SEQ ID NO: 272286 - DNA, 201 bp, Homo sapiens
agccatcatgcccagctaatttttgtattttcagtagagatgaggtatcaccatgttggccatgctggtcttgaacccctgaactcaagtgatcctcccaycttggccttccaaagtgttgggattacaggcatgagccactgcacccagccccatatgaattttaaaagttttttctaattctatgaagaatctcaatag

SEQ ID NO: 272287 - DNA, 201 bp, Homo sapiens
ctaatttattgagagtttttagcatgaagggctgttgaattttgtcaaaggccttttctacatctattgagaaaatcatgtggtttttgtctttggttctstttatatgctggattacgttgattgatttgcatatgttgaaccagccttgcatcccagggatgaagcccacttgatcatggtggataagctttttgatgt

SEQ ID NO: 272288 - DNA, 201 bp, Homo sapiens
tattttattcctgtttccctagtgattagcacagtgcttggtgactggctcatgaggtgtccatgtgatgttcatgagaaaagtgaaggacttggcaattracagtcactcaatatatgacaactattgttgcacaccaggctagcaatcctgtaaggataaaattagattatatgtgtaaagatcctgacatgtggtgag

SEQ ID NO: 272289 - DNA, 201 bp, Homo sapiens
tttctggtaaatttgtttgagttcattgtagattctggatattagccctttgtcagatgaggagattgcaaaaattttctcccattctgtaggttgtctgktcactctgatggtagtttcttttgctgtgcagaagctctttagtttaataagatcccatttgtcaattttggcttttgttgccattgcttttggtgtttt

SEQ ID NO: 272290 - DNA, 201 bp, Homo sapiens
aagaacagatgtacagcttaaaatgttgtctaacaaacgccatatagttgcaatcctggtttaaaagaaaaattgcacgttaccagcactgctaaaaacctcgtgcctgccttcccatcacaaaccccttctatttctccaagatgtaaatgttttcctgactttaataacattcattctttgtttttgtttatagtttgt

SEQ ID NO: 272291 - DNA, 201 bp, Homo sapiens
tcctgacatgtggtgagaaaaacaatatttttattttattttgtagttattatatattttaatacatatttattcataatttttgcttatgtgccaagcaycttcaacctttattataacaacctgtggggtatttataaatatctttatgtaaggaagagaaattgtggctcaaaaagtgaagtgaactgctcaagatga

SEQ ID NO: 272292 - DNA, 201 bp, Homo sapiens
gattacgttgattgatttgcatatgttgaaccagccttgcatcccagggatgaagcccacttgatcatggtggataagctttttgatgtgctgctggattyggtttgccagtattttattaaggaattttgcatcaatgttcatcaggaatattggtctaaaattctctttttttgttgtgtctctgccaggctttggtat

SEQ ID NO: 272293 - DNA, 201 bp, Homo sapiens
gcctggtggctcatacctgtaatccagcgactcaggagacagaggcaggaggatcacttgaggccaggagtttgagacaagcctgggcaacatagtaagaccccatctctacaaaaatttaaaaattatccaggtgtggcagcactgcctgtagccctagctactctggaggctgaggtgggaggatcacttgaacaggaa

SEQ ID NO: 272294 - DNA, 201 bp, Homo sapiens
atacctgtaatccagcgactcaggagacagaggcaggaggatcacttgaggccaggagtttgagacaagcctgggcaacatagtaagaccccatctctacaaaaatttaaaaattatccaggtgtggcagcactgcctgtagccctagctactctggaggctgaggtgggaggatcacttgaacaggaattcaaagctaat

SEQ ID NO: 272295 - DNA, 201 bp, Homo sapiens; identical to SEQ ID NO: 54052

SEQ ID NO: 272296 - DNA, 201 bp, Homo sapiens
taggttttggtaagttgtgtttcaactttcatttgattcgagacttttttttatttccttcataatttctttcttgactcatttgctgttcaggagaatgytgtttaatttccatgtatttgtacagtttccaaagttcctcttattattgatttctaattttagtcctttgtggtctgggaagacacttcatatgatttt

SEQ ID NO: 272297 - DNA, 201 bp, Homo sapiens
tgtctaacatttaagtctttaatccatcttgaattaatttttgtataaggtgtaaggaagggatccagtttcagctttatacatatggctagccagttttyccagcaccatttattaaatagggaatcctttccccatttatttttttgtcaggtttgtcaaatatcagatgggtgtacatgtgtggtattatttctgagg

SEQ ID NO: 272298 - DNA, 201 bp, Homo sapiens
tttaatagcagccattctgactggcatgagatggtatctcactgtggtattgatttgcatttctctaatgattactgatgttgagctttttcatgtgtttkttggccacatgtatgtcttcctttgagaaatatttatccatgtcctttgcctcctttttaatggagttgtttttcttgtaaatttaaattccttgtagat

SEQ ID NO: 272299 - DNA, 201 bp, Homo sapiens; identical to SEQ ID NO: 54048

SEQ ID NO: 272300 - DNA, 201 bp, Homo sapiens
tgtagccttgtagtatagtttgaagtcaggtagcgtgatgcttccagctttgttcttttggcttacgattgacttggcaatgagggctcttttttggctcyatatgaactttaaagtagttttttccaattctgtgaagaaagtcattggtagcttgatggggatggcattgaatctataaattaccttgggcagtatggc

SEQ ID NO: 272301 - DNA, 201 bp, Homo sapiens; identical to SEQ ID NO: 54049

SEQ ID NO: 272302 - DNA, 201 bp, Homo sapiens
ccagttggtcacggttggtgttggttatcaaatcagttgtcttggtatcacagtgcttgtgttcaagtaactcttattttacttaataatggcctcaaagyatatgaaaaaacagtatatacaaagttcagtactatccatggtttcaggcatccactgggggttttggaacgtatccctcacggataagtggggactact

SEQ ID NO: 272303 - DNA, 201 bp, Homo sapiens
tttctggtaaatttgtttgagttcattgtagattctggatattagccctttgtcagatgaggagattgcaaaaattttctcccattctgtaggttgtctgytcactctgatggtagtttcttttgctgtgcagaagctctttagtttaataagatcccatttgtcaattttggcttttgttgccattgcttttggtgtttt

SEQ ID NO: 272304 - DNA, 201 bp, Homo sapiens
cccagttctctcaggctttccagagctcaggacctctgagaagaatggagccctcctggcttcaggaactcatggctcaccccttcttgctgctgatcctmctctgcatgtctctgctgctgtttcaggtaatcaggttgtaccagaggaggagatggacgatcagagccatgcacctgtttcctgcaccccctgcgcact

SEQ ID NO: 272305 - DNA, 201 bp, Homo sapiens
ggtctgttcagattttctatttctttccagttcaatctgggtaggttgaatgtttccaggaatttacccatttcttctaggttttctagtttgttagtgtrtagttgttcataacagtctctagtgaccttttgtatttctgtggtatcagttgaacgtcttctttttcatttgattttatttggatcttctctctttttc

SEQ ID NO: 272306 - DNA, 201 bp, Homo sapiens
acactgataacaaacctactaaaaattgcacaaaagtatctttagataaaaatcactaatgtatataaatacaaaaattttaaataaaatattagtaaacrtaatccaatagctcatcaaaataaatatattggctgggcaggtgactcatgcctgtaatccaaacactttgtgaggccaaggtgggaggattgcttgagt

SEQ ID NO: 272307 - DNA, 201 bp, Homo sapiens
agatcaacaccatcctggctaacatggtgaaaccccgtctctactaaaaatacaaaaaattagtcgggtgtggtggcgggcacctgtagtcccagctactygggaggctgagacaggagaatggtgtgaacccaggaggtggagcttgcagtgagccaagatagcaccactgcactccagcctgggagacagagcaagact

SEQ ID NO: 272308 - DNA, 201 bp, Homo sapiens
gtctgttcagattttctatttctttccagttcaatctgggtaggttgaatgtttccaggaatttacccatttcttctaggttttctagtttgttagtgtayagttgttcataacagtctctagtgaccttttgtatttctgtggtatcagttgaacgtcttctttttcatttgattttatttggatcttctctctttttct

SEQ ID NO: 272309 - DNA, 201 bp, Homo sapiens
tatgtatacatgtgccatgttgtgctgcacccattaactcgtcatttaacattaggtatatctcctaatgctatccctccccgctgcccccaccccacaayaggccccagggtgtgatgttccccatcctgtgtccaagtggtctcattgttcaattcccacaacgagtgagaacatgcggtgtctggttttctgtccttg

SEQ ID NO: 272310 - DNA, 201 bp, Homo sapiens
acataggctctgctcattcttttttatccttttttatttaatttttctgagttatttcaaaagacccatcatcaaggtctgagtctgcttgatctagtctrattgttggagcttccaaatgtattttttatttcattcaatgaatttttcagtttcagaatctctgtttgtttttgtttgtttgcttgttttttaagagac

SEQ ID NO: 272311 - DNA, 201 bp, Homo sapiens
ggtgtggtggcgggcacctgtagtcccagctactcgggaggctgagacaggagaatggtgtgaacccaggaggtggagcttgcagtgagccaagatagcascactgcactccagcctgggagacagagcaagactccacctcaaaaaaaaaaaaaaaaaaaaaaaaaaaggcatgtgagacttcgctgctttggagacaga

SEQ ID NO: 272312 - DNA, 201 bp, Homo sapiens
tatatgtctttttttttttttttttttagagacagggtcttgctctgtcacctagggtagggtccagtggtgtcatcatagctcactgcatcctctagctyctgggcccaagtaatcctcccacttcagcctcctgagcagttgtaactataggcctgcaccactatgcctggctaattttttcttttgtatagacaaggg

SEQ ID NO: 272313 - DNA, 201 bp, Homo sapiens
aaggtctcaggtgccagtgatggactgggcagggcagtctctaggaccctagacagcatgctcaggtactgggaggagtggagccagcctgagcagatctkccctcagaccccccagtagtatatgcaggtgctggctatggtaggcagggagagggtggtccccaggctgctagcagaatgctcagatgagaatggcagc

SEQ ID NO: 272314 - DNA, 201 bp, Homo sapiens
tgtttcatttgcaattaaagtttgaaaaaccccatcctagaagactaggatcatattttattcctgtttccctagtgattagcacagtgcttggtgactgkctcatgaggtgtccatgtgatgttcatgagaaaagtgaaggacttggcaattgacagtcactcaatatatgacaactattgttgcacaccaggctagcaa

SEQ ID NO: 272315 - DNA, 201 bp, Homo sapiens
atattttattcctgtttccctagtgattagcacagtgcttggtgactggctcatgaggtgtccatgtgatgttcatgagaaaagtgaaggacttggcaatygacagtcactcaatatatgacaactattgttgcacaccaggctagcaatcctgtaaggataaaattagattatatgtgtaaagatcctgacatgtggtga

SEQ ID NO: 272316 - DNA, 201 bp, Homo sapiens
cttctggttcgcaacagaagcatcagccattatctgcccacttctgtgatctccaatcctccaatcctctttatggtctcctaacaaatgagttatctcaytgatgcttttaagaatattttttaaagttccctgagttttttcaactctcttagtgaagaaggtagtctgtattcctactacagtactatcagaaatact

SEQ ID NO: 272317 - DNA, 201 bp, Homo sapiens
gatataaatacagcccacatgtctatccaaattttcacagatgtgtgatattggtcacaggagccctggaataggtatgtctcaggataagagccctatawcttcggcgaaaaaaaagcttacagttacatgtgaaaagtggttcatgttaaaatttagcttttcctaagacatacttgatacatctgaagtcctcctttg

SEQ ID NO: 272318 - DNA, 201 bp, Homo sapiens
taaagaacaaaatcattctcagttacaaaaatggggaaaagctgggctttcagtgcaatgccaaagtgactactcctccttttcctttcctcctgtgcttstacccagggaacacctgagccagatgccttacgccacaatgtgcatcaaggaatgcctccgcctctacgcaccggtagtaaacatatcccggttactcga

SEQ ID NO: 272319 - DNA, 201 bp, Homo sapiens
aagatggtgggtgatatatcacacacacatataagaggccaatgccggggatggacagctttccaaaagtcccctcctgggagcaggcagtgtaggcagaragcagctaggctgagcagtggcaagctatccccaggaatgctccccaagaagccagactgggtgaatggatagcagtgcccgccattccacatcttggtg

SEQ ID NO: 272320 - DNA, 201 bp, Homo sapiens
aagtttcttcatctgtgaagtagaataataatagcacctacctatgctattattggagttgtcatgagggttgaagaaaggaatatacatactgcacctarcacagtgtttggcacacaggaagtatatgtaaaattcaagctggtatcagccaggcgcagtggctcacacctggctaacacagtgaaaccccgtctccag

SEQ ID NO: 272321 - DNA, 201 bp, Homo sapiens
aggctggtagaaccttctgccgctccaagcaccttctgagaaataatggatccccaaaagccactgtggcttcatggctgtcataagaaaatcaaggaagytctcaagaaggccaaaaattccaggaaggacaaggctcaagagggtgtgggggggaactgtctctaaacctcaggtgtgcactgtaaagccctaaaggaa

SEQ ID NO: 272322 - DNA, 201 bp, Homo sapiens
atttgtatggaaaatgcagtgaggagtggtagggaagcaggtgaggaggggacagggcagagaaactcccggttcagggagggaaggggagcaggctgccsccaagccctcccacgcagaggatcatgacccgaggtccagggccctagagctggtggggcagtgtgggggacagttctgtgcccggctccacgcagcagt

SEQ ID NO: 272323 - DNA, 201 bp, Homo sapiens
ggggagcagatgacccaggaagcccgagagcatctctacctcgtcctcttctttgacaacaaacgaacctggtaaggaggggagcatttggtgtgactcayagccacagatgcagccctgtgtggtatgggggcagactgccaggaaactccagcaacaggcagactgggctatcacaagtcagtgggggagggacttaga

SEQ ID NO: 272324 - DNA, 201 bp, Homo sapiens
tcatagaagctgttgctatattgtggttatttttttagatcatgagtgtgaacactctttcggaaaggttaaggaactcagttggggagctcctcaagggragcaagtcctcagtccctggactagacttgggctccggggccaattcatagcaggtgctcagaaaacatgtgtagagggacaggacccaggcctaaccct

SEQ ID NO: 272325 - DNA, 201 bp, Homo sapiens
cacttgggcacattatttagcatctctgtactaaagtttcttcatctgtgaagtagaataataatagcacctacctatgctattattggagttgtcatgarggttgaagaaaggaatatacatactgcacctagcacagtgtttggcacacaggaagtatatgtaaaattcaagctggtatcagccaggcgcagtggctca

SEQ ID NO: 272326 - DNA, 201 bp, Homo sapiens; identical to SEQ ID NO: 54057

SEQ ID NO: 272327 - DNA, 201 bp, Homo sapiens
gagaatgtttttggtgcttagaaacccattcctggccgggcgtggtggctcacgcctgtaatcccaacactttgggaggtcgaggcaggcagatcatctgmggtcaggagttcaagaccagcctggccaacatggtgaaaccccatctctactaaaaatacgaaaattagtcaggcgtgatggcaggcacctgtcccagct

SEQ ID NO: 272328 - DNA, 201 bp, Homo sapiens
agcttgcagtgagccgagatcgtgccactgcactccagcctgggcgacagagtgagactctgtctcaacaaaaaaaaaaagaaacctgttcttgagtctcrgctcctggcttagttagtcataaggcctcaagaaagtcattcacctcttccggcttctcttagcttgtttgtagaatgggaataacagtttctatctaga

SEQ ID NO: 272329 - DNA, 201 bp, Homo sapiens
gtaaaattcaagctggtatcagccaggcgcagtggctcacacctggctaacacagtgaaaccccgtctccagcctgggcaacagagcgagactctgtctcaaaaaaaaaaaaaaaaaaaaaaattcaagctggtatcattgtagtgaatgggatagttttgtatctaagaacacgtgtgttcttcacagtagccctgtaag

SEQ ID NO: 272330 - DNA, 201 bp, Homo sapiens
gtaatcccagctactcaggaggctgaggcgggagaatcatttgaacctgggaagcagaggttgcagtgagctgagatcatgccattgcactccagcctggrcgacagggcgacagggcgagactccgtctcaaaaaaaaaaaaaaaacctggccgggcgtggtggctcacacccgtaatcccagcattttgggaggccgag

SEQ ID NO: 272331 - DNA, 201 bp, Homo sapiens
tgggaggccgaggcgggtggatcacgaggtcaggagatcaagaccatcctgcctaatacggtgaaaccccgtctctactaaaaatacaaaaaaaattagcmgggtgtggtggtgggcgcctgtagtcccagctacttgggaggctgaggcaggagaatggcgtgaacccgggaggcgaagcttgcagtgagccgagatcgt

SEQ ID NO: 272332 - DNA, 201 bp, Homo sapiens
ggaaggaagggagggagggaaggaagggagggcagagggagagcagaggaaggaagagaggaaagtaggcgagaggacaactctggagccacagcctaccrtggccaagccccacttacaagatgtaggcgatgacacctatggaccagcaatccacagccttgctgtagggcttctgggccaggacttcaggggctgtgg

SEQ ID NO: 272333 - DNA, 201 bp, Homo sapiens
aagtgcttagaataatgccaggcacatagtaagtattattaccattattattatcctgctaatcaccatagtgaagtgacaaggattttgagcccattcckggttgtgtgacctagggcaagtgatttcattcattctgtaaatatatacaaagcatctgctgtgtgaccggggatacaccagtgaacaaaacagacccaa

SEQ ID NO: 272334 - DNA, 201 bp, Homo sapiens
acataggtgttcagctagtagcacctcttattacagcaatttcagtgtattcataggccgcgcatggtggctcacgcctgtaatcccagcactttgggagsccaaggtggacagatcacttgaggtcaggagttcgagaccaggctggccaacatggtgaaaccccatctctactaaaaacacaaaaattagccacacgtg

SEQ ID NO: 272335 - DNA, 201 bp, Homo sapiens
aaagtgcttagaataatgccaggcacatagtaagtattattaccattattattatcctgctaatcaccatagtgaagtgacaaggattttgagcccattcytggttgtgtgacctagggcaagtgatttcattcattctgtaaatatatacaaagcatctgctgtgtgaccggggatacaccagtgaacaaaacagaccca

SEQ ID NO: 272336 - DNA, 201 bp, Homo sapiens
gtggctcacgcctgtaatcccagcactttgggaggccaaggtggacagatcacttgaggtcaggagttcgagaccaggctggccaacatggtgaaaccccrtctctactaaaaacacaaaaattagccacacgtggtggcacatgcctgtaatcccagctacttgggaggctgaggtaggagaattgcttgaacctgggag

SEQ ID NO: 272337 - DNA, 201 bp, Homo sapiens
acgcctgtaatcccagcactttgggaggccaaggtggacagatcacttgaggtcaggagttcgagaccaggctggccaacatggtgaaaccccatctctamtaaaaacacaaaaattagccacacgtggtggcacatgcctgtaatcccagctacttgggaggctgaggtaggagaattgcttgaacctgggagagccagg

SEQ ID NO: 272338 - DNA, 201 bp, Homo sapiens
taatcccagcactttgggaggccaaggtggacagatcacttgaggtcaggagttcgagaccaggctggccaacatggtgaaaccccatctctactaaaaayacaaaaattagccacacgtggtggcacatgcctgtaatcccagctacttgggaggctgaggtaggagaattgcttgaacctgggagagccaggattgcac

SEQ ID NO: 272339 - DNA, 201 bp, Homo sapiens
gtgtggtaataccttcttcccaggttatgataacctggcccacataggtgttcagctagtagcacctcttattacagcaatttcagtgtattcataggccrcgcatggtggctcacgcctgtaatcccagcactttgggaggccaaggtggacagatcacttgaggtcaggagttcgagaccaggctggccaacatggtga

SEQ ID NO: 272340 - DNA, 201 bp, Homo sapiens
tccaaggtgagtacaggacctgggctggggttagggttcttggacataagtcacttctctatgactcagttttgccacctgtaaaatggggattatatctrcttcataggcttttatgaggatttaaggaactaatacatgtaaagtgcttagaataatgccaggcacatagtaagtattattaccattattattatcctg

SEQ ID NO: 272341 - DNA, 201 bp, Homo sapiens
acactgcccgggtcctccatcttggagaggccaaagtcggagatcatgattttggagtcttcatccaggctgtagtacagcagattctctggcttgaaggkcaggagggaagagaaggggcaatcagagatggttagaggctggtagaaccttctgccgctccaagcaccttctgagaaataatggatccccaaaagccac

SEQ ID NO: 272342 - DNA, 201 bp, Homo sapiens
gtcggagatcatgattttggagtcttcatccaggctgtagtacagcagattctctggcttgaagggcaggagggaagagaaggggcaatcagagatggttrgaggctggtagaaccttctgccgctccaagcaccttctgagaaataatggatccccaaaagccactgtggcttcatggctgtcataagaaaatcaaggaa

SEQ ID NO: 272343 - DNA, 201 bp, Homo sapiens
ggggtcaggcaggagccatggaaggagttccccctttataaactctaccagccctgcctgctcactcctgttctagctacattatcctttctgttccttgwatgtgccgccatcttgccctcctcagggcctttgcacttgccattgcttctgcctatgccactctttccccacacctccaatgtctggctccctcaccac

SEQ ID NO: 272344 - DNA, 201 bp, Homo sapiens
gatagttttgtatctaagaacacgtgtgttcttcacagtagccctgtaaggcaaatgttttacagaggcaagtgtatcgattggcagatgtgagaaccaasctaggacaagtgcttgggaactgcatagcaaagagacagactgcctcaaaacaggagaatgtttttggtgcttagaaacccattcctggccgggcgtggt

SEQ ID NO: 272345 - DNA, 201 bp, Homo sapiens
taatagcacttgtttttctttttttgagacagggtctcgctctgttgcccaggtaggaatgcagagaggcccattccagcctcgaccccccgggcgcagcytcccgagtagctgggactacaggtgtgcgccatgcccggttaaatttttgtattttttgtagaggtgaggtttcgccatgttgctcagactggaagatag

SEQ ID NO: 272346 - DNA, 201 bp, Homo sapiens; identical to SEQ ID NO: 54117

SEQ ID NO: 272347 - DNA, 201 bp, Homo sapiens
gggagacagcgctaaggatggttttatcttccctttattacaagaaggaacaataaaatagaaacatttgtatggaaaatgcagtgaggagtggtagggargcaggtgaggaggggacagggcagagaaactcccggttcagggagggaaggggagcaggctgcccccaagccctcccacgcagaggatcatgacccgagg

SEQ ID NO: 272348 - DNA, 201 bp, Homo sapiens; identical to SEQ ID NO: 54119

SEQ ID NO: 272349 - DNA, 201 bp, Homo sapiens
atcagatgcctcctgaagaattacagacttcttcctctagacttggaggtgagggaccctctctggaatagagaaggtgttgggagtgtttgttgaatgawagagtgaatgaatgaagtccttcagtaaggatccctaagcagttactgtgtgcccagtgtgatgccaggtgctgtgcaagctgagcctgggtagggatgg

SEQ ID NO: 272350 - DNA, 201 bp, Homo sapiens; identical to SEQ ID NO: 54060

SEQ ID NO: 272351 - DNA, 201 bp, Homo sapiens
gcaaagatgatcaagaaagagatgacggcactgcggcggaagcttgcccatcagcgagagacgggacgtgatggccctgagcggcatggcccctcgagccrgggtagtctgacaccccacccggcagcctgtgacaaggatgggcagacagatagtgcggcagaggagagcagcagccaggagacaagcaaaggtctgaat

SEQ ID NO: 272352 - DNA, 201 bp, Homo sapiens
ggctggccaacatggtgaaaccccatctctactaaaaacacaaaaattagccacacgtggtggcacatgcctgtaatcccagctacttgggaggctgaggyaggagaattgcttgaacctgggagagccaggattgcaccagtgcactccagcctaggcaacagagcgagactccatctcaaaaacaaacaaaaaaaaagt

SEQ ID NO: 272353 - DNA, 201 bp, Homo sapiens
ggacccagtgtcagggtctcgccagccccccagctgctgatccaccccctctcccccattcctgtgaagtggtaaggaagagtctgggccggggagctggytggctgtcagaggatgaggactccccgctggatgctctggacctcgtgtgggccaaatgccgaggctatccatcatacccagctctggtatgcttgcttc

SEQ ID NO: 272354 - DNA, 201 bp, Homo sapiens
accccatctctactaaaaacacaaaaattagccacacgtggtggcacatgcctgtaatcccagctacttgggaggctgaggtaggagaattgcttgaaccygggagagccaggattgcaccagtgcactccagcctaggcaacagagcgagactccatctcaaaaacaaacaaaaaaaaagtgtattcatagatagtatct

SEQ ID NO: 272355 - DNA, 201 bp, Homo sapiens
atatagaacaacagtaaccccagagtgaaggagaaagcagccggctttggggctataagcaagatgctggccacatgctgcccttcttccacaagggctcsttctgtgtctgtcaaaggtggctgactgcatctgcctgatggccctagacaagccccaggctgtgcccgtggatgtccatatgtggcacattgcccaacg

SEQ ID NO: 272356 - DNA, 201 bp, Homo sapiens; identical to SEQ ID NO: 54061

SEQ ID NO: 272357 - DNA, 201 bp, Homo sapiens
cactttgttgcccaggctggagtgcagtggcgcgatctcagctcactgcaacccccatctccgaggttcaagtaattctcctgcctcagcttcccaagtasctgggattacaggcacgcaccaccatgtgtggctaattcttttatttttagtagagacagggttttgccatgttggccaggatggtcttgaactcctgac

SEQ ID NO: 272358 - DNA, 201 bp, Homo sapiens
cactgactcagactgaggagcagctccactgcactgtgtaccgaggagacaagagccaggctagcaggcccacaccagacgagctggaggccgtgcgcaartacttccagctagatgttaccctggctcaactgtatcaccactggggttccgtggactcccacttccaagaggtggctcagaaattccaaggtgagtaca

SEQ ID NO: 272359 - DNA, 201 bp, Homo sapiens; identical to SEQ ID NO: 54112

SEQ ID NO: 272360 - DNA, 201 bp, Homo sapiens
ctctgggtcttattagaaatgctctgccaggagttgggtgtggtggctcatgcctagcactttgggaggccgaggcgggtggatcacctgaggtcaggagwtcgagaccagcctggccaacatggcgaaaccccatctctactaaaaatacaaaaattagccgggcgtggtggcaggtgcctgtaatcccagctactaggg

SEQ ID NO: 272361 - DNA, 201 bp, Homo sapiens; identical to SEQ ID NO: 54055

SEQ ID NO: 272362 - DNA, 201 bp, Homo sapiens; identical to SEQ ID NO: 54118

SEQ ID NO: 272363 - DNA, 201 bp, Homo sapiens
cttgggggagacaaatgggaagatatttcttcttttcggttttttgtttgtttgtttgttttggtagaaataggctcttaacaatgttgcctaggctggtsttaaactcttgccctcaagcagtgttcctgctttgccctcccaaagtgctggaattacagggatgagccactgctcccggccacattttgttcctttcgt

SEQ ID NO: 272364 - DNA, 201 bp, Homo sapiens
ggctccggggtggagcactggggcagtctcaggggtcaggcaggagccatggaaggagttccccctttataaactctaccagccctgcctgctcactcctsttctagctacattatcctttctgttccttgtatgtgccgccatcttgccctcctcagggcctttgcacttgccattgcttctgcctatgccactctttcc

SEQ ID NO: 272365 - DNA, 201 bp, Homo sapiens; identical to SEQ ID NO: 54054

SEQ ID NO: 272366 - DNA, 201 bp, Homo sapiens
cctgggagctgggtggaggcttggcttccggaggcagagcaggaaggagaaaggatataagtagatgttttatgagagaaaaaagcagagtgcagaaagaktagaaaggatatagccctttgaatgaatttctagaaagaccatttgttcagatgcaacacatatatgctgctatatatatgcagcaatttccagaaggaa

SEQ ID NO: 272367 - DNA, 201 bp, Homo sapiens
cctctctggaatagagaaggtgttgggagtgtttgttgaatgaaagagtgaatgaatgaagtccttcagtaaggatccctaagcagttactgtgtgcccartgtgatgccaggtgctgtgcaagctgagcctgggtagggatggggaggagtcctggggaggctgggaccagaactagggatatggactcaccttccactt

SEQ ID NO: 272368 - DNA, 201 bp, Homo sapiens
aaataatggatccccaaaagccactgtggcttcatggctgtcataagaaaatcaaggaagctctcaagaaggccaaaaattccaggaaggacaaggctcargagggtgtgggggggaactgtctctaaacctcaggtgtgcactgtaaagccctaaaggaatgtttgaatgcctattttatgccagaccctggattagtgc

SEQ ID NO: 272369 - DNA, 201 bp, Homo sapiens
ataactgcctagaggcctggggcccctaccggtcgtgaggtgagtgggcatctgtccagcctggaagaggggcactaggtgactccctcccctgctgttgkaaatactgtaattatcggagaatttaaattattctcatttgtaactgcgtttccgggtcgcgccagagtcatttggtactaaaaaaaaaaaaaaaaaaga

SEQ ID NO: 272370 - DNA, 201 bp, Homo sapiens
taaaattcaagctggtatcagccaggcgcagtggctcacacctggctaacacagtgaaaccccgtctccagcctgggcaacagagcgagactctgtctcaraaaaaaaaaaaaaaaaaaaaattcaagctggtatcattgtagtgaatgggatagttttgtatctaagaacacgtgtgttcttcacagtagccctgtaagg

SEQ ID NO: 272371 - DNA, 201 bp, Homo sapiens
tagaacaacagtaaccccagagtgaaggagaaagcagccggctttggggctataagcaagatgctggccacatgctgcccttcttccacaagggctcattstgtgtctgtcaaaggtggctgactgcatctgcctgatggccctagacaagccccaggctgtgcccgtggatgtccatatgtggcacattgcccaacgtga

SEQ ID NO: 272372 - DNA, 201 bp, Homo sapiens
gtagaatgggaataacagtttctatctagaagggctttgggagtgaataaagcaatcatgaggcagtgtagtgtaatgggttaagagcacggcgttagccrggtggggtagctcatgctggtaatttcagcacttttgggagcccaaggtgggaggatggcttgagcccaggagtttgagaccagcctgggcaacatagtg

SEQ ID NO: 272373 - DNA, 201 bp, Homo sapiens
ctcaggaagctgggcctgggctatcgtgcccgttacgtgagtgccagtgcccgagccatcctggaagaacagggcgggctagcctggctgcagcagctacragagtcctcatatgaggaggcccacaaggccctctgcatcctgcctggagtgggcaccaaggtgaggccccagggggtaggagctgccctctctactgac

SEQ ID NO: 272374 - DNA, 201 bp, Homo sapiens; identical to SEQ ID NO: 54058

SEQ ID NO: 272375 - DNA, 201 bp, Homo sapiens
ccaggcgcagtggctcacacctggctaacacagtgaaaccccgtctccagcctgggcaacagagcgagactctgtctcaaaaaaaaaaaaaaaaaaaaaawttcaagctggtatcattgtagtgaatgggatagttttgtatctaagaacacgtgtgttcttcacagtagccctgtaaggcaaatgttttacagaggcaag

SEQ ID NO: 272376 - DNA, 201 bp, Homo sapiens
gagagggagggcccacaggtcagaaaaagctccagagacctcacagcattgtagggcggggtggtgggccaaagttaggacactgcgtaaaacaggccatsccaccacctctacctgctcatgccaggagaatccataactgcctagaggcctggggcccctaccggtcgtgaggtgagtgggcatctgtccagcctggaa

SEQ ID NO: 272377 - DNA, 201 bp, Homo sapiens
ccaagctggttcctctgggtgtgaaccaggacctagacaaggagaagatgctggagggccgcaagtccaacatccgcaagtcagtacagatcgcctaccasagggctctgcagcaccgcagcaaggtgcaaggcgagcagagcagtgagaccagcgatagtgattgatactgctcaacacagcccaacctatagtgccctg

SEQ ID NO: 272378 - DNA, 201 bp, Homo sapiens
tgcctattttatgccagaccctggattagtgcttgatttaatgccatcctcactgcttccctgctaggccagtctgtataatctcacctaacagatgaggwaactgatgcctttggaggcaaagtgactcacccaagaacccacagttaggcagtagcagagccagaattcaaaaccaggcatgtcacaccccaagtgccc

SEQ ID NO: 272379 - DNA, 201 bp, Homo sapiens
caacttgaagggcagagaccaggtttgagttatttctgcattcccagcaccaagaacagagccatctccagcctcagttcccaaacctaggctagaacacytagctcttggcagcaagttaaatggactgactggcaccttcattctctcgacttctttctcttcaagaacccagggctattgggagagcagcccgtgtcc

SEQ ID NO: 272380 - DNA, 201 bp, Homo sapiens
tctctaagttcttgaggaggaaaagccttgggaggacatggactgaaccaaactgggctcttattatatcctcagatcattgatccaaagatgccccgagraggtatgttccaccatggggttcccatccctgtgcccccactggaggtgctgaaacttggggagcagatgacccaggaagcccgagagcatctctacctc

SEQ ID NO: 272381 - DNA, 201 bp, Homo sapiens
ttctctctttttctctaagggagaatgaggagaaggtgccctgactagggcctctggtgtgagattccactcctggaacaggacctttttcccaggggacyctgcccacccatccaggggcagaatcttctaggaaaggagactcgagtgtaagctctagaggcagagtctgaaacccacatggaggcctaccaaatacaa

SEQ ID NO: 272382 - DNA, 201 bp, Homo sapiens
gcactggcacctccatcacatctgtcatgttaggccaggcacttgaaataaaggacttctgatgttccccacaaccctgccaagtggaaattgtgatcccyattttataaaggggcaatttaaggcttagagagtttaaatgatttgtccaaagcaggaaaggaggaggatgggagggccaaggcagggtcagcttggggc

SEQ ID NO: 272383 - DNA, 201 bp, Homo sapiens
tttttgagcgaaagggttgtgtcgaccatgtgtctgagaggctgagtgggcactagtggacacagctatagctagaaaccaaaggaccatcagagacttakgacaaatatagaggtggctcccacccagactcagatggcttctagacttagttttcccacctctgcctccacagtgacaaaatgaggataaagcaggcat

SEQ ID NO: 272384 - DNA, 201 bp, Homo sapiens
tcagatgcaacacatatatgctgctatatatatgcagcaatttccagaaggaaattgcaggaaactaaataatagtttccttgggggagacaaatgggaaratatttcttcttttcggttttttgtttgtttgtttgttttggtagaaataggctcttaacaatgttgcctaggctggtcttaaactcttgccctcaagca

SEQ ID NO: 272385 - DNA, 201 bp, Homo sapiens
atgggaagacagaacagaggtggccgcaggggcaggccctccactccagcccgggtgcacctttgtggaccacccatgcccttctgcagagcccgctcctyacccccagccactggtgtcagcagctccccatggctcgccgtctgcccctgcccctcctggctggtgcccagctgcagtttcctcatgtgccgcaccaca

SEQ ID NO: 272386 - DNA, 201 bp, Homo sapiens
gggcagtgtgggggacagttctgtgcccggctccacgcagcagtctcgacagcaacagccagctgccggccctgcatgggaagacagaacagaggtggccrcaggggcaggccctccactccagcccgggtgcacctttgtggaccacccatgcccttctgcagagcccgctcctcacccccagccactggtgtcagcagc

SEQ ID NO: 272387 - DNA, 201 bp, Homo sapiens
gaaagagtagaaaggatatagccctttgaatgaatttctagaaagaccatttgttcagatgcaacacatatatgctgctatatatatgcagcaatttccaraaggaaattgcaggaaactaaataatagtttccttgggggagacaaatgggaagatatttcttcttttcggttttttgtttgtttgtttgttttggtaga

SEQ ID NO: 272388 - DNA, 201 bp, Homo sapiens
gctttatcaccactgagagtctcttggggcctccaggcagcttcatgccatcagtgagcaccacagctggtccctgccttcatactgacctccttctcccraaaccgcggcctctcttctccctttcttcgggtgggcctagcagtctgacgccggctcttcttttgcaggtgtttttggatgagacaatgatagggattc

SEQ ID NO: 272389 - DNA, 201 bp, Homo sapiens
tgaccttggagtcagtgtgcaggggaggggcagcaggacgtcggaggatcccgggttcccgcttagatgaacctgtctggagatgctcttgtttggactgygtggtccttacggaatccacgtaggaaaagctgctgagctggaatcgggagactagcttctgcccgtgcttcaccagcagctgggcctgaacttcctggg

SEQ ID NO: 272390 - DNA, 201 bp, Homo sapiens; identical to SEQ ID NO: 135222

SEQ ID NO: 272391 - DNA, 201 bp, Homo sapiens
tctgttctgtggaaaagtgaggaaggcgtgggtctcccttgtgggcagcagttacaccaagctcctgagaacaagggcaaccttaacttcgaaccctgggsttaaaatctgtgtgattttttaaaatcagggtttctaagcattttataagcctcagtttcttcactgaagcataaagatagtaaccttggtctcctgtga

SEQ ID NO: 272392 - DNA, 201 bp, Homo sapiens
tgttttcttcaacattgtttcattataaaattgagagaaaaattgtttttttttttatatcattttacttaaagtctccattcccaagaatgtatatagcygtgaagcgaggagttactgtaactgattgtggagtggggttggaaaggataagagtttgccagaggcttctgtctcctcttaatttctaacattctctgt

SEQ ID NO: 272393 - DNA, 201 bp, Homo sapiens
catataatactgttttcttcaacattgtttcattataaaattgagagaaaaattgtttttttttttatatcattttacttaaagtctccattcccaagaaygtatatagctgtgaagcgaggagttactgtaactgattgtggagtggggttggaaaggataagagtttgccagaggcttctgtctcctcttaatttctaa

SEQ ID NO: 272394 - DNA, 201 bp, Homo sapiens
cctcatataatactgttttcttcaacattgtttcattataaaattgagagaaaaattgtttttttttttatatcattttacttaaagtctccattcccaaraatgtatatagctgtgaagcgaggagttactgtaactgattgtggagtggggttggaaaggataagagtttgccagaggcttctgtctcctcttaatttc

SEQ ID NO: 272395 - DNA, 201 bp, Homo sapiens
attaagagcaaccacttgtggactatggcggtgtttccaagtcagtgttcccagaaacattttactggaaggtagtaatgagggtgtactaattatatgtrtgatttcaaaaaacttaaggaaaattagatatttaagtgacatgagggttcttaggttattatttaatagatgtagtttagagtcaaattatgtcaatat

SEQ ID NO: 272396 - DNA, 201 bp, Homo sapiens; identical to SEQ ID NO: 135229

SEQ ID NO: 272397 - DNA, 201 bp, Homo sapiens
acataataccatcactaccaccaacaataatgccagcaacaagacctgcagcatcatcacatcaccaccacaatcaccatcatcaccaacaccaccaccascaccaccaccatcaccatcatcaccatcaccactaccaccaccaccaccaccaccaccatcaccaccatcaccaccatcaccatcaccaccaccaccatc

SEQ ID NO: 272398 - DNA, 201 bp, Homo sapiens
taccatcactaccaccaacaataatgccagcaacaagacctgcagcatcatcacatcaccaccacaatcaccatcatcaccaacaccaccaccagcaccamcaccatcaccatcatcaccatcaccactaccaccaccaccaccaccaccaccatcaccaccatcaccaccatcaccatcaccaccaccaccatcatcacc

SEQ ID NO: 272399 - DNA, 201 bp, Homo sapiens
cactaccaccaacaataatgccagcaacaagacctgcagcatcatcacatcaccaccacaatcaccatcatcaccaacaccaccaccagcaccaccaccaycaccatcatcaccatcaccactaccaccaccaccaccaccaccaccatcaccaccatcaccaccatcaccatcaccaccaccaccatcatcaccatcacc

SEQ ID NO: 272400 - DNA, 201 bp, Homo sapiens
ccaccaccatcatcaccatcaccaccaccaccaccatcaccaccaccaccaccaccaccatgtccaccaccactaccaccaccatcaccatcaccatcacsaccaccaccaccaccatcaccatcaccatcatcaccatcacctccaccaccaccaccactatcaccaccatcaccatcaacaccatcaccaccatcatca

SEQ ID NO: 272401 - DNA, 201 bp, Homo sapiens; identical to SEQ ID NO: 135245

SEQ ID NO: 272402 - DNA, 201 bp, Homo sapiens; identical to SEQ ID NO: 54129

SEQ ID NO: 272403 - DNA, 201 bp, Homo sapiens
acccctgctgctggtgctgctgctcacctggggcggcggcaggaagtgtgcagggctggaagccaaagtgcctcccaggccctggcccctcaggagctacygcatgtgtgctggaggggaggggatttcctcaccaagtcctgagcctgtcctcagcccctggttgggtttctgtgccttttggagttggttaaaggtaca

SEQ ID NO: 272404 - DNA, 201 bp, Homo sapiens
aggacctgcacattcctgaactcagggtatgtaatttgagagtccaggtgatgccctcgacccccctcaaatgcagacggagcctggtcctgagacagtcrgcctcccttctccacccctgctgctggtgctgctgctcacctggggcggcggcaggaagtgtgcagggctggaagccaaagtgcctcccaggccctggcc

SEQ ID NO: 272405 - DNA, 201 bp, Homo sapiens
cttgctctcactctccaagtgccttaggttttaccttgctaatgtgaaccaatttccaaatctcaagccaccattcctttcagaactggaattatggattygtgttcatcaatggacgtaaccttgggcgatattggaatattgggcctcagaaaacactgtaccttcctggagtttggcttcatccagaagacaatgagg

SEQ ID NO: 272406 - DNA, 201 bp, Homo sapiens
cagccttaccattaaagggttggttctatttatgcttttctctttcattcctagacagcaaggtagaagttctataacatatcccactctaaacccacctycatttgagtgccataaagtatctcaatcttgctctcactctccaagtgccttaggttttaccttgctaatgtgaaccaatttccaaatctcaagccacca

SEQ ID NO: 272407 - DNA, 201 bp, Homo sapiens
gtccctctttatctctaataatgcttcttgccttaaagtattatttttctgaatattaacagagctatagcaacttccttttggttagggtttacatatcrttatccattgtttttcttttatttttccaatgccttatgtttttgatgcttctcttatatgtagcatataactactttatttgaaatcaagaccagcaac

SEQ ID NO: 272408 - DNA, 201 bp, Homo sapiens
cacaaggcagtccttaggtgaagggaagactgctgggccctggagcctcctgttctcccatgtgtctctccatgtgggactcagtgaaaaaacgggttgtygggtagacgccctccatggctgcgtggtctccatgacctggcctgtcccagcaggactgccgatacctgaggatcctggtggagaatcaaggacgagtca

SEQ ID NO: 272409 - DNA, 201 bp, Homo sapiens
ctggcaacagcaatctttttattatctttatggatttgcctatattggaaatgactcccataccttttttttttttacacgtagaataagaataaatttawtgtatttattttcatgactgaagaattacattcttcaaagcaagaattcagaatgtacataattataagccatatttcatatcagtgcattatttttata

SEQ ID NO: 272410 - DNA, 201 bp, Homo sapiens
caatagcagccttaccattaaagggttggttctatttatgcttttctctttcattcctagacagcaaggtagaagttctataacatatcccactctaaacycacctccatttgagtgccataaagtatctcaatcttgctctcactctccaagtgccttaggttttaccttgctaatgtgaaccaatttccaaatctcaag

SEQ ID NO: 272411 - DNA, 201 bp, Homo sapiens
ttatatctagggcttgtctatggtaaataattaagacttcgtttgtgtttatgttcataactgagatctctttgtcaggttttggtgccaatgtttagggmtctcataaaggatttaggaaggcgaatttgtgtaagacaagtatcacttcttaaacatttaatggagttcattagtgaagccttctagagctggcatttt

SEQ ID NO: 272412 - DNA, 201 bp, Homo sapiens
tctttttattatctttatggatttgcctatattggaaatgactcccataccttttttttttttacacgtagaataagaataaatttaatgtatttattttmatgactgaagaattacattcttcaaagcaagaattcagaatgtacataattataagccatatttcatatcagtgcattatttttatattatactttctat

SEQ ID NO: 272413 - DNA, 201 bp, Homo sapiens
gcttctcagaactcaacactgccaacagtggtacatttttatatataactttgcctgaacacacacgtacacaattatttttacactaatagaattgtacyatgtattctgaagcttgccttttttttctgtgtggggtgagttggtaagttagtttttacttagaatatctttttctgtataaatacacatagataacat

SEQ ID NO: 272414 - DNA, 201 bp, Homo sapiens
tttatttttataatgtcttgacatagatacttagataatggactttcagtctttgttctttttaattatatgaatttaggttattaatcatcatttacgcrtggatttggttgcatcctctaagttttaaaaagattttttgaggtaaaattacataacataaaattagttctgttaaagtgaacgattaagtagtctttc

SEQ ID NO: 272415 - DNA, 201 bp, Homo sapiens
gggtacttcggcgtcagaactagggccctggaacaagtgtcctgattctgatcttaacgcatctagtctactctatctcattgaaacagaaccttaggctyggcccacgccacctggggtgggtactgggaactgggttgggaaggggacttcttctcccccatggcttggcctttcttccaggctccgctctgccacctg

SEQ ID NO: 272416 - DNA, 201 bp, Homo sapiens
ctcatcaccatgccctgcatttccctgagtttccttcctgggcagtggagacgtaagcacagagcagtgtcacatggcatctgtttcatcatttcccattygaagaacccttggggaccattaggcaggaccaaatgacagggtcttaggaaggaggatcctgactgctcagcccttggacttctgctcttgccatttctc

SEQ ID NO: 272417 - DNA, 201 bp, Homo sapiens
aagtctgcattgctttgtcccagatgctagagaatatccagtcctggctcatattctctttcctgcctcccatctgcatctgcaggaataactggatctgycagcatcaataactcttccctggagggctttaccatctattccctggagatgaaaatgagcttctttgagaggtatgctccagctggcccccagtgcaca

SEQ ID NO: 272418 - DNA, 201 bp, Homo sapiens
atacagaatgagcagaaaggtgggctctggctgtggcttctcctcagttgctcagaaccgaagacccgggctatgcactggagtcgggggcgggagagggyggggaaaccagccgctcagcagtgggctacccaggccctgggagcagagatgcaaaatcggcccctcgcccttgtcttgccttctctgatctccagggcc

SEQ ID NO: 272419 - DNA, 201 bp, Homo sapiens
gtatccccccgtgagaccgtcgctgtacctcccgctgtgggacgccctatcctacttaaatgaggtgcgtgctgcctggccacaggaggcggagtggccaytggagggatgggggagggattccttcaggaaactttttattaggaagtgggaaaacaaatcctctgcatttcattcaaatttagaactgtgggacaagag

SEQ ID NO: 272420 - DNA, 201 bp, Homo sapiens
tctgctaattgattcacttgatcagccgtagatattcatgcaacttttcacatacaagcactcagccaggccctgaggatgctctggtggatagaaattayatggttcccacccccaacagagtataagttagtgaggtccacagatcattacagagtaaaacaatcaatatgtagttccatgtttggtggatactttgaa

SEQ ID NO: 272421 - DNA, 201 bp, Homo sapiens
gaaccttcccataaacaatgggagcggccagtcctacgggcttgtcctgtatgagaagtccatctgctccggaggccgcctccgtgcccacgctcatgacrtggcacaggtagggccagcaggctgtctgtgtgggaagcaaagtgcatcacctccccatgctgtcgggcagggtagttgactgaaggatgcacgttgctg

SEQ ID NO: 272422 - DNA, 201 bp, Homo sapiens
tgtaactaaatttaatttaatgaaataaacatttgcttggtgcctcattcattgctagacttcaactattttagaatacaatttatttactcttttttttycttgagacagggtcttgcttggtggctgtggctggaatgcggtggcacaatcatggctcactgcagccttgaactcctgggctgaagcaatcctccggcc

SEQ ID NO: 272423 - DNA, 201 bp, Homo sapiens
tctacccttagctcctccacctgcaccaggcaccccaagcctggccataagggtgggggagagaggcaggacaaggtcgcatcccccatccgggtccccgrgggtcttccttggggaactgttgtgatgccccaacagaaaggggcccccactctgctccgctcctccaggcagccaggaaggcctccaggaaggcagcat

SEQ ID NO: 272424 - DNA, 201 bp, Homo sapiens
accccgcccaggagctacagggctttccagagcaggtgtggctgggctgcgggagggaggtgagcccgtagcccctcctccctccccattgccggccacamagtccatcttgttatctacccttagctcctccacctgcaccaggcaccccaagcctggccataagggtgggggagagaggcaggacaaggtcgcatcccc

SEQ ID NO: 272425 - DNA, 201 bp, Homo sapiens
tggggaggggggtcctggctgccgagggagggaccctcctctcctggaggtcctgagttgggggtgcctcccagagggcaccagggacccacgagggcacrcaggtccacgtcccaaatccctgctctccgcctgggcgtgtgtgcagaggtgtgcgtgttgtagggtgggagaggagccccctcaccttctctcacctgg

SEQ ID NO: 272426 - DNA, 201 bp, Homo sapiens
acttggaaaccccacctttattctccgacccagaacagaagcggtgattcagagcgggattagggagtgcaggagggacggagccgccctccctgggcgasggcagggctcggaggtgagaccagcagtttgggttccatgaagcctctgaggagccccagggtggaggcaggaaagtcgggtcaccaccagctgtgcgcg

SEQ ID NO: 272427 - DNA, 201 bp, Homo sapiens
ctgggcctcctcgcgcacgtggtcgtgcagggtgaactcctggaggatctcctggcggaggtggtggtagaaggtccaggagcaggggtagcccgtgaggyggacacagcgccccgggatgtggcggtactcctcctccatccagtcgttcaggtggtagttctgccaggggatcctgctggccgtggcgctgtgcagcac

SEQ ID NO: 272428 - DNA, 201 bp, Homo sapiens; identical to SEQ ID NO: 54148

SEQ ID NO: 272429 - DNA, 201 bp, Homo sapiens
aggtgtctgggggccaggaccacacgggctgagtatgcccagggcgcaggcaccagagccaggtgctggtggcagtgaaagatggtggacaccacaaaaayggcaaagacgaagtagaaggtggagaaggaagggcgggtggcccagaatcccttgacggctgtggggaggagagaggacatggtcaggaggcagggctgg

SEQ ID NO: 272430 - DNA, 201 bp, Homo sapiens; identical to SEQ ID NO: 54150

SEQ ID NO: 272431 - DNA, 201 bp, Homo sapiens; identical to SEQ ID NO: 54151

SEQ ID NO: 272432 - DNA, 201 bp, Homo sapiens
tgaagtgggccatgggaaaggagaaaggcatctgaacgaccagcatggctgtcaggggaggaaaacgggacacgttagctgggagatggaggcccggggcrctggtgaacgtggccatgcggtggtgtgcaggcatagtgtgggtgtgtgtgtgcttctacttcaggtgtgtaaatacttggcacatacttgcctatgtgc

SEQ ID NO: 272433 - DNA, 201 bp, Homo sapiens
tgcctcgagctcgctgtcttcctgcacctccccgggattcccggattcccggcattatcacttccaccctggggaggagaagggagcttcagacaataacktagggccatcacttggaaaccccacctttattctccgacccagaacagaagcggtgattcagagcgggattagggagtgcaggagggacggagccgccct

SEQ ID NO: 272434 - DNA, 201 bp, Homo sapiens; identical to SEQ ID NO: 54133

SEQ ID NO: 272435 - DNA, 201 bp, Homo sapiens; identical to SEQ ID NO: 54135

SEQ ID NO: 272436 - DNA, 201 bp, Homo sapiens
cccgggcactcatcttgagggaggcagagaaggagaaaaggtctcaaagaatgggccagcattagtgcttgagtaagggggacaggtctgcggcaatcccygtccactccggcaggaaggctgcctctggcttaaagattttgaggaaaggggagtcggggagggtgtaattggccaggtagatggtgtctccgcccgtga

SEQ ID NO: 272437 - DNA, 201 bp, Homo sapiens
gccaggtgctggtggcagtgaaagatggtggacaccacaaaaatggcaaagacgaagtagaaggtggagaaggaagggcgggtggcccagaatcccttgayggctgtggggaggagagaggacatggtcaggaggcagggctggggggacaggagtctcttcacccaccccctgccaaagtcattcattcactcactcaat

SEQ ID NO: 272438 - DNA, 201 bp, Homo sapiens
atatgaacttggccaagggaggctgggtgcagtgactcacgcctgtaatcccagcactttgggaggctgaggcaggaggataacctatggtcaggagttcragaccagcctggccaacatggtgagaccccatctctactaaaaatacaaaaattagcagggagtggtggcaggtgcctgtagtccaagctactcaggaag

SEQ ID NO: 272439 - DNA, 201 bp, Homo sapiens
ctcgcgcacgtggtcgtgcagggtgaactcctggaggatctcctggcggaggtggtggtagaaggtccaggagcaggggtagcccgtgaggcggacacagygccccgggatgtggcggtactcctcctccatccagtcgttcaggtggtagttctgccaggggatcctgctggccgtggcgctgtgcagcaccggcagggt

SEQ ID NO: 272440 - DNA, 201 bp, Homo sapiens
ctcctcgcgcacgtggtcgtgcagggtgaactcctggaggatctcctggcggaggtggtggtagaaggtccaggagcaggggtagcccgtgaggcggacayagcgccccgggatgtggcggtactcctcctccatccagtcgttcaggtggtagttctgccaggggatcctgctggccgtggcgctgtgcagcaccggcag

SEQ ID NO: 272441 - DNA, 201 bp, Homo sapiens
aagaatgctgttcgttttaggctctgggtgaagaacccaggtttcccagttttgatactgggagtattgatagtggtcaaatgtagcgtttaaaccatagmtcatagaacgggaggtagccgggcacagtggctcacgcctgtaatgccagaacttccagaagccaaagtgggtggatcacctgaggtcagcagttcgaga

SEQ ID NO: 272442 - DNA, 201 bp, Homo sapiens
tcgcgcacgtggtcgtgcagggtgaactcctggaggatctcctggcggaggtggtggtagaaggtccaggagcaggggtagcccgtgaggcggacacagcsccccgggatgtggcggtactcctcctccatccagtcgttcaggtggtagttctgccaggggatcctgctggccgtggcgctgtgcagcaccggcagggtg

SEQ ID NO: 272443 - DNA, 201 bp, Homo sapiens
ttctgggcctcctcgcgcacgtggtcgtgcagggtgaactcctggaggatctcctggcggaggtggtggtagaaggtccaggagcaggggtagcccgtgargcggacacagcgccccgggatgtggcggtactcctcctccatccagtcgttcaggtggtagttctgccaggggatcctgctggccgtggcgctgtgcagc

SEQ ID NO: 272444 - DNA, 201 bp, Homo sapiens
gacactgaaacctttcatctctaagctgctttcctgctaagccatggggttctcttttcgctctgtttgtacaatccattcaattaatatgcattagacgytctatgtgtttccccggttgctctaagaaggtaacacacaactgggtccctcaaagcaaaagaaaatcattctcctttagtttttcttttttcttttttt

SEQ ID NO: 272445 - DNA, 201 bp, Homo sapiens
ggaacttctgggcctcctcgcgcacgtggtcgtgcagggtgaactcctggaggatctcctggcggaggtggtggtagaaggtccaggagcaggggtagccsgtgaggcggacacagcgccccgggatgtggcggtactcctcctccatccagtcgttcaggtggtagttctgccaggggatcctgctggccgtggcgctgt

SEQ ID NO: 272446 - DNA, 201 bp, Homo sapiens; identical to SEQ ID NO: 54136

SEQ ID NO: 272447 - DNA, 201 bp, Homo sapiens
aagctctgcctcccgggttcacgccattctcctgcctcagcctcccgagtagctgggactacaggagcccgcccgccaccacgcccggctaatttttttgkattttttcttttttttagtagagacggggtttcaccttgttagccaggatggtctcgatctcctgaattcgtgatccgccaggctcggcttcccaaagtg

SEQ ID NO: 272448 - DNA, 201 bp, Homo sapiens; identical to SEQ ID NO: 54137

SEQ ID NO: 272449 - DNA, 201 bp, Homo sapiens
accgagattgtgccactgcactccagcctgggtgacggactgaggtcctacttggggctaggactttaatatatgaacttggccaagggaggctgggtgcrgtgactcacgcctgtaatcccagcactttgggaggctgaggcaggaggataacctatggtcaggagttcaagaccagcctggccaacatggtgagacccc

SEQ ID NO: 272450 - DNA, 201 bp, Homo sapiens
tattgttaagtgacccatgaccatattgttgaatgaatgaaagtatttccagaattttacttcctgggacagtgtccatgaaatcatctccaggactactrgccctgtgccaaggacactgaaacctttcatctctaagctgctttcctgctaagccatggggttctcttttcgctctgtttgtacaatccattcaattaa

SEQ ID NO: 272451 - DNA, 201 bp, Homo sapiens; identical to SEQ ID NO: 54140

SEQ ID NO: 272452 - DNA, 201 bp, Homo sapiens; identical to SEQ ID NO: 54141

SEQ ID NO: 272453 - DNA, 201 bp, Homo sapiens
gcagtgaaccgagattgtgccactgcactccagcctgggtgacggactgaggtcctacttggggctaggactttaatatatgaacttggccaagggaggcygggtgcagtgactcacgcctgtaatcccagcactttgggaggctgaggcaggaggataacctatggtcaggagttcaagaccagcctggccaacatggtg

SEQ ID NO: 272454 - DNA, 201 bp, Homo sapiens; identical to SEQ ID NO: 54142

SEQ ID NO: 272455 - DNA, 201 bp, Homo sapiens
aatagagcatatatagaaacctcatctctggcactttgtattggcattgcagatgaagtacaggagatgactgatattcaataatggtgctcggagatttsgttttccatattaaaaaaaatgaatttaatatatatatacacacacacaccccatctgggtttgtgtaaatatactctatgatgttcatacaacatgaaa

SEQ ID NO: 272456 - DNA, 201 bp, Homo sapiens; identical to SEQ ID NO: 54143

SEQ ID NO: 272457 - DNA, 201 bp, Homo sapiens; identical to SEQ ID NO: 54144

SEQ ID NO: 272458 - DNA, 201 bp, Homo sapiens
gggtgaactcctggaggatctcctggcggaggtggtggtagaaggtccaggagcaggggtagcccgtgaggcggacacagcgccccgggatgtggcggtaytcctcctccatccagtcgttcaggtggtagttctgccaggggatcctgctggccgtggcgctgtgcagcaccggcagggtgattctgaagatgggggcca

SEQ ID NO: 272459 - DNA, 201 bp, Homo sapiens
cctcgcgcacgtggtcgtgcagggtgaactcctggaggatctcctggcggaggtggtggtagaaggtccaggagcaggggtagcccgtgaggcggacacascgccccgggatgtggcggtactcctcctccatccagtcgttcaggtggtagttctgccaggggatcctgctggccgtggcgctgtgcagcaccggcaggg

SEQ ID NO: 272460 - DNA, 201 bp, Homo sapiens; identical to SEQ ID NO: 54146

SEQ ID NO: 272461 - DNA, 201 bp, Homo sapiens
tcaaaaaacaacttcagctatctggccctttctctgagtttgcgtattttctgtgagtcctgtgtgcacatgataaaatgtgtattcctttctcctgctayctggctattattagtttgatttatatagactcaaatgttttaacctccaggggaaacattttaacttccccgcagttctggcactgtgagcaggatgcaa

SEQ ID NO: 272462 - DNA, 201 bp, Homo sapiens
gagacttgtctcaaaaaaaaaaaaaaaaaaaagaaaaagaaaaaagaaagaaatttactctttctggacgggcggggtgaggtggctcacgcctataatcmcagcactttgggaggccgaggcaggtgaatcatgtgagggctgaagttcgagagcagcctgggcaacatagtaaaaccctgtgcctacaaaaaatgcaaa

SEQ ID NO: 272463 - DNA, 201 bp, Homo sapiens
ctgggcccggtggcttacgcctgtcatcccagcgctttgggaggcagaggagggtggatcacttgaggccaggaatttgagactagcctgggaaacatggygaaccccatctctactaaaaatacaaaaattagccaggcatggtggagcacgcctgtaaatcccagctactcagatggctgaggcacaagaatctcttga

SEQ ID NO: 272464 - DNA, 201 bp, Homo sapiens
cctcctcgcgcacgtggtcgtgcagggtgaactcctggaggatctcctggcggaggtggtggtagaaggtccaggagcaggggtagcccgtgaggcggacrcagcgccccgggatgtggcggtactcctcctccatccagtcgttcaggtggtagttctgccaggggatcctgctggccgtggcgctgtgcagcaccggca

SEQ ID NO: 272465 - DNA, 201 bp, Homo sapiens
tctcagctactcaggaggctgaggcaggagaatcacttgaacctgggaggcggaggttgcagtgaaccgagattgtgccactgcactccagcctgggtgayggactgaggtcctacttggggctaggactttaatatatgaacttggccaagggaggctgggtgcagtgactcacgcctgtaatcccagcactttgggagg

SEQ ID NO: 272466 - DNA, 201 bp, Homo sapiens
gttccagaccagcctggacaacatggtgaaaccccatctctactgaacatacaaaaaattagccaggcatggtggtgtgctcctgttatctcagctactcrggaggctgaggcaggagaatcacttgaacctgggaggcggaggttgcagtgaaccgagattgtgccactgcactccagcctgggtgacggactgaggtcc

SEQ ID NO: 272467 - DNA, 201 bp, Homo sapiens
ctggaggccattgccagcgaacaccacgtccccaagggagctgttgatgctctcccggcaccaggccatgtcatcgctggtgaccacaaagaccgggaggyggcagcaggcccggaaccagtccagggcccgctgcaggtagccggtcggccagcacccccttccatacgcgcggcatgacacggacatagtccccccggc

SEQ ID NO: 272468 - DNA, 201 bp, Homo sapiens
gggaggctgaggctgaaggatcgcttgaggccaggagttcaagagcaccctggacaacacagcaagagccatctctgccaaaattttatttattattattktatttatttttatttatttatttattccaagacagagtttccctcttgttgcccaggctggagtacaatggcacaatctcggctcactgcaacctctgcc

SEQ ID NO: 272469 - DNA, 201 bp, Homo sapiens
cagcactttgggaggctgagtcgggcggatcacgaggtcaggagattgagaccatcctggctaatacagtgaaaccccgtctctactaaaaatatatatawaaaaaaaattagccgggcgtggtggtgggtgcctgtagtcccagctacttgggaggctgaggcaggagaatggcgtgaaccccgggggcggagcttgcag

SEQ ID NO: 272470 - DNA, 201 bp, Homo sapiens
gcaggtggatcacctgaggtcaggagtttgagaccagtctggccaacatggtgaaaccctgtctctactaaaaatgcaaaaatcagtggggcgtggtggcrtgcacctgtaatcccagctacttgggaggctgaggcaggagaatcgcttgaacttgggaggcggaggttgcagtaaactgagattacaccattgcactcc

SEQ ID NO: 272471 - DNA, 201 bp, Homo sapiens; identical to SEQ ID NO: 54134

SEQ ID NO: 272472 - DNA, 201 bp, Homo sapiens
gcctcccgagtagctgggattacaggcatgcaccaccacgcctggctaattttgtatttttagtagagacggggtttctccatgttggccagactggtctygaactcctgacctcaagtgatccgcctgtctcggcctcccaaagtgctgggattacaggcgtcagccaccacgtccagccccgtccacgtctttctattg

SEQ ID NO: 272473 - DNA, 201 bp, Homo sapiens
ctgggtcccagtgcctttgatgttgaggctagcactggtatctgcaccggtaactcccacatggcttgaatcttcgctagccgctgctgaacgtgaaatayagtggaaaccgtaaagacaaagaggatgaagtgggccatgggaaaggagaaaggcatctgaacgaccagcatggctgtcaggggaggaaaacgggacacg

SEQ ID NO: 272474 - DNA, 201 bp, Homo sapiens; identical to SEQ ID NO: 54139

SEQ ID NO: 272475 - DNA, 201 bp, Homo sapiens
aaatacaaaaattagctggctgtgtggtggtgagcacctgtaatctcagctacctgggaggctgaggcagaagaattgcttgaacctgggaggcagaggcrgggtggggtggaggtttcagtgttccgagatcgcaccactgcactccagcctgggcaaaagagcaagactctgtctaaaacaaacaaacaaacaaaacaa

SEQ ID NO: 272476 - DNA, 201 bp, Homo sapiens
accattgcactccagcctgcacaacacagtgagactccgtctcaaaaaaaaaaaaaaaaaaaaaaaagagccagtgcagtggctcatgcctgtaatcccarcactttggtaggctgaggcgggtggatcacctgaggtcaggagttcgagaccagcctgactaatatggtgaaaccccatttctactaaatacaaaaaatt

SEQ ID NO: 272477 - DNA, 201 bp, Homo sapiens
cttctacttcaggtgtgtaaatacttggcacatacttgcctatgtgcacaggcatgtatctcaagtgtgtttatacagatgtgtctacattgtgttcatasgtgggtgtgtgtacacaggtagatgcgtacacattgtgtgtaatgtggatatggggatccatacattgtatacatatacaggtgtgtgcaaaattgtgtg

SEQ ID NO: 272478 - DNA, 201 bp, Homo sapiens
tcaggggaggaaaacgggacacgttagctgggagatggaggcccggggcgctggtgaacgtggccatgcggtggtgtgcaggcatagtgtgggtgtgtgtstgcttctacttcaggtgtgtaaatacttggcacatacttgcctatgtgcacaggcatgtatctcaagtgtgtttatacagatgtgtctacattgtgttca

SEQ ID NO: 272479 - DNA, 201 bp, Homo sapiens
cctcctgccattgtaattcaggctcagctgaccagtgtttaacatcaacacagacctcaagactgaccagggctgggcacggtggctcatgcctgtaatcyccgcaatttgggaggccgaggtgggcggatcacttgaggtcaggagttccagaccagcctggacaacatggtgaaaccccatctctactgaacatacaaa

SEQ ID NO: 272480 - DNA, 201 bp, Homo sapiens
ggaaaggagaaaggcatctgaacgaccagcatggctgtcaggggaggaaaacgggacacgttagctgggagatggaggcccggggcgctggtgaacgtggscatgcggtggtgtgcaggcatagtgtgggtgtgtgtgtgcttctacttcaggtgtgtaaatacttggcacatacttgcctatgtgcacaggcatgtatct

SEQ ID NO: 272481 - DNA, 201 bp, Homo sapiens
aagacaaagaggatgaagtgggccatgggaaaggagaaaggcatctgaacgaccagcatggctgtcaggggaggaaaacgggacacgttagctgggagatrgaggcccggggcgctggtgaacgtggccatgcggtggtgtgcaggcatagtgtgggtgtgtgtgtgcttctacttcaggtgtgtaaatacttggcacata

SEQ ID NO: 272482 - DNA, 201 bp, Homo sapiens
tgctgtgcatctgggccgggatgaaggcgggccgcccgttcatcttggccagggcgtacagtgtggcgtactcgcccatctggttccccaggcggcctatygcattgatcgtccacatccccctgagctggctgggtcccagtgcctttgatgttgaggctagcactggtatctgcaccggtaactcccacatggcttgaa

SEQ ID NO: 272483 - DNA, 201 bp, Homo sapiens
cgctgtgcagcaccggcagggtgattctgaagatgggggccagggtgctgtgcatctgggccgggatgaaggcgggccgcccgttcatcttggccagggcrtacagtgtggcgtactcgcccatctggttccccaggcggcctattgcattgatcgtccacatccccctgagctggctgggtcccagtgcctttgatgttg

SEQ ID NO: 272484 - DNA, 201 bp, Homo sapiens
aaactggattaacgggaaaaaacgtatgtgaaccagtttgcttataaaataaattgatgggccgagtgtggtgactcatgcctgtaatcccagcactgtgrgaggctgaggctgaaggatcgcttgaggccaggagttcaagagcaccctggacaacacagcaagagccatctctgccaaaattttatttattattatttt

SEQ ID NO: 272485 - DNA, 201 bp, Homo sapiens
cctgtgggacccggtccagtaaaggtggtaaaagtcttggtttttttccctttccaaaactggattaacgggaaaaaacgtatgtgaaccagtttgcttayaaaataaattgatgggccgagtgtggtgactcatgcctgtaatcccagcactgtgggaggctgaggctgaaggatcgcttgaggccaggagttcaagagc

SEQ ID NO: 272486 - DNA, 201 bp, Homo sapiens
ttctgcttgggcttttgtaatgtgaaagctgttggctgggcacagtggctcacgcctgtcatcccagaagtttgggaggccgaggtggaaggatcacttgyggtcagaccagcctggccaaaatggcaaaaccccatctctactaaaaatacaaaaatcagctggatgtggcagcgggtgcctaaaatcccacttgggagg

SEQ ID NO: 272487 - DNA, 201 bp, Homo sapiens
aaactgcatgagggaccgtgagtccatgccccgcacgccccactcactgcccctcgggtcacaggatgaggaccaggcacatgcagggctggctagaggcygttctgtccagcctgtccaaggtcagccgcaaggcccacccactctggcaggaaggccgcttacggcctaaagaccacgttgaaaggggagttgggcagg

SEQ ID NO: 272488 - DNA, 201 bp, Homo sapiens; identical to SEQ ID NO: 212432

SEQ ID NO: 272489 - DNA, 201 bp, Homo sapiens
tgcgcctgtagtcccagctactcgggagggggaggcaggagaatcgcttgaaaacctggaaggcagaggttgcagtgagctgaggtcgcgccactgcactccagcctgacgacagggcaagactccatctccaaaaaaaaaaaagaaatctatctatctatcagtcagaatcactgaggaaaccgttgaaaaatgcggagt

SEQ ID NO: 272490 - DNA, 201 bp, Homo sapiens
gcatcaagttctttacaggagatgtttttggctaccatggatacacatttgccaatctaggagagcatgagtttgtagagtaagtgttgggagaggagggragaacataacattttctcctttttatactttttttttttaaattatgtatttatttatgtgtagagacaggatctatgctatgttgttcaagctggtctt

SEQ ID NO: 272491 - DNA, 201 bp, Homo sapiens
cagtcgccggatcgcctttgagtctcgtgaggtacttttggtcccaggctccgcggacgaggtactgcgcaggcgtgggagggtctgcgcatgcgcagaarcactccgggcgtgctgccggcggcggtaggtggcgcgcgggtccggcgggcggttggcttgagcgggaccggagctgaggcaggaagagccggcgccatg

SEQ ID NO: 272492 - DNA, 201 bp, Homo sapiens
tttcgccatattgacgagactggtctcgatctccttacctcaagtgatccacccgcctcggcctcctgaagtgctgggattacaggagtgagccaccgcgscaggacgtcttttgttttgtgcagttgggtgacctcggttcactgcagcctctggcctcccgggttcaagacttcctctcacctcagtcttctgagtagc

SEQ ID NO: 272493 - DNA, 201 bp, Homo sapiens
cttacctcaagtgatccacccgcctcggcctcctgaagtgctgggattacaggagtgagccaccgcgccaggacgtcttttgttttgtgcagttgggtgayctcggttcactgcagcctctggcctcccgggttcaagacttcctctcacctcagtcttctgagtagctgggattacaggctcgcgccaccatgcctggct

SEQ ID NO: 272494 - DNA, 201 bp, Homo sapiens
tttccagatctggggtaggaaaattacaggtgagcttggaatatcctgctatgccagaaagtaaggaagtgctctaagaatgataggggcatgtcaaaagmacaagaagaataatcaattaatgtaaacaaggaattatgaagataacaaagtctatctttgactatcaccatagtagtaacaattgtttcaatcaagaat

SEQ ID NO: 272495 - DNA, 201 bp, Homo sapiens
caaattattgttgactgtagtcaccctgttatgctatcaaatactgtatcttattcattgtatttaattatatttttgtatccattagtcatccctccttyccctccaccccccactacccttcctagcctctggtaaccctcagtctactatctgcatgagttcaattgttttaatttttttagttcccacaaataagtg

SEQ ID NO: 272496 - DNA, 201 bp, Homo sapiens
acaattgtttcaatcaagaatcaaagtgctaaaatcaatggggaacagtttgcggtgaaacagtgtagatgtttccttatcagatgcttttatgctatgcstggtggctcacccctataaatcccaagaggctgaggcaaattgatcacttgcacccaggagttttgagaccagcctgggcaacaaaacgagaccccatct

SEQ ID NO: 272497 - DNA, 201 bp, Homo sapiens
tgggaccacaggcgtatgccatatcactcagctaattttgtgtgtgcatggcgtatgccgtaacactcagctgattgtgtgtgtgtgtgtgtgtgtgttgtttttttttttttttttgtgatggactctcactctgtcgcccaggctggagtgcagtggcacaatcttggctcactgcaacctccgcctcctgagttcaag

SEQ ID NO: 272498 - DNA, 201 bp, Homo sapiens
ccccgtcactagtaaaaatacaaaagttatttgggcgtggttgtgggcgtctccagcctgggtgacagagtgagactccatctcaaaaaaaaagaagaaamacaaaaacaagtaaataaatgaataaaaataaaggaatccagccatctgttagtatagccaaagcagaggatattgcatcaaatgttaaacgctagtcct

SEQ ID NO: 272499 - DNA, 201 bp, Homo sapiens
aaatcaatggggaacagtttgcggtgaaacagtgtagatgtttccttatcagatgcttttatgctatgcctggtggctcacccctataaatcccaagaggmtgaggcaaattgatcacttgcacccaggagttttgagaccagcctgggcaacaaaacgagaccccatctctacaaaaaataaaaaagttagccagataca

SEQ ID NO: 272500 - DNA, 201 bp, Homo sapiens
ctgccttgggctcccaaagtgctgtgattacaggcgtgagccactgcggcctggcctggtttgtgttttaaaatgatcgctccagaataggttaaagtggkcagaaatggaagtaaagattctggctggactgttgcagtaatccagttgagataaaaatattggtggcttgaaactcaagagaaggggtcaaataaatat

SEQ ID NO: 272501 - DNA, 201 bp, Homo sapiens
acaaaaaattagcagggcttggtggcgggcgcctgtggtcccagctactcgggaggctgaggcaagagaatggcgtgaacctgggaggcggagcttgcaaygagccgagatcatgccactgcactccagccttggcaacagagtgagactccgtttcaacaacaacaacaacaaaaacaaacaaaaacaaacaacactgga

SEQ ID NO: 272502 - DNA, 201 bp, Homo sapiens
tttttttttttttttttttttttttgagacggagtcttgctctgttgcccaggctggagtacagtggtgcaatcgcagctcactgcaacctccgcctcccstgttgaagtgattctcctgcctcagcctcctgggtagctgggattacaggcacacaccaccacacctggcttatttttgtatttttagtagagatggcat

SEQ ID NO: 272503 - DNA, 201 bp, Homo sapiens
cctgtagacttctgcctctccactagaatagcaatatataaaaaataaagaggggacagattctgatttttacaataagtatcttatattcacgtggttcraaattcaaggcaatgtaagatctgtaaacattattctctaccttttttcactttatgtgatcttgttatctcttggggacatctccagatcagtacatag

SEQ ID NO: 272504 - DNA, 201 bp, Homo sapiens
cccaaagtgttgcaattacaggcgtgagccaccacacccagcctgatttattttcatttgggtatatacctagcagtgggattgcatttttacccgagtctttttttttttttttttgagacggagtttcgctcttgttacccagactggagtatggtggcgtgatctcagctcaccgcaacccttgcctcccaggttcaa

SEQ ID NO: 272505 - DNA, 201 bp, Homo sapiens
cactctcttgacctcgtgatccgcccacctcagccccccaaagtgctgtgattacaggtgtgagccaccgcgcctggcaaacctggcacttttaatttttrttttaattttttttttggagacggagtctagctctgtcgcccaggctggagtgcagtggcacgatcttggcacactgcaacctctgcctcccaggctcaa

SEQ ID NO: 272506 - DNA, 201 bp, Homo sapiens
gacatctacaaaagtagaagtattgggtggtagcagatcagtgctctctggcatccagatcgtctagatggtcacagcctttttttttttttttttggagrcagagtcttgctctgtcgcccaggctggagtgcagtggcacaatctcggctcactgcaacctccacctcccgggttcaagagattctcctgcctcagcct

SEQ ID NO: 272507 - DNA, 201 bp, Homo sapiens
ggagtctcactctgtcacccaggctggagtgcagtggtgcaatcttggctcactgcaacctccacctcccggttcaaacagtttccccgcctcagcctccmgagtagctgggattacaggtgcccaccagcacacccagctaatttttgtatttttagtagaaacggggtttcaccatgttggccaggctggcctcaaact

SEQ ID NO: 272508 - DNA, 201 bp, Homo sapiens
gcagtgatgagatctctgctcatgtagccttgaccttctgggctcaagtgatcttctgccttggcctccttagtagctgggactacaggcaccaccatacytggctaaattttttttttttttttggtagcagtgaggtctcactatgttgcccaggattatctcaaactcctgggctcaagcgatcctcacgccttggcc

SEQ ID NO: 272509 - DNA, 201 bp, Homo sapiens
gagtttcgctcttgttgaccaggctggagtgcaatggtgcgatctcggttcaccacaacctccacctcccaggtttaagcaattctcctgcctcagccttytgagtagctgggattacaggcatatgtcaccacgcctggcaaatttttttttttttttttttttttttgtgagacggagtctcgctctgtctcccagcct

SEQ ID NO: 272510 - DNA, 201 bp, Homo sapiens
ggttagggttcccttcccctccccgctttccctaggtttaaccaaaggttgtaaagccacttttgcttcaaggtacactttgtgctcctaaattagtaacrttgaaaaacaaaaaggaaaaacagcctgtggttttcacaccctctaggaagctggtgggcctttctagcacctgtgccattctgataaataagggcttag

SEQ ID NO: 272511 - DNA, 201 bp, Homo sapiens
ctcgtgatccgcctgcctcagcctcccaaagtgctgggattacaggcgtgagccaccgcgcctggccacatttttgtatttttagtagagacggggtttcmccatgttggccaggctggtctcaaactcctgacctcaggtgatcctcctgcctcggtctcccaaagtgctgagattacaggcgtgaggcaccgtgcccgg

SEQ ID NO: 272512 - DNA, 201 bp, Homo sapiens
aaggaagtgcccaaaaaggtttcccagaggaagagttgtttgtgttggcatgtgagggacaagctttccaggcaccagagccaagagcagtgctctgtcckaggaagtaggataaaccgaaagacggacgtaggggcagagttgctgtggctgccctcactgccgcagccagctccttccatgagttgcagaatgcctact

SEQ ID NO: 272513 - DNA, 201 bp, Homo sapiens
gctccttccatgagttgcagaatgcctactgtgtgcaaggcactgtgttgagtgcagggaatcacatccagtcttgttgtccccatctatagctgataaaraagctatgagaaattaagtgacctgaccaaggccacacagctgtggaagaaggggcgagagcatagacagtgggtaagggcataggctcaccctatgatt

SEQ ID NO: 272514 - DNA, 201 bp, Homo sapiens
aggaatttgtggcctttccctttagagcattgtcattatgtgtatctgcatctctgcattccaactttcacattttcagttcccaggagagagaatctgaytggcctggttggggtcctgtgcccacttctggctgtcacctgtggctttcttccctcagttgtagaccacactctggatacctgggacccctgaaatctc

SEQ ID NO: 272515 - DNA, 201 bp, Homo sapiens
atcgcctttgagtctcgtgaggtacttttggtcccaggctccgcggacgaggtactgcgcaggcgtgggagggtctgcgcatgcgcagaagcactccgggmgtgctgccggcggcggtaggtggcgcgcgggtccggcgggcggttggcttgagcgggaccggagctgaggcaggaagagccggcgccatggtggagaagg

SEQ ID NO: 272516 - DNA, 201 bp, Homo sapiens
tgtgaaagacaaacaaataattctactccttgtgaggacagctataacagagggctatagaaactatcatgtgttgttcctggtttttgtttgtttttttycccccccaaaacagggtcttgctctgctttccaggctggagtgtggtggcacaatcataactcactatagccttgaactcctgggctcaagttatcctct

SEQ ID NO: 272517 - DNA, 201 bp, Homo sapiens
tgatcctcatgccttgccctcctaaagtgctgggattacaggtgtgacccactgcgtccagcctgctgtagttttgtcggagagaaacgatggtggctcaractagagtggtgtttgtggaacttgagggaagtagatggacaatgctgctgtgaatgtgtatctttttttttttttttttttgagacagagtctcactct

SEQ ID NO: 272518 - DNA, 201 bp, Homo sapiens
tcaatggcagagctcgatttgaaccgagatctgactccaaagcttttgcccttaaccaccatcccgatctgtgacctggagaggctttttttgattccaayaacatgattcctagggtaaaattacattctctccccttgtcaccctctagggagaaaactaaagttgccaaagttagccaaggagtagaagatgggcccg

SEQ ID NO: 272519 - DNA, 201 bp, Homo sapiens
aagttgccaaagttagccaaggagtagaagatgggcccgacaccaagagagcaaaacttgattcttctgagacaacgatggtcaaaaaggtatgtgtaacrtgggggcagaggtcagaaaccctggggccttggaggggtcaggcaatgacgattgaaaaggataagagcaagcacttcttgaaggggtggggcgggtgct

SEQ ID NO: 272520 - DNA, 201 bp, Homo sapiens
caatgcaggctcggattccaaccccaagcccttaaggttacgaggcattcagtgcattcctgctgacaatccctgggattccaaaccttgcctttgtgcascctcaccaagggccctgcggaccgactgggctggactgggttttggccatggctttgtcaccttgcaataacatgcctccttccgttttggcacagatgg

SEQ ID NO: 272521 - DNA, 201 bp, Homo sapiens
ctgacctgcttcctgaggactttgtcaggttggtgtcagtatttatcactgtttagtctggacagataaagtttgttttcaggatttgccttaatttgacragctcttttattagaaacccttcagagagcaccctgccacattctgctcgctcctgtagacttctgcctctccactagaatagcaatatataaaaaataa

SEQ ID NO: 272522 - DNA, 201 bp, Homo sapiens
cactagtaaaaatacaaaagttatttgggcgtggttgtgggcgtctccagcctgggtgacagagtgagactccatctcaaaaaaaaagaagaaaaacaaamacaagtaaataaatgaataaaaataaaggaatccagccatctgttagtatagccaaagcagaggatattgcatcaaatgttaaacgctagtcctgtcagt

SEQ ID NO: 272523 - DNA, 201 bp, Homo sapiens
accaccttttgcatctgctgctacagattaggcagcttggttaagttttgttttgtttttaattgttatgagttagtttgaaccaaaaggattgttaagtrgagtgtaagaagcactgaataactactgttatctgagaggagtagtaaagaccagggccactgggcaatcccagaggcattaggaatttgtggcctttcc

SEQ ID NO: 272524 - DNA, 201 bp, Homo sapiens
actagtaaaaatacaaaagttatttgggcgtggttgtgggcgtctccagcctgggtgacagagtgagactccatctcaaaaaaaaagaagaaaaacaaaamcaagtaaataaatgaataaaaataaaggaatccagccatctgttagtatagccaaagcagaggatattgcatcaaatgttaaacgctagtcctgtcagtc

SEQ ID NO: 272525 - DNA, 201 bp, Homo sapiens
acggggtttcaccatgttggccaggctggtctcaaactcctgacctcaggtgatcctcctgcctcggtctcccaaagtgctgagattacaggcgtgaggcmccgtgcccggcagtgagaacatttacaatcacatattgtgtagcatcaggaaggatttttaagatcaaagttagcacattagaagtggaaataatttaaa

SEQ ID NO: 272526 - DNA, 201 bp, Homo sapiens
tagtaaaaatacaaaagttatttgggcgtggttgtgggcgtctccagcctgggtgacagagtgagactccatctcaaaaaaaaagaagaaaaacaaaaacragtaaataaatgaataaaaataaaggaatccagccatctgttagtatagccaaagcagaggatattgcatcaaatgttaaacgctagtcctgtcagtcac

SEQ ID NO: 272527 - DNA, 201 bp, Homo sapiens
ttgtcttctaaatttctaggagaactactgttaagttttttagtatcttgttgaacaatggttaacaattataatcatttgtgtttatgtaatcaaactgtgaaacaccggttgggaacttgcttgtgtacacttgatggcgtaaatggtaggggaagagcatacatacaaaagtggcctcttttgctttcttggcagcat

SEQ ID NO: 272528 - DNA, 201 bp, Homo sapiens
gatcatctactccagagttgaaaagtgtacacgccaaaaaaaaaaaagagaaaagaaaaaaagcacatatcttcacggatgacagagttctctaggacttkctctgtgccgggcgttttccatgtatatcaccttcatctcacaaaggccctcaggcaagtgctattaacaccaccagctacagaggggaatctgaggctc

SEQ ID NO: 272529 - DNA, 201 bp, Homo sapiens
taaagagaaaccagggttccttggagaaatggctgtttccagatctggggtaggaaaattacaggtgagcttggaatatcctgctatgccagaaagtaagraagtgctctaagaatgataggggcatgtcaaaagaacaagaagaataatcaattaatgtaaacaaggaattatgaagataacaaagtctatctttgacta

SEQ ID NO: 272530 - DNA, 201 bp, Homo sapiens
ggtcatgcctataatcccagcactttgggaggctgaggcaggaggatcacttaaggtcagaagttcgagaccagcctggccaacatagtgaagccccgtcwctagtaaaaatacaaaagttatttgggcgtggttgtgggcgtctccagcctgggtgacagagtgagactccatctcaaaaaaaaagaagaaaaacaaaaa

SEQ ID NO: 272531 - DNA, 201 bp, Homo sapiens
tttcatagtaaaggaagttttgtttgtaatgaccttcctgtttgatgggtctaagtatatggctggcccttctggctaaagcaggctttaaactggtcctgcctagaatgtgtacctcccactccttatcatctctcttctaggtcccttcccctttccctttcccttccccttccccttcgcttcttccttccctttgtt

SEQ ID NO: 272532 - DNA, 201 bp, Homo sapiens
atgggaggatcggttgagcgcaggaggtcgaagctgcagtgagttgtgattgcaccactgcactccagcctgggagcaagactttgtctcccccgaaaaaraagatgcttttaaatgaattacatagagagacattggagaaccctggcaggttgtacctcagctgagtgatgaaattaacaatctagggatggacagtta

SEQ ID NO: 272533 - DNA, 201 bp, Homo sapiens
atcgcgccactgcactccagcctgggtgacagagcgagactctgtcttaaaacgaacaaacaaaaaaaacaaaagtgagccaaccctggggaggagtctaygttcagctgcagggagccagggaattggggccgaggtgtctggcacagaaaagctttgggcctgtctcaggtaaatgaagttttgatatagattcaactc

SEQ ID NO: 272534 - DNA, 201 bp, Homo sapiens
gttagccaggctggtctcgaactcctagcctcaggtgatcctcccacctcagcctcctgaagtgctgggattataagtgtgagccagtgcacctggcctctttttttttttttttttttttaattttacagaattttttttttttttaagacagagtcttgctctaaggctgtagtgcagtggtatgatcacagcttgctg

SEQ ID NO: 272535 - DNA, 201 bp, Homo sapiens
gcagtgaacatttataggtaattcattcagcgggtaagggtcaggaccttttatagggatccttaataccacatttttacatggttcattgagcattcgtrctcccctctgctgtgggtgagggtgcaggtccctcagccttcttgcttgggttgagtcatcctggtctttaatttggtaagcaaaaaatggcatcttgtt

SEQ ID NO: 272536 - DNA, 201 bp, Homo sapiens
cagtctcgttctgtcagccaggctggagtgcagtggcacaatcttggctcactgcaacctctgcctcccaggttcaagcaattctcctgcctctgcctccmgagtagctgggattacaggtgcctaccaccacgtccggctaatttttgtatttttagtggagatgggctttcaccatgttggccaggctggtctcaaact

SEQ ID NO: 272537 - DNA, 201 bp, Homo sapiens
gcccataaagctgaaaatattttattatctggttcttttgtttgtttgtttgtttttgagacaaagtttcactttgtcacctaggctagagtgcagtggcrtgatctcggctcactgcaacctccacctcccgggttcaagtgaatctcctgcctcagcctcctgagtagctgggattacgggcatacgccaccatgccca

SEQ ID NO: 272538 - DNA, 201 bp, Homo sapiens
ccactgccggcctcgttctgtcgtatttttttacgtaggagagctcagtctgaatgtaggatatgacatggttgtggggttttttttgtttttgttttgtttttgttttgttttgttttgttttgttttgttttgttttgtttttgagacagtctcactctgtcccccaggctggagtgcagtggtgtgatagctcactga

SEQ ID NO: 272539 - DNA, 201 bp, Homo sapiens
ggaagtttattcttgttgtccacattatttccctgtgacttttagatttttttttcctttttgtaaattagttttttcatactagttagaatgtttcaccktaaaggtgagagtcaagctctggaatcgcctgacatttttaaggaaaggaatagaatattgggctggggctagtctgaaatggtggtttgtattatttta

SEQ ID NO: 272540 - DNA, 201 bp, Homo sapiens
cactgccggcctcgttctgtcgtatttttttacgtaggagagctcagtctgaatgtaggatatgacatggttgtggggttttttttgtttttgttttgtttttgttttgttttgttttgttttgttttgttttgttttgtttttgagacagtctcactctgtcccccaggctggagtgcagtggtgtgatagctcactgaa

SEQ ID NO: 272541 - DNA, 201 bp, Homo sapiens
agatcatgccaaagcactccagcctgggtgacagagctgaactccatctccaaaaaaaagggggagaaacagagtcaatcacagatcatctactccagagwtgaaaagtgtacacgccaaaaaaaaaaaagagaaaagaaaaaaagcacatatcttcacggatgacagagttctctaggacttgctctgtgccgggcgttt

SEQ ID NO: 272542 - DNA, 201 bp, Homo sapiens
aattatattcttttagttgctttgaaatgtacaacaaattattgttgactgtagtcaccctgttatgctatcaaatactgtatcttattcattgtatttawttatatttttgtatccattagtcatccctccttcccctccaccccccactacccttcctagcctctggtaaccctcagtctactatctgcatgagttcaa

SEQ ID NO: 272543 - DNA, 201 bp, Homo sapiens
actgccggcctcgttctgtcgtatttttttacgtaggagagctcagtctgaatgtaggatatgacatggttgtggggttttttttgtttttgttttgtttttgttttgttttgttttgttttgttttgttttgttttgtttttgagacagtctcactctgtcccccaggctggagtgcagtggtgtgatagctcactgaaa

SEQ ID NO: 272544 - DNA, 201 bp, Homo sapiens
gacattttcttattccacttttgcagatgggaaactgaggcccaccaagatcagattacaataatgggcaacattgtcagcaacctgccttgctttttttyttagcaggcccacatctcccccactcccccacccacttggcagtagcctgtgtttgagctgctcacaggccccaaggcccagctgcaattcttgtttaaa

SEQ ID NO: 272545 - DNA, 201 bp, Homo sapiens
cgcagtcttggttcactgcaagctccgcctcccaggttcacgccattctcctgcctcagcctccctagtagctgggactacaggtgcccgccaccacgccyggctaatttctgtatttttagtagagacggggtttcaccttgttggccaggatggtctcaatctcctgacctcgtgtaccacaatttctttatccatttg

SEQ ID NO: 272546 - DNA, 201 bp, Homo sapiens
ctgccggcctcgttctgtcgtatttttttacgtaggagagctcagtctgaatgtaggatatgacatggttgtggggttttttttgtttttgttttgtttttgttttgttttgttttgttttgttttgttttgttttgtttttgagacagtctcactctgtcccccaggctggagtgcagtggtgtgatagctcactgaaac

SEQ ID NO: 272547 - DNA, 201 bp, Homo sapiens
taaaataaagtaaagaagcagcttcctagagcagatttggttgcttaaattgaggccaagtttctggagtttttattgatagttgacaattacaactaaawtttttttttctcgctctgttacccaggctggagtgcagtgacgcagtgacgtgatcttcagctcactgcaacctccacctcccgggttcaagggattctc

SEQ ID NO: 272548 - DNA, 201 bp, Homo sapiens
cagaataccaaagaagacaatagacttgcccagaaatatttagaagtaagtcactcagttgcctggattggaaccctcaggccagagaggttcaaaatccygcatttttttttttttttttttttttttgagacagagtctcactctatcacccaagctggagtgcaatggtgcgatctcggctcactgcaacctccgcct

SEQ ID NO: 272549 - DNA, 201 bp, Homo sapiens
aggaatagaataagtgttcttgccaatgtgaaagacaaacaaataattctactccttgtgaggacagctataacagagggctatagaaactatcatgtgtkgttcctggtttttgtttgttttttttcccccccaaaacagggtcttgctctgctttccaggctggagtgtggtggcacaatcataactcactatagcctt

SEQ ID NO: 272550 - DNA, 201 bp, Homo sapiens
aacgtaaacatggtatttggtgttgatggcagttgagtatttaatttaatttaatttaattttttttgagacggagtctgtcacctgggatggagtgcagyggcacagtcttggctcattgaaacctctgcctctcaggttcaagcgattctcctgcctcagcctcccaaatagctaggattacaggtgcccgccaccaac

SEQ ID NO: 272551 - DNA, 201 bp, Homo sapiens
ataagtgttcttgccaatgtgaaagacaaacaaataattctactccttgtgaggacagctataacagagggctatagaaactatcatgtgttgttcctggkttttgtttgttttttttcccccccaaaacagggtcttgctctgctttccaggctggagtgtggtggcacaatcataactcactatagccttgaactcctg

SEQ ID NO: 272552 - DNA, 201 bp, Homo sapiens
ggtttattcggtggccttggtgattagatttaggcataatagttaaatgtaatagaagtttatgtaacaaacagtgattaataatgttgctgtccagattyccgttatagcgctaacctgatgttatgaactgagattaaatttgaatttgagtgcttacattattttgtaaaggtggttgtatattcacatatccacagt

SEQ ID NO: 272553 - DNA, 201 bp, Homo sapiens
aggccactgcacccatcttagagcgtattatgtagtttacattcaacaagcatctgagagcacctactgggtgccctgaagtctgctaggtgctggtgatwgaaagatgctcacggtttggttcccattctcaaggttttttttttttttttttccggaaaccatagcaggctccctgactgaggttgtggtacatgaaag

SEQ ID NO: 272554 - DNA, 201 bp, Homo sapiens
gctgtagttttgtcggagagaaacgatggtggctcagactagagtggtgtttgtggaacttgagggaagtagatggacaatgctgctgtgaatgtgtatctttttttttttttttttttgagacagagtctcactcttgtcacccaggctggagtgcagtggcgcgatctcggctcactgcaagctacaccttccgggttc

SEQ ID NO: 272555 - DNA, 201 bp, Homo sapiens; identical to SEQ ID NO: 54156

SEQ ID NO: 272556 - DNA, 201 bp, Homo sapiens
aagtggaactctcagactctccagcaaggcggcgttggagattttctttctcattttgtgtttgtgttggagtagtttggtgctgtaagtgtgatacagargaattaagccctaattttagtgtctattcacagaaccataattatccagagtgaaccttggtgttttggccaaaacttgggtgcctttctttctttttga

SEQ ID NO: 272557 - DNA, 201 bp, Homo sapiens
gtgtatatttattgaatgaacaattgactgaatgtcaggcccagggctttgccttaggaaacaggctgttggataagaggtagtactaccatactttgcartttttctggaaatttatgtcacctgggagtggagcagattaccaggctgtttccagagatagcgactctccataaagtgagccaacctgggggctgggcg

SEQ ID NO: 272558 - DNA, 201 bp, Homo sapiens
gtgagctggtttcctgtggcaaaaaaatgactttgatttgttctttttgaggttactgtgagtttatcataacaggagtgctaaaaataccgagtctggtrtggaaacagcattcacttaccagcatgaacaataacatacaggtttagcctagagcaggaagaaatggacttcatctcaagatgagaatacttatcagag

SEQ ID NO: 272559 - DNA, 201 bp, Homo sapiens
ctggagtgcagtggtgccatcatagctcattgcagcctctaacgcctgggctcaaaggatccttccaccttagcctcccaagtagctgggattacaggcaygcaccaccacacccagctaattaaaaaatttttttttttgtagagacaggggtcttgtcatgttgcccaggctggtcatgaactcctgacttcaagtgat

SEQ ID NO: 272560 - DNA, 201 bp, Homo sapiens
tgccggcctcgttctgtcgtatttttttacgtaggagagctcagtctgaatgtaggatatgacatggttgtggggttttttttgtttttgttttgtttttgttttgttttgttttgttttgttttgttttgttttgtttttgagacagtctcactctgtcccccaggctggagtgcagtggtgtgatagctcactgaaacc

SEQ ID NO: 272561 - DNA, 201 bp, Homo sapiens
atcacttgaacccaggaggcacagcttgcggtgagccgagatcccgccactgcattccagcctgggcaacagagagagactctgtctcaaaaataaaaataaaaaaaaaataataaaagctcattggagcattttggatttgggattcttagatttggggtgctctattggtaagtacaatgcaaatatttcaaaatctga

SEQ ID NO: 272562 - DNA, 201 bp, Homo sapiens
  misc_feature (1)...(201): n = A,T,C or G
gcggcattagcgaggaggaggcggcacagtatgaccggcagatccgcctgtggggactggaggcccagaaacggtcagggccggcgcggcttgaggccgcnagggtctggagggggcgtctattctgaggcgtttgcggcccggaaggagcgggaaggtgtgatttgaagggaggaggcgggaattctgtgctctgggatc

SEQ ID NO: 272563 - DNA, 201 bp, Homo sapiens
agcacctctctatccctgacagtgtttgatcttaacggaacagttttataatgtgtaaactggtgggaggtgctcttcagaaatgcagtcaacagtggtatgtgtgcgtgtttggctcttggggcggggcggaaagcagaacaaaggagaatttaataagcgagaacttgtcaggggctagggtcagttctgaggctgctg

SEQ ID NO: 272564 - DNA, 201 bp, Homo sapiens
ttcttgccaatgtgaaagacaaacaaataattctactccttgtgaggacagctataacagagggctatagaaactatcatgtgttgttcctggtttttgtktgttttttttcccccccaaaacagggtcttgctctgctttccaggctggagtgtggtggcacaatcataactcactatagccttgaactcctgggctcaa

SEQ ID NO: 272565 - DNA, 201 bp, Homo sapiens
gcacctctctatccctgacagtgtttgatcttaacggaacagttttataatgtgtaaactggtgggaggtgctcttcagaaatgcagtcaacagtggtatgtgtgcgtgtttggctcttggggcggggcggaaagcagaacaaaggagaatttaataagcgagaacttgtcaggggctagggtcagttctgaggctgctgc

SEQ ID NO: 272566 - DNA, 201 bp, Homo sapiens
tgccaatgtgaaagacaaacaaataattctactccttgtgaggacagctataacagagggctatagaaactatcatgtgttgttcctggtttttgtttgtkttttttcccccccaaaacagggtcttgctctgctttccaggctggagtgtggtggcacaatcataactcactatagccttgaactcctgggctcaagtta

SEQ ID NO: 272567 - DNA, 201 bp, Homo sapiens
tgatggggtggggggatgtcatcatgaggcattaacattggtgggagggttgaaggcacctggaatagattgggaattaagtgatgagaatgtgcctctgsacataggtggactgcattgattttagggactgctattttctggatggagtggaaagaggatttatgtgagttggaggaaactttgaggaagcttggtgtg

SEQ ID NO: 272568 - DNA, 201 bp, Homo sapiens
cagagggctatagaaactatcatgtgttgttcctggtttttgtttgttttttttcccccccaaaacagggtcttgctctgctttccaggctggagtgtggkggcacaatcataactcactatagccttgaactcctgggctcaagttatcctctcacctcgacctgcaaagtagctgggactacaggcgtgtgccaccatg

SEQ ID NO: 272569 - DNA, 201 bp, Homo sapiens
tattgcctaatggcgcacatagtaggtgctcaataaataaatattttttgcatgagtggtttttgcttgtctggtcatttgccctattgtagagggagagyagtgtgcccactggagtccccacagggtccttttgcctgcatgcctacccctgtggcacccatcaggcttttgattccaatgttgccctgggctctcact

SEQ ID NO: 272570 - DNA, 201 bp, Homo sapiens
ttatcatctctcttctaggtcccttcccctttccctttcccttccccttccccttcgcttcttccttccctttgttccttttcctttcctttttttcttcttttttttttttttttttgacagggtctcactctgtcacccaggctggagtgcagtgatgagatctctgctcatgtagccttgaccttctgggctcaagtg

SEQ ID NO: 272571 - DNA, 201 bp, Homo sapiens
ccacacctggctaatttttgtatttttagtagagacagggtttcactatgttggccaggctggtctcgaactcctgaccttgtgatccacctgcctcggcstcccaaagtgctggggttacagctgtgagccaccgcacccggctcttccaggtcttaatagagcctttttcctctactgaaagcttccactgctttctgc

SEQ ID NO: 272572 - DNA, 201 bp, Homo sapiens
tggtgtgtctattaattcacagccatttgagtaacagtatgtcctaaatgccaaggaagttactggttctagtgatacagtggtttctggagtttacattstaatggaggagggggcagtaaacatataaacaagtagtgtagcttagcacagtggtgtgtggctgtgatcccagctactggggaggctgaggttggagga

SEQ ID NO: 272573 - DNA, 201 bp, Homo sapiens
ctggtggcccttaggttgcttgtctctgtctccccgcttccattttaagctccatagggggaaggtagtcttgttcactgctagactcctagtccagtgtstagcacagtcatatccacggaatatttgttcagtgtactggtggctgttaactgcagcataatccagcaaccctggagattattttcttccttttttttt

SEQ ID NO: 272574 - DNA, 201 bp, Homo sapiens
ataatggtagagcccaactccaatgtagctttctctgaccaggctcatcttcaaggtgaaaataagtgctgctctctctacattcccatgcctcagtgacrttttatttattttatttatttattttgagacaaagacttactctgtcgcccaggctggagtacagtgacacaacctcagctcactgcaacctctgcctcc

SEQ ID NO: 272575 - DNA, 201 bp, Homo sapiens
ccttgaactcctgggctaaagggatcctcccacccacctcagtctccaaggtagctgggaccacaggcatgtgccaccatgctctgctaattttttcgggttttttttttttttttgagatctcttgctgtgttgcccaggctgatctcaaactcctggcctcaagtgatcctcttgccttggcctctcaaagtgctgaga

SEQ ID NO: 272576 - DNA, 201 bp, Homo sapiens
cccagccctagttctccatgtattttagagctctgtagtggaccttgataagcaggaagatgttacccctggatgaacaaaatgggaatgtgctggtcctrgccagggcgtaaggagccggaggtgcctttggacacagctcttgggattggaatggatacagccttttgggagggcattttggcaatacatatgaaaaac

SEQ ID NO: 272577 - DNA, 201 bp, Homo sapiens
attggttggaccctccgtcacgtgacatgcagtcgccggatcgcctttgagtctcgtgaggtacttttggtcccaggctccgcggacgaggtactgcgcasgcgtgggagggtctgcgcatgcgcagaagcactccgggcgtgctgccggcggcggtaggtggcgcgcgggtccggcgggcggttggcttgagcgggaccg

SEQ ID NO: 272578 - DNA, 201 bp, Homo sapiens
atgcagtcgccggatcgcctttgagtctcgtgaggtacttttggtcccaggctccgcggacgaggtactgcgcaggcgtgggagggtctgcgcatgcgcasaagcactccgggcgtgctgccggcggcggtaggtggcgcgcgggtccggcgggcggttggcttgagcgggaccggagctgaggcaggaagagccggcgcc

SEQ ID NO: 272579 - DNA, 201 bp, Homo sapiens
aatgtgcctctggacataggtggactgcattgattttagggactgctattttctggatggagtggaaagaggatttatgtgagttggaggaaactttgagraagcttggtgtgttctgagatcctaaagggttggggaggggattctaaggtactggaagggttaatcgaaggggtttgcggcagcagatagctttgtttg

SEQ ID NO: 272580 - DNA, 201 bp, Homo sapiens
gaagcttggtgtgttctgagatcctaaagggttggggaggggattctaaggtactggaagggttaatcgaaggggtttgcggcagcagatagctttgtttraagtggggcaaagttggtgaggtttaaactggaatgtagttagggaactttcagagggatggggatgatttttctgagaagcagtgaagaatggatgggg

SEQ ID NO: 272581 - DNA, 201 bp, Homo sapiens
gggttggggaggggattctaaggtactggaagggttaatcgaaggggtttgcggcagcagatagctttgtttgaagtggggcaaagttggtgaggtttaawctggaatgtagttagggaactttcagagggatggggatgatttttctgagaagcagtgaagaatggatgggggcctctgagtgggagatgacctaaggga

SEQ ID NO: 272582 - DNA, 201 bp, Homo sapiens
caagagattgagaccatcctggcaaacgtggtgaaaccctgtctctactaaaaatacaaaaattagctgttgtggtggtgcgtgcttgtagtcccagctayttgggaggctgaggcaggaggagaatcatttgaacccaggaggcggaggttgcaatgagccgagatcatgccactgcactccagcctggtgacagagcaa

SEQ ID NO: 272583 - DNA, 201 bp, Homo sapiens
agtgggagatgacctaagggacaagtcagggtcagggcatggaatttgtgggaggtaggaattattctgagggagtggagctgtaccaaatttggtggagmacatgaaaaggattggctgggggttgcaggagggagggaagaggttgtttgtaatttgtactctatttttagacagtcttagagagtttattaaagtgtt

SEQ ID NO: 272584 - DNA, 201 bp, Homo sapiens
agacgtagtttgggcattgtggagtagcttagggaattctttttttttttttttttttttttgagatagtctctctctgtcgcccaggctggagggcagtkgcgcgatctcggctcactgcaacctctgcctcccggattcaagcgattctcctaactcagcctcccgagtagctgggattataggggcccgccagcacgc

SEQ ID NO: 272585 - DNA, 201 bp, Homo sapiens
tggaatctgtaatcttactggtggctattaggggattatattatcctgtctttgaggctctgctctgctgatgttcagccttaggggtgaaataattcctstgttccagtccccactcatctctccacctctctgagttctttttttttttttttgagacagagtctcactctgttgcccaggctggagtgcagtggcacg

SEQ ID NO: 272586 - DNA, 201 bp, Homo sapiens
caatagagaagagcaactgccttgtgattggaagccagcatatgttattcctaagcagttctgccttttttccacagaaggtggtcttctgccctgttaargaagccctggaggtggactggagcagtgagaaagcaaaggctgctctgaagcgcacgacctccgactactttctccttcaaggtgaggtctcaaagcaca

SEQ ID NO: 272587 - DNA, 201 bp, Homo sapiens
tctgcctgcctcggcctcccaaagtgctgggattacaagcgtgagccaccgcacctggccatagtctatctatgttttttaaaagttcatttcaagcattyttaattgtgtctgatttttgcacaagtttgattttttttttaagttttctcatgaggttgcaatttttgttgttttttgagagagggcctctctgtgttg

SEQ ID NO: 272588 - DNA, 201 bp, Homo sapiens
cctattttttaaagttatgaaccgcataacaagagagtatacaaagcacatctgcctgagttaaatgataattaatacttatttatttttgttgtagagaygggggtctcactctgctgcccaggctgttctcagactcctggattcaagccatccttctgccttggctttccaaaacttctgggatagacaggcgtcagc

SEQ ID NO: 272589 - DNA, 201 bp, Homo sapiens
ataaaggaagagatcccagttctgatacatatgaggaagattctgagttgttgctccagatacgaaatgatgtgcttgactcactgggtattagtcctgayctgcttcctgaggactttgtcaggttggtgtcagtatttatcactgtttagtctggacagataaagtttgttttcaggatttgccttaatttgacaagct

SEQ ID NO: 272590 - DNA, 201 bp, Homo sapiens
ggaaactgaggctgcctgctttccaggtgcaaggtgatggacagtggcaggaaccctgtgctagatgactcttgtgcgatcttatttctttgttactgggrcacaagcaccaactgtcacaagggaccaacaagaggaggtgattttttttttcagctgttaccacaaagcttttcatcttttggtttgaaaacatagctg

SEQ ID NO: 272591 - DNA, 201 bp, Homo sapiens
tcatcctggtctttaatttggtaagcaaaaaatggcatcttgtttttgagctcgtttctgagaaagtgcatgctccttttccccatcaacaactttcatcsggcgcctcggaacctcttcagtagagagtgagatgcaaatagcgaggcacagcttctttccctcttctgagctgatgcctggtgaggtcatagactgggt

SEQ ID NO: 272592 - DNA, 201 bp, Homo sapiens
acagagagagactctgtctcaaaaataaaaataaaaaaaaaataataaaagctcattggagcattttggatttgggattcttagatttggggtgctctatyggtaagtacaatgcaaatatttcaaaatctgaaaatacccaaaattcaaacacttctgctccctgacatcctgtgtaaacaacactgcagtgaacattta

SEQ ID NO: 272593 - DNA, 201 bp, Homo sapiens
taaggcaaattgctacaggaacagtaatacattttagggctgtgcacagtgtttcatgcctgtaatctcagcactttgggaggctgaggcaggcggatcaygaggtcaagagattgagaccatcctggcaaacgtggtgaaaccctgtctctactaaaaatacaaaaattagctgttgtggtggtgcgtgcttgtagtccc

SEQ ID NO: 272594 - DNA, 201 bp, Homo sapiens
gatagcttgaacacttttcaattcagtcagtaacagaccaggtctgctttggatttccaggagcttgtgtcactttattttttttctgagccagggtctcrctttgtcacccagctggagtgcagtggtgcaatgtcagctcaccacagcctctgcctcctgggttcaagcaattctcgtacctcagcctcccaagtagct

SEQ ID NO: 272595 - DNA, 201 bp, Homo sapiens
tctgatgtggggtgtgggaggatttccagctggggccctcgatcatggttctgaggccgagtggtgaagggctgggggtgcccccatggcttatttctgayagcagcgatgggctgagggcagtctttctgtgaggatggggcaggactctgtacccaggcacaggcactggggcgggggagggtgctgatgacacccact

SEQ ID NO: 272596 - DNA, 201 bp, Homo sapiens
tggggtttgtgagacctgtgggcagcagtaaggcgaggggacagaggtgggcagctgcacaacagcaccctctttccggggccctggggcgttttttgacrcatgcaatcctttcatgggaaactgactcaggcactccagccgatggatgaaactcagcagcttctcagtgagggcacttgggtataaaaggacagggca

SEQ ID NO: 272597 - DNA, 201 bp, Homo sapiens
tgtgagacctgtgggcagcagtaaggcgaggggacagaggtgggcagctgcacaacagcaccctctttccggggccctggggcgttttttgacgcatgcartcctttcatgggaaactgactcaggcactccagccgatggatgaaactcagcagcttctcagtgagggcacttgggtataaaaggacagggcaagctcct

SEQ ID NO: 272598 - DNA, 201 bp, Homo sapiens
aagctcacagtagcctgggagccccgggtacctgcctctctcccgcgtgtgtttctggccgtccacgcctgctggatcggccccgttcccctggtctctgytttctcccttggccttgcagctcctccctcttggtccctgtgctgtaacccccggtcctgcgaccacacttgtctgttggtagctgcagccctccaccct

SEQ ID NO: 272599 - DNA, 201 bp, Homo sapiens
gagtccaacctctgcaggaagacgggagcgtgggagccccaaggggcatcactgggggtttcagtttttttcctctaaaattactggatactcagtcctgrcctgaagagaggatggagaaaaatgagaagggtccctcttctcaagcttttcttcctgggctgatgtagaattctctcttgtctgtgaaacacaagaagt

SEQ ID NO: 272600 - DNA, 201 bp, Homo sapiens
acacaagaagtgagggagaaatgtctccctccccaccccacagtaataatcagagaggccattcagctttgacatgattagaactacagagagggagaaawgagtgtgggggttgacggtgtttgtgcagagaacagcccttgacccagaagctgggagacccttgctggagtcttcgtccgctgagtcaggatgggcttg

SEQ ID NO: 272601 - DNA, 201 bp, Homo sapiens
ccaggctgttctcaaactcctgaccttgagtgatctgcctgcctcagcttcccaaagtgctgggattacaggtgtgagccaccacgcctggcctgtttccttttttttttttttttttttgagacagggtcttgctctgttgcccaggctgcagtatagtgctgtgatctcggctcatggcaacctcttcttcctgggtta

SEQ ID NO: 272602 - DNA, 201 bp, Homo sapiens
aggatgggcttgaatgaaccaagccacgtggccccctgtggcctcgccctcctcatggcgtcactgccaccttgcggggagccatgctgacacctgagggkccagctttagtcattgctcaggttacatgtagttgaaaatttctaggaaaacaaaagcatcagaactgaaagaacttttgactctgaggctcttccatgc

SEQ ID NO: 272603 - DNA, 201 bp, Homo sapiens
gatgcctggctagtttttgtattttcagcagagacagggtttcaccatgttggccaggctgattacgaactcctgacctcaagtgtgccttctgcctcagmctcccaaagtgctgggattacaggcgtgagccactgcgcctggccttgacacggggtctcgccctgtcacccaggctggagtgcagtggtgccatcatca

SEQ ID NO: 272604 - DNA, 201 bp, Homo sapiens
ccaggctggtcttgaactcctgggcacaagtgatttgcccacctctttctcccaaagtgctgagattacaggtgtgagccatagcacctgacaattttatytttacatttttctttttagaggcacggtcttgttctgtcatccaggctgcagtgcagtggttcagtcatagctcactggagcctaaattcctgggttcaa

SEQ ID NO: 272605 - DNA, 201 bp, Homo sapiens
gtcagatgcatgcttcagagcagcaggtgtaattgggctttcgggtccataggcatttgagagcaccctgaagtcctgggaagacaagcagaagtgcgagstgccccgccctccatcctgttccctgcacccggagatgctgtccgaggaggaggccacccagatggaccagtttgggcaggcagcaggggtcctcattca

SEQ ID NO: 272606 - DNA, 201 bp, Homo sapiens
cgcctgtgagtccctcccagccggcagctgtgctgctccgccggtgcggggcctgcctgcattctccccccgtggccgcacgctggctggtgccctggtgyccctttcttgtttcccctgggctccttcttctcctggctgtggacaggtgcacccgtcggttttgtgcccggcatgccgtgtgcccttccaggcagcctg

SEQ ID NO: 272607 - DNA, 201 bp, Homo sapiens
acctgtcctttataaaccttcctcctctcctctcttggatactttgtttaatcttgtccaagttactgcatttaacaatttaaaagagaagtcttatcttygccctcttggtttcgttcttccagcccacccagtacagcatggaccacttctcagggatgcacaattggtacgcctgttcccacgcgaggccgacctact

SEQ ID NO: 272608 - DNA, 201 bp, Homo sapiens
caaacctgggcacccctgcccagtggggtttgtgagacctgtgggcagcagtaaggcgaggggacagaggtgggcagctgcacaacagcaccctctttccrgggccctggggcgttttttgacgcatgcaatcctttcatgggaaactgactcaggcactccagccgatggatgaaactcagcagcttctcagtgagggca

SEQ ID NO: 272609 - DNA, 201 bp, Homo sapiens
ccctgtcatctgaatttggacccgtgaaaagtgaagagggggtccattcagaatgttgtgcctctacccatccctgctcgctcgtcatgaccgttggaccrttgtggtccccgggcctcacattaattactcttaggcccttttggtttggcctgtggtttcagcgtgacacagtttgctggactttgatcttttttgtca

SEQ ID NO: 272610 - DNA, 201 bp, Homo sapiens
cagactgccaggcctattgcttctcctgttgaccatttcctccatgcacagggacttgcctggggatgccctggccacggctgtgctcctgagcccctggyggtgggaagctggtagagaaggaggggctgactcatacctttctcttttcttttgttctgtgtctctgctgctcagtgtgacgggcgacccatcccactc

SEQ ID NO: 272611 - DNA, 201 bp, Homo sapiens
caccaatattcatgaaggtattgatctgtaatttatttctctccctttcttccctcatttcttcctttctgcctttgtcaggttttggtactttaaaaaayagagagtcaggccagatgtggtggctcacgtccgtaatccctgcattttgggaggccgaagcaggtggatcacttgaggctaggagttcaagactggcct

SEQ ID NO: 272612 - DNA, 201 bp, Homo sapiens
taatgtaaaaggtttttaatgccattttattgtcggatttcaaagtctaaactttggtgtcagatgaagtcacttcagaccctgcgcttctagttatgaarcatgcgattgtggacagggtgtctaaacctcccttaagacgtggtttcctcatctgtaaacatggaaaatattagttcttgggttggttgtagtgaaagt

SEQ ID NO: 272613 - DNA, 201 bp, Homo sapiens
agctgcaggggtggttggagacccagtattttagctaggccctgccagaggccattgggatagcaggtcaatggatgaaggaggttgtataggcaaatggsagtaattatctctgatcttgatttttgtaggaaataggcgtagattaaggcatagataaatttgaaaaggcatagatacattaattaattaattagagat

SEQ ID NO: 272614 - DNA, 201 bp, Homo sapiens
tggctgggtctggaaggtgagtagggagcagtgccttctgcttctggcagtggtgagctgagtgactgcagcgccactcttccaagcacagtctgctaatragatgatgctgaatttctggactaggatctggggtggctgaagatctgtggaagtgagtgtggtatttggggctgcttttgaccttggaatctgtagtgg

SEQ ID NO: 272615 - DNA, 201 bp, Homo sapiens
atttggcatctctaccaaatttggtccacctagaacttcaggatgcccacataataagatattagttaaatatctttaaaaaaattttttttctttttttytgagacagggtcttgctcggtcgtccaggctggagtgcagtggcatactgcagtctctggctgggctcaggcaatcctcctgcctcagccacctgagtag

SEQ ID NO: 272616 - DNA, 201 bp, Homo sapiens
agataacagatggaatctcccctagagcctttagagggagtgcggccttctgatcccttgatctccgacttccagcccccagagcagtgagacagtcaagtttttttttttttttttttttccaagttttgttttaagccttgaagttttatggcagccctagggcagccctggggaaagaacactgggccctgaacaaaa

SEQ ID NO: 272617 - DNA, 201 bp, Homo sapiens
cttctgatcccttgatctccgacttccagcccccagagcagtgagacagtcaagtttttttttttttttttttttccaagttttgttttaagccttgaagttttatggcagccctagggcagccctggggaaagaacactgggccctgaacaaaacatgggagccaagaggctgagccctgtgagactgtctgagtgcctt

SEQ ID NO: 272618 - DNA, 201 bp, Homo sapiens; identical to SEQ ID NO: 54165

SEQ ID NO: 272619 - DNA, 201 bp, Homo sapiens
tgatcccttgatctccgacttccagcccccagagcagtgagacagtcaagtttttttttttttttttttttccaagttttgttttaagccttgaagttttatggcagccctagggcagccctggggaaagaacactgggccctgaacaaaacatgggagccaagaggctgagccctgtgagactgtctgagtgccttagca

SEQ ID NO: 272620 - DNA, 201 bp, Homo sapiens
atcccttgatctccgacttccagcccccagagcagtgagacagtcaagtttttttttttttttttttttccaagttttgttttaagccttgaagttttatggcagccctagggcagccctggggaaagaacactgggccctgaacaaaacatgggagccaagaggctgagccctgtgagactgtctgagtgccttagcagg

SEQ ID NO: 272621 - DNA, 201 bp, Homo sapiens
tcccttgatctccgacttccagcccccagagcagtgagacagtcaagtttttttttttttttttttttccaagttttgttttaagccttgaagttttatggcagccctagggcagccctggggaaagaacactgggccctgaacaaaacatgggagccaagaggctgagccctgtgagactgtctgagtgccttagcaggg

SEQ ID NO: 272622 - DNA, 201 bp, Homo sapiens
gggtgaactcatcagcttttcgggttgagaggagttttagtgtctgtggccgaggcactttcctctcatggtgtgtgcagatgcacacgccaggcctgtgmgtggtgggttgggctgagggcgcgggcctggagcttctgagccccagagccgctgacgtagacagctttggcagcagcatcctgagaaatggcagggggc

SEQ ID NO: 272623 - DNA, 201 bp, Homo sapiens
gtcctggccatttggggtgattgcaggtacagcagattctcttctatgaagactcggttgcagcccacctttctaaaatcctcacctcggaccagcactcrgtggtcatctcctcggccaagtgagtgcctggtggccctggggagggcatggtgccctggcccccagcctggagctgcctctctagaagggtctttctgt

SEQ ID NO: 272624 - DNA, 201 bp, Homo sapiens
tgtcaggttttacttgtctcaaggcatgttttatttcttatcaaaattaatttctgttcattttccttttctttaatgtcatcggtaatggggaaaaggaraaaagggtcacagagacagccgcgttacagctggatatctctctctcagaaaggcggagggaatcacggggctatgaatttcatcttcttattattaaat

SEQ ID NO: 272625 - DNA, 201 bp, Homo sapiens
tggatatgactatattgtattaaaattggtttccactgtaatcataagtattttatttttggcacttagagaaattctgagaaggagttcataggcctcaycagactgccagaaggggtccatggcacagaacagacgaggagctcttgtatgacttctccaaagtgtgacatggcacttctgcggacatcctcccggttg

SEQ ID NO: 272626 - DNA, 201 bp, Homo sapiens; identical to SEQ ID NO: 54172

SEQ ID NO: 272627 - DNA, 201 bp, Homo sapiens
aatagcttttgtagcagaagagtagatatccggaaaaagttatccttaaaagttttcaaggtataatcaatacaaacaggaaaaataaaagttaagggaaraccaagtataatttaacatataagatgcctttaattggtagctaaataaaaaggaagctatgtaatggatcagagtattgcgtttaaatcttgtcatggc

SEQ ID NO: 272628 - DNA, 201 bp, Homo sapiens; identical to SEQ ID NO: 54173

SEQ ID NO: 272629 - DNA, 201 bp, Homo sapiens
gggacctcaaggtacttccataggcgtctccctggaacctgcacttgggcttgcacgcagctcccttctcttccatcctctcccccgacctggccatgtcycagcatcacgattcttctcaggctttcgtgtatacctcaggtgggggcggctgtggccctcatctaggcagtgatggctccacccaccacaaccagagga

SEQ ID NO: 272630 - DNA, 201 bp, Homo sapiens; identical to SEQ ID NO: 54174

SEQ ID NO: 272631 - DNA, 201 bp, Homo sapiens
ctcccacagcccggactgactgggctcacccctccctccagcgctgccacctgtggcctgtgttaacctctccatgagcccagccccccaaacatgtgcayccactcggtcctccgcccccttctttgtcccacacacttcacgcaactgcctgtggtttgcagccctccctcctcagccctcccacctgctcgtgtcgct

SEQ ID NO: 272632 - DNA, 201 bp, Homo sapiens
ggaaagttgcaccgtttgttttcccattgtgcttcctattgaaaacagcttacggtttttgctccaggtgagcccgcccggttagaacactgcttcctcargcaggtggctggacaggtggctgcgagcaggctgggtccctggggcagctctggcagatccggttggcacggactttctcctcctgctgcagtgcgcttt

SEQ ID NO: 272633 - DNA, 201 bp, Homo sapiens
cgtgatggcacacgcccgtagtcccagccacttgggaggctgaggcaggagaatcgtttgaacctgggaggtggaggttgcagtgagccgagatcgtgccmccgcgctccagcctgggcgacagaatgagactctgtctcaaaaaaggaaaaaaaagaaaaaaaagaaagaaaacagatgggaaggatgttatctcggcat

SEQ ID NO: 272634 - DNA, 201 bp, Homo sapiens; identical to SEQ ID NO: 54179

SEQ ID NO: 272635 - DNA, 201 bp, Homo sapiens
tatgtcttagaaatggaaggctggaatttttaaggtataggctttgtggtgtgactttactcatgtgctagaaacattctgtggttctcacctggccagayagaaagctgcaggtggaagaggcttgtgtgtggtgaattcctacagtctgagctttgtcacgggaaaatttccctccagtcccccaaagcaagcactaca

SEQ ID NO: 272636 - DNA, 201 bp, Homo sapiens
tggctgcgagcaggctgggtccctggggcagctctggcagatccggttggcacggactttctcctcctgctgcagtgcgcttttcctccggggcggattargttcagccgttcccttcaccgtgggagccttctcttctgtcagcctttgatacctgcgatgggggaacctgaggtcctaacatgttacaaacaggtttgt

SEQ ID NO: 272637 - DNA, 201 bp, Homo sapiens
gcttcaggcctctggtgtgtttcactgacttccaagtttccaaagcgccctgtctgcacccctcttatgacacttgaaaacaatttatggaaatttccaarcagacacggaagtagagaccgttgaattaatcacatcagcctgtgtctttcttgtttcatctgtctccaccccctacccacacccctacttttctcctga

SEQ ID NO: 272638 - DNA, 201 bp, Homo sapiens
ttttgtgtggacataggttttcatttatcttggctatacacctaggagtggaagtgctgggccatatggtaatactaccggactattttccagctaaaaarctgccgtaacattttacattcccaccagctgtgtatgaggagggttccaatttttccacatccttgtcagtaactgttattatctctcttttgatactag

SEQ ID NO: 272639 - DNA, 201 bp, Homo sapiens
tgaaacagagtgatttcattccacagctcgatagggagatggattttgttctgtaggtttcgcagaagctgaatctttcctaccttaatgaaccacagagmgcatgtgtgtattttgggatgtcgcacctgctgctgggggttaaggtttgtttcgcctttggtgtgtagtggagatgggtttgtgcataaattcactttc

SEQ ID NO: 272640 - DNA, 201 bp, Homo sapiens; identical to SEQ ID NO: 54198

SEQ ID NO: 272641 - DNA, 201 bp, Homo sapiens
gcatttcctctcacctgccttctagaaacacccctggagccactgtgtccctcgtggctggtggtcagcattgtctgccattcctgctcctcgcccgccasgtgcgggttccgcctgtgagtccctcccagccggcagctgtgctgctccgccggtgcggggcctgcctgcattctccccccgtggccgcacgctggctgg

SEQ ID NO: 272642 - DNA, 201 bp, Homo sapiens
ggagaaaaggttctgtgccctcaggtggggcttaccccctcgtatttataatcttaatttatatagtgaccaccgtggaaacaaacgcctcttgtattgtyatgtacatagtccatacctgagtgctgtacataagttgttctgtgtataaataaaacaagcctgtttttgatcttccatcgccagagtctttgtcatcat

SEQ ID NO: 272643 - DNA, 201 bp, Homo sapiens
cccctggaaagccattaccctgtcccctcaaagcccatggtggcccctctggcctgcctggaaggtgcacttgcacagcactgcaggaagctgctggcagyggcctgtttccacagggtcaggacaggctggccccgctgcctttgcttgcactgctcctatagtctctgtcccccgatctcacctgcctgagccacatct

SEQ ID NO: 272644 - DNA, 201 bp, Homo sapiens
gcctgcctggaaggtgcacttgcacagcactgcaggaagctgctggcagcggcctgtttccacagggtcaggacaggctggccccgctgcctttgcttgcrctgctcctatagtctctgtcccccgatctcacctgcctgagccacatctcagcctccctgggacctggtgtgacttgtgctctcaccgtcttccctatga

SEQ ID NO: 272645 - DNA, 201 bp, Homo sapiens
cctgccagaggccattgggatagcaggtcaatggatgaaggaggttgtataggcaaatgggagtaattatctctgatcttgatttttgtaggaaataggcrtagattaaggcatagataaatttgaaaaggcatagatacattaattaattaattagagatgaggtttcactctgtcgccctgtctgaagtgcaatggcgt

SEQ ID NO: 272646 - DNA, 201 bp, Homo sapiens
taaatggttcaaggtttaatacaactgattcctgattcctggagttaaatcagaatttctggggaacgaggcatgaaccgcagagctcctgacaggcgcgkcctgagttgaggcccacgatgctggttttcgtggcctctgtagtgttccagtacctaagacgtcctgttgtggacgtacactttcccagattccctgtga

SEQ ID NO: 272647 - DNA, 201 bp, Homo sapiens
cgtggcctctgtagtgttccagtacctaagacgtcctgttgtggacgtacactttcccagattccctgtgatcagtagtgctgctgtgaatatgcttatcytcgtcttcttggcacatgggcaagagtttctctagaatgtgtttctaaggatagaattgccaggtgtgtgcatcttcagcttgactggtgatcgtcaaat

SEQ ID NO: 272648 - DNA, 201 bp, Homo sapiens
agctctgctgtgtgtgtgctccgcctcccacagcccggactgactgggctcacccctccctccagcgctgccacctgtggcctgtgttaacctctccatgrgcccagccccccaaacatgtgcacccactcggtcctccgcccccttctttgtcccacacacttcacgcaactgcctgtggtttgcagccctccctcctca

SEQ ID NO: 272649 - DNA, 201 bp, Homo sapiens
ttttcttttttaacataccaaactgagggcaagatgaagacctcatgagtgagataagacattggacattgctgagactttaatcgacaccgtgccctcascatgtccacacggacctgctggccctgccgccaccccagctgtaaagcttgcttccacccacagtgtccccttcctgggatgggagcagcacccagccag

SEQ ID NO: 272650 - DNA, 201 bp, Homo sapiens
  misc_feature (1)...(201): n = A,T,C or G
gacaccccgtggctctgccagtccgcagagcccggcgacgaagaggtatgtggctcatagggctgtgcctgggtctcccggacatggtggctctcgcctgnagtgcctgtgttccttgtgacccgtgtggctctgggatcaagatcgtgtcgctccggcagcccctgaggggccttctccagacttcgctattaaaatgct

SEQ ID NO: 272651 - DNA, 201 bp, Homo sapiens
cccttgatctccgacttccagcccccagagcagtgagacagtcaagtttttttttttttttttttttccaagttttgttttaagccttgaagttttatggcagccctagggcagccctggggaaagaacactgggccctgaacaaaacatgggagccaagaggctgagccctgtgagactgtctgagtgccttagcagggc

SEQ ID NO: 272652 - DNA, 201 bp, Homo sapiens
cttgatctccgacttccagcccccagagcagtgagacagtcaagtttttttttttttttttttttccaagttttgttttaagccttgaagttttatggcagccctagggcagccctggggaaagaacactgggccctgaacaaaacatgggagccaagaggctgagccctgtgagactgtctgagtgccttagcagggctg

SEQ ID NO: 272653 - DNA, 201 bp, Homo sapiens
cctgagcagaaagtggaagcttggctcagctcagcctgcacatgtgtggggctgtctactggcatgtagtgtcccttggtatcaggaggcaggaagtctaygtgcaggttgaatgtgtggcccagagtttttgggacagatgcagtgcaagaaacggggtacagagcagttgaaggtgctgcatggagaaagttctgcaac

SEQ ID NO: 272654 - DNA, 201 bp, Homo sapiens
ttgatctccgacttccagcccccagagcagtgagacagtcaagtttttttttttttttttttttccaagttttgttttaagccttgaagttttatggcagccctagggcagccctggggaaagaacactgggccctgaacaaaacatgggagccaagaggctgagccctgtgagactgtctgagtgccttagcagggctga

SEQ ID NO: 272655 - DNA, 201 bp, Homo sapiens
tgatctccgacttccagcccccagagcagtgagacagtcaagtttttttttttttttttttttccaagttttgttttaagccttgaagttttatggcagccctagggcagccctggggaaagaacactgggccctgaacaaaacatgggagccaagaggctgagccctgtgagactgtctgagtgccttagcagggctgag

SEQ ID NO: 272656 - DNA, 201 bp, Homo sapiens
gatctccgacttccagcccccagagcagtgagacagtcaagtttttttttttttttttttttccaagttttgttttaagccttgaagttttatggcagccctagggcagccctggggaaagaacactgggccctgaacaaaacatgggagccaagaggctgagccctgtgagactgtctgagtgccttagcagggctgagg

SEQ ID NO: 272657 - DNA, 201 bp, Homo sapiens
tctccgacttccagcccccagagcagtgagacagtcaagtttttttttttttttttttttccaagttttgttttaagccttgaagttttatggcagccctagggcagccctggggaaagaacactgggccctgaacaaaacatgggagccaagaggctgagccctgtgagactgtctgagtgccttagcagggctgaggtg

SEQ ID NO: 272658 - DNA, 201 bp, Homo sapiens
ggtgtgatctcggctcactgcaacctccacctcccgggttcaagtgattctcctgcctcagcctcctgagtagctgggattacaggtgcctgctacgatgyctggctagtttttgtattttcagcagagacagggtttcaccatgttggccaggctgattacgaactcctgacctcaagtgtgccttctgcctcagactcc

SEQ ID NO: 272659 - DNA, 201 bp, Homo sapiens
cacaactccagtacaatgtcacacccaggatactaacctcgttacagtggagatgggtagcctccaagccgcagagattttccttgtgcccttttacagcytcacacatgtccctctgtaacccctggcaaacactcatctggtctccatttctataatttggtcttttcaagatgtgatataaatggaatcttatagtat

SEQ ID NO: 272660 - DNA, 201 bp, Homo sapiens
atttacattttgagacatatccctagaaagttactgcattaaaatttgaaatggaacaaagcagcttgtttagaaagggttctgaccacttccctcaattaaaaaaaaaaaaaaacacgacaaaataaccttttacagttagttctggtggtgcggggaggggaaaggttacttaaaagattgagtttcttttctgagtta

SEQ ID NO: 272661 - DNA, 201 bp, Homo sapiens
agaggggaccagggtggctggggggggcgccagagtgagaggactccagaggggaccagggtggctggtagaggccagagtgagaggacaccagaggggascagggtggctggcagaggccagagtgagaggacaccagaggggaccagggtggctgcggggggggccagagtgagaggactccagaggggaccagggtgg

SEQ ID NO: 272662 - DNA, 201 bp, Homo sapiens
tccttgttcagtgctctgtcctgaaagagaagctggattcccttctcaagaccttggacgatgagtcccaggcctcgtcctctctgcccaacccgcccccsaccattgccgaggaggctgaagatggagatgggtcgggcagcatctgcggttccaccggagaccgcttggtggcatcagcttgcccggcccggccgcaga

SEQ ID NO: 272663 - DNA, 201 bp, Homo sapiens
gtgtcatgaacaactattttggcattggcctggatgcgaagatatccctggactttaacaacaagcgcgatgagcacccagagaagtgcaggtaggtaacrggctcaggagcacgtctgtcttttgcgtctttgtggcttctccttccagacagtagcagatttctggagtcagcaggttaaagaacgtgcagaatgctaa

SEQ ID NO: 272664 - DNA, 201 bp, Homo sapiens
gcagggagtgctggctgaaggagccctggagagggccgtgtctggacaaggacaaaccccagcctgtctcttggcttccctgcttcagagatagaacacaraggggccctgaggaaagctcatcttgggcagtacagttgcagaaggcaaataactgcaagacgccaaacctgggcacccctgcccagtggggtttgtgag

SEQ ID NO: 272665 - DNA, 201 bp, Homo sapiens
tcatcaggctacagcatcatcggatcgcccaggtagtggccatggtcctggggtgtctggccgagtccccagcccggagtgtgctaaattctggggcagtrcatggagcctgggagggtgggcgctttccagggccatgtggctgcctcatgtcctgtcctggacagctcgtggccccacttcctgggccagagccctttc

SEQ ID NO: 272666 - DNA, 201 bp, Homo sapiens
tcttctccttgcccatggttctgtgaaatgggaatgtttcctgggcctcccttaggaggtcattgtatggatttttttttaatatatatgttttttattayactttaagttctagggtcctttgtagggacatggatgaagctggaaaccatcattctcagcaaactatcacaaggacagaaaaaccaaacaccgcatgtt

SEQ ID NO: 272667 - DNA, 201 bp, Homo sapiens
tggatgaaactcagcagcttctcagtgagggcacttgggtataaaaggacagggcaagctcctcaaaatccattaaataattcattgtaaaggtgattaavaaattttacccaaaattacaaaaataataatatacaatgattcaacagatgtcacagtgacatagccctataataccagattaaattaaggccagtaaag

SEQ ID NO: 272668 - DNA, 201 bp, Homo sapiens
cctgggctcaagctatcctcccgcctcagcctcccgaagttctgggattacaggcgtgatccactgtgctcagccttgtttgttttttgtcagtctgatgrtgcaaatagtattttcacttagttttgtttttctcttctgagctaggttgagcatcttttcctttgtttaagcgccttttgcatttttttctgtcaaatg

SEQ ID NO: 272669 - DNA, 201 bp, Homo sapiens
ttctgcctgccctgagttgggggattcgaggtggggaggaagacagcagtagagtggtgacaagacaaacttggagacacaaagctctggactcaggccgygctggggcatgccctgcctgctccctcctgggctgctggttcctgataaattgatgcattggtcgaggttcctgtgctgggaagcccaggccaccagaga

SEQ ID NO: 272670 - DNA, 201 bp, Homo sapiens
tggaggggagggtgtgtaggtgccgtgagatactctgtagccggtaaaaatgcatttgctgatgtggctatatggtgataatatacatgacaaaaaaatarcaaggtcacataacagtatgtacagtatggattccacgttcataaaaagaaagttgtaagttgaaaaaaacctgttatcttgctttctcctgtcctggtc

SEQ ID NO: 272671 - DNA, 201 bp, Homo sapiens
agtctcactgtgtcgcccaggctggagtgcagtgatgcgatctcagctcactgcaacttccaccttctgggttcaagtgattcttgtgcctcagccttccragtagctgggattacaggctcccgccaccacacccggctaatttttgtatttttagtagagatgggtttcaccatgttggccaggctggtcttgaactcc

SEQ ID NO: 272672 - DNA, 201 bp, Homo sapiens
ctgtctgagtgtctcccacgtgcggacccacagtctggagctcacgttcttagcatgttctttatacaattaaagcttattgcttgtcctctcagcagacytgtcctttataaaccttcctcctctcctctcttggatactttgtttaatcttgtccaagttactgcatttaacaatttaaaagagaagtcttatctttgc

SEQ ID NO: 272673 - DNA, 201 bp, Homo sapiens
ggaccacagagtgtgcccaccactgtcccacagcgagagcttcggggtccccaaggggaggagccagcgcaaaggtacttgtgcctccacctccctctgcrcaccgtcgtgtgcttggttttggtgagacgtagcgggcttgccaggggaggttttagggcactttctcatagttgctttggccacttggttacataaaaa

SEQ ID NO: 272674 - DNA, 201 bp, Homo sapiens
ttcgtcagatcatagaacacacagaaaaaggtaactggccttgtgatgaggaggggctttcctcaggccagcactgggcatgcccagcgtcccctgaacayggagatgacagaagggtgcatgttgagaaaacctccactgcggccctctccacccatgtccaggcaccagacccccaacgagttcgcttgccctccttcc

SEQ ID NO: 272675 - DNA, 201 bp, Homo sapiens
tttctatgtttagttatatttagatacgcaaatacttgccgttgagttatagttgcctacagtgtcagcacagtgatgtgctctatgggtttgtagtccargagcaataggtcatgccatacagatgaggtgtgtgccatctagatttgtgaaagtacactctgtgatgttcacataggatgaaatcacctcataacacat

SEQ ID NO: 272676 - DNA, 201 bp, Homo sapiens
gaaaggaggcaaatagagtagaacttttctaaagtctttccatttccaggaagaagaacaaagatccaattatattagacaagtcagggatgcatgttgtrtgtaatctgtgtggtggccaccaaaattgtgatagtgtgtgatagctaagctaaacaagaaaaatagaatcagagattctaaatctgaaagaaggcaaga

SEQ ID NO: 272677 - DNA, 201 bp, Homo sapiens
ccggctctcagcttggcctcctctggatactctgttaggtgagtgctggagtgcctagctgcggcctgggagtggggtgggcatggttttttcttgtggcrctggctggagtaaggtgggtgttactgccgttgtcagtttctgtcttgtctgactgcccccttcctggatccttggcctggaagagcaggcttttgttgg

SEQ ID NO: 272678 - DNA, 201 bp, Homo sapiens
accgcatcccacttggaggtgggtgtgtcctgtcaggctgtccccctctgctgtgtcatcgcttggtttacagatttctaggtcttttcttcctctttttyttttctttttttttttttttttaatagaagtgggatctccctacgttaagccagtctggtcttgaactcctgacctaaagtgatcctcctgccttggcct

SEQ ID NO: 272679 - DNA, 201 bp, Homo sapiens
ggtacgcctgttcccacgcgaggccgacctactgcaatgtgtgccgtgaggctctgtctggggtcacgtcgcacgggctgtcctgcgagggtacggatgtscgtttgttattctgtcaggaaaggtggcctggcattttacttgataaagccttggaaatccaaacccagtcaccataaataagccgttgtcacccatgtg

SEQ ID NO: 272680 - DNA, 201 bp, Homo sapiens
aaaaaaaaagtcctatttgtctctttctagttgtgatctcgttggcatccccatagtgtctgtcgcagtcagatgcatgcttcagagcagcaggtgtaatygggctttcgggtccataggcatttgagagcaccctgaagtcctgggaagacaagcagaagtgcgagctgccccgccctccatcctgttccctgcacccgg

SEQ ID NO: 272681 - DNA, 201 bp, Homo sapiens
gccttgaactactggtctcaagtgatcctctcacctcagcctcccaagtagcttggaccacaggtgtgcaccaccacgcccagctattttttttttttttytaaatttgaggccgggtgtggtggctcacgcctgtaatcctagcactttgggaggccaaggcgggtggattgcctgagctcaggaggtcgagactagcct

SEQ ID NO: 272682 - DNA, 201 bp, Homo sapiens
ggtctcaaagcttagtcatttcccagccaagagaagaggagctgaggatttccaggcggaggaaagagtatattcaaaaaagtggggaaataaaaggagtyggttgtgtttgggtcaggtggttctgggaggggtgagagaggagcctctcagattgggaggagcccggtgggccacgtgaagccttcctagatgacaagg

SEQ ID NO: 272683 - DNA, 201 bp, Homo sapiens
cccggtgcgctctctcctgctggccgttggtgtcatgaagacgctgatgtggcacacactccgttgccaccttgggcgtgcacactccctcagcttctgcsaggatgcggtaagatcagcttataggtagacaggtggtgggtaagttgcaggtagttcctgaatgaggatgaatctgtgggtagtgttttgagtagatac

SEQ ID NO: 272684 - DNA, 201 bp, Homo sapiens
ttgacagtagtaaatacagaaataccagcattgggttgtttgctttggttctctctctttcttccttcactaatgcaatgacaatgtttgtagattttttwaaaaaaatcatggcactatacctgtgagcccgagcttttggttagaagcaggtgggtgggttaatttggattggcttattgattggatgctacagtttca

SEQ ID NO: 272685 - DNA, 201 bp, Homo sapiens
ccagaggggaccagggtggctggtagaggccagagtgagaggacaccagaggggagcagggtggctggcagaggccagagtgagaggacaccagaggggascagggtggctgcggggggggccagagtgagaggactccagaggggaccagggtggctgggggggggggggtgccagagtgagaggactccagaggggagc

SEQ ID NO: 272686 - DNA, 201 bp, Homo sapiens
ccttgcagactttcgcagctccatcattcgatgacaagattctggaggtggtcgccgtgttcggcagcatgcagatggccgtctctcgagtcatcaggctrcagcatcatcggatcgcccaggtagtggccatggtcctggggtgtctggccgagtccccagcccggagtgtgctaaattctggggcagtgcatggagcct

SEQ ID NO: 272687 - DNA, 201 bp, Homo sapiens
gggttcacgccattctcctgcctcagcctcctgagtggctgggagtacaggtgccgccaccacgcccgactaattttttttttgtatttttagtagagackgggtttcacagcgttagccaggatggtctcgatctcctgacctcgtgatccgccggcctcagcctcccaaagtgctgggattaaaggtgtgagccaccgc

SEQ ID NO: 272688 - DNA, 201 bp, Homo sapiens
gatgattcccatgttttcaagtttcccttttatattctccaatgtgaagtggttctttctgacaggagttgcgcctcttcactgacgtgtcacaaagaagrattaggttggacgtgaagtgtgttattactgccatcttgatatgccctcaaggtggggtagactcagggagcaggctgtcgttagagatgattcatagtg

SEQ ID NO: 272689 - DNA, 201 bp, Homo sapiens
cctcagcctcctgagtggctgggagtacaggtgccgccaccacgcccgactaattttttttttgtatttttagtagagacggggtttcacagcgttagccrggatggtctcgatctcctgacctcgtgatccgccggcctcagcctcccaaagtgctgggattaaaggtgtgagccaccgcgcccggccaataggtaaaat

SEQ ID NO: 272690 - DNA, 201 bp, Homo sapiens
agcacttgcgtcctgccctcactgcttccttggaaccacactgggccccagaactgctcagaaggggctgtgtctggcagagggaaggcgggtgggtgagsgtgggccttctttgtccttgcccctcctggaacagcccacagcgcaggccctggtggagggcacccccagcctgtgcaggctgctgggaggcccatgctc

SEQ ID NO: 272691 - DNA, 201 bp, Homo sapiens
tggaaactgaagcgccagtgcaacagtattgagaggtagaaactttaagaggtgatcagtgctgggtgcagtggctcacgcctgtaatcccagcactttgrgaggccaaggcgggcagatcacctgaggtcgggagtttgagatcagcctgatcaacatggagaaaccctgtctctactaaaaatacaaaattagctgggt

SEQ ID NO: 272692 - DNA, 201 bp, Homo sapiens
tgaagcgccagtgcaacagtattgagaggtagaaactttaagaggtgatcagtgctgggtgcagtggctcacgcctgtaatcccagcactttgggaggccraggcgggcagatcacctgaggtcgggagtttgagatcagcctgatcaacatggagaaaccctgtctctactaaaaatacaaaattagctgggtgtgttgg

SEQ ID NO: 272693 - DNA, 201 bp, Homo sapiens
ggttctgggcagctggtggcagttggttaaatgtggccagccatttttctggagtggtgacggacagtgacaggaagaaatgtgcggttcacagaggctcygggtttgggaaagtggacccctagattccaggtgctggcctggtacagcacttcagtgtccctgttcctggcctggtctactcctcccctggggctgcgt

SEQ ID NO: 272694 - DNA, 201 bp, Homo sapiens
ctgggtgcagtggctcacgcctgtaatcccagcactttgggaggccaaggcgggcagatcacctgaggtcgggagtttgagatcagcctgatcaacatggwgaaaccctgtctctactaaaaatacaaaattagctgggtgtgttggcacatgcctgtaatcccagctactcaggaggctgaggcaggagaatcacttgaa

SEQ ID NO: 272695 - DNA, 201 bp, Homo sapiens
tcacctgcaggctggcctccatccatcagcagactgccaggcctattgcttctcctgttgaccatttcctccatgcacagggacttgcctggggatgcccyggccacggctgtgctcctgagcccctggcggtgggaagctggtagagaaggaggggctgactcatacctttctcttttcttttgttctgtgtctctgctg

SEQ ID NO: 272696 - DNA, 201 bp, Homo sapiens
gcagatcacctgaggtcgggagtttgagatcagcctgatcaacatggagaaaccctgtctctactaaaaatacaaaattagctgggtgtgttggcacatgyctgtaatcccagctactcaggaggctgaggcaggagaatcacttgaacccaggaggcggaggttgcagtgagccgagattgtgccattgcactccagcct

SEQ ID NO: 272697 - DNA, 201 bp, Homo sapiens; identical to SEQ ID NO: 54177

SEQ ID NO: 272698 - DNA, 201 bp, Homo sapiens
catctttctgagactcaattttctcatctgtgaaatgggataatactggactgtatctcaaaggtcattggattggcacagaagtgcgttctgaatgtttyctagtttctaatctccaccaccagtcatctctactagtaggaaagtaatagggtttaacttgctaacatgtaacagttattctgatttataggagtttca

SEQ ID NO: 272699 - DNA, 201 bp, Homo sapiens; identical to SEQ ID NO: 54181

SEQ ID NO: 272700 - DNA, 201 bp, Homo sapiens; identical to SEQ ID NO: 54182

SEQ ID NO: 272701 - DNA, 201 bp, Homo sapiens
gcctggaatgctctagccggctctgccgcggctctcccctagcccccggctcctgccccgtcccacctctctgtggcgtctgcagctgcccttcgctcagsctcctctagtccagctggtggttcttttcatttggtgattgttactgttgtgtttaacgctcctacagtttccctcagagaacagactttgtctttagtt

SEQ ID NO: 272702 - DNA, 201 bp, Homo sapiens
gttgacggtgtttgtgcagagaacagcccttgacccagaagctgggagacccttgctggagtcttcgtccgctgagtcaggatgggcttgaatgaaccaarccacgtggccccctgtggcctcgccctcctcatggcgtcactgccaccttgcggggagccatgctgacacctgagggtccagctttagtcattgctcagg

SEQ ID NO: 272703 - DNA, 201 bp, Homo sapiens
cagagtccattctggactttccctgcctcctggtttgaagcccttttcaaggacattctcagagctgtcttactgttaagcaaggaccactggagacttgygcttccccccaagcagctgcacgtggtagtcttggacctgtgggctgggcatatgtctgtcgggtcagtgggtggccgtggaccacactccagctcaggc

SEQ ID NO: 272704 - DNA, 201 bp, Homo sapiens
tggtgtatttcttttttttttccttttttatgtttaaactttcttccttccaaatttataaaagttatgtaggactttctgcaaaagttctaaatgcacaraatcatgtgatctcaccacttggaagtggccagctgcttactctacagtgtttatctttatttctgtatatttatgtctttacctacatgtacccatgag

SEQ ID NO: 272705 - DNA, 201 bp, Homo sapiens
ctgcgcggctgagtgccagggtgctcttctgtggcatcctccagggttaagcatcctttggggcttagtctccatttgacttactcttctggtaaatgccrgttcacactttttacctattttctctttggtggtttttcttttttatcattccgtgggagtttctttttttctttctttctttctttttttttttttgag

SEQ ID NO: 272706 - DNA, 201 bp, Homo sapiens
ttgcttttcttttatgtatgagatgtgtagcaggagatgcaagaaaaaatactccagcatctgtcctttaaagataacttataacttttctgggttttggsttgttggttttgtcttttttttttttcccatttagggaagagatggaagtgattgctttccccacaaaggtaaggaagatgaatggggggccaggagaga

SEQ ID NO: 272707 - DNA, 201 bp, Homo sapiens
aggcactttcctctcatggtgtgtgcagatgcacacgccaggcctgtgagtggtgggttgggctgagggcgcgggcctggagcttctgagccccagagccrctgacgtagacagctttggcagcagcatcctgagaaatggcagggggccagagaacacagagacagggccaagaatagctgaaaaataccaaatgctgaa

SEQ ID NO: 272708 - DNA, 201 bp, Homo sapiens
agaatgcactggccccgcgtcccagtgtcctcccagctgctgtgtactgtggccctgtgagcctcagtgtcccttcttcatgtctgccagtgcgtccaggrcacaccctgggcctcttgacacccccacccacacaggcacacattgccccttagaggacaggattggtgcaaccccccatgcccccggcagcgtgctggg

SEQ ID NO: 272709 - DNA, 201 bp, Homo sapiens
cagttctgctccttctcttggtgggacgtcctgcagcctggccttttgaatccctgggatgtcattcatttgtcctgttgagttcagtttattgccctgctttttttttttttttttttttgagacagggtctcactctgtcacccaggctggagtgcagtggtgcaatcttggctcactgcaacctccgcctcccaggtt

SEQ ID NO: 272710 - DNA, 201 bp, Homo sapiens
agccgtcccaggggaggaactgggggtgctgagtccttgtgtgggaaaagcttcaattctcagatctgttattgccagtgagttttgtaacactccacgcygtcaggttttacttgtctcaaggcatgttttatttcttatcaaaattaatttctgttcattttccttttctttaatgtcatcggtaatggggaaaaggaa

SEQ ID NO: 272711 - DNA, 201 bp, Homo sapiens
caatgagtagtttgtgtcattaactgttctctcatgtatattagtatttctaagtcttcttttctttgttcagaatttacttgatatacataccccccacscttttccatcctaacttttatctttagttttccttattattttgaatttaattccctttttttttttttttttttttttttttttttttagagataggct

SEQ ID NO: 272712 - DNA, 201 bp, Homo sapiens
tcagtctctgtgagtataaggacatcttcacacggcacgacatccggggctctgagctcctgcacctggagcggagggacctcaaggtacttccataggcrtctccctggaacctgcacttgggcttgcacgcagctcccttctcttccatcctctcccccgacctggccatgtcccagcatcacgattcttctcaggctt

SEQ ID NO: 272713 - DNA, 201 bp, Homo sapiens
ttagttttccttattattttgaatttaattccctttttttttttttttttttttttttttttttttagagataggctcttgctgtgttgctcaggctggartgcggtggtacagtgttagctcactgcagcctcaaactcctggtctcaagagatcttcctgcctcaccctccccagtagctggaaccacaggcattgtca

SEQ ID NO: 272714 - DNA, 201 bp, Homo sapiens
ggtggctggggggggcagagcgagaggactccagaggggaccagggtggctggggggggcgccagagtgagaggactccagaggggaccagggtggctggyagaggccagagtgagaggacaccagaggggagcagggtggctggcagaggccagagtgagaggacaccagaggggaccagggtggctgcggggggggcca

SEQ ID NO: 272715 - DNA, 201 bp, Homo sapiens
ccagagcagtgagacagtcaagtttttttttttttttttttttccaagttttgttttaagccttgaagttttatggcagccctagggcagccctggggaamgaacactgggccctgaacaaaacatgggagccaagaggctgagccctgtgagactgtctgagtgccttagcagggctgaggtgccaggttctgccaaagg

SEQ ID NO: 272716 - DNA, 201 bp, Homo sapiens
acaccctcccctcacaatttggattgggatccaaagaagccacttccaaggaatgcgcaggagccagaagtattggaaggactgcagccctgcttcaaatyacctcagtcctctgaaattaaagtaatcccagtgtactagtgtctctagattcccaacagaagcaaactttaatcctctctagagggagatatctccctc

SEQ ID NO: 272717 - DNA, 201 bp, Homo sapiens
agttttggcagagaactagaaactatggaaaagaaccagatgaaaattctagtccacactggccagatggctcacgcctataatctcagcacttttggacygaggcaggtggatcattggaggtcacgagtttgagaccagcctggccaacatggcaagatcccgcctctactaaagatactagacattttttttttcttt

SEQ ID NO: 272718 - DNA, 201 bp, Homo sapiens
  misc_feature (1)...(201): n = A,T,C or G
ttttaggtcacgtccccacattgctaacgtaaccctcacggtgggggacaaggagggctgcgggctgggaagtggcccctgcccccaggtgtttgcctgcncatcgtcccccatgtttccttagtgtcagctgggagtgctgccgctcggcacagggaacgacttggcccgagtactgggctggggctcagcctgcgatga

SEQ ID NO: 272719 - DNA, 201 bp, Homo sapiens
cccctgcccccaggtgtttgcctgcgcatcgtcccccatgtttccttagtgtcagctgggagtgctgccgctcggcacagggaacgacttggcccgagtaytgggctggggctcagcctgcgatgacgacacccagctcccccagatcttggagaagttggagagagccagcaccaagatgctggacaggtgagtggggat

SEQ ID NO: 272720 - DNA, 201 bp, Homo sapiens
tttgttacttaggcgtggagagttaggattttccttttgatcgagttctaggaagtctgggtgaaatggcctgaggttccctgcctgcagaccctgttctmctgcctcagctctgcatgccatttcctttccttgttcagtgctctgtcctgaaagagaagctggattcccttctcaagaccttggacgatgagtcccagg

SEQ ID NO: 272721 - DNA, 201 bp, Homo sapiens
ataatgatagcaatagcaaataacaattctttaataagccttctatgtgccaggcactttcttgggttagctttacagcacttgacatggttagtttattrgtactggtgagaacccaataagttggatgctatcatctccgtcttttggaattggaatagaaatagaatcaaggttaaatgacttgcccagggtgtcaca

SEQ ID NO: 272722 - DNA, 201 bp, Homo sapiens
cctgaagaaagcaattcgtcagatcatagaacacacagaaaaaggtaactggccttgtgatgaggaggggctttcctcaggccagcactgggcatgcccakcgtcccctgaacacggagatgacagaagggtgcatgttgagaaaacctccactgcggccctctccacccatgtccaggcaccagacccccaacgagttcg

SEQ ID NO: 272723 - DNA, 201 bp, Homo sapiens
ccccccgcccccatgcatatttgcctggtttcttctaggggctcaactgcagcttcgtcctggaaatggtgaataacttcagagctctgcgcagtgagacrgagctgctgctgtctgggaagatggccctggtaagctggtgccccagggacagcagggctcgggctgtgtgtgaaacgactgctgtcgccaggttgctgg

SEQ ID NO: 272724 - DNA, 201 bp, Homo sapiens
cctgcgcccgggctggaggggagggcttgctccctaccgtgcccatgcgggccttgcggctccgcatgatctgctggatcctggtaaattaatcccagagrcccctccggctgagagtgggtttttgaactgttgggtcattctccttcttagctatgttttggggtatttcttccttttgcatttattcctgtctttaga

SEQ ID NO: 272725 - DNA, 201 bp, Homo sapiens
ctttcccacactgtggccacagtcagctttccagagtgtatttctgagccaccaccgggctctgtctgtagccccagggagcagctgccggcctctgcttscccagcccctcctccctggcctgctcaggtacctgttgtctcaggcagctcccttatggggcattgctcactgccctgtgccccacatcccagagcactc

SEQ ID NO: 272726 - DNA, 201 bp, Homo sapiens
atcacctcactccacgcatcacctcactccacagaaatcctcactctacgcatctccttatcccatgcctcccctcgtcccacgtcccgtggtcacacgcrtgtcctcactgcacacctcctgctgcctcctgcaaggttcgactgctgactttgcttcccacagcatttccactgcttgacacaggtgaatggctccgac

SEQ ID NO: 272727 - DNA, 201 bp, Homo sapiens
gcacccactcggccttggcagctcccagtctcccatgaccgtccctcagtggctgtccagagactccctgagtcccactctcagggcccactttgtcgtcytcatggctgagtcagtgtgggaaatagttatctgcctgcctctccacgctgtgagttctgtgaggggaggaactttgctcaccatgttgttagaatcccc

SEQ ID NO: 272728 - DNA, 201 bp, Homo sapiens
gtggctgtccagagactccctgagtcccactctcagggcccactttgtcgtcttcatggctgagtcagtgtgggaaatagttatctgcctgcctctccacrctgtgagttctgtgaggggaggaactttgctcaccatgttgttagaatccccagtctagaggagacacctagccagcatctgctgagccggggggtgtcc

SEQ ID NO: 272729 - DNA, 201 bp, Homo sapiens
aggattttataatttaggctttacgggctgactttagcgcctgcctgtgtaaggtttgactctaataacagcactagaacttttaaagctgtttttctttrtgttattaggccatcccatgtagacaaaaagtgtgtaccctaattaaaaaaattattcttttataattcagtcaaggtgagtaattttcctcaagtttag

SEQ ID NO: 272730 - DNA, 201 bp, Homo sapiens
ccaccttggccttctgaagtgctgaggttacaggcatgagccaccacacccagccatgctttcttattttaatggtctcttggtacctctcttctacttcycttctgtgttgtctcttaaacatttatagttcacagattttctttttcctttcttttcttttcttttttctcctcccctcccctcctctcctttcccctc

SEQ ID NO: 272731 - DNA, 201 bp, Homo sapiens
gagccaccacacccagccatgctttcttattttaatggtctcttggtacctctcttctacttcccttctgtgttgtctcttaaacatttatagttcacagrttttctttttcctttcttttcttttcttttttctcctcccctcccctcctctcctttcccctcccctccccgcttctctctttttctatcttcctttctt

SEQ ID NO: 272732 - DNA, 201 bp, Homo sapiens
gagggtacggatgtgcgtttgttattctgtcaggaaaggtggcctggcattttacttgataaagccttggaaatccaaacccagtcaccataaataagccrttgtcacccatgtggtcagtcaagggcacagcgatttctgtgatgccattcttgtttattttacctgccgaagagtccttgataaatcattttttatagt

SEQ ID NO: 272733 - DNA, 201 bp, Homo sapiens
agcatctgctgagccggggggtgtcctctggagggagaggggctgtttgtggtgctctcaagcttgaacagcagcagggcagaaggcagacggcccctccrggcctgcctttgccgtctctccttcgccctcactctctcccagctctgctgcttcccacgcccagcccggccccaggtgttcttctcccaccaacccagg

SEQ ID NO: 272734 - DNA, 201 bp, Homo sapiens
cttgtgctctgcataatgatgtttccggatgatgatccacatggacaaaggtggtcccataagattataatgaagctgaaaaattccaattgtctagtgaygtggtagctgttataatgttgtagggcaatgaattacctatgtgtttgtggtgatgctggtgtaaacagacctactgcactgcaagtggtagaaaagtat

SEQ ID NO: 272735 - DNA, 201 bp, Homo sapiens
aaaccatagatgaagagaaagagagaaaggcggaggttgcagtgagtcgagatcacaccactgcactccagcctgggcaacagagcgagactttgcttctraaaacaaaaaccaaacaaaaaaagaatgacagctgtgttcttaacagaaataatggaaaccaaaagtctattgaaatttaagtcctcaaagaaagttact

SEQ ID NO: 272736 - DNA, 201 bp, Homo sapiens
ccccgggtacctgcctctctcccgcgtgtgtttctggccgtccacgcctgctggatcggccccgttcccctggtctctgctttctcccttggccttgcagytcctccctcttggtccctgtgctgtaacccccggtcctgcgaccacacttgtctgttggtagctgcagccctccaccctgcctgcttcccctctgaccgt

SEQ ID NO: 272737 - DNA, 201 bp, Homo sapiens
ccctggggaggcaggagtggtttcctttaaggtgagatcttgagggataaagaattcaccaggctaagtgggtaagaaatggccttctacatatttgaacsttgcgtctagagctttaggcacaactgcgaaatgatcagaagttgggccagaggtggatcacgttgattagacttattagttggaagggttggttagggc

SEQ ID NO: 272738 - DNA, 201 bp, Homo sapiens
tctggccgtccacgcctgctggatcggccccgttcccctggtctctgctttctcccttggccttgcagctcctccctcttggtccctgtgctgtaaccccyggtcctgcgaccacacttgtctgttggtagctgcagccctccaccctgcctgcttcccctctgaccgttgtcacacccggccctgacgtgctctctggct

SEQ ID NO: 272739 - DNA, 201 bp, Homo sapiens
ccttgcaagggcacagctgctgctgcggatgtactgttcccctcctgcctgggaaccctggccttgctggggtcacctcctccacaacttggactggagcrgaaggacaaagaatggatctgaggacaagctggcccaggaccagaactgtatgtatgtcaggcttttaaaatattagtctagtgcaagtcagagctgtct

SEQ ID NO: 272740 - DNA, 201 bp, Homo sapiens
gtggtgcgatctcagctacggcaacctttgcctcctgggcttaagtgattttcctgcctcagcctcccaagtagctgggactacaggcaaatgccaccatrctggctaatttttgtattttgttgtagagatggagtttccccatgttccccaggctggtctcaaactcctgagctcaagtaatacacccacctcagcctc

SEQ ID NO: 272741 - DNA, 201 bp, Homo sapiens
aactgttgggtcattctccttcttagctatgttttggggtatttcttccttttgcatttattcctgtctttagacatatgcagatgtgtattgttatgacrgatgtcaccctgcatcatgcggcactgtagccgggttgtgaggggtcacctgggacaattgagctggccgcctctgtggtgtggaagcaggaaagctgta

SEQ ID NO: 272742 - DNA, 201 bp, Homo sapiens
attagaaaagaagacatgctgaaaatcaggtagttagaagaatagcaacacattaaactcaaaggaaatagagtatttttttaaaggatttatagaagaawgaggaggaggaggttgctgatcaaagaggtatgcaaaggccctgtggcaagagggagcttggggaaatcttggggctgaaagaaggctgtggtggttagg

SEQ ID NO: 272743 - DNA, 201 bp, Homo sapiens
acatgctgaaaatcaggtagttagaagaatagcaacacattaaactcaaaggaaatagagtatttttttaaaggatttatagaagaatgaggaggaggagkttgctgatcaaagaggtatgcaaaggccctgtggcaagagggagcttggggaaatcttggggctgaaagaaggctgtggtggttagggctggtaagcatc

SEQ ID NO: 272744 - DNA, 201 bp, Homo sapiens
tgcagtatttaaggtgtacagtttgatagtttttatacacacacactttctctctctctctctcataattacactgaagctgtcaccatagtcaggataacatttccatcaccctgagaatttccttgtaatccttccttctctgcctcttcacaggcaaacatggatggatttgttttctgtcattgtagattactctgc

SEQ ID NO: 272745 - DNA, 201 bp, Homo sapiens
gtgtgttcctgagtagtgggtgtttgctgatcacctgctgcccactctgctggctctgctcttctgtgtctgagggtaaagggtgtctgcctccctttccyctgcaggaagggctggactctcatcccctgatgaatggtgctttgtccttatagaatgatggaagagggacactctttttcttttaaacctgctatttta

SEQ ID NO: 272746 - DNA, 201 bp, Homo sapiens
tcattgaggttgatgagtcttatcagtggttgttcctttttattactgagtagtattccacgggtgtaccacagtttgttaatcatttaccccctgaaggrcatccgaatagtttccagcttttggtgatcatgaataaagctgctgtaaacattcctgggtaggtttcggtgcaaacatgaatctccatttctctgggat

SEQ ID NO: 272747 - DNA, 201 bp, Homo sapiens
aagacattacttcatttgtatttcctgactacagtacacagtaatgactctgtagaactgcatagctagaatggaaagaaagaaaatggagctaacactcygaccagcacattcaccagcacattataaggtattttgaaatttcagtgaagaaccgtgtaattctgcaaagctatcagttaaaagagtttaatttattta

SEQ ID NO: 272748 - DNA, 201 bp, Homo sapiens
gtaccaagaacatatactgaggaaaggacagtctcttcaataaatggtgctgggaaaactggttatccatatgcagaagaatgaaactagactcccatttmttgccatatgcaaatatcaaatcaaaatggattaaagactttaagacctcaaactatgaaactgtgaaaacactggggaaactttctaggacgttggact

SEQ ID NO: 272749 - DNA, 201 bp, Homo sapiens
gaatgaatttcttcctctggaagcatcagttccaggtcggagctctaagaggacttgctggcactgccggagatgtccaggatacccgtagtgggaagtgmctgcagagcctgtggtctggcctgtatttctctgggaggagtcagtggggtctgtgtattaggagccaggggctactctgatgtgaacctcggccagctc

SEQ ID NO: 272750 - DNA, 201 bp, Homo sapiens
gcggttatctgaagctccccacgtggatggagagagaagtttccggggctcggggccgggcaggcgtctctgcactggagaggatgtagctgctctgctcrtggagggcttcttggctgcagagacacagacactgtcattgactcatggatgcagtgggtgtcagggtgaggggttcacgaagaccccaaaatacactcc

SEQ ID NO: 272751 - DNA, 201 bp, Homo sapiens
atgtgcatttactctttgtcagggcaattctacttctaggaatttaccccagagatacactggtaaaaacaggaaaagatgcttgtaaagataattcacgrcaacactatgagaaatcgcagaagaattttaaacagcacaaaattcccatccatagggcgctggctgagtcctatacagtggagtactgtgccactgttg

SEQ ID NO: 272752 - DNA, 201 bp, Homo sapiens
ttagtagagatgggtttcaccatgttggccaggctggtcttgaactcctgagctcaagtgatctgcccgcttcagcctcccaaagtgctaggattacaggygtgagccaccatgcccagttttatcatcttcccttagcagcctagagctgtggaacactacaagactgtagggtccattcgagttttatgcttttattta

SEQ ID NO: 272753 - DNA, 201 bp, Homo sapiens
cccggagatgctgtccgaggaggaggccacccagatggaccagtttgggcaggcagcaggggtcctcattcacaggtgggctcctacccctctgcgttgcscatgagcctcccccagggtccctgggactgcactcttccaaggcccctggggcgtggagctgctgctcctgacttttgtggggtctgcattacccatgag

SEQ ID NO: 272754 - DNA, 201 bp, Homo sapiens
gtttgcatgtatcttaaaaatggaaggagaaaccttactttctctctctcttttttggtaaagcagcctatgggaaccaagataggggagagatataaaagctagatttctaaatctaccttgtttgtagatttgactttggaactccatcgctatattataatcattataaaacaaaattaagtaaaaggttatgaccct

SEQ ID NO: 272755 - DNA, 201 bp, Homo sapiens
atctccgacttccagcccccagagcagtgagacagtcaagtttttttttttttttttttttccaagttttgttttaagccttgaagttttatggcagccckagggcagccctggggaaagaacactgggccctgaacaaaacatgggagccaagaggctgagccctgtgagactgtctgagtgccttagcagggctgaggt

SEQ ID NO: 272756 - DNA, 201 bp, Homo sapiens
agttttattctctcaccagcactacttagaaagtgaggttctgggtttggttccttttctggtgctctgggacttcgtttctggaaagtgagctccctgaycagagcagagcagagccctggagcggacctcacccccctgggcctcgcgctgatcagcagtgcacactctccatttctctctccctccctccgcctggag

SEQ ID NO: 272757 - DNA, 201 bp, Homo sapiens
tctgagtctccatctctcggctccagaagagcaaatacaaacaaatctggctgaaaattaacaaagaccattttttaaagaaatcgttaatttattgagtmctagtgggaataccatgggctaggtattacattttgtatttcactggttcagtttaacagcaaatatttgagatcttaacattgttaactgttgtgcgag

SEQ ID NO: 272758 - DNA, 201 bp, Homo sapiens
gtcaaactgaaagagatgggctcgctgccctcggagagtttacaggcccctgagaaagataggtggaattgaaaaatttacacgactgtatgaaaagtgctttttttttttttttaaaaacaaaaaacaaaaaacaaaagccagatagtacccaaataaccacccaaggagcccaggaggcgccattgaggaggtgatgct

SEQ ID NO: 272759 - DNA, 201 bp, Homo sapiens
atcttgggcagtacagttgcagaaggcaaataactgcaagacgccaaacctgggcacccctgcccagtggggtttgtgagacctgtgggcagcagtaaggygaggggacagaggtgggcagctgcacaacagcaccctctttccggggccctggggcgttttttgacgcatgcaatcctttcatgggaaactgactcaggc

SEQ ID NO: 272760 - DNA, 201 bp, Homo sapiens
cgcatcacctcactccacacatcacctcactccacacatctcctcactgcacgcatctcactccacacatcacctcactccacacatctcctcactccacrcatctcctcactccacgcatctcctcactccacgcatctcctcactccacgcatctcctcactccacgcatgtcctcactgcacgcatgtcctcactgca

SEQ ID NO: 272761 - DNA, 201 bp, Homo sapiens
cgcacccggccactgagcactgtgttttcaaggcttatttacgttgtacgtttcagaacttcttctttttttttttttttttttgtttgagtgaataatastctgttctgtcaatgtaccacattttgtttgctcattcatcggttgacagatatttgggttgcttctaccttttgactattgtgaatagaactgctgtga

SEQ ID NO: 272762 - DNA, 201 bp, Homo sapiens; identical to SEQ ID NO: 54178

SEQ ID NO: 272763 - DNA, 201 bp, Homo sapiens
ttgtacgtttcagaacttcttctttttttttttttttttttgtttgagtgaataatactctgttctgtcaatgtaccacattttgtttgctcattcatcgsttgacagatatttgggttgcttctaccttttgactattgtgaatagaactgctgtgaacattcatgtacaaattattatttaaatacctattttcattta

SEQ ID NO: 272764 - DNA, 201 bp, Homo sapiens
ccacgagttttgtagtttcagctattattaatatatttagtctttgatccattttgagttattttttgtatgtggtgtgaggtcaggttccaacttcattmttcctgtgtggatgtgcagttgctccagcaccagctgttgaagaggagcgctctccagttggagtctgcctccccagctgtgcagacagccctgcagtat

SEQ ID NO: 272765 - DNA, 201 bp, Homo sapiens
gttgtttgaggaagatcaggccgtggggtgaggatgaggggccctccacccagcctgacagcgcccttggctttgcacccgcgtgctcagccgcacacackctccttgcacagctgtcgatgagcagaatgcccagacccaggagcaggagggcttcgtcctgggcctctctgagtcagaggagaagatggaccacagagt

SEQ ID NO: 272766 - DNA, 201 bp, Homo sapiens
ggagagccatgcactgcaggcgggcagggtccatgcttctgctgttgttggtacttttatttgttttgggtgactctgagaattaaatattaataacagtrttgaaggaacatactgtatcattggccatgatgcatgcctcctagaaagcagcgctgtacacagtgacatgatcacagcacccctgcaggactccagatg

SEQ ID NO: 272767 - DNA, 201 bp, Homo sapiens
tcggtcgtccaggctggagtgcagtggcatactgcagtctctggctgggctcaggcaatcctcctgcctcagccacctgagtagctgggactccagatgcrttccatgatgcctggctaatttaaaaacacatttttatggagacgagggtctcactatgttgcccatgcttggggtctcaaactcctgggctcaagcgat

SEQ ID NO: 272768 - DNA, 201 bp, Homo sapiens
tgatcacagcacccctgcaggactccagatgcacagtttcttctcctcactgagagtgttttggtattgctggcctttccagttctagaaatgtccccttkgagactgacttcatggtggctggtgtcagagtctgtgtcccttgtgaaggaggcagaatcagagctaaattcaatttagcaaagattttctagactaagt

SEQ ID NO: 272769 - DNA, 201 bp, Homo sapiens
ctgtgattataggcacttactgattattcagtgaatgaactgaaagcaataaaccaaattcatttattatatcatttggtatgtggaaaattttcttctartttggtgtacttaacgtttcatactttctctgtttactgaataataactttaattgaacaaaatcactactaattagtccagatttcactgggcttcagt

SEQ ID NO: 272770 - DNA, 201 bp, Homo sapiens
tgtgtccttcagatgttactgctgtaaataattgctaaatgtagctgatttgtgggtcagatgctgttcccagctttcacagaaatgactctggttaactrtacgaagaaagcccagacctatggcaagtctttgcttctgtttctaggagccgaaccaagaacatgatgtggtatggagttcttggaaccaaagagttgc

SEQ ID NO: 272771 - DNA, 201 bp, Homo sapiens
tttctggtgctctgggacttcgtttctggaaagtgagctccctgatcagagcagagcagagccctggagcggacctcacccccctgggcctcgcgctgatyagcagtgcacactctccatttctctctccctccctccgcctggagcagcagctggatccgcctcagaaggagcagctggggagtgctcttgccgagatgg

SEQ ID NO: 272772 - DNA, 201 bp, Homo sapiens
ggttgtctcaagcatgcgagaagcgcttgcagcggaaacacccttgtcgtcgtggacagaagatgcttttctgccttagaagcctgtagtgcagagtcctkctcctgccgagagctggccacactctcaggcaccttccatgctcagccctgcaaaaccggctgatatggcagctgtggggctgttactgaatcacagggg

SEQ ID NO: 272773 - DNA, 201 bp, Homo sapiens
agcttttaaaatctctcacctagcactaggtgagtcccagattagcgttagaagtgagttgaggcttggctgggtcagacagtgtctgttaggagagactyatctttcccagcttgtgctggcaaggaagtggctgacagagtcactgggactgtcatggagcttgctgtcacagagaccaacagtcctggccatttgggg

SEQ ID NO: 272774 - DNA, 201 bp, Homo sapiens
gtgtgaagttcctcagaagattcaaacagctactaaaccccgcccaggtcttcgacctcatgaacggaggcccacacctcgggtaggaagcttgtaaaatrtatctttcttggagttttaaaaattgtgtagatagtgtgtgcttgttaaaaaaaaaaagttcaaagacacaaagctttaaataggaaagaaaagttgaac

SEQ ID NO: 272775 - DNA, 201 bp, Homo sapiens; identical to SEQ ID NO: 54166

SEQ ID NO: 272776 - DNA, 201 bp, Homo sapiens; identical to SEQ ID NO: 54167

SEQ ID NO: 272777 - DNA, 201 bp, Homo sapiens; identical to SEQ ID NO: 54168

SEQ ID NO: 272778 - DNA, 201 bp, Homo sapiens
gttgacaagtactggtggaaagggggatgtggggtacatggctcagaggagatcaagaagagaagacagcagaaaggtggcatttggacagcttgtgaatrtggaggtcagatggatggggctcccggcctcacacatggagaccggctgtggggaactgttcactgacctcctcctgacttacaggtgtgcatgtgtcag

SEQ ID NO: 272779 - DNA, 201 bp, Homo sapiens
cttacctaagaagtgagctcaaggtcttgatatgaataggatgtattttagcttgagatgtaaactgtttgatgcgtgcaatgttatcagttctttagataatgttcataatgacattagcatccctaaacatttgaataaatgaaaaagaaataacatatagaataataatacacaaagtaaaagcagatctagttgcag

SEQ ID NO: 272780 - DNA, 201 bp, Homo sapiens
agggtgggctcacatggttaggggccacggcaggctgtgcccgtgagcctggcaggggatgcagttttggcccaccactttgcctgtgatgtctgcagagsgtgcagtggctcaccaagctgagtggtcttgtcgctgggtggggcgtggctggtgggagcagttggctggaccccagtgctgctgtcgtccctttgacaa

SEQ ID NO: 272781 - DNA, 201 bp, Homo sapiens
ctccttccacccctcctctcacaccctcagaccccttcatgctgcctcccctcgacctctttcctggccctcattgacttcactataagcgtctcactccygtgagagccttgaggtcacggcctcacacccgcacacctgcgtgtccatgcagccgctcctcccgcttgcagccctccagcctgcgccaggctcctctgc

SEQ ID NO: 272782 - DNA, 201 bp, Homo sapiens
cacggcatgccttggatgaggtgacttggccaactgtcttgtggccccagctcctgacattacaatgtgatgactgtgacacttggaagagaaatgtctcrggtatcgtggtcctgggtcctgtggtacaggaccttgtctctgcggtcctgtacttttgcttcacaattagaagaattgaaagcttcaggttgtttcagg

SEQ ID NO: 272783 - DNA, 201 bp, Homo sapiens
  misc_feature (1)...(201): n = A,T,C or G
gtgctctgggacttcgtttctggaaagtgagctccctgatcagagcagagcagagccctggagcggacctcacccccctgggcctcgcgctgatcagcagngcacactctccatttctctctccctccctccgcctggagcagcagctggatccgcctcagaaggagcagctggggagtgctcttgccgagatggaccgac

SEQ ID NO: 272784 - DNA, 201 bp, Homo sapiens
ctttgtgtcactcatgtgatgctacattagcacaagctccctagtaatgtgtacttggccacaccttgagctcaaggccatggagtgtcttggcagcttarggtccccagtgctctgccctttggggtgactatgtgtatgaatatgagctggaagaagcaggttctgttgcttctttttgttagcacaacagagagaatg

SEQ ID NO: 272785 - DNA, 201 bp, Homo sapiens
acttctgttcatttaaaattatctagtctgtggtattctgttacagcagcgcaaaacagactaagacacatgtctagagggctgcttatgtgtaatagctwtataatactgcatatataaagggcagtttatatttaatgctggtagaatatcatgaaggtagtgtatgttagagttaggtttagctactgtattagtttc

SEQ ID NO: 272786 - DNA, 201 bp, Homo sapiens
ttggctggggaatgaggccatctcttttcagagtgagcagtgaaccatttttgtctgtacactgacctggggctgatttggcatcctgaccttccagtctragggagttggtaaggggctggaagggcccattctttgtgtgtgtgggtattttttagagacggggtcttgctgtgttgcctgggccggtctggagatcct

SEQ ID NO: 272787 - DNA, 201 bp, Homo sapiens
tgaacacacaaacaggcttgaatcaattcatttgaaaaggtgtggacaagactttgtcctaagggtgacacctggcccagccagcagatgtgattgttctrccttggccaccttgctctgggaaattgtattgcttagtcaggttgaccttcagtgaccaaaaaagtggatggtagtgtcaagggcttcgggtagcttatg

SEQ ID NO: 272788 - DNA, 201 bp, Homo sapiens
ttactgaggagcctcccaaaaggtttcctgccttctttcctgcatcttactgtcagctttcaataaagcaaccagaatgatgctttcaaaacttgagcttkcatggcttcttattttacgtggagtaaaagccaaagttcttacacctgcatggccctctgtggtcctgatgcttgcaggttggcccctggcccccttcct

SEQ ID NO: 272789 - DNA, 201 bp, Homo sapiens
gtgagtaagcctggtctggctgccggttccatctccctgtaaatttccagaaggggagggaatgtgtgccttagggtccagtacctatgtgggcatacatkagtaagcaaaacatgctgtggggcccaaggttggacaagggggcaacttcatcctggcattgctcttgccctagatccctgtgttccagcgtggagggac

SEQ ID NO: 272790 - DNA, 201 bp, Homo sapiens; identical to SEQ ID NO: 107747

SEQ ID NO: 272791 - DNA, 201 bp, Homo sapiens
gacattcaaagctaccagaagcatcatggtccccagaccctgtacctgcctgtaactctaagcagtgtgagtaagcctggtctggctgccggttccatctscctgtaaatttccagaaggggagggaatgtgtgccttagggtccagtacctatgtgggcatacatgagtaagcaaaacatgctgtggggcccaaggttgg

SEQ ID NO: 272792 - DNA, 201 bp, Homo sapiens
tcttcccgcctcggcctcccaaagtgttgggattacaggtgtgagccaccacacccggcctatgctgttcttttcttattgccagttcctggaggagcatytctgacttgtgccaaaattgaaaagttttcctttattgtctttcttccttcctaggcccctgtgggtgcagtaccctcaggatgtgactaccttcaatat

SEQ ID NO: 272793 - DNA, 201 bp, Homo sapiens
gttgtaagcaaagagagttgagagtccaagttagggccttgggaagtttctcaagcagtatctctccttcaccctcttttccaacctgcttcctctctctyctctaccagcggatgtgggtggcttcttcaaaaacccagagccagagctgcttgtgcgctggtaccagatgggtgcttaccagccattcttccgggcaca

SEQ ID NO: 272794 - DNA, 201 bp, Homo sapiens
aagtcagggtgtgggaggtccactccttgttcaaatgttcttgtgaactgcatcttcagcagggttctggggacccagagcggatgtgggaggtcagccatgtaaaaagctgaactcctttaccatgtgcaagctccccacttcttgtcttcctcaggagccgtgtggacaggggacaacactgccgagtgggaccatttg

SEQ ID NO: 272795 - DNA, 201 bp, Homo sapiens
ttcttttgatatgtttcccaggctttctgtctctggtcgtgatgagaacagtgtggagttaaccatggctgagggaccctacaagatcatcttgacagcayggccattccgccttgacctactagaggaccgaagtcttttgcttagtgtcaatgcccgaggactcttggagtttgagcatcagagggcccctagggtctc

SEQ ID NO: 272796 - DNA, 201 bp, Homo sapiens
accctcatcgcgacttgggcatcttctggctcaatgctgcagagacctgggttgatatatcttccaacactgccgggaaggtgagagcacaggcacggggraaaaggagggagtgaagcttccaggccttgaggcaaataggtatactaggggcattagctatttggggactgggtttaagaaggggctgtgggcctggtg

SEQ ID NO: 272797 - DNA, 201 bp, Homo sapiens
ggctggatgctggttatataagcagaaataaacaaggccctgtttatttacagatctagttctccaggaatacaatgtctacctgcttgcttgtttgcttscttccttccttccttccttccttccttccttccttccttcctcctttccttttccttagatattcagaataggattactcagattcttgtgtcatgatac

SEQ ID NO: 272798 - DNA, 201 bp, Homo sapiens
ttaaccatggctgagggaccctacaagatcatcttgacagcacggccattccgccttgacctactagaggaccgaagtcttttgcttagtgtcaatgcccraggactcttggagtttgagcatcagagggcccctagggtctcgtgagtacaggggttgggactgcagggaacctagtgtgaaagagcataggggtgttgt

SEQ ID NO: 272799 - DNA, 201 bp, Homo sapiens
tagcaccttgccatactcctcaacctttccccacctcttcttctgtttcacttttctctttatccctttatcctcattcattcattcagcaaacaattatkgctttttcctccctgacaggcctgggctggatgctggttatataagcagaaataaacaaggccctgtttatttacagatctagttctccaggaatacaat

SEQ ID NO: 272800 - DNA, 201 bp, Homo sapiens
gagttttactttgtcgcccaggctggagtgcagtggagtgatctcagctcactgcaagctccacctcccaggttcacaccattctcctgcctcagcctccygagtagctgggactacagctgcccaccaccacgcctggataattttgtgtatttttaatagagacagagtttcaccgtgttagccaggatggtctcaaac

SEQ ID NO: 272801 - DNA, 201 bp, Homo sapiens
cagcctggtctcgaactcctgaccttgtgatccgcccaccccggcctcccaaagtgctgggtttacaggtgtgagccactgcgcctggccagaaaaaaaamaaaaaccacaactttttaaaaattagctgggtgctgtggcgagcaactgtagtcccagctacttgggagggtgaggcaggtggatcacctgaggtcagga

SEQ ID NO: 272802 - DNA, 201 bp, Homo sapiens
ctcggctcactgcaagctccgcctcctgggttcacgccattctcctgcctcagcctcccgagtagctgggactacaggcacccgccaccacgcctggctawttttttgtatttttagtagagacggggtttcactatgttggtgaggatgatctcgatctcttgacctcgtgatccacccgcctcggcctcccaaagtgct

SEQ ID NO: 272803 - DNA, 201 bp, Homo sapiens
cgagatctcggctcactgcaagctccgcctcctgggttcacgccattctcctgcctcagcctcccgagtagctgggactacaggcacccgccaccacgccyggctatttttttgtatttttagtagagacggggtttcactatgttggtgaggatgatctcgatctcttgacctcgtgatccacccgcctcggcctcccaa

SEQ ID NO: 272804 - DNA, 201 bp, Homo sapiens
ctgagagaggagagttggtggaaagagggaaaacagcccagagactgagggcctagggaacttgcaccagatgacagctggcttttgctcctcactacccstctcttctctcctcacccagcacatggcgactgctgatgggctgagacagcgctctgggggcatggaacgcccctttgtcctggccagggccttcttcgc

SEQ ID NO: 272805 - DNA, 201 bp, Homo sapiens
cctttggggggaggtgccccagacccttccagcctttcactcaccccactttcccctgctgtgtgatgtctggtcctgttacctgttaccctggctgggarcccccagaagaaggaaggtgagatactgaaagtcaggtccttcgggaatgtagggagcttattgctttgccaggggatggagagatgctgcctattgctg

SEQ ID NO: 272806 - DNA, 201 bp, Homo sapiens; identical to SEQ ID NO: 54215

SEQ ID NO: 272807 - DNA, 201 bp, Homo sapiens
cctaattttaatgtatttagatgtatcagtcttttaccttctgttgttagccttttgtttgttgtatttagtctttatctaccccaaggtcagaaaaaaawatatatatatatattttttgagacagagtcttgctctgttgcttaggctgagtgcagtagtgcgatcttggctcaccacaacctccgcctcctgtgttga

SEQ ID NO: 272808 - DNA, 201 bp, Homo sapiens; identical to SEQ ID NO: 54209

SEQ ID NO: 272809 - DNA, 201 bp, Homo sapiens
tgatcttggctcactgaatgcactccgcctcccgggttcaagtgattctccagcctcagcctcctgagtagctgggatcacaggtgcctgccaccatgccyggctaatttttgtatttttagtagagacggggtttcaccatgttgttcaggctgatctcgaactcctgacctcaggtgatcttcccgcctcggcctccca

SEQ ID NO: 272810 - DNA, 201 bp, Homo sapiens; identical to SEQ ID NO: 54206

SEQ ID NO: 272811 - DNA, 201 bp, Homo sapiens; identical to SEQ ID NO: 54211

SEQ ID NO: 272812 - DNA, 201 bp, Homo sapiens; identical to SEQ ID NO: 54213

SEQ ID NO: 272813 - DNA, 201 bp, Homo sapiens
atttaactcactgtacgtcttttttttttttttttgagagacagagtctcgctctgttgcccaggctggagtgcagtggcgagatctcggctcactgcaarctccgcctcctgggttcacgccattctcctgcctcagcctcccgagtagctgggactacaggcacccgccaccacgcctggctatttttttgtattttta

SEQ ID NO: 272814 - DNA, 201 bp, Homo sapiens
gcaaatagggccccagagggtatttaactcactgtacgtcttttttttttttttttgagagacagagtctcgctctgttgcccaggctggagtgcagtggygagatctcggctcactgcaagctccgcctcctgggttcacgccattctcctgcctcagcctcccgagtagctgggactacaggcacccgccaccacgcct

SEQ ID NO: 272815 - DNA, 201 bp, Homo sapiens; identical to SEQ ID NO: 54219

SEQ ID NO: 272816 - DNA, 201 bp, Homo sapiens
atcctatctccattggcatctttccgaaccaattttacagactgtgcaaatagggccccagagggtatttaactcactgtacgtcttttttttttttttttgagagacagagtctcgctctgttgcccaggctggagtgcagtggcgagatctcggctcactgcaagctccgcctcctgggttcacgccattctcctgcct

SEQ ID NO: 272817 - DNA, 201 bp, Homo sapiens
agactctgtttcagaaaaaaaaaaaagaaaggttctgactcacagggaggaagacacgttaaacacataacaaaggaggcaagatggggccgggcatgatrgctcatgtctgtaatcccagcacttggggaggctgaggcaagaggatcgcttgaggccaggagttcgagaccagcctgggcaacatggcgagaccccatc

SEQ ID NO: 272818 - DNA, 201 bp, Homo sapiens; identical to SEQ ID NO: 54221

SEQ ID NO: 272819 - DNA, 201 bp, Homo sapiens; identical to SEQ ID NO: 54222

SEQ ID NO: 272820 - DNA, 201 bp, Homo sapiens; identical to SEQ ID NO: 54223

SEQ ID NO: 272821 - DNA, 201 bp, Homo sapiens
tgccactgtgctccagcctgggcaacagagcgagactccatctcaaaaaaaaaaaaaagaagtacatcatttttcttcatatttggaaaatcatttttttycctatatggaaaatgttttttcagttccatttttgaatagttctcctttcctctctcatctgctatgccacctcttagtatttagtacatttaaaaaagt

SEQ ID NO: 272822 - DNA, 201 bp, Homo sapiens
agcatatgggataagatcaagaaccttttctctaggtaaatccatggccaccggtactgtatctgttcctctgcccttacccattcctcactctagccttyggggggaggtgccccagacccttccagcctttcactcaccccactttcccctgctgtgtgatgtctggtcctgttacctgttaccctggctgggagcccc

SEQ ID NO: 272823 - DNA, 201 bp, Homo sapiens
gccatatcgcctctacaatttggatgtgttccagtatgagctgtacaacccaatggccttgtatgggtctgtgcctgtgctcctggcacacaaccctcatygcgacttgggcatcttctggctcaatgctgcagagacctgggttgatatatcttccaacactgccgggaaggtgagagcacaggcacggggaaaaaggag

SEQ ID NO: 272824 - DNA, 201 bp, Homo sapiens
aggtctatctgcctggccaaggggaggtgagttaaggaagggcatggtggggaaagatggtggaagccaaaggaggcaaacaggacgggacccctgtgcaytgagtgatccggtatcttacctcttttgtcactcacaggtgtggtatgacattcaaagctaccagaagcatcatggtccccagaccctgtacctgcctgt

SEQ ID NO: 272825 - DNA, 201 bp, Homo sapiens; identical to SEQ ID NO: 54254

SEQ ID NO: 272826 - DNA, 201 bp, Homo sapiens
ccggccgggacaccccctggcgggggagcgctgcttgggttgcggagccttctgcaggggaccagcaagcccaaagagccggccagctgtgagttctaacmcccatctcacccacttcggacaccctacccccttagggactcaggtgccgtggggtggggtcccatagaaacctgcgtgcggggagtccatcttcccaac

SEQ ID NO: 272827 - DNA, 201 bp, Homo sapiens
aggaaaccccctccttaaaatacacactcagctgacacgtgctgtttccccaaggcctgacctctcgggacacacccagccctgtggacccagacaccgtsgaggtgttgatgacctttgaacccgacccagctgatcttgccctatcaagcattcctggccacgagacctttgaccctcgaagacatcgcttctcagaag

SEQ ID NO: 272828 - DNA, 201 bp, Homo sapiens
agtcaagcctgggcttctccttgggattagtgctcagcctctcctggcctgcagccacagattagtcctccttggccacggggcacaagggggcaggggcytgaggtttataaagacagtgtcaactgggcgaggggcctcactcgtgtaatcccagcattttagggggctgaggcaggaggatctcttgagctcgggagt

SEQ ID NO: 272829 - DNA, 201 bp, Homo sapiens
cagccaatcatgaagaaggcaagaaaaatccaggtgccggaggagcagaaggtgagcagagctggatgtgggagatagacttggctggagacatgccccayagccagggaggggccttttctcacagtcaagcctgggcttctccttgggattagtgctcagcctctcctggcctgcagccacagattagtcctccttggc

SEQ ID NO: 272830 - DNA, 201 bp, Homo sapiens; identical to SEQ ID NO: 54263

SEQ ID NO: 272831 - DNA, 201 bp, Homo sapiens
ggcttctccttgggattagtgctcagcctctcctggcctgcagccacagattagtcctccttggccacggggcacaagggggcaggggcctgaggtttatraagacagtgtcaactgggcgaggggcctcactcgtgtaatcccagcattttagggggctgaggcaggaggatctcttgagctcgggagttcaagaccagc

SEQ ID NO: 272832 - DNA, 201 bp, Homo sapiens
caggacataagagactggcagcccaggtccctgggtcccccagtggggcgtgctgcagccccgggtcccagagttcttcagaagggaaaacgttagggatsttgtttctggatcctccaattggggctggggccaagcttcctatattcctaggagaggcctgggatcccagaatcgtggtagcccagtggcgggggttct

SEQ ID NO: 272833 - DNA, 201 bp, Homo sapiens; identical to SEQ ID NO: 54255

SEQ ID NO: 272834 - DNA, 201 bp, Homo sapiens; identical to SEQ ID NO: 54265

SEQ ID NO: 272835 - DNA, 201 bp, Homo sapiens; identical to SEQ ID NO: 54252

SEQ ID NO: 272836 - DNA, 201 bp, Homo sapiens; identical to SEQ ID NO: 54251

SEQ ID NO: 272837 - DNA, 201 bp, Homo sapiens
cctgcagccacagattagtcctccttggccacggggcacaagggggcaggggcctgaggtttataaagacagtgtcaactgggcgaggggcctcactcgtktaatcccagcattttagggggctgaggcaggaggatctcttgagctcgggagttcaagaccagcctgggcaacatggcaaaaccccatttctacaagcca

SEQ ID NO: 272838 - DNA, 201 bp, Homo sapiens
tttactgttgctaggggcccaatctccttagcaaccagggccctagaaaggcagacccttgggtacctatcccagcagagacctggtgtggtttaggcccsgctgctggggctcccttcctctctcgctgggacctgggtccctctggacctcagtgctctccccctcttctcctgcaggatgagaaatactggagccggc

SEQ ID NO: 272839 - DNA, 201 bp, Homo sapiens
ggccgaggcggacagatcacgagatcaggagaccatcctggccaacatggtgaaaccccgtctctacaaaaaaatacaaaaattagctgggcatggtggcrctcatctgtagtcccagctacttgggaggctaatgtaggaaaatcgcttgaacccaggagacggaggttgcagtgagccgagatcgcgccactgcactcc

SEQ ID NO: 272840 - DNA, 201 bp, Homo sapiens
ggccctacccttcccagcggcacattcctgcgccacgtgagtcctcccatccctcctccgcgcttcgcgcaggcgccttcaagcgcgaggggggcggggccgggggaacgtgagggcgccgatggcgggggcctgggaggaagggaggaggagggaagcaggcgtcagcacgtgactcggccctgaacctgtgtccttagc

SEQ ID NO: 272841 - DNA, 201 bp, Homo sapiens; identical to SEQ ID NO: 103985

SEQ ID NO: 272842 - DNA, 201 bp, Homo sapiens
aaagcgccggctctgaagcccgtccaccctaaggacccaggcaccaacgtccccaacgtcctccccgcttagttcacaagagtgtaggccccagcctcctyttccttttggtccgggagtctggacccctggggtcccagggagggggtgtgtcgggtgctcacacggtggtgacacgggcttgggcggggcgtcatgggg

SEQ ID NO: 272843 - DNA, 201 bp, Homo sapiens
caaaagcgccggctctgaagcccgtccaccctaaggacccaggcaccaacgtccccaacgtcctccccgcttagttcacaagagtgtaggccccagcctcctcttccttttggtccgggagtctggacccctggggtcccagggagggggtgtgtcgggtgctcacacggtggtgacacgggcttgggcggggcgtcatgg

SEQ ID NO: 272844 - DNA, 201 bp, Homo sapiens; identical to SEQ ID NO: 54262

SEQ ID NO: 272845 - DNA, 201 bp, Homo sapiens
tgcaggggaactcccacttataaaaccatcagatcttgtgagacttattcactactgtgagaacagtatgggggaaactgcccccatgatggagttttctscacctggcccccacccttgacacctggggattattacaattcaaggtaagatgtgggtggggacacagccaaaccatatcagctggggatagaattctat

SEQ ID NO: 272846 - DNA, 201 bp, Homo sapiens
gaggaccaaagtaatgtcttacatggcagcaggcaagagggcgtgtgcaggggaactcccacttataaaaccatcagatcttgtgagacttattcactacygtgagaacagtatgggggaaactgcccccatgatggagttttctccacctggcccccacccttgacacctggggattattacaattcaaggtaagatgtg

SEQ ID NO: 272847 - DNA, 201 bp, Homo sapiens; identical to SEQ ID NO: 54284

SEQ ID NO: 272848 - DNA, 201 bp, Homo sapiens
atgagagggtcagtcctttgctcagggtcccagagccagtggaggctgtgctgggctccctgcgagcctctggatctatggttggcagtcagggctctccsttttgtgacaaaagaaaagcctcaggccttgtccagcctgggtttcatagcccaggacactttggaagaggcagagcacttcaggaccacggatgcagct

SEQ ID NO: 272849 - DNA, 201 bp, Homo sapiens
agtcctttgctcagggtcccagagccagtggaggctgtgctgggctccctgcgagcctctggatctatggttggcagtcagggctctccgttttgtgacaraagaaaagcctcaggccttgtccagcctgggtttcatagcccaggacactttggaagaggcagagcacttcaggaccacggatgcagctggcaatagtag

SEQ ID NO: 272850 - DNA, 201 bp, Homo sapiens
agtctcgctctttcgcccaggctggagtccagtggcactatctcggctcactgcaagctccacctccctggttcatgccattctccggcctcagcctcccragtagctgggactacaggtgtctgccaccacgcccagctaattttttgtattgtcagtggagacagggtttcaccatgttagccaggatggtcttgatct

SEQ ID NO: 272851 - DNA, 201 bp, Homo sapiens
caaggagtgacagggcctggtgtgaggggtggtggggcagaagaagaagagaatttggcagaaagaggccagaactggagagagacagaaccaggctacaytgaagttctattccccttactaggtatttaaatgtaaggaagttgctgaacttctgtttcccacatgagaaatggtgataatagattcagccttgcagag

SEQ ID NO: 272852 - DNA, 201 bp, Homo sapiens
cagaactggagagagacagaaccaggctacattgaagttctattccccttactaggtatttaaatgtaaggaagttgctgaacttctgtttcccacatgasaaatggtgataatagattcagccttgcagagcagtcgagtgggttttctaagcttacgttgtaatttctcttgggtacagagcacccagcaccgtgtaga

SEQ ID NO: 272853 - DNA, 201 bp, Homo sapiens
tgaagttctattccccttactaggtatttaaatgtaaggaagttgctgaacttctgtttcccacatgagaaatggtgataatagattcagccttgcagagyagtcgagtgggttttctaagcttacgttgtaatttctcttgggtacagagcacccagcaccgtgtagaatcttcataagtgttagctgttactgtggtac

SEQ ID NO: 272854 - DNA, 201 bp, Homo sapiens
atctggggaccctaagaagctgtgtgatgcctcagcacttgagcccacatggaaaggctgtggccagggccctgacctgctgtgtctgcagtggggttgtsccagccctcatgggcagctgaccttgagttctggccttattttcccccctctcagggcttggagaagatctctgcctacatgaagtccagccgcttcctc

SEQ ID NO: 272855 - DNA, 201 bp, Homo sapiens
agctgaccttgagttctggccttattttcccccctctcagggcttggagaagatctctgcctacatgaagtccagccgcttcctcccaagacctgtgttcwcaaagatggctgtctggggcaacaagtagggccttgaaggccaggaggtgggagtgaggagcccatactcagcctgctgcccaggctgtgcagcgcagct

SEQ ID NO: 272856 - DNA, 201 bp, Homo sapiens
aagaaactgagaatgagagggtcagtcctttgctcagggtcccagagccagtggaggctgtgctgggctccctgcgagcctctggatctatggttggcagwcagggctctccgttttgtgacaaaagaaaagcctcaggccttgtccagcctgggtttcatagcccaggacactttggaagaggcagagcacttcaggacc

SEQ ID NO: 272857 - DNA, 201 bp, Homo sapiens
ggctgcctggctctggagcaatgtgctgagagctgcaggggaggcctgctgtctgactggcagagagagtcccaccactccctaccctgtaccctggaagwccaggctgcccagcctgtccacctagtagaccgtttgcctgcccaattctccttctctgattcctgatgtgcagcttgatgcctgcatgggctgcgccag

SEQ ID NO: 272858 - DNA, 201 bp, Homo sapiens
cccctctcagggcttggagaagatctctgcctacatgaagtccagccgcttcctcccaagacctgtgttcacaaagatggctgtctggggcaacaagtagrgccttgaaggccaggaggtgggagtgaggagcccatactcagcctgctgcccaggctgtgcagcgcagctggactctgcatcccagcacctgcctcctcg

SEQ ID NO: 272859 - DNA, 201 bp, Homo sapiens
tctggtgactagcatcactcatatccatgtctgtggcagtcatcaggtgcttattatatatttgacttttggccacccctctgggggtgttaaatgcaggsagggtctagtcaagccattacaagttggcagtgactcgtagcaactttctacacacccttctcggtcagggtggataccttttgaaaataagttcagttc

SEQ ID NO: 272860 - DNA, 201 bp, Homo sapiens; identical to SEQ ID NO: 54285

SEQ ID NO: 272861 - DNA, 201 bp, Homo sapiens; identical to SEQ ID NO: 54286

SEQ ID NO: 272862 - DNA, 201 bp, Homo sapiens
taataaaaagattcataatgtagctcatgtagttaattcctttttgatggaacatttatttaagttaataatataagtatcattaatacctaataatatgrgtatatgtatatgtaattttcttgtttacctttttatattgatctagcgtcagagtttgagaaattgtagaaagattagaaacgactctgattaccctag

SEQ ID NO: 272863 - DNA, 201 bp, Homo sapiens
tgtatatgggctgggcgcagtggctcatgagtgtgatcccggcactttgggaggccgagggggcagatcacgaggtcaggagatcgagaccatcctggctracacggtgagaccacatctctactaaaaatatcaaaattatttttttttgtatttttgggcgtggtggagcttgcctgtagtcccagctactcaagaggc

SEQ ID NO: 272864 - DNA, 201 bp, Homo sapiens
tgtctcccccagcaagctccgaatgagcacaacaccattataagaaaaacactattttcttttctctgaggtagcattcctgatgtttggattcaggctgrtaagtgacagtgatttataatcatccttgcctgtgttgtccttcccatgttaggtcatgtctgtagtttatgacaatctgtgtcatccatgccattttca

SEQ ID NO: 272865 - DNA, 201 bp, Homo sapiens
gggtttacttcctctctttcctgggtacctgtgagagaaatgtctttagtccttgcataactgaaagtgcctttacatgcttactgaatactctggctgakgatttagtctgttctcacgctgctaatagagacatacccgagactgggtaattgataaaggaaagaggtttaaaggactcacagttccacagggcctggg

SEQ ID NO: 272866 - DNA, 201 bp, Homo sapiens
catgttagccaggatggtcttgatctcctgacctcgtgatccgcccgccttggcctcccaaagtgtggggattacaggcgtgtagttacctaacttttaasagaataaactattacatataacaagcaaattggttaaagtttcaatatttctcttaaggtcacttattgcttccacttctttttccatctctaactttgt

SEQ ID NO: 272867 - DNA, 201 bp, Homo sapiens
agtgtggggattacaggcgtgtagttacctaacttttaacagaataaactattacatataacaagcaaattggttaaagtttcaatatttctcttaaggtmacttattgcttccacttctttttccatctctaactttgtgcctgttctactttcttgaaattctagtttgtttgccttattcttggtatcacaggcatgt

SEQ ID NO: 272868 - DNA, 201 bp, Homo sapiens; identical to SEQ ID NO: 54288

SEQ ID NO: 272869 - DNA, 201 bp, Homo sapiens
taattgcacagagcttgtgtctcattgaataggaccccaagggggtggaatctccatcagagagaaccagggtcccttttaccttctccactatatgactrcatcacttctgttaggtctccaggacccaatctctattgtttttctcagatggcttccaggtaccctctccaggcttgctgcacagctgtcatcaggacg

SEQ ID NO: 272870 - DNA, 201 bp, Homo sapiens
tagtaaggcgcttgagaattcttgctcccattcctgagagactcagagcaggaagccccatgaggcactgtggaaaggatgtctctttcttggcctggatstcccattcattcatccagccgtattgagtactttccataattgcacagagcttgtgtctcattgaataggaccccaagggggtggaatctccatcagaga

SEQ ID NO: 272871 - DNA, 201 bp, Homo sapiens
gtagttacctaacttttaacagaataaactattacatataacaagcaaattggttaaagtttcaatatttctcttaaggtcacttattgcttccacttctktttccatctctaactttgtgcctgttctactttcttgaaattctagtttgtttgccttattcttggtatcacaggcatgttggaaaaatgttttctcaat

SEQ ID NO: 272872 - DNA, 201 bp, Homo sapiens
gcatgtgatctctgttctgctttttgccccttaaagcatgtgatctttgtacctaccccccgttcgtacaccccctccccttttgcaatccttaataaaarcttgctggttttgaggctcgggccggcatcacggtcctactgatatgtgatgtcacccctggcggcccagctgtaaaattcctctctttgtactctttct

SEQ ID NO: 272873 - DNA, 201 bp, Homo sapiens
tgagagggtcagtcctttgctcagggtcccagagccagtggaggctgtgctgggctccctgcgagcctctggatctatggttggcagtcagggctctccgwtttgtgacaaaagaaaagcctcaggccttgtccagcctgggtttcatagcccaggacactttggaagaggcagagcacttcaggaccacggatgcagctg

SEQ ID NO: 272874 - DNA, 201 bp, Homo sapiens
gcagcattgactggtttacaggccctgctcctgcagcatggtccctgccttaggcctacctgatggaagtaaagcctcaaccacatttgctgtgtgtcttrtcttatttgctcctggccatctacccagactgtctgtctgtctgtcactgcctcttccaagggactggctggtgatcctggcagtggctgggttctaaag

SEQ ID NO: 272875 - DNA, 201 bp, Homo sapiens
cctcattgtcgtaaaggtaaacactgggcaagtacttgccactctaagtctgatatagatggcaatcccttgccacagaaccagggaaatgggaagcaggrccagtcccaggccccagtatcaaatgggacacctcagactcagaccaatattgtgtttctgcttcaagcggtcccaatacagcccccagcacaggcaaat

SEQ ID NO: 272876 - DNA, 201 bp, Homo sapiens
acttttggccacccctctgggggtgttaaatgcaggcagggtctagtcaagccattacaagttggcagtgactcgtagcaactttctacacacccttctcrgtcagggtggataccttttgaaaataagttcagttcatcctgcctagctttgccccagcagctctagaagaattacccgatggtgctgggctcaggctgc

SEQ ID NO: 272877 - DNA, 201 bp, Homo sapiens
gtatatgggctgggcgcagtggctcatgagtgtgatcccggcactttgggaggccgagggggcagatcacgaggtcaggagatcgagaccatcctggctakcacggtgagaccacatctctactaaaaatatcaaaattatttttttttgtatttttgggcgtggtggagcttgcctgtagtcccagctactcaagaggct

SEQ ID NO: 272878 - DNA, 201 bp, Homo sapiens
attgtgggacttcactccaaaattgtgtgagccaattcccataagagataaataaatttgtaaataaacacacaaatttcctacaggcttatcttagtggygtcacttcaaattttgaagaaccttgactagtacacatagcaaaaaaaaaaaaaaaaatacacaagtgggtcaccatcatcaataagtaagttttataaa

SEQ ID NO: 272879 - DNA, 201 bp, Homo sapiens
cccataagagataaataaatttgtaaataaacacacaaatttcctacaggcttatcttagtggtgtcacttcaaattttgaagaaccttgactagtacacrtagcaaaaaaaaaaaaaaaaatacacaagtgggtcaccatcatcaataagtaagttttataaaatcaaacacaagataaaacgctgcagcatatctatta

SEQ ID NO: 272880 - DNA, 201 bp, Homo sapiens; identical to SEQ ID NO: 54283

SEQ ID NO: 272881 - DNA, 201 bp, Homo sapiens
aagagataaataaatttgtaaataaacacacaaatttcctacaggcttatcttagtggtgtcacttcaaattttgaagaaccttgactagtacacatagcaaaaaaaaaaaaaaaaatacacaagtgggtcaccatcatcaataagtaagttttataaaatcaaacacaagataaaacgctgcagcatatctattacctgg

SEQ ID NO: 272882 - DNA, 201 bp, Homo sapiens; identical to SEQ ID NO: 54281

SEQ ID NO: 272883 - DNA, 201 bp, Homo sapiens
gaagaccaggctgcccagcctgtccacctagtagaccgtttgcctgcccaattctccttctctgattcctgatgtgcagcttgatgcctgcatgggctgcrccagctgagattgtctctaggtcctcccttctgccagctggtgtccagggaagtgggtcctctggcctgcttcctgccagccagaatttcgaggaccttg

SEQ ID NO: 272884 - DNA, 201 bp, Homo sapiens
tcttgaaattctagtttgtttgccttattcttggtatcacaggcatgttggaaaaatgttttctcaattcaaatttggtagcatcttcaaatggtgatttytattttcttcttttcagattgaagaaaagattctttatatttcagatttcctaagtttacccaaacaatatttaagagactttaatacatttccatgaat

SEQ ID NO: 272885 - DNA, 201 bp, Homo sapiens
tgtaagtccccccaccccactcccagtctccccttccctactcccagtctcccctttccctgcagagtttgtgtccaaaattgattccttctggtgagttmttggtcttgctgactctaagaatgaagccgcggtcctacacggtgagtgttacagttcttaaagatggtgtgtccggagtttgttccttcagatgttcag

SEQ ID NO: 272886 - DNA, 201 bp, Homo sapiens; identical to SEQ ID NO: 54308

SEQ ID NO: 272887 - DNA, 201 bp, Homo sapiens
gattagtttttaaaattctgacaacatgttaggtagattttctgttaatttgccttgagaatgtaagaatgttgtcagaagagacagaaggaattatgaawtccagtccagaggtcccattacaggcccttggtaaagtgggacccagtgcattttgactgtctggcacagcattgttttaaaaattagaacttttccaca

SEQ ID NO: 272888 - DNA, 201 bp, Homo sapiens; identical to SEQ ID NO: 225428

SEQ ID NO: 272889 - DNA, 201 bp, Homo sapiens
tcaccaaagcacatttatcttgccttgcactgggcctgatggtcaaaagggaacaattcagccttatatcatgccaatccccattaatctttggggtagayatttgctggaacaatggggggctgaaattaatattccacataactcttctcgtgctcccagtcaacatataatggaaaacgtggggactgttcctggact

SEQ ID NO: 272890 - DNA, 201 bp, Homo sapiens
caatactctgactgcagccgaacaccattatacaggcaaaaaattctccctaaatgaaagcaagccagtgttatggaaaaactcccagacaaatacctggkaacctggaacaattataatgtggggaagagggtatgcttgtgtttcaccaggagatcatcaatcccctgtctgggtgcccactagaagactttaacttcg

SEQ ID NO: 272891 - DNA, 201 bp, Homo sapiens
tctgtacccttcttcacacatggacgcccctgccactctggttgcacaggatttcccaataatcaccagtatgcttctgtctcttctgctcccccaatgcmcctttctcacactctcatactggtctgacctcctgaacctcagtttcccttatctacacatacttttactgtcacttctatgccaactccatctcatgtg

SEQ ID NO: 272892 - DNA, 201 bp, Homo sapiens
acaaagaaacaagtggattagaggtgtgggcttatccggtcacgctggaacctcccaatgctcaaggggtacaaatgcgttgatatgcactgctcaatctkaccttttcaaaagaattcaaggatgcttgtgctcagtatggtcctgcttctccatatgttaaaatggcattacagactctttgtactgaggtcattttgc

SEQ ID NO: 272893 - DNA, 201 bp, Homo sapiens
atccgcggggtgagcgagggtccgctgggcggtgggacgggggtgcgtgggggcggggaagtgtggagcagctgcaggacgggctctagggacggttcctyttcagggctgtccctgacagcggggtctgtgcttgccgctgtctgtgcgtgtggctgggcgtgcggggtgggggcgggtgaggcaggaacgagaggagga

SEQ ID NO: 272894 - DNA, 201 bp, Homo sapiens
tttactacctaatattgttttaaacaaaggagataagacagggggccctgggatgggctctggcggtgaaaaagccgcttattggattaaagtaatttctraacaacagcccacctgcaccatacatattaaaggaaaaaagtttgagggcctagtagatactggggctgatgtttctattatttcctctaatttatggcc

SEQ ID NO: 272895 - DNA, 201 bp, Homo sapiens
agccccatgagcgcgctccaggcctccagattggcccgtttcgggggcagggcgggccgtggggcggggtcgcagcaaggcttcccctctaccctctctgkgcctctcacaaacgctgagccccgccccgctgaggcctgtctgcagaatccacagcaaccagcaccatgcccatgacactggggtactggaacatccgcg

SEQ ID NO: 272896 - DNA, 201 bp, Homo sapiens
tcaaatgggacacctcagactcagaccaatattgtgtttctgcttcaagcggtcccaatacagcccccagcacaggcaaatttacctacagccaacccagrtgggtcccagtcgcttcttctgtctcagtacaatgcttgtctacctccacagtagggggcagggcggtcaatctctgtagtaccactcctctaaatttac

SEQ ID NO: 272897 - DNA, 201 bp, Homo sapiens
caaacgctgagccccgccccgctgaggcctgtctgcagaatccacagcaaccagcaccatgcccatgacactggggtactggaacatccgcggggtgagcsagggtccgctgggcggtgggacgggggtgcgtgggggcggggaagtgtggagcagctgcaggacgggctctagggacggttcctcttcagggctgtccct

SEQ ID NO: 272898 - DNA, 201 bp, Homo sapiens
ggatgctggggagcctggtggcccaactgagcttccccggtttcccatctatccagctgccctacttgattgatgggactcacaagatcacccagagcaaygccatcctgcggtacattgcccgcaagcacaacctgtgtgagtagatttggttgcaagatgcggggagggaccgtggcctcctcctcggcttggctgggc

SEQ ID NO: 272899 - DNA, 201 bp, Homo sapiens
cttagctgtgtggggtccagagccctcactggaattctttttctctgaatcctgggatgtgggactgagtggtcagattctagatccacctgtctcagggrtcttgccactggctccttgggagggtccccaggaaggagggctgggctttggggaggtttgttttcacttcatcttccccaccacagctcctgattatga

SEQ ID NO: 272900 - DNA, 201 bp, Homo sapiens
tcctgggatgtgggactgagtggtcagattctagatccacctgtctcaggggtcttgccactggctccttgggagggtccccaggaaggagggctgggctytggggaggtttgttttcacttcatcttccccaccacagctcctgattatgacagaagccagtggctgaatgaaaaattcaagctgggcctggactttccc

SEQ ID NO: 272901 - DNA, 201 bp, Homo sapiens
ttctgtgtggtgacaactggctacaaccccttccttctgaacacttgcagcttccctcatccctgctgctcctgatccccgtccacagacccactttcccygctggtgtgatccttgtggccactatggcagctactttggagagccgctagtccagtccttcccgccttccgcagagctctactcctgcttctgaagaag

SEQ ID NO: 272902 - DNA, 201 bp, Homo sapiens; identical to SEQ ID NO: 225398

SEQ ID NO: 272903 - DNA, 201 bp, Homo sapiens
tagggaacaagagaagacaaccataaggtctgactgtccgcagggtcaggcaaaatagagccatatttttcttcttgcagagagcctataaatggacatgsaagtagggaagatattgctaaattcttttcctagcaaggaatattaatattaatactctgggaaaggaaagcattcctggggggaggtctataaatggtc

SEQ ID NO: 272904 - DNA, 201 bp, Homo sapiens
ctgctcttgaaccctgtgttctgttgtttaagatgtttatcaagacaatacatgcaccgctgaacatagacccttatcaggagttctattttgcccttgtsctgtttcctcagaagcatgtgatctttgttctgctttttgccctttaaagcatgtgatcttcgtacctaccccctgttcgtacaccccctccccttttgc

SEQ ID NO: 272905 - DNA, 201 bp, Homo sapiens
tttgcccttgtcctgtttcctcagaagcatgtgatctttgttctgctttttgccctttaaagcatgtgatcttcgtacctaccccctgttcgtacaccccytccccttttgcaatccttaataaaaacttgctggttttgaggctcgggcgggcattacggtcccactgatatgtgatgtcacctccagcagcccagctgt

SEQ ID NO: 272906 - DNA, 201 bp, Homo sapiens
agcagggccagtcccaggccccagtatcaaatgggacacctcagactcagaccaatattgtgtttctgcttcaagcggtcccaatacagcccccagcacargcaaatttacctacagccaacccagatgggtcccagtcgcttcttctgtctcagtacaatgcttgtctacctccacagtagggggcagggcggtcaatct

SEQ ID NO: 272907 - DNA, 201 bp, Homo sapiens
cccccaccgcagcccctcaccctcctgtcatttcggtccctcaaccagtcactttgccattcactcaacctgcttctctgtacccttcttcacacatggaygcccctgccactctggttgcacaggatttcccaataatcaccagtatgcttctgtctcttctgctcccccaatgcccctttctcacactctcatactggt

SEQ ID NO: 272908 - DNA, 201 bp, Homo sapiens
ctgggctcaggctgcctggctctggagcaatgtgctgagagctgcaggggaggcctgctgtctgactggcagagagagtcccaccactccctaccctgtaycctggaagaccaggctgcccagcctgtccacctagtagaccgtttgcctgcccaattctccttctctgattcctgatgtgcagcttgatgcctgcatggg

SEQ ID NO: 272909 - DNA, 201 bp, Homo sapiens
ccagagatgaaaacatctgcttgcacattttgctaattcattttgggtgagggtctctggcaggcttggaagggtgggtgagcagtgggaagggggctgcrtctggtgactagcatcactcatatccatgtctgtggcagtcatcaggtgcttattatatatttgacttttggccacccctctgggggtgttaaatgcagg

SEQ ID NO: 272910 - DNA, 201 bp, Homo sapiens
gtctacacagcccttgcatgatgttctgtgtcccagctcatttattagtgtgacagtatttctatctcaggcctgccatgagcaggccctggtctcctctytgcccttgcatatgggaaggggatgctggggagcctggtggcccaactgagcttccccggtttcccatctatccagctgccctacttgattgatgggact

SEQ ID NO: 272911 - DNA, 201 bp, Homo sapiens
ctgcctctcagtgtgccaaaacacgaagatgtgtcctgattttcaaaatctctcccctgaagttcccacctgatatgtagttggagatgggcaaatacagygtccttgaagcatcattttattcatagtgcctggaatgtagtaggatctcgacaattgttgtttcaataaaggaatgaccaaatatattaatactgtaaa

SEQ ID NO: 272912 - DNA, 201 bp, Homo sapiens
tgctgacttcaggggtgaagccgcagaccttcgcagtgagtgctacagctcttaaaggtggcgcgtctggagttgtttattcctcttggtgggttcatggyctggctggcttcaggagtgaagctgcagaccttcatagtgaatgttatagctcataaaggtagttcaaacccaaagagtgagcaacagcaggatttatgg

SEQ ID NO: 272913 - DNA, 201 bp, Homo sapiens; identical to SEQ ID NO: 54276

SEQ ID NO: 272914 - DNA, 201 bp, Homo sapiens; identical to SEQ ID NO: 225420

SEQ ID NO: 272915 - DNA, 201 bp, Homo sapiens; identical to SEQ ID NO: 225423

SEQ ID NO: 272916 - DNA, 201 bp, Homo sapiens; identical to SEQ ID NO: 225426

SEQ ID NO: 272917 - DNA, 201 bp, Homo sapiens
acctgggaggtggaagttgcagtgagccaagatcgtgccactgcattccagcctgtatgacagagtgtgactccatctcaagaaaaaaaaaaaaaaaaaamaaaggagccgggcatggtggctcacacttgtaatcccagcattttgggaggccgagttgggtggatcacctgaggtcgggagttcgagaccagcctgacc

SEQ ID NO: 272918 - DNA, 201 bp, Homo sapiens
aaaattcaagctgggcctggactttcccaatgtaggtgcaggggaaggggcggttttgggggaaagtgcgacgtgtctctgactgcatctcctctccccascttagaggtgttaagatcaggagtcttctgcccaattcctctcactcttggctgtctacacagcccttgcatgatgttctgtgtcccagctcatttatta

SEQ ID NO: 272919 - DNA, 201 bp, Homo sapiens
gcaggagaatctcttgaacctgggaggcggaggttgcggtgagccaagatcgtgccattgcaccccagcctgggcaacaagagtgaaactccatctcaaamaaaaaaaagaagaaaagaataacttgcatttattgagtgctggcttcatgccacgaactgtacccagcacattatacctattgtgttgaatttgaaattt

SEQ ID NO: 272920 - DNA, 201 bp, Homo sapiens
ggctgtggctggagctggattaaggtacatatgtgggtgcccctgttgaaggagcttatgctgaaatgccctgtgctggagcactttccttctctacctcttttttttttttttttttgagacggagtcttgctctgtcacccaggccggagtgcagtggagcaatctcggctcactgcaacctctgtctcctgggttcaa

SEQ ID NO: 272921 - DNA, 201 bp, Homo sapiens
aaaaaaaaaaaatacacaagtgggtcaccatcatcaataagtaagttttataaaatcaaacacaagataaaacgctgcagcatatctattacctgggtttytttctatatggaaagcactgtctgagatgcctcacagtaaactccaaggagattttgagggaagatattatctttcctggtaaatctccgtgttgatgat

SEQ ID NO: 272922 - DNA, 201 bp, Homo sapiens; identical to SEQ ID NO: 54287

SEQ ID NO: 272923 - DNA, 201 bp, Homo sapiens
gctgtcccttccctgagccctggtgagggagctccttgcaaggcagaatgctggggcgggatgctgggcccccgtctgggtaattatgatgggtgtccctyagggcttgcctaaaccctggaagccttagctgtgtggggtccagagccctcactggaattctttttctctgaatcctgggatgtgggactgagtggtcag

SEQ ID NO: 272924 - DNA, 201 bp, Homo sapiens
ggagtgtggtggtgtgatctcgtctcactgcaacctccccttcctgggttcaaacaattctccttcctcagcctcccgagtagctgggactacaggcgtgyacactgtgcccagccgatttttgtatttttgttttagagacgggttttcaccatgttggccatgctggtctcgaactcctgacctcgtgatccacccacc

SEQ ID NO: 272925 - DNA, 201 bp, Homo sapiens
gggaactcccacttataaaaccatcagatcttgtgagacttattcactactgtgagaacagtatgggggaaactgcccccatgatggagttttctccaccyggcccccacccttgacacctggggattattacaattcaaggtaagatgtgggtggggacacagccaaaccatatcagctggggatagaattctatgatga

SEQ ID NO: 272926 - DNA, 201 bp, Homo sapiens
  misc_feature (1)...(201): n = A,T,C or G
ttttagagatggagtcttgctccatcacccaggctggagagcagtggcacgatcatagctcactgcacccttgaactcctgggctcaagtgatcctcccanctcaacctcctgagttgctggtactgcagacgtgcatcaccatgtctggctaatttttaagaatattttttgtagagacagtgtctcgttttgtttccct

SEQ ID NO: 272927 - DNA, 201 bp, Homo sapiens
tgacactgctgtttgaacattaggagacagcaatcaaatatatgactgatggatgtttactgaaacatattctgggagacccaagtcttaccaaattcagwgtcattattttggatgaagcccatgaaagaactctaactacagtgagtattttaatttattattattttttattagcaagtagtttgtttgggtagcttt

SEQ ID NO: 272928 - DNA, 201 bp, Homo sapiens
  misc_feature (1)...(201): n = A,T,C or G
tagtggtgaattcctgtgacactgctgtttgaacattaggagacagcaatcaaatatatgactgatggatgtttactgaaacatattctgggagacccaantcttaccaaattcagagtcattattttggatgaagcccatgaaagaactctaactacagtgagtattttaatttattattattttttattagcaagtagt

SEQ ID NO: 272929 - DNA, 201 bp, Homo sapiens
tgagttgctggtactgcagacgtgcatcaccatgtctggctaatttttaagaatattttttgtagagacagtgtctcgttttgtttccctggcaggtctcracctcctggcctccgaccttggcctcccaaagtgctgggattacaggtgtgagccaccgcacctggctcctacttatattttaatgtattaaaataggaa

SEQ ID NO: 272930 - DNA, 201 bp, Homo sapiens
caggccgggtgcagtggctcatgcctgtaatcctagcactttgggagacagagtcgggcagaacacctgacattaggagttgagaccagtctgaccaacayagcaaaaccccgtctctactaaaaatgcaaaacttagccaggagtggtggcacatgcctgtaatcccagctacttgggaagctgagtcaggaaaatcact

SEQ ID NO: 272931 - DNA, 201 bp, Homo sapiens
gaggcagagcttgcagtgagccaagatcatgccactgcactccagcctgggcaacagagcgaaactctatctgaaaaaaaaaaaaaaggagaaagaaactrcacgatataatcccttttgtttaataaatattggtattatttaacaagtaatttctgagtaccatttcagtgccaagcattatgctggatacataaaaat

SEQ ID NO: 272932 - DNA, 201 bp, Homo sapiens
agagcttgcagtgagccaagatcatgccactgcactccagcctgggcaacagagcgaaactctatctgaaaaaaaaaaaaaaggagaaagaaactacacgrtataatcccttttgtttaataaatattggtattatttaacaagtaatttctgagtaccatttcagtgccaagcattatgctggatacataaaaatgataa

SEQ ID NO: 272933 - DNA, 201 bp, Homo sapiens
tttgtagagacagtgtctcgttttgtttccctggcaggtctcaacctcctggcctccgaccttggcctcccaaagtgctgggattacaggtgtgagccacygcacctggctcctacttatattttaatgtattaaaataggaattccttggttagaacagcagcgtatttagaatagtttggctgttaagtgtgcttgtga

SEQ ID NO: 272934 - DNA, 201 bp, Homo sapiens
tgcctcagcttcccaaagtgctaggattacaggcatgagccaccacgcctggcctaattttcttaaattgaattgaacttctggaggtgattggaggtaaygtaaattatatctgatttattctgaatgatgaatgttacatttgtactctcctagtgtagaaagacttacaaactttttctttgtattaaggagtggcca

SEQ ID NO: 272935 - DNA, 201 bp, Homo sapiens
tggccatgtcaccagattgggtttgtctatggtggagtttcctttgcctccacatctgacatgtgcagtaataaaagctgcttccctggattgtgaagatytactacttccaatagcagcaatgttgtctgtggaaaacgtcttcattagacctggtaagatgtttattttaagttgtgttttttaaaactaatagacttg

SEQ ID NO: 272936 - DNA, 201 bp, Homo sapiens
gtttgggatgtacaatagcaaatacatgtggtagagatctgaaattatcagatcatcacaaccttaatattggcttatacgtatggctctgtttaaaaaawttttttttaggccgggtgcggtggctcacgcctgtaatcccagcactttgggaggccacagtgggcggattgcgaggtcaggagatggagatcatcctgg

SEQ ID NO: 272937 - DNA, 201 bp, Homo sapiens
ttcctcttttgccaaatgctgatcatgatcatataatttttttttagaaaaagatgacttgaaaaatagaaataaaaccttttaaagaaattttcgtcatrtctatataaaatcctaccatgttcaaggaatgcctctcacttcatatcttatttaaacacacaggtttccctatttggatccacctaatgagagacttat

SEQ ID NO: 272938 - DNA, 201 bp, Homo sapiens
aaggcaggtggattgcttgaggtcagaagttggaagaccagccttaccaacatggtaaaaccccatctctactaaaaaaaaaaaaaaaaaacaccaaaaamaaaattaatagactttattttttagagcatttttaagtttacagaaaaattgagtagaaagtacagagggttgacattcatcccctcaacctcccacagc

SEQ ID NO: 272939 - DNA, 201 bp, Homo sapiens
tggtaaaaccccatctctactaaaaaaaaaaaaaaaaaacaccaaaaaaaaaattaatagactttattttttagagcatttttaagtttacagaaaaattkagtagaaagtacagagggttgacattcatcccctcaacctcccacagcaatttctcctattaacatctttgatttgtatgacatataagttgcaattggt

SEQ ID NO: 272940 - DNA, 201 bp, Homo sapiens
aagatgacttgaaaaatagaaataaaaccttttaaagaaattttcgtcatatctatataaaatcctaccatgttcaaggaatgcctctcacttcatatctyatttaaacacacaggtttccctatttggatccacctaatgagagacttattttagaagctcttaaacagctttaccagtgtgatgctattgacaggtaaa

SEQ ID NO: 272941 - DNA, 201 bp, Homo sapiens
atgttcaaggaatgcctctcacttcatatcttatttaaacacacaggtttccctatttggatccacctaatgagagacttattttagaagctcttaaacarctttaccagtgtgatgctattgacaggtaaaaaaaaaaaaaaatcacaatcaaaacagatattgatctccttttaaacagggctctaaatacctttctct

SEQ ID NO: 272942 - DNA, 201 bp, Homo sapiens
aaccccatctctactaaaaaaaaaaaaaaaaaacaccaaaaaaaaaattaatagactttattttttagagcatttttaagtttacagaaaaattgagtagraagtacagagggttgacattcatcccctcaacctcccacagcaatttctcctattaacatctttgatttgtatgacatataagttgcaattggtgagcca

SEQ ID NO: 272943 - DNA, 201 bp, Homo sapiens
catattttaaatagttatttaacagatagatcttttgtaaatattttctcccagtctgtggtttatcttctaattgttttgacattgacttttgcagagcrgaagtttttatttttgacgaagtctaccttatcaattatttctttcatagattgtgtctttattgttgtatctaaaaaagtcattgtcgtacccaaagtc

SEQ ID NO: 272944 - DNA, 201 bp, Homo sapiens
tgagagacttattttagaagctcttaaacagctttaccagtgtgatgctattgacaggtaaaaaaaaaaaaaaatcacaatcaaaacagatattgatctcyttttaaacagggctctaaatacctttctctaacagtagaaaataatttctttaaattgaatggattgttagtctttcatcacaattctgattgaaaaacc

SEQ ID NO: 272945 - DNA, 201 bp, Homo sapiens
tctttcatagattgtgtctttattgttgtatctaaaaaagtcattgtcgtacccaaagtcatctagattttctcttctattgtcttttagtatttggacgyacagttgttgcggtaccatttgttcaaaacactgtcctttttctgttgaaatgccttcgcttctttgttaaatatcagctgactattcttatatgggtct

SEQ ID NO: 272946 - DNA, 201 bp, Homo sapiens
acccagtctctactaaaaatacaaaaactagctgggcatggtggcacacacctgtaatctcagctactcgggaggctgaggcaggacagtcacttgaaccygggaggcagaagttgtactgagctgagatcatgccactgcactccagccttgtgacagagtgagaatccacctcaaaaaaaaaaaaaaaaactgggggag

SEQ ID NO: 272947 - DNA, 201 bp, Homo sapiens
gactaacacaaatgaatgcaggaaggactttgtgatgatgtgggaaaagaaaaaggacatcttaaaatcttaaaaacgaaccaaagatttgtctggatacstcaaagacttataatatcttttatagaggtttggaaactggtaggtagggcaaatttatgagaagatgacatttgatctggccatgttgggtttgtgttg

SEQ ID NO: 272948 - DNA, 201 bp, Homo sapiens
acataaatgatgaaagattcaattcaccaataaatataacatttctatttgtgtgtaactattgatgtagcctgaaaatacataaagcaaaaatatgatakaactacagggaaaaatggacatctccatcaacatggtgagagacttttaacacctaataattgttcagattttttaaaaattaaggatatagaagattta

SEQ ID NO: 272949 - DNA, 201 bp, Homo sapiens
aaaattaataaataaaaaaaattaggactgttcataactatagtgggcccttgaacaacaaacaacgtgtttaaactgcataggtccactcataagcagattttttttttttaatgaaagttcaattgagtgtgcccgtctctcctgccactccttccaccttcacctcttttacctctgccaacctgagacagaaagacc

SEQ ID NO: 272950 - DNA, 201 bp, Homo sapiens
tttaccagtgtttaaaacactcaggatgaaatgggatttgcttggccaacggctatagcttcttggttacccctcctcttctcttccctacatctctgacsagctgttaaacatgctgttgactggccatgtggtggctcacgcctataatcccagcactttgggaggccgagacaggcagatcacttgaggtcaggagtt

SEQ ID NO: 272951 - DNA, 201 bp, Homo sapiens
aaatgcatttactaaaacaaatgtattttatagtgaagaattggaaacattctctttatgattaggagcaagcctgttgtctttcattacttttcattactttttttttttttttggcttttctttgtttactttgtttacttctttgtttacttttacttctgtttaacattttactgagttactagccactgcctaagt

SEQ ID NO: 272952 - DNA, 201 bp, Homo sapiens
tactattctcaagcattactcagcaacttggtggcagatagagtgaatggtagtgttaaattggcattggggatggagctgactggtataacaagaagtgyaaggatttctcaggagcacatcattgaagtaatgactgtgtgattcaggccatttagaaagttaagtattaccagatgggagataatttagttggagaat

SEQ ID NO: 272953 - DNA, 201 bp, Homo sapiens
cttggtggcagatagagtgaatggtagtgttaaattggcattggggatggagctgactggtataacaagaagtgcaaggatttctcaggagcacatcattraagtaatgactgtgtgattcaggccatttagaaagttaagtattaccagatgggagataatttagttggagaatagaaaagaattaaggaattagaatac

SEQ ID NO: 272954 - DNA, 201 bp, Homo sapiens
attattttgaagacttgtagccaagaaaagtttgaattctgtctaaactatagaaaataataaaaattgaaaaatattaggcaggactagaatctaacaayaggtatactatagtttttgaaacataatttctctgtctccagtttctcattttcactaaagacaaattatggtaggactgatttgctttcttctaattgg

SEQ ID NO: 272955 - DNA, 201 bp, Homo sapiens
accttctaaagaggaccaaaagaaggtaacaattgtccatggatgacaaaagttttagggtagccatagtcaaagacatagttgacaagggaatttattayctctgtggcacacaataattataattattattgataatgtacattaagtcatatcagaattataggagtttctcataattttaggacacatactaataac

SEQ ID NO: 272956 - DNA, 201 bp, Homo sapiens
caagaaaaccaaataccatttcttatatgacaatgtttcctgtgtaattttttttactaaataagccaaattatgtcattttttgaactttatagggaacytaatgtcttaaagaattaattaggtcaaaaaaaagacataatttatcatttgattttggaaagtttgtcaaatatcaaaggtttaaaaaacttcatacta

SEQ ID NO: 272957 - DNA, 201 bp, Homo sapiens
gttgaatctttctgcccaaaggcatatatgtctttctgggttgtttacctttgtgtctttcagttgtgtcctaatgatttatttattttttaaagagatcrgatatcttatcaagcagagttccatgtaacttacaaaaaaaaaagagaggagagatagagtctcactctgtttacccaggctgacgtgttgtttttttag

SEQ ID NO: 272958 - DNA, 201 bp, Homo sapiens
agccacagaccggtactggtctatggcctgttaggaactgggccgcacagcaggaggtgagctgtgggctagagctccacttcctgtcacatcagcagcgkcactggattctcataggattgcaaaccctattgtgaactgtgcatgcgaggggggttgctcgcttcttatgagagtctaatgataaatgtaatgcacttg

SEQ ID NO: 272959 - DNA, 201 bp, Homo sapiens; identical to SEQ ID NO: 54313

SEQ ID NO: 272960 - DNA, 201 bp, Homo sapiens; identical to SEQ ID NO: 54314

SEQ ID NO: 272961 - DNA, 201 bp, Homo sapiens
atgtttttccctgaatatctgtaaattacaagggagccataatattctggactttgtttctcattgaagtagggaggatttggattagttgatttttactratagtgaagaattttactctcaatttgtaaaaagcaaaacatgcatgtaagtatatacctagaaatgctactttttaattacagttttcatgggaataac

SEQ ID NO: 272962 - DNA, 201 bp, Homo sapiens
tttctttttttttttttcacgctctgtcatggctggattgcagtggcacaaccatgactcactgcaaccttgacctccccggctcaagcgatcctcctgcytcaacctttcaagtagctgagaatacaggcgtgtaccaccatgccctgctaatgttttaatttttttgtagagacgaagtctcactatgttgcctaggtt

SEQ ID NO: 272963 - DNA, 201 bp, Homo sapiens
taatctaagcttctctttaactgggaagtgtgattagtttgattttgttatgatagctgagataattcagatttctttttttttttttcacgctctgtcayggctggattgcagtggcacaaccatgactcactgcaaccttgacctccccggctcaagcgatcctcctgcctcaacctttcaagtagctgagaatacagg

SEQ ID NO: 272964 - DNA, 201 bp, Homo sapiens
tgaacatatagaaagatacatgaatgttaataaccttaattaaaaatttttttttttaatttcagcttttttccccaagcaaaccaaactgaatcataatrgcatagaattgtttcaataaaccataaaatatgttagaccagttactaaaaggcaacagaaaagacctgcactgccagaatattatgttggaagaaaaca

SEQ ID NO: 272965 - DNA, 201 bp, Homo sapiens
tttagaggtgggggtgggttctagcattttgtgtcaggggtcttaaagatcacggccgggttctttgattctctaggctgaatcataagactcggcatatrgttgtattcctgtatatgatttattacactgaaaagatacaaagcaaaatcagcaaagggaagggggcatgggatgaagtctgaaggaagccaggcgcaa

SEQ ID NO: 272966 - DNA, 201 bp, Homo sapiens
cagaaaagacctgcactgccagaatattatgttggaagaaaacatttcctttggatattcatgaaaacattgttagcatcaggccataacaaacagaactygaggaaaaaaacttaatatgagctgaaaatgagttgaaagagagtgttacaatttcacaccctttaaaaggagagagaaaactaaaaacagtgagatgca

SEQ ID NO: 272967 - DNA, 201 bp, Homo sapiens
gcttgactataagcttagcttgaggagcaaaagtataggtgctaaattcatgttgagataatagaataccaagcattacaattaaaaggaatgttgagtgttttgtttttttttttttgtaatggactcttgatgtaggttatttgccaagtactgtatgttgaatgtattacagaaaaatgtcaccttggtaccttcttg

SEQ ID NO: 272968 - DNA, 201 bp, Homo sapiens
tctcttacttcctggttccttttaccttcttttatacatgacctaaataagcattgaattagacaaaaattgttcacctttttaaaaaggacacacttttwaaaaaaaaatatttttctacaatatattttattgaaatatttattattttagtataactttagattctaaattatgatgagtttgtctacaattatccca

SEQ ID NO: 272969 - DNA, 201 bp, Homo sapiens
aaatgtgaaccccacatatctgagacaggtctcagttaatttagaaagtttattttgccaaggttgagtacacgggaccatgacacagctgcaggaggtcytgagacatgtgcccaaagtggtcagagaacagtttggttttatacattttagggagacacgaaacatcagtcaacatatgtaagatgaacattgggttct

SEQ ID NO: 272970 - DNA, 201 bp, Homo sapiens
tacatactcagaatccttgttagttcccttttaaatgcatttttaaaaagctttatatcagtgattcgtctgcatacacttaaattggaacacttcagctrtgaccttggtaaaaagatcagaggttgtccttgtttctaacttaagtttaattcgttcatctctgatttttcactcttgttaatgacatgtccaactttc

SEQ ID NO: 272971 - DNA, 201 bp, Homo sapiens
gactataagcttagcttgaggagcaaaagtataggtgctaaattcatgttgagataatagaataccaagcattacaattaaaaggaatgttgagtgttttktttttttttttttgtaatggactcttgatgtaggttatttgccaagtactgtatgttgaatgtattacagaaaaatgtcaccttggtaccttcttgagag

SEQ ID NO: 272972 - DNA, 201 bp, Homo sapiens
agatttacaatggtaccttcttggaaccctgcctatattaatttctgaataaatctgtactaacagacttagttttttgttgctgttacagtgaaagttattttttttttcagatctggctgctggtttgcaccttccctttttatcatttttttttacattttgaaggaaatgaatctattgtaaagtattgcttctgat

SEQ ID NO: 272973 - DNA, 201 bp, Homo sapiens
tggctgctggtttgcaccttccctttttatcatttttttttacattttgaaggaaatgaatctattgtaaagtattgcttctgattggccccaactccagstcctttcaggacaagtgccagtcctttcaggacaagttgaatcaggtttttcttgtctattttgaaaatacgtatgccctgtttttatttataaagatac

SEQ ID NO: 272974 - DNA, 201 bp, Homo sapiens
tcaggacaagttgaatcaggtttttcttgtctattttgaaaatacgtatgccctgtttttatttataaagatacttccttaagttttaacatagttgtaatttttttttttttttttgagacagagtctcactctgtcacctaggatggagtgcagtggcatgatcttggctcactgtaacctccgcctcccaggttctgg

SEQ ID NO: 272975 - DNA, 201 bp, Homo sapiens
gtgcaccaccatgcctggctaattttttatattttggtagagtcggggtttcaccgtattagccaggatggtctcgatctcctcacctcgtgatctgcccrcctcgccctcccaaagtgctgggattacaggcgtgagccacaggaatggggataaagcagtttactgaataactataaggctaacacacttatgtaacta

SEQ ID NO: 272976 - DNA, 201 bp, Homo sapiens
ttggctcactgtaacctccgcctcccaggttctggcaattctcctgcctcagcctcccaagtagctgggactacaggcacacaccactacacctggttaatttttttttttttttttttttttgtaattttagtagagacggggttttaccatgttggccaggctggtcccgaactcctgacctcaagtgatccgctcacc

SEQ ID NO: 272977 - DNA, 201 bp, Homo sapiens
tttagcctgctaagccacttatctgaggatgtgtgactttcattaattctggaggatttctcagccattgtatatatttgcatgttgcaatgttcccattaaaaaaaaaacaattctcaggccaggtgtggtggctcacatctgtaatcccagcacttggagaggccaaggcaggaggtttccttgagtccagtaatttga

SEQ ID NO: 272978 - DNA, 201 bp, Homo sapiens
accattgcttgtttgatcttgtcttttctggatttaactttgtttttactgaagtctttcaaagttctttcagcaaaggttgtacaaagagtagattcttyctgtgtgtgaacatgtgttaattctactttctctcttaaatgatacagaatcacattcagcgtcttaaagctacaattccactgcattctaatcttttta

SEQ ID NO: 272979 - DNA, 201 bp, Homo sapiens
gtgctgggattacaggcatgagccattgtgcccagctagtgcacatatttctgtcatgcttaaggcttgttaaaggtgattcagatggagtgtaaataatytacagtgagagatatatgtgtgtgttactatggcgttcagatccaaatttcacgagatagcttattttcatctagcagaaactcttatctaatgcattgc

SEQ ID NO: 272980 - DNA, 201 bp, Homo sapiens
ctttatttaggcatagagtaaaattttcagggcaactagctaatagggaataaaacagggtttctcatatcaggcattgttgacattttgggccaataatkatttgggatggggaaagggaggctgtcctgtgccttgtagaatgttcagtggcatctctacctctactgactagatgctggtatcaccctacccccaagt

SEQ ID NO: 272981 - DNA, 201 bp, Homo sapiens
ttctcagatttgaccaagtcaagtagagtttgtcaaatctgatgggagaaagaccagaacaaacaaacaacaaaaaacccaacaatatgatcactgactgygctaatggtaaggagaaattaagaccagctagttgttaaactttagccaagacaaaaccccaattcagctacttacccagggataggtctcaggctgaag

SEQ ID NO: 272982 - DNA, 201 bp, Homo sapiens
agtctcgccctgttgcccaccccggagtgcaatggcgcgatctcggctcactgcaacctctgcctcccgggtttaagagattcttctaactcagcctcccsagtagctgggattacaggcgtgcaccaccatgcctggctaattttttatattttggtagagtcggggtttcaccgtattagccaggatggtctcgatctc

SEQ ID NO: 272983 - DNA, 201 bp, Homo sapiens
tgataatttgtcagacaagccaatctgaattttagtgtaacttttttttttttttgagacggagtctcgccctgttgcccaccccggagtgcaatggcgcratctcggctcactgcaacctctgcctcccgggtttaagagattcttctaactcagcctcccgagtagctgggattacaggcgtgcaccaccatgcctggc

SEQ ID NO: 272984 - DNA, 201 bp, Homo sapiens
agacttaattctccaaacgataaggcctaataaaaacagcatgaagccaattcaatttatttttaaaagtttataaacagtctccaaaattttaatcttgrccataagatataacttccttaagcctttcacagcatttataacctttattaaggagtcagttaatgcttcaacaaaaccttgttaatctgacacaggggc

SEQ ID NO: 272985 - DNA, 201 bp, Homo sapiens
ttatctctagactcactgataatttgtcagacaagccaatctgaattttagtgtaacttttttttttttttgagacggagtctcgccctgttgcccacccyggagtgcaatggcgcgatctcggctcactgcaacctctgcctcccgggtttaagagattcttctaactcagcctcccgagtagctgggattacaggcgtg

SEQ ID NO: 272986 - DNA, 201 bp, Homo sapiens
tttcaccaaagtgataactcagaaaaaggtgaaaaccttcattctttgagagaggagacttaattctccaaacgataaggcctaataaaaacagcatgaarccaattcaatttatttttaaaagtttataaacagtctccaaaattttaatcttgaccataagatataacttccttaagcctttcacagcatttataacct

SEQ ID NO: 272987 - DNA, 201 bp, Homo sapiens
tccacaagctgtacaggaagcatggctgggaggcctcaggaaacttaacagtcatggtcaaaggcgaaggggaagcaagcatgtcttaccatggcagagcwggagtgggagagagtgaagggggaagtgccacacatttttaaaccatcagatcttgagagaactcactcactatcatgagaacaagggggaagtctgtcc

SEQ ID NO: 272988 - DNA, 201 bp, Homo sapiens
gcaggtagatcacctgaggtcaggagtttgagaccagcctggccaacattgtgaaaccctgtctctactaaaaatacaaaattagccgggcgtggtggcaygttcctgtagtcgcagatactcaggaggagaatcgcttgaatccaggaggcgggggttacaatgagccgagattgcgccattgcactccagcctgggcaa

SEQ ID NO: 272989 - DNA, 201 bp, Homo sapiens
acctgagactggataacttatgaagaaaagaggtttaattgactcaccgttccacaagctgtacaggaagcatggctgggaggcctcaggaaacttaacartcatggtcaaaggcgaaggggaagcaagcatgtcttaccatggcagagctggagtgggagagagtgaagggggaagtgccacacatttttaaaccatcag

SEQ ID NO: 272990 - DNA, 201 bp, Homo sapiens
ttttgttgagatggggtctgtgttagcccgttctcaaaccgctataaagaactacctgagactggataacttatgaagaaaagaggtttaattgactcacygttccacaagctgtacaggaagcatggctgggaggcctcaggaaacttaacagtcatggtcaaaggcgaaggggaagcaagcatgtcttaccatggcaga

SEQ ID NO: 272991 - DNA, 201 bp, Homo sapiens
gcacatatatttatttggtaaactgagcactgtcatacttatacattgtggagctaaataagggttttttgttgtttttttttttaattcacatgaacttycagactttgagttcgtcttctctgaataaaagattgaagcttttgaaatgatactgtgttctactcttttacaattattttattgataggtattccttaa

SEQ ID NO: 272992 - DNA, 201 bp, Homo sapiens
gtcaggagttcgaaaccagcctggccaacatggtgaaaccctgtctctactaaaaatacaaaaaaaattagctggacatggtggctggcaaccgtaatccyggctacttgggaggctgaggcaggaaaatcacttgaaccccggaggcagaggttgcagtgagccgagatcgcgccactgtactccagcctgggtgactag

SEQ ID NO: 272993 - DNA, 201 bp, Homo sapiens
catcaagatttatacatatatttgttgagaaattctaatgtaattgtcactgtaataaatggtaatgactatactaagagtgatgaagtctccaaaagagrtggtgtaatgcagcataattggtaagctgaagcgtaagccttgatacatttcctttatttagggtatagaaagatgatgtgcagccagtgaagaatgaat

SEQ ID NO: 272994 - DNA, 201 bp, Homo sapiens
taatatctggtagaactatatatcccttgttgtccccgaaccccaaggttattttaattctttttctctgcataaattttagaatcaatttgtcttacatrggaaaaaaacaagcattaatatttttggtggattctcatttaagataatctttttgatgttgaatctttctgcccaaaggcatatatgtctttctgggtt

SEQ ID NO: 272995 - DNA, 201 bp, Homo sapiens
gacctaaaagagatgtgtcgagatgctgccctcctctgtgttagagaatatgttaattctacatcagaagaaaggtatgttattttgacttgatttttaayacttgtcaaaatcttttagagcttttaggttagtttcttttattttgctttatattagaaacaccgcttatgaaataaaaggtaaatttggattatcacc

SEQ ID NO: 272996 - DNA, 201 bp, Homo sapiens
ggtttcatcatattgtccaggctgctctcgaagtactgagctcaagtgatccacgtgcatcggtctcccatagcagtgggatttcaggcatgagccactgygctcggcccatttttttttttatagccactacagatgccacttttaccaaattctcatatgtattgtctctgtttctggactttaaattcaggtcttggt

SEQ ID NO: 272997 - DNA, 201 bp, Homo sapiens
ctgtggctggccagctatggtttttgatgtacagtacaatagaacataggatacagtagcatggaaagtagccacaattaaagttgtaaatttaatatgtygtgtgagtaatcaaaatgggttgtaacaggttttatcaagtttattataaatttgtatagtgttaacatagaaatggaaatttgtaacctccattttatt

SEQ ID NO: 272998 - DNA, 201 bp, Homo sapiens
tcctataaatctgatgttcataaagttattttagagaaaaatgaggaaggaatctgagaatgatataccccaaggatctccagcccctgcagccacagacyggtactggtctatggcctgttaggaactgggccgcacagcaggaggtgagctgtgggctagagctccacttcctgtcacatcagcagcgtcactggattc

SEQ ID NO: 272999 - DNA, 201 bp, Homo sapiens
tttaaaatttgcattttcgtaatgacatgatgtggaacattgtttcatgtgcttatttgtcatctgtgtatctttgttgaggtgtctgttcaaatgttttkcccattttgaaacaattgtaatattttttattgtttgattttttaattttttattgatacataataattgtacatatgtatgaggcacctatgcaatgag

SEQ ID NO: 273000 - DNA, 201 bp, Homo sapiens
tggtaaactgagcactgtcatacttatacattgtggagctaaataagggttttttgttgtttttttttttaattcacatgaacttccagactttgagttcrtcttctctgaataaaagattgaagcttttgaaatgatactgtgttctactcttttacaattattttattgataggtattccttaacatgattcgcttatt

SEQ ID NO: 273001 - DNA, 201 bp, Homo sapiens
tcagcttagtggtttaaaagaaagttaaaaagaagttaatctggcatgtttgttttttcagccagattgctggaaataaacatcctagaaccattttcccttttttttttttttttttaatgaatcacttacttatatctcatggaaaagttaacagtgttcttttgttgttttaactttagtattttctctttttttttt

SEQ ID NO: 273002 - DNA, 201 bp, Homo sapiens
ctggttcatttgaagctcttctactatctgactctttcattgagcttattatttcaagtattatatttttcagttttagaaattcttagattgtttttcamatctaccaggtcagttttgataggctcttgcttattactcatgtttctaattggattagaaaatcagaaccctggcatcaacaagctgtgtagccttggc

SEQ ID NO: 273003 - DNA, 201 bp, Homo sapiens
cttccttaagttttaacatagttgtaatttttttttttttttttgagacagagtctcactctgtcacctaggatggagtgcagtggcatgatcttggctcmctgtaacctccgcctcccaggttctggcaattctcctgcctcagcctcccaagtagctgggactacaggcacacaccactacacctggttaatttttttt

SEQ ID NO: 273004 - DNA, 201 bp, Homo sapiens
cagcttagtggtttaaaagaaagttaaaaagaagttaatctggcatgtttgttttttcagccagattgctggaaataaacatcctagaaccattttcccttttttttttttttttttaatgaatcacttacttatatctcatggaaaagttaacagtgttcttttgttgttttaactttagtattttctcttttttttttt

SEQ ID NO: 273005 - DNA, 201 bp, Homo sapiens
tcttctctagcatttggttttattaattttggggatttttagctattgtaatagatatataggtatctaatagtttcccatttttaaaatttgcattttcrtaatgacatgatgtggaacattgtttcatgtgcttatttgtcatctgtgtatctttgttgaggtgtctgttcaaatgtttttcccattttgaaacaattg

SEQ ID NO: 273006 - DNA, 201 bp, Homo sapiens
tttaagaagttgtggtaatcaaaattttcaatagcttttgtgtttaaggtttttttggtcacatgtttcaaaaattaaagtatgtatatttaataatacayggagaaaaatcttctcttttttcctgtatatatttttttcttttctttcttttttttttgaagcagagtgtcactctgtagtccaggctggattgcagtg

SEQ ID NO: 273007 - DNA, 201 bp, Homo sapiens
ttacaggcgtgtgccaccacactcggctaatttttgtatttttaccatgtattttttgcattttaccatatatttttaccatggtttcaccatgttggccmggctggtctcaaactcctggcctcatatgttatttctccttttatttacttattttttatataaactatcaataacacatacacactgttctgtgcattg

SEQ ID NO: 273008 - DNA, 201 bp, Homo sapiens
cttaagatatttactgtatttttcaaataaaatgattaattctactaccaaataaatcttaatttctagtctacttctagtttgcaagaggagctttaaawgtatttgtttacttaacatttaaaaatccatttctccttaaaatgaaacactttttttaaggtaggtaatattttaatttgactagaagttagtttttct

SEQ ID NO: 273009 - DNA, 201 bp, Homo sapiens
tgcctcagcatcccaaagtgttgagattacaggtgtgaaccactgtgcccatcctcttcctaaatcttttatttgcatatagcacttactaagtaaagccrttaccaaaaacatccgtcttaaaaaggagtttaaatttttaagcctctataaagcttaagataataaacacagtttttatttgttgaagttggttataaa

SEQ ID NO: 273010 - DNA, 201 bp, Homo sapiens
ttttggtagctattgccacattgttacggtttactcatattcctgtgataaagagtgcctcttttcctatagtcttgccaacagaatgttatggaacttcrtgccaacatgatagatagaaaatggttatctctctgtttttttgtttttgttttttttcttttttgtgacatgatctctctctgttgcctagcctgaagt

SEQ ID NO: 273011 - DNA, 201 bp, Homo sapiens
aattatgtcattttttgaactttatagggaacctaatgtcttaaagaattaattaggtcaaaaaaaagacataatttatcatttgattttggaaagtttgycaaatatcaaaggtttaaaaaacttcatactacaggtcattgtaaaataagtcattcatttcaccaaagtgataactcagaaaaaggtgaaaaccttcat

SEQ ID NO: 273012 - DNA, 201 bp, Homo sapiens
gctgggactataggtgcatgcaccacacccagcgaattttttgtatttttagtagaaatggggtttcgccatgttgcccaggctggtctagaactcctgasctcaagagatccacccatctcagcctcccaaagtgctaggattacaagcatgagccatcccacccagcagatacagggaatttttagcaattctgttatt

SEQ ID NO: 273013 - DNA, 201 bp, Homo sapiens
ggcttttaaacccaaggtttactggagctgagtcttataagactgagaagctgaagtaaataaaattgagataggagtcagtaaggaacaagcagttagtrttgcctaggtaggtaagggagtagatacaagtgatgaggaaagaaaagcaataggagctgggaatcagaggagaaaaaactctgcagtattgttttctac

SEQ ID NO: 273014 - DNA, 201 bp, Homo sapiens
tctggataattgctgacatgagaacatctcgtcatttcccactggttggtatttatatgctgaaggattactgctacttcaataaaatctgaagaaaattmatttaattttgttaaagatgcctcaaatcagtagcacatatatttatttggtaaactgagcactgtcatacttatacattgtggagctaaataagggttt

SEQ ID NO: 273015 - DNA, 201 bp, Homo sapiens
ttctcacttctttcccactgtctggggaatcacttgcataaagtcaccatagccaaagaaggagaaggttgcaaaagagaattgattttaaacgtgttatrgaatggtcaaggagaagaagaggtcatgaggaatatgatctaagaaagtgatcagtaaatttagtgaaattaagcttggagagagtaatttccatttggt

SEQ ID NO: 273016 - DNA, 201 bp, Homo sapiens
aagaacttaaaaaaaaaaatgaccagaggagtgagaataaaaccaagatgatgtttagggtactggtgatagtcttttctacatgaatacatctgaagtayacagagtactgcagacagtcatagtggttcactgtggcagtgattgtcaactgaaacactatgttctgcaaagaaataatcagaatttggggaagtttgt

SEQ ID NO: 273017 - DNA, 201 bp, Homo sapiens
ggatctgaaagacacagtcatcttacctatcaaaaagaaacatttgtttgagaattccaggcttctgcagcctccaaaaggtatggtaaaggtatatattsgcctaaagcattaaaatcctagaaaacattgaaactttctgccattgtagaactagtttttgtgaaatcagattctcaagaggatgctgagatctatgtg

SEQ ID NO: 273018 - DNA, 201 bp, Homo sapiens
agacctaagtctttattacattaaaaatttcagaattgggaaggatataaacgggttttgtgtgttgaccttttatgggattaaaagttgttactatcttsatgactgggatgtgttcataacagccctaatttgttcatgtagttcaatgaatatccagtagatgacttggttggtagttttatcactaccaactctaaa

SEQ ID NO: 273019 - DNA, 201 bp, Homo sapiens
gatgggttagtttgaattatagtccaatgataggacagattttacagaattaaactttaaataaatctaggatatatgtttgccattgcaggactctcatrtgtcatggtaatgtgtttttgctgaaattactttttataaaaaatacttttttgaagtgtggacatagcacattacaagatatttttgtgccacttgcat

SEQ ID NO: 273020 - DNA, 201 bp, Homo sapiens
ggattatcaccccctgcaactttatttattgccatttttccaaagcagaattctgaaaatgaaggagggcagaattgtgggaagggtctagaatgaaggaraaaaaaggtgaatttcttctgatgatccgtggaaatttcacatgtaaatgtgaggggaaatttcccatgtaaattggagatattgaagactagacctcaa

SEQ ID NO: 273021 - DNA, 201 bp, Homo sapiens
ctggttggtatttatatgctgaaggattactgctacttcaataaaatctgaagaaaattaatttaattttgttaaagatgcctcaaatcagtagcacatakatttatttggtaaactgagcactgtcatacttatacattgtggagctaaataagggttttttgttgtttttttttttaattcacatgaacttccagactt

SEQ ID NO: 273022 - DNA, 201 bp, Homo sapiens
tttgttaaagatgcctcaaatcagtagcacatatatttatttggtaaactgagcactgtcatacttatacattgtggagctaaataagggttttttgttgtttttttttttaattcacatgaacttccagactttgagttcgtcttctctgaataaaagattgaagcttttgaaatgatactgtgttctactcttttacaa

SEQ ID NO: 273023 - DNA, 201 bp, Homo sapiens
cctatacaaactgacctgaaattacttttgtatgatatagcagcaatagtttttgttttttgttttgagacagaactgacagtctcctacattctagctgaccaccagcctcatcattctagccagactggaatgcagtggtgtaatcctagctcactgcagccttgaactccttggctcaagtgatcctcctgcctcaac

SEQ ID NO: 273024 - DNA, 201 bp, Homo sapiens
ctatacaaactgacctgaaattacttttgtatgatatagcagcaatagtttttgttttttgttttgagacagaactgacagtctcctacattctagctgaccaccagcctcatcattctagccagactggaatgcagtggtgtaatcctagctcactgcagccttgaactccttggctcaagtgatcctcctgcctcaacc

SEQ ID NO: 273025 - DNA, 201 bp, Homo sapiens
tatacaaactgacctgaaattacttttgtatgatatagcagcaatagtttttgttttttgttttgagacagaactgacagtctcctacattctagctgaccaccagcctcatcattctagccagactggaatgcagtggtgtaatcctagctcactgcagccttgaactccttggctcaagtgatcctcctgcctcaacct

SEQ ID NO: 273026 - DNA, 201 bp, Homo sapiens
ttattttttctaattttttaattcattgaaacaaatctctattcttcttttgcctgcccttttcagagtctcttcactatctttgcctgctctttaaactrtttaaataagatgatctataattcttgagatgaaattattgtaaagtgtactacattttgttaattttgtagagaaacattttgttaaaattagactttt

SEQ ID NO: 273027 - DNA, 201 bp, Homo sapiens
aagaacaatgatgttttccaatccatttttacttcaaccatccttctagtgatgtaatgaagtggccccttgccaagctagcagttttttatactggaaastacatcactactatttgttaatattaatggtgattagcagcatttattttatcactaaggtctttcaccagaaagctggacagaaggtaaaattattgct

SEQ ID NO: 273028 - DNA, 201 bp, Homo sapiens
ttgaactcttactatgagccagaaattgtaattttagaaagatttctgaattttgtctttatgccaaccaaacaggaggtgggcagggactactattactrctataattataatgctacagatgaggaaagtgattattgccaaaagtaaggttagtgaaagcaaaaatttagttaaaggttatataacttgccccacacc

SEQ ID NO: 273029 - DNA, 201 bp, Homo sapiens
gggttcaaagcaaacaaaacgtgaactctaaatcctaaatcaaagtcatgtctttgagatatattgacagtatcatgtggaagttaatagcttaacattaytggcattaaaatttaaacattttatgattggagaaatgattgattcctagtgtttatttttattaatcattatgaaaagttttgtaactttataattcac

SEQ ID NO: 273030 - DNA, 201 bp, Homo sapiens
ttacagtcagtcatggctggcagtcaatataactcttgtactggtttaaaaactaaacacatatgaaagttatatctccattatatgttccataaaaaaaatgtgaattttcctttttgtaaagtttgaggaggggtaacatctaagattgcatatgttttctttgaatcagatctaactcatgccccagactctgtgaca

SEQ ID NO: 273031 - DNA, 201 bp, Homo sapiens
agttaagtagttgcttctggaattcaaaagagcaatcagtattggagaaggatatttaatggaagtaccattgtagttactacggttatataaaactgccrggtcataaaaataaaaggtagccagggaataccaataaacaagtgacatgcggaggaaaaggcaataatgaaagaaactgagaagagctgacagaagtaa

SEQ ID NO: 273032 - DNA, 201 bp, Homo sapiens
tatccttctcggtgcttcaaactagatctttttcagatatgttatgagtgagtatgagcttattttggtgcaaaaaattgaaatccattcacagttttttsataatatacatgttccatgacttttgaagatcgctcatgtagaagttttagttatgtcacatttgcctgacattattacaaggtgaacatctgtgtgctt

SEQ ID NO: 273033 - DNA, 201 bp, Homo sapiens
tttcttagaatgtatccctgtcattaaatgacacatggctgtacttgtatggagagcttatagtttagtggaggatcttccccaacttacaaatttaagtrcaattattaatagaacatgagttagggattgctcattctggtgagagcatagacagatatttagaagatggtttcaaccaggaattaaaatacttgaaga

SEQ ID NO: 273034 - DNA, 201 bp, Homo sapiens
aatgatatattgttctatattttgtacacttcttctactttccatcatatgattgaaaatggaaggtaaaataaatcatttaagccatttgagatgtcackcaacaagaagttcctaaatccagaaaaatgaattgctttgaaaagcagaaaaaaagtccttatttctctcttgtctgctttttcttctgaaaatatacac

SEQ ID NO: 273035 - DNA, 201 bp, Homo sapiens
attaatgctggaggctgcaacttcaattccttcctcagacgagctgtcagattcgttggtgggtgtggggaaccacaaagaaaagaaatgcttttttttttatattgaaatgttatatttaattatagatattaagtctcgtacgctataatttagatgtataatttcagtacatgatgagttttatattgtacaagaaac

SEQ ID NO: 273036 - DNA, 201 bp, Homo sapiens
ttacttcttttccatgagtggaaatagcccagattcattacttttactttggcctattcagataccctctatgaattccttagcagggcaagctgtagaayaattacttgaacacaattcatggagtttaaatgagcattgatgacactgtatcttggggttaacagacttcaaagacagagccacacaattggattgcaa

SEQ ID NO: 273037 - DNA, 201 bp, Homo sapiens
ctcagtccaaaagcttcttaagctgataagcagcttcagcaaaggctcaggatacaaaactattgtgcaaaaatcactagcaatcctataccccaacaacmgttaagctgagagccaaatcaaaaaagaactcccattcacaactgccacagaaagaatgaaatatctaggaatacagctaacaagagaagtgaaagagct

SEQ ID NO: 273038 - DNA, 201 bp, Homo sapiens
agaactaacattgaggtgtttttcttaccaataattagactgaaccaattgcacttaggtccataactatctggttggctgtcaagcaacatagaggaggwtaatggctttcttatttgctgtaacaagatggtttctgcctgtgtaaaactggtatttagatcacttaagaataaattaaagaaaaggggaaagacgagt

SEQ ID NO: 273039 - DNA, 201 bp, Homo sapiens
ataaactttctgcaaattatcaatgattttgccattcttctactaaagcttcatcataaattcaatgcatgttcttgcttcaattttagcagaactcatgytgctctgacaggggttcttttcaaactgatatcttatccttctcggtgcttcaaactagatctttttcagatatgttatgagtgagtatgagcttatttt

SEQ ID NO: 273040 - DNA, 201 bp, Homo sapiens
aaagaataagtacaatttttatgagaaataaatgtggaaccataatgtgaagcagagactagaacatgtctttttgaaatataaatataatgggaacatgkgctgtctttctggtttaggagagtggagagtaggtggaaagcaaaatcaaccaagacaggcagatcaaggccatattttaaaaagtcataaatatcattc

SEQ ID NO: 273041 - DNA, 201 bp, Homo sapiens
ttgtaaaatacatttcaaatcatactacacctctgcttgaactctccagaatgtttctgatcctactttaaataaaattctaacttcctccttggacgtcrggtctctgcaacgtctggtcccaaatctacctctctgacttcattttgtatcacttcctccttttgattatggtctttacctggttttcatatggctagt

SEQ ID NO: 273042 - DNA, 201 bp, Homo sapiens
ggtcaagtcaagcaggattagaagaaaaagcattagaaaattgaaggtaggagtgaagtgtgtgtgtgtgtgtgtgtgtgtgtgtgtgtgtgtgtgtgtgwgatggagatccaatctgtgagcaaaccatggagacccctttaaacattttggttttctaagctggcttattaaataaagattatttgagacacaattatt

SEQ ID NO: 273043 - DNA, 201 bp, Homo sapiens
ctactttaaataaaattctaacttcctccttggacgtcaggtctctgcaacgtctggtcccaaatctacctctctgacttcattttgtatcacttcctccktttgattatggtctttacctggttttcatatggctagttctttcttgcccattcaagtctctgcttaaatggcacctactcaaataggtcttcctagatc

SEQ ID NO: 273044 - DNA, 201 bp, Homo sapiens
agaagaacaaattttcactacctgaggttaagtctggtgagtgcaaaaccaactaccccaagcctagtgctagatcaatattcaggtaataaaacaaccayttatcattatttttgactttactgttacatcagtgtgattgcattggtccttttagagctgtaaagatgtagtttcatattcaggtataaaaacatagaa

SEQ ID NO: 273045 - DNA, 201 bp, Homo sapiens
aacttgaaataaaagtttagatagatagatagagtttataatatatataaattttatatatatagatgctttaaatgtatcatactgtcacaccagaaagygcttatcctaaaagtgctcaaaattattataattgatatatttgaatttgagataaattacttaacatactacacaaatgatcatgcctctgttataaaa

SEQ ID NO: 273046 - DNA, 201 bp, Homo sapiens
tctcactcgcatgcattcttcactgcaggagaaagggatcaaattaaaattggtgtgccaggaattgtgcataagcctgggttgcccatgggagtgttagytggcaatgtgcattgcagaagaaataaaggagactggaaatgccactctctagtttatgtattgcttttgcatgtgtgtcatttcatgatgtcctggaat

SEQ ID NO: 273047 - DNA, 201 bp, Homo sapiens
agtaggatggagaaaagaatggggttcacattgctgagcaattcatgcagcgatttatgatataacttacaaagtatttccctgcaaaaatatagttttcrtgtttcattatttgtactagtcaatggtgtataggaagcatatacctatgtatgtacttcagtgggtactctaaggaaaccctagtgactgtcttctagt

SEQ ID NO: 273048 - DNA, 201 bp, Homo sapiens; identical to SEQ ID NO: 54317

SEQ ID NO: 273049 - DNA, 201 bp, Homo sapiens
tggcatcatcggtggttagcctctatttcctcgaactcacagatgtcttcaaacctgtgcactctggatttagctgctatgaccggagtcttagcatgccrtacattgaaccaacccaggaggcaattccattcctcatgttgcttagcttggcttttgctggacctgcaattacggtaagaattacccccaaaattgtgt

SEQ ID NO: 273050 - DNA, 201 bp, Homo sapiens
tatacaaatcatggaatcttactgtataacctcatacaaatcatgtaatctcatgtaatctcagtttcctcatctgtaagatggcagtaataatagtatcytcatcaaaaaggtgttgtgaagattgcatgaattcaaacatataaagtactttaaatggtacctgtcaaacattagtagcattaaattactattattacc

SEQ ID NO: 273051 - DNA, 201 bp, Homo sapiens
aaggtctttcaccagaaagctggacagaaggtaaaattattgcttattgccttgtgacttttaagttgaacattttaaccactcagtgtctttgagatgaytgctagcagtgtatctgaactacaaggcataatttgactatcttcttttggcagaaagtccttcccttctcaacatgcaacccttgctgcctttgcagct

SEQ ID NO: 273052 - DNA, 201 bp, Homo sapiens
agccaaccttggtggtgcatgcctatattcccagctacttgggaggctgaggcgggagaatggcttgaacccaggaggcggaggttgcagtgagccaagaycacaccattgcactccagcctggcctgcagagcaagactcagtctcaaaaaaaaaaaaaaaaaactcctgaaatctcaaggtctcaagctcatttgagat

SEQ ID NO: 273053 - DNA, 201 bp, Homo sapiens
tactccaagatgacagcaattctttcctaccacactggttttataggttttaggtaaccaactggatggtgagacagatttgactttgctgacatcaaacwctttgtcacagctttctctccaaacatatactatacttctagatttcactctactttcatttttttttcttggttttgaaggccttctccccaaacatac

SEQ ID NO: 273054 - DNA, 201 bp, Homo sapiens
cctaccacactggttttataggttttaggtaaccaactggatggtgagacagatttgactttgctgacatcaaacactttgtcacagctttctctccaaamatatactatacttctagatttcactctactttcatttttttttcttggttttgaaggccttctccccaaacatacattttctcagcagtgatcctccagt

SEQ ID NO: 273055 - DNA, 201 bp, Homo sapiens
aggttaatggctttcttatttgctgtaacaagatggtttctgcctgtgtaaaactggtatttagatcacttaagaataaattaaagaaaaggggaaagacragtaattaaaatcaatgtatttgtgggaaaaggtaaacatggaatcatacatttaacagaagaatgatgtttgggagtgagagcaatggaagtagatgtg

SEQ ID NO: 273056 - DNA, 201 bp, Homo sapiens
agaatgatgtttgggagtgagagcaatggaagtagatgtgactatatcgttaacaatttaatgctcttaccaaaagtctgcgctatgggtttgcttagagrtaaactgccatttaatgaaatcctaggcatgcttcagaaattaagtcctcatggatagagtccaaaagagactgatcttttattaaatgttcttcaataa

SEQ ID NO: 273057 - DNA, 201 bp, Homo sapiens
aattctaacttcctccttggacgtcaggtctctgcaacgtctggtcccaaatctacctctctgacttcattttgtatcacttcctccttttgattatggtytttacctggttttcatatggctagttctttcttgcccattcaagtctctgcttaaatggcacctactcaaataggtcttcctagatctaaaatgggaatt

SEQ ID NO: 273058 - DNA, 201 bp, Homo sapiens
ctggttataacaataacaacaatacttaataatatttataaactatttattccagatattgttgactgtggaactagaattcatggattcaaaatccacckctgtcacttacgatatgtaactgcttatccacctgcaaaatgaggatactgatagcaactatcttatgtcacaatagaaagttttaggttaaatgagttt

SEQ ID NO: 273059 - DNA, 201 bp, Homo sapiens
aactaaatgtttttgatatactttttgttctctgcaaagcatccatctgaaaaacagaaagattatgcaagtttactcactatgtatttcttttttttccrgtaaacctaattatttcctaactacaaaaaaaaagacctcttgggaatagaagacataatgctgtcttctaaaaataaaaattaaaaaactgttttttca

SEQ ID NO: 273060 - DNA, 201 bp, Homo sapiens
gaaagcacctttctacactcacatactttccatggattgatccttctgctcaatcccaaattggtttatggacctaatctgctggtaaaatgttccagtayatgagagtccagaagaccctacaaaatctcattagagtggcctgattacttacttctcactgcttgatcaaattctcagaagaaattgctgtgcctctac

SEQ ID NO: 273061 - DNA, 201 bp, Homo sapiens
cgctgcatgcagcgcgctggctccagcggtggccgcggggaatgtgacatcagcggcgccgggcgcttggggctggaggaggcagctcgcctcagctgcgytgtgcacacctcgcccgggggaggacgcagacccgggcaggcggcagggatgtcggcgaaggagaggccaaagggcaaagtgatcaaggacagcgtcacc

SEQ ID NO: 273062 - DNA, 201 bp, Homo sapiens
caccatactgtctcacacatgcttccaacaacaatgctaaacctagtgatgaagtgcaatggagagccctgtctgtgctgtgacttggctagcttcatggyatctggatgcatgcatttgaaacatgtctgtttgtggctctgtcagagttctggaacagagtttttctctacattcagctactaaacttggctgtattag

SEQ ID NO: 273063 - DNA, 201 bp, Homo sapiens
aatggtatttctggttctagatccttgaggaattgccatactgtcttccacaatggttaaactaatttacattcccaccaacagtgtaaaagcgtttctakctctccacagcctcactagcatctattgtttcctgactttttaataattgccattctgactggcatgaggtggtacctcattgtggttttgatttgcatt

SEQ ID NO: 273064 - DNA, 201 bp, Homo sapiens
aaccactagactgatgcgatctgaaatactttgttgttgttgtttgtttgttttctttatttcttctaaaataaaagggatacatgtgcagaatgtgcagrtttgttacataagcatatgtgtgccatagtggtttgctgcacctattgacctgtcttctaagttccctcccctcaaccctcaacccccaacatgccctgg

SEQ ID NO: 273065 - DNA, 201 bp, Homo sapiens
ctggccacagttgctttggcaccaattgaatggaaagtttgctaaactttaatgtttcagtcagaattgtgtaagctgaaccaagtgagaggtctatgttkttggctattgtttgtgttgttaatagtcagtcctcttcaattagggtatggacaagacaaatgttttccttgcaaattgatgtggatggtctgatgttgt

SEQ ID NO: 273066 - DNA, 201 bp, Homo sapiens
ggggaaccacaaagaaaagaaatgcttttttttttatattgaaatgttatatttaattatagatattaagtctcgtacgctataatttagatgtataattycagtacatgatgagttttatattgtacaagaaactgttaaaacaccaaaatttgggttttgtatctgaaatgtgttatttacagttgtagcccttgtttt

SEQ ID NO: 273067 - DNA, 201 bp, Homo sapiens
aaaatcaccacatttgtataataaatgggttcaaagcaaacaaaacgtgaactctaaatcctaaatcaaagtcatgtctttgagatatattgacagtatcwtgtggaagttaatagcttaacattattggcattaaaatttaaacattttatgattggagaaatgattgattcctagtgtttatttttattaatcattatg

SEQ ID NO: 273068 - DNA, 201 bp, Homo sapiens
ttttgactttactgttacatcagtgtgattgcattggtccttttagagctgtaaagatgtagtttcatattcaggtataaaaacatagaacagatttttttcccattcaacctaatacatctattaggtgaggtagctcttctctattaattatcattgctatggaggatccaatttaagtttcttgatttgttaatgcta

SEQ ID NO: 273069 - DNA, 201 bp, Homo sapiens
tttgggtttatcacaaatcttcatgaagtctatgtgaacagaaaaaaaagggcgctttttcttcctggaaatacaattttattacacattgttaaagaattaatatatctaattttatagaagaattccatcagaatttaattctagctcctggaatagccttagctttaggaggctacacaatcaatatgcagaatatta

SEQ ID NO: 273070 - DNA, 201 bp, Homo sapiens
cattggaccatcctaatgttgttccagtcataggtcttttatttttttaatatagttgaatagtcacacacaatacatcacactaacctgaatgttttctrttcattcccaataagtccgcataaagttatttttacctgtaacatgtaagctcaaaataattgatggctttgcttaatccctagtagataattatacaca

SEQ ID NO: 273071 - DNA, 201 bp, Homo sapiens
tgttaattttgtagagaaacattttgttaaaattagacttttcttatgctttctagagtattaacaaaacacatttagatccaatgccatgagaaaataasttcattttttaaaatttttatgtaaataaaacaatgtgtttaggagcatagaaaaagtttaaagctttaaacccctaggttttatgagctgttacttaga

SEQ ID NO: 273072 - DNA, 201 bp, Homo sapiens
aaccattagtccattcctaaagtactgatgctaatgggaatttaaccatatcattgcaatcttttttacattatcagctaaagaaaaatgggtgcctttgraagatttcttaagaatagaaaacaagaagaagttagaacaagccaaattaggactgtgaaatggatgcctaatgatttctcattgacactctcacaaaat

SEQ ID NO: 273073 - DNA, 201 bp, Homo sapiens
ttaatgctcttaccaaaagtctgcgctatgggtttgcttagaggtaaactgccatttaatgaaatcctaggcatgcttcagaaattaagtcctcatggatrgagtccaaaagagactgatcttttattaaatgttcttcaataaggaatgctaaaatgaaattccagggtataacctgttttgtactcttacaacaattta

SEQ ID NO: 273074 - DNA, 201 bp, Homo sapiens
gtagagaaacattttgttaaaattagacttttcttatgctttctagagtattaacaaaacacatttagatccaatgccatgagaaaataacttcatttttwaaaatttttatgtaaataaaacaatgtgtttaggagcatagaaaaagtttaaagctttaaacccctaggttttatgagctgttacttagaactggtataa

SEQ ID NO: 273075 - DNA, 201 bp, Homo sapiens
gtcaagtcaagcaggattagaagaaaaagcattagaaaattgaaggtaggagtgaagtgtgtgtgtgtgtgtgtgtgtgtgtgtgtgtgtgtgtgtgtgtwatggagatccaatctgtgagcaaaccatggagacccctttaaacattttggttttctaagctggcttattaaataaagattatttgagacacaattattg

SEQ ID NO: 273076 - DNA, 201 bp, Homo sapiens
caatcaatatgcagaatattagacatgttagggcttccaaaaaacattcattgaaaattgaaacattgaagatactatgatgaatactataataatttttsttgttttgttttacaagaaagactttttggactgtgagttctccctatgatgactgttccatggctagggtccttatagtactaagaaatatatttcctc

SEQ ID NO: 273077 - DNA, 201 bp, Homo sapiens
atttttgttgttttgttttacaagaaagactttttggactgtgagttctccctatgatgactgttccatggctagggtccttatagtactaagaaatatakttcctctcaaaatctcccctgaagtagtcattataatatctcctcccaaaacctgtccacaacaacaacaaattgcgtccttttcagggttgggtacagc

SEQ ID NO: 273078 - DNA, 201 bp, Homo sapiens
gaagaagtgaaggtgaaattaacctcttttagctgaatacaatacatttcaagaataagtggttaattttctggaaatgatgaatttgaggtagcagttayattattctgtgtaattgttgtactatgttgtatctgtctacacagagtatagaacctattgaatttctatgtctaacttgaagtgctaatgtaggactat

SEQ ID NO: 273079 - DNA, 201 bp, Homo sapiens
acattggctcatcagttagtggctagtgcccctcaacaagaactctggatagatgcaaggaaggagtaaagatgttggcagcccatttgcagagtgtcaakgtatctctaattataccccaatgggcattaggctgaggtgttggtgttcagccactaaaaccaagtaatcttgtccttgttcaccacgatacctgatgtt

SEQ ID NO: 273080 - DNA, 201 bp, Homo sapiens
aaaaccaactaccccaagcctagtgctagatcaatattcaggtaataaaacaaccacttatcattatttttgactttactgttacatcagtgtgattgcaytggtccttttagagctgtaaagatgtagtttcatattcaggtataaaaacatagaacagatttttttcccattcaacctaatacatctattaggtgaggt

SEQ ID NO: 273081 - DNA, 201 bp, Homo sapiens
gactacaggcatgcaccaccacacccagctagtatttataatttttagtagagacaggatttcaccatgttgcccaagctggtctcgaactcctgggctcragcaatcctcccgcctcagcctcccaaagtgctgggatcacaggcatgagccactgcacctggcctactcagaaagttttcattactttgaatgtgtact

SEQ ID NO: 273082 - DNA, 201 bp, Homo sapiens
attcaggcacttaattacacagccctcttctttatagtatgtgttctttctgatatatatatctttctgatatatatttaatatatattatatattatatrtgtgcaatatatagttaatatataatatatattatatatatgaaatatatattgtttacctggcttcctcaactagaatgaaatattcatgggaacagat

SEQ ID NO: 273083 - DNA, 201 bp, Homo sapiens
ataattcactttgaatggctaataggacatttctgatatacttcctaattaacttactttacatgtgtttatttagtatctgaagcctgaaaaaatggggragaaattacatagccaaaagtgcatttgctatcactcacagttttatttcttactagattatcactgtttattgattatggatactgagcataaataatt

SEQ ID NO: 273084 - DNA, 201 bp, Homo sapiens
tatttcctctcaaaatctcccctgaagtagtcattataatatctcctcccaaaacctgtccacaacaacaacaaattgcgtccttttcagggttgggtacrgcacaaaacagagattgtgaaaagatacttgttgtaaactgttttctgtttacaaatgcaacagcaacaaataattttcttatcagaacctaaattctga

SEQ ID NO: 273085 - DNA, 201 bp, Homo sapiens
gacttaagtatctgtttagaagtttaggaattttctatactgtcttcttgaaatcaacttagagaaaatgaacacaatagattttaagatcttaattcacyaatgtttaatgaatatgtttgatgctgacacaaccaccaacttggtaacaatttctttcattttgcctataggtgttcatgtatttggattatgctctac

SEQ ID NO: 273086 - DNA, 201 bp, Homo sapiens
tccacatttttgggttctggaaggtctggcactaggttaagcatgtgtgatattttctctttagctgagagcaggtctctcactaagctattgctccttgrtgaccaagtctatctcttattcactatattatatctacctacattagtgcctagcacattcacacatgaatgaataaacaattaaacacaaaaatggtac

SEQ ID NO: 273087 - DNA, 201 bp, Homo sapiens
tctatgagtgagaacatgcggtgtttggttttttatctttgtgatagtttactgagaatgatgatttccaatttcatccatgtccctacaaaggacatgarctcatcattttttatggctgcatagtattccatggtgtatatgtgccacattttcttaatccagtctatcattgttggacatttgggttggttccaagtc

SEQ ID NO: 273088 - DNA, 201 bp, Homo sapiens
cacaacagtctccagagtgtgatgttccccttcctgtgtccatgtgttctcattgttcaattcccatctatgagtgagaacatgcggtgtttggttttttrtctttgtgatagtttactgagaatgatgatttccaatttcatccatgtccctacaaaggacatgaactcatcattttttatggctgcatagtattccatg

SEQ ID NO: 273089 - DNA, 201 bp, Homo sapiens
tttctgtttacaaatgcaacagcaacaaataattttcttatcagaacctaaattctgacaccatacctcagtacaacactgtgccattcaaaaaaaaaaaaggagaaataagctgggcatttggaaacgcactgggaaacatctccctataccctgaggagacctatctttatgccaaattgaattattttgaaaactcgt

SEQ ID NO: 273090 - DNA, 201 bp, Homo sapiens
tactatgttgtatctgtctacacagagtatagaacctattgaatttctatgtctaacttgaagtgctaatgtaggactatatttttcaaaaagtataaatkgttaactcagcatccaatggtttgaaatgaattacttttgattatttctataatgattgatcttaaaatagtttattatgccacatgattttcacacata

SEQ ID NO: 273091 - DNA, 201 bp, Homo sapiens
aaaaaaaactataattttgaacacttcataaaataaatgttaagctagtaatgacaactgagaggttttctatggaaaacctgtttcagtccaaatcaggkttatagtatttacagtgacatgattagttgtatttaacagactgttagtatctcatttaagagactgcttgtatctcattaattgtactttcctcagctc

SEQ ID NO: 273092 - DNA, 201 bp, Homo sapiens
caagaaactgttaaaacaccaaaatttgggttttgtatctgaaatgtgttatttacagttgtagcccttgttttgagagctaatatgccatgtgtttcaayttatttttgccttagctctggttgaagtatgaatttattttaaaatggtttcactggatctgtggtcagtttttcaaaatggagaacaaacgtcagcagg

SEQ ID NO: 273093 - DNA, 201 bp, Homo sapiens
agtatgaatttattttaaaatggtttcactggatctgtggtcagtttttcaaaatggagaacaaacgtcagcaggccagaatgaatagacaactcttcagraattactttagccacattaatgattccatttcaattgtcctggagtgtttccatccagaagttactacactttgaaatgtcactattgagtactgcatca

SEQ ID NO: 273094 - DNA, 201 bp, Homo sapiens
gatcacagcttgaagagaattagaatggattctgtagggtgtgataactgtggctagtgttagagaccatcagggagaaataaccctggcaacttaaaaaygctaagcaaattaaaactactttaaatttttcttcattccacacatgtcgtcgctctcaaataataccttagcatgttccaagtgtcttgacaagtgact

SEQ ID NO: 273095 - DNA, 201 bp, Homo sapiens
aaataaccctggcaacttaaaaatgctaagcaaattaaaactactttaaatttttcttcattccacacatgtcgtcgctctcaaataataccttagcatgytccaagtgtcttgacaagtgacttacagttaatgttaagaattggcactttatcaccaaattaacaaaagtgcctaaagttactactttggagatactca

SEQ ID NO: 273096 - DNA, 201 bp, Homo sapiens
tgatctcttcaattactaaaccatagaaactcattgggggcttattccaaattcttctctatgtctccaaatttcagcctcacatttttgctactagtccstatttcaccaaactccaccatgttttgtgatcaatcctatactcattatggttttaggttactataaatggtttatttcagaatatttacagtcagtcat

SEQ ID NO: 273097 - DNA, 201 bp, Homo sapiens
taaataatgtcttcttcatggcaaaacctgataaaaaggatggtcagcaatctgttataaacaatatactatagggagatgaatttttgaaaactcttctsctttaagacctcatttggtttctagcttccagttgaattttatgtacatgaagaaaaattatttgatggtgttacatctttcaatatttcagtctcagac

SEQ ID NO: 273098 - DNA, 201 bp, Homo sapiens
tgttttctttgaatcagatctaactcatgccccagactctgtgacataatttcattcattctttgaatgaacccgggtgtgcatagcttctggccttacaygtcagaaaataaaggaaactcaagaaattaccaatgcattacatttcttaataaataaagcaaaaataaacttacatgacaagagatagtagtttacagt

SEQ ID NO: 273099 - DNA, 201 bp, Homo sapiens
taacttcaaagaaactgcacaaggaataacgttcaggacctgagggcaccacatcagtgagagtgtgatttgaaagtgcctgccacccctttcctgttgtwgccgttgaaaccccttgacacatggccatctctcgccttgtgtcctttaaactggcaatctcattgaagcctggggctgtcctttcctgaaaagcaccag

SEQ ID NO: 273100 - DNA, 201 bp, Homo sapiens
cataggaggatattgtgaattataggaatgttacaaaacttgaaagaatcacaataagtacccacaaagacatacaacgtgcacacacacacacacacacrtacgctactttagtatttctgtaacaataagttttaggtcagtgtaaatttagaaatgttgtacaatgaatagtcattttatctaatttgtacaatagtc

SEQ ID NO: 273101 - DNA, 201 bp, Homo sapiens
attgaatcaataagcagttaagtagttgcttctggaattcaaaagagcaatcagtattggagaaggatatttaatggaagtaccattgtagttactacggktatataaaactgccaggtcataaaaataaaaggtagccagggaataccaataaacaagtgacatgcggaggaaaaggcaataatgaaagaaactgagaag

SEQ ID NO: 273102 - DNA, 201 bp, Homo sapiens
gttcaaagcaaacaaaacgtgaactctaaatcctaaatcaaagtcatgtctttgagatatattgacagtatcatgtggaagttaatagcttaacattattkgcattaaaatttaaacattttatgattggagaaatgattgattcctagtgtttatttttattaatcattatgaaaagttttgtaactttataattcactt

SEQ ID NO: 273103 - DNA, 201 bp, Homo sapiens
cattacccaagttcaaattatactacagggctacagtaaccaaaacagcatggtactggtacaagaacagagacatagatcaatggaacagaataggaaayctagaaataagactgcacacctacaactatctgatctttgacaatcctgacaaaaacaagcaatagggaaaggattccctattcaataaatgatgctggg

SEQ ID NO: 273104 - DNA, 201 bp, Homo sapiens; identical to SEQ ID NO: 249417

SEQ ID NO: 273105 - DNA, 201 bp, Homo sapiens; identical to SEQ ID NO: 249418

SEQ ID NO: 273106 - DNA, 201 bp, Homo sapiens; identical to SEQ ID NO: 249419

SEQ ID NO: 273107 - DNA, 201 bp, Homo sapiens; identical to SEQ ID NO: 249420

SEQ ID NO: 273108 - DNA, 201 bp, Homo sapiens; identical to SEQ ID NO: 249421

SEQ ID NO: 273109 - DNA, 201 bp, Homo sapiens; identical to SEQ ID NO: 249422

SEQ ID NO: 273110 - DNA, 201 bp, Homo sapiens; identical to SEQ ID NO: 249423

SEQ ID NO: 273111 - DNA, 201 bp, Homo sapiens; identical to SEQ ID NO: 249424

SEQ ID NO: 273112 - DNA, 201 bp, Homo sapiens; identical to SEQ ID NO: 249425

SEQ ID NO: 273113 - DNA, 201 bp, Homo sapiens; identical to SEQ ID NO: 249426

SEQ ID NO: 273114 - DNA, 201 bp, Homo sapiens; identical to SEQ ID NO: 249427

SEQ ID NO: 273115 - DNA, 201 bp, Homo sapiens; identical to SEQ ID NO: 249428

SEQ ID NO: 273116 - DNA, 201 bp, Homo sapiens; identical to SEQ ID NO: 249429

SEQ ID NO: 273117 - DNA, 201 bp, Homo sapiens; identical to SEQ ID NO: 249430

SEQ ID NO: 273118 - DNA, 201 bp, Homo sapiens; identical to SEQ ID NO: 249431

SEQ ID NO: 273119 - DNA, 201 bp, Homo sapiens; identical to SEQ ID NO: 249432

SEQ ID NO: 273120 - DNA, 201 bp, Homo sapiens; identical to SEQ ID NO: 249433

SEQ ID NO: 273121 - DNA, 201 bp, Homo sapiens; identical to SEQ ID NO: 249434

SEQ ID NO: 273122 - DNA, 201 bp, Homo sapiens; identical to SEQ ID NO: 249435

SEQ ID NO: 273123 - DNA, 201 bp, Homo sapiens; identical to SEQ ID NO: 249436

SEQ ID NO: 273124 - DNA, 201 bp, Homo sapiens; identical to SEQ ID NO: 249437

SEQ ID NO: 273125 - DNA, 201 bp, Homo sapiens; identical to SEQ ID NO: 249438

SEQ ID NO: 273126 - DNA, 201 bp, Homo sapiens; identical to SEQ ID NO: 249439

SEQ ID NO: 273127 - DNA, 201 bp, Homo sapiens; identical to SEQ ID NO: 249440

SEQ ID NO: 273128 - DNA, 201 bp, Homo sapiens; identical to SEQ ID NO: 249441

SEQ ID NO: 273129 - DNA, 201 bp, Homo sapiens; identical to SEQ ID NO: 249442

SEQ ID NO: 273130 - DNA, 201 bp, Homo sapiens; identical to SEQ ID NO: 249443

SEQ ID NO: 273131 - DNA, 201 bp, Homo sapiens; identical to SEQ ID NO: 249444

SEQ ID NO: 273132 - DNA, 201 bp, Homo sapiens; identical to SEQ ID NO: 249445

SEQ ID NO: 273133 - DNA, 201 bp, Homo sapiens; identical to SEQ ID NO: 249446

SEQ ID NO: 273134 - DNA, 201 bp, Homo sapiens; identical to SEQ ID NO: 249447

SEQ ID NO: 273135 - DNA, 201 bp, Homo sapiens; identical to SEQ ID NO: 249448

SEQ ID NO: 273136 - DNA, 201 bp, Homo sapiens; identical to SEQ ID NO: 249449

SEQ ID NO: 273137 - DNA, 201 bp, Homo sapiens; identical to SEQ ID NO: 249450

SEQ ID NO: 273138 - DNA, 201 bp, Homo sapiens; identical to SEQ ID NO: 249451

SEQ ID NO: 273139 - DNA, 201 bp, Homo sapiens; identical to SEQ ID NO: 249452

SEQ ID NO: 273140 - DNA, 201 bp, Homo sapiens; identical to SEQ ID NO: 249453

SEQ ID NO: 273141 - DNA, 201 bp, Homo sapiens; identical to SEQ ID NO: 249454

SEQ ID NO: 273142 - DNA, 201 bp, Homo sapiens; identical to SEQ ID NO: 249455

SEQ ID NO: 273143 - DNA, 201 bp, Homo sapiens; identical to SEQ ID NO: 249456

SEQ ID NO: 273144 - DNA, 201 bp, Homo sapiens; identical to SEQ ID NO: 249457

SEQ ID NO: 273145 - DNA, 201 bp, Homo sapiens; identical to SEQ ID NO: 249458

SEQ ID NO: 273146 - DNA, 201 bp, Homo sapiens; identical to SEQ ID NO: 249459

SEQ ID NO: 273147 - DNA, 201 bp, Homo sapiens; identical to SEQ ID NO: 249460

SEQ ID NO: 273148 - DNA, 201 bp, Homo sapiens; identical to SEQ ID NO: 249461

SEQ ID NO: 273149 - DNA, 201 bp, Homo sapiens; identical to SEQ ID NO: 249462

SEQ ID NO: 273150 - DNA, 201 bp, Homo sapiens; identical to SEQ ID NO: 249463

SEQ ID NO: 273151 - DNA, 201 bp, Homo sapiens; identical to SEQ ID NO: 249464

SEQ ID NO: 273152 - DNA, 201 bp, Homo sapiens; identical to SEQ ID NO: 249465

SEQ ID NO: 273153 - DNA, 201 bp, Homo sapiens; identical to SEQ ID NO: 249466

SEQ ID NO: 273154 - DNA, 201 bp, Homo sapiens; identical to SEQ ID NO: 249467

SEQ ID NO: 273155 - DNA, 201 bp, Homo sapiens; identical to SEQ ID NO: 249468

SEQ ID NO: 273156 - DNA, 201 bp, Homo sapiens; identical to SEQ ID NO: 249469

SEQ ID NO: 273157 - DNA, 201 bp, Homo sapiens; identical to SEQ ID NO: 249470

SEQ ID NO: 273158 - DNA, 201 bp, Homo sapiens
atttgatctggttacagtgaattttcttcaaagaaacactcaatagggtcccttgtcagagtgcctcgcagcgacagtgactgggtactgctgcctttgtyctgccaccgtcagacggggctggctatgggaggcaaccaaagacatcccgcacctgccctgggagcctttccctcctccagggctcagccacctcaggcg

SEQ ID NO: 273159 - DNA, 201 bp, Homo sapiens; identical to SEQ ID NO: 249471

SEQ ID NO: 273160 - DNA, 201 bp, Homo sapiens; identical to SEQ ID NO: 249472

SEQ ID NO: 273161 - DNA, 201 bp, Homo sapiens; identical to SEQ ID NO: 249473

SEQ ID NO: 273162 - DNA, 201 bp, Homo sapiens; identical to SEQ ID NO: 249474

SEQ ID NO: 273163 - DNA, 201 bp, Homo sapiens; identical to SEQ ID NO: 249475

SEQ ID NO: 273164 - DNA, 201 bp, Homo sapiens; identical to SEQ ID NO: 249476

SEQ ID NO: 273165 - DNA, 201 bp, Homo sapiens; identical to SEQ ID NO: 249477

SEQ ID NO: 273166 - DNA, 201 bp, Homo sapiens; identical to SEQ ID NO: 249478

SEQ ID NO: 273167 - DNA, 201 bp, Homo sapiens; identical to SEQ ID NO: 249479

SEQ ID NO: 273168 - DNA, 201 bp, Homo sapiens; identical to SEQ ID NO: 249480

SEQ ID NO: 273169 - DNA, 201 bp, Homo sapiens; identical to SEQ ID NO: 249481

SEQ ID NO: 273170 - DNA, 201 bp, Homo sapiens; identical to SEQ ID NO: 249482

SEQ ID NO: 273171 - DNA, 201 bp, Homo sapiens; identical to SEQ ID NO: 249483

SEQ ID NO: 273172 - DNA, 201 bp, Homo sapiens; identical to SEQ ID NO: 249484

SEQ ID NO: 273173 - DNA, 201 bp, Homo sapiens; identical to SEQ ID NO: 249485

SEQ ID NO: 273174 - DNA, 201 bp, Homo sapiens; identical to SEQ ID NO: 249486

SEQ ID NO: 273175 - DNA, 201 bp, Homo sapiens; identical to SEQ ID NO: 249487

SEQ ID NO: 273176 - DNA, 201 bp, Homo sapiens; identical to SEQ ID NO: 249488

SEQ ID NO: 273177 - DNA, 201 bp, Homo sapiens; identical to SEQ ID NO: 249489

SEQ ID NO: 273178 - DNA, 201 bp, Homo sapiens; identical to SEQ ID NO: 249490

SEQ ID NO: 273179 - DNA, 201 bp, Homo sapiens; identical to SEQ ID NO: 249491

SEQ ID NO: 273180 - DNA, 201 bp, Homo sapiens; identical to SEQ ID NO: 249492

SEQ ID NO: 273181 - DNA, 201 bp, Homo sapiens; identical to SEQ ID NO: 249493

SEQ ID NO: 273182 - DNA, 201 bp, Homo sapiens; identical to SEQ ID NO: 249494

SEQ ID NO: 273183 - DNA, 201 bp, Homo sapiens; identical to SEQ ID NO: 249495

SEQ ID NO: 273184 - DNA, 201 bp, Homo sapiens; identical to SEQ ID NO: 249496

SEQ ID NO: 273185 - DNA, 201 bp, Homo sapiens; identical to SEQ ID NO: 249497

SEQ ID NO: 273186 - DNA, 201 bp, Homo sapiens; identical to SEQ ID NO: 249498

SEQ ID NO: 273187 - DNA, 201 bp, Homo sapiens; identical to SEQ ID NO: 54320

SEQ ID NO: 273188 - DNA, 201 bp, Homo sapiens
ctgcatcacactgctctgctgtcccctccatgttccccggcactgccgcctaccctggggtcttctggaagtaactgaaggccccctcaacctggctcatyatcaaagcagactgttgactagctgcaggcaaatatgaagaggctatttcctgtcacaaaaaggccatgctgtatctttctgaagctatggagctgacgc

SEQ ID NO: 273189 - DNA, 201 bp, Homo sapiens
tttctgcagaagagtgtgccccagcccttgctgggcacagatcaaagaggtgttcatgggtcgaaatcacagatttcaagggctgataggagtcagagtgkgggggctgggagggctgaggcaggttaaagatttgagaggggctgctgtgtccacagctgcatcacactgctctgctgtcccctccatgttccccggcac

SEQ ID NO: 273190 - DNA, 201 bp, Homo sapiens
cttttctgcagaagagtgtgccccagcccttgctgggcacagatcaaagaggtgttcatgggtcgaaatcacagatttcaagggctgataggagtcagagkgggggggctgggagggctgaggcaggttaaagatttgagaggggctgctgtgtccacagctgcatcacactgctctgctgtcccctccatgttccccggc

SEQ ID NO: 273191 - DNA, 201 bp, Homo sapiens; identical to SEQ ID NO: 249499

SEQ ID NO: 273192 - DNA, 201 bp, Homo sapiens; identical to SEQ ID NO: 249500

SEQ ID NO: 273193 - DNA, 201 bp, Homo sapiens; identical to SEQ ID NO: 249501

SEQ ID NO: 273194 - DNA, 201 bp, Homo sapiens; identical to SEQ ID NO: 249502

SEQ ID NO: 273195 - DNA, 201 bp, Homo sapiens; identical to SEQ ID NO: 249503

SEQ ID NO: 273196 - DNA, 201 bp, Homo sapiens; identical to SEQ ID NO: 249504

SEQ ID NO: 273197 - DNA, 201 bp, Homo sapiens; identical to SEQ ID NO: 249505

SEQ ID NO: 273198 - DNA, 201 bp, Homo sapiens; identical to SEQ ID NO: 249506

SEQ ID NO: 273199 - DNA, 201 bp, Homo sapiens; identical to SEQ ID NO: 249507

SEQ ID NO: 273200 - DNA, 201 bp, Homo sapiens; identical to SEQ ID NO: 249508

SEQ ID NO: 273201 - DNA, 201 bp, Homo sapiens; identical to SEQ ID NO: 249509

SEQ ID NO: 273202 - DNA, 201 bp, Homo sapiens; identical to SEQ ID NO: 249510

SEQ ID NO: 273203 - DNA, 201 bp, Homo sapiens; identical to SEQ ID NO: 249511

SEQ ID NO: 273204 - DNA, 201 bp, Homo sapiens; identical to SEQ ID NO: 249512

SEQ ID NO: 273205 - DNA, 201 bp, Homo sapiens; identical to SEQ ID NO: 249513

SEQ ID NO: 273206 - DNA, 201 bp, Homo sapiens; identical to SEQ ID NO: 249514

SEQ ID NO: 273207 - DNA, 201 bp, Homo sapiens; identical to SEQ ID NO: 249515

SEQ ID NO: 273208 - DNA, 201 bp, Homo sapiens; identical to SEQ ID NO: 249516

SEQ ID NO: 273209 - DNA, 201 bp, Homo sapiens; identical to SEQ ID NO: 249517

SEQ ID NO: 273210 - DNA, 201 bp, Homo sapiens; identical to SEQ ID NO: 249518

SEQ ID NO: 273211 - DNA, 201 bp, Homo sapiens; identical to SEQ ID NO: 249519

SEQ ID NO: 273212 - DNA, 201 bp, Homo sapiens; identical to SEQ ID NO: 249520

SEQ ID NO: 273213 - DNA, 201 bp, Homo sapiens; identical to SEQ ID NO: 249521

SEQ ID NO: 273214 - DNA, 201 bp, Homo sapiens; identical to SEQ ID NO: 249522

SEQ ID NO: 273215 - DNA, 201 bp, Homo sapiens; identical to SEQ ID NO: 249523

SEQ ID NO: 273216 - DNA, 201 bp, Homo sapiens; identical to SEQ ID NO: 249524

SEQ ID NO: 273217 - DNA, 201 bp, Homo sapiens
aacaggagagccccaaacaggaaggaccagggcccttcccctcccctccatgctgcccaccctctgaggagcagtggccaagttcctctctgggcttctcrggccaggctgaccctgtcccccagggcctcccacgaagcatgggagctgttccctcacaggcagcacagacccggacggacacctgtccctatgtcccag

SEQ ID NO: 273218 - DNA, 201 bp, Homo sapiens; identical to SEQ ID NO: 249525

SEQ ID NO: 273219 - DNA, 201 bp, Homo sapiens; identical to SEQ ID NO: 249526

SEQ ID NO: 273220 - DNA, 201 bp, Homo sapiens; identical to SEQ ID NO: 249527

SEQ ID NO: 273221 - DNA, 201 bp, Homo sapiens; identical to SEQ ID NO: 249528

SEQ ID NO: 273222 - DNA, 201 bp, Homo sapiens; identical to SEQ ID NO: 249529

SEQ ID NO: 273223 - DNA, 201 bp, Homo sapiens; identical to SEQ ID NO: 249530

SEQ ID NO: 273224 - DNA, 201 bp, Homo sapiens; identical to SEQ ID NO: 249531

SEQ ID NO: 273225 - DNA, 201 bp, Homo sapiens; identical to SEQ ID NO: 249532

SEQ ID NO: 273226 - DNA, 201 bp, Homo sapiens; identical to SEQ ID NO: 249533

SEQ ID NO: 273227 - DNA, 201 bp, Homo sapiens; identical to SEQ ID NO: 249534

SEQ ID NO: 273228 - DNA, 201 bp, Homo sapiens; identical to SEQ ID NO: 249535

SEQ ID NO: 273229 - DNA, 201 bp, Homo sapiens; identical to SEQ ID NO: 249536

SEQ ID NO: 273230 - DNA, 201 bp, Homo sapiens; identical to SEQ ID NO: 249537

SEQ ID NO: 273231 - DNA, 201 bp, Homo sapiens; identical to SEQ ID NO: 249538

SEQ ID NO: 273232 - DNA, 201 bp, Homo sapiens; identical to SEQ ID NO: 249539

SEQ ID NO: 273233 - DNA, 201 bp, Homo sapiens; identical to SEQ ID NO: 249540

SEQ ID NO: 273234 - DNA, 201 bp, Homo sapiens; identical to SEQ ID NO: 249542

SEQ ID NO: 273235 - DNA, 201 bp, Homo sapiens; identical to SEQ ID NO: 249541

SEQ ID NO: 273236 - DNA, 201 bp, Homo sapiens; identical to SEQ ID NO: 249543

SEQ ID NO: 273237 - DNA, 201 bp, Homo sapiens; identical to SEQ ID NO: 249544

SEQ ID NO: 273238 - DNA, 201 bp, Homo sapiens; identical to SEQ ID NO: 249545

SEQ ID NO: 273239 - DNA, 201 bp, Homo sapiens; identical to SEQ ID NO: 249546

SEQ ID NO: 273240 - DNA, 201 bp, Homo sapiens; identical to SEQ ID NO: 249547

SEQ ID NO: 273241 - DNA, 201 bp, Homo sapiens; identical to SEQ ID NO: 249548

SEQ ID NO: 273242 - DNA, 201 bp, Homo sapiens; identical to SEQ ID NO: 249549

SEQ ID NO: 273243 - DNA, 201 bp, Homo sapiens; identical to SEQ ID NO: 249550

SEQ ID NO: 273244 - DNA, 201 bp, Homo sapiens; identical to SEQ ID NO: 249551

SEQ ID NO: 273245 - DNA, 201 bp, Homo sapiens; identical to SEQ ID NO: 249552

SEQ ID NO: 273246 - DNA, 201 bp, Homo sapiens; identical to SEQ ID NO: 249553

SEQ ID NO: 273247 - DNA, 201 bp, Homo sapiens; identical to SEQ ID NO: 249554

SEQ ID NO: 273248 - DNA, 201 bp, Homo sapiens; identical to SEQ ID NO: 249555

SEQ ID NO: 273249 - DNA, 201 bp, Homo sapiens; identical to SEQ ID NO: 249556

SEQ ID NO: 273250 - DNA, 201 bp, Homo sapiens; identical to SEQ ID NO: 249557

SEQ ID NO: 273251 - DNA, 201 bp, Homo sapiens; identical to SEQ ID NO: 249558

SEQ ID NO: 273252 - DNA, 201 bp, Homo sapiens; identical to SEQ ID NO: 249559

SEQ ID NO: 273253 - DNA, 201 bp, Homo sapiens; identical to SEQ ID NO: 49031

SEQ ID NO: 273254 - DNA, 201 bp, Homo sapiens; identical to SEQ ID NO: 49032

SEQ ID NO: 273255 - DNA, 201 bp, Homo sapiens; identical to SEQ ID NO: 249561

SEQ ID NO: 273256 - DNA, 201 bp, Homo sapiens; identical to SEQ ID NO: 249563

SEQ ID NO: 273257 - DNA, 201 bp, Homo sapiens; identical to SEQ ID NO: 249564

SEQ ID NO: 273258 - DNA, 201 bp, Homo sapiens
taacaagctcatttgatctggttacagtgaattttcttcaaagaaacactcaatagggtcccttgtcagagtgcctcgcagcgacagtgactgggtactgytgcctttgtcctgccaccgtcagacggggctggctatgggaggcaaccaaagacatcccgcacctgccctgggagcctttccctcctccagggctcagcc

SEQ ID NO: 273259 - DNA, 201 bp, Homo sapiens
ttggggtggagaaggctgtggggtgctgccccagcccaggcagcctgactgtgagagccccaaacaggagagccccaaacaggaaggaccagggcccttcscctcccctccatgctgcccaccctctgaggagcagtggccaagttcctctctgggcttctcgggccaggctgaccctgtcccccagggcctcccacgaag

SEQ ID NO: 273260 - DNA, 201 bp, Homo sapiens; identical to SEQ ID NO: 249565

SEQ ID NO: 273261 - DNA, 201 bp, Homo sapiens; identical to SEQ ID NO: 249566

SEQ ID NO: 273262 - DNA, 201 bp, Homo sapiens; identical to SEQ ID NO: 249567

SEQ ID NO: 273263 - DNA, 201 bp, Homo sapiens; identical to SEQ ID NO: 249568

SEQ ID NO: 273264 - DNA, 201 bp, Homo sapiens; identical to SEQ ID NO: 249569

SEQ ID NO: 273265 - DNA, 201 bp, Homo sapiens; identical to SEQ ID NO: 249570

SEQ ID NO: 273266 - DNA, 201 bp, Homo sapiens; identical to SEQ ID NO: 249571

SEQ ID NO: 273267 - DNA, 201 bp, Homo sapiens; identical to SEQ ID NO: 249572

SEQ ID NO: 273268 - DNA, 201 bp, Homo sapiens; identical to SEQ ID NO: 249573

SEQ ID NO: 273269 - DNA, 201 bp, Homo sapiens
cccaaacaggaaggaccagggcccttcccctcccctccatgctgcccaccctctgaggagcagtggccaagttcctctctgggcttctcgggccaggctgrccctgtcccccagggcctcccacgaagcatgggagctgttccctcacaggcagcacagacccggacggacacctgtccctatgtcccagcgcccccaggc

SEQ ID NO: 273270 - DNA, 201 bp, Homo sapiens
cccccagggcctcccacgaagcatgggagctgttccctcacaggcagcacagacccggacggacacctgtccctatgtcccagcgcccccaggccccagtraggagtagccaggggggtgaacaagggggttcctgctgcctgggcttgtttgggaagcagatgctgggctcagagtttcttcagagagcctcaccttccg

SEQ ID NO: 273271 - DNA, 201 bp, Homo sapiens; identical to SEQ ID NO: 249574

SEQ ID NO: 273272 - DNA, 201 bp, Homo sapiens
ccggtgccgcgcattcacaggatggctctccatgggtccactggggcccagcctcttatgtggcccctcgctaaaaggactcaacagaaagagtgaccagrcaccgaccctcatctaaaggaggacttggccattccctgggctgtcccacagcacctgccggccagggcccgggcacagagcgagactgtcttttcctca

SEQ ID NO: 273273 - DNA, 201 bp, Homo sapiens; identical to SEQ ID NO: 249575

SEQ ID NO: 273274 - DNA, 201 bp, Homo sapiens
gaggacttggccattccctgggctgtcccacagcacctgccggccagggcccgggcacagagcgagactgtcttttcctcaaggagacaccgtgggggagrgagggagaggtagacaccaccaacctcattccatgaccagggcctggcgatgctcagaagccagtgagtgtgtccctgccctgaagggtcagtgctggcc

SEQ ID NO: 273275 - DNA, 201 bp, Homo sapiens; identical to SEQ ID NO: 249576

SEQ ID NO: 273276 - DNA, 201 bp, Homo sapiens
ctcaaggagacaccgtgggggagggagggagaggtagacaccaccaacctcattccatgaccagggcctggcgatgctcagaagccagtgagtgtgtcccwgccctgaagggtcagtgctggccccctggacctagggggaagatggtgcaggcagtggcccagcctgaggaaggagctgaagctctcaagagtttgcagc

SEQ ID NO: 273277 - DNA, 201 bp, Homo sapiens; identical to SEQ ID NO: 249577

SEQ ID NO: 273278 - DNA, 201 bp, Homo sapiens
tcaaggagacaccgtgggggagggagggagaggtagacaccaccaacctcattccatgaccagggcctggcgatgctcagaagccagtgagtgtgtccctrccctgaagggtcagtgctggccccctggacctagggggaagatggtgcaggcagtggcccagcctgaggaaggagctgaagctctcaagagtttgcagcc

SEQ ID NO: 273279 - DNA, 201 bp, Homo sapiens; identical to SEQ ID NO: 249578

SEQ ID NO: 273280 - DNA, 201 bp, Homo sapiens; identical to SEQ ID NO: 249579

SEQ ID NO: 273281 - DNA, 201 bp, Homo sapiens
gggttggattagtagtacatacagaatgatccacatgtgaagataagaccatgattggctccagagaaaacagcagtgcaagcaagaagaggtagctagtcacagtttacgatctggcaatagcgtttacacagtcatcaccatagaaatgccgagtcaggatctagtttactgcagaactctatcaggaggactggaaga

SEQ ID NO: 273282 - DNA, 201 bp, Homo sapiens
ggttggattagtagtacatacagaatgatccacatgtgaagataagaccatgattggctccagagaaaacagcagtgcaagcaagaagaggtagctagtcacagtttacgatctggcaatagcgtttacacagtcatcaccatagaaatgccgagtcaggatctagtttactgcagaactctatcaggaggactggaagat

SEQ ID NO: 273283 - DNA, 201 bp, Homo sapiens; identical to SEQ ID NO: 249580

SEQ ID NO: 273284 - DNA, 201 bp, Homo sapiens
actgtaaactctctttccgcctcttcaatcttgacaggccccagggctgctaagctaatatggcagaagggacactgtgccagttgcaggcccaggccttaagagactggcagcttcccctctctgtctctggaaacctacctgcccttctgtaaggaagcccaagcagctctggagaagcccttatggaggggcccactc

SEQ ID NO: 273285 - DNA, 201 bp, Homo sapiens; identical to SEQ ID NO: 249581

SEQ ID NO: 273286 - DNA, 201 bp, Homo sapiens
ctgtaaactctctttccgcctcttcaatcttgacaggccccagggctgctaagctaatatggcagaagggacactgtgccagttgcaggcccaggccttaagagactggcagcttcccctctctgtctctggaaacctacctgcccttctgtaaggaagcccaagcagctctggagaagcccttatggaggggcccactct

SEQ ID NO: 273287 - DNA, 201 bp, Homo sapiens; identical to SEQ ID NO: 249582

SEQ ID NO: 273288 - DNA, 201 bp, Homo sapiens; identical to SEQ ID NO: 249583

SEQ ID NO: 273289 - DNA, 201 bp, Homo sapiens; identical to SEQ ID NO: 249584

SEQ ID NO: 273290 - DNA, 201 bp, Homo sapiens; identical to SEQ ID NO: 249585

SEQ ID NO: 273291 - DNA, 201 bp, Homo sapiens; identical to SEQ ID NO: 249586

SEQ ID NO: 273292 - DNA, 201 bp, Homo sapiens; identical to SEQ ID NO: 249587

SEQ ID NO: 273293 - DNA, 201 bp, Homo sapiens; identical to SEQ ID NO: 249588

SEQ ID NO: 273294 - DNA, 201 bp, Homo sapiens; identical to SEQ ID NO: 249589

SEQ ID NO: 273295 - DNA, 201 bp, Homo sapiens; identical to SEQ ID NO: 249590

SEQ ID NO: 273296 - DNA, 201 bp, Homo sapiens; identical to SEQ ID NO: 249591

SEQ ID NO: 273297 - DNA, 201 bp, Homo sapiens
tgtaaactctctttccgcctcttcaatcttgacaggccccagggctgctaagctaatatggcagaagggacactgtgccagttgcaggcccaggccttaagagactggcagcttcccctctctgtctctggaaacctacctgcccttctgtaaggaagcccaagcagctctggagaagcccttatggaggggcccactctc

SEQ ID NO: 273298 - DNA, 201 bp, Homo sapiens; identical to SEQ ID NO: 249592

SEQ ID NO: 273299 - DNA, 201 bp, Homo sapiens; identical to SEQ ID NO: 249593

SEQ ID NO: 273300 - DNA, 201 bp, Homo sapiens; identical to SEQ ID NO: 249594

SEQ ID NO: 273301 - DNA, 201 bp, Homo sapiens; identical to SEQ ID NO: 249595

SEQ ID NO: 273302 - DNA, 201 bp, Homo sapiens; identical to SEQ ID NO: 249596

SEQ ID NO: 273303 - DNA, 201 bp, Homo sapiens; identical to SEQ ID NO: 249597

SEQ ID NO: 273304 - DNA, 201 bp, Homo sapiens; identical to SEQ ID NO: 249598

SEQ ID NO: 273305 - DNA, 201 bp, Homo sapiens; identical to SEQ ID NO: 249599

SEQ ID NO: 273306 - DNA, 201 bp, Homo sapiens; identical to SEQ ID NO: 249600

SEQ ID NO: 273307 - DNA, 201 bp, Homo sapiens; identical to SEQ ID NO: 249601

SEQ ID NO: 273308 - DNA, 201 bp, Homo sapiens; identical to SEQ ID NO: 249602

SEQ ID NO: 273309 - DNA, 201 bp, Homo sapiens; identical to SEQ ID NO: 249603

SEQ ID NO: 273310 - DNA, 201 bp, Homo sapiens; identical to SEQ ID NO: 249604

SEQ ID NO: 273311 - DNA, 201 bp, Homo sapiens; identical to SEQ ID NO: 249605

SEQ ID NO: 273312 - DNA, 201 bp, Homo sapiens; identical to SEQ ID NO: 249606

SEQ ID NO: 273313 - DNA, 201 bp, Homo sapiens; identical to SEQ ID NO: 249607

SEQ ID NO: 273314 - DNA, 201 bp, Homo sapiens; identical to SEQ ID NO: 249608

SEQ ID NO: 273315 - DNA, 201 bp, Homo sapiens; identical to SEQ ID NO: 249609

SEQ ID NO: 273316 - DNA, 201 bp, Homo sapiens; identical to SEQ ID NO: 249610

SEQ ID NO: 273317 - DNA, 201 bp, Homo sapiens; identical to SEQ ID NO: 249611

SEQ ID NO: 273318 - DNA, 201 bp, Homo sapiens; identical to SEQ ID NO: 249612

SEQ ID NO: 273319 - DNA, 201 bp, Homo sapiens; identical to SEQ ID NO: 249613

SEQ ID NO: 273320 - DNA, 201 bp, Homo sapiens; identical to SEQ ID NO: 249614

SEQ ID NO: 273321 - DNA, 201 bp, Homo sapiens; identical to SEQ ID NO: 249615

SEQ ID NO: 273322 - DNA, 201 bp, Homo sapiens; identical to SEQ ID NO: 249616

SEQ ID NO: 273323 - DNA, 201 bp, Homo sapiens; identical to SEQ ID NO: 249617

SEQ ID NO: 273324 - DNA, 201 bp, Homo sapiens; identical to SEQ ID NO: 249618

SEQ ID NO: 273325 - DNA, 201 bp, Homo sapiens; identical to SEQ ID NO: 249619

SEQ ID NO: 273326 - DNA, 201 bp, Homo sapiens; identical to SEQ ID NO: 249620

SEQ ID NO: 273327 - DNA, 201 bp, Homo sapiens; identical to SEQ ID NO: 249621

SEQ ID NO: 273328 - DNA, 201 bp, Homo sapiens; identical to SEQ ID NO: 249622

SEQ ID NO: 273329 - DNA, 201 bp, Homo sapiens; identical to SEQ ID NO: 249623

SEQ ID NO: 273330 - DNA, 201 bp, Homo sapiens; identical to SEQ ID NO: 249624

SEQ ID NO: 273331 - DNA, 201 bp, Homo sapiens; identical to SEQ ID NO: 249625

SEQ ID NO: 273332 - DNA, 201 bp, Homo sapiens; identical to SEQ ID NO: 249626

SEQ ID NO: 273333 - DNA, 201 bp, Homo sapiens; identical to SEQ ID NO: 249627

SEQ ID NO: 273334 - DNA, 201 bp, Homo sapiens; identical to SEQ ID NO: 249628

SEQ ID NO: 273335 - DNA, 201 bp, Homo sapiens; identical to SEQ ID NO: 249629

SEQ ID NO: 273336 - DNA, 201 bp, Homo sapiens; identical to SEQ ID NO: 249630

SEQ ID NO: 273337 - DNA, 201 bp, Homo sapiens; identical to SEQ ID NO: 249631

SEQ ID NO: 273338 - DNA, 201 bp, Homo sapiens; identical to SEQ ID NO: 249632

SEQ ID NO: 273339 - DNA, 201 bp, Homo sapiens; identical to SEQ ID NO: 249633

SEQ ID NO: 273340 - DNA, 201 bp, Homo sapiens; identical to SEQ ID NO: 249634

SEQ ID NO: 273341 - DNA, 201 bp, Homo sapiens; identical to SEQ ID NO: 249635

SEQ ID NO: 273342 - DNA, 201 bp, Homo sapiens; identical to SEQ ID NO: 249636

SEQ ID NO: 273343 - DNA, 201 bp, Homo sapiens; identical to SEQ ID NO: 249637

SEQ ID NO: 273344 - DNA, 201 bp, Homo sapiens; identical to SEQ ID NO: 249638

SEQ ID NO: 273345 - DNA, 201 bp, Homo sapiens; identical to SEQ ID NO: 249639

SEQ ID NO: 273346 - DNA, 201 bp, Homo sapiens; identical to SEQ ID NO: 249640

SEQ ID NO: 273347 - DNA, 201 bp, Homo sapiens; identical to SEQ ID NO: 249641

SEQ ID NO: 273348 - DNA, 201 bp, Homo sapiens; identical to SEQ ID NO: 249642

SEQ ID NO: 273349 - DNA, 201 bp, Homo sapiens; identical to SEQ ID NO: 249643

SEQ ID NO: 273350 - DNA, 201 bp, Homo sapiens; identical to SEQ ID NO: 249644

SEQ ID NO: 273351 - DNA, 201 bp, Homo sapiens; identical to SEQ ID NO: 249645

SEQ ID NO: 273352 - DNA, 201 bp, Homo sapiens; identical to SEQ ID NO: 249646

SEQ ID NO: 273353 - DNA, 201 bp, Homo sapiens; identical to SEQ ID NO: 249647

SEQ ID NO: 273354 - DNA, 201 bp, Homo sapiens; identical to SEQ ID NO: 249648

SEQ ID NO: 273355 - DNA, 201 bp, Homo sapiens; identical to SEQ ID NO: 249649

SEQ ID NO: 273356 - DNA, 201 bp, Homo sapiens; identical to SEQ ID NO: 249650

SEQ ID NO: 273357 - DNA, 201 bp, Homo sapiens; identical to SEQ ID NO: 249651

SEQ ID NO: 273358 - DNA, 201 bp, Homo sapiens; identical to SEQ ID NO: 249652

SEQ ID NO: 273359 - DNA, 201 bp, Homo sapiens; identical to SEQ ID NO: 249653

SEQ ID NO: 273360 - DNA, 201 bp, Homo sapiens; identical to SEQ ID NO: 249654

SEQ ID NO: 273361 - DNA, 201 bp, Homo sapiens; identical to SEQ ID NO: 249655

SEQ ID NO: 273362 - DNA, 201 bp, Homo sapiens; identical to SEQ ID NO: 249656

SEQ ID NO: 273363 - DNA, 201 bp, Homo sapiens; identical to SEQ ID NO: 249657

SEQ ID NO: 273364 - DNA, 201 bp, Homo sapiens; identical to SEQ ID NO: 249658

SEQ ID NO: 273365 - DNA, 201 bp, Homo sapiens; identical to SEQ ID NO: 249659

SEQ ID NO: 273366 - DNA, 201 bp, Homo sapiens; identical to SEQ ID NO: 249660

SEQ ID NO: 273367 - DNA, 201 bp, Homo sapiens; identical to SEQ ID NO: 249661

SEQ ID NO: 273368 - DNA, 201 bp, Homo sapiens; identical to SEQ ID NO: 249662

SEQ ID NO: 273369 - DNA, 201 bp, Homo sapiens; identical to SEQ ID NO: 249663

SEQ ID NO: 273370 - DNA, 201 bp, Homo sapiens; identical to SEQ ID NO: 249664

SEQ ID NO: 273371 - DNA, 201 bp, Homo sapiens; identical to SEQ ID NO: 249665

SEQ ID NO: 273372 - DNA, 201 bp, Homo sapiens; identical to SEQ ID NO: 249666

SEQ ID NO: 273373 - DNA, 201 bp, Homo sapiens; identical to SEQ ID NO: 249667

SEQ ID NO: 273374 - DNA, 201 bp, Homo sapiens; identical to SEQ ID NO: 249668

SEQ ID NO: 273375 - DNA, 201 bp, Homo sapiens; identical to SEQ ID NO: 249669

SEQ ID NO: 273376 - DNA, 201 bp, Homo sapiens; identical to SEQ ID NO: 249670

SEQ ID NO: 273377 - DNA, 201 bp, Homo sapiens; identical to SEQ ID NO: 249671

SEQ ID NO: 273378 - DNA, 201 bp, Homo sapiens; identical to SEQ ID NO: 249672

SEQ ID NO: 273379 - DNA, 201 bp, Homo sapiens; identical to SEQ ID NO: 249673

SEQ ID NO: 273380 - DNA, 201 bp, Homo sapiens; identical to SEQ ID NO: 249674

SEQ ID NO: 273381 - DNA, 201 bp, Homo sapiens; identical to SEQ ID NO: 249675

SEQ ID NO: 273382 - DNA, 201 bp, Homo sapiens; identical to SEQ ID NO: 249676

SEQ ID NO: 273383 - DNA, 201 bp, Homo sapiens; identical to SEQ ID NO: 249677

SEQ ID NO: 273384 - DNA, 201 bp, Homo sapiens; identical to SEQ ID NO: 249678

SEQ ID NO: 273385 - DNA, 201 bp, Homo sapiens; identical to SEQ ID NO: 249679

SEQ ID NO: 273386 - DNA, 201 bp, Homo sapiens; identical to SEQ ID NO: 249680

SEQ ID NO: 273387 - DNA, 201 bp, Homo sapiens; identical to SEQ ID NO: 249681

SEQ ID NO: 273388 - DNA, 201 bp, Homo sapiens; identical to SEQ ID NO: 249682

SEQ ID NO: 273389 - DNA, 201 bp, Homo sapiens; identical to SEQ ID NO: 249683

SEQ ID NO: 273390 - DNA, 201 bp, Homo sapiens; identical to SEQ ID NO: 249684

SEQ ID NO: 273391 - DNA, 201 bp, Homo sapiens; identical to SEQ ID NO: 249685

SEQ ID NO: 273392 - DNA, 201 bp, Homo sapiens; identical to SEQ ID NO: 249686

SEQ ID NO: 273393 - DNA, 201 bp, Homo sapiens; identical to SEQ ID NO: 249687

SEQ ID NO: 273394 - DNA, 201 bp, Homo sapiens; identical to SEQ ID NO: 249688

SEQ ID NO: 273395 - DNA, 201 bp, Homo sapiens; identical to SEQ ID NO: 249689

SEQ ID NO: 273396 - DNA, 201 bp, Homo sapiens; identical to SEQ ID NO: 249690

SEQ ID NO: 273397 - DNA, 201 bp, Homo sapiens; identical to SEQ ID NO: 249691

SEQ ID NO: 273398 - DNA, 201 bp, Homo sapiens; identical to SEQ ID NO: 249692

SEQ ID NO: 273399 - DNA, 201 bp, Homo sapiens; identical to SEQ ID NO: 249693

SEQ ID NO: 273400 - DNA, 201 bp, Homo sapiens; identical to SEQ ID NO: 249694

SEQ ID NO: 273401 - DNA, 201 bp, Homo sapiens; identical to SEQ ID NO: 249695

SEQ ID NO: 273402 - DNA, 201 bp, Homo sapiens; identical to SEQ ID NO: 249696

SEQ ID NO: 273403 - DNA, 201 bp, Homo sapiens; identical to SEQ ID NO: 249697

SEQ ID NO: 273404 - DNA, 201 bp, Homo sapiens; identical to SEQ ID NO: 249698

SEQ ID NO: 273405 - DNA, 201 bp, Homo sapiens; identical to SEQ ID NO: 249699

SEQ ID NO: 273406 - DNA, 201 bp, Homo sapiens; identical to SEQ ID NO: 49027

SEQ ID NO: 273407 - DNA, 201 bp, Homo sapiens; identical to SEQ ID NO: 249701

SEQ ID NO: 273408 - DNA, 201 bp, Homo sapiens; identical to SEQ ID NO: 249702

SEQ ID NO: 273409 - DNA, 201 bp, Homo sapiens; identical to SEQ ID NO: 249703

SEQ ID NO: 273410 - DNA, 201 bp, Homo sapiens; identical to SEQ ID NO: 249704

SEQ ID NO: 273411 - DNA, 201 bp, Homo sapiens; identical to SEQ ID NO: 249706

SEQ ID NO: 273412 - DNA, 201 bp, Homo sapiens; identical to SEQ ID NO: 249705

SEQ ID NO: 273413 - DNA, 201 bp, Homo sapiens; identical to SEQ ID NO: 249707

SEQ ID NO: 273414 - DNA, 201 bp, Homo sapiens; identical to SEQ ID NO: 249708

SEQ ID NO: 273415 - DNA, 201 bp, Homo sapiens; identical to SEQ ID NO: 249709

SEQ ID NO: 273416 - DNA, 201 bp, Homo sapiens; identical to SEQ ID NO: 249710

SEQ ID NO: 273417 - DNA, 201 bp, Homo sapiens; identical to SEQ ID NO: 249711

SEQ ID NO: 273418 - DNA, 201 bp, Homo sapiens; identical to SEQ ID NO: 249712

SEQ ID NO: 273419 - DNA, 201 bp, Homo sapiens; identical to SEQ ID NO: 249713

SEQ ID NO: 273420 - DNA, 201 bp, Homo sapiens; identical to SEQ ID NO: 249714

SEQ ID NO: 273421 - DNA, 201 bp, Homo sapiens; identical to SEQ ID NO: 249715

SEQ ID NO: 273422 - DNA, 201 bp, Homo sapiens; identical to SEQ ID NO: 249716

SEQ ID NO: 273423 - DNA, 201 bp, Homo sapiens; identical to SEQ ID NO: 249717

SEQ ID NO: 273424 - DNA, 201 bp, Homo sapiens; identical to SEQ ID NO: 249718

SEQ ID NO: 273425 - DNA, 201 bp, Homo sapiens; identical to SEQ ID NO: 249719

SEQ ID NO: 273426 - DNA, 201 bp, Homo sapiens; identical to SEQ ID NO: 249720

SEQ ID NO: 273427 - DNA, 201 bp, Homo sapiens; identical to SEQ ID NO: 249721

SEQ ID NO: 273428 - DNA, 201 bp, Homo sapiens; identical to SEQ ID NO: 249722

SEQ ID NO: 273429 - DNA, 201 bp, Homo sapiens; identical to SEQ ID NO: 249723

SEQ ID NO: 273430 - DNA, 201 bp, Homo sapiens; identical to SEQ ID NO: 249724

SEQ ID NO: 273431 - DNA, 201 bp, Homo sapiens; identical to SEQ ID NO: 249725

SEQ ID NO: 273432 - DNA, 201 bp, Homo sapiens
ttgactagctgcaggcaaatatgaagaggctatttcctgtcacaaaaaggccatgctgtatctttctgaagctatggagctgacgcaggctgagtaggctsacctttcactggaattgcaaaggcctagccacatgaaaccgcgcctcctcatccaggagacacggaaaagggcccagcagaacgcagacaaggatggggc

SEQ ID NO: 273433 - DNA, 201 bp, Homo sapiens; identical to SEQ ID NO: 249726

SEQ ID NO: 273434 - DNA, 201 bp, Homo sapiens; identical to SEQ ID NO: 249727

SEQ ID NO: 273435 - DNA, 201 bp, Homo sapiens; identical to SEQ ID NO: 249728

SEQ ID NO: 273436 - DNA, 201 bp, Homo sapiens; identical to SEQ ID NO: 249729

SEQ ID NO: 273437 - DNA, 201 bp, Homo sapiens; identical to SEQ ID NO: 249730

SEQ ID NO: 273438 - DNA, 201 bp, Homo sapiens; identical to SEQ ID NO: 249731

SEQ ID NO: 273439 - DNA, 201 bp, Homo sapiens; identical to SEQ ID NO: 249733

SEQ ID NO: 273440 - DNA, 201 bp, Homo sapiens; identical to SEQ ID NO: 249732

SEQ ID NO: 273441 - DNA, 201 bp, Homo sapiens; identical to SEQ ID NO: 249734

SEQ ID NO: 273442 - DNA, 201 bp, Homo sapiens; identical to SEQ ID NO: 249735

SEQ ID NO: 273443 - DNA, 201 bp, Homo sapiens; identical to SEQ ID NO: 249736

SEQ ID NO: 273444 - DNA, 201 bp, Homo sapiens; identical to SEQ ID NO: 249737

SEQ ID NO: 273445 - DNA, 201 bp, Homo sapiens; identical to SEQ ID NO: 249738

SEQ ID NO: 273446 - DNA, 201 bp, Homo sapiens; identical to SEQ ID NO: 249739

SEQ ID NO: 273447 - DNA, 201 bp, Homo sapiens; identical to SEQ ID NO: 249740

SEQ ID NO: 273448 - DNA, 201 bp, Homo sapiens; identical to SEQ ID NO: 249741

SEQ ID NO: 273449 - DNA, 201 bp, Homo sapiens; identical to SEQ ID NO: 249742

SEQ ID NO: 273450 - DNA, 201 bp, Homo sapiens; identical to SEQ ID NO: 249743

SEQ ID NO: 273451 - DNA, 201 bp, Homo sapiens; identical to SEQ ID NO: 249744

SEQ ID NO: 273452 - DNA, 201 bp, Homo sapiens; identical to SEQ ID NO: 249745

SEQ ID NO: 273453 - DNA, 201 bp, Homo sapiens; identical to SEQ ID NO: 249746

SEQ ID NO: 273454 - DNA, 201 bp, Homo sapiens; identical to SEQ ID NO: 249747

SEQ ID NO: 273455 - DNA, 201 bp, Homo sapiens; identical to SEQ ID NO: 249748

SEQ ID NO: 273456 - DNA, 201 bp, Homo sapiens; identical to SEQ ID NO: 249749

SEQ ID NO: 273457 - DNA, 201 bp, Homo sapiens; identical to SEQ ID NO: 249750

SEQ ID NO: 273458 - DNA, 201 bp, Homo sapiens; identical to SEQ ID NO: 249751
  misc_feature (1)...(201): n = A,T,C or G

SEQ ID NO: 273459 - DNA, 201 bp, Homo sapiens; identical to SEQ ID NO: 249752

SEQ ID NO: 273460 - DNA, 201 bp, Homo sapiens; identical to SEQ ID NO: 249753

SEQ ID NO: 273461 - DNA, 201 bp, Homo sapiens; identical to SEQ ID NO: 249754

SEQ ID NO: 273462 - DNA, 201 bp, Homo sapiens; identical to SEQ ID NO: 249755

SEQ ID NO: 273463 - DNA, 201 bp, Homo sapiens; identical to SEQ ID NO: 249756

SEQ ID NO: 273464 - DNA, 201 bp, Homo sapiens; identical to SEQ ID NO: 249757

SEQ ID NO: 273465 - DNA, 201 bp, Homo sapiens; identical to SEQ ID NO: 249758

SEQ ID NO: 273466 - DNA, 201 bp, Homo sapiens; identical to SEQ ID NO: 249759

SEQ ID NO: 273467 - DNA, 201 bp, Homo sapiens; identical to SEQ ID NO: 249760

SEQ ID NO: 273468 - DNA, 201 bp, Homo sapiens; identical to SEQ ID NO: 249761

SEQ ID NO: 273469 - DNA, 201 bp, Homo sapiens; identical to SEQ ID NO: 249762

SEQ ID NO: 273470 - DNA, 201 bp, Homo sapiens; identical to SEQ ID NO: 249763

SEQ ID NO: 273471 - DNA, 201 bp, Homo sapiens; identical to SEQ ID NO: 249764

SEQ ID NO: 273472 - DNA, 201 bp, Homo sapiens; identical to SEQ ID NO: 249765

SEQ ID NO: 273473 - DNA, 201 bp, Homo sapiens; identical to SEQ ID NO: 249766

SEQ ID NO: 273474 - DNA, 201 bp, Homo sapiens; identical to SEQ ID NO: 249767

SEQ ID NO: 273475 - DNA, 201 bp, Homo sapiens; identical to SEQ ID NO: 249768

SEQ ID NO: 273476 - DNA, 201 bp, Homo sapiens; identical to SEQ ID NO: 249769

SEQ ID NO: 273477 - DNA, 201 bp, Homo sapiens; identical to SEQ ID NO: 249770

SEQ ID NO: 273478 - DNA, 201 bp, Homo sapiens; identical to SEQ ID NO: 249771

SEQ ID NO: 273479 - DNA, 201 bp, Homo sapiens; identical to SEQ ID NO: 249772

SEQ ID NO: 273480 - DNA, 201 bp, Homo sapiens; identical to SEQ ID NO: 249773

SEQ ID NO: 273481 - DNA, 201 bp, Homo sapiens; identical to SEQ ID NO: 249774

SEQ ID NO: 273482 - DNA, 201 bp, Homo sapiens; identical to SEQ ID NO: 249775

SEQ ID NO: 273483 - DNA, 201 bp, Homo sapiens; identical to SEQ ID NO: 249776

SEQ ID NO: 273484 - DNA, 201 bp, Homo sapiens; identical to SEQ ID NO: 249777

SEQ ID NO: 273485 - DNA, 201 bp, Homo sapiens; identical to SEQ ID NO: 249778

SEQ ID NO: 273486 - DNA, 201 bp, Homo sapiens; identical to SEQ ID NO: 249779

SEQ ID NO: 273487 - DNA, 201 bp, Homo sapiens; identical to SEQ ID NO: 49030

SEQ ID NO: 273488 - DNA, 201 bp, Homo sapiens; identical to SEQ ID NO: 249781

SEQ ID NO: 273489 - DNA, 201 bp, Homo sapiens; identical to SEQ ID NO: 249782

SEQ ID NO: 273490 - DNA, 201 bp, Homo sapiens; identical to SEQ ID NO: 249783

SEQ ID NO: 273491 - DNA, 201 bp, Homo sapiens; identical to SEQ ID NO: 249784

SEQ ID NO: 273492 - DNA, 201 bp, Homo sapiens; identical to SEQ ID NO: 249785

SEQ ID NO: 273493 - DNA, 201 bp, Homo sapiens; identical to SEQ ID NO: 249786

SEQ ID NO: 273494 - DNA, 201 bp, Homo sapiens; identical to SEQ ID NO: 249787

SEQ ID NO: 273495 - DNA, 201 bp, Homo sapiens; identical to SEQ ID NO: 249788

SEQ ID NO: 273496 - DNA, 201 bp, Homo sapiens; identical to SEQ ID NO: 249789

SEQ ID NO: 273497 - DNA, 201 bp, Homo sapiens; identical to SEQ ID NO: 249790

SEQ ID NO: 273498 - DNA, 201 bp, Homo sapiens; identical to SEQ ID NO: 249791

SEQ ID NO: 273499 - DNA, 201 bp, Homo sapiens; identical to SEQ ID NO: 249792

SEQ ID NO: 273500 - DNA, 201 bp, Homo sapiens; identical to SEQ ID NO: 249793

SEQ ID NO: 273501 - DNA, 201 bp, Homo sapiens; identical to SEQ ID NO: 249794

SEQ ID NO: 273502 - DNA, 201 bp, Homo sapiens; identical to SEQ ID NO: 249795

SEQ ID NO: 273503 - DNA, 201 bp, Homo sapiens; identical to SEQ ID NO: 249796

SEQ ID NO: 273504 - DNA, 201 bp, Homo sapiens; identical to SEQ ID NO: 249797

SEQ ID NO: 273505 - DNA, 201 bp, Homo sapiens; identical to SEQ ID NO: 249798

SEQ ID NO: 273506 - DNA, 201 bp, Homo sapiens
cggagagtgcagagtagcgcgctcctgctgtcactccctcctccaagtccacaaagaggcaagaaagggaggattttaaggcctatccataccgcatggcrggtgagagcagaggagcaaacagcacttttggatcctggaaagcagaaggtgagtgtcccaggcgtagctgacctgagaaaggcgactccaaagccagca

SEQ ID NO: 273507 - DNA, 201 bp, Homo sapiens; identical to SEQ ID NO: 249799

SEQ ID NO: 273508 - DNA, 201 bp, Homo sapiens; identical to SEQ ID NO: 249800

SEQ ID NO: 273509 - DNA, 201 bp, Homo sapiens; identical to SEQ ID NO: 249801

SEQ ID NO: 273510 - DNA, 201 bp, Homo sapiens; identical to SEQ ID NO: 249802

SEQ ID NO: 273511 - DNA, 201 bp, Homo sapiens; identical to SEQ ID NO: 249803

SEQ ID NO: 273512 - DNA, 201 bp, Homo sapiens; identical to SEQ ID NO: 249804

SEQ ID NO: 273513 - DNA, 201 bp, Homo sapiens; identical to SEQ ID NO: 249805

SEQ ID NO: 273514 - DNA, 201 bp, Homo sapiens; identical to SEQ ID NO: 249806

SEQ ID NO: 273515 - DNA, 201 bp, Homo sapiens; identical to SEQ ID NO: 249807

SEQ ID NO: 273516 - DNA, 201 bp, Homo sapiens; identical to SEQ ID NO: 249808

SEQ ID NO: 273517 - DNA, 201 bp, Homo sapiens; identical to SEQ ID NO: 249809

SEQ ID NO: 273518 - DNA, 201 bp, Homo sapiens; identical to SEQ ID NO: 249810

SEQ ID NO: 273519 - DNA, 201 bp, Homo sapiens; identical to SEQ ID NO: 249811

SEQ ID NO: 273520 - DNA, 201 bp, Homo sapiens; identical to SEQ ID NO: 249812

SEQ ID NO: 273521 - DNA, 201 bp, Homo sapiens; identical to SEQ ID NO: 249813

SEQ ID NO: 273522 - DNA, 201 bp, Homo sapiens; identical to SEQ ID NO: 249814

SEQ ID NO: 273523 - DNA, 201 bp, Homo sapiens; identical to SEQ ID NO: 249815

SEQ ID NO: 273524 - DNA, 201 bp, Homo sapiens; identical to SEQ ID NO: 249816

SEQ ID NO: 273525 - DNA, 201 bp, Homo sapiens; identical to SEQ ID NO: 249817

SEQ ID NO: 273526 - DNA, 201 bp, Homo sapiens; identical to SEQ ID NO: 249818

SEQ ID NO: 273527 - DNA, 201 bp, Homo sapiens; identical to SEQ ID NO: 249819

SEQ ID NO: 273528 - DNA, 201 bp, Homo sapiens; identical to SEQ ID NO: 249820

SEQ ID NO: 273529 - DNA, 201 bp, Homo sapiens; identical to SEQ ID NO: 249821

SEQ ID NO: 273530 - DNA, 201 bp, Homo sapiens; identical to SEQ ID NO: 249822

SEQ ID NO: 273531 - DNA, 201 bp, Homo sapiens; identical to SEQ ID NO: 249823

SEQ ID NO: 273532 - DNA, 201 bp, Homo sapiens; identical to SEQ ID NO: 249824

SEQ ID NO: 273533 - DNA, 201 bp, Homo sapiens; identical to SEQ ID NO: 249825

SEQ ID NO: 273534 - DNA, 201 bp, Homo sapiens; identical to SEQ ID NO: 249826

SEQ ID NO: 273535 - DNA, 201 bp, Homo sapiens; identical to SEQ ID NO: 249827

SEQ ID NO: 273536 - DNA, 201 bp, Homo sapiens; identical to SEQ ID NO: 249828

SEQ ID NO: 273537 - DNA, 201 bp, Homo sapiens; identical to SEQ ID NO: 249829

SEQ ID NO: 273538 - DNA, 201 bp, Homo sapiens; identical to SEQ ID NO: 249830

SEQ ID NO: 273539 - DNA, 201 bp, Homo sapiens; identical to SEQ ID NO: 249831

SEQ ID NO: 273540 - DNA, 201 bp, Homo sapiens; identical to SEQ ID NO: 249832

SEQ ID NO: 273541 - DNA, 201 bp, Homo sapiens; identical to SEQ ID NO: 249833

SEQ ID NO: 273542 - DNA, 201 bp, Homo sapiens; identical to SEQ ID NO: 249834

SEQ ID NO: 273543 - DNA, 201 bp, Homo sapiens; identical to SEQ ID NO: 249835

SEQ ID NO: 273544 - DNA, 201 bp, Homo sapiens; identical to SEQ ID NO: 249836

SEQ ID NO: 273545 - DNA, 201 bp, Homo sapiens; identical to SEQ ID NO: 249837

SEQ ID NO: 273546 - DNA, 201 bp, Homo sapiens; identical to SEQ ID NO: 249838

SEQ ID NO: 273547 - DNA, 201 bp, Homo sapiens; identical to SEQ ID NO: 249839

SEQ ID NO: 273548 - DNA, 201 bp, Homo sapiens; identical to SEQ ID NO: 249840

SEQ ID NO: 273549 - DNA, 201 bp, Homo sapiens; identical to SEQ ID NO: 249841

SEQ ID NO: 273550 - DNA, 201 bp, Homo sapiens; identical to SEQ ID NO: 249842

SEQ ID NO: 273551 - DNA, 201 bp, Homo sapiens; identical to SEQ ID NO: 249843

SEQ ID NO: 273552 - DNA, 201 bp, Homo sapiens; identical to SEQ ID NO: 249844

SEQ ID NO: 273553 - DNA, 201 bp, Homo sapiens; identical to SEQ ID NO: 249845

SEQ ID NO: 273554 - DNA, 201 bp, Homo sapiens; identical to SEQ ID NO: 249846

SEQ ID NO: 273555 - DNA, 201 bp, Homo sapiens; identical to SEQ ID NO: 249847

SEQ ID NO: 273556 - DNA, 201 bp, Homo sapiens; identical to SEQ ID NO: 249848

SEQ ID NO: 273557 - DNA, 201 bp, Homo sapiens; identical to SEQ ID NO: 249849

SEQ ID NO: 273558 - DNA, 201 bp, Homo sapiens; identical to SEQ ID NO: 249850

SEQ ID NO: 273559 - DNA, 201 bp, Homo sapiens; identical to SEQ ID NO: 249851

SEQ ID NO: 273560 - DNA, 201 bp, Homo sapiens; identical to SEQ ID NO: 249852

SEQ ID NO: 273561 - DNA, 201 bp, Homo sapiens; identical to SEQ ID NO: 249853

SEQ ID NO: 273562 - DNA, 201 bp, Homo sapiens; identical to SEQ ID NO: 249854

SEQ ID NO: 273563 - DNA, 201 bp, Homo sapiens; identical to SEQ ID NO: 249855

SEQ ID NO: 273564 - DNA, 201 bp, Homo sapiens; identical to SEQ ID NO: 249856

SEQ ID NO: 273565 - DNA, 201 bp, Homo sapiens; identical to SEQ ID NO: 249857

SEQ ID NO: 273566 - DNA, 201 bp, Homo sapiens; identical to SEQ ID NO: 249858

SEQ ID NO: 273567 - DNA, 201 bp, Homo sapiens; identical to SEQ ID NO: 249859

SEQ ID NO: 273568 - DNA, 201 bp, Homo sapiens; identical to SEQ ID NO: 249860

SEQ ID NO: 273569 - DNA, 201 bp, Homo sapiens; identical to SEQ ID NO: 249861

SEQ ID NO: 273570 - DNA, 201 bp, Homo sapiens; identical to SEQ ID NO: 249862

SEQ ID NO: 273571 - DNA, 201 bp, Homo sapiens; identical to SEQ ID NO: 249863

SEQ ID NO: 273572 - DNA, 201 bp, Homo sapiens; identical to SEQ ID NO: 249864

SEQ ID NO: 273573 - DNA, 201 bp, Homo sapiens; identical to SEQ ID NO: 249866

SEQ ID NO: 273574 - DNA, 201 bp, Homo sapiens; identical to SEQ ID NO: 249865

SEQ ID NO: 273575 - DNA, 201 bp, Homo sapiens; identical to SEQ ID NO: 249867

SEQ ID NO: 273576 - DNA, 201 bp, Homo sapiens; identical to SEQ ID NO: 249868

SEQ ID NO: 273577 - DNA, 201 bp, Homo sapiens
aggccaggtcaggggagctggagcctggctaggtatggagagagcagggtacacttgctgcaactgtgagaagagccaggggtggccctggtggcctgggygcgtttagctgtgcctggggccaggcctgactggctgcaagtcattactataggcggagagtgcagagtagcgcgctcctgctgtcactccctcctccaa

SEQ ID NO: 273578 - DNA, 201 bp, Homo sapiens; identical to SEQ ID NO: 249869

SEQ ID NO: 273579 - DNA, 201 bp, Homo sapiens; identical to SEQ ID NO: 249870

SEQ ID NO: 273580 - DNA, 201 bp, Homo sapiens; identical to SEQ ID NO: 249871

SEQ ID NO: 273581 - DNA, 201 bp, Homo sapiens
ggccccatggtgagcacatgcagccgaagtgacaggttgggctcctttgtgggacaagagcctctccaggccactgcagggtgttcagagaacaaggcctrcaaggatctgctgtgcctgcagctgggcagtagaacactgagcatgcagggccggggtgggaagcaggaaagccacatggacgagagagccgggcctgcc

SEQ ID NO: 273582 - DNA, 201 bp, Homo sapiens; identical to SEQ ID NO: 249872

SEQ ID NO: 273583 - DNA, 201 bp, Homo sapiens; identical to SEQ ID NO: 249873

SEQ ID NO: 273584 - DNA, 201 bp, Homo sapiens; identical to SEQ ID NO: 249874

SEQ ID NO: 273585 - DNA, 201 bp, Homo sapiens; identical to SEQ ID NO: 249875

SEQ ID NO: 273586 - DNA, 201 bp, Homo sapiens; identical to SEQ ID NO: 249877

SEQ ID NO: 273587 - DNA, 201 bp, Homo sapiens; identical to SEQ ID NO: 249876

SEQ ID NO: 273588 - DNA, 201 bp, Homo sapiens; identical to SEQ ID NO: 249879

SEQ ID NO: 273589 - DNA, 201 bp, Homo sapiens; identical to SEQ ID NO: 249878

SEQ ID NO: 273590 - DNA, 201 bp, Homo sapiens; identical to SEQ ID NO: 249880

SEQ ID NO: 273591 - DNA, 201 bp, Homo sapiens; identical to SEQ ID NO: 249881

SEQ ID NO: 273592 - DNA, 201 bp, Homo sapiens; identical to SEQ ID NO: 249882

SEQ ID NO: 273593 - DNA, 201 bp, Homo sapiens; identical to SEQ ID NO: 249883

SEQ ID NO: 273594 - DNA, 201 bp, Homo sapiens; identical to SEQ ID NO: 249886

SEQ ID NO: 273595 - DNA, 201 bp, Homo sapiens; identical to SEQ ID NO: 249884

SEQ ID NO: 273596 - DNA, 201 bp, Homo sapiens; identical to SEQ ID NO: 249885

SEQ ID NO: 273597 - DNA, 201 bp, Homo sapiens; identical to SEQ ID NO: 249890

SEQ ID NO: 273598 - DNA, 201 bp, Homo sapiens; identical to SEQ ID NO: 249887

SEQ ID NO: 273599 - DNA, 201 bp, Homo sapiens; identical to SEQ ID NO: 249888

SEQ ID NO: 273600 - DNA, 201 bp, Homo sapiens; identical to SEQ ID NO: 249889

SEQ ID NO: 273601 - DNA, 201 bp, Homo sapiens; identical to SEQ ID NO: 249894

SEQ ID NO: 273602 - DNA, 201 bp, Homo sapiens; identical to SEQ ID NO: 249891

SEQ ID NO: 273603 - DNA, 201 bp, Homo sapiens; identical to SEQ ID NO: 249892

SEQ ID NO: 273604 - DNA, 201 bp, Homo sapiens; identical to SEQ ID NO: 249893

SEQ ID NO: 273605 - DNA, 201 bp, Homo sapiens; identical to SEQ ID NO: 249896

SEQ ID NO: 273606 - DNA, 201 bp, Homo sapiens; identical to SEQ ID NO: 249897

SEQ ID NO: 273607 - DNA, 201 bp, Homo sapiens; identical to SEQ ID NO: 249899

SEQ ID NO: 273608 - DNA, 201 bp, Homo sapiens; identical to SEQ ID NO: 249900

SEQ ID NO: 273609 - DNA, 201 bp, Homo sapiens; identical to SEQ ID NO: 249901

SEQ ID NO: 273610 - DNA, 201 bp, Homo sapiens; identical to SEQ ID NO: 249902

SEQ ID NO: 273611 - DNA, 201 bp, Homo sapiens; identical to SEQ ID NO: 249903

SEQ ID NO: 273612 - DNA, 201 bp, Homo sapiens; identical to SEQ ID NO: 249904

SEQ ID NO: 273613 - DNA, 201 bp, Homo sapiens; identical to SEQ ID NO: 249906

SEQ ID NO: 273614 - DNA, 201 bp, Homo sapiens; identical to SEQ ID NO: 249907

SEQ ID NO: 273615 - DNA, 201 bp, Homo sapiens; identical to SEQ ID NO: 249908

SEQ ID NO: 273616 - DNA, 201 bp, Homo sapiens; identical to SEQ ID NO: 249909

SEQ ID NO: 273617 - DNA, 201 bp, Homo sapiens; identical to SEQ ID NO: 249911

SEQ ID NO: 273618 - DNA, 201 bp, Homo sapiens; identical to SEQ ID NO: 249910

SEQ ID NO: 273619 - DNA, 201 bp, Homo sapiens; identical to SEQ ID NO: 249913

SEQ ID NO: 273620 - DNA, 201 bp, Homo sapiens; identical to SEQ ID NO: 249912

SEQ ID NO: 273621 - DNA, 201 bp, Homo sapiens; identical to SEQ ID NO: 249915

SEQ ID NO: 273622 - DNA, 201 bp, Homo sapiens; identical to SEQ ID NO: 249914

SEQ ID NO: 273623 - DNA, 201 bp, Homo sapiens; identical to SEQ ID NO: 249918

SEQ ID NO: 273624 - DNA, 201 bp, Homo sapiens; identical to SEQ ID NO: 249917

SEQ ID NO: 273625 - DNA, 201 bp, Homo sapiens; identical to SEQ ID NO: 249916

SEQ ID NO: 273626 - DNA, 201 bp, Homo sapiens; identical to SEQ ID NO: 249920

SEQ ID NO: 273627 - DNA, 201 bp, Homo sapiens; identical to SEQ ID NO: 249919

SEQ ID NO: 273628 - DNA, 201 bp, Homo sapiens; identical to SEQ ID NO: 249921

SEQ ID NO: 273629 - DNA, 201 bp, Homo sapiens; identical to SEQ ID NO: 249925

SEQ ID NO: 273630 - DNA, 201 bp, Homo sapiens; identical to SEQ ID NO: 249924

SEQ ID NO: 273631 - DNA, 201 bp, Homo sapiens; identical to SEQ ID NO: 249923

SEQ ID NO: 273632 - DNA, 201 bp, Homo sapiens; identical to SEQ ID NO: 249927

SEQ ID NO: 273633 - DNA, 201 bp, Homo sapiens; identical to SEQ ID NO: 249926

SEQ ID NO: 273634 - DNA, 201 bp, Homo sapiens; identical to SEQ ID NO: 249929

SEQ ID NO: 273635 - DNA, 201 bp, Homo sapiens; identical to SEQ ID NO: 249928

SEQ ID NO: 273636 - DNA, 201 bp, Homo sapiens; identical to SEQ ID NO: 249930

SEQ ID NO: 273637 - DNA, 201 bp, Homo sapiens; identical to SEQ ID NO: 249931

SEQ ID NO: 273638 - DNA, 201 bp, Homo sapiens; identical to SEQ ID NO: 249932

SEQ ID NO: 273639 - DNA, 201 bp, Homo sapiens; identical to SEQ ID NO: 249933

SEQ ID NO: 273640 - DNA, 201 bp, Homo sapiens; identical to SEQ ID NO: 249934

SEQ ID NO: 273641 - DNA, 201 bp, Homo sapiens; identical to SEQ ID NO: 249935

SEQ ID NO: 273642 - DNA, 201 bp, Homo sapiens; identical to SEQ ID NO: 249936

SEQ ID NO: 273643 - DNA, 201 bp, Homo sapiens; identical to SEQ ID NO: 249937

SEQ ID NO: 273644 - DNA, 201 bp, Homo sapiens; identical to SEQ ID NO: 249938

SEQ ID NO: 273645 - DNA, 201 bp, Homo sapiens; identical to SEQ ID NO: 249939

SEQ ID NO: 273646 - DNA, 201 bp, Homo sapiens
gcaactgtgagaagagccaggggtggccctggtggcctgggcgcgtttagctgtgcctggggccaggcctgactggctgcaagtcattactataggcggaragtgcagagtagcgcgctcctgctgtcactccctcctccaagtccacaaagaggcaagaaagggaggattttaaggcctatccataccgcatggcaggtg

SEQ ID NO: 273647 - DNA, 201 bp, Homo sapiens; identical to SEQ ID NO: 249940

SEQ ID NO: 273648 - DNA, 201 bp, Homo sapiens; identical to SEQ ID NO: 249941

SEQ ID NO: 273649 - DNA, 201 bp, Homo sapiens; identical to SEQ ID NO: 249942

SEQ ID NO: 273650 - DNA, 201 bp, Homo sapiens; identical to SEQ ID NO: 249943

SEQ ID NO: 273651 - DNA, 201 bp, Homo sapiens; identical to SEQ ID NO: 249944

SEQ ID NO: 273652 - DNA, 201 bp, Homo sapiens; identical to SEQ ID NO: 249945

SEQ ID NO: 273653 - DNA, 201 bp, Homo sapiens; identical to SEQ ID NO: 249946

SEQ ID NO: 273654 - DNA, 201 bp, Homo sapiens; identical to SEQ ID NO: 249947

SEQ ID NO: 273655 - DNA, 201 bp, Homo sapiens; identical to SEQ ID NO: 249948

SEQ ID NO: 273656 - DNA, 201 bp, Homo sapiens; identical to SEQ ID NO: 249949

SEQ ID NO: 273657 - DNA, 201 bp, Homo sapiens; identical to SEQ ID NO: 249950

SEQ ID NO: 273658 - DNA, 201 bp, Homo sapiens; identical to SEQ ID NO: 249951

SEQ ID NO: 273659 - DNA, 201 bp, Homo sapiens; identical to SEQ ID NO: 249952

SEQ ID NO: 273660 - DNA, 201 bp, Homo sapiens; identical to SEQ ID NO: 249953

SEQ ID NO: 273661 - DNA, 201 bp, Homo sapiens; identical to SEQ ID NO: 249954

SEQ ID NO: 273662 - DNA, 201 bp, Homo sapiens; identical to SEQ ID NO: 249955

SEQ ID NO: 273663 - DNA, 201 bp, Homo sapiens; identical to SEQ ID NO: 249956

SEQ ID NO: 273664 - DNA, 201 bp, Homo sapiens; identical to SEQ ID NO: 249958

SEQ ID NO: 273665 - DNA, 201 bp, Homo sapiens; identical to SEQ ID NO: 249959

SEQ ID NO: 273666 - DNA, 201 bp, Homo sapiens; identical to SEQ ID NO: 249957

SEQ ID NO: 273667 - DNA, 201 bp, Homo sapiens; identical to SEQ ID NO: 249960

SEQ ID NO: 273668 - DNA, 201 bp, Homo sapiens; identical to SEQ ID NO: 249962

SEQ ID NO: 273669 - DNA, 201 bp, Homo sapiens; identical to SEQ ID NO: 249963

SEQ ID NO: 273670 - DNA, 201 bp, Homo sapiens; identical to SEQ ID NO: 249961

SEQ ID NO: 273671 - DNA, 201 bp, Homo sapiens; identical to SEQ ID NO: 249964

SEQ ID NO: 273672 - DNA, 201 bp, Homo sapiens; identical to SEQ ID NO: 249965

SEQ ID NO: 273673 - DNA, 201 bp, Homo sapiens; identical to SEQ ID NO: 249966

SEQ ID NO: 273674 - DNA, 201 bp, Homo sapiens; identical to SEQ ID NO: 249967

SEQ ID NO: 273675 - DNA, 201 bp, Homo sapiens; identical to SEQ ID NO: 249968

SEQ ID NO: 273676 - DNA, 201 bp, Homo sapiens; identical to SEQ ID NO: 249969

SEQ ID NO: 273677 - DNA, 201 bp, Homo sapiens; identical to SEQ ID NO: 249970

SEQ ID NO: 273678 - DNA, 201 bp, Homo sapiens
aggctgtggggtgctgccccagcccaggcagcctgactgtgagagccccaaacaggagagccccaaacaggaaggaccagggcccttcccctcccctccaygctgcccaccctctgaggagcagtggccaagttcctctctgggcttctcgggccaggctgaccctgtcccccagggcctcccacgaagcatgggagctgt

SEQ ID NO: 273679 - DNA, 201 bp, Homo sapiens; identical to SEQ ID NO: 249971

SEQ ID NO: 273680 - DNA, 201 bp, Homo sapiens; identical to SEQ ID NO: 249972

SEQ ID NO: 273681 - DNA, 201 bp, Homo sapiens; identical to SEQ ID NO: 249973

SEQ ID NO: 273682 - DNA, 201 bp, Homo sapiens; identical to SEQ ID NO: 249974

SEQ ID NO: 273683 - DNA, 201 bp, Homo sapiens; identical to SEQ ID NO: 249975

SEQ ID NO: 273684 - DNA, 201 bp, Homo sapiens; identical to SEQ ID NO: 249976

SEQ ID NO: 273685 - DNA, 201 bp, Homo sapiens; identical to SEQ ID NO: 249977

SEQ ID NO: 273686 - DNA, 201 bp, Homo sapiens; identical to SEQ ID NO: 249978

SEQ ID NO: 273687 - DNA, 201 bp, Homo sapiens; identical to SEQ ID NO: 249979

SEQ ID NO: 273688 - DNA, 201 bp, Homo sapiens; identical to SEQ ID NO: 249980

SEQ ID NO: 273689 - DNA, 201 bp, Homo sapiens; identical to SEQ ID NO: 249981

SEQ ID NO: 273690 - DNA, 201 bp, Homo sapiens; identical to SEQ ID NO: 249982

SEQ ID NO: 273691 - DNA, 201 bp, Homo sapiens; identical to SEQ ID NO: 249983

SEQ ID NO: 273692 - DNA, 201 bp, Homo sapiens; identical to SEQ ID NO: 249984

SEQ ID NO: 273693 - DNA, 201 bp, Homo sapiens; identical to SEQ ID NO: 249985

SEQ ID NO: 273694 - DNA, 201 bp, Homo sapiens; identical to SEQ ID NO: 249986

SEQ ID NO: 273695 - DNA, 201 bp, Homo sapiens; identical to SEQ ID NO: 249987

SEQ ID NO: 273696 - DNA, 201 bp, Homo sapiens; identical to SEQ ID NO: 249988

SEQ ID NO: 273697 - DNA, 201 bp, Homo sapiens; identical to SEQ ID NO: 249989

SEQ ID NO: 273698 - DNA, 201 bp, Homo sapiens; identical to SEQ ID NO: 249990

SEQ ID NO: 273699 - DNA, 201 bp, Homo sapiens; identical to SEQ ID NO: 249991

SEQ ID NO: 273700 - DNA, 201 bp, Homo sapiens; identical to SEQ ID NO: 249992

SEQ ID NO: 273701 - DNA, 201 bp, Homo sapiens
ccctcagtccaacgtcagcctcctggatcagcaccagcaccttaaagagaaggctgaaggtgggctgggcagcactgcctgggcgagaaagaagaagctgrgcctggtacaccgttttggtatctgtctgacatcttccacttcttttctcagcgcgcaaagagtctgccaaggagaagcagctgaaggaagaagagaaga

SEQ ID NO: 273702 - DNA, 201 bp, Homo sapiens
ccgtgcgatagtatctccggaacaaatttgtccctctgcgcgatccggaactccgaggtcgttcctacgcgccgtcgttcgcctcttcacatcggattggrtctcacgcaaggatgaggcggggtttcgccgtggcgcgcatgcgtgcagcaaagaatggaggagtcggaacccgaacggaaggtaggagagaggcgagac

SEQ ID NO: 273703 - DNA, 201 bp, Homo sapiens; identical to SEQ ID NO: 54338

SEQ ID NO: 273704 - DNA, 201 bp, Homo sapiens
gcctgctctgtgcccagctctgctgagctgtgaggacctagatgggccagggagatggctgcctgggaagccgtcaggcgaggggagagaaagacgcacaygcagaaacgtggacggcagtcacaagaccgctagcagatgaggcaggatctcagcatctggtgagaggtaggcagggaacggcacaggcggccacacttc

SEQ ID NO: 273705 - DNA, 201 bp, Homo sapiens; identical to SEQ ID NO: 54321

SEQ ID NO: 273706 - DNA, 201 bp, Homo sapiens
aagatcacctgacctgatctttgtggtggcaggaggtagaatatgtgaaggaggaggccaagatggtgtacctgctcgagtgcctgcagaagacacccccrcctgtgagtgcagccaggccaggccggggccagagtccccaggaccagggagggctttggaggggacagagtgccaggggaggtgcggtgggtgcccagg

SEQ ID NO: 273707 - DNA, 201 bp, Homo sapiens
gccagcctggatgtcatccaggtgggcaggtgctcctgatgggcggtctctcacctgtgggggctggatctgacaagtctccctgaagctgattggagccrggggtccaccttgtgggaaccgggggtttcattcaaagcccctgacgcttaaccagggccatttttagggcaccagcccttggcggccagaggcttctgg

SEQ ID NO: 273708 - DNA, 201 bp, Homo sapiens
gggcaaaggtcagggtggtgcaagcactggcttggaccctgctgcagtagcagcgctttacctaatgccttcccctgcctggttggcctgccactcccctrtcccatggtggctctgacagtgtctgcctgaccctccccagaccaggaggaacggactaaggccatcgaggcattccgggagggcaagaaggatgtccta

SEQ ID NO: 273709 - DNA, 201 bp, Homo sapiens
ccgcccgtgctgcaggtgctgcattgcggggatgagtccatgctggacattggaggtgactgcagagcgggatccccgagtccccagccggcaggtggcarggaggggtgctggaagtcagaaacgtgaaaccggtggaccgagggtgcctaacggggggcccgaagtccagggcatggatcctggtccttgacttggctg

SEQ ID NO: 273710 - DNA, 201 bp, Homo sapiens
gggcaccttgggcagccagaaccccagggaggaaatacatgctgcccccagcccctgagctgaagacaggctcccctccccccggcctgcagctgtctctrgacggagggacgggaagtggccagaaggggaagtgtgaggagttcccgtccagcctgtcatcagtctccccaggtcttgaagcggcggccctgctcctgg

SEQ ID NO: 273711 - DNA, 201 bp, Homo sapiens
gggtctcacgcaaggatgaggcggggtttcgccgtggcgcgcatgcgtgcagcaaagaatggaggagtcggaacccgaacggaaggtaggagagaggcgasaccccgcgcgtgtgggagcgggcgtgaagaggggagcaggccgtgcctgactggcgtgtgcttgcagcgggctcgcaccgacgaggtgcctgccggagga

SEQ ID NO: 273712 - DNA, 201 bp, Homo sapiens
tgaagacaggctcccctccccccggcctgcagctgtctctggacggagggacgggaagtggccagaaggggaagtgtgaggagttcccgtccagcctgtcrtcagtctccccaggtcttgaagcggcggccctgctcctggccgtgaccatggaccctctggagacccctatcaaggatggcatcctctaccagcagcatg

SEQ ID NO: 273713 - DNA, 201 bp, Homo sapiens; identical to SEQ ID NO: 54328

SEQ ID NO: 273714 - DNA, 201 bp, Homo sapiens; identical to SEQ ID NO: 54346

SEQ ID NO: 273715 - DNA, 201 bp, Homo sapiens
tacttggctgtggaaggagccaccgagctggtgcccgcctctggggactctgggtctctccactgggttgtctgaatttatgactcaaggagggaccacaytggcgggccaaggagaagtgcttggattctctggtctccctggccagctgtcatagctctcaggcccactcttcctgtcagggctgtgatgtttcaggga

SEQ ID NO: 273716 - DNA, 201 bp, Homo sapiens
ggccagaaggggaagtgtgaggagttcccgtccagcctgtcatcagtctccccaggtcttgaagcggcggccctgctcctggccgtgaccatggaccctckggagacccctatcaaggatggcatcctctaccagcagcatgtcaagtttggcaaggtggggacccctggctgccaggcagctgccaaggaccaacagtgg

SEQ ID NO: 273717 - DNA, 201 bp, Homo sapiens
  misc_feature (1)...(201): n = A,T,C or G
cacgagtacctgctgctcaagggggttgaggccgtagccatccatgggggcaaaggtcagggtggtgcaagcactggcttggaccctgctgcagtagcagngctttacctaatgccttcccctgcctggttggcctgccactcccctatcccatggtggctctgacagtgtctgcctgaccctccccagaccaggaggaac

SEQ ID NO: 273718 - DNA, 201 bp, Homo sapiens
ggccaggtactgtgggagcacggcagatggaatggcccaccttgctggggacatctgggaggtgggagctcagagaaggcttttccgggaaggtgacattygaattgggaagaggggcagtccaggctgaaagcacagaggcggacggcccaggaaggtcagggtcattcagtggtcagtcaaggaggttgaggcactggg

SEQ ID NO: 273719 - DNA, 201 bp, Homo sapiens
ctgctgcagcgaagacgcaagggagctgcggaggaagagcagcaggacagcggtagtgaaccccggggagatgaggacgacatcccgctaggccctcagtccaacgtcagcctcctggatcagcaccagcaccttaaagagaaggctgaaggtgggctgggcagcactgcctgggcgagaaagaagaagctgagcctggta

SEQ ID NO: 273720 - DNA, 201 bp, Homo sapiens
gtgtggtgagtctgttaccagcgccaccttagctgttccctgggtcccctgcctgtggccacccaggttctggccacagagcccaggatgggccctgatgsttccccactcctcccccagatgagtcagtgctgatggacctcaaagcgctgctgctagaagccaagcagaaggtgccgcccgtgctgcaggtgctgcatt

SEQ ID NO: 273721 - DNA, 201 bp, Homo sapiens
gaagaggttacccttctcaaagcgcgaggggccctatggactcatcatctgcccctcggtaagataggctggcctggagggcaggccagagattggggctrccatctggtgccagcctttgtccctctgcctgcagcgggagctggcccggcagacccatggcatcctggagtactactgccgcctgctgcaggaggacag

SEQ ID NO: 273722 - DNA, 201 bp, Homo sapiens
gagtccatgctggacattggaggtgactgcagagcgggatccccgagtccccagccggcaggtggcagggaggggtgctggaagtcagaaacgtgaaaccrgtggaccgagggtgcctaacggggggcccgaagtccagggcatggatcctggtccttgacttggctgacccctgtccccattcccccaggagagcgcggc

SEQ ID NO: 273723 - DNA, 201 bp, Homo sapiens; identical to SEQ ID NO: 54324

SEQ ID NO: 273724 - DNA, 201 bp, Homo sapiens
tgctaggcaagccaacaaaaggcgcccccagcaggaagcaaagctttaaatgaacatgtgacctctccggggccccctgggacctgccacccacactcacrtggttggggccattcagggctgtgggtcccatgtggactggatgcccagcgtgagtgtataccgtgagggcctttgagctctcggacagcgtggagtggt

SEQ ID NO: 273725 - DNA, 201 bp, Homo sapiens
gaagctgattggagccgggggtccaccttgtgggaaccgggggtttcattcaaagcccctgacgcttaaccagggccatttttagggcaccagcccttggyggccagaggcttctggtcacctcctggtccagatgacgggccatggcagggctgtggcgggtaagcctaatctcaagatcacctgacctgatctttgtgg

SEQ ID NO: 273726 - DNA, 201 bp, Homo sapiens
gccagcgacagaccctgctcttcagtgccaccatgccgaagaagattcagaactttgctaagagtgcccttgtaaagcctgtgaccatcaatgtggggcgygctggggctgccagcctggatgtcatccaggtgggcaggtgctcctgatgggcggtctctcacctgtgggggctggatctgacaagtctccctgaagctg

SEQ ID NO: 273727 - DNA, 201 bp, Homo sapiens; identical to SEQ ID NO: 54326

SEQ ID NO: 273728 - DNA, 201 bp, Homo sapiens
gaaggggacagacaaagaaataggaaggaggacagagagcagagcagatgcagggtgcctgcttgcctctagataggtgataggccagtggccccaacctsagggtctctccttggtccccagcggtgtacacatgatggtggccaccccggggcgcctcatggatttgctgcagaagaagatggtcagcctagacatctg

SEQ ID NO: 273729 - DNA, 201 bp, Homo sapiens
acggaaggtaggagagaggcgagaccccgcgcgtgtgggagcgggcgtgaagaggggagcaggccgtgcctgactggcgtgtgcttgcagcgggctcgcaycgacgaggtgcctgccggaggaagccgctccgaggcggaagatgaggacgacgaggactacgtgccctatgtgccgttacggcagcgccggcagctactg

SEQ ID NO: 273730 - DNA, 201 bp, Homo sapiens
ttatggaaaattaagagtgattttaaatatgtttcaaaatctcatagctttgtatagttcgacaagctatctgcatgtgtgtctctgtgtgtgtgtgtgtstgtgtgtgtgtgtgtgtgtcacgggagatcttggcacatttcttaacttctctgagctttagagtcccctcttgtgtaatggaaacagttatatatatat

SEQ ID NO: 273731 - DNA, 201 bp, Homo sapiens
aacccagaaggcagaggttgcagtgagccgagattgcaccactgcactccagcctgggtgatagagtgagaccctgtctcaaaaaaaaaaaaaaaaaagtycaacgtcatttgtgttgtttcttctattatcttctggaagctttcatgttttgcctttcatatttatctccagcatccacctagggttgatttttatgta

SEQ ID NO: 273732 - DNA, 201 bp, Homo sapiens
gtgtgtgtgtcacgggagatcttggcacatttcttaacttctctgagctttagagtcccctcttgtgtaatggaaacagttatatatatatatatatatayacacacattttataatatattatataatatatattttagttataatgtattatataatatatattttagttatagtatataatatgtattttagttataa

SEQ ID NO: 273733 - DNA, 201 bp, Homo sapiens
catctctgaacagggagattaccctactcctatagatgtttgagcaaagagaagggagtaatgtacccttcagaatgtctcacaaagaccaggcaccatgsctcatgcctataatcccagcacttcaggagccaagatgggaggatcatttgagcacaggagtttgagaccagcctgggcaacatagcgagacccctgtct

SEQ ID NO: 273734 - DNA, 201 bp, Homo sapiens
agccaccgcacccggccaaaagttgaatgcttcctacctacaagacactgggtaacactgggtactacttggactatctcatttttaacctcttagtaagktgggaaaggtcttcttcttttaagcttcttcaccaaggtcacagaggtagcaagaagttgaaacaggacttgaactaggatctgcctggctccaaaacct

SEQ ID NO: 273735 - DNA, 201 bp, Homo sapiens
ttagagggtaaggacggcctctaattgatctttatgtgccctagtgcccagtgaagggtctggcacacggtaggtgtaccatgaatgttcgtagcacaaaygcatcaatggcaaccgcctccctccttcattcactctttccttctaataatacagccaacattctattagctctgtgggcagccacagcgtgctggaact

SEQ ID NO: 273736 - DNA, 201 bp, Homo sapiens
gccaaggctggtctcaaactcctggcctcaagcaatcctcccaaagtgctgggattataggcatgagccaccgcacccggccaaaagttgaatgcttcctrcctacaagacactgggtaacactgggtactacttggactatctcatttttaacctcttagtaaggtgggaaaggtcttcttcttttaagcttcttcacca

SEQ ID NO: 273737 - DNA, 201 bp, Homo sapiens
aaacttctaggtaactcaacccaaagaaattctttatattccaaaatcactttgcactctgaacaataacagccatcctcatcgcttctacatatgccttstttcttggttcagccacagcaaacttatagagagctgcaactctcagggatacaatgactgctccaacaatgtgaaatggcagactctggaccagaaggc

SEQ ID NO: 273738 - DNA, 201 bp, Homo sapiens
aattcttttcttagaggtttaaatgttacagacacatgactgacatgtaataaatattcagcattcattggcaagaacaggagaagccagatggctggatragctttgggctttggttcaaactgcagttccccagataaatagctccgggatcttgggcatgttctaaactacctgggctttattttttccctctgtagc

SEQ ID NO: 273739 - DNA, 201 bp, Homo sapiens
ggcctctaggctcaagggatcctcctgcctcagcctccccagtagctggaactataggcccgttccctgccccgctattttacttattttttattttttttgtagaggcaaggtcttgctatgttgccaaggctggtctcaaactcctggcctcaagcaatcctcccaaagtgctgggattataggcatgagccaccgcac

SEQ ID NO: 273740 - DNA, 201 bp, Homo sapiens
gattttgaagacttgctatgccaaaaaggatagcaaaatattaacatttcgctaattagttttcatactaattagttttatgctaatttattacctgttgraatgatgagattttgaggacacgtcaggttaaatagaattaacattaatttctttattttcagtgctttattttttaatgtattatttatcttttttcaa

SEQ ID NO: 273741 - DNA, 201 bp, Homo sapiens
ggtagcagtactccctgtatgctattagagcagtcagttaactttttttttttttgagacaggctctcactttgtcacccaggctggagtacagtggcacrgtagcacaatctcggttctcaagccatcctccctccgccgcctgagtagctgggactacagacgtatgctgccactcatagctgatttttgtatgtttgt

SEQ ID NO: 273742 - DNA, 201 bp, Homo sapiens
ctgggactgagggatttcccagtgcatgggacgatttggtcctccccatagcagttcctacatgcagggctgctgttggaagaattcagcaagattgggtrtgttctcctgctagcctctggtagagaagaattcagcgagattgggtgtgttcccctgccagcctctggtagatgcccactagattagtttctctcctct

SEQ ID NO: 273743 - DNA, 201 bp, Homo sapiens
caaccccagctaattttttgtcatttctagtagagacgggatttcgccatgttggacaggccggtctcggactcctgagctcaggtgatccgcctgcctcrgcctcccaaagtgctgggattacaggcatgaaccactgtgccggcctgttttctatattctgtccttcccctggggaggcagtggaatgacccagctcta

SEQ ID NO: 273744 - DNA, 201 bp, Homo sapiens
acatgatgatctccagttccatccacgttgttgcaaatgactagatcttttttttttttttttttttttgagatggagtctcgatctgttgcccaggctgragtgcagtggtgccatctcggctcactgcaacctctgcctcccgggttcaagcgattctcctgcctcagcctccctagtaactgggactacaggcatggg

SEQ ID NO: 273745 - DNA, 201 bp, Homo sapiens
tactggccttgcctgatgggactctaatcaggcaagattttacaattgaatggcgcaggatcaaaacaaggccattaaaagttggactctgcccggagttyaaagggaccctgttgctttctatttaggaactcacgagtcttgcagtcataaagcagcaacataaagcaagctcccaactctagttctccaggcaattca

SEQ ID NO: 273746 - DNA, 201 bp, Homo sapiens
ggactctaatcaggcaagattttacaattgaatggcgcaggatcaaaacaaggccattaaaagttggactctgcccggagttcaaagggaccctgttgctytctatttaggaactcacgagtcttgcagtcataaagcagcaacataaagcaagctcccaactctagttctccaggcaattcatccaggctgtcccctgca

SEQ ID NO: 273747 - DNA, 201 bp, Homo sapiens
ctgcccaccagaattatgatttagtagaatcaccggcggccagaatgctcccaactctatttccatgttctctaggaatcctggaccagcccccgacccctgccaaccttgtccttgtccagaggtcccgtaatcttcactgccagcatctcccatttaggtgctaacatctattatcttggatatcagcaacttgccagc

SEQ ID NO: 273748 - DNA, 201 bp, Homo sapiens
tcccaggactctacccactaaatgccagtagcaactctctcctgaggttgtgataaccaaaaatgtctgcagacatggccagatgtcccctggtggatacrgtaaccccacgtgagaacccctgcaatacatgacacctgtctctatccgaagagagatagagagccattgcacatttatactaaagaatatggccaggca

SEQ ID NO: 273749 - DNA, 201 bp, Homo sapiens
attatataatatatattttagttataatgtattatataatatatattttagttatagtatataatatgtattttagttataatatattatgtaatatataytttagttttaatatataatatattttagttgtaatatataatatatattttagttatatgatatatattttagttataatatatatatattttagttata

SEQ ID NO: 273750 - DNA, 201 bp, Homo sapiens
cgctcctcacctacctcctgcctctttcaggtgtggtgttgggtggctgtggtgacaaatccattcgtttccgtcccacgctggtcttcagggatcaccaygctcacctgttcctcaatattttcagtgacatcttagcagacttcaagtaaagaagccatttccactacagtgagaaagcccggatcccaacagttgtca

SEQ ID NO: 273751 - DNA, 201 bp, Homo sapiens
catccatgtcccagggaattaccaactctcagcatgtaacttacattgcgcgtcgactgtgaaatcaaggagaacaagagacgaggagcttgcgtgctggyggagagggaccgatgaatcatgaacgaatgagaaagagacagataagggtgacaaaaataaaatgtgttggtctgaaagcagtgggactactttaagttg

SEQ ID NO: 273752 - DNA, 201 bp, Homo sapiens
ggcctgcagcttccagcacagctaccgcctgctggtgcctggtaagccccgggggtcttgataagaactggtactaatggaagataccatccagactaggrattcctgggctggaagagcccttggggataaagggaccagccagtgagtgtttctgggactgtcccactgtattagtctgttctcatgctgctaataaag

SEQ ID NO: 273753 - DNA, 201 bp, Homo sapiens
acattagtcaagctgcagccaaagtcgacgttgaatttgattatgatgggcctctgatgaagacggaagtcccagggcctagatctcgggtgagttgagcrcacctgagtggggtattttggaaaagggaaaaaggcgcctaagaagcaaaagcacagtcaagcttagggacctgtattgattgtcagctgctttcagaga

SEQ ID NO: 273754 - DNA, 201 bp, Homo sapiens
tcagaatgaccttgggaggtatgatcaagcccttagagagatgagaggctgggcatagtggctcacacctttaatctcagcactttgggaggcgaggtgaraggattgcttgagcccaggagttcataaccaacctaggcaacacagcaagtccccgtctctacaaaaaaataaaaacattacccaggggtggtagtgcat

SEQ ID NO: 273755 - DNA, 201 bp, Homo sapiens
gagaggaaataggctcaggagcaagcaccttcacatctgagcaggaactagaactaggccttcttgtaccaaccctctggattctctcaactttccaagcytccaaagtttgtttctgtgtttacttcactctctggttaggtggtttctacaggagtctttagaacaagagagaagaccgacatttattacaaccagcaa

SEQ ID NO: 273756 - DNA, 201 bp, Homo sapiens
caataccatttatgtaaaaaatacacataccaattaacaaaacaggtttttagcagaaagatgtacagacagaaggaggcacacaaaacacatttaaatgrtgttctggggagagggaacagggagcaaggagagatgataaaaggaaacaaactgggggataggggctgctccaggctcccaataagaatggcaatcagg

SEQ ID NO: 273757 - DNA, 201 bp, Homo sapiens
agtttgtttctgtgtttacttcactctctggttaggtggtttctacaggagtctttagaacaagagagaagaccgacatttattacaaccagcaaccaacrttaatcactttcccatatcagtacataaagcgccatcgcattctttttgttgaatgcaggttattctgcatgatggatgtacccaagtttattttaacca

SEQ ID NO: 273758 - DNA, 201 bp, Homo sapiens
tgaaatgcatcaaaaacaggatgtgataaagcacatgtggtaatcatgttaatggtagaggctagtagtgggtatataggtatttaccgtaaaattctttyggctttgctgtgcattggaaagtttcataaaaaatcatgggaaatggtctaggcgccgtggctcactggtgaatattgtcaatttcatgtggttcccctc

SEQ ID NO: 273759 - DNA, 201 bp, Homo sapiens
cccatcttgtgatcaccctcattacctcttctgggccccctgtggacctgcgttgacccagcatgggctacaatgggggagttgggtaatcgctcccggtrggttcctccccaacccccgaggcggggtcaggtggagcgtgggcgccagagcagcccctctgccttgggtgtcttggagatgacttggcgccccccggag

SEQ ID NO: 273760 - DNA, 201 bp, Homo sapiens
agatgacttggcgccccccggagccccgtcatggctgtggctgcgtccacaacactgcatcagcagagtcctggggaagccatttaggaatctgaagccckggatttctgctttgtcccttcaggggttcctgagcctgttaaaaaaaaaaaaaaatctaggaagaggccctggaaggaaaaaggggagggagatagccta

SEQ ID NO: 273761 - DNA, 201 bp, Homo sapiens
ggcaggagaatggcttgaacctgggaggtggaggttgcagtgagtgagactgggttgccactgcaccccagcctgggtgacagcgcgagactccatctctwaaaaaaaaaaaaaaaaggcataaacaacctcgacaaggaaaggacaccagctgtaactggtgaagtcaccctttaaaataagcagagcctgtccctcctc

SEQ ID NO: 273762 - DNA, 201 bp, Homo sapiens
gccatgcacagtggctcacacctgtaattccagcactttgggaggcagaggcgggtggatcacaaggtcaagagattgagaaccttctggccaacatggtraaacctcatttctactaaaaatacacaaattagccaggtgtggtggcacatgcctataatcccagctactcgggaggctgaggcaggagaatcgcttgaa

SEQ ID NO: 273763 - DNA, 201 bp, Homo sapiens; identical to SEQ ID NO: 54380

SEQ ID NO: 273764 - DNA, 201 bp, Homo sapiens
aagaccaggcaccatggctcatgcctataatcccagcacttcaggagccaagatgggaggatcatttgagcacaggagtttgagaccagcctgggcaacayagcgagacccctgtctctaaaaaatatatatatttaaaaattagctgggtatggtggtgcatgcctgtagtcccagctacttggcagggctaaggtggga

SEQ ID NO: 273765 - DNA, 201 bp, Homo sapiens
aaaaataataataataataataataaataaaaagtacaacacccatgcaggcatgcatacagcctaaatgcaccactcaatgaatttcccatgtaaccaawgtttcacaactctttttgttattggaacatcccttaaggagcatttttagacattattttcctagttgttccctatcatgaaattgaaatagaaaaatac

SEQ ID NO: 273766 - DNA, 201 bp, Homo sapiens
gacatcttgggtcttccgcatttttggctggagatgcactcaggtggtggcaatggtattctgcttgtacagggcaggttcctgccaggtcaccaaagtcycaagaaggggtttatcaacctttttgcacccaaaccaaaccaccctgaaactccaccataattacttcatgtgacttcctaaaaatgaaaccatgtccct

SEQ ID NO: 273767 - DNA, 201 bp, Homo sapiens
aagagtaacactgaagggatttctaggggttcctgacagtaaaccctcacacacttgtcttggatacaccgcacctgtctttcactcagggatcagcaagkcttgggcttgagctaccctttgtgtttcagcaacatgtggagctaaaaagattgtgggattcacccgggaaatcaaacaccctctgtaaactcattacac

SEQ ID NO: 273768 - DNA, 201 bp, Homo sapiens
aatgaaaccatgtcccttagatctaatatctggattccaattatgatttcttttttcttcttctttcttccttcttcttccttctccttctccttctcctycttctccttcttcttctttcttctttctctctctgtcacccaggctagagtggagtggctggatcatagttcattgcagcctcgaactcctggactcaaa

SEQ ID NO: 273769 - DNA, 201 bp, Homo sapiens
cctctgcactccaacctgggcaacagagcaagactctgtctcaaaaaaaaaaaagaaaaagaagccaacgagggcatcacagaggagatgtatcagttttmtcctaccacagtaatgcttcataacaaacagccacaaaaatcccactagcacagagcaagccaattgctcgtgcatttaaggttcattgggagttgggta

SEQ ID NO: 273770 - DNA, 201 bp, Homo sapiens
aagaaaaagaagccaacgagggcatcacagaggagatgtatcagttttatcctaccacagtaatgcttcataacaaacagccacaaaaatcccactagcayagagcaagccaattgctcgtgcatttaaggttcattgggagttgggtagacagctctgttgggcagacagctctgttgggctcacctccatgcctggggg

SEQ ID NO: 273771 - DNA, 201 bp, Homo sapiens
ataaaactgtcaccatcgccacctcctttctctctcccatctctgtcgtatgatcctgtcccaagtgcctcggtctgatgggattggatccaccctggagmcactctgcctgcaggtaggcggtggcctccacagccagatggccccaggccatctgtgcagggaccgctggggaaaacacacatctgggatcgctgctaa

SEQ ID NO: 273772 - DNA, 201 bp, Homo sapiens
atgcttcataacaaacagccacaaaaatcccactagcacagagcaagccaattgctcgtgcatttaaggttcattgggagttgggtagacagctctgttgrgcagacagctctgttgggctcacctccatgcctgggggacagctggctgttggttgatctaggttaggtgtggcttgaatcactgcagtgatttggttct

SEQ ID NO: 273773 - DNA, 201 bp, Homo sapiens
ctgctgtcaccagggatttctcattgtctttgtttactgcaggatccagacacattagtcaagctgcagccaaagtcgacgttgaatttgattatgatggrcctctgatgaagacggaagtcccagggcctagatctcgggtgagttgagcacacctgagtggggtattttggaaaagggaaaaaggcgcctaagaagcaa

SEQ ID NO: 273774 - DNA, 201 bp, Homo sapiens; identical to SEQ ID NO: 54376

SEQ ID NO: 273775 - DNA, 201 bp, Homo sapiens
gagttagagaccagtctgggcaacaaagtaagactttgtccctacagaaaataaaaaaattagccaggcactgtggttcatgcttgtggtcccagctaccygggaggctgagttgggaggataagcccaggaaatcaaggctgcagtgagctgtgatcacaccactgccctccagcttgggcgacaaagcaagaccctatc

SEQ ID NO: 273776 - DNA, 201 bp, Homo sapiens
ccaccacatctggctaatttttgtatttttagtagagaatggggttttaccatgttggccaggatggtctcgaactcatgacctcaggtgatccacctgcytcagactcccaaagtgttgggattacaggcttgagccacaatgcccagcctccatgtgtaacttttgactccccaaaaactttactactaatagcatccg

SEQ ID NO: 273777 - DNA, 201 bp, Homo sapiens
ttattctcttacagttctagaggccagaagtccaaaatccagagatcagtaggactgtactctctctgatggctctagggttccaactttgcctgctgccrgaggagtggttgagaataactgagtacatggccctccttcagcaattgctctgttctgttgtgtggagagatcacattttgtttatctgctcatatgctc

SEQ ID NO: 273778 - DNA, 201 bp, Homo sapiens
ggggggtcctgcaggcctcctggaggccactctgatggcattggctgtcactctgcgatgggggtgtattggttcgttctcaaactgctataaagaaatamctgagactggagaatttataaagaaaagaggtttcattggctcatggttctgcgggctgtacaggaagtatagcagcttctgtttgtgggaagacatcag

SEQ ID NO: 273779 - DNA, 201 bp, Homo sapiens
accacgcccagttaatttttatatttttagtagagacagtgtttcaccctgttggccaggctggtctcgaactcctgacctcaagtaatcctcccgcctcrgcctcccaaagtgctgggattataggcgggagccactgcacctggctacactcttttaaacaaccacatctcatgagaactctatcacaagaacagcacc

SEQ ID NO: 273780 - DNA, 201 bp, Homo sapiens
caaggtctctgggttgtgccaagcatgagcattttcgggcagaggctacctggagtatctgacagagagtggcatctaaagtcagtaaacctagatccgarttgtggttctgccccttcttggctgtgtgacttggggcaagttgcttgacctctctggtcctcagttcccccaactctacaatgaggacaattaacttcc

SEQ ID NO: 273781 - DNA, 201 bp, Homo sapiens
caatgcaatatggctaccaggacactgacccttttttaaaacatccacagcaatcctggtggatttctctaaaggtttaaggaaaccggccatgccccackctgacagaacgtcatcatcctgcaaccccatttggaggctatttgaacacaggggctatgaaaagcaccatttgtgggcagggagctgggtcaggccccc

SEQ ID NO: 273782 - DNA, 201 bp, Homo sapiens
tgtcccaagtgcctcggtctgatgggattggatccaccctggagccactctgcctgcaggtaggcggtggcctccacagccagatggccccaggccatctstgcagggaccgctggggaaaacacacatctgggatcgctgctaaggaacaaagaaagccataagcgactctgaaattgacctagagcccagctgtgcttc

SEQ ID NO: 273783 - DNA, 201 bp, Homo sapiens
tggatcactggatgggaggcaccatcttaggaatgtctcacccccactctgccccacacccatggccacttgcactggctccttcttccttctgtttgacstctttgagacctccctcccaatagtcccatgagggagggaggctcaagtgaatcctattttacaggtgagagaactcaggcttagagaagcaaagccatt

SEQ ID NO: 273784 - DNA, 201 bp, Homo sapiens
gatttggttctgctccatgtgtctgccatgctccagaaggctagatggggcttgtcctcatggcaatggcaaaggtgtacaaaagcaagaggagaacatgstatagttctgctgaggcctgggttccgcatgggtccgccatcactgctgcctccttctgctggccaaagcaagtcatagcttgccttaagtccagagtca

SEQ ID NO: 273785 - DNA, 201 bp, Homo sapiens
aggatgtggcagtgaagaaagacatgtggctcttgtggagctctagcctggtggcgcatgtggcaccatctttaaaggtcattctccaggacatctgagcyttcctaaggagacaccatgggaagagcactaggtcaagattcatgtgattgggttgctagcttcaccacacattaaccaagtgagcctaaccgatagacc

SEQ ID NO: 273786 - DNA, 201 bp, Homo sapiens
gcgcatgtggcaccatctttaaaggtcattctccaggacatctgagccttcctaaggagacaccatgggaagagcactaggtcaagattcatgtgattggrttgctagcttcaccacacattaaccaagtgagcctaaccgatagaccttatccaagcctcggttttctcatcaggaaaacgggtctaataatcatatcct

SEQ ID NO: 273787 - DNA, 201 bp, Homo sapiens
aaaaaaaaaagaaaagagctttcttagttacacattcatcttcttatacactgtctcccagctgcagaatggaagttccatggggtcaggaccacaatccycaatgcctggcacgcagtaggtgctaaatgtgtatttgttgactgaacaaattgatggaaaaattactaaatgaatgaatgagctctggcccacctctca

SEQ ID NO: 273788 - DNA, 201 bp, Homo sapiens
aacaaacttatggaaaacatgataggaactgatacagttctcggaacagacccatctgccttggacctgtcctcagcattcctggcttgcgccccatagckcccagttggccagttctcaccctttcttcaccacctctcccagctcctgtttccccatggccttgacatgctcattatcgcagttccacttgatcccacg

SEQ ID NO: 273789 - DNA, 201 bp, Homo sapiens
agtcctcacatttacaatggggacttggggactgctgggtcccaagtccccacttgtcagaggaagcgccaaggctctgcaaaggtcatgaagccaggaasgggcagagctggaactcaatgccatcccccagcaggctgcctcgtggaatccattcctgggtgtcagcgcatccctgcttaccccgtgcgatctttgtgt

SEQ ID NO: 273790 - DNA, 201 bp, Homo sapiens
ctcgtgcctgtaatcccaacaccctgagaggctgaggtaggtggatcacttgagaccagtctgggcaacatgatgaaactctgtctctataaaaaaaaaatatatatatatatacaaaaaattagccaggcatggtggcacacaccagtagtcccagccgagaggctgaggtgggaggatcacctgagccctgaaggtaag

SEQ ID NO: 273791 - DNA, 201 bp, Homo sapiens
tatgagaacatattcctgggggaagaagaagaaaataaatctccgccagcttcccatgcattaaaaatgagcaaagtgggctggccaccttgtctcacgtytgcgatcccagcactttgggaggctgaggcggcagaatcacttgagcccaggagtttgaggctgcagtgagttgtgagtgagccactgcactccaacctg

SEQ ID NO: 273792 - DNA, 201 bp, Homo sapiens
ttgggaggctgaggtgggtggatcacttgaggccatgagttcaaaaccagcctggccaacatggtgaaaccccatctctactaaaaatacaaaaattagcygggtgtggtggcacgctcctgtaatccagctactgaggaagctgaggcacgagaatcaattgaacctgggaggtggaggctgcagtgagccaagatcgtg

SEQ ID NO: 273793 - DNA, 201 bp, Homo sapiens
tatggaaaacatgataggaactgatacagttctcggaacagacccatctgccttggacctgtcctcagcattcctggcttgcgccccatagctcccagttrgccagttctcaccctttcttcaccacctctcccagctcctgtttccccatggccttgacatgctcattatcgcagttccacttgatcccacggtctccag

SEQ ID NO: 273794 - DNA, 201 bp, Homo sapiens
cccagttggccagttctcaccctttcttcaccacctctcccagctcctgtttccccatggccttgacatgctcattatcgcagttccacttgatcccacgstctccagtcatttctctctggatccattcagccgcagctccccctgtgaactgctcccattcccagtatttccacactccggttcccaagaaatctgatt

SEQ ID NO: 273795 - DNA, 201 bp, Homo sapiens
aagatcgtgccacggcacttcagcctgggagacagagcaagaccctgtctcaaaaaaaagatactcatgcaaataaatgtgtaagtactaactgtgatgartggaaagaattacgcaagaagctataagaaattacagcaagacaattgtatatccacaagaaggtttataaatgcttctctgaagagataacatggagtg

SEQ ID NO: 273796 - DNA, 201 bp, Homo sapiens
tctctccctgtgctagtgagcaatgcccatggtggtctagcagaataatcactttttttgttgtttttttgagaccaggtctccctctgtcacccaggctkgagtacagtggtgcaatcatggctcactgcagcctcgacctcccagactcaagccatcctcccacctcagcctacctagcagctgggactataggcacac

SEQ ID NO: 273797 - DNA, 201 bp, Homo sapiens
ttaagagtgattttaaatatgtttcaaaatctcatagctttgtatagttcgacaagctatctgcatgtgtgtctctgtgtgtgtgtgtgtgtgtgtgtgtstgtgtgtgtcacgggagatcttggcacatttcttaacttctctgagctttagagtcccctcttgtgtaatggaaacagttatatatatatatatatatat

SEQ ID NO: 273798 - DNA, 201 bp, Homo sapiens
gtctccctctgtcacccaggctggagtacagtggtgcaatcatggctcactgcagcctcgacctcccagactcaagccatcctcccacctcagcctacctwgcagctgggactataggcacacactaccatgccagggtaattttttttttttttttttttagcggagacagggtttcactatgttgcccaggtctccagc

SEQ ID NO: 273799 - DNA, 201 bp, Homo sapiens
ctccctctgtcacccaggctggagtacagtggtgcaatcatggctcactgcagcctcgacctcccagactcaagccatcctcccacctcagcctacctagyagctgggactataggcacacactaccatgccagggtaattttttttttttttttttttagcggagacagggtttcactatgttgcccaggtctccagctc

SEQ ID NO: 273800 - DNA, 201 bp, Homo sapiens
gttcaagaagtgagagctaaaatgggatttacctttacgtcagtttgcaagaggcaagagagaagcttacatttctaaaacagcagccacaccgtggaacytaaaagctagctggacttaactccagtgcatcctagccaggaattagggaactttttttaaactttatttatttatgttgtagagacagtttcccaggct

SEQ ID NO: 273801 - DNA, 201 bp, Homo sapiens
ttagctcatctcgcccctccccgcaatgcaccagacacacgaaggaagcagagagagctaatttgcattttaatcaaaagaaaaaggacgaggagaggtgkgtgggactgaagagctcactatctggctagaccagggttttgacttgttttgactgagacacacagtaaggaatagaacttacttcaggcccactgcaca

SEQ ID NO: 273802 - DNA, 201 bp, Homo sapiens
cccccgacctcaggtgatccgcttgcctcagcctcccaaagtgctgggatttcacgagcatgggccaccgtgcccggccctggttatcttttgacaccaawttcagacatcccccctttgagagtcccccaagcactccctctctcaccccctctagtgtgttcattattcccgcctttgtgcaacctgttgcatacttac

SEQ ID NO: 273803 - DNA, 201 bp, Homo sapiens
tggcaccatctttaaaggtcattctccaggacatctgagccttcctaaggagacaccatgggaagagcactaggtcaagattcatgtgattgggttgctascttcaccacacattaaccaagtgagcctaaccgatagaccttatccaagcctcggttttctcatcaggaaaacgggtctaataatcatatccttcctatt

SEQ ID NO: 273804 - DNA, 201 bp, Homo sapiens
ttgtcttctcttttgacttattgatttgggatatctagtaagccagaatatggttttttaagaatactaaaacacagtgttggcaaagatacaggaatacrtgtactctcgtacactgctattaggcaagtagcaaccaggggaaggattaaaaaatgataggaattacagcttacttgtaacccacttagccctcacctc

SEQ ID NO: 273805 - DNA, 201 bp, Homo sapiens
gtcagggaaattaagttgccagagccacagagctgatgagcggctgagccaggcttttgagctaagcccagttggctccaggacccgagccactgtattgrttatctgccgccacgtaacacatacctccagatttagcagattgggatcctatgtttattatctcacagtttctgcgggttgggactccaggggtgactt

SEQ ID NO: 273806 - DNA, 201 bp, Homo sapiens
accacaccccagagttggtctcagactgaagcaaagggcctggctttttatgacccttcaccagccagtcatcgcccatcagctgcgagaggggagaactygtataatctcctcggaaaagtggcttccatttgccaagggcgattttccaggcaaggaggcagctggagttattatcaatcaacacacacagcagctgga

SEQ ID NO: 273807 - DNA, 201 bp, Homo sapiens
aataaatctccgccagcttcccatgcattaaaaatgagcaaagtgggctggccaccttgtctcacgtctgcgatcccagcactttgggaggctgaggcggsagaatcacttgagcccaggagtttgaggctgcagtgagttgtgagtgagccactgcactccaacctgggcaacaaagggacactgtaaataattaatcat

SEQ ID NO: 273808 - DNA, 201 bp, Homo sapiens
aaacagcagccacaccgtggaacctaaaagctagctggacttaactccagtgcatcctagccaggaattagggaactttttttaaactttatttatttatkttgtagagacagtttcccaggctggtcttgaactcctcagctcaagcaaacctccagccttggcctcccaaagtgctgagattacaggagtgagccactg

SEQ ID NO: 273809 - DNA, 201 bp, Homo sapiens
gacttgctaacaccagaagttgccagtggtgaaattcagctttgagtttgctgatagttacggggccaagagacaggaatctgaggctcatctcagcaggycaagcctccttccttactgtggggaaattccttctctgagcacctagagggatcctggtgtcagactgacctcacctgaatcaggcttccacccacgtga

SEQ ID NO: 273810 - DNA, 201 bp, Homo sapiens
ttcctatgggtagctgctctggagggtggaagcctgaacttgatcattccctctaattctcagcccatctagacaaaaggagtcttgctgggagagagaawttgtttggtttattatcagttctgaaggtctcacgctggtaagaagttcagagttagttgcagactttttaactcaagagacaggatcttgctgtgttgc

SEQ ID NO: 273811 - DNA, 201 bp, Homo sapiens
ttaactcaagagacaggatcttgctgtgttgcccaggctggagtgcagtggcatgatcgtagctcactgcagcctcaaactcccgggttcaaaggatcttyctgcctcagcctcccatgtaactgggaccacaggtgcacaccaccacacctagctaatttttttattttctgtagagacagggatggcagtggtggggtg

SEQ ID NO: 273812 - DNA, 201 bp, Homo sapiens
cagacagctgcaaccccaagcagctccataggaaaactgcagaatggcagaaaatgcaagggaagccaatatggaaagggctttttccacatgctgacagytttcttcacaagtatcacaatgaagctatttgagaatcagcttgcaaagcacctggctctaaatagccttctctccctagtccttaagtagagacaaagc

SEQ ID NO: 273813 - DNA, 201 bp, Homo sapiens
atgttctaaactacctgggctttattttttccctctgtagcttgtaagagcacctactccacagactcatgagaataaacagcaggtgctcaataaacggyggccagtattgttatttaaggtttacactcgctttaggtgtatgtcagtcccacctgagctacatttgccaatgagtcacgcctggctaccaagtgcccg

SEQ ID NO: 273814 - DNA, 201 bp, Homo sapiens
cctctgtagcttgtaagagcacctactccacagactcatgagaataaacagcaggtgctcaataaacggtggccagtattgttatttaaggtttacactcrctttaggtgtatgtcagtcccacctgagctacatttgccaatgagtcacgcctggctaccaagtgcccgaaatggggctcatctgaatgggggtgtgccg

SEQ ID NO: 273815 - DNA, 201 bp, Homo sapiens
agcaggtgctcaataaacggtggccagtattgttatttaaggtttacactcgctttaggtgtatgtcagtcccacctgagctacatttgccaatgagtcaygcctggctaccaagtgcccgaaatggggctcatctgaatgggggtgtgccgtaagcataaaacacacatccgattttgaagacttgctatgccaaaaagg

SEQ ID NO: 273816 - DNA, 201 bp, Homo sapiens
tgttcctactgcattcaacctctggccacattgacataaagtctcctttcaaagcaaatgtatttggatggacacagtggctcacgcctgtaatcccacastttgggaagccaagacaggaaaatagcttgagctcaggagtttgagaccagcctagccaacatgttgaaaccctgtctataaaaaaaaaaaaaaaaaaaa

SEQ ID NO: 273817 - DNA, 201 bp, Homo sapiens
aggagtttgagaccagcctagccaacatgttgaaaccctgtctataaaaaaaaaaaaaaaaaaaaaaaaaaaaaaaaaattagccaggcatggtggtgcayacctgtaatcccagctattcaggaggctgaagtgggaggattgcttaagctagggaggttgaggctgcagtgagccatgattacaccactgcactccagc

SEQ ID NO: 273818 - DNA, 201 bp, Homo sapiens
ttcatactaattagttttatgctaatttattacctgttgaaatgatgagattttgaggacacgtcaggttaaatagaattaacattaatttctttattttyagtgctttattttttaatgtattatttatcttttttcaacttttgcctttttccatgtgttccaaaagattaatttcatctgtttcttttcttttttgat

SEQ ID NO: 273819 - DNA, 201 bp, Homo sapiens
aaaaaccaatgttcaagtgatggagaggcatgggtggatgaggagtggcaagaggaggctgtaggaagagtagatcatgtcccgccaggtgacccatgatsttgaatttggacttgactcagagacccatagggaaccatggaagagattaaagcaaggcagtgatgtgattttgttatcacttgagaaagatcctcctgg

SEQ ID NO: 273820 - DNA, 201 bp, Homo sapiens
tttgctatgtaccctgacaattcctattctgtttgatttactgatggatttaaatttctctttcagttctgatcatgtcaaggaaaaggtccccatgtgaygccagcctgcctttaacacctgtctgctctctgccagtctctagggaaaggagggggccaggcctggggctatagccttgggcggtccactctgtccggc

SEQ ID NO: 273821 - DNA, 201 bp, Homo sapiens
tctgtctttgtagattcacctactcttgaaggttcctataaatggattcgtagactatggggcattttacctctgcattcattcatatagcataaaaaatrttttgagatttatccatgttgtagcatgtgtcagaacttcattcctttttatgactgaataatatttcgttgtaaggatagaccatgttttgtttattca

SEQ ID NO: 273822 - DNA, 201 bp, Homo sapiens
gccatcgcatctcaattccaggcaataggaaggaaaaagaagggaaggacagagtggcccccttcttgtctttagcagccttcccagaaatctcacataayacttctaacacttgactaagagctggtcacgtggtcactcctaaccgtaaggaggtgtgtggatgtgtgtgtgtgagtgtggcaggcaggcctaaagggg

SEQ ID NO: 273823 - DNA, 201 bp, Homo sapiens
tccaggcaataggaaggaaaaagaagggaaggacagagtggcccccttcttgtctttagcagccttcccagaaatctcacataacacttctaacacttgaytaagagctggtcacgtggtcactcctaaccgtaaggaggtgtgtggatgtgtgtgtgtgagtgtggcaggcaggcctaaaggggtgtctaaatggaagag

SEQ ID NO: 273824 - DNA, 201 bp, Homo sapiens
tggcccccttcttgtctttagcagccttcccagaaatctcacataacacttctaacacttgactaagagctggtcacgtggtcactcctaaccgtaaggasgtgtgtggatgtgtgtgtgtgagtgtggcaggcaggcctaaaggggtgtctaaatggaagagactttaatctaaaccatcccagggccacactctgtggg

SEQ ID NO: 273825 - DNA, 201 bp, Homo sapiens
ttggaccctgctcagaagcctggagcctttccctgagacccagccttggctgtcccccctcctcttcttcccctgctcatttcctcacacctatttatttsccactaacatgagattagacagtaagcggatgactcattctttgggggaagtccatcattcaggaatgcctcagctatggaaggcattttggagacaaga

SEQ ID NO: 273826 - DNA, 201 bp, Homo sapiens
tgccagcccacaaaatagttccaattgctattactcccattttacagatcaggaaactgaggcacagagacgttacttaatgtgcctgaggttatacggcrggtcagtgagaggccagggatgtctagtctgggggtaagatcattttgaaggatgcaagattggggagatgcagggaagaagcagtttcatatccagcac

SEQ ID NO: 273827 - DNA, 201 bp, Homo sapiens
ccagcctgaggcaacagtgcaagaccctgtctcagtaaaaaacaaaaacagaaaaattctagaagttctaaaagttctctctctggccacctgtcctcccrtatctgtagtctttgaaaagatttttttaagttaatacttatagagaatttactatgcacttggcatattgccaagtgccttatacattatctcattaaa

SEQ ID NO: 273828 - DNA, 201 bp, Homo sapiens
gtactccagcctggcaacagaacaagactccatctcaaaaacaaagagtttggtttctcagttaattcatggccacactttccaagcccacactttctcaraaagtttcctctggtgaaaagcaataaaatttattctgtgaactaggtcatttttattcatgaagcctcatatcaacaatagctaggggccgggcacggt

SEQ ID NO: 273829 - DNA, 201 bp, Homo sapiens
gtgatccacccaccttggcctcccaaagtgctaggaatacaggcgtgagccaccgcgcctggccctcccaagcttatttctatggtagctgccttgcagaygcctgcccctgccctgccctgaaatgtgggggtcccacagcatagaaagcccaaggcaggatttccctgatcagagggaccagctccgctttcatctctt

SEQ ID NO: 273830 - DNA, 201 bp, Homo sapiens
gctggtttttggatttgcactgagtgcattacactgattttgcccaagacactctttctctactccaaaagtccctttttgtatttttagcagagaaaagstttcaccacgttggccaggctggtctcgaactcctggcctcaagcaatccatccgcctcggcctcccaaaatgcagggattataggcgtgaggcactgca

SEQ ID NO: 273831 - DNA, 201 bp, Homo sapiens
tggatttgcactgagtgcattacactgattttgcccaagacactctttctctactccaaaagtccctttttgtatttttagcagagaaaagctttcaccaygttggccaggctggtctcgaactcctggcctcaagcaatccatccgcctcggcctcccaaaatgcagggattataggcgtgaggcactgcactctgcctg

SEQ ID NO: 273832 - DNA, 201 bp, Homo sapiens
cacgggaagttgcaaaaaccagtacaaagagccccatgtacgcttcgctcagttttccccagcggcagtagcatcctatataacgccaatgcaatatggcwaccaggacactgacccttttttaaaacatccacagcaatcctggtggatttctctaaaggtttaaggaaaccggccatgccccacgctgacagaacgtca

SEQ ID NO: 273833 - DNA, 201 bp, Homo sapiens
ttcgctcagttttccccagcggcagtagcatcctatataacgccaatgcaatatggctaccaggacactgacccttttttaaaacatccacagcaatcctrgtggatttctctaaaggtttaaggaaaccggccatgccccacgctgacagaacgtcatcatcctgcaaccccatttggaggctatttgaacacaggggct

SEQ ID NO: 273834 - DNA, 201 bp, Homo sapiens
tactgtggggaaattccttctctgagcacctagagggatcctggtgtcagactgacctcacctgaatcaggcttccacccacgtgatgacctcaggccagmcactttaactctcagtgcctcatttctctaactttaaaatagctaaaaggcaaaggaaaaaacatgaaagccaaaaaaaaaaaaaaaggtagaaggagga

SEQ ID NO: 273835 - DNA, 201 bp, Homo sapiens
tggcgtggcagcctgcgcctgtagtcccaactacttgggaggctgaggcaggagaatcgcttgaacccgggaggcggaggttgcagtgagccaagattacrccactgcactccagcctgggcaacagagcaaaaccctgtctcaaaacaaaaacaaaaaaacaaacaacagcaacatcgaaaaaacaaaaaaacaaaaaac

SEQ ID NO: 273836 - DNA, 201 bp, Homo sapiens
atgcccagcctatatttattttcaatagtacaggtctaaagacatgatatagaaagtaggaatggttaaggagtgagaaaagcgtggacttggcaatcagmaagatgtaggggcttatcagggtagcagtactccctgtatgctattagagcagtcagttaactttttttttttttgagacaggctctcactttgtcaccc

SEQ ID NO: 273837 - DNA, 201 bp, Homo sapiens
agagggatcctggtgtcagactgacctcacctgaatcaggcttccacccacgtgatgacctcaggccagccactttaactctcagtgcctcatttctctawctttaaaatagctaaaaggcaaaggaaaaaacatgaaagccaaaaaaaaaaaaaaaggtagaaggaggaggcaatagtagaacctctctcattgggccgc

SEQ ID NO: 273838 - DNA, 201 bp, Homo sapiens
agagaaagagactctgtgcagggagagcatcatgaacaggcccagagagttcataggaagccgttccaagaaaatcgcaggggaaaaaggaaggatagacmgcgtatggtggctcgcacctgcaatcccagcgctttgagaggccgaggtgggtggatcacttgaacccaggagttcaagaccagcctggccaacatggcc

SEQ ID NO: 273839 - DNA, 201 bp, Homo sapiens
agttggtagcctcacgtttcagtacagacctgcaacaattaatacatgagatccactcctgagaaagcactttctacttgtctggactgaatatcggtttsgttggaaagatgaagccccgactaccccagagcatctctgagattttgttctgttctattgtttcagagcaaggaaagagggcagaggggcttctcccag

SEQ ID NO: 273840 - DNA, 201 bp, Homo sapiens
agtgggggctcctgaggccccaagaatgcttagcaggctgaatcagttgtcctcacttcttcactttgccctctgatccaccatgaccactctgctgcagragcttttaacagaaagcctgggagagcattctgagggggtctgtgctatagctcttcctccctggggtctaaccatccttgctttctctagacactccac

SEQ ID NO: 273841 - DNA, 201 bp, Homo sapiens
gaggttgcagtgagccgagatcacaccactacactccagcctgggtgacagagtgagactcctctcaaaacaaacaaaaaaacaaaaacaaaaacaaaagkccggctgctgtggttcacgcctgtaatcccagcactttgggaggccgaggcgggtggatctcccgaggtcaggagttccagaccagcctggccaatatgg

SEQ ID NO: 273842 - DNA, 201 bp, Homo sapiens
agcagtactccctgtatgctattagagcagtcagttaactttttttttttttgagacaggctctcactttgtcacccaggctggagtacagtggcacggtrgcacaatctcggttctcaagccatcctccctccgccgcctgagtagctgggactacagacgtatgctgccactcatagctgatttttgtatgtttgtatt

SEQ ID NO: 273843 - DNA, 201 bp, Homo sapiens
acaatagcggcggctgacattagcagtttacacatattgtcccactgattgcacacaatcccactgcagagtggggattattattcctgctttgcagatgkgggaatcagtgttcaggaagaggaagaatttccaaggctattcagtgacagagccgggactggaactcttgactctgtcttcaaagcctgcgctgcatct

SEQ ID NO: 273844 - DNA, 201 bp, Homo sapiens
ttgcatgccatttctacctccatgttgacatttgaccttcagaatgaccttgggaggtatgatcaagcccttagagagatgagaggctgggcatagtggcycacacctttaatctcagcactttgggaggcgaggtgagaggattgcttgagcccaggagttcataaccaacctaggcaacacagcaagtccccgtctcta

SEQ ID NO: 273845 - DNA, 201 bp, Homo sapiens
gtttacacatattgtcccactgattgcacacaatcccactgcagagtggggattattattcctgctttgcagatgggggaatcagtgttcaggaagaggargaatttccaaggctattcagtgacagagccgggactggaactcttgactctgtcttcaaagcctgcgctgcatctgtgattaatcgcaatgcaaacacat

SEQ ID NO: 273846 - DNA, 201 bp, Homo sapiens
aagacttggggagaagagaaacagatgaagggtttatctggggatctgtgcagtgctcccccagagggaagcagggacacagaggccttgcgtcccaaatrttctatgttgggagagttcgtgagacacactgtttctgtcacagcatccatcacccaactctgataccaatttctgtatcacttaagtttcttggaagac

SEQ ID NO: 273847 - DNA, 201 bp, Homo sapiens
taatagtaataaatattaatcatactgtatgtaaagcgttttgtgcagcatgcgtcacacagaaaggactcgggaaacagggtccatgaagaggaatgacwcatgaatggtgctgtcgctgttctgagatacaaattttgttctgagatacaataccatttatgtaaaaaatacacataccaattaacaaaacaggttttt

SEQ ID NO: 273848 - DNA, 201 bp, Homo sapiens
tttccccatggccttgacatgctcattatcgcagttccacttgatcccacggtctccagtcatttctctctggatccattcagccgcagctccccctgtgwactgctcccattcccagtatttccacactccggttcccaagaaatctgattgctacaatgcaatgtcaagacactttctggagaaaagaaaggaggacgc

SEQ ID NO: 273849 - DNA, 201 bp, Homo sapiens
ccttcttgtctttagcagccttcccagaaatctcacataacacttctaacacttgactaagagctggtcacgtggtcactcctaaccgtaaggaggtgtgkggatgtgtgtgtgtgagtgtggcaggcaggcctaaaggggtgtctaaatggaagagactttaatctaaaccatcccagggccacactctgtgggagaggg

SEQ ID NO: 273850 - DNA, 201 bp, Homo sapiens
  misc_feature (1)...(201): n = A,T,C or G
gatactcccgatgattccatacggaataagctcattttaattgccagaaacaaaggtaaggggtcaggagtggctgctgagtttcatgagcatccagtatntcctgctgtagctgccacatgttgctaggtactcagcaatattttgtgtggggggcaggtggtacacaggtctgaaaagagcctgaatgctctttctcca

SEQ ID NO: 273851 - DNA, 201 bp, Homo sapiens
gaaaacgcagctaagagagcagatagctgcagcagttggtgagggtaggaaatcagggcaggctcccttgaggaagtagcattttaccctaagtcttgacraacagggattggctgggtgaagaaggtaaggaagagcattctgggcggagggaagggtgcatgcgatggcctgaggtgggatggagcttacagaggtggt

SEQ ID NO: 273852 - DNA, 201 bp, Homo sapiens
cgcatgccaattaagggttcgagagtcccccttcagcttccggatgagaactggggttcagtatcaaaacatctcatgtactccccaagtatatacacctmctatgcacccagaaaaattaaaaattaaacgataaaaagaactggggtttcacaggcaacaggcctccctgcccactgacagcctcgcgctgaaatgtct

SEQ ID NO: 273853 - DNA, 201 bp, Homo sapiens
aagtatatacacctactatgcacccagaaaaattaaaaattaaacgataaaaagaactggggtttcacaggcaacaggcctccctgcccactgacagcctygcgctgaaatgtctatcatctcctttacaaagacggtactgcctgcttccccaagccaagcgtctgcttttctgttttgctgaactcaggttgcttagcg

SEQ ID NO: 273854 - DNA, 201 bp, Homo sapiens
ctggtcttgaactcctgacctcaggtgatctgcacacctcagcctcccaaagtgctgggattacaggcctgagccaccacacttggccttaaaatctttttaaaaaacctttttggatacataatagttgcagtgcgtaatgatcaaatctgggtaattggatatccatcacctaaaatatttatcatctctttgtattgg

SEQ ID NO: 273855 - DNA, 201 bp, Homo sapiens
caggttcaagtgattctcctacctcagcctcccgagtagctgggactacaggcacacgtcaccatacccaactaatttttgtatttctaacagagacgagrtttcgccatgttggccaggctggtcttgaactcctgacctcaggtgatctgcacacctcagcctcccaaagtgctgggattacaggcctgagccaccaca

SEQ ID NO: 273856 - DNA, 201 bp, Homo sapiens
taaggcacgccacatctgaggcttaatgaggtctacctggaacaggcttagctctccaaaggcagaaaagtcatgaacacacaggcagtggtgataaggarccaggacttaaagacctttggccccgaaacagttggagaaacccagagtgttcctttcttgagtaaggtgtacttttcagtcttggggccagcgtgtgtt

SEQ ID NO: 273857 - DNA, 201 bp, Homo sapiens
agcatcaggggtgggagaagttggggttggtgaaagaatggggattcttcccttaaactttacacacacacacacacacacacacacacacacacacacayatatatatttttttttttgagacagagtctcactctgttacccaggctggagtgcagtggtgcaatctcagctcactgcaacccctacctcccaggttca

SEQ ID NO: 273858 - DNA, 201 bp, Homo sapiens
tccaaggctctctcatccatcttctcgaccagacagagtggaaccccaaggcatttcaaatcactttcacttttctattctattagcagaaagtctccccygggtgatgccaggtctttaatacctgtctccactggctgatctcttactgtggaggagtgcgcggcccaggctcagaggcttgggcaggcaacagaaaga

SEQ ID NO: 273859 - DNA, 201 bp, Homo sapiens
ttttctttctttttttttttttttgagacagagtttcactctcttgcccaggctggggtgcagtggcacgatatctcggctcattgcaacttctacctccygggttcaagcgattctcgtgcctcagccactggagtagctgggagtacaggcgtgagccaccatgcccaactaatttttgtatttttagtagagatgggg

SEQ ID NO: 273860 - DNA, 201 bp, Homo sapiens
acccgggaggtggtggttgcggtgagctgagattgcgctattgcactccagcctgggcaacaagagtaaaactccatctcaaaaaaaaaaaaaagaaaacmaagaaaagtatctcagagcttccttggggtgactggtggagaccaaggtcaaaatcatatcacccaaacagaggctttttcttaattgtacataacaaag

SEQ ID NO: 273861 - DNA, 201 bp, Homo sapiens
aggtcaggagttcaagagcagcctgactaacatggagaaaccccatctctactaaaaatacaaaattagccgggcatggtggtgcatgcctgtaatcccarctactccagaggccgaagcaggagaatcacttgaacccgggaggtggtggttgcggtgagctgagattgcgctattgcactccagcctgggcaacaagag

SEQ ID NO: 273862 - DNA, 201 bp, Homo sapiens
gcttgacaccacgcccggctaattttttgtatttttaatagagacagggtttcaccgtgttagccaggatggtctcgatctcctgaccttgtgatccgccygcctcggcctcccaaagtgctgggattacaggtgtgagccaccgcgccggccttcttttcttttgttttgtttgagacagggtctcactctgtcacccag

SEQ ID NO: 273863 - DNA, 201 bp, Homo sapiens
tggcgcgatctcagctcactgcaagctccgcctcctgggttcatgccattttcctgcctcagcttcctgagtagctgggactacaggcgcttgacaccacrcccggctaattttttgtatttttaatagagacagggtttcaccgtgttagccaggatggtctcgatctcctgaccttgtgatccgcccgcctcggcctcc

SEQ ID NO: 273864 - DNA, 201 bp, Homo sapiens
ttgttttgctttgtttttgagatggagtctagctctgttgcccaggctggagtgcagtggcgcgatctcagctcactgcaagctccgcctcctgggttcaygccattttcctgcctcagcttcctgagtagctgggactacaggcgcttgacaccacgcccggctaattttttgtatttttaatagagacagggtttcacc

SEQ ID NO: 273865 - DNA, 201 bp, Homo sapiens
ctgtgcattttttctgcaattacgaagagagccgaggcaattacctggttgatgtggacggcaaccgaatgctggatctttattcccagatctcctctgtycccataggtaagagctgggaaatcattccttggatataacctctgtttctgtctctcctagtcgtggctatccaggtattaggatgtggcttccagcagg

SEQ ID NO: 273866 - DNA, 201 bp, Homo sapiens
ctgcctggaaactgccaaggagtcacatttgctttgttttgttttgctttgtttttgagatggagtctagctctgttgcccaggctggagtgcagtggcgygatctcagctcactgcaagctccgcctcctgggttcatgccattttcctgcctcagcttcctgagtagctgggactacaggcgcttgacaccacgcccgg

SEQ ID NO: 273867 - DNA, 201 bp, Homo sapiens
cgaggatatatctccgattctgccccaaaaggattctcacaccaatcatagcaataatactgtaagaataggaacaataataatcaataataatatagtcrtgctaatcgtaatagtagcagccaccactttatgtgtgccagactctgctgtattttctctctgtctctgtgtgtgtgtgtgtgtgtgtgtgtgtgtgtg

SEQ ID NO: 273868 - DNA, 201 bp, Homo sapiens
cttcttcactttgccctctgatccaccatgaccactctgctgcaggagcttttaacagaaagcctgggagagcattctgagggggtctgtgctatagctcytcctccctggggtctaaccatccttgctttctctagacactccacacattaaactgtcttgcccgttgcagggatgggatggcatcatgtggcctctaat

SEQ ID NO: 273869 - DNA, 201 bp, Homo sapiens
ttattacaaccagcaaccaacgttaatcactttcccatatcagtacataaagcgccatcgcattctttttgttgaatgcaggttattctgcatgatggatrtacccaagtttattttaaccagttcccactcatggacaattaggttattttcaatttatatcaatgagacaaattccttcaagtagaattatgctaggga

SEQ ID NO: 273870 - DNA, 201 bp, Homo sapiens
ccactctgctgcaggagcttttaacagaaagcctgggagagcattctgagggggtctgtgctatagctcttcctccctggggtctaaccatccttgctttmtctagacactccacacattaaactgtcttgcccgttgcagggatgggatggcatcatgtggcctctaattacacatcccttcaataataagattgactct

SEQ ID NO: 273871 - DNA, 201 bp, Homo sapiens
acagccgtgtatatctataatttcaatcagattgcttgtgcctaacaggatacacacacacacacacacacacacacacacacacacacacacacacacasaggaggcattcaggatgtatttgttggatgttggatggctgggggtgtagatggatgcatggatggacagacacaacccctttgttggttggctagattg

SEQ ID NO: 273872 - DNA, 201 bp, Homo sapiens
gcactttgggaggtcggggggggaggggcagatcacttgaggatcagcctggccaacatggtgaaacaccgtctctactaaaaatacaaaaattagctggkcgtggttgcttgtacctgtaatcccagctacttgggaggctgaggcaggagaatcacttgaacccgggaggctgaggttgcagtgagccacgatggtacc

SEQ ID NO: 273873 - DNA, 201 bp, Homo sapiens
aaagtttcataaaaaatcatgggaaatggtctaggcgccgtggctcactggtgaatattgtcaatttcatgtggttcccctcaatttatgttttatttggycaaaaagatccttccaggttcccaatctgtagcatcaacagatctgctttgtggagtcccctttggcccttgttctgccccgatttgggggctgggggct

SEQ ID NO: 273874 - DNA, 201 bp, Homo sapiens
atcaagcgggaggacctgctaaataatgcagcccatgccgggaaggccctgctcacaggactgctggacctccaggtaacaccccctcccctgccccgccyccaccacccatggctccccgcagcagcctccggggcaacactggagctcttcggcatggtgttgtgcctgctgttccagcagttcgtaacgggctgtgct

SEQ ID NO: 273875 - DNA, 201 bp, Homo sapiens
tctcctccccagtcccaggactccctcccagccctcgcggtccctctggtgggtcccgccccagcccccgtctcccccgcccccggaggctggactctgcycccgccccgcctgccacctccctcctgggggcggtggcccgtggcgggcgcacccattggctgtggcgaaagcgagggccggggctggcggcgctgattg

SEQ ID NO: 273876 - DNA, 201 bp, Homo sapiens
gcggggccctcccccgaaaagacaggggctcccaccccccagagagcaaaataccttcctttctccttcagaaatgggcccttcctcctggctccagctcyagacagaagtcctctcccttttaccgcttgaaatagaatgcggccccaaaaagtggtctccaggtctctagagccccctcacctcttgggagactgatgc

SEQ ID NO: 273877 - DNA, 201 bp, Homo sapiens
aaatgatgtgtcttatccttctggcttaaaccaagctgggcttaaaacatcttttaaaaaaaatctgtattctatttttttctctctgtttatcgctctcyttctgcctctgttaatctttgtttctgtgtagttgcatcctgtttctgtctgaaaacccttgtctttctgaatccatctttcagtctctcacattctgtc

SEQ ID NO: 273878 - DNA, 201 bp, Homo sapiens
atcataagacaaggaaatcccggagcagagactctgcaagtcaccctcccaccccagatactgggctctggagagatagatgattcacccttagccctgcyggagacccctccctacccgtcagagaggcagggtggcctctgacaccaccacattaaaggcttttggggatttcccctctcctccccagtaaagatgtaa

SEQ ID NO: 273879 - DNA, 201 bp, Homo sapiens
accagctgagtgcatccttttcccaaacctgctctgcttccaaggggcccttttctgtctcctccacctgtccccatgttttggggactgcctggaaatcygggacaccctcctgaggagggagctggtgcccaacggcacctcttaggatgaacccagccagctgcgttcctggcctctgcagaatggcatacagaaggc

SEQ ID NO: 273880 - DNA, 201 bp, Homo sapiens; identical to SEQ ID NO: 54394

SEQ ID NO: 273881 - DNA, 201 bp, Homo sapiens
atatgccaataataaataaattaaaaaaagataatagtattttattaatggtaccttcatgagagtgactttgtatctcagatcatttgtactgaggttaygtaagagaacattcttgttcttagaagatacaggctgaaggattcaaggatgaaatatcacaatgtccacaactaactcaaataattcagaagacagata

SEQ ID NO: 273882 - DNA, 201 bp, Homo sapiens
cctgagccagcccctgcctctgggaagatgacccctaaatggcagcctcagtcagggggcagggttttagagaacaacaggaatagaagtatttgcctccmaggagtagataagacggtgtatgtgaaaccttgacacgattggcattcattcgtaaaatcagagcagatacctgcacacacaggcataaatgaaagatac

SEQ ID NO: 273883 - DNA, 201 bp, Homo sapiens
cacccgccacctctcccccgctccctgccccaacacacgcacaaaggctgtgttcaatgcattctctcttgcagtctgggaggacagctggccctcttccmagagggcccgcatttcccccctaaagtgtgcacccccgcaagcgcctgtggacattgcctggtggaattccctgggcactcagccaagagaaatgggtgc

SEQ ID NO: 273884 - DNA, 201 bp, Homo sapiens
tttcttgggtccatcactgtttgctggatttcttcccaatccataattgcctggaagcagccatcacatccatcacatttattcttgtgtcttaaatgcayagcacacttccctatgcacacagtagatattcaaggagcattgactgaatgcagaaaagtattttttaaattggggtaaaatacacataacatgaaattg

SEQ ID NO: 273885 - DNA, 201 bp, Homo sapiens
ccatccttacaactatgactaatgactgatatttcttggttttaggcccctggctgccccgactacagcatcctctccttcatgggcgcgttccatgggargaccatgggtaaggagggaccattgcgctcccaaggtggcgtttagaatagtaataataacggcaacaatagcggcggctgacattagcagtttacacat

SEQ ID NO: 273886 - DNA, 201 bp, Homo sapiens
tggccacagaggtgatgtggccacttcccagggcttcaagacacatgaaagtgaggatgcattcatcagggtgagagctgtgatttttagaaactcaagtsaaacaaatgaggtcggctgctgagttcttttctcagagagagaccctgctgccctgttgtgctccaaccttatgtgtaattatctcccagtactgactgg

SEQ ID NO: 273887 - DNA, 201 bp, Homo sapiens
ggaaatcagggcaggctcccttgaggaagtagcattttaccctaagtcttgacgaacagggattggctgggtgaagaaggtaaggaagagcattctgggcrgagggaagggtgcatgcgatggcctgaggtgggatggagcttacagaggtggtaaaagggaaagaagggggcgtgaaggcgaacggttgggaggggatga

SEQ ID NO: 273888 - DNA, 201 bp, Homo sapiens
gactttgagaaaccacgctcctcacctacctcctgcctctttcaggtgtggtgttgggtggctgtggtgacaaatccattcgtttccgtcccacgctggtsttcagggatcaccacgctcacctgttcctcaatattttcagtgacatcttagcagacttcaagtaaagaagccatttccactacagtgagaaagcccgga

SEQ ID NO: 273889 - DNA, 201 bp, Homo sapiens; identical to SEQ ID NO: 54373

SEQ ID NO: 273890 - DNA, 201 bp, Homo sapiens
ataatgcaagccacatatgtaattatagcttttccagtagtcaccttttctttcatttttacaccctgcctggaaactgccaaggagtcacatttgctttrttttgttttgctttgtttttgagatggagtctagctctgttgcccaggctggagtgcagtggcgcgatctcagctcactgcaagctccgcctcctgggtt

SEQ ID NO: 273891 - DNA, 201 bp, Homo sapiens
tggtgtcaagtcctggttggccccactggctgccatgggtgtactaaccctgaggtgggtctcctacgcctccctccctctggtcttctcgacagggaggkccaggtgcaaccacaaagtgtcccgggcctgtggagtggcatcaccatggacaggggactctgtgtaggaggcagaggtgggaatgagcattgtccacca

SEQ ID NO: 273892 - DNA, 201 bp, Homo sapiens
ttggacccgggaggcagaggttgcaatgagccaagattgcaccactgcactccagcctgggtaacggagtgagactctgtccaaaaaaaaaaaaaaaaaaraaagagagagagagaaagaaagaatatgggatatcccacaggaaaaaatggttccacaagatcctctaaaccactggttttgtcttctcctgagtcttgg

SEQ ID NO: 273893 - DNA, 201 bp, Homo sapiens
tgcgatagaatggttaagaatgtctttcaaaaagccctagaagattacaacaatcttgcttgagtttaacataactacagagtaattcttattaattaacrtcaaacatttttattttaatttttttctttttttatttcttctttttaaaaaaaagggatacatgtgtagaacctgccggtttgttacataggtaaacgt

SEQ ID NO: 273894 - DNA, 201 bp, Homo sapiens
ggctgggcacggtggctccgcctgtaatcccagcactttgggaggctgagacgggaggatcacctgaggccaggagttcgagaccagcctggccaacatgrtgaaaccccatctctactaaaaattagctgggtgtggtggcacatgcctgtaatcccagctactagggaggctgaggcacaagaatcccttggacccggg

SEQ ID NO: 273895 - DNA, 201 bp, Homo sapiens
acggtactgcctgcttccccaagccaagcgtctgcttttctgttttgctgaactcaggttgcttagcgaccacgcactctaaagccattcacaagatcgayatcccttcctttgactggcccatcgcaccgttcccacggctgaaataccctctggaagagtttgtgaaagagaaccaacaggaggaggcccgctgtctgg

SEQ ID NO: 273896 - DNA, 201 bp, Homo sapiens
gaggccgaggcgggtggatctcccgaggtcaggagttccagaccagcctggccaatatggcgaaaccctgtctctactaaaaatacaaaaattagccagaygtggtggcgggtacctgtaattccagctactcgggaggctgaggcaggagaatcgcttgaacccgacgggcgcggaggttgcagtaggccgagatctcac

SEQ ID NO: 273897 - DNA, 201 bp, Homo sapiens
gccaaggcaggcggatcacccgaggtcaggagttcaagaccagcctggctaatatggtgaaaccccatctctactaaaaagacaaaaattacccgggcatrgtggcacatgcatgtaatcccagctacttgggaggctgaggcaggagaatcatttgaacccaggaggtggaggttgcagtgagccgagatcacaccacta

SEQ ID NO: 273898 - DNA, 201 bp, Homo sapiens
gctggctggcactgtcctcaattaggaagggccaggccaggcgcggtggctcatgcctgtaatcccagcactttgggaggccaaggcaggcggatcacccraggtcaggagttcaagaccagcctggctaatatggtgaaaccccatctctactaaaaagacaaaaattacccgggcatggtggcacatgcatgtaatccc

SEQ ID NO: 273899 - DNA, 201 bp, Homo sapiens
gtaagaccctgtctcaaaaaaaaaaaaagaagaagaaaatgctccttaaattcccctccaaggttgggcacagtggctcacacttgtaatcccagcacttygggaggctgaggcaggcagatcacttgagtccaagagttcaagaccagcctgggcaacatggtgaaaccccgtctctataaaatatacaaaaaattagct

SEQ ID NO: 273900 - DNA, 201 bp, Homo sapiens
agagtaagaccctgtctcaaaaaaaaaaaaagaagaagaaaatgctccttaaattcccctccaaggttgggcacagtggctcacacttgtaatcccagcasttcgggaggctgaggcaggcagatcacttgagtccaagagttcaagaccagcctgggcaacatggtgaaaccccgtctctataaaatatacaaaaaatta

SEQ ID NO: 273901 - DNA, 201 bp, Homo sapiens
aaaggtcttcttcttttaagcttcttcaccaaggtcacagaggtagcaagaagttgaaacaggacttgaactaggatctgcctggctccaaaacctaagtstccaaacatggggttattggaggacctcccagggccagggacttagaagccctcctccttcccttcctgtacctttattcctcaagtctgtatagactta

SEQ ID NO: 273902 - DNA, 201 bp, Homo sapiens
acactagatcttattcttctatctaactgtacttttgtatccattaaccaacccctatttatctccacctccccattagccttgccagcctctgataggcrtcattcgactctatttcttcataagggaaatgtttttagttcccacctgagtgagaacatgcaatatttgtgtatgtgtggcttatgtcacttaacataa

SEQ ID NO: 273903 - DNA, 201 bp, Homo sapiens
gctgaggtggaaggattgcttgagcctgggaggtcaaggctgcagtgagccatggttgtgccactgcatttcagcctgggtgacagagtaagaccctgtcwcaaaaaaaaaaaaagaagaagaaaatgctccttaaattcccctccaaggttgggcacagtggctcacacttgtaatcccagcacttcgggaggctgaggc

SEQ ID NO: 273904 - DNA, 201 bp, Homo sapiens
atttttatcctcatttgactaatgaggaatcaggcacagagaggttaagtaatttgtcaaaggtcacacagcctgttaagtgacaaagccaggattccaayccagagcccatactcttacccactacactgtgtactgccatgtgtgcatacagatttacacacacacacacacagccatcaggggccaacgtcctttcac

SEQ ID NO: 273905 - DNA, 201 bp, Homo sapiens
agaaatctcacataacacttctaacacttgactaagagctggtcacgtggtcactcctaaccgtaaggaggtgtgtggatgtgtgtgtgtgagtgtggcasgcaggcctaaaggggtgtctaaatggaagagactttaatctaaaccatcccagggccacactctgtgggagagggaggggtgtgttcaaactgccagctc

SEQ ID NO: 273906 - DNA, 201 bp, Homo sapiens
ataagtgtctaacacggtgcccggctctgtcacccccagaataggaccatgtctccagtttctaccaatgagctgccgtgaaataagacttgctcccccarctcagcccccagtaccctgaaattatttggggttttccaagcccttgtttgctgtccttcatatggacagcagagagtaaggtgaaatcaaggtcctcca

SEQ ID NO: 273907 - DNA, 201 bp, Homo sapiens
cttcccaatccataattgcctggaagcagccatcacatccatcacatttattcttgtgtcttaaatgcatagcacacttccctatgcacacagtagatatwcaaggagcattgactgaatgcagaaaagtattttttaaattggggtaaaatacacataacatgaaattgaccattttcatcattttatttttatgtattt

SEQ ID NO: 273908 - DNA, 201 bp, Homo sapiens
tgtatttacccagcagtgggattcctggatcatatggtagctcaatttttagttttttgaggaacctccaactgttctctatagtggttgtactagtttayattcccactaacaatgtacaagggttccctttgctccacatcctctccagcatttgttattgcctgtcttttggatataagccatgttaactggggtgag

SEQ ID NO: 273909 - DNA, 201 bp, Homo sapiens
cacaacccctttgttggttggctagattgatggatacatgtgtgaatgaatggatgaataaatgaatccaatttacaaattccactgtgggaaaacagaaygctattcttccaaccagagtagcctgcccctttatctctgtctagcacagtgtttttcaaactttagcatcagaatcccctcaagagcttgttaaaacac

SEQ ID NO: 273910 - DNA, 201 bp, Homo sapiens
ttagttttttgaggaacctccaactgttctctatagtggttgtactagtttacattcccactaacaatgtacaagggttccctttgctccacatcctctcyagcatttgttattgcctgtcttttggatataagccatgttaactggggtgagatgacagctctttgtagttttgatttgccttctctgatgatcagtgat

SEQ ID NO: 273911 - DNA, 201 bp, Homo sapiens
tggagtgcagtggcatgatcatgtttacctggaacctatgaataggacctaatttggaaatagagactttgcagaaatagttaggttgaaatgaggtcttyctgcattagagtggcccctaatccaatgactgctatcttttttttttttttttttgagatggagtcttgctctgttgcccaggctggggtgcagtggtgc

SEQ ID NO: 273912 - DNA, 201 bp, Homo sapiens
aacccctttgttggttggctagattgatggatacatgtgtgaatgaatggatgaataaatgaatccaatttacaaattccactgtgggaaaacagaacgcyattcttccaaccagagtagcctgcccctttatctctgtctagcacagtgtttttcaaactttagcatcagaatcccctcaagagcttgttaaaacacaga

SEQ ID NO: 273913 - DNA, 201 bp, Homo sapiens
gatcgccccactgcactccagcctgggcgacagagtgagaccctgtcagagagagagagagagagagattgattatatctaaacgatgcagtgccttgctsataacaggtgcctaattaacttttgttgattgaattagtgggtgagagggagtgaatgaatgacattaactcttccaattgtttgaaatatattgtgcta

SEQ ID NO: 273914 - DNA, 201 bp, Homo sapiens
tatggctcactgcagcctcaaattcctgggctcaagcgatcctaccacatcagcctcctgagtagctgggactataggcaggcaccaccacacccagctartttttaaagtctttgtgaagatgggatcttgctatgctgcccagactagtctggaactcctggcctcaagaagtcctcggtctcccagtgtggctgagat

SEQ ID NO: 273915 - DNA, 201 bp, Homo sapiens
gcctaagtctgcatttctggtttctttcagggtggcagcacgcaaagggtgtccctgtccctcaaggggtcatggcctccatgttgctcgcccagcgcctrgcctgcagcttccagcacagctaccgcctgctggtgcctggtaagccccgggggtcttgataagaactggtactaatggaagataccatccagactaggg

SEQ ID NO: 273916 - DNA, 201 bp, Homo sapiens
tctggggcctagaggcccttccaggagtcttcaaactctgacaacagagatggcctctgaggcagcaggaccagcagagaccacccgccacctctcccccrctccctgccccaacacacgcacaaaggctgtgttcaatgcattctctcttgcagtctgggaggacagctggccctcttccaagagggcccgcatttcccc

SEQ ID NO: 273917 - DNA, 201 bp, Homo sapiens
agcccccgacccctgccaaccttgtccttgtccagaggtcccgtaatcttcactgccagcatctcccatttaggtgctaacatctattatcttggatatcrgcaacttgccagcactctgtccctgggctgcactgagaattccttcaaaggtgggacccactgtattctagtaccttactactgaaagtgtggtccagcg

SEQ ID NO: 273918 - DNA, 201 bp, Homo sapiens
cctagaggcccttccaggagtcttcaaactctgacaacagagatggcctctgaggcagcaggaccagcagagaccacccgccacctctcccccgctccctrccccaacacacgcacaaaggctgtgttcaatgcattctctcttgcagtctgggaggacagctggccctcttccaagagggcccgcatttcccccctaaag

SEQ ID NO: 273919 - DNA, 201 bp, Homo sapiens
  misc_feature (1)...(201): n = A,T,C or G
gcccagcgcctggcctgcagcttccagcacagctaccgcctgctggtgcctggtaagccccgggggtcttgataagaactggtactaatggaagataccanccagactagggattcctgggctggaagagcccttggggataaagggaccagccagtgagtgtttctgggactgtcccactgtattagtctgttctcatgc

SEQ ID NO: 273920 - DNA, 201 bp, Homo sapiens
aataacaataataatgaacaagtgaacaaggctagaatcagataatccaaaaatttgtgttgtaagtaggtagtgcataactctttttctataaaaacaaygttacgccgggtgtggtggctctcgcctgtaatccagcactttgggaggccgaggcaggcagattgcctgagctcaggagttcgcgaccaacttgggcaa

SEQ ID NO: 273921 - DNA, 201 bp, Homo sapiens
aagaaaaagaggtttaatggtctcacagtttcatatggctggggaggcctcacaatcatggcggaaggtgaaggaggaacaaaggcacgtcttacatggckacaggcaagagagcatgtgcaggggaactcccgtttgtaaaaccatcagatcgtgtgagacttactcaattgactatcatgagaacagcatgggaaagac

SEQ ID NO: 273922 - DNA, 201 bp, Homo sapiens
ccccaaccaccagtcctgttgctcttgccgccccaagacttggggagaagagaaacagatgaagggtttatctggggatctgtgcagtgctcccccagagkgaagcagggacacagaggccttgcgtcccaaatattctatgttgggagagttcgtgagacacactgtttctgtcacagcatccatcacccaactctgata

SEQ ID NO: 273923 - DNA, 201 bp, Homo sapiens
ctacttgggaggctgaggcaggagaatcgcttgaacccgggaggcggaggttgcagtgagccaagattacgccactgcactccagcctgggcaacagagcraaaccctgtctcaaaacaaaaacaaaaaaacaaacaacagcaacatcgaaaaaacaaaaaaacaaaaaaccaatgttcaagtgatggagaggcatgggtg

SEQ ID NO: 273924 - DNA, 201 bp, Homo sapiens
gccactgcactccagcctgggcaacagagcaaaaccctgtctcaaaacaaaaacaaaaaaacaaacaacagcaacatcgaaaaaacaaaaaaacaaaaaamcaatgttcaagtgatggagaggcatgggtggatgaggagtggcaagaggaggctgtaggaagagtagatcatgtcccgccaggtgacccatgatcttgaa

SEQ ID NO: 273925 - DNA, 201 bp, Homo sapiens; identical to SEQ ID NO: 54375

SEQ ID NO: 273926 - DNA, 201 bp, Homo sapiens; identical to SEQ ID NO: 54377

SEQ ID NO: 273927 - DNA, 201 bp, Homo sapiens
tttttagcagagaaaagctttcaccacgttggccaggctggtctcgaactcctggcctcaagcaatccatccgcctcggcctcccaaaatgcagggattayaggcgtgaggcactgcactctgcctgttttttagccattctgatggttaaatatataaagaaagagactcacgggaagttgcaaaaaccagtacaaagag

SEQ ID NO: 273928 - DNA, 201 bp, Homo sapiens
taatctcagctacttgggaggctgaggcaggagaattgcttgaacccaggaggtggaggttgcggtgagctgagatggtgccactgcactccagcttgggygacagagggagactttatcccaaaaaataataataataataataataaataaaaagtacaacacccatgcaggcatgcatacagcctaaatgcaccactc

SEQ ID NO: 273929 - DNA, 201 bp, Homo sapiens
ctttgggaggctgaggcaggcagagcacttgaggaaggtcaggagttcaagaccagcctggccagcatggtgaaaccccgtctctactaaaaatacaacarttagccaggtgtggtggtgtgagcctgtaatctcagctacttgggaggctgaggcaggagaattgcttgaacccaggaggtggaggttgcggtgagctga

SEQ ID NO: 273930 - DNA, 201 bp, Homo sapiens
tctgcaatccagcactagggcctgttgaaccacactccccagccagccccaggcttgaaattttcttgcatttatctccctttttatttatttatttattwaaatagagtctcactgtcacccaggctggagtgcagtggcgtgatctcaactcaatgcaacctccgcctcttgtgttcaagagattcttctgcctcagcc

SEQ ID NO: 273931 - DNA, 201 bp, Homo sapiens
cactttggaaggccgaggtgggtggatcacttgagggcaggagttcaagacgagcctcgccaacatggcaaaacctcatatctactaaaaatacaaaaaaattgtggctgggtacggtgactaccgcctgtaatcccagcactttggaaggccgaggtgggtggatcacgaggtcagcagattgagaccatcctgggtaac

SEQ ID NO: 273932 - DNA, 201 bp, Homo sapiens
ccagtactgactgggagatgacctgcagggcaggtgcattaataaccaggagatagacaatggcttgacttcaggccgggttcggtggctcacacctgtartcctagcactttggaaggccgaggtgggtggatcacttgagggcaggagttcaagacgagcctcgccaacatggcaaaacctcatatctactaaaaatac

SEQ ID NO: 273933 - DNA, 201 bp, Homo sapiens
ttcagctcgtttctccttgatctcataagcagagagagtttcagcattttcagcaagttgatttctttctttctttctttctttctttctttctttctttcttttttttttcttgaaaacggagtcccattctgttgcccaggctggagtgcagtggcacaatctcagctcactacaacctctgcccccctggttcaagcg

SEQ ID NO: 273934 - DNA, 201 bp, Homo sapiens
gtttttcaaactttagcatcagaatcccctcaagagcttgttaaaacacagattgatgcccctgcccaccagaattatgatttagtagaatcaccggcggscagaatgctcccaactctatttccatgttctctaggaatcctggaccagcccccgacccctgccaaccttgtccttgtccagaggtcccgtaatcttcac

SEQ ID NO: 273935 - DNA, 201 bp, Homo sapiens
ccaacatgttgaaaccctgtctataaaaaaaaaaaaaaaaaaaaaaaaaaaaaaaaaattagccaggcatggtggtgcacacctgtaatcccagctattcrggaggctgaagtgggaggattgcttaagctagggaggttgaggctgcagtgagccatgattacaccactgcactccagcctgggcaacagagtgagacca

SEQ ID NO: 273936 - DNA, 201 bp, Homo sapiens
aaatagcttgagctcaggagtttgagaccagcctagccaacatgttgaaaccctgtctataaaaaaaaaaaaaaaaaaaaaaaaaaaaaaaaaattagccrggcatggtggtgcacacctgtaatcccagctattcaggaggctgaagtgggaggattgcttaagctagggaggttgaggctgcagtgagccatgattaca

SEQ ID NO: 273937 - DNA, 201 bp, Homo sapiens
gccgaggctggaccatgggaggcctttgacgaagcacagccattaagcccagctggtacacaggtgatgggctttgacgccagccttgtctcctcccactrcaggcccggtacccccagttcatcagcagggtgagaggacgaggcaccttttgctccttcgatactcccgatgattccatacggaataagctcattttaa

SEQ ID NO: 273938 - DNA, 201 bp, Homo sapiens
ctttgagtttgctctaaggtttaccatacatatcttaacagaatcgacttcagatttgtatctctttttttgttctgatgtataaaacacatacagaaaawttcataaaaaataaaatcacagcttactgaactattataaagcaaaccacccatgcacttagccaaaacaagaaatacattgctggcacccacagatgcc

SEQ ID NO: 273939 - DNA, 201 bp, Homo sapiens
  misc_feature (1)...(201): n = A,T,C or G
cagcagggtgagaggacgaggcaccttttgctccttcgatactcccgatgattccatacggaataagctcattttaattgccagaaacaaaggtaaggggncaggagtggctgctgagtttcatgagcatccagtatctcctgctgtagctgccacatgttgctaggtactcagcaatattttgtgtggggggcaggtggt

SEQ ID NO: 273940 - DNA, 201 bp, Homo sapiens
tggagtcatagagaaatgtgttttctcgaggcccaaagaggttagccacggggagaggtaaatggtccagtctggagtcctaagacctaaaagggcttctrcattaaagacgtggccccttcatttgacagttaaacacacagaggcacaaaaggggaagagacttgctcaaggtcacccagcctgtgggagacagctggc

SEQ ID NO: 273941 - DNA, 201 bp, Homo sapiens
caaatgggatttctttatccatttatttactcaacaagcgttcgctgaggaggtgagttgtaagtggacactggagacagttacagtgatgatgaagaccmtcagagccccttccttcaggaagcatgcagtgtagcaggaaggcatggctttacacatggcatttcacaaccaatccattgcaattttaagtcctgggaa

SEQ ID NO: 273942 - DNA, 201 bp, Homo sapiens
aatggtctcacagtttcatatggctggggaggcctcacaatcatggcggaaggtgaaggaggaacaaaggcacgtcttacatggctacaggcaagagagcrtgtgcaggggaactcccgtttgtaaaaccatcagatcgtgtgagacttactcaattgactatcatgagaacagcatgggaaagacccacccccatgattc

SEQ ID NO: 273943 - DNA, 201 bp, Homo sapiens
gaaggaggaacaaaggcacgtcttacatggctacaggcaagagagcatgtgcaggggaactcccgtttgtaaaaccatcagatcgtgtgagacttactcarttgactatcatgagaacagcatgggaaagacccacccccatgattcaattacctcccactgggtccctcccatgacatgtgggaattatgggagctacga

SEQ ID NO: 273944 - DNA, 201 bp, Homo sapiens
gattctgtgctaaaaggaagatttgatctggtgggagaggttcagggaagtcttctctgagaaagtgagtcatgaactgatatcagaagtgtgagtagaamtgaaggaatcagaagcaagggaaaagcattttgggtggtgggaacagcatctgcaaagactgagtagaagccttcccaggacaaacagtagatcctcgtg

SEQ ID NO: 273945 - DNA, 201 bp, Homo sapiens
atttgtatttacagtaaggtgggaagtgtcctaactcccattttacaagcatggaaatacaggcacaatgcaaaaaacaaaaaaacagaaaaaatagaaawggctaaatcacagagtttcttacctttacctcttctgcattttcttggctggagctgaatcttttttggcacatttatgatttagaaaaccatatggtga

SEQ ID NO: 273946 - DNA, 201 bp, Homo sapiens
gttggcaaagatacaggaatacgtgtactctcgtacactgctattaggcaagtagcaaccaggggaaggattaaaaaatgataggaattacagcttacttktaacccacttagccctcacctccactccttaaggtaaaggaaacttcaagtcagggaaattaagttgccagagccacagagctgatgagcggctgagcca

SEQ ID NO: 273947 - DNA, 201 bp, Homo sapiens
agatacaggaatacgtgtactctcgtacactgctattaggcaagtagcaaccaggggaaggattaaaaaatgataggaattacagcttacttgtaacccayttagccctcacctccactccttaaggtaaaggaaacttcaagtcagggaaattaagttgccagagccacagagctgatgagcggctgagccaggcttttg

SEQ ID NO: 273948 - DNA, 201 bp, Homo sapiens
cacatacctccagatttagcagattgggatcctatgtttattatctcacagtttctgcgggttgggactccaggggtgacttagccagatcctctggctcraggtctgtcatgagggtgtaatggagctgtcagctggggctgtggtctcatatgatggctcaacttggcggttggacgatctactggcagtcccacttac

SEQ ID NO: 273949 - DNA, 201 bp, Homo sapiens
tggtgaagtcaccctttaaaataagcagagcctgtccctcctccgtaatagctcagcacctcacacatgcttccgactcagcctgtgcttttgcaacttayttgcttacctattttcttttcccactcctccatgactttgtggaaggcaaggactttatctcaggatttctctatcaccagacctagcttggggcagcaa

SEQ ID NO: 273950 - DNA, 201 bp, Homo sapiens
aaatgcttgatcattcagtattaattcaaaccggttttttgcatctttgtgatcatgatcaaaatttgcctttaggagaagtgtgttgttttgctgcaaakgtttcattcaaaggctagcactcgatgaaatcaaagatagcctcagttccattcatagcttctaggaaacaggtcagatgggcaaatttcctgctaacca

SEQ ID NO: 273951 - DNA, 201 bp, Homo sapiens
tctaccttaaagtgtatagtcttataagtgacaagacatgaaccaaataattccacaaatagaggtaacatatgaatgtgatggggccacaaaggggagcygtgtaggattctgtgctaaaaggaagatttgatctggtgggagaggttcagggaagtcttctctgagaaagtgagtcatgaactgatatcagaagtgtga

SEQ ID NO: 273952 - DNA, 201 bp, Homo sapiens
accgcacctgtctttcactcagggatcagcaagtcttgggcttgagctaccctttgtgtttcagcaacatgtggagctaaaaagattgtgggattcacccrggaaatcaaacaccctctgtaaactcattacacattatgtggaaaatgtgaaatgcattcaaacaaatgatgggtgaccatgtattagtctgttcccgca

SEQ ID NO: 273953 - DNA, 201 bp, Homo sapiens
aagatgtcaacctcaaaacaattaatgggtgcataatattccatgaaatggttgactatgccacattctgcttagctgacctccggtgctggacatgtagrttgttttccctttgttttttgtttgtttgttgagacagtgtctcactctgttgcccaggctgaagtgctgtaatcatggctcactgcagcctcaacctct

SEQ ID NO: 273954 - DNA, 201 bp, Homo sapiens
tccatgaaatggttgactatgccacattctgcttagctgacctccggtgctggacatgtagattgttttccctttgttttttgtttgtttgttgagacagygtctcactctgttgcccaggctgaagtgctgtaatcatggctcactgcagcctcaacctctcaggctgaagcaatcctcccacctcagcctcccaagtag

SEQ ID NO: 273955 - DNA, 201 bp, Homo sapiens
ggacccgggaggcagaggttgcaatgagccaagattgcaccactgcactccagcctgggtaacggagtgagactctgtccaaaaaaaaaaaaaaaaaaaaaagagagagagagaaagaaagaatatgggatatcccacaggaaaaaatggttccacaagatcctctaaaccactggttttgtcttctcctgagtcttgggg

SEQ ID NO: 273956 - DNA, 201 bp, Homo sapiens
ccccagggaacttttttttttttccaagacagactctcactctgttgcctaggttggagtgcagtggcacaattttggctcaatgcaatctctgcctcctsggttcaagcaattctcctgcctcagcttcctgagtagctggaattacagtcgtgcaccaccacactcggcaacatttttgtatttttaatagagaggggg

SEQ ID NO: 273957 - DNA, 201 bp, Homo sapiens
gaactcctgacctcaggtgatctgcacacctcagcctcccaaagtgctgggattacaggcctgagccaccacacttggccttaaaatctttttaaaaaacytttttggatacataatagttgcagtgcgtaatgatcaaatctgggtaattggatatccatcacctaaaatatttatcatctctttgtattgggaatattc

SEQ ID NO: 273958 - DNA, 201 bp, Homo sapiens
acacttggccttaaaatctttttaaaaaacctttttggatacataatagttgcagtgcgtaatgatcaaatctgggtaattggatatccatcacctaaaayatttatcatctctttgtattgggaatattccaaatccactcctattttgaactatgcaataaattattaactaaaatcaccctattgtgctactggacac

SEQ ID NO: 273959 - DNA, 201 bp, Homo sapiens
cttaaaatctttttaaaaaacctttttggatacataatagttgcagtgcgtaatgatcaaatctgggtaattggatatccatcacctaaaatatttatcawctctttgtattgggaatattccaaatccactcctattttgaactatgcaataaattattaactaaaatcaccctattgtgctactggacactagatctta

SEQ ID NO: 273960 - DNA, 201 bp, Homo sapiens
ccgggaatccttcatgttccttgacgtgtggaggcttcactctgcttctggcgtcacttggtgttctccccactgtgcctgtgtctgtctccagattgtcktcttcttataaagataccagtcattgagccgggcgctgtggctcacacctgtaatcccagcactttgggaggccaaggcaggtggatcacttgaggtcag

SEQ ID NO: 273961 - DNA, 201 bp, Homo sapiens
aaacaaagaaaagtatctcagagcttccttggggtgactggtggagaccaaggtcaaaatcatatcacccaaacagaggctttttcttaattgtacataayaaagaaagctttcacttgttagtctatctaggtgtacggtttggggtttttctttctttttttttttttttgagacagagtttcactctcttgcccaggc

SEQ ID NO: 273962 - DNA, 201 bp, Homo sapiens; identical to SEQ ID NO: 54378

SEQ ID NO: 273963 - DNA, 201 bp, Homo sapiens
gcatatttctattggggagatagattttaatctagtagtagtaaaattcttggaatactttttcatattcttgtcatgaatattatcctgtatttttattkgaaatatataattttatgacactaactgctaacatctattttatattgaattacttttggaattgaaatctttgtaatatcaaagcggctagtttctaat

SEQ ID NO: 273964 - DNA, 201 bp, Homo sapiens
caactattttataaatccagaaatctttgtactaatataagtgattgtagttattttggatagtgttttgctaacaaaacgggagacattttaaatgcatrtttctattggggagatagattttaatctagtagtagtaaaattcttggaatactttttcatattcttgtcatgaatattatcctgtatttttatttgaaa

SEQ ID NO: 273965 - DNA, 201 bp, Homo sapiens
agttatcaatggcttttgaggttttgcttttccttttttcttttttgtttttgtttttgtttttgtttttgttttttttttggtgtgtgtgtatgtgtgtytgagatggagtctcactctgttggccaggctggagtggtgccgtggtgcaatctcgactcactgcaacctccacctcccggattcaagtgatcctcctgc

SEQ ID NO: 273966 - DNA, 201 bp, Homo sapiens
cctgggtggttttaagaagttatcaatggcttttgaggttttgcttttccttttttcttttttgtttttgtttttgtttttgtttttgttttttttttggkgtgtgtgtatgtgtgtctgagatggagtctcactctgttggccaggctggagtggtgccgtggtgcaatctcgactcactgcaacctccacctcccggat

SEQ ID NO: 273967 - DNA, 201 bp, Homo sapiens
gccttttcagcacaactagggttgcttcttggcaggagaagaatgtgtatggcaacccctggagtgacacatcagttttattaagcttcatctcccagctyctggcactgaacatttcatttttgctagcagtggaagcaacagttttactgtgcagtcagcccaggttctggcagcagcagcatctgcctggcaccatct

SEQ ID NO: 273968 - DNA, 201 bp, Homo sapiens
ttattcttctcgacctgggtggttttaagaagttatcaatggcttttgaggttttgcttttccttttttcttttttgtttttgtttttgtttttgtttttkttttttttttggtgtgtgtgtatgtgtgtctgagatggagtctcactctgttggccaggctggagtggtgccgtggtgcaatctcgactcactgcaacct

SEQ ID NO: 273969 - DNA, 201 bp, Homo sapiens
tctcattaaatgggtctgccccttgttccaggacaggagagccaaacatagcggacaggattgatgttgttttcatgaatgtaggtggccgctgtgttctytgtgggttttcaaggtgggaatttgtttgcaaatgaatgtatgaagaagccaggagttaacactgcttcagggaggttttagagcctgggggaaataatg

SEQ ID NO: 273970 - DNA, 201 bp, Homo sapiens
ttttccttattcttctcgacctgggtggttttaagaagttatcaatggcttttgaggttttgcttttccttttttcttttttgtttttgtttttgtttttktttttgttttttttttggtgtgtgtgtatgtgtgtctgagatggagtctcactctgttggccaggctggagtggtgccgtggtgcaatctcgactcactg

SEQ ID NO: 273971 - DNA, 201 bp, Homo sapiens
gaggcctcacaatcatggcggaaggtgaaggaggaacaaaggcacgtcttacatggctacaggcaagagagcatgtgcaggggaactcccgtttgtaaaamcatcagatcgtgtgagacttactcaattgactatcatgagaacagcatgggaaagacccacccccatgattcaattacctcccactgggtccctcccatg

SEQ ID NO: 273972 - DNA, 201 bp, Homo sapiens; identical to SEQ ID NO: 54384

SEQ ID NO: 273973 - DNA, 201 bp, Homo sapiens
cagcccccgacccctgccaaccttgtccttgtccagaggtcccgtaatcttcactgccagcatctcccatttaggtgctaacatctattatcttggatatyagcaacttgccagcactctgtccctgggctgcactgagaattccttcaaaggtgggacccactgtattctagtaccttactactgaaagtgtggtccagc

SEQ ID NO: 273974 - DNA, 201 bp, Homo sapiens
agcactttgggaggccaaggcaggcagattacttgaggtcagaagttcaagaccaaactagccaacatagtgaaaccccatctctacttaaaaaaaaaaaatcactgggcatggtagcacatgcctgtagtcccagctactcaggaggctgaggttgcagtgaaccgagatcgagccactgcactccagcctgagcgatag

SEQ ID NO: 273975 - DNA, 201 bp, Homo sapiens; identical to SEQ ID NO: 54387

SEQ ID NO: 273976 - DNA, 201 bp, Homo sapiens
tgtccctgggctgcactgagaattccttcaaaggtgggacccactgtattctagtaccttactactgaaagtgtggtccagcggccagcagcattgcatcwtctaggagctagctagaaatgcagaatcttgggccccacccagaactacagaatgtgaatctgcgttttaacaatatcccctggggtgatttgtgtgcac

SEQ ID NO: 273977 - DNA, 201 bp, Homo sapiens
cctgtaatcccagcactttgggaggccaaggcaggcagattacttgaggtcagaagttcaagaccaaactagccaacatagtgaaaccccatctctacttwaaaaaaaaaaatcactgggcatggtagcacatgcctgtagtcccagctactcaggaggctgaggttgcagtgaaccgagatcgagccactgcactccagc

SEQ ID NO: 273978 - DNA, 201 bp, Homo sapiens; identical to SEQ ID NO: 54388

SEQ ID NO: 273979 - DNA, 201 bp, Homo sapiens
cagcggccagcagcattgcatcttctaggagctagctagaaatgcagaatcttgggccccacccagaactacagaatgtgaatctgcgttttaacaatatyccctggggtgatttgtgtgcacttttaagtttgagaagcgtattttagacagatctgtaaaccccacactcagagctaagctagggatagctttgctgat

SEQ ID NO: 273980 - DNA, 201 bp, Homo sapiens; identical to SEQ ID NO: 54389

SEQ ID NO: 273981 - DNA, 201 bp, Homo sapiens
gcaaagtcataaaacctctaatcatgaagtggggaggtgcttatgccttaaggcaaaacttgtaacccttgccgtagataatctgccagggccaaggtgcytggggacaaggggatgtcttcctagagagacagtgtagtatgtggaatggaccacagaccctgaagccagatggagtagagagttggccactggtagtgg

SEQ ID NO: 273982 - DNA, 201 bp, Homo sapiens; identical to SEQ ID NO: 54391

SEQ ID NO: 273983 - DNA, 201 bp, Homo sapiens
gcaggatccagacacattagtcaagctgcagccaaagtcgacgttgaatttgattatgatgggcctctgatgaagacggaagtcccagggcctagatctcrggtgagttgagcacacctgagtggggtattttggaaaagggaaaaaggcgcctaagaagcaaaagcacagtcaagcttagggacctgtattgattgtcag

SEQ ID NO: 273984 - DNA, 201 bp, Homo sapiens
gaggtttgttggggttggacatcagaaaagagacaggtctagatgaggggttctcattttgggcactgttgacagttgggtcagaggattctttgttgtgrgactcccctgtgtattgtaggatattcagcagcgcctctggtctctacccactagatgccagtgacactccctaccccatgagtcatgtccatcagaaat

SEQ ID NO: 273985 - DNA, 201 bp, Homo sapiens; identical to SEQ ID NO: 54393

SEQ ID NO: 273986 - DNA, 201 bp, Homo sapiens
tatattgaattacttttggaattgaaatctttgtaatatcaaagcggctagtttctaattccctgtttctgtataggataaagtacaagtggtttatggastgtttggattataattataaatggttctttgatatgcaagttaatattttcagttatttatattcttaatgaagtgttaacaccttttttcccctaaata

SEQ ID NO: 273987 - DNA, 201 bp, Homo sapiens
ttcatgaatgtaggtggccgctgtgttctttgtgggttttcaaggtgggaatttgtttgcaaatgaatgtatgaagaagccaggagttaacactgcttcasggaggttttagagcctgggggaaataatgttgttttagaatttttagaataagtattggcagtgtgttgggggaaaaaaaaaaaccctgaaaaatagaat

SEQ ID NO: 273988 - DNA, 201 bp, Homo sapiens
gagaaggagatgtgtctagctgtggagccttccaatattaataacaatttttaatttctcacatttacacaagactttcttgtctggtttttgtttttctytttagtagagacagagtcgggtggtctctaactcctaggcttaagcgatcctcccgccttggcttcccaaagcactggggttacaagtgtgagttacaac

SEQ ID NO: 273989 - DNA, 201 bp, Homo sapiens
  misc_feature (1)...(201): n = A,T,C or G
gaagacggaagtcccagggcctagatctcgggtgagttgagcacacctgagtggggtattttggaaaagggaaaaaggcgcctaagaagcaaaagcacagncaagcttagggacctgtattgattgtcagctgctttcagagagttcaccaccagagatctgagatactcaatgaggccattttgccatacaaagccaaag

SEQ ID NO: 273990 - DNA, 201 bp, Homo sapiens; identical to SEQ ID NO: 54395

SEQ ID NO: 273991 - DNA, 201 bp, Homo sapiens
ggccgctgtgttctttgtgggttttcaaggtgggaatttgtttgcaaatgaatgtatgaagaagccaggagttaacactgcttcagggaggttttagagcytgggggaaataatgttgttttagaatttttagaataagtattggcagtgtgttgggggaaaaaaaaaaaccctgaaaaatagaatacagatttcagttaa

SEQ ID NO: 273992 - DNA, 201 bp, Homo sapiens
agattttcttgctaaatattttagtttattttatctttcaggtggctgaatttccagcctgtctatcgtactagtaatttaagcgtgtaatggaatagttkcctgccaactatttatatcaagtaattttaaagtaatatggttgactaataaaatatttagttattggcaaaagaaaaaaatgccaagacttgggaaaac

SEQ ID NO: 273993 - DNA, 201 bp, Homo sapiens
tggcaaaagaaaaaaatgccaagacttgggaaaacatgaaagattttaagctattttggcaagagtgtggacttgctataatgcttttgttgttcttgccygcaggagttaatgaaacagctgaatataattcaggtaagtgaggaggaggtaactttccttctgttgcttctttatcacaattgagctaaaagacagatg

SEQ ID NO: 273994 - DNA, 201 bp, Homo sapiens
cttctttatcacaattgagctaaaagacagatgcttaatctgttctggctcttttttaaaaaaaatgtagttgacttttgttctaaacattttttctcatwtcctttgtgatttcttctttgacccgttagttacttacatgatgtttaatttctacgctttggtaaatttcccaaatttctttctgttattgatttctag

SEQ ID NO: 273995 - DNA, 201 bp, Homo sapiens
acagatgcttaatctgttctggctcttttttaaaaaaaatgtagttgacttttgttctaaacattttttctcatatcctttgtgatttcttctttgacccrttagttacttacatgatgtttaatttctacgctttggtaaatttcccaaatttctttctgttattgatttctagtttcattccattatggttggaaacat

SEQ ID NO: 273996 - DNA, 201 bp, Homo sapiens
tatattctgctgttgttgggcagagtgttctatagatgtttcttaggtctggttgcttttagaatattgttcaagtcttctatttccttgctaatcttctscctagttgtcctatccattatggagtgccagatgttgacatctccaactattattataaaattgtttttccctttgattctgtttttgctctgtgtattc

SEQ ID NO: 273997 - DNA, 201 bp, Homo sapiens
gagaccaaggtcaaaatcatatcacccaaacagaggctttttcttaattgtacataacaaagaaagctttcacttgttagtctatctaggtgtacggtttrgggtttttctttctttttttttttttttgagacagagtttcactctcttgcccaggctggggtgcagtggcacgatatctcggctcattgcaacttctac

SEQ ID NO: 273998 - DNA, 201 bp, Homo sapiens
tcaaggggtcctcccacctcagcctctcaagtagctgagactacaggcacgcagccaccatgcccagctaatttctaaatgttttgcagacatgaaccgcrctatgttgcacaggctggtctcaaactcctggcctcaaggtatcctcctgcctcagccacccaaagtgctgggattgcaggtgtgagccaccacacctgg

SEQ ID NO: 273999 - DNA, 201 bp, Homo sapiens
ggaactgaatcttaatctactttaggtttcatatgacaggaatcatgcagtatctgacctttggtgactggcttatttcacttagcataatgtcttccagyctcatccatgttgcagcatataacaggatttcctccttttttaaggctgcataatattccactctgtggatacagcatattttttcccattcatctgtca

SEQ ID NO: 274000 - DNA, 201 bp, Homo sapiens
cctgggcaccattgagcactgagtgaacgagactccgtctgtaatcccggcacctcgggaggccgaggctggcggatcacttgcggttaggggctggagascggcctggccaacacagcgaaaccccgtctccaccaaaaccagtcaggcgtggcggcgtgaggctgcaatcgcaggcactcggcaggctgaggcaggaga

SEQ ID NO: 274001 - DNA, 201 bp, Homo sapiens
acttttgtatccattaaccaacccctatttatctccacctccccattagccttgccagcctctgataggcgtcattcgactctatttcttcataagggaartgtttttagttcccacctgagtgagaacatgcaatatttgtgtatgtgtggcttatgtcacttaacataatgtcctgtagttccatccacgtcattgcta

SEQ ID NO: 274002 - DNA, 201 bp, Homo sapiens
tgggcacacctcccagacggggtggtggccgggcagaggggctcctcacttcccagtaggggcggccgggcagaggcgcccctcacctcccggacggggcrgctggccgggcagaggggctcctcacttcccagtaggggaggccgggcagaggcgcccctcacctccggacggggcggctggccgggcggggggctgacc

SEQ ID NO: 274003 - DNA, 201 bp, Homo sapiens
gattcagctctggttggaactgctcagcttaagtgttttgattagttttttttgtgcacagctcaagaacatggggctggtttgctcttcagaaaacaagyacgatgtgtgtggacccagggtttggcagttagctggctatggagggcatgaatttctggcctcccacgggtgtttatttctccctcctctctcttctcc

SEQ ID NO: 274004 - DNA, 201 bp, Homo sapiens
tgaaaagtctcccatgtctacttctttctacacagacacggcaaccatccgatttctcaatcttttccccacctttcccgcctttctattccacaaaaccrccattgtcatcctggcccgttctcaatgagctgttgggcacacctcccagacggggtggtggccgggcagaggggctcctcacttcccagtaggggcggc

SEQ ID NO: 274005 - DNA, 201 bp, Homo sapiens
ggctatggagggcatgaatttctggcctcccacgggtgtttatttctccctcctctctcttctccggccagcatggctgcgccttcttggtggacgaggtmcagaccggaggaggctgcacgggcaagttctgggcccatgagcactggggcctggatgacccagcagacgtgatgaccttcagcaagaagatgatgactg

SEQ ID NO: 274006 - DNA, 201 bp, Homo sapiens
cgatcacacgcgatacgctcaccctcagacacattgctgctgcctgcatttcctccgggctgccatcccccttcccctaccctggcctctgtctgccacgrctgcccttgtctacctgccaagctctaattatcgttaaacatcccgtcactgcttcccggaaatctttaacttccacccaagaacagctaacactatacg

SEQ ID NO: 274007 - DNA, 201 bp, Homo sapiens
ttgggtgtttctcacagagggggatttggcagggtcataggacaatagtggagggaaggtcggcagataaacaagtgaacaaaggtctctggttttcctasgcagaggaccctgcggccttccgcagtgtttgtgtccctgggtacttgagattagggagtggtgatgactcttaacgagcctgctgccttcaagcatctg

SEQ ID NO: 274008 - DNA, 201 bp, Homo sapiens
ccgtcactgcttcccggaaatctttaacttccacccaagaacagctaacactatacgccctcctctacctgcagaaatcacttggaccctctgacatcacrtgtccaaccgacctctttctccacatttgcccgtgagctgcacttcattttgcaaggacataaagaagactattcacgcaactacatgcaaaatgactgg

SEQ ID NO: 274009 - DNA, 201 bp, Homo sapiens
tgctgggattagaggcatgagtcaccatgcccagaccctctatctgtttctaggaggttgactactttaggttttttttgttttttttttttgtttgtttkttttttaatttatttattttttattgataattcttgggtgtttctcacagagggggatttggcagggtcataggacaatagtggagggaaggtcggcaga

SEQ ID NO: 274010 - DNA, 201 bp, Homo sapiens
tttgggagtccgagggaggaggatcacttgaagtcaagagttagagactagcctcaggaatatagggagaccccatctctacaaaaaataaatataaaaawaaactaaccagacatagtggtgtgtgcctgtgatcccagctactcaggaggctgaggcaagaggatcacctgagcccaagagttcgaggctgcagtgagc

SEQ ID NO: 274011 - DNA, 201 bp, Homo sapiens
tcattaattgtttatttatcaagagaaactatttctaattttttgtgtgtgagacggtgtctcactctatcacccagactggagtgcggtggtgtgatctyggctcactgccatctccgcctcccaggttcaagcgattcttgtgcctcagactcctgagtagctgggattacaggcgtgcaccaccacacccagctaatt

SEQ ID NO: 274012 - DNA, 201 bp, Homo sapiens
gagcccaggagttcaaggctgcagtgagcaatgatcacgccactgctctctagtctttcttttgtctagcccttttttgtcttaaaaaaaaaaaaaaaaaaaaagaccctgtttgaatgctggatcatctcagtgggtagagagtgtcaggactctggcccagccctgtctagtcaaccatggccagtagggccaggtcta

SEQ ID NO: 274013 - DNA, 201 bp, Homo sapiens
agtttggtttctcagttaattcatggccacactttccaagcccacactttctcaaaaagtttcctctggtgaaaagcaataaaatttattctgtgaactasgtcatttttattcatgaagcctcatatcaacaatagctaggggccgggcacggtggctcacgcctgtaatctcagcacgttgggaggccaaggcaggcag

SEQ ID NO: 274014 - DNA, 201 bp, Homo sapiens
gtttcgccatgttggccaggcgggtctcaaactcctgatctcaggcgatcctctgccctcagcctcacaaagtgctgggattacaggtgtgagccaccgcrcccagtgccaagggacttttggcaaggtctggagatgcttttggttgttacaactggtgggggaatgaagaatgctactggcatctggtgggcagaggcc

SEQ ID NO: 274015 - DNA, 201 bp, Homo sapiens
atctattcaaatcttttgtccattttttgatcgaattatgagatttttttctatagagttgtttgacctcctttttatattctggttattaatcccttgtsagaggagtagtttgtaaatattttctcttgttctgtgggttgcctcttcgctttgttgattgtatcctttgctggaggacagacccttctggatgcaact

SEQ ID NO: 274016 - DNA, 201 bp, Homo sapiens
aattggtgcctgagctgaagcatctttcaggcattactggccatttgtacctttgcctgacgttatctcttgaaatgtctacactggcctcgctttacccrtgggaaaccagaagcccagaggagcagtgccttgcccaaggtcacacgatgaccatgaaagcagagtggagatcactctccactccttaaagggaatggg

SEQ ID NO: 274017 - DNA, 201 bp, Homo sapiens
aactaaccagacatagtggtgtgtgcctgtgatcccagctactcaggaggctgaggcaagaggatcacctgagcccaagagttcgaggctgcagtgagccrtgagccatgatcatgccactgcactccagcctaggtgatagagcgagaccctgtctctaaaaaaaaaaaaaaaaaaaaaacaattaaagaagttttaggg

SEQ ID NO: 274018 - DNA, 201 bp, Homo sapiens
tgtaaatagctactgcactccagcctgggcaacatagtggaaccctgtttctaaaaaaaaaaaagagagagagagagagagaaaagaactgaaatgctgcwatgatactgaaaatatggggtgtagggggagcattctgaagctacttaggtctgtcctctgaaactggagaaaggggagatgacttgaaagtgatgcaag

SEQ ID NO: 274019 - DNA, 201 bp, Homo sapiens
ggttttaccatgttggccagggtagtctagaactcctgaccgcaagtgatctgcctgcctcagcctcccacagtgctgggattacaggtgtgagccactayacccagcctaatttttttattttttgtagagatggtggtctcactatgcgctgcccaggctggtctcgaactcctggactcaagtgatcctcccaccttg

SEQ ID NO: 274020 - DNA, 201 bp, Homo sapiens
cctgggcaacatagtggaaccctgtttctaaaaaaaaaaaagagagagagagagagagaaaagaactgaaatgctgctatgatactgaaaatatggggtgyagggggagcattctgaagctacttaggtctgtcctctgaaactggagaaaggggagatgacttgaaagtgatgcaagaacaagaacttaagttgtattct

SEQ ID NO: 274021 - DNA, 201 bp, Homo sapiens
ctccccagcctcgcctcccagccatatagagtgttcactcgctgtataaaagggcacacagacaggatggacagggctaaattggaaatgcaggtagctgytatttgcagcttggatggttaatgtttctttggctgatggattcctggctacattgagtagtccataggctgtgtctgatgaagcctgtcccttcacagg

SEQ ID NO: 274022 - DNA, 201 bp, Homo sapiens
gctctttggtccagcaatcccactttgaaaaatctcacacagaaatgctcacacttgcactgacataacataaaaatgtccatggcagagcttgcaacacyggtatgggaagggattacagtatatgcattcatgtgggagaatgagtagattttagatgaatgaggtggatccacattcctgaccttgaaaggttcctga

SEQ ID NO: 274023 - DNA, 201 bp, Homo sapiens
gaaaaagataaagtcacagaatcaacatagccagtatgatcctatttttttttaaatgtaaatatgcatgaacatggatagttagggaagtggggaattamaaggacctagatagtatgtatgtatgagaacatattcctgggggaagaagaagaaaataaatctccgccagcttcccatgcattaaaaatgagcaaagtg

SEQ ID NO: 274024 - DNA, 201 bp, Homo sapiens
cacagtttcagcttttcagcacgttctttctttcttttctctgctttcctgtaagcccaagaatatagtcgttgattcgtttttgtttttttttaactctytgaggcatggtgtcaagtcctggttggccccactggctgccatgggtgtactaaccctgaggtgggtctcctacgcctccctccctctggtcttctcgac

SEQ ID NO: 274025 - DNA, 201 bp, Homo sapiens
aaaagataaagtcacagaatcaacatagccagtatgatcctatttttttttaaatgtaaatatgcatgaacatggatagttagggaagtggggaattaaarggacctagatagtatgtatgtatgagaacatattcctgggggaagaagaagaaaataaatctccgccagcttcccatgcattaaaaatgagcaaagtggg

SEQ ID NO: 274026 - DNA, 201 bp, Homo sapiens
ttctcagagagagaccctgctgccctgttgtgctccaaccttatgtgtaattatctcccagtactgactgggagatgacctgcagggcaggtgcattaatwaccaggagatagacaatggcttgacttcaggccgggttcggtggctcacacctgtaatcctagcactttggaaggccgaggtgggtggatcacttgaggg

SEQ ID NO: 274027 - DNA, 201 bp, Homo sapiens
agacgagcctcgccaacatggcaaaacctcatatctactaaaaatacaaaaaaattgtggctgggtacggtgactaccgcctgtaatcccagcactttggraggccgaggtgggtggatcacgaggtcagcagattgagaccatcctgggtaacacgatgaaaccccgtctctactaaaaatacaaaaaattagccaggcg

SEQ ID NO: 274028 - DNA, 201 bp, Homo sapiens
caagagattcttctgcctcagccccccgagtacctgggattacaggcacgtgctacctcgcccggctaatttttgtatttttagtagagacggggattcascatgttggccaggctggtctggaactcctgacctcaagtgatccacccgccttggcctcccgaagtgctgggattacaggtgtgagccaccacacgtggc

SEQ ID NO: 274029 - DNA, 201 bp, Homo sapiens
caactctctcctgaggttgtgataaccaaaaatgtctgcagacatggccagatgtcccctggtggatacagtaaccccacgtgagaacccctgcaatacawgacacctgtctctatccgaagagagatagagagccattgcacatttatactaaagaatatggccaggcacggtggctcacgcctgtaatcccagcacttt

SEQ ID NO: 274030 - DNA, 201 bp, Homo sapiens
cttactgaactattataaagcaaaccacccatgcacttagccaaaacaagaaatacattgctggcacccacagatgcctctgtgtgtccacagatagtcaygatatggtgtacttcactgattcaagcttaatcctaaaagcccaagaatctagggagtggcagtgagcctgagttggtcttttctttctccaagaatgca

SEQ ID NO: 274031 - DNA, 201 bp, Homo sapiens
cagaaaaattcataaaaaataaaatcacagcttactgaactattataaagcaaaccacccatgcacttagccaaaacaagaaatacattgctggcacccasagatgcctctgtgtgtccacagatagtcacgatatggtgtacttcactgattcaagcttaatcctaaaagcccaagaatctagggagtggcagtgagcct

SEQ ID NO: 274032 - DNA, 201 bp, Homo sapiens
ttaaagaccatcttcatgtggtaccgggtgaggtttggggcacacacacacacacacacacaggctccccagcacccagccacacgctcaccccttgtctkactgttcattccaatgggctggagtattagacatcagtaccagggttaaaatacagggagggccactgctggatggtactttgagacggcacagtggggt

SEQ ID NO: 274033 - DNA, 201 bp, Homo sapiens
aggttgcagtgagccgagattgcaccactgcactccagcctgggtgatagagtgagaccctgtctcaaaaaaaaaaaaaaaaaagttcaacgtcatttgtrttgtttcttctattatcttctggaagctttcatgttttgcctttcatatttatctccagcatccacctagggttgatttttatgtattgtattaggtaga

SEQ ID NO: 274034 - DNA, 201 bp, Homo sapiens
gtcttttggatataagccatgttaactggggtgagatgacagctctttgtagttttgatttgccttctctgatgatcagtgatgtcaagcaccttttcatrtgcttgcttgccatttgtatgtcttcttttgagaaatatctattcaaatcttttgtccattttttgatcgaattatgagatttttttctatagagttgtt

SEQ ID NO: 274035 - DNA, 201 bp, Homo sapiens
cttctaccttaaagtgtatagtcttataagtgacaagacatgaaccaaataattccacaaatagaggtaacatatgaatgtgatggggccacaaaggggarctgtgtaggattctgtgctaaaaggaagatttgatctggtgggagaggttcagggaagtcttctctgagaaagtgagtcatgaactgatatcagaagtgt

SEQ ID NO: 274036 - DNA, 201 bp, Homo sapiens
ataaataaattaaaaaaagataatagtattttattaatggtaccttcatgagagtgactttgtatctcagatcatttgtactgaggttatgtaagagaacrttcttgttcttagaagatacaggctgaaggattcaaggatgaaatatcacaatgtccacaactaactcaaataattcagaagacagataatagagtgggc

SEQ ID NO: 274037 - DNA, 201 bp, Homo sapiens
atactgagttccttccttttgtgtatttacccagcagtgggattcctggatcatatggtagctcaatttttagttttttgaggaacctccaactgttctcyatagtggttgtactagtttacattcccactaacaatgtacaagggttccctttgctccacatcctctccagcatttgttattgcctgtcttttggatata

SEQ ID NO: 274038 - DNA, 201 bp, Homo sapiens
agtgacaagacatgaaccaaataattccacaaatagaggtaacatatgaatgtgatggggccacaaaggggagctgtgtaggattctgtgctaaaaggaasatttgatctggtgggagaggttcagggaagtcttctctgagaaagtgagtcatgaactgatatcagaagtgtgagtagaaatgaaggaatcagaagcaag

SEQ ID NO: 274039 - DNA, 201 bp, Homo sapiens
ccaggcaggccgtggcatttcagcaggtcagattgtatgttcctgtgaccacactccaattctgatgcaatgcgtcagcccgcacaggccagtacagtagscgttcatcacatctggtcattgagcatctgagacgtggctattctaaactgtgatgtgctgtgagtgtgaaattcacaccagattttgaagacttagcac

SEQ ID NO: 274040 - DNA, 201 bp, Homo sapiens
tccagttccatccacgttgttgcaaatgactagatcttttttttttttttttttttttgagatggagtctcgatctgttgcccaggctgaagtgcagtggygccatctcggctcactgcaacctctgcctcccgggttcaagcgattctcctgcctcagcctccctagtaactgggactacaggcatgggtcaccacaccc

SEQ ID NO: 274041 - DNA, 201 bp, Homo sapiens
cttggggaaaatgctgtggcaaattctcagtaatatggaactcttagcacgcttgtcaggtgtttcttagagtccgaacgggccttagaaacaatgtgatscagccaggcaaggtggctcatgcctgtaattccagcactctgggaggccgagggatcacttgaggtcaggagttcaagaccagcctagccaacatggtga

SEQ ID NO: 274042 - DNA, 201 bp, Homo sapiens
ttcattgggagttgggtagacagctctgttgggcagacagctctgttgggctcacctccatgcctgggggacagctggctgttggttgatctaggttaggygtggcttgaatcactgcagtgatttggttctgctccatgtgtctgccatgctccagaaggctagatggggcttgtcctcatggcaatggcaaaggtgtac

SEQ ID NO: 274043 - DNA, 201 bp, Homo sapiens
aagtgctgggattacaggcatgagccaccgcacctggggccagctatgaaagattttgttttgaggttctcagttgccattgccactttgctgaaaaaagsggctcaaattccagtggagtgtggagtcagtcatgatgggtgcattcccaaggctgagacatccctggagtaactttaggtgtctgtcctgggctgtgtc

SEQ ID NO: 274044 - DNA, 201 bp, Homo sapiens
tgaggggagagagaaaggaaatgaagactggatgggtgggtggtaggaaggaagcccgggcttccatgatggaggatgatggatggatggatggatggatdagcgttgccaacaggcatcactttccccccagctctcccagcatgtgactttgagaaaccacgctcctcacctacctcctgcctctttcaggtgtggtgt

SEQ ID NO: 274045 - DNA, 201 bp, Homo sapiens
gcttgaatcactgcagtgatttggttctgctccatgtgtctgccatgctccagaaggctagatggggcttgtcctcatggcaatggcaaaggtgtacaaargcaagaggagaacatgctatagttctgctgaggcctgggttccgcatgggtccgccatcactgctgcctccttctgctggccaaagcaagtcatagcttg

SEQ ID NO: 274046 - DNA, 201 bp, Homo sapiens
tccctggagtaactttaggtgtctgtcctgggctgtgtcctggcagagaaggaagcacgggagaaggaaggcaggccgccgcatcctaacacctgagttcyggtttgggacacacagagaactctgtgctcccgcctacactctgccttccccgacttcctccccattcccgacgtttcacttgattgtcaggcccagctg

SEQ ID NO: 274047 - DNA, 201 bp, Homo sapiens
ctgcaccccagcctgggtgacagcgcgagactccatctctaaaaaaaaaaaaaaaaaggcataaacaacctcgacaaggaaaggacaccagctgtaactggtgaagtcaccctttaaaataagcagagcctgtccctcctccgtaatagctcagcacctcacacatgcttccgactcagcctgtgcttttgcaacttactt

SEQ ID NO: 274048 - DNA, 201 bp, Homo sapiens
gtcagtagagatacagagcagttttcagtggaaactgaacagagtggtttgactccagtacaccagctcaatgccagttcttggggcagagcagttgaccsgagggagtggataattaaacaatgcacagaaccttagaacctgggactatgagggatctctgagctgattgggtctaaaccaagtccctttgcctgatgc

SEQ ID NO: 274049 - DNA, 201 bp, Homo sapiens
gaacctgggaggtggaggttgcagtgagtgagactgggttgccactgcaccccagcctgggtgacagcgcgagactccatctctaaaaaaaaaaaaaaaaaggcataaacaacctcgacaaggaaaggacaccagctgtaactggtgaagtcaccctttaaaataagcagagcctgtccctcctccgtaatagctcagcac

SEQ ID NO: 274050 - DNA, 201 bp, Homo sapiens
gtcttagagcatactacctgtgccttcattgtgactccaaaccaaaccagaccagcaggtgacagtgcagtgaattgatttctaagttacattaatacacwctggccctggtgctgtagcttagaccagagtctcccaatcaatccatcaggcacctctttctgttccttcttttctgttcctttctctcttaagatagtc

SEQ ID NO: 274051 - DNA, 201 bp, Homo sapiens
tgaacctgggaggtggaggttgcagtgagtgagactgggttgccactgcaccccagcctgggtgacagcgcgagactccatctctaaaaaaaaaaaaaaaaaggcataaacaacctcgacaaggaaaggacaccagctgtaactggtgaagtcaccctttaaaataagcagagcctgtccctcctccgtaatagctcagca

SEQ ID NO: 274052 - DNA, 201 bp, Homo sapiens
tggccgggcacggtagctcgcgtctgtaatcccagcactttgggaggccaaggcgggtggatcacttgaggtcaggagtttgagaccagcctgaccaacayggtgaaactttgtctctactaaaaatacaaaaattagccaggagtgatggcacacacctgtcatcccagctactcgggaggctgaggcaggagaatcgct

SEQ ID NO: 274053 - DNA, 201 bp, Homo sapiens
caagacactgatttttatacccagtgagtttgtcaagtagcctaaagatatttttgaggcaacgtattgggtaaaaagaaactgaagttggaatcagaagractaatttaagaattaaattaaaatcccaaatcacctctttttttttttcttttagagatggggtctcgctctgtcacccaggctgatctcaatctcctg

SEQ ID NO: 274054 - DNA, 201 bp, Homo sapiens
tcaggagttcgagaccagcctggccaacggggcaaaacctcatctctactgaaaatacaaaaattagctggccgtggtggcggcacctgtgatcccagctrcttgggagactgaggcaggagaatggcttgaacctgggaggtggaggttgcagtgagtgagactgggttgccactgcaccccagcctgggtgacagcgcg

SEQ ID NO: 274055 - DNA, 201 bp, Homo sapiens
tgtgtgtgtgagagagacagagagagagagagagatggagggagagacaaagactcagctactacaccagcgcctcttctagactagccatgcggaaacasgccccaaaacaaggaccacacagtgaggagagtgccgaaggtgtgtgggagtgaatacaggttcaagctcaaagtaaaaagaggttaccactccctgttc

SEQ ID NO: 274056 - DNA, 201 bp, Homo sapiens
ctgaggttgtgataaccaaaaatgtctgcagacatggccagatgtcccctggtggatacagtaaccccacgtgagaacccctgcaatacatgacacctgtytctatccgaagagagatagagagccattgcacatttatactaaagaatatggccaggcacggtggctcacgcctgtaatcccagcactttgggaggctga

SEQ ID NO: 274057 - DNA, 201 bp, Homo sapiens
ggttaccactccctgttcctggggattctagggaagaaatttcaggaggaaaaggcagaaaagaagagaaagagactctgtgcagggagagcatcatgaasaggcccagagagttcataggaagccgttccaagaaaatcgcaggggaaaaaggaaggatagacagcgtatggtggctcgcacctgcaatcccagcgcttt

SEQ ID NO: 274058 - DNA, 201 bp, Homo sapiens
ttgttccctatcatgaaattgaaatagaaaaatacagtacatatggagtgtatctgtgtgttgtatttatgtccgtgctttacatggaacagagtaaaaawttttttttttttactcccactgagaatgcatgagttgtaatgaggaatcagaacatgcccccacccagttattattccttccaaccaaattaagtagacc

SEQ ID NO: 274059 - DNA, 201 bp, Homo sapiens
ttaaagcctctctcctgcatcttagacaagaaggcgtccagcctccagagtggatcccgctccaaggcaaggagctttcttagttattgagccaaaatccrccttcgattttgtaacttattgaagattgcagccatagtacaggacagagctgggactcaaacccaggtctgagtgcacagcccatgaccctaacacctg

SEQ ID NO: 274060 - DNA, 201 bp, Homo sapiens
aaaaggggtccctagccctaaaacgtacttcactttaaataaacagagttggagctaataggaaagaaccacattttcttctgtctgaatgggtgtgcccygcctgggaggggccaggggacactcttgcctccgattagttgagaggtttaggagctgctgtatagggaactggtgtcctcctgaaggtgtctgatgagg

SEQ ID NO: 274061 - DNA, 201 bp, Homo sapiens
ggaaagaaccacattttcttctgtctgaatgggtgtgccccgcctgggaggggccaggggacactcttgcctccgattagttgagaggtttaggagctgcygtatagggaactggtgtcctcctgaaggtgtctgatgaggcccactgaggccggaggctcccgaatgtgtttacatctaaagcctggctttgttttgaaa

SEQ ID NO: 274062 - DNA, 201 bp, Homo sapiens
aggggccaggggacactcttgcctccgattagttgagaggtttaggagctgctgtatagggaactggtgtcctcctgaaggtgtctgatgaggcccactgmggccggaggctcccgaatgtgtttacatctaaagcctggctttgttttgaaatgttgtgcgaatcccagatgccttggcagttggtgctgaaaaaaaatg

SEQ ID NO: 274063 - DNA, 201 bp, Homo sapiens
cccctctcacctcgtcagggactggtcctaaccctcacatctcccacttggctttctgccagcaacctctccccatcgatccctcccacctcccttctcaycccttccaaaccgtccaccaaactgtgccgcgtgtggaacccttccctggtacttactgccttccggctgtgtcccaatctcctccacctcaaatgctaa

SEQ ID NO: 274064 - DNA, 201 bp, Homo sapiens
tctcacctcgtcagggactggtcctaaccctcacatctcccacttggctttctgccagcaacctctccccatcgatccctcccacctcccttctcatcccytccaaaccgtccaccaaactgtgccgcgtgtggaacccttccctggtacttactgccttccggctgtgtcccaatctcctccacctcaaatgctaagccc

SEQ ID NO: 274065 - DNA, 201 bp, Homo sapiens
atccctcccacctcccttctcatcccttccaaaccgtccaccaaactgtgccgcgtgtggaacccttccctggtacttactgccttccggctgtgtcccartctcctccacctcaaatgctaagcccttggagggctgcctcccactttcttctttagccttattacttgacatttgctcattcattggttattgactgaa

SEQ ID NO: 274066 - DNA, 201 bp, Homo sapiens
atacaataatcatggacattgcatgtgcacagtcacattgcaatgaatgcacatagcacagcaggcctgaccaagtaagacacctgccatcctatgacctstgggtctttccctctgcataactcttcctttgagactgaactcctgcatcctctgtatgccatatcatctcactggcttcttacaagcacctagtgaaga

SEQ ID NO: 274067 - DNA, 201 bp, Homo sapiens
gcaggcctgaccaagtaagacacctgccatcctatgacctctgggtctttccctctgcataactcttcctttgagactgaactcctgcatcctctgtatgscatatcatctcactggcttcttacaagcacctagtgaagagtctccagtttggcagatgagaaacccaaagctcagagaggttaagtgagttgcccaagg

SEQ ID NO: 274068 - DNA, 201 bp, Homo sapiens
acagagccgccagcaggagcctcccttcacatgccccgagagtggcctcctgcagagatataaagtgcctggctcggggctggccatgaaataggttcagraagaccagtgagcctccagcctgtccccagctctctcacagcccctgtgcttgtcatcatggtgtcccttgttggcaggccttactgccttctgaagaca

SEQ ID NO: 274069 - DNA, 201 bp, Homo sapiens; identical to SEQ ID NO: 54374

SEQ ID NO: 274070 - DNA, 201 bp, Homo sapiens
catctctgagattttgttctgttctattgtttcagagcaaggaaagagggcagaggggcttctcccaggaggagctggagacgtgcatgattaaccaggtragtgcagctgggcttgcaccacgtacatctggggaagctgcacagcctctcccgggctgttgctggctggctggcactgtcctcaattaggaagggccag

SEQ ID NO: 274071 - DNA, 201 bp, Homo sapiens
gggtaaggagggaccattgcgctcccaaggtggcgtttagaatagtaataataacggcaacaatagcggcggctgacattagcagtttacacatattgtcycactgattgcacacaatcccactgcagagtggggattattattcctgctttgcagatgggggaatcagtgttcaggaagaggaagaatttccaaggctat

SEQ ID NO: 274072 - DNA, 201 bp, Homo sapiens
aaggtgtacaaaagcaagaggagaacatgctatagttctgctgaggcctgggttccgcatgggtccgccatcactgctgcctccttctgctggccaaagcmagtcatagcttgccttaagtccagagtcaagggctggggtacaacatccaaacaacagtgaaagaacatggcaatgttacatggcacagggctcagagat

SEQ ID NO: 274073 - DNA, 201 bp, Homo sapiens
aggtgtacaaaagcaagaggagaacatgctatagttctgctgaggcctgggttccgcatgggtccgccatcactgctgcctccttctgctggccaaagcamgtcatagcttgccttaagtccagagtcaagggctggggtacaacatccaaacaacagtgaaagaacatggcaatgttacatggcacagggctcagagatc

SEQ ID NO: 274074 - DNA, 201 bp, Homo sapiens
tggcacttcctatatgctgtcatcacagaagcagggggtgggagaagcctcttggtcttcatccaggtctaggatggaatttctgtccactgtggggctgsgtagagttaggcagcccaagccagggctgcatgaggaaagggctgcgtccccagggtctgtcacagagtaagtttcaggtgttgcaactcgcaataaatc

SEQ ID NO: 274075 - DNA, 201 bp, Homo sapiens
tttatttgaaatatataattttatgacactaactgctaacatctattttatattgaattacttttggaattgaaatctttgtaatatcaaagcggctagtktctaattccctgtttctgtataggataaagtacaagtggtttatggagtgtttggattataattataaatggttctttgatatgcaagttaatattttca

SEQ ID NO: 274076 - DNA, 201 bp, Homo sapiens
aatagttgcctgccaactatttatatcaagtaattttaaagtaatatggttgactaataaaatatttagttattggcaaaagaaaaaaatgccaagacttrggaaaacatgaaagattttaagctattttggcaagagtgtggacttgctataatgcttttgttgttcttgcccgcaggagttaatgaaacagctgaatat

SEQ ID NO: 274077 - DNA, 201 bp, Homo sapiens
tcagctgaagtcaggagttcgagaccagcctggccaacggggcaaaacctcatctctactgaaaatacaaaaattagctggccgtggtggcggcacctgtratcccagctacttgggagactgaggcaggagaatggcttgaacctgggaggtggaggttgcagtgagtgagactgggttgccactgcaccccagcctggg

SEQ ID NO: 274078 - DNA, 201 bp, Homo sapiens
agactttattgtctttagattgaaccatatgaaattactatttttggccaggtgcggtggctcatgcctgtaatcctagcactttgggaggtcggggggggaggggcagatcacttgaggatcagcctggccaacatggtgaaacaccgtctctactaaaaatacaaaaattagctgggcgtggttgcttgtacctgtaat

SEQ ID NO: 274079 - DNA, 201 bp, Homo sapiens; identical to SEQ ID NO: 54385

SEQ ID NO: 274080 - DNA, 201 bp, Homo sapiens
tgggaagatggatggatggatggatggatggatggatggatggatggatggaaaaatggatgggaagatggatggagagatggagggagagaaggatagayggatgaatgaacagacagacaaaaaacagaaacctagactttattgtctttagattgaaccatatgaaattactatttttggccaggtgcggtggctcat

SEQ ID NO: 274081 - DNA, 201 bp, Homo sapiens
aaatccaaagctagcttatccttttgcagatgtttctttccatattatttcctacctccagaacaaaggctatctgtgtctcacattcggaggcttggatktgaagccctgtctgttcatttttctctccagttttttcacaggctgggtaactacctgcctgctagcaacgatgtgttcgttctccctggattcctgatt

SEQ ID NO: 274082 - DNA, 201 bp, Homo sapiens; identical to SEQ ID NO: 54386

SEQ ID NO: 274083 - DNA, 201 bp, Homo sapiens
tggatggatgggtggatggatgggtggatggatgggaagatggatggatggatggatgggaagatggatggatggatggatggatggatggatggatggadggatggaaaaatggatgggaagatggatggagagatggagggagagaaggatagatggatgaatgaacagacagacaaaaaacagaaacctagactttat

SEQ ID NO: 274084 - DNA, 201 bp, Homo sapiens
ctgggaagcagcggagtagaaaggtgagtcagacgccatcttcataggctgcttgttgagcatttactgtttattcaatgattgtttgcaggcaggcactsctctggggctggggaaacagtaaggacttctgccagcccacaaaatagttccaattgctattactcccattttacagatcaggaaactgaggcacagaga

SEQ ID NO: 274085 - DNA, 201 bp, Homo sapiens
ggatggatggatgattggatggatggatggatggatggatgatgatggatggatggatggatgggtggatggatgggtggatggatgggaagatggatggrtggatggatgggaagatggatggatggatggatggatggatggatggatggatggatggaaaaatggatgggaagatggatggagagatggagggagaga

SEQ ID NO: 274086 - DNA, 201 bp, Homo sapiens
tgggaagcagcggagtagaaaggtgagtcagacgccatcttcataggctgcttgttgagcatttactgtttattcaatgattgtttgcaggcaggcactgstctggggctggggaaacagtaaggacttctgccagcccacaaaatagttccaattgctattactcccattttacagatcaggaaactgaggcacagagac

SEQ ID NO: 274087 - DNA, 201 bp, Homo sapiens
atgagtaggcagtgggtctgttaatggagatgctcaacataggaaaggagataggtgtagtgaagagaagatgatgactgtgagaacgtattgcacttgawatgcaggacaccctgctgaaccagggagaggatttggggatagtgaatcatttgtggaaaccgtgagtgtccatgagctctcccagagatgggtgggtgg

SEQ ID NO: 274088 - DNA, 201 bp, Homo sapiens
aggtggagacaggaagagaggatgatctggaaatgcccggaacagtccaggcatgagcaattgcagtcagtgcctgggttcagatccaagcctttggaatmatgtatgaatttgaaactccctttcctcctgtgcaagttaaaggttttttgttgtttgttttttgttttttggttttttttttggagatggggtcttgct

SEQ ID NO: 274089 - DNA, 201 bp, Homo sapiens
caggggtggtagtgcatgcctgtagtctcccaactactcaggaggctgaggtggaaagatcacttgagtccaggaggttaaggctgcactgagagagagasagagagagagagagagagagagagagagagagagaggaaataggctcaggagcaagcaccttcacatctgagcaggaactagaactaggccttcttgtac

SEQ ID NO: 274090 - DNA, 201 bp, Homo sapiens
tagctgggactacagacgtatgctgccactcatagctgatttttgtatgtttgtatttttttatacagacctgctttcactgtattgcccaggctggtctygaattcctgagctcaaggaatccgcccactttggcctcccaaagtgctaggattacaggcatgaaccaccaagcccagccagttaacctttgtgtgcctc

SEQ ID NO: 274091 - DNA, 201 bp, Homo sapiens
gtctgggtggggctttgacacaagtgtaagcttctggtgagcgagcgtcaggtgcagccaacgctagaaatttctggcttttgagctctaagaccttgaamaagccttttaggcttctgaaccggttttataacgccagccaatcctgcagattaccgaaaggatctatggaaggtctattgcatgtggtaggtgaacagt

SEQ ID NO: 274092 - DNA, 201 bp, Homo sapiens
agaaaagcgtggacttggcaatcagaaagatgtaggggcttatcagggtagcagtactccctgtatgctattagagcagtcagttaactttttttttttttgagacaggctctcactttgtcacccaggctggagtacagtggcacggtagcacaatctcggttctcaagccatcctccctccgccgcctgagtagctggg

SEQ ID NO: 274093 - DNA, 201 bp, Homo sapiens
tcaaataccacctccatgcacaacccacatatcttaattatctattatggtgcacataacagacatcactaatctatcacattttttcccctgaaaacctraaagagtgcttcctgctaacaggtcaaaaaataatgaaaaataaaaaataagtaaagctaaaagaggccgtaaaatctttttgttcgctgctccaaatag

SEQ ID NO: 274094 - DNA, 201 bp, Homo sapiens
tttcttttcttttttgatgtgaccactagaaatttttaattggcacatgtgactcacatttttatttatttatttatttatttatttatttatttatttttgagatggagtctcactctgtcgcccaggctggactgcagtagcactatctcagctcactgcaacctccgcctcctgggttcaagcgattctcctgcttca

SEQ ID NO: 274095 - DNA, 201 bp, Homo sapiens
tcagtgcctgggttcagatccaagcctttggaatcatgtatgaatttgaaactccctttcctcctgtgcaagttaaaggttttttgttgtttgttttttgktttttggttttttttttggagatggggtcttgctctgtcacccaggctggagtacagtggtgtgattgcagctcactgcaacctccacctcccaggttca

SEQ ID NO: 274096 - DNA, 201 bp, Homo sapiens
agtcagcaaagtagtttgaaaataatgaacaaggccaggcatggtggttcatgcctgcaatcctagcactttgggaggccgaggtggacagattgcttgarctcaggagttcgagaccaccttgggcaacatggtgaaaccctgtctctaccaaaaatacaaaaaattggtcaagcatggtggtgcgtgcctatagtgcca

SEQ ID NO: 274097 - DNA, 201 bp, Homo sapiens
cttgactcagagacccatagggaaccatggaagagattaaagcaaggcagtgatgtgattttgttatcacttgagaaagatcctcctggaagctgaatggmgagtagacagacaccttctcccactagcctttgagctcagatttccttagggaaacagccaatcccaggggcagattgctgaccttcctgcaaaaggttt

SEQ ID NO: 274098 - DNA, 201 bp, Homo sapiens
gcaggaggtgatcctttgtacattggaggtggtagtagtaatagctgacatgatcagtaaaaatattcattgagatcatacattcactttctggagctgcygcaaaaaaattgtcacaaactgagtgactcaaaacaatggaagtttattctcttacagttctagaggccagaagtccaaaatccagagatcagtaggact

SEQ ID NO: 274099 - DNA, 201 bp, Homo sapiens
ggtctagtctgttttttttcccttgagaggaagagatggtgggtgcattgtggagagagagggaaacagtgaccctgaggtggggacgcacatctggacgsaaagtgtttgccgagagcacttggccgcctgccctcccacggagcaggtgctagtcttgggtcccgctcttccgggttcttcagaagctgagctccggtc

SEQ ID NO: 274100 - DNA, 201 bp, Homo sapiens
ccctggttctgtctgtccccggtacggcccctgcgaagattcagctccagccaggggaagcgggaggacaggagtcatgatgagcctgggctcacggctawttccctccccacaggtggctcccaaagggatgtcccagctcatcaccatggcctgcggctcctgctccaatgaaaacgccttaaagaccatcttcatgtg

SEQ ID NO: 274101 - DNA, 201 bp, Homo sapiens
catggcctgcggctcctgctccaatgaaaacgccttaaagaccatcttcatgtggtaccgggtgaggtttggggcacacacacacacacacacacaggctycccagcacccagccacacgctcaccccttgtctgactgttcattccaatgggctggagtattagacatcagtaccagggttaaaatacagggagggccac

SEQ ID NO: 274102 - DNA, 201 bp, Homo sapiens
agttctttgcccatttttgaattgagttgtctttttgtctttttgttcttgagctgtaagagttcttcttttctctttttctttttctttttatttatctwtttttttttttgagacagagtctcaccctgtctgtcacccaagctggagtgcagtggcatgatcatagcttactgcagccttgacttcccaagctcaaac

SEQ ID NO: 274103 - DNA, 201 bp, Homo sapiens; identical to SEQ ID NO: 54367

SEQ ID NO: 274104 - DNA, 201 bp, Homo sapiens
caaaactcctgtgctgatcggtagtggaattatgcctgtaaatagctactgcactccagcctgggcaacatagtggaaccctgtttctaaaaaaaaaaaaragagagagagagagagaaaagaactgaaatgctgctatgatactgaaaatatggggtgtagggggagcattctgaagctacttaggtctgtcctctgaaa

SEQ ID NO: 274105 - DNA, 201 bp, Homo sapiens; identical to SEQ ID NO: 54370

SEQ ID NO: 274106 - DNA, 201 bp, Homo sapiens; identical to SEQ ID NO: 54371

SEQ ID NO: 274107 - DNA, 201 bp, Homo sapiens
gtttcttttcttttttgatgtgaccactagaaatttttaattggcacatgtgactcacatttttatttatttatttatttatttatttatttatttatttttgagatggagtctcactctgtcgcccaggctggactgcagtagcactatctcagctcactgcaacctccgcctcctgggttcaagcgattctcctgcttc

SEQ ID NO: 274108 - DNA, 201 bp, Homo sapiens
tgtttcttttcttttttgatgtgaccactagaaatttttaattggcacatgtgactcacatttttatttatttatttatttatttatttatttatttatttttgagatggagtctcactctgtcgcccaggctggactgcagtagcactatctcagctcactgcaacctccgcctcctgggttcaagcgattctcctgctt

SEQ ID NO: 274109 - DNA, 201 bp, Homo sapiens
tctgtttcttttcttttttgatgtgaccactagaaatttttaattggcacatgtgactcacatttttatttatttatttatttatttatttatttatttatttttgagatggagtctcactctgtcgcccaggctggactgcagtagcactatctcagctcactgcaacctccgcctcctgggttcaagcgattctcctgc

SEQ ID NO: 274110 - DNA, 201 bp, Homo sapiens
atggtgttcccaatggcatcattttatgcctccccaaaattaataatcttatgttggtaaatagaatacagagagtgggagaccacatcaaaattgttatygctgggtagaaaattaaatgtgttttcttttttccatgttgcttattggtatcttcctcaataagcattttatcacaaaataagtggggtggacagttgc

SEQ ID NO: 274111 - DNA, 201 bp, Homo sapiens
atctgtttcttttcttttttgatgtgaccactagaaatttttaattggcacatgtgactcacatttttatttatttatttatttatttatttatttatttatttttgagatggagtctcactctgtcgcccaggctggactgcagtagcactatctcagctcactgcaacctccgcctcctgggttcaagcgattctcctg

SEQ ID NO: 274112 - DNA, 201 bp, Homo sapiens
tttatccatgttgtagcatgtgtcagaacttcattcctttttatgactgaataatatttcgttgtaaggatagaccatgttttgtttattcattcatccaytgatcgacatctgggctttttctacctttcggcgcttgtgaatagtgctgctatgtgtatttgtttgagtctctgttttcagttctttgggttgatgcaa

SEQ ID NO: 274113 - DNA, 201 bp, Homo sapiens
atacagagagtgggagaccacatcaaaattgttatcgctgggtagaaaattaaatgtgttttcttttttccatgttgcttattggtatcttcctcaataarcattttatcacaaaataagtggggtggacagttgcaggagcagataaaaaaaattttttaacagaaaagcagagcaaacaactccagttggacttgacct

SEQ ID NO: 274114 - DNA, 201 bp, Homo sapiens
ttaatttcatctgtttcttttcttttttgatgtgaccactagaaatttttaattggcacatgtgactcacatttttatttatttatttatttatttatttatttatttatttttgagatggagtctcactctgtcgcccaggctggactgcagtagcactatctcagctcactgcaacctccgcctcctgggttcaagcga

SEQ ID NO: 274115 - DNA, 201 bp, Homo sapiens
gtggggtggacagttgcaggagcagataaaaaaaattttttaacagaaaagcagagcaaacaactccagttggacttgaccttcgttctggccaggctcaygtacagagctttggctgtttgggaacacgacattcgtttatcactctcggtctaaagatcaagagaacattaacaatgtttgctagctactgtgtagttt

SEQ ID NO: 274116 - DNA, 201 bp, Homo sapiens
agagacagggatggcagtggtggggtggtggggggcgcaggtggctcgggggcagggttgtgtgtctcactttgttgcccaggctggtcttgaactcctgrgctcaagcaatctccctgcctctgcctcccaaggtgctggaattacaagtgtgagccagcgcacctggccaatcaaattctttaaaattaagtgccacaa

SEQ ID NO: 274117 - DNA, 201 bp, Homo sapiens
tgtttgacctcctttttatattctggttattaatcccttgtcagaggagtagtttgtaaatattttctcttgttctgtgggttgcctcttcgctttgttgrttgtatcctttgctggaggacagacccttctggatgcaactagagcagctgggctccctcctccctttgagagggtctccagagggccctatcaatcaag

SEQ ID NO: 274118 - DNA, 201 bp, Homo sapiens
tcctgacctcaggtgatccacctgcctcagcctcctgaagtgttgggattacaggcgtgcgcatgcgcccggccttctggcttttatgaatagtgctgcarttggcagggcacggtggcttatgcctgtaatcccagcactttgggaggccaaggtgggcagatcacgtgaggtcaggagttcaagaccagcctggctacc

SEQ ID NO: 274119 - DNA, 201 bp, Homo sapiens
gtggtacacaggtctgaaaagagcctgaatgctctttctccaaagaagagaacattacaaatgggatttctttatccatttatttactcaacaagcgttcrctgaggaggtgagttgtaagtggacactggagacagttacagtgatgatgaagaccatcagagccccttccttcaggaagcatgcagtgtagcaggaagg

SEQ ID NO: 274120 - DNA, 201 bp, Homo sapiens
tgaagtccgtcttgtgttcctatgggtagctgctctggagggtggaagcctgaacttgatcattccctctaattctcagcccatctagacaaaaggagtcttgctgggagagagaatttgtttggtttattatcagttctgaaggtctcacgctggtaagaagttcagagttagttgcagactttttaactcaagagacag

SEQ ID NO: 274121 - DNA, 201 bp, Homo sapiens
atcacgtgaggtcaggagttcaagaccagcctggctaccatgatgaaacccatctctacaaaaaaaatacaaaaattaaccaggcttggtggcacacacckgtaatcccagctactcgagaggctgaggcacaagaatcacttgaaccaaggaggtggaggttgaagtgagccaagattgcgccactgcactccagcctgg

SEQ ID NO: 274122 - DNA, 201 bp, Homo sapiens
gctcgtgcctgtaatcccaacaccctgagaggctgaggtaggtggatcacttgagaccagtctgggcaacatgatgaaactctgtctctataaaaaaaaaatatatatatatatacaaaaaattagccaggcatggtggcacacaccagtagtcccagccgagaggctgaggtgggaggatcacctgagccctgaaggtaa

SEQ ID NO: 274123 - DNA, 201 bp, Homo sapiens
aacacatgtctttccagccttgctttattgtgtagcagtttatgattttgtttttttgtgcctgtaaaaaattgtagccagactgcatatacaattttacrttctttttttctctcattacatggcttaaaaaatcacttccctgtctttttacacagttttcagttaatgtcatataatcaagctgttgtaccacaactt

SEQ ID NO: 274124 - DNA, 201 bp, Homo sapiens
tgggcgacagagtgagaccctgtcagagagagagagagagagagattgattatatctaaacgatgcagtgccttgctgataacaggtgcctaattaacttktgttgattgaattagtgggtgagagggagtgaatgaatgacattaactcttccaattgtttgaaatatattgtgctaagaattaatgtctaacagagatc

SEQ ID NO: 274125 - DNA, 201 bp, Homo sapiens
tgcaagcccagctgaatctgagagtgtatttcaactgttaatcagtaaaatgaatgtttgtgtccttagagttggtatgaacatggccatacctagacggwactggccttgcctgatgggactctaatcaggcaagattttacaattgaatggcgcaggatcaaaacaaggccattaaaagttggactctgcccggagttc

SEQ ID NO: 274126 - DNA, 201 bp, Homo sapiens
ctgtcagagagagagagagagagagattgattatatctaaacgatgcagtgccttgctgataacaggtgcctaattaacttttgttgattgaattagtggrtgagagggagtgaatgaatgacattaactcttccaattgtttgaaatatattgtgctaagaattaatgtctaacagagatcagattttgttataaggtca

SEQ ID NO: 274127 - DNA, 201 bp, Homo sapiens
acagagtctcactatgttgctcaggctggtcttgagctccctggctcaagcagtcatcctgcctcagcctcccaaagtgctggcattacaggcatgagccsccatgctggccttaattctttttttttttttttttgctttgttttgttttttctctttgagatggagtgtcactctgtctgtcactcaggctgcagtgca

SEQ ID NO: 274128 - DNA, 201 bp, Homo sapiens
acatctcatgagaactctatcacaagaacagcaccaaacggatggtgctaaactattcatgagaagcccacccccatgatccagtcccctcccaccaggcycctcgtccaacactggggattacgtttcaacgtgagatttgggtggggacatggatccaaaccatatcaggggaccactggaaggttttcaccagaggga

SEQ ID NO: 274129 - DNA, 201 bp, Homo sapiens; identical to SEQ ID NO: 54369

SEQ ID NO: 274130 - DNA, 201 bp, Homo sapiens
ttccaacacccgttcctcattccagccctaccggatcttcaacacctggctgggggacccgtccaagaacctgttgctggctgaggtcatcaacatcatcwagcgggaggacctgctaaataatgcagcccatgccgggaaggccctgctcacaggactgctggacctccaggtaacaccccctcccctgccccgccccca

SEQ ID NO: 274131 - DNA, 201 bp, Homo sapiens
ccccgtctctactaaaaatacaaaaaattagccgggcgtggtggtgtgcgcctgtagtcccagctactcgggaggctgaggcaggagaatagcttgaaccyggaaggcggaggttgcagtgaaccaaaatcgtgccattgctctccagcctgggtgacagacagagtgagactctgtctcaaaaaaaaaaaccaaaaaatt

SEQ ID NO: 274132 - DNA, 201 bp, Homo sapiens
gagttcaagaccagcctggagtttcggccgacatggcgaaaccccgtctctactaaaaatacaaaaaattagccgggcgtggtggtgtgcgcctgtagtcycagctactcgggaggctgaggcaggagaatagcttgaacccggaaggcggaggttgcagtgaaccaaaatcgtgccattgctctccagcctgggtgacag

SEQ ID NO: 274133 - DNA, 201 bp, Homo sapiens
agattgattatatctaaacgatgcagtgccttgctgataacaggtgcctaattaacttttgttgattgaattagtgggtgagagggagtgaatgaatgacrttaactcttccaattgtttgaaatatattgtgctaagaattaatgtctaacagagatcagattttgttataaggtcaattttcaactgcaggccaccaaa

SEQ ID NO: 274134 - DNA, 201 bp, Homo sapiens
taaactattcatgagaagcccacccccatgatccagtcccctcccaccaggctcctcgtccaacactggggattacgtttcaacgtgagatttgggtggggacatggatccaaaccatatcaggggaccactggaaggttttcaccagagggaggactggtgtgatgtgacctgacttttgcaaaggactgctctggctcc

SEQ ID NO: 274135 - DNA, 201 bp, Homo sapiens
tggctgtcactctgcgatgggggtgtattggttcgttctcaaactgctataaagaaataactgagactggagaatttataaagaaaagaggtttcattggmtcatggttctgcgggctgtacaggaagtatagcagcttctgtttgtgggaagacatcaggaaacttacaatcatggcaggaggtgaagggggagcaggca

SEQ ID NO: 274136 - DNA, 201 bp, Homo sapiens
agcctagcattttagtaaagactgaatatgtgttaatttccccattccccccctttctgatagcgcagttgcaaacaaacttatggaaaacatgataggarctgatacagttctcggaacagacccatctgccttggacctgtcctcagcattcctggcttgcgccccatagctcccagttggccagttctcaccctttct

SEQ ID NO: 274137 - DNA, 201 bp, Homo sapiens
aagggcctcggatcacctaaggtcaggagttcaagaccagcctgggcaacatggtgaaaccctatctctacaaaaattagccaggcatgatagcaggtacstgcaattccagctacttaggaggttgagtcaggagaatcacttgaacctgggaatcagaggttgcagtgagccgaggtcgtgccattgcaatccagcctg

SEQ ID NO: 274138 - DNA, 201 bp, Homo sapiens
gatcagattttgttataaggtcaattttcaactgcaggccaccaaaatgtcaccacggtatattttccaatgtgacattttgtaattgaaaacgtgtgggwttggctctcacttttgcagaatattcaaatgttgagttctctgagacattcggagtttcaaaaacgtgtttaatggaaattgaattgtgtgacgcctcag

SEQ ID NO: 274139 - DNA, 201 bp, Homo sapiens
gcgcagttgcaaacaaacttatggaaaacatgataggaactgatacagttctcggaacagacccatctgccttggacctgtcctcagcattcctggcttgygccccatagctcccagttggccagttctcaccctttcttcaccacctctcccagctcctgtttccccatggccttgacatgctcattatcgcagttccac

SEQ ID NO: 274140 - DNA, 201 bp, Homo sapiens
tctggcttttatgaatagtgctgcagttggcagggcacggtggcttatgcctgtaatcccagcactttgggaggccaaggtgggcagatcacgtgaggtcrggagttcaagaccagcctggctaccatgatgaaacccatctctacaaaaaaaatacaaaaattaaccaggcttggtggcacacacctgtaatcccagcta

SEQ ID NO: 274141 - DNA, 201 bp, Homo sapiens
atccattgagttattaagaaaagagtttgggccatgcacagtggctcacacctgtaattccagcactttgggaggcagaggcgggtggatcacaaggtcargagattgagaaccttctggccaacatggtgaaacctcatttctactaaaaatacacaaattagccaggtgtggtggcacatgcctataatcccagctact

SEQ ID NO: 274142 - DNA, 201 bp, Homo sapiens
aaaaaaaaaagtcatcgatatgttctaggacctttagctctcttctaatggaatacttttaggaattccctttttcagatcaaagagaagaaaataaaagstgtttttcttcatccttatataagtatagtgctgtattttaacggtactttatgttcaaaagacagcatgatgttacataattaattcagaaaccttctt

SEQ ID NO: 274143 - DNA, 201 bp, Homo sapiens
gcgaccacgcccagctaattttttgtagttttagtagagaagggtttcaccatgttggccaggctggtcgcaaactcctgacctcaagtgatccacctgcstcagcctcccaaagtgctgggatcacaggcgtgagccaccgcacctgaccctgtgcaagctttaaattgcaggaggtgatcctttgtacattggaggtgg

SEQ ID NO: 274144 - DNA, 201 bp, Homo sapiens
gctactcgggaggctgaggcaggagaatcgcttgaaccagggagtcagaggttgcagtgagccgagatcacgccactgtactccagcctggcaacagaacragactccatctcaaaaacaaagagtttggtttctcagttaattcatggccacactttccaagcccacactttctcaaaaagtttcctctggtgaaaagca

SEQ ID NO: 274145 - DNA, 201 bp, Homo sapiens
ttcaagaccagcatggccaacatgatgaagccctgtctctactaaaaatacaaaaattagccgtgggtggtgcacgcctgtaatcccagctactcaggagkctgagacaggagaatcacttgaaaggaggcagaggttgcagtgagccgaagctgtggagccactgtactccagcctgggtgacacagcgagactctgtct

SEQ ID NO: 274146 - DNA, 201 bp, Homo sapiens
cccaccagatccctcccttgacacatggggattacaattcaagatgaaatttgggtggggacacagagccaaaccatatcaggggctttccagtctttacyggaaagcctgctagacaaattttaaaagagctataacactgagttgggatttcttgaggtcaaaatatttaatatctctttatgttgttttccaaaaggt

SEQ ID NO: 274147 - DNA, 201 bp, Homo sapiens
aatcaatggctcacaatagccttgagctcctgggcttaagcaattctcccgagcagctgggaccacaggcacatgcctccatgcctggctaccttttttaytttttgtagagatggggtctcactatatcgcccaagctggtctggaactcctgggctcaagccatcctcccacctcaacctcccaaagtgctgggattac

SEQ ID NO: 274148 - DNA, 201 bp, Homo sapiens
gtgattcctaggttttggctaaggaggaatgagggaagcagacggggctgcaagaatggcaggtgcaaaggccctgaggctacagagctctgtgccctccmggaatcagagggtggaatgggtggggtggcatgtcagtactcagaaaagagatgcaggcagaggtgggttaggcaaggtcccagatgcctcatgaaaggc

SEQ ID NO: 274149 - DNA, 201 bp, Homo sapiens
gtttcaccgtgttagccagaatggtctcgatcttctgacccgcccgcctcggccttccaaagtgctaggattacaggcgtgagccaccgcgcccggcccastccatccattttattcagatttccccagctttacatgcattcaccttgcacgttttttgtttgtttgttttgttttgtttttgagacagggtcttgctct

SEQ ID NO: 274150 - DNA, 201 bp, Homo sapiens
aaatgggatttacctttacgtcagtttgcaagaggcaagagagaagcttacatttctaaaacagcagccacaccgtggaacctaaaagctagctggacttmactccagtgcatcctagccaggaattagggaactttttttaaactttatttatttatgttgtagagacagtttcccaggctggtcttgaactcctcagct

SEQ ID NO: 274151 - DNA, 201 bp, Homo sapiens
agaactggggtttcacaggcaacaggcctccctgcccactgacagcctcgcgctgaaatgtctatcatctcctttacaaagacggtactgcctgcttcccsaagccaagcgtctgcttttctgttttgctgaactcaggttgcttagcgaccacgcactctaaagccattcacaagatcgacatcccttcctttgactggc

SEQ ID NO: 274152 - DNA, 201 bp, Homo sapiens
ttcactctgcttctggcgtcacttggtgttctccccactgtgcctgtgtctgtctccagattgtcttcttcttataaagataccagtcattgagccgggcrctgtggctcacacctgtaatcccagcactttgggaggccaaggcaggtggatcacttgaggtcaggagttcgaaaccagcctggcctacattgtgaaacc

SEQ ID NO: 274153 - DNA, 201 bp, Homo sapiens
catcaagcgggaggacctgctaaataatgcagcccatgccgggaaggccctgctcacaggactgctggacctccaggtaacaccccctcccctgccccgcycccaccacccatggctccccgcagcagcctccggggcaacactggagctcttcggcatggtgttgtgcctgctgttccagcagttcgtaacgggctgtgc

SEQ ID NO: 274154 - DNA, 201 bp, Homo sapiens
ggagtacagtggcacgatctccgctcactgcaagctctgcctcccaggttcacgccattctcctgcctcagcttcccgagtagctgggactacaggcgccygccacaatgcccagattttttttttttttttttcagtagagacagggtttcaccgtgttagccagaatggtctcgatcttctgacccgcccgcctcggcc

SEQ ID NO: 274155 - DNA, 201 bp, Homo sapiens
catgttattgaagggaatactctttttaggtctttttatttttagttttttgagacagactctgagtgtcgctctgtcacccagactggagtgcagtggcrcgatctcagctcactgcaacctccgcctcccgggttcacgtgatcctcatgcctcggcctcctgagtagctgggattataggcatgtgccatgatactgg

SEQ ID NO: 274156 - DNA, 201 bp, Homo sapiens
caccaccacactcggcaacatttttgtatttttaatagagagggggtttcgccatgttggccaggcgggtctcaaactcctgatctcaggcgatcctctgscctcagcctcacaaagtgctgggattacaggtgtgagccaccgcgcccagtgccaagggacttttggcaaggtctggagatgcttttggttgttacaact

SEQ ID NO: 274157 - DNA, 201 bp, Homo sapiens
attttggctcaatgcaatctctgcctcctgggttcaagcaattctcctgcctcagcttcctgagtagctggaattacagtcgtgcaccaccacactcggcwacatttttgtatttttaatagagagggggtttcgccatgttggccaggcgggtctcaaactcctgatctcaggcgatcctctgccctcagcctcacaaag

SEQ ID NO: 274158 - DNA, 201 bp, Homo sapiens
taattctcagcccatctagacaaaaggagtcttgctgggagagagaatttgtttggtttattatcagttctgaaggtctcacgctggtaagaagttcagasttagttgcagactttttaactcaagagacaggatcttgctgtgttgcccaggctggagtgcagtggcatgatcgtagctcactgcagcctcaaactcccg

SEQ ID NO: 274159 - DNA, 201 bp, Homo sapiens
ctctgctgcaactgtgctccccagggaacttttttttttttccaagacagactctcactctgttgcctaggttggagtgcagtggcacaattttggctcamtgcaatctctgcctcctgggttcaagcaattctcctgcctcagcttcctgagtagctggaattacagtcgtgcaccaccacactcggcaacatttttgta

SEQ ID NO: 274160 - DNA, 201 bp, Homo sapiens
acctgccacatttcctggagagcagggttctctgctgcaactgtgctccccagggaacttttttttttttccaagacagactctcactctgttgcctaggytggagtgcagtggcacaattttggctcaatgcaatctctgcctcctgggttcaagcaattctcctgcctcagcttcctgagtagctggaattacagtcgt

SEQ ID NO: 274161 - DNA, 201 bp, Homo sapiens
caccacgcctggctaactttttgtatttttactagagatggggtttcaccatgttagccaggatggtctcgatctcctgacctcgtgatccgcccgcctcrgcctcccaaagtgctgggattacaggcgtgagccaccacgcctggccgatttttttttttaaatcacagttttaggtttatagaataattaatagtatat

SEQ ID NO: 274162 - DNA, 201 bp, Homo sapiens
gtctccgggcctctgtctccgggcctctgtcttcggccgcatctccggccccctgtctctgggcctctgtctccgggcgtctctctccggccccatctccrgccccctgtctccgggcctctgtctccggccccatctccggccccctgtctccgggcccctgtctccgggcctctgtctccggccccctgtctccgggcc

SEQ ID NO: 274163 - DNA, 201 bp, Homo sapiens
agctcaatggtagagtcgggtgcccttgtgtcctgaaattccgtctttaaaaaaaaaagtaatagccttttttttttttttagacagcatctcactctgtyacccaggctggtgtgatcatggcttactgcagcctccaccttctgggctcaagccatcctcctgccccagcctcctgaggagctgggactacagacgtgt

SEQ ID NO: 274164 - DNA, 201 bp, Homo sapiens
ataccagcggcaccttcaatgtgtctcgtgtgctctatgagaagttcttccgggtgggtgcctcgtgcgctctgtgagaagttcttccgggtgggtgcctygtgcgctctgtgagaagttcttccgggtgggtgccttgtgcgctctgtgagaagttcttccgggtgggtgtactcccagcgggggcctccccctgacggc

SEQ ID NO: 274165 - DNA, 201 bp, Homo sapiens
ccggccccctgtctccgggcttctgtctctggccctctgtctctggccctctgtctccaggcctttgtgtcccgccttctgtctctggccctctgtctccsgcctgactccgcttctctgggtggcagcaggtcagcacagctgcagcccaagtggacgccatgaacacagctcaatggtagagtcgggtgcccttgtgtc

SEQ ID NO: 274166 - DNA, 201 bp, Homo sapiens
tgggtgccttgtgcgctctgtgagaagttcttccgggtgggtgtactcccagcgggggcctccccctgacggccgcccgctccctgccctgggcctccccrtgacggccgcccgctccctgccctgggcctcccccgacggccgcccgctccctgccccgggcctccccctgacagccacccgctcactgtcctgtgacct

SEQ ID NO: 274167 - DNA, 201 bp, Homo sapiens
ttcttggggtcatctgtgtccttggacgctggtcactgcatgggcaggtctctgcgggacccacggggctggcgtctcctttgtccccatcctcccggccyctgcgccagcctgcccacacatgggtgctgcccagtggggctgagcaggaggcgggcgctggtgtacttgctcttctgtagcggcctcggcctctgccgg

SEQ ID NO: 274168 - DNA, 201 bp, Homo sapiens
ccgggcctctgtctccgggcctctgtctccggccccctgtctctgggcctctgtctccggccccatctccggccccctgtctccgggcttctgtctctggycctctgtctctggccctctgtctccaggcctttgtgtcccgccttctgtctctggccctctgtctccggcctgactccgcttctctgggtggcagcaggt

SEQ ID NO: 274169 - DNA, 201 bp, Homo sapiens
gggctggcgtctcctttgtccccatcctcccggcccctgcgccagcctgcccacacatgggtgctgcccagtggggctgagcaggaggcgggcgctggtgyacttgctcttctgtagcggcctcggcctctgccggcatttctggcaggtgctgggtggccgaggcagccgaggtgttttagggggaagccgtcctcagcc

SEQ ID NO: 274170 - DNA, 201 bp, Homo sapiens
cagtgggacctgcctagcaggggtagctacctttatggttattgtgggcaagcaacccccgaaccagaagagccgagaaaccaaagaacaaggcagacagrtcccgtttgtctgtgtcaggtgattttaccagggaatttgtgggcagaagcgtagtcttgggtggctgtgagacgggcgtctccatgctgttacccccag

SEQ ID NO: 274171 - DNA, 201 bp, Homo sapiens
ctgccctcacacctgcttctggttttgcaggcacggctgccatacggtgattgccagtaggagcctgccgcgagtgctgacggtgagagggcctctcccakggtcccctgttcgggtggctgtgggggggctggggctgggcctgggccaggagagtccagaggctatggggatgttggcaccaaaactttttttttctga

SEQ ID NO: 274172 - DNA, 201 bp, Homo sapiens
tgcttctggttttgcaggcacggctgccatacggtgattgccagtaggagcctgccgcgagtgctgacggtgagagggcctctcccatggtcccctgttcrggtggctgtgggggggctggggctgggcctgggccaggagagtccagaggctatggggatgttggcaccaaaactttttttttctgagacgggagtctcg

SEQ ID NO: 274173 - DNA, 201 bp, Homo sapiens; identical to SEQ ID NO: 54397

SEQ ID NO: 274174 - DNA, 201 bp, Homo sapiens
gattctcctgcctcagcctccggagtagctgggactacaggtgcccgccaccacgcctggctaatttttgcatttttttggtagagatgggttttcaccaygttgaccaggctggtctcgaattcctgacctcaggtgatccgcccacctcagcctcccaaagtgccaggattacaggtgtgaaccactgtgcccggccgg

SEQ ID NO: 274175 - DNA, 201 bp, Homo sapiens; identical to SEQ ID NO: 54399

SEQ ID NO: 274176 - DNA, 201 bp, Homo sapiens
tctatgagaagttcttccgggtgggtgcctcgtgcgctctgtgagaagttcttccgggtgggtgcctcgtgcgctctgtgagaagttcttccgggtgggtrccttgtgcgctctgtgagaagttcttccgggtgggtgtactcccagcgggggcctccccctgacggccgcccgctccctgccctgggcctccccatgacg

SEQ ID NO: 274177 - DNA, 201 bp, Homo sapiens
ctcccccgacggccgcccgctccctgccccgggcctccccctgacagccacccgctcactgtcctgtgacctcccccgacacccgcccgctcactgccccrggccttgtgtgttgcaggaccacggaggggtgatcgtgaacatcactgccaccctggggaaccgggggcaggcgctccaggtgcatgcaggctccgccaa

SEQ ID NO: 274178 - DNA, 201 bp, Homo sapiens
cacctacccgacaggatccaggtgcctgccagagggactggggagcggtcgaggattgccctggggggagtcaggacttcaaggcccctacaggtcagtgragattgtgtggctctggtctggggcctgctgggacctcgagagtcagggctgtgtcgggccccagtgctggcgccctgcagagcacattttctcctggga

SEQ ID NO: 274179 - DNA, 201 bp, Homo sapiens
ggtgggtgcctcgtgcgctctgtgagaagttcttccgggtgggtgccttgtgcgctctgtgagaagttcttccgggtgggtgtactcccagcgggggcctycccctgacggccgcccgctccctgccctgggcctccccatgacggccgcccgctccctgccctgggcctcccccgacggccgcccgctccctgccccggg

SEQ ID NO: 274180 - DNA, 201 bp, Homo sapiens; identical to SEQ ID NO: 54398

SEQ ID NO: 274181 - DNA, 201 bp, Homo sapiens
agcctgaagccccagtcggccaccgtgcacgacttccaggaggaattcggcctggaccagactcaggcgagtgggccgtggggcggtgctggtcttgggtycccaccgcccgggcgcacgcaggcagcagggagggtccagcgcccaaggcagggccacctcagcttcctccctgcaccagggctcgtttccaaggaccct

SEQ ID NO: 274182 - DNA, 201 bp, Homo sapiens
agcagatcaacaggtgtggtgggcagggcccctcgtcgcgaccccccgccgggatctcgccccggcgcggcgccccgaccctgagcgggcccctgtctccrcagcgtgtccgagcacgagtacagctttgtgagcagccagcccctgggccgggaccagtacaaggagatgtacctgttcgtgtacaggtgaggggcgggc

SEQ ID NO: 274183 - DNA, 201 bp, Homo sapiens
gcgccggagcctgaagccccagtcggccaccgtgcacgacttccaggaggaattcggcctggaccagactcaggcgagtgggccgtggggcggtgctggtsttgggtccccaccgcccgggcgcacgcaggcagcagggagggtccagcgcccaaggcagggccacctcagcttcctccctgcaccagggctcgtttccaa

SEQ ID NO: 274184 - DNA, 201 bp, Homo sapiens
ccctgcaccagggctcgtttccaaggaccctggagagcccggcccaccccatgtggagctctgggcaggcagggtaccttgcctttccctcaaagggccartggtgacaccctctgccccggcccctgcccctgccccaccgcaggcagcagcaggggtgggcacccaggcctcaccggcccctcccatccctgtgggtgg

SEQ ID NO: 274185 - DNA, 201 bp, Homo sapiens
cgacgtaagcccacccctcggtcccggggtccctgcaggcgcgccccgggggtctggttcatgagggcgggacctcgacggctcctgcggcggctcagacrcggctccgcggcgcccgcaggacatgctgttcctgggcgacttcaacgccgactgcagctatgtgcgggcgcaggactgggccgccatccgtctgaggag

SEQ ID NO: 274186 - DNA, 201 bp, Homo sapiens
ctgcacgcggcgccgcatcaagccgtggcggagatcgacgcgctctacgacgtgtacctggacgtgatcgacaagtggggcaccgacgtaagcccacccckcggtcccggggtccctgcaggcgcgccccgggggtctggttcatgagggcgggacctcgacggctcctgcggcggctcagacacggctccgcggcgcccg

SEQ ID NO: 274187 - DNA, 201 bp, Homo sapiens
ctggtgctgatcccgctgcacgcggcgccgcatcaagccgtggcggagatcgacgcgctctacgacgtgtacctggacgtgatcgacaagtggggcaccgmcgtaagcccacccctcggtcccggggtccctgcaggcgcgccccgggggtctggttcatgagggcgggacctcgacggctcctgcggcggctcagacacg

SEQ ID NO: 274188 - DNA, 201 bp, Homo sapiens
gcccctgcccctgccccaccgcaggcagcagcaggggtgggcacccaggcctcaccggcccctcccatccctgtgggtggggtgcacttttcccctgaggytcactctgtccccacaggctcttgccatcagcgaccactttccagtggaggtgaccctcaagttccaccgatgactcgaggcctggctggggcatgccac

SEQ ID NO: 274189 - DNA, 201 bp, Homo sapiens
ctctgcacccacatccaaggtgagtctctcggctgccctgagctggggctggatgggccggaccctccattccggctgcagcttcccgcgcagtgagaagrcagcggtccctgagagcccagcagtgccctgggagcctgcagaacgcaggggcggattccgcgtcgcactggccgtcaaggggcggccgcggagggaagg

SEQ ID NO: 274190 - DNA, 201 bp, Homo sapiens
  misc_feature (1)...(201): n = A,T,C or G
cctgtgtcggacacgcccgcagcctggacccgggatccccatccccctaggatctctgagcctcgggcctctgcacccacatccaaggtgagtctctcggntgccctgagctggggctggatgggccggaccctccattccggctgcagcttcccgcgcagtgagaaggcagcggtccctgagagcccagcagtgccctgg

SEQ ID NO: 274191 - DNA, 201 bp, Homo sapiens
gaaaaaatagaaaaacatatctaattattaaatcaaaatcctatttttgaaaaaattaacaatataaataaacccgtaagctaagttggtaaaaaaaaaaacggagaaagcataaatatgcaaaataaatgacaagggagaaacagaagaaatgtaaaaatcaaaagacaaatttgtagtctttgaaataaatttgaaacc

SEQ ID NO: 274192 - DNA, 201 bp, Homo sapiens
aaaactaggtaaagaacaacaaagtaattcaaaagaaagcatatgataggaattagtatagataaaaacagaaattaatgaggaaaaaatagaaaaacatrtctaattattaaatcaaaatcctatttttgaaaaaattaacaatataaataaacccgtaagctaagttggtaaaaaaaaaaacggagaaagcataaatat

SEQ ID NO: 274193 - DNA, 201 bp, Homo sapiens
gtttacagtcccaccaacagtgtaaaagtgttcctatttctccacatcctctccagcacctgttgtttcctgactttttaatgattgccattctaactggygtgagatggtatctcattgtggttttgatttgcatttctctgatggccagtgatggtgagcattttttcatgtgttttttggttgcataaatgtcttctt

SEQ ID NO: 274194 - DNA, 201 bp, Homo sapiens
agtttacagtcccaccaacagtgtaaaagtgttcctatttctccacatcctctccagcacctgttgtttcctgactttttaatgattgccattctaactgkcgtgagatggtatctcattgtggttttgatttgcatttctctgatggccagtgatggtgagcattttttcatgtgttttttggttgcataaatgtcttct

SEQ ID NO: 274195 - DNA, 201 bp, Homo sapiens
tttccaatttcatccatgtccctacaaagaacatgaactcatcattttttatggctgcatagtattccatggtgtatatgggccacattttcttaatccgstctatcattgttggacatttgggttggttccaagtctttgctattgtgaataatgctgcaataaacatacgtgtgcatgtgtctttatagcagcatgatt

SEQ ID NO: 274196 - DNA, 201 bp, Homo sapiens
caaaaatttaacgtcttttacgattaaaaaatacataaagttagacaaaaatagactgggagaaaaatatttgctacacatacatttgctactcatggagractagtatccaaatatataaagaactcttacaaatcaggagaaaagatatcctgatggagaaatttgggattaacgcgcagctccagatgaggaaatgca

SEQ ID NO: 274197 - DNA, 201 bp, Homo sapiens
tattgatagtttttacaacaaaaatttaacgtcttttacgattaaaaaatacataaagttagacaaaaatagactgggagaaaaatatttgctacacatayatttgctactcatggagaactagtatccaaatatataaagaactcttacaaatcaggagaaaagatatcctgatggagaaatttgggattaacgcgcagc

SEQ ID NO: 274198 - DNA, 201 bp, Homo sapiens
agtcaggctgtaggaacaaggaagaaagtagcagtaactccagagaacgagaagactccaattaaggccccaatgggacttaccaactgctggtggttctratgtggctgatgatgctctgggctggatggccataaagatgatactggtaggctggagggggggggtccccaaatgccgatgggacctcagcgccagccg

SEQ ID NO: 274199 - DNA, 201 bp, Homo sapiens
atcccagctccaccaccatggtcccggtgccttttcggctacatccatttgctcgctgtcatccttgtcctggtctgtcgggaactgtgtttccacacctracagtcttgaccctgatgcctccatcagccccgctgcacgtgcatcttcccctcacattgtacatgtctgtccggctctccatcctcccgcgtccaccag

SEQ ID NO: 274200 - DNA, 201 bp, Homo sapiens
gcgctggaaatcccagctccaccaccatggtcccggtgccttttcggctacatccatttgctcgctgtcatccttgtcctggtctgtcgggaactgtgttyccacacctaacagtcttgaccctgatgcctccatcagccccgctgcacgtgcatcttcccctcacattgtacatgtctgtccggctctccatcctcccgc

SEQ ID NO: 274201 - DNA, 201 bp, Homo sapiens
aattttaacatatacaacgtttggttaacaaaataatatgtaaaacttgagtacgaggactatgacatatacaggttgagtataccttctttgcaatgctyggaaccagaagtgttttggatttcagatttttttggattttggaatatttgcagaatacatactcactgactattgctaatctgagtatctgaaatccag

SEQ ID NO: 274202 - DNA, 201 bp, Homo sapiens
ctccgcctcccaggttcaaccaattctcatgtctcaggctctccgagtagctgggactgcaggcccacgccaccacacctggctaatatttgtatttttttagtagaaacggtatttcaccatattggtcaggctggtctcgaactcctgacctttggtgatccacccaccttagcctcccacagtgctgggattacaggc

SEQ ID NO: 274203 - DNA, 201 bp, Homo sapiens
atacagacttatctctggatagttgggattgtggctgatatttattttcttttaaactttttataatttgcaaatgtcctagaataagtatatataatttrtagttctaagtgtgtaatgaacattatttttaaaatagttgcctttttaattactataactcattgaagtgaatctggttttgtataacataataaattg

SEQ ID NO: 274204 - DNA, 201 bp, Homo sapiens
acatcaatttgtaaaactgatgattaacagcagcaatagccaatgtatggacacctcatttggttcagccttacccaattctgactgataaaattaaagtkgagcaaactatttaatggatgtcaaaactattgcatctagattggctgcaggcaagagcagagctttaagtggaagttttaaacaagtgagatcaagatc

SEQ ID NO: 274205 - DNA, 201 bp, Homo sapiens
tcccaaagtggtttaaactgtatactgtccccttaatttcaatcttgttaaacagagtaatacttccttctcattttggctctgctaattttgttggagaycacattaaacacatagtaacctatgtccaacccccacacttgcaaattttacattgttaattgtttgctttcaaaatcctgaccttcagtgattgccaac

SEQ ID NO: 274206 - DNA, 201 bp, Homo sapiens
ggtggatcatctgaggtcaggacaagaccaacctggccaacatggtgaaactccttctctactaaaaatacaaaaaaattggccgggcgcggtggctcacrcctgtaatcccagcactttgggaggccgaggcgggtggatcatgaggtcaggagatcgagaccatcctggctaacaaggtgaaaccccgtctctactaaa

SEQ ID NO: 274207 - DNA, 201 bp, Homo sapiens
agaagggatgagacaatgttaaccatgaagcccttcgtcttcagcagcagaccatctacatcaatttgtaaaactgatgattaacagcagcaatagccaakgtatggacacctcatttggttcagccttacccaattctgactgataaaattaaagttgagcaaactatttaatggatgtcaaaactattgcatctagatt

SEQ ID NO: 274208 - DNA, 201 bp, Homo sapiens
ttttttgagatggagtctcgctctgttaccaggctggagtgcagtggcgcaatctcggctcactacaacctccacctccctggttcaagcaattctcctactttagcctcctgagtagctgggattacaggcatgcaccaccacgcctggctaatttttatatttttagtagagacggggtttcaccatattggccaggtg

SEQ ID NO: 274209 - DNA, 201 bp, Homo sapiens
catcattttcttttcctgagaaaagaattatccagtgtacctagaaacaactaattaacccattatacaacttatttttactaaaatcttctatggcatcmactagttagttacccaaggctttgtcttctgtaggtccttgtctgcagatgatgattttaaatattttgccactgcatgctgtggactactagtagcccc

SEQ ID NO: 274210 - DNA, 201 bp, Homo sapiens
atatgataggaattagtatagataaaaacagaaattaatgaggaaaaaatagaaaaacatatctaattattaaatcaaaatcctatttttgaaaaaattamcaatataaataaacccgtaagctaagttggtaaaaaaaaaaacggagaaagcataaatatgcaaaataaatgacaagggagaaacagaagaaatgtaaaa

SEQ ID NO: 274211 - DNA, 201 bp, Homo sapiens
aattcacaaatatatcctctgtactattttccataagcattatagcttcaactttcatattttaggtttgtaatctacctggaattgtttcatttttttttcttttttggatatagtataaggtagcaatttaatttctttcttctccatatgaaaacccaataatctcagcaccattagttgaaatatgtgtctataccc

SEQ ID NO: 274212 - DNA, 201 bp, Homo sapiens
gactttgaattcataattaaaaattatattcccttcaaattttagagtaattcactcatgttctcttctaatacatttatagtttcatattttacatttakatctctggtccattgaatttttttattatatatgctataaacagattcaatcttatccttttccattgactacacagttagttgccccccaaaattctat

SEQ ID NO: 274213 - DNA, 201 bp, Homo sapiens
tgcacaatattcgtaactgttacccagttttcacagaaataagcacacacatcacatttatgttttgaacaacttttactgctcgtaagtacaggagaaayagaagttaaaaaattaacaaatactgggaaagttacagagttacaataaatcataaaagcactagtaaatagttatccctggtcatcattcagttacatt

SEQ ID NO: 274214 - DNA, 201 bp, Homo sapiens
ctcccagtctgttggctgcctatttattttcttaacggtatcatttgagaagcagaagttttaaatttttatgaagtctaatttatcaatttttttctttyatagttattactgttccctaagaaacctttatctacttgttttctcatgctttaggctaaatgctttatggttttagattttacattttaggcaatgatc

SEQ ID NO: 274215 - DNA, 201 bp, Homo sapiens
gtgaggtttctctagttccatttccttgtaacttcgctttctctcctggtctgtttttctctccagttagatttgtctgaaatatgtccactagccagtarttaagctggctgtactcttaagtaaagctagttttatttacctttttctaaactagtatttgggcccaatcttaatgtagtcctgtggtttctaccattg

SEQ ID NO: 274216 - DNA, 201 bp, Homo sapiens
tacctgttacagagttgtaatgactaaatgagataattagtgtaaagcactgagaatagtcctgaacatacagtaagcattcaggaatagttttccttccrtcattcagcaaatatttattgcgtagctgctgtgtgctgtgcactgttttaggtgttggggatatagcagacaaaccagcaaaaatatttgcgctcatga

SEQ ID NO: 274217 - DNA, 201 bp, Homo sapiens
aaacatgttggggtggcctatcagaatcttaaacttcccctttagcatctataacgaagacatagatgaagtgcattcattccataattactgagctcctrttatatgccaggcactgagcacctgctcatcagctcattgacaatagccatgctcaagatccacactcctcatataactttctgattataattgatcttc

SEQ ID NO: 274218 - DNA, 201 bp, Homo sapiens
ccaatgtgtagtcttttatcccttactcccctccctctcttccccccaagtccccaaaatccattgtatcattctcatgcctttgcgtcctcatagcttarctcccacctttaagtgagaacatgtgatgtttgggtttcctttcctgagttacttcacttagaataatggtctccaactgcaccctggttgctgcaaatg

SEQ ID NO: 274219 - DNA, 201 bp, Homo sapiens
gtggtcactaggaattgtcttctctccattagttccctctaacacttgcaagtatctttctgcccacatactagactcaaaacacatgagtccatcccccycaggcccccagcccccaaggtttacctgccagtacgttccatgcaggtgctgtctgaatgtgcagtgatgccccatttcctccatttaccctgagtgact

SEQ ID NO: 274220 - DNA, 201 bp, Homo sapiens
aaatcagcagtttacaaatggataagttgtattaagaagggatgagacaatgttaaccatgaagcccttcgtcttcagcagcagaccatctacatcaattkgtaaaactgatgattaacagcagcaatagccaatgtatggacacctcatttggttcagccttacccaattctgactgataaaattaaagttgagcaaact

SEQ ID NO: 274221 - DNA, 201 bp, Homo sapiens
gcgaccgagtgagacttcgtctcgaaaaaaaaaaaaaaaaatcttaatgaggtacagcatacccactagaatggttacaacaaaaaagcttgacaataccmaaataaaaaagcctattccaatatcgaacatttggaacaattgaaactcccatacactgtagataggaatgtagaatgatacaaccaccgtagaaaagtt

SEQ ID NO: 274222 - DNA, 201 bp, Homo sapiens
tctccaccttttttgtttttgcctttttctaatattctactctgatgcatatagttgtcttctgacttgcttcttttctacctcaccctttttcccttccrtatctttggtccatctttaatcatataactcttttcttaatttatgctcttgttcttctgacctcattgtttctgggtttccttattgtgaagctgattt

SEQ ID NO: 274223 - DNA, 201 bp, Homo sapiens
tctttctcccttgaagaactgcctacacagttttcttcctgactcgacttttcaagtacaagcaattttcattatcctgtgtgcttgaataataatttttrgtagcaaacacttacattgcattatcttaaatttgaaaaagctcttatccatctccctttaaaaaaactcaacctattttctcagtcatcactaaaacac

SEQ ID NO: 274224 - DNA, 201 bp, Homo sapiens
atattctacaaatcatttacccactgactctataataagtgaatgctgaattattctctggatgttaaccttatcatgattcccaaccagtcctcaaccartagcattcatttgttctacaaagaatcccgatctatacctgtcaatcctcatgtttttaaggtttccaccaatggcttcttatcagggtttatcttaatt

SEQ ID NO: 274225 - DNA, 201 bp, Homo sapiens
gtagcttggccagcttaatcctcctgcaaataataattgacattagtacaaagctataccttcccaaaatgaagataacccacaacagtatgaaaatattrgggagtggtgaaaagcaagcaaaaactggagggaagcagttgatgcctgaaagacaaaagctatactgggtgaaatttgtggggtttttttgctattctc

SEQ ID NO: 274226 - DNA, 201 bp, Homo sapiens
atatatttgctgtttgctttctgttgatttcattttttgaccataagaaagccaataggaatttaaaagaatataatatcttaaagcattcttttctaaaatgaagttttcatcatgtgaaagccatccttatctgataaagcaaaggaagaagttacaaaagataatactgatagatttgagtgcatcaaaattttcata

SEQ ID NO: 274227 - DNA, 201 bp, Homo sapiens
gtatgaagccttttttgagtttcttttcagttacttagcataatgcatgtgagattcatccatattattgtttgtatcagtagtttatttttattttgtcrtcgtattccattgaatggatgtacctctgtttatctgtttgccagttgaaggatatttggcttgttaccagtttttggtgattataaacaacattgctat

SEQ ID NO: 274228 - DNA, 201 bp, Homo sapiens
ccaccacgcctggctaatatttgtatttttagtagagacggggtttcaccatgttagccaggatggtctcgatctcctgacctcatgatccgcccgcctcrgcctcccaaagtgctgggagccaccgcgcccggcctatagtttttgtttttgttttgagacggagtcttgttctgtcacacaggctggagtggaatggtg

SEQ ID NO: 274229 - DNA, 201 bp, Homo sapiens
tgtacactttcacaaggaaacatatacaaatatttcaattccagtattacttgtaatatcaaaatattgagagatgtctttaacatcctttgaattaacgattggacaaaatgtttagttgtattatgggatgttataaaatgtttaatcaggaattaattattgtttcatgaaaaaaaaaactgtgtgaagtaaatatac

SEQ ID NO: 274230 - DNA, 201 bp, Homo sapiens
taagaaagccaataggaatttaaaagaatataatatcttaaagcattcttttctaaaatgaagttttcatcatgtgaaagccatccttatctgataaagcmaaggaagaagttacaaaagataatactgatagatttgagtgcatcaaaattttcataaaaatggataaaactaaaaagtaaaagataacgtgcactgaaa

SEQ ID NO: 274231 - DNA, 201 bp, Homo sapiens
ggttgctgcaaatgctattatttcattccttttaatggctgagtagtattccatggtgtatatatgtgtgtgtgcgcgcgtttgtgtatatatatatatakagagagagagagggcgcattttctttatttacttattgattgatgggcatttgggctggttccatatttctgcaattgtgaattgtgctgctataaacat

SEQ ID NO: 274232 - DNA, 201 bp, Homo sapiens
tgtcacaggagaatttggagcttatagaaatgcaaagacatgaagactgtcacaggttgggaattttaaatgtaagaacaggtgtttagtgcaaggttatwgaaatcagttatctgtattaatctcattgtattagtatgatatagataagtattgtgatccttatttaactggtatagcccataaagttgaagtagtcaa

SEQ ID NO: 274233 - DNA, 201 bp, Homo sapiens
gagtccatctgctgtctcagttcacccctaaccgtcctgtattctcagttctgcctctaaggaacagtggtttcctctctctgttgtgtcctctggccttycatcgtctcgccatgccctttattgacacacggtcctcaatgtttccaaggtgccaacacctctacaccctgtttctgtggcctcatctcacctctcctt

SEQ ID NO: 274234 - DNA, 201 bp, Homo sapiens
gacgatgctgatcttttgaaatacttaagagagtgataatgaaattggaaaatgaagttgcaggatttattggatggtgggattttagagcatgcttaggkcccagatatctttctttgtactcaatttccaccctcatttttgccttagattagacaaataacccttcgctttcagtaagataggaatactatgatggct

SEQ ID NO: 274235 - DNA, 201 bp, Homo sapiens
tctacaccctgtttctgtggcctcatctcacctctccttcattccttccgtgtcttacccacaccatgctttctcctccatgacctgcatcaaacacttcrccccttttgggcaaaaaggaggattctctacgttcacacccacactcttgctcttggcatgcctcccttgctgcagtacattccctgatcctctcaacaa

SEQ ID NO: 274236 - DNA, 201 bp, Homo sapiens
attattgtttgtatcagtagtttatttttattttgtcgtcgtattccattgaatggatgtacctctgtttatctgtttgccagttgaaggatatttggctygttaccagtttttggtgattataaacaacattgctataaacattcatgttttgatttttggatgaacatacatttttatttcttttggataaatgcctgg

SEQ ID NO: 274237 - DNA, 201 bp, Homo sapiens
cgtgagccactgcacccggcccatctatagctttttatcagcattcatcagtttataactttcctatcaagcaagtcctttaattagccattccctcaaamgctttaagagctagtctgctgctgcctcctactgaattccttgctccttaaccctttctgtgtatttcccatgcagccgaccatttagacctagacagga

SEQ ID NO: 274238 - DNA, 201 bp, Homo sapiens
gcatcaagtgataatattatggtccaggtattgtcattgaatcacattagcttgtctcaggatcagcattctttaaacctgtattgtaggggcagtgtatygattccctagataaacattaactaaaggcaaattaagcagctactagtacgtattctgaagtaggaatctcactaattatgattactgccatttgaatac

SEQ ID NO: 274239 - DNA, 201 bp, Homo sapiens
ggcaggtaagaagcttccatcagattttccttccattttcttgcaaagcttaataataggatatagatgggcatcttatgccttgctgttgtcccatcatsccattatatgagtaacaatttgatacccagtcaaaatgaataatttgttttgcatgctattcttggttattcttttaagatgtacatttggcccaaaaca

SEQ ID NO: 274240 - DNA, 201 bp, Homo sapiens
caccacacccggctaatttttgtatttttagtagagaaggggtttcaccatattggccaggttggtctcgaacttgtgacctcaggtgatctgcctgcctyggcctcccaaaatgctgggattacaggcgtgagccactgcgcccggccagcatttcttaatagcagactcttctgaagacagaattgggaaatatctggc

SEQ ID NO: 274241 - DNA, 201 bp, Homo sapiens
tttgtatctttcaaggaatttcagttaaattgttgaacttggcataaagctcttcataatattcctccattcttttaatgtctgcagaatccttagtggtrtctcttccttcattctgatattggtaaattgtattttctctcttttatttctaggaagcttgtctagggatttataaactttattgatcttgtcatagaa

SEQ ID NO: 274242 - DNA, 201 bp, Homo sapiens
cccacatagccaagacaatcctaagcaaaaagaacaaagctggaggcatcacgctacctgacttcaaactatactacaaggatacagtaaccaaaacagcrtgatactggtatcaaaacagatacatagaccaacggaaaagaacagaggcctcagaaataacaccacacatttacaaccatctgatctttgacaaacctg

SEQ ID NO: 274243 - DNA, 201 bp, Homo sapiens
actacttctcaaggaaataagagaggacacaaacaaatggaaaaacattccatgctcatggataggaagaatcaatactgtgaaaatggccatactgcccmaagtaatgtgtagaatcagtgctatccccattaagctcccattggctttcttcacataattagaaaaaaactactttaaatttcatatggaaccaaaaaa

SEQ ID NO: 274244 - DNA, 201 bp, Homo sapiens
tgctgggcttacaggcgtgagctactgtgctcagccgttaggtttattttttaattccatttttccacagattttttgaagtcccctcgtatttgtgatarccctaaactggaaacatcccaaatgctcatcaaagaagaaggaacaaattgtggtatattcatgcaatagactattactcagcaataaaaggaaaaaatt

SEQ ID NO: 274245 - DNA, 201 bp, Homo sapiens
ttcaaaggattgaaatcatatagactgtgttctttatttacaatgggatagtgttggaaattaataaaaaaagaataactagataaattgccatttatttkgatagtaagaacatttttctgttttgtttacagccatgataaagtaaatggactggatttaccctgctactataaatacctagaaaatcaaacaaaattt

SEQ ID NO: 274246 - DNA, 201 bp, Homo sapiens
caaaaacccattcaaatttatcttaaaaagctttattataggacacaaatctcagaatttgaggtgaagcttataggtagacaccagggcaagaaattggkcagctttaagaattcaacagcagattttttttctttttcttttttgagtcggagtctcgtgctttcgcccaggctggagtgcagtggcacgatcttggct

SEQ ID NO: 274247 - DNA, 201 bp, Homo sapiens
tccaacaaagcttcctggacagcaaaaccttatgccctggctcttactttgccaccttcttaccttactctctccttgttaatacacaactctgacaaatycccaactctcatttcctaatattcccatttagccctctttaatgcccttccatatctgttgtttttctgcactgcatgttctgccccctacctcattcac

SEQ ID NO: 274248 - DNA, 201 bp, Homo sapiens
cctcttcatgtcttttggcccaaatatgggactgtctctccagtcagtcctgccattcttcaaatgaccttttcatctggagtcaactttaatgttttctyctattccttttctccttgttacctatcttgccctaaagatgtacgctaccttatcttcagcctcccttcttttagctgctgtccatatttcattcagatg

SEQ ID NO: 274249 - DNA, 201 bp, Homo sapiens
tcaaagcaatagctaccaagaggtggaagtggaagtggtccagtcaaagcaaaagtggacctgtcaaaaacagggcaacagtttttggagatgcttgaggkattttgcttgttcactttctggagggccaagtaatgataatagcttattatgagagtatttagagaaagttggccaaagctttagtagaaaaacacttgg

SEQ ID NO: 274250 - DNA, 201 bp, Homo sapiens
aaccactatggaaaacagtatagagattctttaaagagttaaaagtagaactgccattcgacccagcaatcccactactgggtatctactcgaaggaaaaraagtcattatatgaaaaagacacatgcacatgcatgtttataacagcacagttcacaattgcaaagacgtggaaccaacctaagtgcccatcagtcaaca

SEQ ID NO: 274251 - DNA, 201 bp, Homo sapiens
gaaaatgtggaacacagtgctgagtacagatggcacttcctaagaaatgatggaaacgtctcccttgcactccccactgatgcaggtttgcctcccttctyctccagttgcaggctcctttagctgcaccatgaagtttacagtccgggactgtgaccctaacactggagttccagatgaggatgggtatgatgatgagta

SEQ ID NO: 274252 - DNA, 201 bp, Homo sapiens
aatccagcagcacatcaaaaagcttatctagtatgatcaagttggcttcatccctgggatgcaaggctggttcagcatacacaaatcaacaaatgtaatcyatcacataaacagagccaatgacaaaaaccacatgattatctcaatagatgcagaaaaggcctttgataaaattaaacaccccttcatgctaaaaattct

SEQ ID NO: 274253 - DNA, 201 bp, Homo sapiens
cccaaatatgggactgtctctccagtcagtcctgccattcttcaaatgaccttttcatctggagtcaactttaatgttttctcctattccttttctccttrttacctatcttgccctaaagatgtacgctaccttatcttcagcctcccttcttttagctgctgtccatatttcattcagatggactctgtctcctcctga

SEQ ID NO: 274254 - DNA, 201 bp, Homo sapiens
ttaataccgcacttacatgatattcatttgtttctcccctttggtgatttgccctcccttaattatatagagtaaaatttcatctaccatctgtacctggmaacaaagaagtttcacccttgagatgggtttccaacatgatctccagccactcctcttccaatattagtcatccattctacaaactactcaaagatctat

SEQ ID NO: 274255 - DNA, 201 bp, Homo sapiens
acatgatattcatttgtttctcccctttggtgatttgccctcccttaattatatagagtaaaatttcatctaccatctgtacctggaaacaaagaagtttyacccttgagatgggtttccaacatgatctccagccactcctcttccaatattagtcatccattctacaaactactcaaagatctatcctggtgtctttaa

SEQ ID NO: 274256 - DNA, 201 bp, Homo sapiens
aataaataaataaatatatatatacacatatatatatatacatatatatatatacacatatatatgcatatatatatatacgtatatatatatacacacacaaacacacactatccgagactgggtaatttataaaggaaaggggtgtaattgactcacagttccgcgtggctgggggaggcctcaggaaacttacaatca

SEQ ID NO: 274257 - DNA, 201 bp, Homo sapiens
aaataaataaataaatatatatatacacatatatatatatacatatatatatatacacatatatatgcatatatatatatacgtatatatatatacacacacaaacacacactatccgagactgggtaatttataaaggaaaggggtgtaattgactcacagttccgcgtggctgggggaggcctcaggaaacttacaatc

SEQ ID NO: 274258 - DNA, 201 bp, Homo sapiens
taaaaataaataaataaataaatatatatatacacatatatatatatacatatatatatatacacatatatatgcatatatatatatacgtatatatatayacacacacaaacacacactatccgagactgggtaatttataaaggaaaggggtgtaattgactcacagttccgcgtggctgggggaggcctcaggaaact

SEQ ID NO: 274259 - DNA, 201 bp, Homo sapiens
ccagctactttttgcatttttagtagagatggggtttcaccatgttggcgaggctggtatcaaactcctgacctcaaatgatccacctgtctcagtccccygaagtgctgggattacaggcatgagccaccgtgcccagcccctacccacactttatattccacactccagcctaaatcctacatcttttcatcttttagc

SEQ ID NO: 274260 - DNA, 201 bp, Homo sapiens
aaaggccagcaccctgtcttcatcatctaattgatcagccattttctagtccagtagtagcctccctctacacatcaccaacaacccccttcaccaacaamcccttccaccccagctcccagcatacactggtgcagagggagatccctgtgctttactttcctaatactgtctcatacatcttctcaacacagaggctgt

SEQ ID NO: 274261 - DNA, 201 bp, Homo sapiens
tattagggctcatcttaatccatctccttctaatccttctcattaaacttctcacaaaagcttcgcattacttttcaagcacttgttcttcttccattgtrtctactgcttttcaaagtctgcaattaagagccaacatttgactgaataaacccacattttttaagggtttacaagatttcccattctgggaaacacttt

SEQ ID NO: 274262 - DNA, 201 bp, Homo sapiens
aatgtacccccacctccatttcttattacttaacaccacttgtgtgaaaacatacaactgcccacttgcttttccatttaagacactgactttaccaatastagaaactcattactgacctactcactttaggctgaaggttgacagataaagcaagttctctctggtgatctgtggacccgccatcagtccacaatctaa

SEQ ID NO: 274263 - DNA, 201 bp, Homo sapiens
agtcaagactgagcagatgaaagtcttattacccaatctgtcgtatatggtcttcacatctgagcctgttctttcctctccttgcctatcccccaaataaytttttaactctcccaatatctaatattttttgtacctataagctttttccagaccatagacaagatcctaaatgccttttcttcatccctgcttgctaaa

SEQ ID NO: 274264 - DNA, 201 bp, Homo sapiens
aacaagtcacgtcttgaatggatggcagcaggcaaagagagagagcgcttgtgcagggaaactcccatttttaaaaccatcagatctcatgagacttactktcatgagaacagcatgggaaacacttgcccccatgattcaattacctcccacttggtccctcccataacacatggaaattcaagatgagatttgggtggg

SEQ ID NO: 274265 - DNA, 201 bp, Homo sapiens
ctgcagttagcctgtacagatccatctcttttgccttctttctaatcttttgccctagtgacatacccttttctttaattattattctaacaaagctttcyggaaatacctcataagtgtctcttactttgtcatggtctcccccaggtggttgagacctggcagctccctcccacctttcccactctgccctttgccaca

SEQ ID NO: 274266 - DNA, 201 bp, Homo sapiens
attccctgacatgaaattttattggatttaatatctacatgatatagccatttaagagtataacttgaggaaaaaggaaagatctacctgatcaaaaaacwtgttggggtggcctatcagaatcttaaacttcccctttagcatctataacgaagacatagatgaagtgcattcattccataattactgagctcctattat

SEQ ID NO: 274267 - DNA, 201 bp, Homo sapiens
ctgacagagccagaaagagtgcatcagggaaaaatgcccacgctacaaaattttttggtgcaggacacttccaaaaaaagtcttttttttttttttttttttttttttgagacagggtctcactctgtcacccaggttggagtacagtggtgccatctcagctcactgcaacctctgcctcctgggttcaagcagtcctcc

SEQ ID NO: 274268 - DNA, 201 bp, Homo sapiens
cagtctcagctcactacaacctccgcttcctgggttcaagccattcatatgcctcagcctcttgagtagctggaactataggcatcccagcactttgggargctgaggtgggtggatcatttaagatcagatttcttataagtctcttcaaaactaggcttcctccatcatgctcctcaaaattcttccaagcttccaccc

SEQ ID NO: 274269 - DNA, 201 bp, Homo sapiens
tggcaggcatctgtagtcccagctactcaggaggctgaggcaggagaattgcttgaacccgggaggcggaggttgtggtgagccgagatcatgccactgcrctccagcctgggcgaccgagtgagacttcgtctcgaaaaaaaaaaaaaaaaatcttaatgaggtacagcatacccactagaatggttacaacaaaaaagc

SEQ ID NO: 274270 - DNA, 201 bp, Homo sapiens
tcaggagactgatctcacatgcagagacacacataggcttaaaataaagggatggaagaatatttaccaagcaaatgaaagcaaaaaaaaaaaaaaaaaaaaccggttgcaatcctagtctctgataaaacagactttaaaccaacaaagatcaaaagagacaaagaaaggcattacataatggtaaagggatcaatgcaa

SEQ ID NO: 274271 - DNA, 201 bp, Homo sapiens
ctaaaaatacaaaaaattagctgggcgtggtggcaggcatctgtagtcccagctactcaggaggctgaggcaggagaattgcttgaacccgggaggcggargttgtggtgagccgagatcatgccactgcactccagcctgggcgaccgagtgagacttcgtctcgaaaaaaaaaaaaaaaaatcttaatgaggtacagca

SEQ ID NO: 274272 - DNA, 201 bp, Homo sapiens
tcatcagggaaatgcaaattaaaatcttagtgagataggctgggcacggtggctcacgcgtgtaatcccagcactttgggaggccgaggtgggtggatcaygaggtcaggagatcgagaccgtcctggctaacacggtgaaaccctgtctctactaaaaatacaaaaaattagctgggcgtggtggcaggcatctgtagtc

SEQ ID NO: 274273 - DNA, 201 bp, Homo sapiens
aactaaccttcataagtgaaggagaaataaaatcctttacagagaagcaaatcctgagagattatgtcaccaccaggcctgcctttcaagagctcctgaarggagcactaaatatggaaaggaaaaacaagtgtcagccactgcaaaaacataccaaatggtaaagaccattgacactatgaagaaactgcatcaactaat

SEQ ID NO: 274274 - DNA, 201 bp, Homo sapiens
acccgattttccaggtgcgtccatcacccctttctttgactcggaaagggaactccctgacccttgcgcttcccaagtgaggcaatgcctcgccctggttyggcttgcgcacggtgcgtgcacccactgacctgcgcccactgtctggcactccctagtgagatgaacccagtacctcagatggaaatgcagaaatcaccg

SEQ ID NO: 274275 - DNA, 201 bp, Homo sapiens
ctcaaagatctatcctggtgtctttaagtgctgccctattagggctcatcttaatccatctccttctaatccttctcattaaacttctcacaaaagcttcscattacttttcaagcacttgttcttcttccattgtatctactgcttttcaaagtctgcaattaagagccaacatttgactgaataaacccacatttttta

SEQ ID NO: 274276 - DNA, 201 bp, Homo sapiens
gcatctttatggcgctgtggtctttcttattaccacgccaccttttcagaatcattatctagtttatttaatgctccccttagctttaacccctcttcatktcttttggcccaaatatgggactgtctctccagtcagtcctgccattcttcaaatgaccttttcatctggagtcaactttaatgttttctcctattcctt

SEQ ID NO: 274277 - DNA, 201 bp, Homo sapiens
agaatgtaaatgttataatccatgataatacaaaaagaataatactaacaaaaatttggagatacacgggagggcagatgagagaggagaaagcttacgtrcattaatttttttgctttcatagcttaactcttttatctaaagttttatggcagcgacaaaaagaactagaatgtaaatctcccatatttcagagagaaa

SEQ ID NO: 274278 - DNA, 201 bp, Homo sapiens
tctaggcaacttcagtggaacactgtgcaatagtctacgatatcttaactgtcagtcatcctttcacttgccatctctctcttttttctttttttgagacrgaaactcactctgtcacccaggttagagtgcagtggcgtgattttggctcactgaaacctccaggattacaggcatgtgccactacgcccagctaatttt

SEQ ID NO: 274279 - DNA, 201 bp, Homo sapiens
tataggtgagtttctgggtatgattcatcccaagacagaattcctctttatctatggacctgtgaaactagcaaacaagttatgtgctgctaaaatactgyggtgggacaggcatagaataacaattatatacattcccattcagaaagggagacaatgagaggaaagaaaagagtcactagcaccagacaatttttaaat

SEQ ID NO: 274280 - DNA, 201 bp, Homo sapiens
tttgtatttctctagtattttggttttaatatctcccgattcctttttaattgagcttacttggatcttctctcttcttggttagtcttggtaatggtctrtcaattttgtttatcttcaaagaactagctttttgtttcatttatcttttgtattttttgttgttgttgttgtttcagtttcatttaattgtgctctgat

SEQ ID NO: 274281 - DNA, 201 bp, Homo sapiens
tatcaattatggccttggaattagttgtagcagcaaggattgaactatgttccactcaccttcctttatttagtcttttgtagaaatagtgattgctaccrtcttgaagcctccatgatagattagacttaatggaggacatgaacaaatttgagggatggaaagggtagactgtattggacacctcttttgagccacttc

SEQ ID NO: 274282 - DNA, 201 bp, Homo sapiens
acataaatcttataatgacctggtagatatagacccaaatatatcattatccacattaaatgtaaatgaagagcacaaagatcatttacaaaaagttgatkgtatattgagccataaagcaagacacaacacatttcaaaggattgaaatcatatagactgtgttctttatttacaatgggatagtgttggaaattaataa

SEQ ID NO: 274283 - DNA, 201 bp, Homo sapiens
ctggttgctgcaaatgctattatttcattccttttaatggctgagtagtattccatggtgtatatatgtgtgtgtgcgcgcgtttgtgtatatatatatakagagagagagagagggcgcattttctttatttacttattgattgatgggcatttgggctggttccatatttctgcaattgtgaattgtgctgctataaac

SEQ ID NO: 274284 - DNA, 201 bp, Homo sapiens
acaaacataaatcttataatgacctggtagatatagacccaaatatatcattatccacattaaatgtaaatgaagagcacaaagatcatttacaaaaagtkgattgtatattgagccataaagcaagacacaacacatttcaaaggattgaaatcatatagactgtgttctttatttacaatgggatagtgttggaaatta

SEQ ID NO: 274285 - DNA, 201 bp, Homo sapiens
agaataatggtctccaactgcaccctggttgctgcaaatgctattatttcattccttttaatggctgagtagtattccatggtgtatatatgtgtgtgtgygcgcgtttgtgtatatatatatatagagagagagagagggcgcattttctttatttacttattgattgatgggcatttgggctggttccatatttctgca

SEQ ID NO: 274286 - DNA, 201 bp, Homo sapiens
gacgtggaggtgtggctggcaagatggccgaataggaacagctctggtctccagctcccagcgagatcaacgtggaaggcgggtgatttctgcatttccarccgaggtacccggctcttctcactgggactggttagacagtgggtgcagcccctggagggcaagttgaagcaggatggggcattgcctcaccagggaagt

SEQ ID NO: 274287 - DNA, 201 bp, Homo sapiens
aaaagaaaaaaaaaagctaaaaaatcaaaccaaaagaaggggaaaaaaagaggaagagaaacatagatcaaataggacaaacataaatcttataatgacckggtagatatagacccaaatatatcattatccacattaaatgtaaatgaagagcacaaagatcatttacaaaaagttgattgtatattgagccataaagca

SEQ ID NO: 274288 - DNA, 201 bp, Homo sapiens
ctgattagcttaatacctaacctcctgaattcttttacaggtaaatcaaggatttcttcttggcttagatccattgctggtgaactagtgtaattttttttgggggggaggtgttaaagagccttgttttgtcatattaccagagttggttttctggttccttctcatttgggtaggctctgtcagagggaaggtctaggc

SEQ ID NO: 274289 - DNA, 201 bp, Homo sapiens
ccggtcggaaaagctcaatattcgggtgggagtgacccgattttccaggtgcgtccatcacccctttctttgactcggaaagggaactccctgacccttgmgcttcccaagtgaggcaatgcctcgccctggtttggcttgcgcacggtgcgtgcacccactgacctgcgcccactgtctggcactccctagtgagatgaa

SEQ ID NO: 274290 - DNA, 201 bp, Homo sapiens
gcctcggcctcccaaagtgctgggagccaccgcgcccggcctatagtttttgtttttgttttgagacggagtcttgttctgtcacacaggctggagtggamtggtgtgcccttggctcactgcagcctccgcctcccaggcttaagccttccaagtagctgggattacagctgtgtgccaccacgcccagctaatttttgt

SEQ ID NO: 274291 - DNA, 201 bp, Homo sapiens
gctagcaatcagcgagattccgtgggcgtaggaccctccgagccaggtgcgggatgtaatctcgtggtgggctgttttttttttttgtttgtttttttttktttttttgagacggagtctcgctctgtcgcccaggccagactgcggactgcagtggcgcaatctcggctcactgcaagctccgcttcccgggttcacgcc

SEQ ID NO: 274292 - DNA, 201 bp, Homo sapiens
ttgattgtggccattcttgcaggagtaaggtggtatcacattgtggttttgatttgcatttccctgatcattagtgatgttgagcatttttttatatgttygttgctcatttgtatatcttcttttgagaattgtctattcagttccttagcccactttttgatggaattgtttttttcttactgatttgttagagtttgt

SEQ ID NO: 274293 - DNA, 201 bp, Homo sapiens
tttccagtttttctgttctgttttttccccatctttgtggttttatctacttttggtctttgatgatggtgatgtacagatgggtttttggtgtggatgtyctttctgtttgttagttttccttctaacagacaggaccctcagctgcaggtctgttggaataccctgctgtgtgaggtgtcagtgtgcccctgctggggg

SEQ ID NO: 274294 - DNA, 201 bp, Homo sapiens
ctactcagactctagcacgaggtagattcacgttggcaccactgctgtgtctgaatcccagattgttccctctggccctgggtggaactctacttctattmtttagccaccctggatccataaccccctgagtaggaaggcactttcctatctggcctccaatatttctcctttgagctcgaggctatctggctttaacct

SEQ ID NO: 274295 - DNA, 201 bp, Homo sapiens
accagtacacgttggagccttcagaaaaaccgtttgacatgaaatcaattcctcttgctatggctcctgtctttgaacagaaagcaggttcactctattcrtttttctgtgtataagtagttttgcaaaactaaaaaatattagcatattttctctaatactcatttaattgtcactcttttttttttttttttttttttg

SEQ ID NO: 274296 - DNA, 201 bp, Homo sapiens
aattgctttgtgatgaaatgaatttttagaaatccctcatccaccattccagaagtgcctctcaatctgcctgtgcttttaatccctatgcatattgcctstctatttgatatctaaataatggcctataaatatttattggcagccatgaaagtccactgtttgatttcattgagagctgcttgcgaaataaacatgaaa

SEQ ID NO: 274297 - DNA, 201 bp, Homo sapiens
caagattaaccaaatactactgatttttttggacaaactccctgggcatagggcttttcatgctgaatgagctcttgagtcaggtgaagtaaagattagcytgtgaatagggcttttctaggagcaccagacaggtcacatagtgacagttctctggggatgagattttggcccagagctgcttttgtagctaggctgctg

SEQ ID NO: 274298 - DNA, 201 bp, Homo sapiens
aaataataatttgacagattttcttaaatgctttaaaccagtatgtctcccatcattttccaacgggtgctgtgtatgttggggcgtgctttccatgcccygggagttcacagctctgccttagccttcacttcctgctttgtgcagagcctcagagtcaagcaaaggttagagagcggagctctgtcaggtctttagtgg

SEQ ID NO: 274299 - DNA, 201 bp, Homo sapiens
cttaacattattagtcatcagggaaatgcaaattaaaatcttagtgagataggctgggcacggtggctcacgcgtgtaatcccagcactttgggaggccgrggtgggtggatcatgaggtcaggagatcgagaccgtcctggctaacacggtgaaaccctgtctctactaaaaatacaaaaaattagctgggcgtggtggc

SEQ ID NO: 274300 - DNA, 201 bp, Homo sapiens
gcattcccaacagcagtgtgtaagcattcccttttctctgcaacctcaccagcatctgttactttttgactttttaataatagctattctgactggtacargatggtaccaagcatatgaaaaaatggtcaacatcactaatcattagagaaatgcaaatcgaaaccacaatgagatacaatttcacaccagtcagaatga

SEQ ID NO: 274301 - DNA, 201 bp, Homo sapiens; identical to SEQ ID NO: 54411

SEQ ID NO: 274302 - DNA, 201 bp, Homo sapiens
agatggtaaaaattgccagaagtacaaagaatttggaaaatgtgactagtagccaagagaaaaagcaatcaatagaaactaaccctgatatgatccagacrttggaattagcaaacaaaaactttgtagcatctattataaatttgtccatgactttatttatttatttatttatttatttatttatttatttatttatga

SEQ ID NO: 274303 - DNA, 201 bp, Homo sapiens
atagataaaaacagaaattaatgaggaaaaaatagaaaaacatatctaattattaaatcaaaatcctatttttgaaaaaattaacaatataaataaacccrtaagctaagttggtaaaaaaaaaaacggagaaagcataaatatgcaaaataaatgacaagggagaaacagaagaaatgtaaaaatcaaaagacaaatttg

SEQ ID NO: 274304 - DNA, 201 bp, Homo sapiens
ggatgtgctaattaccctgatgtgataactatgcattctatgtatcaaaacatcactgtgtaccccatcagtatatacaattattatgtgtcagttaaaartaaattattaaatctatatggtgaattaaaggagtgatcaaagaaaaactcattgcagtaaataccttttatcaatgaaaaggaaggaataaaaagtgaa

SEQ ID NO: 274305 - DNA, 201 bp, Homo sapiens
ttattttatggttggaatgtttctggttggagatgtcatttgtgatttatggtcatgctgaatttgggggaaaaaaggcaaatcactacataactacataycagaatctatagactatatagcactgcaagatgactgtagttaacagttatttattatgtattttcaaatagctcagagaggattttgaatgttcccagt

SEQ ID NO: 274306 - DNA, 201 bp, Homo sapiens
tgttatgttgcctatctggtcttgaactcctggcctcagaggatcctctgacatgccttggcctcccaaagtgctgggatcacaggcgtaaaccacgatgygtagcttgttactcattcttaaaagtctgtgtttatttttcccattcccttcttttatctgcagtccttcttttttctttaaggcagcttaatttacaag

SEQ ID NO: 274307 - DNA, 201 bp, Homo sapiens
tttttgggctttgtattatgttactgaactgtttgtcaatccagtaccagtaccacactaatattgattaatgtagcattatggtacctcttaagtagtgyggtcttccaactttttcttttttaatattctggttcctttgcatttcctatgaaatttaggaccaatttatcaatttctactaaacaagcctgctaggat

SEQ ID NO: 274308 - DNA, 201 bp, Homo sapiens
cttttacatctacttaaatggtagatggagcaccttgatcactatgtgacaaccttggttgtcatttttagttgctatttgaattgatttgagcagccctrtcttcaccggacatacctgaatttgttcctaggtacccactttgttcctagaaaagggctaactttctactatggtctgaagagtgttcaaagtagacta

SEQ ID NO: 274309 - DNA, 201 bp, Homo sapiens
aaatcatacggagcagcttttactttatgaaactttgaaaccattttgtcaaaaagagctcttttgatatttattaggttattcttaagaggaataagatkaaattcttcactggaaattgtgtgtaaagtaccccattttatttgagagggtgtttatgccctcttgatgtttataacttctatggtaacatattcagtt

SEQ ID NO: 274310 - DNA, 201 bp, Homo sapiens
tctcactttgtctcccaggctagagtgcagtggcacgatcttggcacactgcaacctccgcctcccaggttcaagcgattctcatgcctcagcctcccaaatagcagggatcacaggcacctgccaccacgtccggctaatttttgtatttttagtagagacagggtttcgccatgttggccaggctgctctcaaactcgt

SEQ ID NO: 274311 - DNA, 201 bp, Homo sapiens
gggcaattttgcaagagtgtccgtaggcatccaccttagagttcttatctggcttctttcttttgcttcctaatcttgaaaaaaatctctaaagagcaccyatgtttcttcagttaataatggaaaaatgggtgagcgtgggggatgtggctgggtgggtgccggggcttcacctccaaggcagtggccggatcatgattg

SEQ ID NO: 274312 - DNA, 201 bp, Homo sapiens
agtggaagaaaggatatcggagattgaagataaatctaatgaaataaagtgtgaagacaagattagagaagaaagaatgaaaaggaatgaaaaaagcctcyaagaaatatgggactatgtcaaaagaccaaacctacgtttgattggcgtacctgaaagtgatggggagaatggaaccaagttggaaaacactcttcagga

SEQ ID NO: 274313 - DNA, 201 bp, Homo sapiens
ccatattcaaggctagaggggtcctgggaaggaagccagggaaggccacaccatctgcctctttcatcaggaatctaatatcttttcccaaggcaattttwagatttcacttggcacaactgtgttatatgactatccttaggaagccaggaaagtgagtatttagtattttatagcccaagtattagggacagaaaaggg

SEQ ID NO: 274314 - DNA, 201 bp, Homo sapiens
acggagcatgttctaacccaatgtaaggaagctaagaaccttgaaaaaaggttagaggagttgctaagtagaataaccagcttagaaagaaaataaataamctgatgtagctgaaaaacacagcatgagaacatcgtgaagcatacacaagtatcaatagccaaattgatcaagtggaagaaaggatatcggagattgaag

SEQ ID NO: 274315 - DNA, 201 bp, Homo sapiens
aaaagcaaacaggcagcattcagtacttgtgtaagggagacatactcttgtacaaaggagacagagtaataaattgattcaatttttctagaaagtaattkagcaacatttattgaataattgaaaggctttatccctttgacctagtaaggccacatctgtggaactatccttggaaaataatcagacataacacagaaa

SEQ ID NO: 274316 - DNA, 201 bp, Homo sapiens
agacacaacacatttcaaaggattgaaatcatatagactgtgttctttatttacaatgggatagtgttggaaattaataaaaaaagaataactagataaawtgccatttattttgatagtaagaacatttttctgttttgtttacagccatgataaagtaaatggactggatttaccctgctactataaatacctagaaaa

SEQ ID NO: 274317 - DNA, 201 bp, Homo sapiens
taaaatcttctatggcatccactagttagttacccaaggctttgtcttctgtaggtccttgtctgcagatgatgattttaaatattttgccactgcatgcygtggactactagtagcccctttaccattggaaactggtcattaataccttcaatcaaatcagagaagcaacttcaggttcatatctttaaggacttcttt

SEQ ID NO: 274318 - DNA, 201 bp, Homo sapiens
ctactaaaagtttagagatcactatgccagaacttttaagcatggtatgcgatactgaattattttaaataaggggggataaatggctatgtgggtttatrcattgaaagccagaaaaattgcagaggcagaatgtttacaaagagattcttttttcttgagttctaaaggatttttgcagaaatagaaaatcctgtgtgt

SEQ ID NO: 274319 - DNA, 201 bp, Homo sapiens
cttagtcttgctttggctatgtgggctctttttttggttccatatgaattttaagatttgtgtgtgtgtgtggttctgtgaagaatgatggtggtattttratgggaattatgttgaatttgtagattgcttttggcagtgtgatcatttcacaatattgattctactcatccatgagcatgggaggtgtttccatttgtt

SEQ ID NO: 274320 - DNA, 201 bp, Homo sapiens
acaactcttaagattctttcctttgtcttaactttaggtaacctgatgacagtgtgcctaagtgatgatccttttgcaatgaatttcccaggtgttctttrtgcttcttgtatttggatgtctaggtctcttgcaaggccggggaaattttccttagttattcccccaaatacattttccaaactttcagatttctcttct

SEQ ID NO: 274321 - DNA, 201 bp, Homo sapiens
atcccttctagcttgtagggtttctgctgagaaatctgctgttaatctgataagttttccttgataggttatctggtgcgtctgtctcacaactcttaagrttctttcctttgtcttaactttaggtaacctgatgacagtgtgcctaagtgatgatccttttgcaatgaatttcccaggtgttctttgtgcttcttgtat

SEQ ID NO: 274322 - DNA, 201 bp, Homo sapiens; identical to SEQ ID NO: 54410

SEQ ID NO: 274323 - DNA, 201 bp, Homo sapiens
atgatctgtatgctctttaccacaggttttttttttgtttttttttttggtcaggtcctacagcagtggttctcaaaatatttatttttcaacatttaggyccctttgataggcatggcaaaaagcccccaaaagtacctctctgctgctttcttcataccaatagagaaacagtctgcccatgttatcatttctgtactg

SEQ ID NO: 274324 - DNA, 201 bp, Homo sapiens
gtagaggagatgggcagagaaacaaagaccagatggaacaaatataaaactagccagaccacagactgatttgaggaataataaaactgtagtctcctgcraaacaacaacaaaaacaaaaacagaaaacaaactaacaagaccacagatttcaatccagtcataatcagtaattatattaataatggattgtctaaacac

SEQ ID NO: 274325 - DNA, 201 bp, Homo sapiens
tgtctccatgttctaagctttttttttattattatactttaagttttagggtacatgtgcacaatgtgcaggtttgttacatatgtatacatgtgccatgytggtgtgctgcacccattaacttgtcatttagcattagatatatctcctaatgctatcccttccccctccccctgccccacaacagtcctcagtgtgtga

SEQ ID NO: 274326 - DNA, 201 bp, Homo sapiens
agcatgatgtgattagttttaatgattccttaggcaaaaatacggaattgagggagtgattgttttgggacaaagagaggtagagattttgccagaaataygtggagctccttccgttaccagcattcctttaccagaaggtaattactgtcttgaagttggtattcttctatcgttgtttatattaatatatgaggatta

SEQ ID NO: 274327 - DNA, 201 bp, Homo sapiens
aaagaaacaaatagattagaagtaaaaagatgaagcaagatataccatgctaactgtaatcacaagaagctgtatgtcttcagataatgtagactccagawtaaataatattactagggataaaggggtcagcttaccaagaggacaaagtaatattgtttatggagctaataacagagtttcacagtgcttgaaacaaaa

SEQ ID NO: 274328 - DNA, 201 bp, Homo sapiens
tcttttttttttttttttttttgagaggtagggtcttgctatgttgattaggttggtcttgaactcctgacctcaagcagtcctctcatctcagcctcccmaagtgctggaattacaggtgagagccactacccctagcctcggttgttctaacacttgatttttttttttaacctctgttctagtattttaatatattgt

SEQ ID NO: 274329 - DNA, 201 bp, Homo sapiens
aagaggactgcattggggaagattgtcaaagaggactgtctccatgttctaagctttttttttattattatactttaagttttagggtacatgtgcacaaygtgcaggtttgttacatatgtatacatgtgccatgctggtgtgctgcacccattaacttgtcatttagcattagatatatctcctaatgctatcccttcc

SEQ ID NO: 274330 - DNA, 201 bp, Homo sapiens
  misc_feature (1)...(201): n = A,T,C or G
ttttacgatgaaaaacctccttttatttattttccccagggaactaagagtgttctaaattagggagcattgcttgaaatgttttaaattatttaactgcntataaaacttataaatattcattataagacgtgaaaatggaagaattaaagtatgcagtgtaaaacttttccctgcagatctaccgtgaagtcataaaga

SEQ ID NO: 274331 - DNA, 201 bp, Homo sapiens
ctttgcctagaacttggtagagctttatagaaagatacttttgaatttctatgagagttgacatatccatgtgttttctgagtttcaagtaaaaaagtagratgtaaggttttcctgtataactaaaaagcacacagacttctgggtattcagtaaatagttgtgaaagaaagataaatctcatgctgatgagcaggctgg

SEQ ID NO: 274332 - DNA, 201 bp, Homo sapiens
gcaatagccaatgtatggacacctcatttggttcagccttacccaattctgactgataaaattaaagttgagcaaactatttaatggatgtcaaaactatkgcatctagattggctgcaggcaagagcagagctttaagtggaagttttaaacaagtgagatcaagatcctgagacatttccttgaggaattataacggga

SEQ ID NO: 274333 - DNA, 201 bp, Homo sapiens
tggtgaactttgggtagaagaatggtgaaattatcgatgtgttacaaaaaagcatggcaatagtgacccaaagaaatcagcagtttacaaatggataagtkgtattaagaagggatgagacaatgttaaccatgaagcccttcgtcttcagcagcagaccatctacatcaatttgtaaaactgatgattaacagcagcaat

SEQ ID NO: 274334 - DNA, 201 bp, Homo sapiens
aaatattagtattctgaatagtttctcacccagatattaatttttttttttggtagatgagactcttttaaagaatatctttctaaaatatatatctactkggggtcctcacttcaaataatttaaaaaaccatttcctaatcaataatctgttaccttttataaatgatttttcagcaaacattgaggagaatgtgctac

SEQ ID NO: 274335 - DNA, 201 bp, Homo sapiens
ttctaaattagggagcattgcttgaaatgttttaaattatttaactgcttataaaacttataaatattcattataagacgtgaaaatggaagaattaaagyatgcagtgtaaaacttttccctgcagatctaccgtgaagtcataaagactgttaatacctagcttctggcatgacactgtgaaggtggactgataaagaa

SEQ ID NO: 274336 - DNA, 201 bp, Homo sapiens
tgaatttttaagtttttacctattgtgtcaatgcatcagttgtgtttaggaaatattagtattctgaatagtttctcacccagatattaattttttttttkggtagatgagactcttttaaagaatatctttctaaaatatatatctacttggggtcctcacttcaaataatttaaaaaaccatttcctaatcaataatct

SEQ ID NO: 274337 - DNA, 201 bp, Homo sapiens
atgagcagatgatgtcattaaaacaactattaacatgatctatatgcttaagttgtaaagaaaggcataacaagaataaagcataaaataggagagatacmaagagatccaaatacacttcccaaaaattaaaaaaaaagaaaagaaatatataaaatgaaaactacactgcatggggttaatagcaaattagagatgtag

SEQ ID NO: 274338 - DNA, 201 bp, Homo sapiens
gagaattgagaattctggaattgagtcctgaggaatgatccatcactcacattaggaagtactctggggagtgggcatcagtatgtgagaagttacgtccyggtttcagaaaatcaaatgaaaaattcaaagaccatggtttaggaagaaataaatgggttgtagaaactgttatcagctaggcagttttgaaatcaattg

SEQ ID NO: 274339 - DNA, 201 bp, Homo sapiens
aactaactaaatgtatattgacaacctgattttactgttctactcattacaagaaggcatacccttatgtgatggcacccacccagtgaaagtctggaatkgagtcctgagagaattgaggaattgagaattgagagaattgaggaattgagaattgagagaattgagaattctggaattgagtcctgaggaatgatccat

SEQ ID NO: 274340 - DNA, 201 bp, Homo sapiens
tctgatgagtgtctccactgagtgttatattggcactcaaaaaatttctgattttggagcatttcagattttggattttgagattagagatgtttaacctrtacttcctttttattcatgagatcctaaaccagtgatgcgcatagtagattctcaataaatcctttggtttcaatttaatgagtactagttagagcatgt

SEQ ID NO: 274341 - DNA, 201 bp, Homo sapiens
ataaagttgaagtagtcaacctaagggaatgagaaagtataggatggaaaatcaaggccacgtgtaataatttatcagataccttagtaaattgagaactrtagacaatgttctttggataccgtgattaaaaatagtctgtattaaagttgatttgctataatctgtgatagaaaaggtagaaaagtagcaatgtttttt

SEQ ID NO: 274342 - DNA, 201 bp, Homo sapiens
cctacccctcagcagacgccggagagaaatgagtagcaacaaagtaagtctgccttcatttcttaaccccattgagcctctcacttccctccatggaacgrgttcctttggacctgtctcagaccccagccaccacgagtctcttcttccccgcaagaagctgcccatgcctgggaggcccagatttaagccctggtttgg

SEQ ID NO: 274343 - DNA, 201 bp, Homo sapiens
tgaccatggccttctcagagcaggattgtgacggggcggaccagggggacggtggtcctggctgagggcacagctcgggcaaaggtgggaaagtgggcggygggcagggggcatccgcaggaaagggtggccacgcgtagtaagatataggcggctggacccctgggcgccttgaatgccaaggtctcagggcagatgggg

SEQ ID NO: 274344 - DNA, 201 bp, Homo sapiens
aggtgatacagcccgagcatgaccctgagaatgtcaggattccccatcattctttcattcattcattctttcctaagcacttactacatgactggccctgyatgccccttccctaggatccactgcagccttggtggagcctgaggtttggaagtgggatggggtggttgtattaatttgagtttaatcaggaaaaagaaa

SEQ ID NO: 274345 - DNA, 201 bp, Homo sapiens
gttggcattgtgggagcactttcttttctttctttctttcttttattttattttatttatttatttttgtttttgtttttgagacggagtctcgctctgtygccaggctggagtgcagtggcaccatctcggttcactgcaacctccgcctcccgggttcaagcgattctcctgcctcagcctccggagtagctgggacaa

SEQ ID NO: 274346 - DNA, 201 bp, Homo sapiens
aggtcaggtcctccagcaggggagccagctttggccctgccagctgccttggtgtgggaaggcccctgcttagggaggagaatgggcagggctctgccgcyaccaggctgtgtgacctcaggcagattcctggcctttctggccctcagtgtctccgtctgcaaaagggatacagtcctgagccttaaagttctgggtgca

SEQ ID NO: 274347 - DNA, 201 bp, Homo sapiens
gagtccatgctcctggcccagcgctcggggctgccgcctccccagcgtgagcaagccgctccccaacaggccggcacccctagacccccgccctggtgcckgtgccgagccacgtcctgggcacacactccatggcctctgacccgttccagccgagagggatcctccagggagacgaagtcaggctcagccctgggcagc

SEQ ID NO: 274348 - DNA, 201 bp, Homo sapiens
ggaatgaatgggctcagtttccctgtctttaaaatgggcataacaattcctgggtcctggaggcctggatgtatggagcacagggccagcacagagtggcygtgataatgttgactttccttatccaccagacactgccctctcggtgccaccagtgtgtgattgtcagcagctccagccacctgctgggcaccaagctgg

SEQ ID NO: 274349 - DNA, 201 bp, Homo sapiens; identical to SEQ ID NO: 54419

SEQ ID NO: 274350 - DNA, 201 bp, Homo sapiens
tgactttccttatccaccagacactgccctctcggtgccaccagtgtgtgattgtcagcagctccagccacctgctgggcaccaagctgggccctgagatygagcgggctgagtgtacaatccgcatgaatgatgcacccaccactggctactcagctgatgtgggcaacaagaccacctaccgcgtcgtggcccattcca

SEQ ID NO: 274351 - DNA, 201 bp, Homo sapiens
tcaggaggctgaggcaggaggatgacttgagcccgggaggttgaggctgcagtgagccaggatggtgccactgcactccagcctgggtgacagaatgagaytacatcttacatctccttaagaaaaaaagtagtaaaagcaactttaatatatttttaacccaatatgttcaacatatagctcctgtacatattttgttag

SEQ ID NO: 274352 - DNA, 201 bp, Homo sapiens
gcctttgtgctggctgtttctcctgccttgaatatgtttccctaggtggtccttcttcatccttcacatctcagctcagagagacgtctctgttacagccrgacagcttcttgcctgctgcccaggaaaagccaatacactgagactgcgggtgttgcagcagagaaagggtttaacaatcgcagggccagccaaatgagg

SEQ ID NO: 274353 - DNA, 201 bp, Homo sapiens
aaaatatctcagacactcaggttttacaataatgatgttatctatgttaaaaacaacgatgatgttatctatattttaaaaagcaaactaagaaacaatgrctggttataattcaactatagctacatcttagcagaaaagcaagctaagagataatgactggttatggtttatgcctacagcttgacagaaaggtgtgcg

SEQ ID NO: 274354 - DNA, 201 bp, Homo sapiens
gcattgcctggattcagtgcgtgggtgatgcttagaacgcattcccacacattccttgatattccgggaaagtcgctgcactggggtcaggggaggagtgyttcactgacacactggagaggcgggccttgaacagtgattaaccacaagactaacagctgttggcattgtgggagcactttcttttctttctttctttct

SEQ ID NO: 274355 - DNA, 201 bp, Homo sapiens; identical to SEQ ID NO: 54412

SEQ ID NO: 274356 - DNA, 201 bp, Homo sapiens
agacgaagtcaggctcagccctgggcagctccctgtaaacaaggctctggagccggctctgggcggccccgcaaggcgctttgcctctctgaacctcagtytccttatctgtaaaatgggcaacaagagctcctaccatgcattgcctggattcagtgcgtgggtgatgcttagaacgcattcccacacattccttgatat

SEQ ID NO: 274357 - DNA, 201 bp, Homo sapiens; identical to SEQ ID NO: 54413

SEQ ID NO: 274358 - DNA, 201 bp, Homo sapiens
aggctggtttaccatggtgatcgcggtggagttgtgtgaccacgtgcatgtctatggcatggtcccccccaactactgcaggtgagccctccttgccagcrccctcccaggacaacacccaggcactggccgcaggatggagctctaggggctggaaaccttggctgaaggtgcctttgagggcctctgcttcattgtttt

SEQ ID NO: 274359 - DNA, 201 bp, Homo sapiens
gcagggtttagagcagggtgtgaatggggctcctactgcgtggaggtcaggtcctccagcaggggagccagctttggccctgccagctgccttggtgtggraaggcccctgcttagggaggagaatgggcagggctctgccgccaccaggctgtgtgacctcaggcagattcctggcctttctggccctcagtgtctccgt

SEQ ID NO: 274360 - DNA, 201 bp, Homo sapiens
cccattttatggatggggaaaccgaggccccaggaggcatggggatttctcctattgaggtcctatggtaagcgaggggctgaaagggcaaggaccctgcyagcgctcaccttgccctgatgacgcccgtctgctctgtcccagccagcggccccgcctccagcgcatgccctaccactactacgagcccaaggggccgga

SEQ ID NO: 274361 - DNA, 201 bp, Homo sapiens
ctgccccctctggccagcactgtgctccttctcagcatgccccatccagagggcctgttgctcccagcatgcactgctctgaggggtagtcaagtcccgcygtcctctggttgggcctcctaggagagttctcttcatgtccagctgttcacatgggtcctttccagcatgctctgcatggcctggtttgtccaagagggc

SEQ ID NO: 274362 - DNA, 201 bp, Homo sapiens; identical to SEQ ID NO: 54414

SEQ ID NO: 274363 - DNA, 201 bp, Homo sapiens; identical to SEQ ID NO: 54416

SEQ ID NO: 274364 - DNA, 201 bp, Homo sapiens
attgcaaggtctgaaaaatatctcagacactcaggttttacaataatgatgttatctatgttaaaaacaacgatgatgttatctatattttaaaaagcaamctaagaaacaatgactggttataattcaactatagctacatcttagcagaaaagcaagctaagagataatgactggttatggtttatgcctacagcttga

SEQ ID NO: 274365 - DNA, 201 bp, Homo sapiens
atcttccttggtgagatggagtaaccaaggctccgagaggtgaagtcacatgtctaaggccacacagtgagggaaggaagaagatggtattttcctacccsctgctaagatgcagctgcacagagaggccaaagtcattcctggggacttctgttggccttgggtagccatgaaattcagattgtatttctgaggttcacc

SEQ ID NO: 274366 - DNA, 201 bp, Homo sapiens
gcttcactgacacactggagaggcgggccttgaacagtgattaaccacaagactaacagctgttggcattgtgggagcactttcttttctttctttctttmttttattttattttatttatttatttttgtttttgtttttgagacggagtctcgctctgtcgccaggctggagtgcagtggcaccatctcggttcactgc

SEQ ID NO: 274367 - DNA, 201 bp, Homo sapiens
cgtggctgtggaggcacagggaaactgagtgaggacctgggtgggctgtatcccgcaggcagctcttagcctggggggatgggaggacgtaggggagttcstggtccatgccaggcttggaggatgagtgggagtcaggaggccataggagggagggcgttccaggccaacctgagagagagccagagcagaggagttcgg

SEQ ID NO: 274368 - DNA, 201 bp, Homo sapiens
ctccacctgttctttcctaaaggaaaggtggaccctgagagtcaaggccctgcctccggtgatttcatcttgctgcttgctgtgtgaccttggataagtgygctgcccctgtctgggcctcagttctctccaagtccccacccttattgctaatatcctaccatctcctgaatcagaatccttttgaaaatgtgtttctgt

SEQ ID NO: 274369 - DNA, 201 bp, Homo sapiens
cttctcagagcaggattgtgacggggcggaccagggggacggtggtcctggctgagggcacagctcgggcaaaggtgggaaagtgggcggcgggcaggggrcatccgcaggaaagggtggccacgcgtagtaagatataggcggctggacccctgggcgccttgaatgccaaggtctcagggcagatggggccaccccagg

SEQ ID NO: 274370 - DNA, 201 bp, Homo sapiens
ggccccccagccagtaagtggtgaaaccgggattcgcactggcagctgacatgctgtactgaccatggccttctcagagcaggattgtgacggggcggacsagggggacggtggtcctggctgagggcacagctcgggcaaaggtgggaaagtgggcggcgggcagggggcatccgcaggaaagggtggccacgcgtagta

SEQ ID NO: 274371 - DNA, 201 bp, Homo sapiens
cacagtacattttccctttcacaggtggggaaccctggaaaggagctgggttttggttgtgggagaggaagagattggggtgtgcggagcagagctgggcyggcctcctcactgccaggtcttccaaaggcccccccagccaccccctgagactgtgattacagccatttgacagatgaggagtcagccctggcagagact

SEQ ID NO: 274372 - DNA, 201 bp, Homo sapiens
taaccaggcatggtaggtggcaaggaggtggggcgctgagcctgcccggcagctgggccctcactgacctctcctctctccaggagcagcggtcagcagtrttcgtgatcctctttgccctcatcaccatcctcatcctctacagctccaacagtgccaatgaggtcttccattacggctccctgcggggccgtagccgcc

SEQ ID NO: 274373 - DNA, 201 bp, Homo sapiens
acaaccccttgagttaccgactcttattgttcccatttcacagatgaggaaactgaggctcagagaggtcacatggcttgctcgaggccccccagccagtragtggtgaaaccgggattcgcactggcagctgacatgctgtactgaccatggccttctcagagcaggattgtgacggggcggaccagggggacggtggtc

SEQ ID NO: 274374 - DNA, 201 bp, Homo sapiens
aaaattggtggttacacacctagtctaccctgcacccattttatggatggggaaaccgaggccccaggaggcatggggatttctcctattgaggtcctatrgtaagcgaggggctgaaagggcaaggaccctgctagcgctcaccttgccctgatgacgcccgtctgctctgtcccagccagcggccccgcctccagcgca

SEQ ID NO: 274375 - DNA, 201 bp, Homo sapiens; identical to SEQ ID NO: 54415

SEQ ID NO: 274376 - DNA, 201 bp, Homo sapiens
gcaaaaaattattgactataataggacactagagtaacaagggattggaattctgaggaatacaggaatagcagatattaatataaggagcacccctgccyccataaaggctgagatctgggccttgctgaagaaggcccagctatggcccactggatggctccagtacagaactggcctggggaggggaagccgccagcc

SEQ ID NO: 274377 - DNA, 201 bp, Homo sapiens; identical to SEQ ID NO: 54417

SEQ ID NO: 274378 - DNA, 201 bp, Homo sapiens; identical to SEQ ID NO: 54418

SEQ ID NO: 274379 - DNA, 201 bp, Homo sapiens
catcattctttcattcattcattctttcctaagcacttactacatgactggccctgcatgccccttccctaggatccactgcagccttggtggagcctgargtttggaagtgggatggggtggttgtattaatttgagtttaatcaggaaaaagaaactacacagtgattaaacggaaaagtttaatgcaaaaaattattg

SEQ ID NO: 274380 - DNA, 201 bp, Homo sapiens; identical to SEQ ID NO: 54421

SEQ ID NO: 274381 - DNA, 201 bp, Homo sapiens
agcaggcctggaaaatgatggccctgagcttcctagcacgagcatcctgcagatacaccttccccaggatggggcaccccacacacgcacacacgtggacrcttgcacatacacatgcacaagccccacaagttcatacacacaaggccaggggcatgtgcacacatgcacacacacggcagtggatactgcactcctgca

SEQ ID NO: 274382 - DNA, 201 bp, Homo sapiens
tgtctccatggcaacatatgttgtggttgctaagcccccactgccgggggaggcgggtgatgggccggcccagggcctgagaggggaagggcagggtgcayaggagacacggcaggacgggaccatgggctgctgctcctcgagtgacccccgcagagaagacgatctgagagccagaggtgaccggccccggggtccagg

SEQ ID NO: 274383 - DNA, 201 bp, Homo sapiens
gaggagaccatcaaaaagcggctggagacctattacaaggccacagaacccgtcatcgccttctatgagaaacgtggcattgtgcgcaaggtgggccccgmgggcccaggggcagctccgggaagaacgggttcctatgtggctccgcctcagctcactgtgtggcctcaggccagcccctctctctgggccttggtttcc

SEQ ID NO: 274384 - DNA, 201 bp, Homo sapiens
tctctcccgcagagaagctgaagaaaaccaagatcatctttgtggtgggtgagttgcgggcaggcgggtggtgcagcaagggtcttcactggcactggagrgagcccgggcctggggctgcaccctgggctctgcccctccctctctgggagaccctggcagcccctgttcctcctgggaccctgtgtctcggggtttatg

SEQ ID NO: 274385 - DNA, 201 bp, Homo sapiens
  misc_feature (1)...(201): n = A,T,C or G
cgcagagaagacgatctgagagccagaggtgaccggccccggggtccaggcacccacagggaggcgccatgagggctggcggcccagcccgctggctgtgnggagagtacttagcctttaggcttttgcctctgcccgtctggctgcctggagcaccctcccttccctgacctctcccaggctccgagctcactcacatcc

SEQ ID NO: 274386 - DNA, 201 bp, Homo sapiens
gctggcggcccagcccgctggctgtgtggagagtacttagcctttaggcttttgcctctgcccgtctggctgcctggagcaccctcccttccctgacctcycccaggctccgagctcactcacatccctgctgactctgggctgtgacttgtctgcctccctgacaggagcgccagcggtgtctgtccctccgcctggggc

SEQ ID NO: 274387 - DNA, 201 bp, Homo sapiens
gggcgcctctgcggggaggggcagcggcaccgggggagggcgggggcgtgctggtgcggggctccctgggggctgtgcggctgtgtatccgtggttgtgakccgtgtgtgtttgcgtggctgtgttccccgggcgctggggatctgtgcctcgctgcctgtgcctttgtggatccgtgcgtgtgtgtgcgtgtgtgtttgt

SEQ ID NO: 274388 - DNA, 201 bp, Homo sapiens
tctaccttactgggtggtctttggggtcctggcgggttccagtcccagaggagctcgaagggtccctcccaacaggggaagaggagtcccaggtgggtctyggccagggcctctgggcaggctctgagggcgggcttggggactgtggccagcaaagcccctgagtcgatgcctcagccctctcgctccctggtctggcct

SEQ ID NO: 274389 - DNA, 201 bp, Homo sapiens
cagcacagaagaggggcccagtacagcgtggttgtgcagtgcagggcaggtttccaggaggcacctgccagtgtgggagtggagggcagagtccaggaagrcttcctgaaggaggtggcacctgagctgagtcccacacaatagcaaggtggggaaaggcatccaggcattgggtacaacatctgccagtggcagctgata

SEQ ID NO: 274390 - DNA, 201 bp, Homo sapiens
  misc_feature (1)...(201): n = A,T,C or G
gtccgaggtcagctcaggctcggccaggggcaagaagctgtcggaaatcatggagaaggggcagctggttccactggtgagtgggccctggtggggtgagnggcaggggatgacagtagccctgagtgggtgtcccaccagcagcaaagcccacggcacacaggcaaagctgaccgtaaccgcccccggctccaaaccctt

SEQ ID NO: 274391 - DNA, 201 bp, Homo sapiens
catccccatgccccattcccatgccccgtctcgtagggccttctgggcttccgtagcttccagcctcatctggggataggaggccatattttctgacctcygagtggctgcatgagtggctgcaagacctcaggaaagtgtctaccccactctgcccctcaccttccctatctgaaatgggggttagctggattccttcag

SEQ ID NO: 274392 - DNA, 201 bp, Homo sapiens
gcccaggcagttggaagcaggagacagggtttgaaggtcccaatcccattcctaaagctgtggcagtcatgggtgactctggggtggctctgccctcccarccaggcagctgtggtagctggattgagcgaggcaggggctgcagaaccttattcctcttgcctttccaaggcgtcccatggatgacatggatgacatgct

SEQ ID NO: 274393 - DNA, 201 bp, Homo sapiens
ccttggacaagcctcttggttacacagctggacagaggcacgaaacagcctgacctgagaggcagtgccccaaggccttgacaggggtccagggccaaagstgcgcagaaacccttgggggctggcccaggcagttggaagcaggagacagggtttgaaggtcccaatcccattcctaaagctgtggcagtcatgggtgac

SEQ ID NO: 274394 - DNA, 201 bp, Homo sapiens
gccttggacaagcctcttggttacacagctggacagaggcacgaaacagcctgacctgagaggcagtgccccaaggccttgacaggggtccagggccaaasctgcgcagaaacccttgggggctggcccaggcagttggaagcaggagacagggtttgaaggtcccaatcccattcctaaagctgtggcagtcatgggtga

SEQ ID NO: 274395 - DNA, 201 bp, Homo sapiens
  misc_feature (1)...(201): n = A,T,C or G
gaggcgccatgagggctggcggcccagcccgctggctgtgtggagagtacttagcctttaggcttttgcctctgcccgtctggctgcctggagcaccctcncttccctgacctctcccaggctccgagctcactcacatccctgctgactctgggctgtgacttgtctgcctccctgacaggagcgccagcggtgtctgtc

SEQ ID NO: 274396 - DNA, 201 bp, Homo sapiens
ttggtagtggcctcagatgacccctgctctccccccaccccccgcaaagactgtgcctccaggtcttggcctcgagggccctgagggcctgggccggaggygctgaagtgggagaggaaggaagtggggagcagaggaggccaaggctgtcgcctcccagccgctctaggggcctcgagtaaacaggaaggcctggcgact

SEQ ID NO: 274397 - DNA, 201 bp, Homo sapiens
ggttttggttctgacatcccttgagcaggccttccctctctcgagctcagtttccctctgcccagtggggctgtggccttgctgggatctaacagcaggcrggacgagacagaggttggagccaagctcaccgccctctctgggcaagagttccacatgcccaccacagccctccaccccggcaactgtctccatggcaac

SEQ ID NO: 274398 - DNA, 201 bp, Homo sapiens
gggggcaggaatggggtccctgtgacatggtgcccgcctgcagattggacagcccacactgctgctgtatgtggacgcaggccctgagaccatgacccagyggctcttgaaacgtggagagaccagcgggcgtgtggacgacaatgaggagaccatcaaaaagcggctggagacctattacaaggccacagaacccgtcat

SEQ ID NO: 274399 - DNA, 201 bp, Homo sapiens
ctttgtggtgggtgagttgcgggcaggcgggtggtgcagcaagggtcttcactggcactggagggagcccgggcctggggctgcaccctgggctctgcccytccctctctgggagaccctggcagcccctgttcctcctgggaccctgtgtctcggggtttatgaatgggtgggcgtttgcaggtgggcctggctcaggga

SEQ ID NO: 274400 - DNA, 201 bp, Homo sapiens
ccgttcctcctcagcctccctttgccagccacccctcctctagctctggtgggaggcccggggcccttcctcgcacagggcatgcctggcctgaggacccrgcgctgagtggcggggcccctgctccgaggggctcatgttcaggcagaaccggtcccagcctgggctcctctgcatcttgctctgtggccttggccctga

SEQ ID NO: 274401 - DNA, 201 bp, Homo sapiens
ttctaccttactgggtggtctttggggtcctggcgggttccagtcccagaggagctcgaagggtccctcccaacaggggaagaggagtcccaggtgggtcycggccagggcctctgggcaggctctgagggcgggcttggggactgtggccagcaaagcccctgagtcgatgcctcagccctctcgctccctggtctggcc

SEQ ID NO: 274402 - DNA, 201 bp, Homo sapiens
ggcaacatatgttgtggttgctaagcccccactgccgggggaggcgggtgatgggccggcccagggcctgagaggggaagggcagggtgcacaggagacayggcaggacgggaccatgggctgctgctcctcgagtgacccccgcagagaagacgatctgagagccagaggtgaccggccccggggtccaggcacccacag

SEQ ID NO: 274403 - DNA, 201 bp, Homo sapiens
gctcagggaagggcacccagtgtgagaagatcgtgcagaagtatggctacacccacctctccaccggggacctcctgcggtccgaggtcagctcaggctcrgccaggggcaagaagctgtcggaaatcatggagaaggggcagctggttccactggtgagtgggccctggtggggtgagaggcaggggatgacagtagccc

SEQ ID NO: 274404 - DNA, 201 bp, Homo sapiens
tgcagaagtatggctacacccacctctccaccggggacctcctgcggtccgaggtcagctcaggctcggccaggggcaagaagctgtcggaaatcatggaraaggggcagctggttccactggtgagtgggccctggtggggtgagaggcaggggatgacagtagccctgagtgggtgtcccaccagcagcaaagcccacg

SEQ ID NO: 274405 - DNA, 201 bp, Homo sapiens
ggtcactttcccaaggtggctttctcagggaaggggtcctgggccttccctgcccccagcagccccctctgccctcagactgcatgtcgggcctggcacayaccagttgccttgggtgtggcttagtggaaggtgagtcagggtgaggaggaaaatccctccccaacctgtgcccttgtcttacagagcactgacacggct

SEQ ID NO: 274406 - DNA, 201 bp, Homo sapiens
ccaggtctccacaattccgaggaagcttcctggagggggaggcttgtttgggacatttgtgttggggagagggcatttcaggtggcaggagcagcgtgagsagaggctgggagaagggatggggaggagaggctcatggccccttcctcctttgctgtgccccaggagacagtgttggacatgctccgggatgccatggtg

SEQ ID NO: 274407 - DNA, 201 bp, Homo sapiens
ctgcagaaccttattcctcttgcctttccaaggcgtcccatggatgacatggatgacatgctgttccaatgacacggacattgctcagaaccccccaggaytcagcagcccctcaccccttccctcatcccttgttcctttgtcaaaggaccccagaattgtgagacaagtgcctccctgccctcaggggcccttgggaga

SEQ ID NO: 274408 - DNA, 201 bp, Homo sapiens
gctcttgaaacgtggagagaccagcgggcgtgtggacgacaatgaggagaccatcaaaaagcggctggagacctattacaaggccacagaacccgtcatcrccttctatgagaaacgtggcattgtgcgcaaggtgggccccgcgggcccaggggcagctccgggaagaacgggttcctatgtggctccgcctcagctcac

SEQ ID NO: 274409 - DNA, 201 bp, Homo sapiens
tccaggtctccacaattccgaggaagcttcctggagggggaggcttgtttgggacatttgtgttggggagagggcatttcaggtggcaggagcagcgtgascagaggctgggagaagggatggggaggagaggctcatggccccttcctcctttgctgtgccccaggagacagtgttggacatgctccgggatgccatggt

SEQ ID NO: 274410 - DNA, 201 bp, Homo sapiens
ctcatcccttgttcctttgtcaaaggaccccagaattgtgagacaagtgcctccctgccctcaggggcccttgggagacctgcttaaggaaagataaaggygctggaagagcctgttccaggaggcggggagtactggggggcggggggtggcatcagagagactgccctgaggaagtgagcttcgcactgaaacctgatg

SEQ ID NO: 274411 - DNA, 201 bp, Homo sapiens
ggcccttgggagacctgcttaaggaaagataaaggcgctggaagagcctgttccaggaggcggggagtactggggggcggggggtggcatcagagagactsccctgaggaagtgagcttcgcactgaaacctgatgcttggtattgaggtgaaggcgagttaggatcaggctcgggggagagggctcctagcagagggaac

SEQ ID NO: 274412 - DNA, 201 bp, Homo sapiens
ggggctgctgtcaattaggttgggctcggggaggcaggcctggtctctggggcctgccatggtgaggcccaccccactccacctggtgactcagccctcayggcccatctccccacaggtcaacgctgagggctccgtggacagtgtcttctcccaggtctgcacccacctggacgccctaaagtagcaacgctggagccg

SEQ ID NO: 274413 - DNA, 201 bp, Homo sapiens
gtgtggcctcaggccagcccctctctctgggccttggtttccccactggttcaatgaggggctgctgtcaattaggttgggctcggggaggcaggcctggyctctggggcctgccatggtgaggcccaccccactccacctggtgactcagccctcacggcccatctccccacaggtcaacgctgagggctccgtggacag

SEQ ID NO: 274414 - DNA, 201 bp, Homo sapiens
ggacatgctccgggatgccatggtggccaaagtcaatacttccaaaggcttcctgattgatggctacccgcgggaggtgcagcaaggagaagagtttgagygacgggtaaggcactgacccaagtggggatcctggtgggctggggcaggataagactcccatccccatgggcgggcctgcgggggctgtgatgcaggtca

SEQ ID NO: 274415 - DNA, 201 bp, Homo sapiens
taaccgcccccggctccaaacccttctgtggttccccattgccctggacagaaagttccttccagaagctcccaagaccttgcaggactctgccctgcccscaactctctcccttccctccatccttcagccaccctggcctctgtcccctcagactagccatactccttccagcctggaatattctttcctcttcagctt

SEQ ID NO: 274416 - DNA, 201 bp, Homo sapiens
cccgggcctggggctgcaccctgggctctgcccctccctctctgggagaccctggcagcccctgttcctcctgggaccctgtgtctcggggtttatgaatrggtgggcgtttgcaggtgggcctggctcagggaagggcacccagtgtgagaagatcgtgcagaagtatggctacacccacctctccaccggggacctcct

SEQ ID NO: 274417 - DNA, 201 bp, Homo sapiens
tgtggtctgatacttgccagagaaaatcctgcaaattgcgtggcagggtgtggaggcttcaaggcccatgtggaggcgggggcagtggcccaggccccttrcttagcacaggacatagtggtgaggagacagacggagagagcctggggaggggagggttgggcagtgggtgtgcagggctgtggagaggagagaggagcc

SEQ ID NO: 274418 - DNA, 201 bp, Homo sapiens
aagattggttttaggaaggtctttcaggctgccttggggaagggattgaaggtctgagggggtatctactggggcttcatagatgggaagatggggaggasatggccctagggggcaggaatggggtccctgtgacatggtgcccgcctgcagattggacagcccacactgctgctgtatgtggacgcaggccctgagacc

SEQ ID NO: 274419 - DNA, 201 bp, Homo sapiens
gttctgagcagaggctgattcatggagtgtgggtgaggaggaaaaccaggaagactttctggaagtgtagaagaaaatgtgtagaaggggaagcgccaggmggggcagttgccaaacctgggctcagattccagctcaacggcttgagatcttgggccagtcattctgcctcctgaacctcagttttcccatctgcaaaat

SEQ ID NO: 274420 - DNA, 201 bp, Homo sapiens
gtccaggtcagtctgacgccggaggtcaggctgcttctcgcctctgtccagctgtgtggccttggacaagcctcttggttacacagctggacagaggcacraaacagcctgacctgagaggcagtgccccaaggccttgacaggggtccagggccaaagctgcgcagaaacccttgggggctggcccaggcagttggaagc

SEQ ID NO: 274421 - DNA, 201 bp, Homo sapiens
cgcccacccgcacccctccccaggtcagtgcgtgcccgcgcgtgtctgggggggcgcctctgcggggaggggcagcggcaccgggggagggcgggggcgtsctggtgcggggctccctgggggctgtgcggctgtgtatccgtggttgtgatccgtgtgtgtttgcgtggctgtgttccccgggcgctggggatctgtgcc

SEQ ID NO: 274422 - DNA, 201 bp, Homo sapiens
gagcagaggctgattcatggagtgtgggtgaggaggaaaaccaggaagactttctggaagtgtagaagaaaatgtgtagaaggggaagcgccaggaggggsagttgccaaacctgggctcagattccagctcaacggcttgagatcttgggccagtcattctgcctcctgaacctcagttttcccatctgcaaaatgcagg

SEQ ID NO: 274423 - DNA, 201 bp, Homo sapiens; identical to SEQ ID NO: 54458

SEQ ID NO: 274424 - DNA, 201 bp, Homo sapiens
gatggggcaccccacacacgcacacacgtggacgcttgcacatacacatgcacaagccccacaagttcatacacacaaggccaggggcatgtgcacacatscacacacacggcagtggatactgcactcctgcacatgcatgtcacggacgcagcacacatatgcaggaatgcacacgtgctcgcacacatggccctgtgc

SEQ ID NO: 274425 - DNA, 201 bp, Homo sapiens
atggggcaccccacacacgcacacacgtggacgcttgcacatacacatgcacaagccccacaagttcatacacacaaggccaggggcatgtgcacacatgsacacacacggcagtggatactgcactcctgcacatgcatgtcacggacgcagcacacatatgcaggaatgcacacgtgctcgcacacatggccctgtgca

SEQ ID NO: 274426 - DNA, 201 bp, Homo sapiens
cccagcggctcttgaaacgtggagagaccagcgggcgtgtggacgacaatgaggagaccatcaaaaagcggctggagacctattacaaggccacagaaccygtcatcgccttctatgagaaacgtggcattgtgcgcaaggtgggccccgcgggcccaggggcagctccgggaagaacgggttcctatgtggctccgcctc

SEQ ID NO: 274427 - DNA, 201 bp, Homo sapiens
aaacgggactgcaagggcctaggagggagaggtcggcaagggctagggggagcctaaccagcatcctggtgggctggggcaggataagactcccatccccrtgccccattcccatgccccgtctcgtagggccttctgggcttccgtagcttccagcctcatctggggataggaggccatattttctgacctccgagtggc

SEQ ID NO: 274428 - DNA, 201 bp, Homo sapiens
gaccctgtgtctcggggtttatgaatgggtgggcgtttgcaggtgggcctggctcagggaagggcacccagtgtgagaagatcgtgcagaagtatggctayacccacctctccaccggggacctcctgcggtccgaggtcagctcaggctcggccaggggcaagaagctgtcggaaatcatggagaaggggcagctggttc

SEQ ID NO: 274429 - DNA, 201 bp, Homo sapiens
tgtcacaaggctgtatgggagaaataaacgggactgcaagggcctaggagggagaggtcggcaagggctagggggagcctaaccagcatcctggtgggctrgggcaggataagactcccatccccatgccccattcccatgccccgtctcgtagggccttctgggcttccgtagcttccagcctcatctggggataggagg

SEQ ID NO: 274430 - DNA, 201 bp, Homo sapiens
ccctcaggggcccttgggagacctgcttaaggaaagataaaggcgctggaagagcctgttccaggaggcggggagtactggggggcggggggtggcatcasagagactgccctgaggaagtgagcttcgcactgaaacctgatgcttggtattgaggtgaaggcgagttaggatcaggctcgggggagagggctcctagca

SEQ ID NO: 274431 - DNA, 201 bp, Homo sapiens
gttgtcaaggtgtctgggcagacgctggccccgcgccctgttttctgggagtttcgaggggagcagctctgcagttgtgtggccgctgtttatgtccctcgtgccatcctcactgtcccagcccctccagcgggaacccaggtggatgggagggggctactgcccttctgtgacaggtgaggccatggaggccagagagga

SEQ ID NO: 274432 - DNA, 201 bp, Homo sapiens
gaggagatggccctagggggcaggaatggggtccctgtgacatggtgcccgcctgcagattggacagcccacactgctgctgtatgtggacgcaggccctsagaccatgacccagcggctcttgaaacgtggagagaccagcgggcgtgtggacgacaatgaggagaccatcaaaaagcggctggagacctattacaaggc

SEQ ID NO: 274433 - DNA, 201 bp, Homo sapiens
tcatcccagacacacatagttcctggccacctcccacctcctggcagcttccctctggccctggggagcgttgtcaaggtgtctgggcagacgctggcccygcgccctgttttctgggagtttcgaggggagcagctctgcagttgtgtggccgctgtttatgtccctcgtgccatcctcactgtcccagcccctccagcg

SEQ ID NO: 274434 - DNA, 201 bp, Homo sapiens
acgccagccagagagggatgtatgtcatgagaacagccttcttccacaatgtgacttacagtcagataaagttggagagattcagaacccaattataggtsactgagatgtacttatacgttgtaaccttactaaatgcaaaaatattgcagtcacaacaaatctgtccatctttagagctaggcaggaacacatacatgc

SEQ ID NO: 274435 - DNA, 201 bp, Homo sapiens
tcaaagagaaattaaaagcactggaatctactgctcaggagaactgctttttacattcttggagtttatcctcccagacttttaaaattcaccaatacatrgtataagtacagtataagcatagatgactttttataaaaactgggtcacacaatggatatgacttgatcatttgcttttacctcccagcaatatcttctg

SEQ ID NO: 274436 - DNA, 201 bp, Homo sapiens
tatgtatatattaggtcaagtgtaaataaaatcagggacagggttggagcgcagcaggaaagagcctgctggggatcagagtctctgggctgtcagggccrggctgggcgggctccgttgttaatggcttcccctcatcttgcaggagccatgtggctagaaatcctcctcacttcagtgctgggctttgccatctactgg

SEQ ID NO: 274437 - DNA, 201 bp, Homo sapiens
tgagttgtggctctttagtgggtggatttgcatgtaccatggattacatttaccagggtctaggaattgtcaagcgcccagcaggctgccatcaggcctcygagctccttcgccaggcggctttatttggagtaagaggaaagcaaaggtttgaggctcagtcaagagggcgccactctgcctggccagctctccgacaaa

SEQ ID NO: 274438 - DNA, 201 bp, Homo sapiens
ccacctttctcaccctcccaaagtgctgggattacaggcatgagccaatgcccccagcctgttccagccatttttaatgactgtacagtattttggcttakgagtatatcaatatttgtaactgatcccctattttagacttttttaggtggcttctcatttttcatgaatcagagcacatagactgaaaaaccccgcctt

SEQ ID NO: 274439 - DNA, 201 bp, Homo sapiens
tccttaccgcaggtgatccacctttctcaccctcccaaagtgctgggattacaggcatgagccaatgcccccagcctgttccagccatttttaatgactgkacagtattttggcttatgagtatatcaatatttgtaactgatcccctattttagacttttttaggtggcttctcatttttcatgaatcagagcacataga

SEQ ID NO: 274440 - DNA, 201 bp, Homo sapiens
ctttggttttaagcaacttctctaccctgaccctcctcctgggacagcgtttcgggaggtttcttggcctcactgagagggatgtggagctgctgtacccygtcaaggagaaggtattctacagcctgatgagggagagcggctacatgcacatccagtgcaccaagcctgacaccgtaggtgagtgtgctcaggggtcct

SEQ ID NO: 274441 - DNA, 201 bp, Homo sapiens
cacgtttttgaagtcatctgcccttccatccctggctatggcttctcagaggcatcctccaagaagggtacggggctgctagaggttccataactgccccrtcctcgccaagggtgggcccggtgttcccaccaggctctccttccggcggggtgagcagggagttggcccgaggaagctgggaaaggaggggcctgagag

SEQ ID NO: 274442 - DNA, 201 bp, Homo sapiens
gccacctttcttcactcaaccacaaaatcctcacattcccaagtatattttctttctttcttttttttgtttttttgagacagagtcttgctgtgttcccmaggctggagtgcagtggtgtgatcttggctcactgcaacctccgcctcctgggttcaagcaattctccctgcctcagcctcctgagtagctgggattaca

SEQ ID NO: 274443 - DNA, 201 bp, Homo sapiens
actccaactacctgaagaaagtcatctcctactggcggaatgaatttgactggaagaagcaggtggagattctcaacagataccctcacttcaagactaarattgaaggtatgtttgcaaaacgccagccagagagggatgtatgtcatgagaacagccttcttccacaatgtgacttacagtcagataaagttggagaga

SEQ ID NO: 274444 - DNA, 201 bp, Homo sapiens
ctgggccacctttcttcactcaaccacaaaatcctcacattcccaagtatattttctttctttcttttttttgtttttttgagacagagtcttgctgtgtyccccaggctggagtgcagtggtgtgatcttggctcactgcaacctccgcctcctgggttcaagcaattctccctgcctcagcctcctgagtagctgggat

SEQ ID NO: 274445 - DNA, 201 bp, Homo sapiens
tccaggggagataaccacgctgtgcacacatgagattggctgacttggcaggactgtgcaattgtcagaaggccgtggggagtgggggccagtgcctgcakcctgccctgcctctctcacaggcccttagagcatcgccaggtgcagagctccacagctctctttcccaaggagtaatcagagggtgagaacgtggagcct

SEQ ID NO: 274446 - DNA, 201 bp, Homo sapiens
tggctgtaaggcaccatccttgagccaagcaagtactaatattcttgttatcttaattagaatgcaagagatcgtgtttttaaaattctctttgaatctgycactttgccctcctcttcctgggtgatacacctggtagtgctggtgggggccatcataatgccccttgtcccagattcccttcttttagatgggactcga

SEQ ID NO: 274447 - DNA, 201 bp, Homo sapiens
tgcgtccgcttggcaggcaggccaggaatgggagggaagccatccgtttttccctttccactggatgttcccttcgccttccccagggaggagtgatgagrctggggtgctggggagggcagtatgggggcaggcttgggaccaggcctgcagaagcagcagaccctccaagcccacctacctctctggcctggcatctga

SEQ ID NO: 274448 - DNA, 201 bp, Homo sapiens; identical to SEQ ID NO: 54494

SEQ ID NO: 274449 - DNA, 201 bp, Homo sapiens
tgccgccttgggttcctgcgtgagcagtccttctcactctgggcgatgttcgctttcaccagcccaaccccaagaagtccaccctggggaggacagagggrgtctccacggctccacacccccatgctttgtcggagatctggccaggcagagtggtgccctcttgactgagcctcgagcctttgctttccccttactcca

SEQ ID NO: 274450 - DNA, 201 bp, Homo sapiens
ggggagataaccacgctgtgcacacatgagattggctgacttggcaggactgtgcaattgtcagaaggccgtggggagtgggggccagtgcctgcagcctrccctgcctctctcacaggcccttagagcatcgccaggtgcagagctccacagctctctttcccaaggagtaatcagagggtgagaacgtggagcctggtg

SEQ ID NO: 274451 - DNA, 201 bp, Homo sapiens
gtctccacggctccacacccccatgctttgtcggagatctggccaggcagagtggtgccctcttgactgagcctcgagcctttgctttccccttactccamataaagccgcagccctggcgagggagcccagaggcctgaggacagcctgctgggtgcctggcactctctagatcctccctgcctgggcggtgggcatctg

SEQ ID NO: 274452 - DNA, 201 bp, Homo sapiens
tgctctctgccttcggctgcctcccacacgctcccatgtgtctcccagtccctaacccctagtcctgctttcaataccgcaggggcttttagctgactttwctccatcttcttaaagggcaggatttcctggcagagacataacgtctttctggaaatgaaagaagctgatgcatgttttttcttttctgaattacttaaa

SEQ ID NO: 274453 - DNA, 201 bp, Homo sapiens
aaagggaaagcaatggcctggcttggctggagatggaacatgcatcaacgtgtcccacgtgtctccagcagggatagcgaaggcctgccccctggcacatggtagactgagtaaatgttgatcagtgagaccttgaggcactttagagtttcacaatccagagagggagatagattggaagttcaagggtggacacctggg

SEQ ID NO: 274454 - DNA, 201 bp, Homo sapiens
tcgcaccactgcactctttgagactctgtctcaaaaaaaaaaaaaaaaaaaaaaagggaaagcaatggcctggcttggctggagatggaacatgcatcaaygtgtcccacgtgtctccagcagggatagcgaaggcctgccccctggcacatggtagactgagtaaatgttgatcagtgagaccttgaggcactttagagt

SEQ ID NO: 274455 - DNA, 201 bp, Homo sapiens
aagggaaagcaatggcctggcttggctggagatggaacatgcatcaacgtgtcccacgtgtctccagcagggatagcgaaggcctgccccctggcacatggtagactgagtaaatgttgatcagtgagaccttgaggcactttagagtttcacaatccagagagggagatagattggaagttcaagggtggacacctgggc

SEQ ID NO: 274456 - DNA, 201 bp, Homo sapiens
tagcgaaggcctgccccctggcacatggtagactgagtaaatgttgatcagtgagaccttgaggcactttagagtttcacaatccagagagggagatagaktggaagttcaagggtggacacctgggcatgattcccaggacgaaggctgcagtcggttctaagaagtatgctggtgactatgagagaagaggttgtgggt

SEQ ID NO: 274457 - DNA, 201 bp, Homo sapiens
gcagggaccacctcctgccttgggtttccaagacagagcgaggggtgctgctggggcgtggtttgcaggggccttgtcagaactcgatgctttctcctccktctgggtcctaactgcagtgcatctagagaccctcctctgactcaggcataaggacggcccgcatattcatgcaggttactctgaacaagaacagtctgt

SEQ ID NO: 274458 - DNA, 201 bp, Homo sapiens
gactggcttgaacctgggaggtgggggttgcagtgggccgagatcacgccactgccctccagcctgggcaacagagtgagaccctatctcaaaaaaaaaaaaagaaaaaagaaaaaagaaatgcgaagtctacagtgaagaaggaagaagtgaagaacacatccgctttgggagtagccagtgatgtgggaaactgccttg

SEQ ID NO: 274459 - DNA, 201 bp, Homo sapiens
cgtctgggtcctaactgcagtgcatctagagaccctcctctgactcaggcataaggacggcccgcatattcatgcaggttactctgaacaagaacagtctrtgggttacttccctaggaatgaggaagatgaagagctagataacaatgctgggctggtatctgcctgatagtgctttgccaagactatggtttcttcctc

SEQ ID NO: 274460 - DNA, 201 bp, Homo sapiens
actggcttgaacctgggaggtgggggttgcagtgggccgagatcacgccactgccctccagcctgggcaacagagtgagaccctatctcaaaaaaaaaaaaagaaaaaagaaaaaagaaatgcgaagtctacagtgaagaaggaagaagtgaagaacacatccgctttgggagtagccagtgatgtgggaaactgccttgc

SEQ ID NO: 274461 - DNA, 201 bp, Homo sapiens
aaagacaactgagttgatgtgaaatgtaacaggcaacactatggacacagaaagtagattagaggctgcttaggacctaacgtggagggcagtaggggagygacagctgaagggtatggagtttctccgtgccgatgaaaatgttctacagttgactgtggctatggctgcacatgtctgtgaatatcctagaaaccactg

SEQ ID NO: 274462 - DNA, 201 bp, Homo sapiens
ctggcttgaacctgggaggtgggggttgcagtgggccgagatcacgccactgccctccagcctgggcaacagagtgagaccctatctcaaaaaaaaaaaaagaaaaaagaaaaaagaaatgcgaagtctacagtgaagaaggaagaagtgaagaacacatccgctttgggagtagccagtgatgtgggaaactgccttgcc

SEQ ID NO: 274463 - DNA, 201 bp, Homo sapiens; identical to SEQ ID NO: 54501

SEQ ID NO: 274464 - DNA, 201 bp, Homo sapiens
ggcttgaacctgggaggtgggggttgcagtgggccgagatcacgccactgccctccagcctgggcaacagagtgagaccctatctcaaaaaaaaaaaaagaaaaaagaaaaaagaaatgcgaagtctacagtgaagaaggaagaagtgaagaacacatccgctttgggagtagccagtgatgtgggaaactgccttgccac

SEQ ID NO: 274465 - DNA, 201 bp, Homo sapiens
gaggggcgcagggccacagcctcacccctccgtcggctctttcacttccaggatgaaggtctatgtgcccactggcttctctgccttcccttttgagctaytgcacacgcctgaaaagtgggtgaggttcaagtacccaaagctcatctcctattcctacatggttcgtgggggccactttgcggcctttgaggagccgga

SEQ ID NO: 274466 - DNA, 201 bp, Homo sapiens
gggccaggcacgaggtccgcagccagggaggacgacagcatccgccctttcaaggtggaaacgtcagatgaggagatccacgtaaggcaccttgggccggrccgggctgggcagtggagagggtggtgtgtcgaagacaggggttgggtcttaggccagatgcgggaggggacgggggcttgggaatggtccatcctactt

SEQ ID NO: 274467 - DNA, 201 bp, Homo sapiens
gcttgaacctgggaggtgggggttgcagtgggccgagatcacgccactgccctccagcctgggcaacagagtgagaccctatctcaaaaaaaaaaaaagaaaaaagaaaaaagaaatgcgaagtctacagtgaagaaggaagaagtgaagaacacatccgctttgggagtagccagtgatgtgggaaactgccttgccact

SEQ ID NO: 274468 - DNA, 201 bp, Homo sapiens
tgcagggtcttctctctccctccaccctgactgtgctctgtccccccagggctggacatccacttcatccacgtgaagcccccccagctgcccgcaggccrtaccccgaagcccttgctgatggtgcacggctggcccggctctttctacgagttttataagatcatcccactcctgactgaccccaagaaccatggcctg

SEQ ID NO: 274469 - DNA, 201 bp, Homo sapiens
ataagttccgtttcaccccacctttggaggacagctgcttccactatggcttcaactccaactacctgaagaaagtcatctcctactggcggaatgaattygactggaagaagcaggtggagattctcaacagataccctcacttcaagactaagattgaaggtatgtttgcaaaacgccagccagagagggatgtatgtc

SEQ ID NO: 274470 - DNA, 201 bp, Homo sapiens
gtgttttctggaaacagactttgctcttgtgctctgtccttcccatccctctcaacttggggtcctgaattttgctccaggacttacaccagaggatcgayaagttccgtttcaccccacctttggaggacagctgcttccactatggcttcaactccaactacctgaagaaagtcatctcctactggcggaatgaatttg

SEQ ID NO: 274471 - DNA, 201 bp, Homo sapiens
ctactggttcatctcccgggacaaagaggaaactttgccacttgaagatgggtggtgggggccaggcacgaggtccgcagccagggaggacgacagcatcygccctttcaaggtggaaacgtcagatgaggagatccacgtaaggcaccttgggccgggccgggctgggcagtggagagggtggtgtgtcgaagacagggg

SEQ ID NO: 274472 - DNA, 201 bp, Homo sapiens
ggctaggtgcggtggctcacgcttttaatcccagcactttaggaggctgaggcggtggatcacctgaggtcaggagttcaagaccagcctggccaacatcrtgaaaccccgtctctactaaaaatacaaaaaattagccgggcatagtggcgggcacctataataatcccagctactcgggaggctgaggcaggagaatcc

SEQ ID NO: 274473 - DNA, 201 bp, Homo sapiens
tgtcctctaagaagtggacctgtgtgcagggtgggccaaggaccccccaggggagaggagggagtgtgacctgtcactcagcagtgcctgaggcacgttgrcttggatcctcctgtctgtaacccagggttgcggctctgggtcaggttcccaggcagagaaggcctgtgataggaggggaaggtcaggcattagacctct

SEQ ID NO: 274474 - DNA, 201 bp, Homo sapiens
caggaggcagaggctgcagtgagccaagatcacaccactgcactccagcctgggcaacaagagtgaaatgccatctcaaaaaaagaaacagatgcataagrataaatgtcacaaaaagcatggataaaagtcatgagagttccaaggaggaagagatttaaaagcagaagctgggctaaacccaagagcaaccaggctgag

SEQ ID NO: 274475 - DNA, 201 bp, Homo sapiens
gtgtgtgtcctctaagaagtggacctgtgtgcagggtgggccaaggaccccccaggggagaggagggagtgtgacctgtcactcagcagtgcctgaggcaygttgacttggatcctcctgtctgtaacccagggttgcggctctgggtcaggttcccaggcagagaaggcctgtgataggaggggaaggtcaggcattaga

SEQ ID NO: 274476 - DNA, 201 bp, Homo sapiens
ggtaactgaaacacttgggaagaagcctgggaatggtgatgcttgagaggctctctaagctgacatgaacttcctccctctggggctggccttttagcctratacatgccaatgagacttgcaccctctctcctggtctgtaaattttttagtttttggagacagggtcttgctctgtcaccaggctggggtgcagtggtg

SEQ ID NO: 274477 - DNA, 201 bp, Homo sapiens
aaacacttgggaagaagcctgggaatggtgatgcttgagaggctctctaagctgacatgaacttcctccctctggggctggccttttagcctaatacatgycaatgagacttgcaccctctctcctggtctgtaaattttttagtttttggagacagggtcttgctctgtcaccaggctggggtgcagtggtgcgatcttg

SEQ ID NO: 274478 - DNA, 201 bp, Homo sapiens
aataggagtaaatttggcaacataggaggacacccaggatacattgttaagttaaaaaaaaagagattctaaaatagaatgtatgtatggttctatttttgttaaaagttatgttctctaagtctttttaaaaagtttgaactgtcacagccaagaagggtctaaagagacatgacagctcagtggtgtgtgagtcctgga

SEQ ID NO: 274479 - DNA, 201 bp, Homo sapiens
agaatgtatgtatggttctatttttgttaaaagttatgttctctaagtctttttaaaaagtttgaactgtcacagccaagaagggtctaaagagacatgayagctcagtggtgtgtgagtcctggatgggatcctggaacagaaaatggatatcaggggaaaaactgaggaaatctggctcatattttgttgtgtgtagat

SEQ ID NO: 274480 - DNA, 201 bp, Homo sapiens
ttggctatgatgatgttttcagcattgcacttaaaaaaaaatcttccactttattttattttaattttttgagatggagtcttgctctgttgcccaggctrgagtgtggtggtgtgatctcggctcagtgcaacctctgcttcccaggttcaagcgattctcttgcctcagcctcccgagtagctggaattgcaggcgcct

SEQ ID NO: 274481 - DNA, 201 bp, Homo sapiens
tggaggcctgctgtgagccaggagctgtcctgagccctggaaacccagcagtggctgtacagacctggcccagctgtcagggggcacctctaaggaaaccrggaggcaataatcgtagctcccttgcagggaggttgtgaaggctgagtgaggacatctgtgcacctggagcacagtgtgagtgtgaaaccagtgtcagcc

SEQ ID NO: 274482 - DNA, 201 bp, Homo sapiens
ccgggtaatttttttgtatttttagtagagacggggtttcaccatgttggccaggctggtcttgagctcctgaccttaggtgatccacccgcctcagcctyccaaagtgctgggattacaggcgtgagccaccacaccaggcccaaaaatcctccactttaaagaaaatatcatttggtaatcagaaaaaggtgacatttt

SEQ ID NO: 274483 - DNA, 201 bp, Homo sapiens
tgtatttttagtagagacggggtttcaccatgttggccaggctggtcttgagctcctgaccttaggtgatccacccgcctcagccttccaaagtgctgggrttacaggcgtgagccaccacaccaggcccaaaaatcctccactttaaagaaaatatcatttggtaatcagaaaaaggtgacattttgtcaatgtgtatga

SEQ ID NO: 274484 - DNA, 201 bp, Homo sapiens
gagcaggaggtagacaggatcagatctgtgttctagaaagaacaggaatacactagggtggaaatggtggtcgtggtcgttttcaagctgcgggcagagcygaaagggagatggaagcacttggccaacttgcagaaatccagttcacagaggtgatgtgtatactggaactagttttcattgaccagttttcattttgcc

SEQ ID NO: 274485 - DNA, 201 bp, Homo sapiens
tgggcttccaggaattctacattcaaggaggggactgggggtccctgatctgcactaatatggcccagctggtgcccaggtgaggtcactgttggggtggkgtgtgtgtgtgtgtgtgtgtgtgtgtgtgtgtgtcctctaagaagtggacctgtgtgcagggtgggccaaggaccccccaggggagaggagggagtgtga

SEQ ID NO: 274486 - DNA, 201 bp, Homo sapiens
tgctgaccaacgtcatgctctactggacaacaggcaccatcatctcctcccagcgcttctacaaggagaacctgggacagggctggatgacccagaagcawgagcggtgagcctggctgagccgagaacaggggcctctgaggctggaggcagggggacggccagtcttgggctccacgaagggcacttggtggtgggata

SEQ ID NO: 274487 - DNA, 201 bp, Homo sapiens
tggtcagtcagataaactaaagttcctaaaaaaaggaaattgaaattatagtgttaactgggtgtggtggcatgcacctgtagtcccagctactcaggagrctgaggcaggaggattgcttgagcccaggaattcaaggctgcagtgagctacaaggacaccactgcactgggtgacagatcaagaccccatctcttaaaa

SEQ ID NO: 274488 - DNA, 201 bp, Homo sapiens
agccgagaacaggggcctctgaggctggaggcagggggacggccagtcttgggctccacgaagggcacttggtggtgggataagtatagccttgcctgcargtgccccaggggcccttggatgggaacactaaaggtcgaggtgtttggagaaagccctcatggagggaccaggtgcctggctcccgggcggccctcagta

SEQ ID NO: 274489 - DNA, 201 bp, Homo sapiens
acatgttaggaatcttatttttaatgttttaagataatttggccttttcaaggaacagtgaagattttaatttgttaaaattctaggaattacttaaagtrtatgaaagacatgttggtcagtcagataaactaaagttcctaaaaaaaggaaattgaaattatagtgttaactgggtgtggtggcatgcacctgtagtcc

SEQ ID NO: 274490 - DNA, 201 bp, Homo sapiens; identical to SEQ ID NO: 54504

SEQ ID NO: 274491 - DNA, 201 bp, Homo sapiens
tgaaaaaaattatgcatttaatacctgttcattgtagaaaaattggaaagtacataaaactcaaagagaaattaaaagcactggaatctactgctcaggaraactgctttttacattcttggagtttatcctcccagacttttaaaattcaccaatacatggtataagtacagtataagcatagatgactttttataaaaa

SEQ ID NO: 274492 - DNA, 201 bp, Homo sapiens
aaaagaaatgcgaagtctacagtgaagaaggaagaagtgaagaacacatccgctttgggagtagccagtgatgtgggaaactgccttgccactcccagagkgcagtatcttgtggctgcagggtttgctgtgttttctggaaacagactttgctcttgtgctctgtccttcccatccctctcaacttggggtcctgaattt

SEQ ID NO: 274493 - DNA, 201 bp, Homo sapiens; identical to SEQ ID NO: 54508

SEQ ID NO: 274494 - DNA, 201 bp, Homo sapiens
ctctgattataaaatacatgttgtcaaaaagcttaaaaatgcaaaaagtacaaaacattaaagacaatctcatataacctcttctccctccccacatcccytctccttcaaaagaacttgtgaacattttggtgagaattttcacaagtgaagtacgtccatatcaccaacatggccccaacactccagatgcccctcggg

SEQ ID NO: 274495 - DNA, 201 bp, Homo sapiens
gtcccaaacatctgacatgtagccaatggaggacatgcaagtggtggggttcccagcagggaccacctcctgccttgggtttccaagacagagcgaggggygctgctggggcgtggtttgcaggggccttgtcagaactcgatgctttctcctccgtctgggtcctaactgcagtgcatctagagaccctcctctgactca

SEQ ID NO: 274496 - DNA, 201 bp, Homo sapiens
tttgtgttctgcgttcccaggaagttctccctggacgacctgctgaccaacgtcatgctctactggacaacaggcaccatcatctcctcccagcgcttctmcaaggagaacctgggacagggctggatgacccagaagcatgagcggtgagcctggctgagccgagaacaggggcctctgaggctggaggcagggggacgg

SEQ ID NO: 274497 - DNA, 201 bp, Homo sapiens
tctctaccctgaccctcctcctgggacagcgtttcgggaggtttcttggcctcactgagagggatgtggagctgctgtaccccgtcaaggagaaggtattytacagcctgatgagggagagcggctacatgcacatccagtgcaccaagcctgacaccgtaggtgagtgtgctcaggggtcctcgcccactgccggctcca

SEQ ID NO: 274498 - DNA, 201 bp, Homo sapiens
atgtctgtgaatatcctagaaaccactggagggttcactttaaatgggcgaattgtatggtatatgaattatgtttcaataaagctcttacacagctaagstgtgtggccatggctgggcttcctagcagtgtcccccaaccccaaattgaacttactctcccagcacttgggcctccccattaccccctgtctgccctga

SEQ ID NO: 274499 - DNA, 201 bp, Homo sapiens
gggaggttgtgaaggctgagtgaggacatctgtgcacctggagcacagtgtgagtgtgaaaccagtgtcagcccttattactgtcaataccatgaaggggsggcgggggcactaagggtggcaggactcaatatctaggctctggggggtgccagagcctgaccgtgcagggtcttctctctccctccaccctgactgtgc

SEQ ID NO: 274500 - DNA, 201 bp, Homo sapiens
ggcctgttcctccgccatctctcctctctccctgtccttgacaccagcccagcctcaccccggcccctctctctgccttcagccacgtgaaaggcctgcayttgaacatggctttggttttaagcaacttctctaccctgaccctcctcctgggacagcgtttcgggaggtttcttggcctcactgagagggatgtggagc

SEQ ID NO: 274501 - DNA, 201 bp, Homo sapiens
gacaatctcatataacctcttctccctccccacatcccctctccttcaaaagaacttgtgaacattttggtgagaattttcacaagtgaagtacgtccatmtcaccaacatggccccaacactccagatgcccctcggggttctctcccaggtaccacgctctgacttctgactgagatggttttgattgtgcctgtttaa

SEQ ID NO: 274502 - DNA, 201 bp, Homo sapiens
actttttcaaaaaggtaaatttataaaggaaccagtaaaattttaaaaagaaacaattcaaagacaaataagaacactgaaattaatttgctaacagacasaaaacttgtcaacatccacagagtaatatcaattaaatctccatgggacaaaattcatttgcctctatgaacaagagtcattcgcattaccctcagttct

SEQ ID NO: 274503 - DNA, 201 bp, Homo sapiens
catgccctgctaatttttttgtatttttaatagagatggggtttcaccatgtcagccaggatagtctcgaactccttaccgcaggtgatccacctttctcrccctcccaaagtgctgggattacaggcatgagccaatgcccccagcctgttccagccatttttaatgactgtacagtattttggcttatgagtatatcaa

SEQ ID NO: 274504 - DNA, 201 bp, Homo sapiens; identical to SEQ ID NO: 54491

SEQ ID NO: 274505 - DNA, 201 bp, Homo sapiens
ccaggctggtcttgagctcctgaccttaggtgatccacccgcctcagccttccaaagtgctgggattacaggcgtgagccaccacaccaggcccaaaaatmctccactttaaagaaaatatcatttggtaatcagaaaaaggtgacattttgtcaatgtgtatgaaaaaaattatgcatttaatacctgttcattgtagaa

SEQ ID NO: 274506 - DNA, 201 bp, Homo sapiens
ctctttattgttctaatattatgctcgcagcctccttgacaacatcatgcaaaatgtgtcttactagcttctagtgcataaaatattggtggagctcttcrctgtgctgggccagtcaccagtgctgggcactgtgggtcaaggcagtgcccaggacgggcacagccctgccttcccaagctatggtttattgtggtagga

SEQ ID NO: 274507 - DNA, 201 bp, Homo sapiens
gactatggtttcttcctcttctgatcaaaaaagacacaggagtcagacaaatggggattaaaagacaactgagttgatgtgaaatgtaacaggcaacactrtggacacagaaagtagattagaggctgcttaggacctaacgtggagggcagtaggggagcgacagctgaagggtatggagtttctccgtgccgatgaaaa

SEQ ID NO: 274508 - DNA, 201 bp, Homo sapiens
gcattgcacttaaaaaaaaatcttccactttattttattttaattttttgagatggagtcttgctctgttgcccaggctggagtgtggtggtgtgatctcrgctcagtgcaacctctgcttcccaggttcaagcgattctcttgcctcagcctcccgagtagctggaattgcaggcgcctgtcagcatgcccgggtaattt

SEQ ID NO: 274509 - DNA, 201 bp, Homo sapiens
caccagaggatcgataagttccgtttcaccccacctttggaggacagctgcttccactatggcttcaactccaactacctgaagaaagtcatctcctactrgcggaatgaatttgactggaagaagcaggtggagattctcaacagataccctcacttcaagactaagattgaaggtatgtttgcaaaacgccagccagag

SEQ ID NO: 274510 - DNA, 201 bp, Homo sapiens
gtcagatgaggagatccacgtaaggcaccttgggccgggccgggctgggcagtggagagggtggtgtgtcgaagacaggggttgggtcttaggccagatgygggaggggacgggggcttgggaatggtccatcctacttgggagtgtgtttcagtctgcttttcctctgctgggcaggtgcaggttgctttggagagggat

SEQ ID NO: 274511 - DNA, 201 bp, Homo sapiens
tttctggctgccctttgtcacacaactgcatgtggcactgagagtggggctttgtgttctgcgttcccaggaagttctccctggacgacctgctgaccaaygtcatgctctactggacaacaggcaccatcatctcctcccagcgcttctacaaggagaacctgggacagggctggatgacccagaagcatgagcggtgag

SEQ ID NO: 274512 - DNA, 201 bp, Homo sapiens
ctgcttccactatggcttcaactccaactacctgaagaaagtcatctcctactggcggaatgaatttgactggaagaagcaggtggagattctcaacagayaccctcacttcaagactaagattgaaggtatgtttgcaaaacgccagccagagagggatgtatgtcatgagaacagccttcttccacaatgtgacttaca

SEQ ID NO: 274513 - DNA, 201 bp, Homo sapiens
tcctctctccctgtccttgacaccagcccagcctcaccccggcccctctctctgccttcagccacgtgaaaggcctgcacttgaacatggctttggttttragcaacttctctaccctgaccctcctcctgggacagcgtttcgggaggtttcttggcctcactgagagggatgtggagctgctgtaccccgtcaaggaga

SEQ ID NO: 274514 - DNA, 201 bp, Homo sapiens
aaaagaaaaaagaaatgcgaagtctacagtgaagaaggaagaagtgaagaacacatccgctttgggagtagccagtgatgtgggaaactgccttgccactyccagagggcagtatcttgtggctgcagggtttgctgtgttttctggaaacagactttgctcttgtgctctgtccttcccatccctctcaacttggggtcc

SEQ ID NO: 274515 - DNA, 201 bp, Homo sapiens
caagtgtaaataaaatcagggacagggttggagcgcagcaggaaagagcctgctggggatcagagtctctgggctgtcagggccgggctgggcgggctccrttgttaatggcttcccctcatcttgcaggagccatgtggctagaaatcctcctcacttcagtgctgggctttgccatctactggttcatctcccgggaca

SEQ ID NO: 274516 - DNA, 201 bp, Homo sapiens
gacagaagccttctcagacatgcaaaaaacatgaggctgtcgggcgccgtggctcacacctgtaatcccagcactttgggaggccgaggcgggcggatcaygaggtcaagagattgagaccatcctggctaacatggtgaaaccccatctctactaaaaatacaaaaattagctgggtgtggtggcacgtgcctgtagtcc

SEQ ID NO: 274517 - DNA, 201 bp, Homo sapiens
cagaggcatcctccaagaagggtacggggctgctagaggttccataactgccccgtcctcgccaagggtgggcccggtgttcccaccaggctctccttccrgcggggtgagcagggagttggcccgaggaagctgggaaaggaggggcctgagaggccggccccagacacaccgccctccggggctggagatgccacccct

SEQ ID NO: 274518 - DNA, 201 bp, Homo sapiens
ggggttggaaacccacccccacacagtcaacacctgctgtcacaccaggctaatcaagaacacctttctttggtgcattaaccacctgctattaaataaarggctgttactaggtggcaaagtaacacactgcagtagagcctatttgtaatctgagatcagtggctgtaaggcaccatccttgagccaagcaagtactaa

SEQ ID NO: 274519 - DNA, 201 bp, Homo sapiens
aagaaggactgttcatgtgggagcgcaaggcggcagcggggttggaaacccacccccacacagtcaacacctgctgtcacaccaggctaatcaagaacacytttctttggtgcattaaccacctgctattaaataaagggctgttactaggtggcaaagtaacacactgcagtagagcctatttgtaatctgagatcagtg

SEQ ID NO: 274520 - DNA, 201 bp, Homo sapiens
tgccatcaggcctccgagctccttcgccaggcggctttatttggagtaagaggaaagcaaaggtttgaggctcagtcaagagggcgccactctgcctggcyagctctccgacaaagcagacgggggggtgtggagccgtggtgaccccctccgtcctccccagggtgggctccttgggcttgggctggtggaagtgaatat

SEQ ID NO: 274521 - DNA, 201 bp, Homo sapiens
gttcttcctctcaggctggagtgcagtgatcatagctcactgcagcctcaaccacctgggctcaagcaatcttcccacttcagcctcccgagtagctgggwcctcaggcatgcaccaccatgcctggctaatttttttttattatttgtggagatggggttttgccatgttgcccaggctggtctcaaactcctgggctca

SEQ ID NO: 274522 - DNA, 201 bp, Homo sapiens
tcagtctggttcgttaattgtaataaatgtaccatgctaacataaaatattaataatggaggaaacccggtgggtgtgaggtatatgggagttttctggaytctttgcagtttttcagcaatctaaaactgttccaaaataaagtttagacagacaacaccatgttttctttagagagtgggattacatgtgagtcttccc

SEQ ID NO: 274523 - DNA, 201 bp, Homo sapiens
caccagggtcctgttaaaggacaatactttttcaaaaaggtaaatttataaaggaaccagtaaaattttaaaaagaaacaattcaaagacaaataagaacrctgaaattaatttgctaacagacacaaaacttgtcaacatccacagagtaatatcaattaaatctccatgggacaaaattcatttgcctctatgaacaag

SEQ ID NO: 274524 - DNA, 201 bp, Homo sapiens
cttcactcaaccacaaaatcctcacattcccaagtatattttctttctttcttttttttgtttttttgagacagagtcttgctgtgttccccaggctggartgcagtggtgtgatcttggctcactgcaacctccgcctcctgggttcaagcaattctccctgcctcagcctcctgagtagctgggattacaggcatgccc

SEQ ID NO: 274525 - DNA, 201 bp, Homo sapiens
taaactgaactagctcagtctgtaagtgaggggactcctgagctttctgcggccttcttcccaattccaggaaaggaaggaccttccacagaaaataactrctcagcaagacagccagggtgaacctcagcaccatctgtgacaagccacatgctctctgcgtgatgcctcctgcctctcagctgtgcctgaagcacacta

SEQ ID NO: 274526 - DNA, 201 bp, Homo sapiens
accaagcatgagctggtcacccctgctgaagaagtagctcgaagcccacccactcggggacagagtgggcacagatgggatagacagatagtgattcgagrggtgcctaggatctcatactgaaaacccacctctgctagggccataaatcccatcaacagcaattcattcctttgagaggtaatacagtgatgtgggaag

SEQ ID NO: 274527 - DNA, 201 bp, Homo sapiens
cagtgggccctgtagcctctgctgggtccagtgaagacacttcaactagagtgaaggccctggccacagggtaggggaggcaaaatcttaagagttcaagrgccctgagtcaaggcaggagggtcactgcccagcccagctggccccctgggctgcctgtgtgtggttcttgacccagacctagtggcttaggagcagagt

SEQ ID NO: 274528 - DNA, 201 bp, Homo sapiens
aggccgtgttctgagtgtctctgccacgggcccgcctggctggctttagtccaggagcagcctggactgtgactcttgaaggctgtgggaggctggtgacygggagcaggaggtctcagtgcatccctgaagggtcagagagccatgccgtgagaggccaggagcaggcagccattggccctccagccctcaccaaaggcc

SEQ ID NO: 274529 - DNA, 201 bp, Homo sapiens
tgaagggtcagagagccatgccgtgagaggccaggagcaggcagccattggccctccagccctcaccaaaggccaccacctcagcttgtcctctggcaacycagcctgggaatttgctttccctgtggaacgagagacactggccgcattgaggggtgactttccggtcctacaaaattgtagccctctttctgctagaac

SEQ ID NO: 274530 - DNA, 201 bp, Homo sapiens
aaccttcaccacgaccaaacaacccagaactcggaccctggtcctcgggctgccctacaggaagcacccctagtcctcttgctgctctgctagatgagacrgcaggctcaggttcctccatgaggcccggctttcagtgctctcctgttacacactgcaaggaagcttccagatcgtggagcacattgttgaggaaaagac

SEQ ID NO: 274531 - DNA, 201 bp, Homo sapiens
gctggtcttgaactcctgacctcaggtgatctgcccaccttggcctccaaagtgctgggattacaagcatgagccaccacgcctgtccccaagtatatttycttagctcactcttttcagcatgtaatttacagaagggtaatctgaattgtaaacacgatttctaagttaaaactcctgggtcagctcgtgatgaagtag

SEQ ID NO: 274532 - DNA, 201 bp, Homo sapiens
aaaagggaaagcaatggcctggcttggctggagatggaacatgcatcaacgtgtcccacgtgtctccagcagggatagcgaaggcctgccccctggcacatggtagactgagtaaatgttgatcagtgagaccttgaggcactttagagtttcacaatccagagagggagatagattggaagttcaagggtggacacctgg

SEQ ID NO: 274533 - DNA, 201 bp, Homo sapiens
cactgccggctccactggggcagggagacacccgcggggtaacctcaccaccccaccccaatgctgcccacagaaggaagcctcttgtaaggacctcccarctctttagatctttaaactgcattttcccatagaatcaagaggatggaccctcagcagattcccaggccaatttagcaactctgtttagccgactcagta

SEQ ID NO: 274534 - DNA, 201 bp, Homo sapiens
agaacacctttctttggtgcattaaccacctgctattaaataaagggctgttactaggtggcaaagtaacacactgcagtagagcctatttgtaatctgaratcagtggctgtaaggcaccatccttgagccaagcaagtactaatattcttgttatcttaattagaatgcaagagatcgtgtttttaaaattctctttga

SEQ ID NO: 274535 - DNA, 201 bp, Homo sapiens
gtggtttgtaaagttcactggggagggtgatccctctttattgttctaatattatgctcgcagcctccttgacaacatcatgcaaaatgtgtcttactagyttctagtgcataaaatattggtggagctcttcgctgtgctgggccagtcaccagtgctgggcactgtgggtcaaggcagtgcccaggacgggcacagccc

SEQ ID NO: 274536 - DNA, 201 bp, Homo sapiens
gtgcattaaccacctgctattaaataaagggctgttactaggtggcaaagtaacacactgcagtagagcctatttgtaatctgagatcagtggctgtaagkcaccatccttgagccaagcaagtactaatattcttgttatcttaattagaatgcaagagatcgtgtttttaaaattctctttgaatctgtcactttgccc

SEQ ID NO: 274537 - DNA, 201 bp, Homo sapiens
ggctgcagcgggaccttggggtgtgggctaaataacaagaacaggggctcctctggggtctgttacaaggcagagatgctccacggtaattagggatttakgggaagaggaaggaacacacatgttgataataagtagttcaacattattatccccattttacagatgcagctactgagcttagagaggtttcataacttg

SEQ ID NO: 274538 - DNA, 201 bp, Homo sapiens
ctgttactaggtggcaaagtaacacactgcagtagagcctatttgtaatctgagatcagtggctgtaaggcaccatccttgagccaagcaagtactaataytcttgttatcttaattagaatgcaagagatcgtgtttttaaaattctctttgaatctgtcactttgccctcctcttcctgggtgatacacctggtagtgc

SEQ ID NO: 274539 - DNA, 201 bp, Homo sapiens
gtgctgggctttgccatctactggttcatctcccgggacaaagaggaaactttgccacttgaagatgggtggtgggggccaggcacgaggtccgcagccasggaggacgacagcatccgccctttcaaggtggaaacgtcagatgaggagatccacgtaaggcaccttgggccgggccgggctgggcagtggagagggtgg

SEQ ID NO: 274540 - DNA, 201 bp, Homo sapiens
gagagtccagatgggagccaaagcagacatggtcagtggcctacaggagcttccgtccagctgtcagtcacataatcaccctgacaaatgtgagctcgacraaggctaggactgagagatctgccttgctgggataggtcaggagaggctacccagaggagggacagtcagtctgaaatctgaaaggtggatagaagttag

SEQ ID NO: 274541 - DNA, 201 bp, Homo sapiens; identical to SEQ ID NO: 54567

SEQ ID NO: 274542 - DNA, 201 bp, Homo sapiens; identical to SEQ ID NO: 54568

SEQ ID NO: 274543 - DNA, 201 bp, Homo sapiens; identical to SEQ ID NO: 54569

SEQ ID NO: 274544 - DNA, 201 bp, Homo sapiens; identical to SEQ ID NO: 54570

SEQ ID NO: 274545 - DNA, 201 bp, Homo sapiens
gcaggagaatggcacgaacccgggaggcggagcttgcagtgagccgagatcgcgccactgcactccagcctgggtgagagagcgagactctgtctcaaaamaaacaaacaaaaaaaaagaaactctccacaagttcaaatacagttgagtccacatgttctcaattctgtttatctaaagaagtagaactttgttcttttt

SEQ ID NO: 274546 - DNA, 201 bp, Homo sapiens
acttctgatgtgtatatattgatgcatctgagaaaccatcatcactgcagtcaggatggtgaatacatcagtcaacccgaaaacccctctgccctttgtcrtctctccctcccacctggtcctggaccccctggtctactatctgtcactctagattagtttgcaatttttaaagctttgtgtaagtggaatcataacagt

SEQ ID NO: 274547 - DNA, 201 bp, Homo sapiens
cacgaggtcaggagatcgagaccatcctggctaacatggtgaaacccccgtctctactaaaaaatacaaaaaattagccgggcgtggtggcgggcgcctgyagtcccagctactcgggaggctgaggcaggagaatggcacgaacccgggaggcggagcttgcagtgagccgagatcgcgccactgcactccagcctgggt

SEQ ID NO: 274548 - DNA, 201 bp, Homo sapiens
ttttctttgttttcttttattttctttagtttctgagacaaagtctcgctcgtcacccaggctggagtgcagtggagcgatctcggctcactgcaagctcygcctcccaggttcaagcaattctcctgcctcagcctcctgagtagctgggattacaggcgcccgccaccacacccggctaatttttgcatttttagtaca

SEQ ID NO: 274549 - DNA, 201 bp, Homo sapiens
cttggagcagttccattaggcaggtggagggacttggcatgcgttaaagcaggctgggaaatcgaggcttaaagggccagcgacctacttaataggaggcrgagtaaagactagaattcacatcttctgctctgagtcagaatcctttacaccttgttcaaataggatttttccaggccaggtgcagtggctcacacctat

SEQ ID NO: 274550 - DNA, 201 bp, Homo sapiens
atgggcagtgcctggaggggtctctctagcctcagggggccgggcatattcgctggctgcaccggtgtgctggactggtaaacgtcagctctctgcacagstctccgcacacgaggcccttgcatgggcactgttctgtaggtacgtgtgtttcagcacaaagctgaaaggaagcgatccctgggtccagcaggctgtgaa

SEQ ID NO: 274551 - DNA, 201 bp, Homo sapiens
tcgtgggtctctccgaaaccctagaacagtttctcgaaagagcagccacacagacaccagaggcagaggcatttgggattgatctgcgctcgaagttcagrgtctagggctgtcgtgggctccttcgtggactcctgcgtggacactctgggcctcttctaatgccagcctccaagggcctggctgcaagattgagatttg

SEQ ID NO: 274552 - DNA, 201 bp, Homo sapiens
atccggaagcagttttctgcagccggccaggggatgctctccccaggggctgtgcttgggtctggactgcagcgccccgggatccgtttagcccgtggggscgccaaggcacgttccgtttcagccgctgcctccaaggaagaaggcccgctccgtctgtggacacccattcttgaggtgtctgcgcatatgactcatgga

SEQ ID NO: 274553 - DNA, 201 bp, Homo sapiens
gctgcttgctttgatgccctcttcaacccatggcaaacatctgcttggtgatcttgctgctttcaaaaatgggatccattcctttaaaactggccaggccrtgggagttggctgcgtgcctactaaataatatgtaaatactgttgttttgttgttgttgttgttgagatagggtctcactctgtcgccctggctggagta

SEQ ID NO: 274554 - DNA, 201 bp, Homo sapiens
ccaaagttctgggattacaggcatgagccactgcaccaggccagtttttgctactttacataattactaaatacaacattgtattaaatgattgcagtcaytccccattcttccctccccccacctagtaacttctcttctactttctgcctctggatttgccaatctgagggacctcatataagtggcatcatatcatat

SEQ ID NO: 274555 - DNA, 201 bp, Homo sapiens
tgcccaggcttttattggcatggagggcagggttatatgcttatttgctagaacctgtaagtatggggcgggtaaaagatggaccagatgaaaaataaatygacacagaaaatcagtaagtggttggcacattgtgcgcacgggaaaagtggcttcggatctttaacatagccttgtctttgaaatggtcattctcccatc

SEQ ID NO: 274556 - DNA, 201 bp, Homo sapiens
ccgcagacccgatttactttgaggaatcccgtttgtgctaagtaaagtatgttacagaaagtcacgctgagggccaggttggttttcttttttttttttttgacagggagtctcactctctcacccagtagtgcagtagcctgatctcagctcactgcaagctccggctcccgggttcacgccattctcctccctcagcct

SEQ ID NO: 274557 - DNA, 201 bp, Homo sapiens
gcctcccaaagtttttgtgaggcttatctgaggtccaggaatttattagtgactggcgttcttccacctggacaccccacctcacccccactcctcctccytaagcaccaggtccttggaagagctttgcgcccttggccctgggcttgtcgtctgcccatcccagtctcagctgctcacctgcctcacctggctgctgtc

SEQ ID NO: 274558 - DNA, 201 bp, Homo sapiens
gaacagagaagttccctgagccccagcagggacacaagagcagactggttcctgccagcaggggggtgcaggacagcagggccagggctgtgtaggtgggygtggggcagcttggaactcaatgtggacgagaagcaagttgcaggaccgcgcacagagtaggcagcatttgtgtgtgcctcgcacgtgtgtggtggcact

SEQ ID NO: 274559 - DNA, 201 bp, Homo sapiens
gtaccacctttgttttaaaaatcctttattttattgtaagtttatgaaatatattattattgttttttgagacagggtcttacagtgttgcccaggctggkctcaaactcctagacacaagcaattcttcgtccttagcctgctgagtagctgatgtgcaccactgtgcccagctcaaatttaatttaagttttatttatt

SEQ ID NO: 274560 - DNA, 201 bp, Homo sapiens
attgcccttatttatattctgctttccttgtcgtacatagcctggcaacccatgccactgtcgctgttaacagaggaagttggggtttatttgttcactgyggttttcttttgttgtttgtttgtttgtttgttttagacagggtctcactctgccacccaggctagagtgcagtggtgtgatctcggctcactgcagctt

SEQ ID NO: 274561 - DNA, 201 bp, Homo sapiens
tgtctgtggcgtcaccggtggtgttggtggcaccgtgtggcctcacgcacagcctcccttgtctgggtctgtctccacagcaactgcatgtccagccagaygaagaacgtggtcagcggcgtgctgtttggcaccggcctgtgggtggccctcatcgtcaccatgcgctactccctgaaagtgctgctctcctaccacggg

SEQ ID NO: 274562 - DNA, 201 bp, Homo sapiens
caggataatcaggagctccaggaggtacatcgacggccaacgcagcttttatttatacctgcaatggtggggtggggggcggggaggaggccctaattgtscaatgggggccgcgtaaatggatcacagcatagtcaaaggaaatcttatgcagccttgggaaggccggtggtcatctccgtcccccagcagagacctgtc

SEQ ID NO: 274563 - DNA, 201 bp, Homo sapiens
gatccggaagcagttttctgcagccggccaggggatgctctccccaggggctgtgcttgggtctggactgcagcgccccgggatccgtttagcccgtgggsccgccaaggcacgttccgtttcagccgctgcctccaaggaagaaggcccgctccgtctgtggacacccattcttgaggtgtctgcgcatatgactcatgg

SEQ ID NO: 274564 - DNA, 201 bp, Homo sapiens
aggcagtcttacacttgcagtggtccccccttatccttggggggatacattccaagacccctggtgggtgcctgaatttgcggacagaaccaaacctatayggtcagctttgtatcctcaggctctgcttctgtggatttaaccaaccaaggattgaaaacatttggggaaaaagaaaaaacctaaataataacaaaaaat

SEQ ID NO: 274565 - DNA, 201 bp, Homo sapiens
gagtgttttaagagctcagttcctgcaagtgctctccctctgactttcccggctgtacctggggcaggctgctggaccctgcagcacgtggtgtctgtggygtcaccggtggtgttggtggcaccgtgtggcctcacgcacagcctcccttgtctgggtctgtctccacagcaactgcatgtccagccagacgaagaacgt

SEQ ID NO: 274566 - DNA, 201 bp, Homo sapiens
ctatcaccacaatcaattttggaatgttttcatcaccctaagaagatacccccaactccttacccatgacctccctatcttcccatctgctccaagccccyggcaaccactagtgtactttctgtctctgtagatttgcttgttccagacatttagaataaatagaatcagcaatatatgaccttctgtatggcttctttc

SEQ ID NO: 274567 - DNA, 201 bp, Homo sapiens
ggaaacggcgtaagtaatcctgtgaaatctccaattgtctgggaagttaccgattttattgctgtttttatgtctcttcaaatgtgatgattgtcactgtyctggattccatatgaagctcctgatgctgttctcacgtcagctttcttcctgtctcctgggtgctgttaaggtccccctaggagtttgcggtcccctgcg

SEQ ID NO: 274568 - DNA, 201 bp, Homo sapiens
attgcatcatatagttcaagtttacctttattaaataactaaaatgccacatttccgctttcccttttatctgcttctctccctctccccacttcttcatygtgagcgcctatgaagtgctctgtagtgaggagatgcgggaagggctctgaaaggcgcgtttgctatcagcatgggaagcaggaggccccgtggcctcat

SEQ ID NO: 274569 - DNA, 201 bp, Homo sapiens
ttaatccactgccatgaataatgcctttgtgttctgtatgaagcccaggagatcttatcaatcgtgcagaggtagccagtcacgtcactttatttgccacsgtgcatgctttgcagagtcctcttctgggatgccttcctcatggttactgcgaaggctttgatggggaagggggctaagagttaaccttgaggcggggcg

SEQ ID NO: 274570 - DNA, 201 bp, Homo sapiens
gtggttttacataaatccagaaccttgctgtggccctgtgggtctcttctaagcttctgaaccttttttctgccctggaccccttgggcagcctaggagascctggggaccccttctcaggggtccttcaaggttatacacaatataaccttgtgttatattgaccccttgaaggggtccttcaaggttatgcacaataac

SEQ ID NO: 274571 - DNA, 201 bp, Homo sapiens
gtagaggctgcagtgagccatgatcgtgccactgcactccagcctgggcaatacagcgagaccctgtctcaaacaaacaaacaaacaaacaaacaaacaaacgtgcaaactgtagctgagaggggactgctgtaggtgcggctatatcagtgtttttaagcataaggccactgatccaggccagaacccagggtgggattt

SEQ ID NO: 274572 - DNA, 201 bp, Homo sapiens
agtagaggctgcagtgagccatgatcgtgccactgcactccagcctgggcaatacagcgagaccctgtctcaaacaaacaaacaaacaaacaaacaaacaaacgtgcaaactgtagctgagaggggactgctgtaggtgcggctatatcagtgtttttaagcataaggccactgatccaggccagaacccagggtgggatt

SEQ ID NO: 274573 - DNA, 201 bp, Homo sapiens
gagtagaggctgcagtgagccatgatcgtgccactgcactccagcctgggcaatacagcgagaccctgtctcaaacaaacaaacaaacaaacaaacaaacaaacgtgcaaactgtagctgagaggggactgctgtaggtgcggctatatcagtgtttttaagcataaggccactgatccaggccagaacccagggtgggat

SEQ ID NO: 274574 - DNA, 201 bp, Homo sapiens
ctggcaacccatgccactgtcgctgttaacagaggaagttggggtttatttgttcactgcggttttcttttgttgtttgtttgtttgtttgttttagacagggtctcactctgccacccaggctagagtgcagtggtgtgatctcggctcactgcagcttcagcctcctgggctcaggggatcctcctacttcagcctcct

SEQ ID NO: 274575 - DNA, 201 bp, Homo sapiens
cctggcaacccatgccactgtcgctgttaacagaggaagttggggtttatttgttcactgcggttttcttttgttgtttgtttgtttgtttgttttagacagggtctcactctgccacccaggctagagtgcagtggtgtgatctcggctcactgcagcttcagcctcctgggctcaggggatcctcctacttcagcctcc

SEQ ID NO: 274576 - DNA, 201 bp, Homo sapiens
caggtgtgaaccactgtacccagcttttttttttttttttttctttttgagacagggtcttgttccattgcccaggctggagtatagtggcaccatcacgkctcactgcagcctcgacttcctaggctcaagtgattttcccacctgagcatcctgagtagctggaactataggtgtacaccaccatggctgactaatttt

SEQ ID NO: 274577 - DNA, 201 bp, Homo sapiens
gcctggcaacccatgccactgtcgctgttaacagaggaagttggggtttatttgttcactgcggttttcttttgttgtttgtttgtttgtttgttttagacagggtctcactctgccacccaggctagagtgcagtggtgtgatctcggctcactgcagcttcagcctcctgggctcaggggatcctcctacttcagcctc

SEQ ID NO: 274578 - DNA, 201 bp, Homo sapiens
agcctggcaacccatgccactgtcgctgttaacagaggaagttggggtttatttgttcactgcggttttcttttgttgtttgtttgtttgtttgttttagacagggtctcactctgccacccaggctagagtgcagtggtgtgatctcggctcactgcagcttcagcctcctgggctcaggggatcctcctacttcagcct

SEQ ID NO: 274579 - DNA, 201 bp, Homo sapiens
ttcaggcaattctcctgcctcagcttcccaagtagctgggattacaggcatgcaccaacatgcccagctaatttttgtatttttagtaaagacagggtttygccatgttggccaggctggtctcgaacccctgacctcaagtgatccacccacctgggcctcccaaagtgctgggattacaggcatgagccaccgcaccaa

SEQ ID NO: 274580 - DNA, 201 bp, Homo sapiens
tgcagtggtgcaatctcagctcactgaaacctctgcctcccagttcaggcaattctcctgcctcagcttcccaagtagctgggattacaggcatgcaccamcatgcccagctaatttttgtatttttagtaaagacagggtttcgccatgttggccaggctggtctcgaacccctgacctcaagtgatccacccacctggg

SEQ ID NO: 274581 - DNA, 201 bp, Homo sapiens
ttggggtgaggaggagagtgcccgtgagtgttttaagagctcagttcctgcaagtgctctccctctgactttcccggctgtacctggggcaggctgctggrccctgcagcacgtggtgtctgtggcgtcaccggtggtgttggtggcaccgtgtggcctcacgcacagcctcccttgtctgggtctgtctccacagcaact

SEQ ID NO: 274582 - DNA, 201 bp, Homo sapiens
ggctctttttttccgagacaaacttcattctggaaaggctgtcacaccgggcgcggtgactcacacctgtaatcccagtactttgggaggatgaggtgggyggattgcctgagctcaggagttcgaaaccaccctgggcaacatgttgaaaccccgtctctactaaaaataacaaaaaatattagccgggtgcggtggcta

SEQ ID NO: 274583 - DNA, 201 bp, Homo sapiens
tctttttccagaagacacaaattagccctggttggtttcgaggccacccgagcagatcgggctgaagggacctctgggaagagagcaaacaggcccgcccygggcgcctgggtctgccagctactttcggcgtgattggttttggggtgaggaggagagtgcccgtgagtgttttaagagctcagttcctgcaagtgctct

SEQ ID NO: 274584 - DNA, 201 bp, Homo sapiens
tgatccccagagcgtgcaggtgctttccgctgatccccagaggagacactggccagggctctttttttccgagacaaacttcattctggaaaggctgtcasaccgggcgcggtgactcacacctgtaatcccagtactttgggaggatgaggtgggcggattgcctgagctcaggagttcgaaaccaccctgggcaacatg

SEQ ID NO: 274585 - DNA, 201 bp, Homo sapiens
gccactgcacctggccaaattagtgcttttcaaatattagggacacctttaggttatatatattggtgttttaatcatttgaagcatgcttaaatagttttcatttaaaaaatattttgcagttcccaaaacaaccaaaactaaaacaaaccacaaaatagctgcatttctggccaggcacagtggcacacacctataatc

SEQ ID NO: 274586 - DNA, 201 bp, Homo sapiens
ttggaccggtgagtgcggcggggctgggcgaggcgcagtggggcgtggtgatgggatgggtaatggggtgtgatgggcccatctccgtgctgggtgccccygttaccttgcggttctaccgccgtaaaggaattactgctgatcattgctatggatgtccttggcagtcttgcacttattttttatttttttgagacaagg

SEQ ID NO: 274587 - DNA, 201 bp, Homo sapiens
aagaccccgtctcaaaaaaatgttgacaatgaagtccacttctccttgccaatcttacccaatccttccttacgttttagacatatcagcatgccctgccrtgcactgaagtacttctctttccccaggacatgggcaagttttgcctcacatacgaggcctccatgacccggctcttccgagaggggaggacggagaccg

SEQ ID NO: 274588 - DNA, 201 bp, Homo sapiens
aaaataaaaatacagcataacaactgtttacatagcatttataaggtattcattattgtaagtaatctagagatgacttaaagtatacaggagggttgggygcggtggctcacacctgttaatcccagcactttgggaggccgaggtgggtggatcacctaaagtcaggagtttgagaccagcctggccaacgtggggaaa

SEQ ID NO: 274589 - DNA, 201 bp, Homo sapiens
agaacggcatcatcactggcgtgtacccggcaagcccctccagttggcttatcgtggtggtgggcgtgatgacaacgatgtacgccaagatcgacccctcrttaggaataattgcaaaaatcaatcggactctggaaacggcgtaagtaatcctgtgaaatctccaattgtctgggaagttaccgattttattgctgtttt

SEQ ID NO: 274590 - DNA, 201 bp, Homo sapiens
ggtgctcaattcagcttctttcctctgcccctttcaagggtacagaaggtattaaaatattaaaaggtaaaggtagggacaaggacagagacgcatgttayaaatgatacttctccaaatcatattctacttcctgagagtctttaaattaggccaggacacacaatgaggaaaggcatagcaggtggctgctttggaact

SEQ ID NO: 274591 - DNA, 201 bp, Homo sapiens
agcaatgcactaccatgcctgggtaatttctttgatttttaatagagatgaggtcttgccatgttccccaggctggtctcgaactcctgagccaaagcaaycctcctgtcttggccttgcgaagtgctgggattacaggggtgagccactgcacctggcccaatttttatttttttttttatttttgtttattatacagag

SEQ ID NO: 274592 - DNA, 201 bp, Homo sapiens
tcacttgaacccaggaggcagaggttgctgtgagccgagatcatgtcattgcactccagcctgggtgatggagcaaaacttcgtctcaaaaaaaaaaaaaaggaatgtgctgtaacttcattattaaaagcacaaaaaggaatctttatgtcttacctacctaccttcccacacacctatctattagtatctccatacgtg

SEQ ID NO: 274593 - DNA, 201 bp, Homo sapiens
gggacacgcggcccggggaccttcacatcagcaggttctggggactggagtgaacacccctagtccatccctgcttcttcccaggcagggcaggtgccggygttctcagtaagagaaaccctggggaggatgcgggcacgtggacaggtggtgagattcattgtcagctggtgaagttttggctgggtgaagacgtgcttg

SEQ ID NO: 274594 - DNA, 201 bp, Homo sapiens
tgcgtgggccaggagtgtggcctcctgcctgaagaggaagcacctggaagaggctggctgggtgaggtggggggcaggcactggagggaggcgggcactcrgggaggcgggcactggggggaggccctgcttttcctttctcatcctttttacaccagggtcataaaaatcctgttgggttgggcaagcaggtggtgactg

SEQ ID NO: 274595 - DNA, 201 bp, Homo sapiens
ggggtttcaccgtgttagcgacgatggtctctacctcctgacctcatgatctgcccccctcggcctcccaaagtgctgggattacaggcgtgagccaccgygcctgacctttttttttttgagacggagtctcactctctcacctaggagtgcagtggcctggtctcggctcactgcaacctctgcctcccgggttcaagc

SEQ ID NO: 274596 - DNA, 201 bp, Homo sapiens
tagagatgaggttttgccacgttggccaggctggtcttgaactcctgacctcaggtgatccacacgcctcagcctcccaaagtgctgggattataggcatragccaccgtgcccagcccagaattccttttataacctgacgacccattatattgaccccataaatgtgaatagtccattatgataaacttcagtacagga

SEQ ID NO: 274597 - DNA, 201 bp, Homo sapiens
gccaccgcgcctggcctaaatttttttaattaaaaaattgtttgtacagacagggtctccccacatttcccaggcaagtcttgaactcctgggctcacgcratcctcttacctcagcctcccagtgttgggattacaggcttcagccactgtgcccagccataagtgaatttcaaaattctctttacctagttttaaacaa

SEQ ID NO: 274598 - DNA, 201 bp, Homo sapiens
gaacttcctgccttcgcctgccaaagtattgggattacaggcatgagccaccatacccagtccagaattccttttattttattatttttattttttgagaygaagtctccctctgtcacccaggctggggtgcagtggcatgatctcggctcactgcaacctctgcctcccgggttcaagcgattctcctgcctcagcctc

SEQ ID NO: 274599 - DNA, 201 bp, Homo sapiens
gaatctcccccatctcaggtgatcctcccacctccacctcctgagtagctgggactacagatgcatgccaccatgcccagctaatttgtgtgtgtgtgtgkatttttttgtagagacagggtttcaccatgttgtccgggctggtctcgaacccctgggctcaagtgacccgcctgcctcagcctcccaaaatgctgggat

SEQ ID NO: 274600 - DNA, 201 bp, Homo sapiens
gtggagactgcagtgagctatgattgcaccactgcgctccagcctcggtgacagccagaccctgtctctggttttttttttttttttttttttttttttttaaaaggtgcagatacagagtagagtccttctcacttggttcccctctccagatgccaccactattaccagtttctttgacgacatgtacaggatatgttt

SEQ ID NO: 274601 - DNA, 201 bp, Homo sapiens
aaaaaacaaagtaccagagcagtttattggccaaggatttgggggatattgagcaaagttgttaaaatgaagttaatcgtaagcaaaattgaagatgtgtyatcaccttcccccccacgattgttgatgtagcattcagcgttggagaactgtccatagtcttcaggattcaattcggatgacacaaggattcatgtcctt

SEQ ID NO: 274602 - DNA, 201 bp, Homo sapiens
tatattacagaggcaagtcccatatctccattttccttgggcgtgttttgaaacctggcaatgcacggtgcatcaagctgacctttcacctgctttcctcrgccacctgcctgtctcagctctgcaggactgggggtgcaggagtggggaggtttgctcaaagggcatagggacctgtgttgagtgtcttcttgattacgt

SEQ ID NO: 274603 - DNA, 201 bp, Homo sapiens
tccggcttccccttccccaggctgagcaggccctgtgctcagcccagccttgcctctggcaccctcttctgggttcatttgacagtatcagcctgccacakggtgtcctttgcagatgggtgggtctgccaccctggggccaccagggcctgtgccagggtgcacactaatgtgcagggatgtgtctggtcaggaatcatt

SEQ ID NO: 274604 - DNA, 201 bp, Homo sapiens
gaaggctgaggcaggagaatcacttgaacccaggaggcagaggttgctgtgagccgagatcatgtcattgcactccagcctgggtgatggagcaaaacttygtctcaaaaaaaaaaaaaaggaatgtgctgtaacttcattattaaaagcacaaaaaggaatctttatgtcttacctacctaccttcccacacacctatct

SEQ ID NO: 274605 - DNA, 201 bp, Homo sapiens
tgtaggtgggcgtggggcagcttggaactcaatgtggacgagaagcaagttgcaggaccgcgcacagagtaggcagcatttgtgtgtgcctcgcacgtgtrtggtggcactgtatgcacttgtagatactcaaatacgtagggaaagatgagccccgcattctggggacagggagaggaggttgtatctattgcatcttag

SEQ ID NO: 274606 - DNA, 201 bp, Homo sapiens
ccaagatcacaccactgcactccagcctgggcgacagagtgagactgtctccaaaaaaaaaaaaaggtagcccctcccgcattgttctgttccctagttcyctgttcctgtgttatttctattcagtggcctgacttgatgtgatagaatttttttgttcatccctgtctcctgctagaatgtttgctcattgagggcaaa

SEQ ID NO: 274607 - DNA, 201 bp, Homo sapiens
ccttaatccgccctggactggattgagtctgagggtctgcccaggggtcggtcagcctgcgggtggccgcgggagggatgctggacgctctggatgctttycaggatgccttcgcccggggccagtagggcctccggctcctgtccctgcccatcccaccctggctctggagaggattgggtctgggggtccgcccgtggg

SEQ ID NO: 274608 - DNA, 201 bp, Homo sapiens
aacagagaagttccctgagccccagcagggacacaagagcagactggttcctgccagcaggggggtgcaggacagcagggccagggctgtgtaggtgggcrtggggcagcttggaactcaatgtggacgagaagcaagttgcaggaccgcgcacagagtaggcagcatttgtgtgtgcctcgcacgtgtgtggtggcactg

SEQ ID NO: 274609 - DNA, 201 bp, Homo sapiens
agtttttgctccgttgcccaggctggagtgcgatggtgcgatctcggctcactgcaacctccgcctcccgggttcaagcaattctcctgcctcagcctccygagtagctgggattacaggtgtccgccaccatgcctggctaatttttgtatgttttgtagagatgaggtttcaccatgttggccaggctgatctcgaact

SEQ ID NO: 274610 - DNA, 201 bp, Homo sapiens
ggtccccccaccccctgccccagaagcttctgtgagacaaatgcgagtgaacaccgctgctttaccaccatttgaacgtccagacagtggaacgcagggcractcagcttcctcgtgcagccgtgacccttgggcttggacacacattttactttcgggtctgaaagctccacagtgtctcggaagtgtccctgctgcccc

SEQ ID NO: 274611 - DNA, 201 bp, Homo sapiens
agtgaacagagaagttccctgagccccagcagggacacaagagcagactggttcctgccagcaggggggtgcaggacagcagggccagggctgtgtaggtkggcgtggggcagcttggaactcaatgtggacgagaagcaagttgcaggaccgcgcacagagtaggcagcatttgtgtgtgcctcgcacgtgtgtggtggc

SEQ ID NO: 274612 - DNA, 201 bp, Homo sapiens
tggtcaccagctccatttctatctactgagagactgcctttccctggcaccggctgtgacctattattattttagagagacagttcacaaccacctgaccrtcactgatggtcgcgtgatattcccagtgtgtgtcggaggaagccctctcctggcctgctcatgtcagacccgctacctgctataacattgcagctgctc

SEQ ID NO: 274613 - DNA, 201 bp, Homo sapiens
cagttatcaataatcaattagaatgtgttatttaggatttaactgtgcaggaagttgcaccctggcatggtttaatgagtcccccaacgaatcattccagkgagccactggaaaagaggaagtcaaacgaagcaattcgcacagaaaacacattcagcatttccatgtggtcttaacttgcttgctgcttgctgcttttgt

SEQ ID NO: 274614 - DNA, 201 bp, Homo sapiens
atcttcactgcagagttccctgggccaggtgtcgtcaggcctattttggacgtgggaaaaataagcagtctcttgatgctgtggagaaagcagcgttcttygtgacgttagatgaaactgaagaaggatacagaagtgaagacccggatacgtcaatggacagctacgccaaatctctactacacggccgatgttacgaca

SEQ ID NO: 274615 - DNA, 201 bp, Homo sapiens
ccagtaggcaaacaaattgctttaaaaaaattattttcaaacagctttacagaggtataattgacatattgcacatgtttaaaatatacagtttgtggccrggcacagggtctcacgcctgtaatcttggcactttgggaggccaaagcaggcggatcatctgaggttagcagttcaagaccagcctggccaacatagtga

SEQ ID NO: 274616 - DNA, 201 bp, Homo sapiens
cccaatccttccttacgttttagacatatcagcatgccctgccgtgcactgaagtacttctctttccccaggacatgggcaagttttgcctcacatacgargcctccatgacccggctcttccgagaggggaggacggagaccgtgcgctcctgcaccactgagtcatgcgacttcgtgcgggccatggtggacccggccc

SEQ ID NO: 274617 - DNA, 201 bp, Homo sapiens
tttggtaaaaagaatgttctgggtcgggcacagtggctcatgcctgtaatcccagcactttaggaggccaaggcagacggatcgcttggggtcaggagttygagaccagcctggtcaacatggtaaaaacccatctctactaaaaatacaaaattagccaggcgtggtggtgcgtgcctgtaattccagctcctgggaagg

SEQ ID NO: 274618 - DNA, 201 bp, Homo sapiens
gggtgggcagtggcagagggccctggaggagctggagtgagagggacccgggagcactcgaggaagcccagctggtgggtcttccaagaaggaagtgggcrtcacaccagttctgtgtattcaaataagacgggcacggagacctccttgtggaggggtcacatgggcatctgtggaatgcacctgggggctgatggcctg

SEQ ID NO: 274619 - DNA, 201 bp, Homo sapiens
attcgccctgcgggccgccatagccaagcactcctagagagaagaaggtggggagagagccagatggccccgatctggaagggtgggcagtggcagagggycctggaggagctggagtgagagggacccgggagcactcgaggaagcccagctggtgggtcttccaagaaggaagtgggcatcacaccagttctgtgtatt

SEQ ID NO: 274620 - DNA, 201 bp, Homo sapiens
ggcggagcttccagtgagccgagatcgcaccactgcactccagcctgggtgacagagcgagactccctctcaaaaaaaaaaaaaaaaaaaaaaaaaaaagwctggaaactagaaagtgtctgagacaggtctcaatttatttagaagttgattttgccaaggttaaagatgcgtgcctgggagacaggcctgtgccttcct

SEQ ID NO: 274621 - DNA, 201 bp, Homo sapiens
ccccagaacccacgtggcccaggtgtgggaatgagctgcaaggggcaccagccactgtgccatgtacttggcaggagcgagcgaaacttcaggacggcccygaggaaggcatctcttcatctctgccctccacactcggaggtgaagcatcttgcctgagggctccagctcgtacgcagcaggactgagatcggaagcagg

SEQ ID NO: 274622 - DNA, 201 bp, Homo sapiens
gccacgctccagtttagtacattttgaaacatgctgaaatgactattctgcaagcagtacaaattggtgacgttgactcaaggtagaaaacctgaaaaggyctctggtccagggaccaaagtgagaggttgtcagggagccacccttgtgactccaaagagcttgcagctcagagactccacaaaggaagccaccccatct

SEQ ID NO: 274623 - DNA, 201 bp, Homo sapiens
ttgtttataaaacattcacacattagaaactctctgcataaggtccgggtgcagtggctcacacctgtaatcccagcactttgggaggccgaggcgggtgratcacgaggtcaggagatcgagaccatcctggctaacatggtgaaacccccgtctctactaaaaaatacaaaaaattagccgggcgtggtggcgggcgcc

SEQ ID NO: 274624 - DNA, 201 bp, Homo sapiens
catcagattcaaggttttctgagatttgttgaaatctacacagtatgccttttaatatctaagaacggggctctggctgctattgaggtctacgtgtttcrgactggcgactgcatatcacttacctgtttccatggtacttaaggcttggggacaccgtcacatagactttagctcactggatgcttggagcagttccat

SEQ ID NO: 274625 - DNA, 201 bp, Homo sapiens
ttttggttaaaaggaattgattatggagaaagggaacaaagtgaacactttcaaaaaacaaagtaccagagcagtttattggccaaggatttgggggataktgagcaaagttgttaaaatgaagttaatcgtaagcaaaattgaagatgtgttatcaccttcccccccacgattgttgatgtagcattcagcgttggagaa

SEQ ID NO: 274626 - DNA, 201 bp, Homo sapiens
cagccacctgcctgtctcagctctgcaggactgggggtgcaggagtggggaggtttgctcaaagggcatagggacctgtgttgagtgtcttcttgattacrtggccagtgttaggattcataggccaatgacttcgaaagaggtgaaaggttttggttaaaaggaattgattatggagaaagggaacaaagtgaacacttt

SEQ ID NO: 274627 - DNA, 201 bp, Homo sapiens
cacctgcggaacaccaggttagtgccacggactgggacggtggcttcttcaggcagacctgggaagcagtctgtggagcaattttgcataacattggtttyttctttgttttcttttattttctttagtttctgagacaaagtctcgctcgtcacccaggctggagtgcagtggagcgatctcggctcactgcaagctccg

SEQ ID NO: 274628 - DNA, 201 bp, Homo sapiens
cagcctaaaaccttttcaatgtgttagaacttttcctaaggcacaagtgaggcaaacataggctttgattaatatgttttaacttgggtgatttttttttyccccaataatcccagtatctacagtcggtgaggcctcttatgaaggaagaagacttcaaacggatgacagcacttgctcaagattttgctgtcggtcttg

SEQ ID NO: 274629 - DNA, 201 bp, Homo sapiens
tttacctgtctaaggactgccaagaccaacttgggggaagagtctaaactttttcttttttttttttgagatagggtctcactctgttgcccaggctgggktgcagtggcatgatcatggctcactgcagccgcaaccttctgggctcaagcgatcctcccaacctcagccccccaggtagctgggaccacagacatgcac

SEQ ID NO: 274630 - DNA, 201 bp, Homo sapiens
cctaatttttgtatttttggtagaggcggggtttccccttgttggccagcttggtctcgaactcctgacctaaagtgatctacccgccttggcctcccaamgtgctaggattacagtcgtgagtcacagagcccagcctaattctgtactatttttatcacctccaaaagaaatccctcattcctttctcccccaggttcc

SEQ ID NO: 274631 - DNA, 201 bp, Homo sapiens
cgcgtgatattcccagtgtgtgtcggaggaagccctctcctggcctgctcatgtcagacccgctacctgctataacattgcagctgctcctccggggtcarggagccatgcccctaacttactagggcttctgggtcaggaaaacgtttgtgtacttcccagtaccgagtttatagctgcactaaaaaccagcctccaatt

SEQ ID NO: 274632 - DNA, 201 bp, Homo sapiens
ggcatggttccgggggacgtccagggccagggttggggtaccacgggcctggatgctggcttggaggcgtggttctgggggacgtccagggccagagttgrggtaccacgggcctggatgctggcttggaggcgtggttccagggaatgtccagggccagggttggggtaccacgggcctgactcctgatgatcatcttgg

SEQ ID NO: 274633 - DNA, 201 bp, Homo sapiens
gttttaataattttgttctatttttgacagtacgtcatgtccattgacagcctccagctgggctatgcggaggatgggcactgcaaaggcgacatcaatcygaacattccgtaccccaccaggctgcagtgggacatcccgggggaagtaagtccggattatccaaccattgttacttacctgggatgggaaacacatttg

SEQ ID NO: 274634 - DNA, 201 bp, Homo sapiens
ttgcttatctttccctatgcaaattctctccacctttgtcgcttttcaggatctgctgtatatccttccaactcacattcaggcagcaagagccggcaacrccatccatgccatcctgctttacaggcgcaaactggaccgggaggaaatcaaaccagtaggcaaacaaattgctttaaaaaaattattttcaaacagctt

SEQ ID NO: 274635 - DNA, 201 bp, Homo sapiens
cagggtgagaagagtggtagtggccctggggcaccccttggaaggtgtcagggcccgagggtttggtcaataatgacagtgcccttagcctggccaatagsgctctgaaatggaatttctgctcaaagggctgattccccatgtagtcatttctttgcacttggagtctgttcattccagagttctgtgacccttgaactg

SEQ ID NO: 274636 - DNA, 201 bp, Homo sapiens
ccccctaggagtttgcggtcccctgcggcctttcctctgtagaccagggtgagaagagtggtagtggccctggggcaccccttggaaggtgtcagggcccragggtttggtcaataatgacagtgcccttagcctggccaatagggctctgaaatggaatttctgctcaaagggctgattccccatgtagtcatttctttg

SEQ ID NO: 274637 - DNA, 201 bp, Homo sapiens
gaggagcagcctgcacccctagcagggacataaatgggtcttcttgtccattggagggagcattccatcccagacagggggcccttggtttctgggggcarcacaagtcatcgtggcattggcttgagatattcccaactttttttttgagacagaatctcactcttgttacccaggctggagtgtaatggcatgatctcg

SEQ ID NO: 274638 - DNA, 201 bp, Homo sapiens
cttggaggtgccatgggctggatcccctgtatacacatggcatttccatctcccttttctgagcactggccatattttggcttgcacctggccaacccctkttggaggagcagcctgcacccctagcagggacataaatgggtcttcttgtccattggagggagcattccatcccagacagggggcccttggtttctgggg

SEQ ID NO: 274639 - DNA, 201 bp, Homo sapiens
gtggtcttgaactggtcaagattgcttgggctcaagcactcttcatacctcagcctctcaaagtgctgggattacaggtgtgagctaccacacctgaccastgttactttctgtaagagcttgcttaggtgtgtagcagaagcttttgagtgtctttttaaacaattgctctctgtgtttccacctctgagcatttgttca

SEQ ID NO: 274640 - DNA, 201 bp, Homo sapiens
gtggtgtctgtggcgtcaccggtggtgttggtggcaccgtgtggcctcacgcacagcctcccttgtctgggtctgtctccacagcaactgcatgtccagcyagacgaagaacgtggtcagcggcgtgctgtttggcaccggcctgtgggtggccctcatcgtcaccatgcgctactccctgaaagtgctgctctcctacca

SEQ ID NO: 274641 - DNA, 201 bp, Homo sapiens
gagtaaatcttcctttcaccatactaaattaaattttggtattttcatacagtggaatattatatagctattaagtgatgtctttgggcaaattacttaaygtctctggcctttgacatctccttccataaaaggagaaactccagccacttggaggtgccatgggctggatcccctgtatacacatggcatttccatctc

SEQ ID NO: 274642 - DNA, 201 bp, Homo sapiens
ggcgcctcggtcccgatgccccctctggatagggccagatcagcatcttacccatgggagtcattcacaggaagggctccgtacgtgccggccaccgtcascgtcacctttgttccccgagcggggtgcactgaggcctagcgtgtttctaggcttattcgccctgcgggccgccatagccaagcactcctagagagaaga

SEQ ID NO: 274643 - DNA, 201 bp, Homo sapiens
ggtctgtctccacagcaactgcatgtccagccagacgaagaacgtggtcagcggcgtgctgtttggcaccggcctgtgggtggccctcatcgtcaccatgygctactccctgaaagtgctgctctcctaccacgggtggatgttcactgagcacggcaagatgagtcgtgccaccaagatctggatggtaattgcgtgtcc

SEQ ID NO: 274644 - DNA, 201 bp, Homo sapiens
gacaaggctggaaagagcggcggcaggagatgcatctcgggtgaagatgcgctcatccgatgccctcctctcagagcctggaatccccagcggaggagacrtggggagcctgagccggcgccgcggggcctgggctccctgtgggtctgtaggcgcctcggtcccgatgccccctctggatagggccagatcagcatctta

SEQ ID NO: 274645 - DNA, 201 bp, Homo sapiens
tgctttccgctgatccccagaggagacactggccagggctctttttttccgagacaaacttcattctggaaaggctgtcacaccgggcgcggtgactcacrcctgtaatcccagtactttgggaggatgaggtgggcggattgcctgagctcaggagttcgaaaccaccctgggcaacatgttgaaaccccgtctctacta

SEQ ID NO: 274646 - DNA, 201 bp, Homo sapiens
cttctggttgggcagggaggaggggccctggacacagggatgcttttcggtggcccaagtagtgagggcctgaaagagggccaggcctgggagcaggagcrggatggaggaggatgtgtgcgggcaagccggcgttgttcggtatctgctgtggtgttgacaaggctggaaagagcggcggcaggagatgcatctcgggtg

SEQ ID NO: 274647 - DNA, 201 bp, Homo sapiens
tagaggctgcagtgagccatgatcgtgccactgcactccagcctgggcaatacagcgagaccctgtctcaaacaaacaaacaaacaaacaaacaaacaaacgtgcaaactgtagctgagaggggactgctgtaggtgcggctatatcagtgtttttaagcataaggccactgatccaggccagaacccagggtgggatttg

SEQ ID NO: 274648 - DNA, 201 bp, Homo sapiens
gtgacccccgctcccaagggaatcttgagtgtcgtgtcatgccaccagggttggtggcatctgtgggttggggaagagagctccccaaggcggccagctaygttggggggatcctgggggctcagccaggtcctcactgcaagtgctgcttagcgctggtgtccagcgtgctcccacggtctctagacgcttccctctgca

SEQ ID NO: 274649 - DNA, 201 bp, Homo sapiens
tagaatgtttgctcattgagggcaaaggcatgatctgtcttacaacagtattgcctgtgccgggagcatcagtaaatcagtattgaatattgaatatggaktgaatgctgacactagacagtggtattaattctagtctgcagcagttatttgcctcctgctttggaagccctaccaacctgaatcattagccccatagta

SEQ ID NO: 274650 - DNA, 201 bp, Homo sapiens
tcacagaggaaaaagagaacaagccaaccagttgaaggattttaagtgttctgaggcaactaagaggatcattgggagggggtggtagctggcagggaggktgacccacttagagtgggttgagctgagacctgagagactcgacggagccagcccggccagtgcagcagggcagcaagcatctaggagcagcaggtgcag

SEQ ID NO: 274651 - DNA, 201 bp, Homo sapiens
ctcaagtgatctacctgcttcggtctttttttttctttaattgaacaaaaggagagggagcagctccatttctttgtttttaaaaaaattatggtaaaatrtacacaacatgaattgtactgttaaccattttcaagtgtacagttcaggggcactaagtacatttataatgttgcgcagccctcactgctgtctcgttcc

SEQ ID NO: 274652 - DNA, 201 bp, Homo sapiens
ctgccacctcccaccggctgcctctgccttcctctccaaactaggccccctgtccttgaacccagacaccctgtcgaccccagccacctgcgcttgacccyagacaccctacccttgaccccagctaccctgcctttgaccccagacacctgcttttgacccgacaccctgcccttgaccccgctggcctgctcttgacct

SEQ ID NO: 274653 - DNA, 201 bp, Homo sapiens
gcatttgctaaagtggaaatagtgtgggcaggtaggggaatagtcagttacgtattcgtctggcgctcggtaaatctgcacttcacacaggtcaggtgaayatggtccacgtttcatctgtcgctctctgcttgggaacaaaataaaaagcttcttgcatgacttagctttcagcttaatcctttccttttggcagagtaa

SEQ ID NO: 274654 - DNA, 201 bp, Homo sapiens
gcacaaaaccctgccacctcccaccggctgcctctgccttcctctccaaactaggccccctgtccttgaacccagacaccctgtcgaccccagccacctgygcttgaccctagacaccctacccttgaccccagctaccctgcctttgaccccagacacctgcttttgacccgacaccctgcccttgaccccgctggcctg

SEQ ID NO: 274655 - DNA, 201 bp, Homo sapiens
cgggcgcggtgactcacacctgtaatcccagtactttgggaggatgaggtgggcggattgcctgagctcaggagttcgaaaccaccctgggcaacatgttraaaccccgtctctactaaaaataacaaaaaatattagccgggtgcggtggctaacttagatccgtaactgctcaacttgagacatgcaacatatgtcctt

SEQ ID NO: 274656 - DNA, 201 bp, Homo sapiens
ccaaagtgctgggattacaggtatgagccatcatgcctggcccatacatattgtcgattgctttgcaaattgctctaagctgaagttatagctggtggaakgtagttttgccaaattactctttccgagtcattgaggcagagctggcaggttctgtgctgatacctcccgggtgtgtcgtcttgcccagctcctcccttg

SEQ ID NO: 274657 - DNA, 201 bp, Homo sapiens
gctcaggcaatccacccgcgtcgggttcccaaagtgctgagattacagacatgaaccattgcgcctggcaaatttaatttttaatagtggctgtatttaayagccagcttgaaaattctctgaaaatatggcagctggctcgtgggagttggtacaagtctgacacctctgtccccgttccgaatcttactccatatatct

SEQ ID NO: 274658 - DNA, 201 bp, Homo sapiens
cccctgggctgctgctgtccttccagagccttcctggtacttcccttgaagttctttgggcagcagtgaggaggccaggccagatttttgccaccttggamatcatgcatgttgtgaaggtggtttccccgagctggagccagtcccggaggctggcactagctttctagcgaagcagaatcttcccaggcattggtcacc

SEQ ID NO: 274659 - DNA, 201 bp, Homo sapiens
cttgcaaatcagggctgatgacggcccctgttccactggcaggatggggtgagcaagagatgcttgaccttcagtgacctctgtctgtgttgcgtagctcrgggttccacttcagctcattcagggcatgattttctgtctcattcacgggcattttactttgaataagcctcaagatgcttgacacctgccccctccccc

SEQ ID NO: 274660 - DNA, 201 bp, Homo sapiens
caccatccagcacatgagagacagcaagcacatcgtcgtgtaccatcgaggacgctacttcaaggtctggctctaccatgatgggcggctgctgaagcccygggagatggagcagcagatgcagaggatcctggacaatacctcggagcctcagcccggggaggccaggctggcagccctcaccgcaggagacaggtgcgc

SEQ ID NO: 274661 - DNA, 201 bp, Homo sapiens
atcgtatttcatcttcactgcagagttccctgggccaggtgtcgtcaggcctattttggacgtgggaaaaataagcagtctcttgatgctgtggagaaagyagcgttcttcgtgacgttagatgaaactgaagaaggatacagaagtgaagacccggatacgtcaatggacagctacgccaaatctctactacacggccga

SEQ ID NO: 274662 - DNA, 201 bp, Homo sapiens
tactactggtctacaaaaccccatctctactaaaaatacaaaattagccaggtatggtggtgggcacccgtaatcccagctacttgggaggctaaggcagrcgaatcacttgaacatgggaggtggaggttgcagtgaactgagattgtgccactgcactccagcccgggcaacaagagtgaaacttcatctcaaaaaaac

SEQ ID NO: 274663 - DNA, 201 bp, Homo sapiens
aggtggtttgacaagtcgttcacgtttgttgtcttcaaaaacgggaagatgggcctcaacgctgaacactcctgggcagatgcgccgatcgtggcccaccyttgggaggtgagttttcacacttttcacttgaatgtggaagttgcttttgaaaatccaaacctggccaggcgcagtggcgcacacctgtaatcccagcac

SEQ ID NO: 274664 - DNA, 201 bp, Homo sapiens
ggtggccccgggccccttcttggggcagcacgcagatgctgttcctcccacagccgcgtgctgccttggactcagtctctgtccttatccaccatctgctrttcccagcaggggcccttgctgcactatcccgtcatctccaccaaggctcagcctcaggggcatcagcccctcctgccgtgctgtcctctctaggcccag

SEQ ID NO: 274665 - DNA, 201 bp, Homo sapiens
ccacgtactgggagggcaagagcaggcctccggcagacaaagcaagggagggagtctagctttgaggaacaactaacacggaagagaaggtgtccaaagcraccctgacagaaccagcaggtggcgctagacgtggcatggtgggtggatgggcagtgcctggaggggtctctctagcctcagggggccgggcatattcgc

SEQ ID NO: 274666 - DNA, 201 bp, Homo sapiens
gagccactgcgcctggccaaccttcagttttcttccctctgccaaaactatcacacatacacagcctgagctgcaaatctgagattcttccctcctctgtrcatgaccacctttgtttggagatgctcatgagatgcagggctgccaggtccctggactcaggcaggggagagtggcaaacagggctaggcacagggttag

SEQ ID NO: 274667 - DNA, 201 bp, Homo sapiens
actcctgggcacaggggatctgcctgcctgggcctcccaaagtgctgggattacagatgggagccaccacactcagccttttttttttttttttttttttttaataattcgttactctgaactgtttgacctgttccgtgtttggcatgagaaattaaatgaaagttttgtttccttaactcaccggtcaggttcttgttt

SEQ ID NO: 274668 - DNA, 201 bp, Homo sapiens
ttccagcttctgggggggtccaggtgctccttggcttgtaggcatatcactctgatctctgcctccatgtcaccttggctctcacctctgtgtgtgtgtgkctctcttacaaggacaacagtcattggatttggggtccaccctagtccagtatgacctcatcttaatattgaattatatcagcaaagaccctatttccag

SEQ ID NO: 274669 - DNA, 201 bp, Homo sapiens
ttgcccaggctggtcttgaactcctgggcacaggggatctgcctgcctgggcctcccaaagtgctgggattacagatgggagccaccacactcagcctttkttttttttttttttttttttaataattcgttactctgaactgtttgacctgttccgtgtttggcatgagaaattaaatgaaagttttgtttccttaactc

SEQ ID NO: 274670 - DNA, 201 bp, Homo sapiens
cagcctggccaacatggtgaaaccccgtctctactaaaaatacaaaaattagccgggcatggtggtgcatgcctgtagccccagctacttgggaggctgargcagaagaaatcgattgaacccgggagacagaggttgcagtgagccgagatcgtgccactgcactccggcctgggcgacagagcgagactctgtctcaaa

SEQ ID NO: 274671 - DNA, 201 bp, Homo sapiens
cactccacagagactgagtgtctgctcactgttagagggacaggtgcaaagtgaattagtccatccaggatgaagcagagaggtgcaatgtctcctcattkttgcctctttaaacacttaagttccacacatgtgtgtttcacgtaggtggtttgacaagtcgttcacgtttgttgtcttcaaaaacgggaagatgggcct

SEQ ID NO: 274672 - DNA, 201 bp, Homo sapiens
ctgtggtgttgacaaggctggaaagagcggcggcaggagatgcatctcgggtgaagatgcgctcatccgatgccctcctctcagagcctggaatccccagyggaggagacgtggggagcctgagccggcgccgcggggcctgggctccctgtgggtctgtaggcgcctcggtcccgatgccccctctggatagggccagat

SEQ ID NO: 274673 - DNA, 201 bp, Homo sapiens
ttttttttaatgataatattccattttgctaagcatgctttttttttttttttttcctgagatggagtatcactctgttacccaggctggagtgcagtggkgtgatctcggctcactgcaacctccacctcctggtttcaagcgattctcctgcctcagcctcccgagtagctgggactagaggtgcatgtcaccacacct

SEQ ID NO: 274674 - DNA, 201 bp, Homo sapiens
cgcagagcagggactcccatgccctttgcagagtcagggtacggtcgtctcagcacgtgctgaacttgggactcttggttttgtgtctccaacctgcggcyggctcagacaccatccagcacatgagagacagcaagcacatcgtcgtgtaccatcgaggacgctacttcaaggtctggctctaccatgatgggcggctgc

SEQ ID NO: 274675 - DNA, 201 bp, Homo sapiens
taggtgcatagacattaaatagataacacttcttcagacagtattttttggtaacagctttattgagagattcatataccataaaattcacccatctaaartgtacacttcggtgagtttgggttttttttgagacagggtcttgctctgttgcccaggctggaatgcagtggtgcagtcacggctcactgcagcttcgaa

SEQ ID NO: 274676 - DNA, 201 bp, Homo sapiens
aaaaaaaaaataaagaaaggtaaatgtatatgagcacgtgcaatgccattcgttggtgatcatcgggcaaagccccacccactttctcagacatccccacyggaggatcccatcagtcacaatcctcactaattagaccattcaaattccccaaaataaaaaaagggaaagaggtatagacttatcttaagggtcttaagt

SEQ ID NO: 274677 - DNA, 201 bp, Homo sapiens
tcgtctcttaattcttgcacagtgcatatggggaacatatgacctccattttactgaggagaggcttagggagggttgggtaatttgttttttttttttttaatgataatattccattttgctaagcatgctttttttttttttttttcctgagatggagtatcactctgttacccaggctggagtgcagtggtgtgatct

SEQ ID NO: 274678 - DNA, 201 bp, Homo sapiens
tgaacaaaaaatacccaccgctccccatgctgtggtctggagaccaggagcaggtgagagtccttccagcaaacagtctcagatggggaacatcatcaacrtggagttttccttcgagaaattctgaaaaactgcaaaggtttgattgtgtcatttcaaacatcacgctccatcgctgcaggtcgggctgcctttaatcgt

SEQ ID NO: 274679 - DNA, 201 bp, Homo sapiens
ttctcctgccttggcctcccgagtagctgggattacaggcatgcaccaccatgcccggctaattttgtattttttaggagagatggggtttctccatgtcrgtcaggctgttctcgaactcctgacctcagttgatcctcccgcctcggcctcccaaagtgctgggattacaggcgtgaaccaccgtgcccggccaatttc

SEQ ID NO: 274680 - DNA, 201 bp, Homo sapiens
ttgccctattgtcattaattaataaaaagttactatacggatcgaatgcctatttacatgggctttacggatatcgtctcttaattcttgcacagtgcatrtggggaacatatgacctccattttactgaggagaggcttagggagggttgggtaatttgttttttttttttttaatgataatattccattttgctaagca

SEQ ID NO: 274681 - DNA, 201 bp, Homo sapiens
attgaacaaaaaatacccaccgctccccatgctgtggtctggagaccaggagcaggtgagagtccttccagcaaacagtctcagatggggaacatcatcawcatggagttttccttcgagaaattctgaaaaactgcaaaggtttgattgtgtcatttcaaacatcacgctccatcgctgcaggtcgggctgcctttaatc

SEQ ID NO: 274682 - DNA, 201 bp, Homo sapiens
cttcaaatggccttaaagaggcccctcatctatctgaaattaacctgtatagatcaaaatgcccagctttttggttcttggctggcagtacacggtgtccyggcagccactgtgcttattgataagcatcttttaaaggaatgagcaaattttatgctggttgtaggctccaggtggcagttttgcatatttctgctgtat

SEQ ID NO: 274683 - DNA, 201 bp, Homo sapiens
ttgagataggatcttgctctgtcacccaggctggagtgcagtggtgcaatttcagttcactgcagcctctgctccccaggctcaagtgatcctcccatctcagctccagaataactgggactacaggtgcacaccaccacacccagctaatttttgtattttttgtagagatagggttttgccatgttgcccaggctgatc

SEQ ID NO: 274684 - DNA, 201 bp, Homo sapiens
ctcctctcagagcctggaatccccagcggaggagacgtggggagcctgagccggcgccgcggggcctgggctccctgtgggtctgtaggcgcctcggtccygatgccccctctggatagggccagatcagcatcttacccatgggagtcattcacaggaagggctccgtacgtgccggccaccgtcaccgtcacctttgtt

SEQ ID NO: 274685 - DNA, 201 bp, Homo sapiens
tgaggtaccacgggcctggatgctggcttggaggcgtggttccagggaatgtccagggccagggttggggtaccacgggcctgactcctgatgatcatctyggggctctaagcagaggtggcgactgtctttgtagcggtggacaggcaagggggtgccagctgtggtgatggaattggtctgttgatgaaaagtattaaa

SEQ ID NO: 274686 - DNA, 201 bp, Homo sapiens
ttagtccatccaggatgaagcagagaggtgcaatgtctcctcatttttgcctctttaaacacttaagttccacacatgtgtgtttcacgtaggtggtttgrcaagtcgttcacgtttgttgtcttcaaaaacgggaagatgggcctcaacgctgaacactcctgggcagatgcgccgatcgtggcccacctttgggaggtg

SEQ ID NO: 274687 - DNA, 201 bp, Homo sapiens
ccaggagcacagtgacaagctcctgtctgtgacagatcattgactaaagatcatgtgattaaaaggtgacatggaatagaggcatcgcatctcagaatcartgagctggattttgagaattgatgagcagattttgcccgtaaacgtgcagtatgagggcatgcaagcagttgataccttacctacagaaaggatgttatt

SEQ ID NO: 274688 - DNA, 201 bp, Homo sapiens
gttttatctgagccttggagattatcaacaagccagacccctcagcagcaagtggagctgtttgacttggagaataacccagagtacgtgtccagcggagrgggctttggaccggtgagtgcggcggggctgggcgaggcgcagtggggcgtggtgatgggatgggtaatggggtgtgatgggcccatctccgtgctgggt

SEQ ID NO: 274689 - DNA, 201 bp, Homo sapiens
aaataataatgaaaatccttcacctttcttgtacatgaaaccctccgaaaaacataaggtgagtcttacattctcacttctaaggtgcttccatcaggttkgggaaacaatttctttttttttttcttttttgagatggagtttcgctcttgttgcccaggctggagtgcggtggtgggaccttggctcactgcaacctcc

SEQ ID NO: 274690 - DNA, 201 bp, Homo sapiens
attttttatatttttttgtagagacaggcctcactatgttgcccaggctggtcttgaactcctggccttaagtgaccctttcaccttggccttgcaaagcrttgggattccaggcatgagccaccacgccgggcttcctggtttctttatacttcttcaaatacacacagtggctcaatgtgatgtccagtacagtttgca

SEQ ID NO: 274691 - DNA, 201 bp, Homo sapiens
attcagatatgtgttgaaggaatgacagaacatttgagacatcctttctttttttttctttagtgacaaggtcttgctctgttgtccaggctggagtgccrtggcgcaatcatagtgcactcttggcctcaagcgatcctcccacctcagcctcccaaagcactgggattacaggcataagccccctcgccctgcccgaag

SEQ ID NO: 274692 - DNA, 201 bp, Homo sapiens
cagacattcagatatgtgttgaaggaatgacagaacatttgagacatcctttctttttttttctttagtgacaaggtcttgctctgttgtccaggctggartgccgtggcgcaatcatagtgcactcttggcctcaagcgatcctcccacctcagcctcccaaagcactgggattacaggcataagccccctcgccctgcc

SEQ ID NO: 274693 - DNA, 201 bp, Homo sapiens
tttgagataggatcttgctctgtcacccaggctggagtgcagtggtgcaatttcagttcactgcagcctctgctccccaggctcaagtgatcctcccatctcagctccagaataactgggactacaggtgcacaccaccacacccagctaatttttgtattttttgtagagatagggttttgccatgttgcccaggctgat

SEQ ID NO: 274694 - DNA, 201 bp, Homo sapiens
gtttgagataggatcttgctctgtcacccaggctggagtgcagtggtgcaatttcagttcactgcagcctctgctccccaggctcaagtgatcctcccatctcagctccagaataactgggactacaggtgcacaccaccacacccagctaatttttgtattttttgtagagatagggttttgccatgttgcccaggctga

SEQ ID NO: 274695 - DNA, 201 bp, Homo sapiens
agtgacgctcagtgaattctgtgtatgtttctcccctgcatgcattggtcaaacagtctgtagagcaggcacctagaattggcttgccggctgccctggtkgacatttccagtcttactggcatggacaaattaccctcaaagtgattttaccaactttcacgtccccagcaatctataaaatacccttttcccttcattt

SEQ ID NO: 274696 - DNA, 201 bp, Homo sapiens
ctggagtgcagtggcgcgatctcggctcactgcaacctccacctcccgagttcacgccattctcctgcctcagcctcccgagtagctgggactataggtgyctgccaccacgcccggctaattttttatatttttagtagagacggagtttcaccgtgttagccaggatggtctcatctcctgacctcgtgatcgtcccac

SEQ ID NO: 274697 - DNA, 201 bp, Homo sapiens
cccaagaccatcatggcaggcctgtatgacgggcgggcctcggggctgcttgggaagctggctggaaagggccagagctgacctgcaattttatttatttwtttttttttagagggagtctcgctctgttgcccaggctggagtgcagtggcgcgatctcggctcactgcaacctccacctcccgagttcacgccattctc

SEQ ID NO: 274698 - DNA, 201 bp, Homo sapiens
tttttatttttgcaaatcaagtaagtatataggtctttttctttcagtaatctaaaatgtagattatctaaaagatagcttcttaaatccctaaacccaartttgtttataggttagatgaccagaaaagagtgtataggtttaaagaagagactacagtgaaactccagtgctagatttcacgggttatagaaagatata

SEQ ID NO: 274699 - DNA, 201 bp, Homo sapiens
tcagacatttatgatttactttccatttggtctcttaaacatttttaaatttttattttatttattatttttatttttaatgtagggctagagccttgctrtgttgcctagcctggtctcgaactcctggtctcaagcaatcctcccacttcggctttttatttcccttttgaaccatctacaaaatgaaggtgatgtacc

SEQ ID NO: 274700 - DNA, 201 bp, Homo sapiens
ctgcagtcccccggctttgtttccggtgactcagaggtgggagaagctgccactctgcatccactcccagctgggtgaaaggcagggagcaggtgtgcccycttctggggagaggtgaagtccctgcgtgggccaggagtgtggcctcctgcctgaagaggaagcacctggaagaggctggctgggtgaggtggggggcag

SEQ ID NO: 274701 - DNA, 201 bp, Homo sapiens
aacatgaattgtactgttaaccattttcaagtgtacagttcaggggcactaagtacatttataatgttgcgcagccctcactgctgtctcgttccaggacmtttcatcccccaaaagctcatagccactaagcagtcactccccatccttctacctccctctcccagcccctcagaaccactaatctcctgtctgtctgta

SEQ ID NO: 274702 - DNA, 201 bp, Homo sapiens
cagatgtaaccgaatatgtatgtatattgatgcatctctagaaatattgtgacagtgtgcaggatgtgctgtgattatttaaatttgcttatctttccctrtgcaaattctctccacctttgtcgcttttcaggatctgctgtatatccttccaactcacattcaggcagcaagagccggcaacgccatccatgccatcct

SEQ ID NO: 274703 - DNA, 201 bp, Homo sapiens
cattgaggtgactggttattatacaggcttgatcatccagcctaaaaccaagggccacagatgtgtcctctgggagacttggcaatgactgaaggaaagamactgcttcccctcggcttggctcagggccaggcacgttgaccctcctcactgttcctagagcctggagcccatcccgaaactaagggccttgcggaagga

SEQ ID NO: 274704 - DNA, 201 bp, Homo sapiens
tgggcccaaggactgcctttgttttggttgccattgaggtgactggttattatacaggcttgatcatccagcctaaaaccaagggccacagatgtgtcctytgggagacttggcaatgactgaaggaaagacactgcttcccctcggcttggctcagggccaggcacgttgaccctcctcactgttcctagagcctggagc

SEQ ID NO: 274705 - DNA, 201 bp, Homo sapiens
ctgttttctgagacgccagaggggtgtgcatcgacggtagtttctggtttcctgggctttgtctttcaaagcatggatggttagaaggcctctcagtttgkgttcttgaccactgctttaataactggcaaatagaactcttctctttccttttccttccattccttcacttccttttatttttttccctcgtttattttt

SEQ ID NO: 274706 - DNA, 201 bp, Homo sapiens
tgaggacaaagtgagatctcatcactctacagagggagagttaagccccataataagccccgaatcctagcatttgctaaagtggaaatagtgtgggcagstaggggaatagtcagttacgtattcgtctggcgctcggtaaatctgcacttcacacaggtcaggtgaacatggtccacgtttcatctgtcgctctctgct

SEQ ID NO: 274707 - DNA, 201 bp, Homo sapiens
agcgattctcctgcctcagcctcccgaatagctggattacaagtgcccaccaccacacctggctaatttttgtatttttactagagatgaggttttgccaygttggccaggctggtcttgaactcctgacctcaggtgatccacacgcctcagcctcccaaagtgctgggattataggcatgagccaccgtgcccagccca

SEQ ID NO: 274708 - DNA, 201 bp, Homo sapiens
cctctgggggagcctgcttgtgagagaagcatgggagtcactgcagtgcccaccacacaccgggactccactctttgccaaacaaatttttttttttttttgagacagcatcttgctctgtcacccaggctggagtgcagtggtgcaatctcggctcattacaacctccgcctcccgggctcaagcgattctctcacctca

SEQ ID NO: 274709 - DNA, 201 bp, Homo sapiens
ctacagtgacagttttaccctgagtgcaggtacaccagcacgatgctgtgttttgcacgcaggaggcttctccctctccctcttccccggagagtcctccygtgagctgtttctcctgcagcagtgccatgctgccccagagacctgctcccatcctcctctttggtttatcttgattccaagggcatccttcccgagctc

SEQ ID NO: 274710 - DNA, 201 bp, Homo sapiens
attggcttaaacagctgataggttttcttggattttccacatgctaatcatagctgcaaatgacacctttgatatttccctttcaatcctttatcttttayttgtttcttattttattgcccggccagcatcctgagtgtaatgtggaatatacatagtcatggtgtgcattcttgtcttgtttgtgactttaaagcgaag

SEQ ID NO: 274711 - DNA, 201 bp, Homo sapiens
gccattgcactccagactgggtgacgaagagagactctatctcaaacaaacaacaacaaaagaatgtgttctgatcccgtgttcagagcagacgtgttccrttaagaaaacagtgcacttgttgctctgagtcctttccgtgcacgtcctcttgctgcgtgcaggtgctttcgtctgcatcaccctgttctgtcctcatga

SEQ ID NO: 274712 - DNA, 201 bp, Homo sapiens
agtctgttcgttcgctggctcaggtcagcctggattgtgacccccacgtattagcggcaccttccacccgccccgccgcctcgccagccgacagtcacccygaccttgtgttgttgtttttacctccctcactagaatgtaagcttcctgagcacagggattcctcttttaaaaaaacttaatttttttagttgagatata

SEQ ID NO: 274713 - DNA, 201 bp, Homo sapiens
agctcaggagttcgaaaccaccctgggcaacatgttgaaaccccgtctctactaaaaataacaaaaaatattagccgggtgcggtggctaacttagatccrtaactgctcaacttgagacatgcaacatatgtccttcccaccttttgtcactcaggtggaacagaggctgaagttgttcaagttggcgtctgagaagcat

SEQ ID NO: 274714 - DNA, 201 bp, Homo sapiens
gatccacccgccttggcctctcaaagtgctgggattatggcatgagccaccacgcctggccttgacgtttctttttataatattgtgtctgtctatttttycccctagagataaacaaattctggtgccagttttttcttgcaaagtcttcgcactcactctcctctctgcctggaaggcttttccccctggcttcccctg

SEQ ID NO: 274715 - DNA, 201 bp, Homo sapiens
tgtctgtaatccctgctactcaggaggctgaggcaggagaatcacttgaacctgggaggaggagcttgcagtaagctgagatcgcaccactgcactccagmctgggtgacagagcaagaccctgtcaaaaaaaaaaaataaagaaaggtaaatgtatatgagcacgtgcaatgccattcgttggtgatcatcgggcaaagc

SEQ ID NO: 274716 - DNA, 201 bp, Homo sapiens
aagtctccctctgtcacccaggctggggtgcagtggcatgatctcggctcactgcaacctctgcctcccgggttcaagcgattctcctgcctcagcctccygaatagctggattacaagtgcccaccaccacacctggctaatttttgtatttttactagagatgaggttttgccacgttggccaggctggtcttgaactc

SEQ ID NO: 274717 - DNA, 201 bp, Homo sapiens
ctgaagttatagctggtggaatgtagttttgccaaattactctttccgagtcattgaggcagagctggcaggttctgtgctgatacctcccgggtgtgtcrtcttgcccagctcctcccttgctctggcgatgtggggcatctccacccggatgtcctggtgacatttcacatgtggcaggtccaggcatgaattctcagc

SEQ ID NO: 274718 - DNA, 201 bp, Homo sapiens
gggtttcgccatgttgcccaggctggtcttgagttcctggactcaagcgatcctcccacgtcagcctcccaaagtgctgggattacaggtatgagccatcrtgcctggcccatacatattgtcgattgctttgcaaattgctctaagctgaagttatagctggtggaatgtagttttgccaaattactctttccgagtcat

SEQ ID NO: 274719 - DNA, 201 bp, Homo sapiens
ctaatttttgtattttttgtagagatggggtcttgctacattgcccagattggtctcaaatacctgggctcaagcgaacttcctgccttcgcctgccaaastattgggattacaggcatgagccaccatacccagtccagaattccttttattttattatttttattttttgagacgaagtctccctctgtcacccaggct

SEQ ID NO: 274720 - DNA, 201 bp, Homo sapiens
gttgtcttagggacatttgtgggaacaatatactggtacgaagaggaggtttaggatgtcctttgggcaggtgcaggtctcctccttgcagtctgagctcstgcccgagtgccgatgctggctagaggcagggcaggcacagtgggaaagaagtagcagctgttaaacttctggtgggcttctgaatagctaggtcagata

SEQ ID NO: 274721 - DNA, 201 bp, Homo sapiens
ctgagggccaggttggttttcttttttttttttttgacagggagtctcactctctcacccagtagtgcagtagcctgatctcagctcactgcaagctccgsctcccgggttcacgccattctcctccctcagcctcccgagtagctgggactacaggcgcccgccaccacgcccggctaattttttttttgtatttttagt

SEQ ID NO: 274722 - DNA, 201 bp, Homo sapiens
acaggggacaccgctcctgttgtcttagggacatttgtgggaacaatatactggtacgaagaggaggtttaggatgtcctttgggcaggtgcaggtctccyccttgcagtctgagctcctgcccgagtgccgatgctggctagaggcagggcaggcacagtgggaaagaagtagcagctgttaaacttctggtgggcttct

SEQ ID NO: 274723 - DNA, 201 bp, Homo sapiens
ctaagtaaagtatgttacagaaagtcacgctgagggccaggttggttttcttttttttttttttgacagggagtctcactctctcacccagtagtgcagtrgcctgatctcagctcactgcaagctccggctcccgggttcacgccattctcctccctcagcctcccgagtagctgggactacaggcgcccgccaccacgc

SEQ ID NO: 274724 - DNA, 201 bp, Homo sapiens
gttttctttccctttcccaggctgcttcccagaccactgggcagccagagggcctgggttttggaggcccccactccctaccccatgcagactgggtgtgkcactgaatccgcctctagggtttctgggtttccatttcctcatctgtaaggtggtgggtctgaacctgtcattccatgtcacacgagttttgtgaggatc

SEQ ID NO: 274725 - DNA, 201 bp, Homo sapiens
ccgtttgtgctaagtaaagtatgttacagaaagtcacgctgagggccaggttggttttcttttttttttttttgacagggagtctcactctctcacccagkagtgcagtagcctgatctcagctcactgcaagctccggctcccgggttcacgccattctcctccctcagcctcccgagtagctgggactacaggcgcccg

SEQ ID NO: 274726 - DNA, 201 bp, Homo sapiens
agttggaaagggacaaagaacgtgttcctgcagtaaagacctaacaggtgtcagagctggctgccacgtcctcctgcagtttgccggaggaggtaagggcrtcctgcatactttatgtgaggcaaatacttgctcaaggtcacaggtctgagtaattggtagagctgggatttgaacccagatctgtgtgttttctttccc

SEQ ID NO: 274727 - DNA, 201 bp, Homo sapiens
aaaatttagaaagctgcaggcacagctctatataaacaactattttaacctttcattgtgtctcatccagaaaacttcctgattgtctaattgctccccgrctaatttttgctttcctttctctgtgttacgtgagggtatttggtgcaaatagttatctttaatagcgcagaagttttagaggacttatgttctcataaa

SEQ ID NO: 274728 - DNA, 201 bp, Homo sapiens
taccctatttgggtatcttgacggcctcagaagtgtctgcctttgccttttttttggtgaggattgttcttcggtccaggaacgtctttggaagttaacartgaaagaaatcatgctgctgagtgaggcgtgccctctccagggtgtgcaggagggtcaccgtcaccttggagggttgggcagtagggtgggtaccgctct

SEQ ID NO: 274729 - DNA, 201 bp, Homo sapiens
gctagaacctgtaagtatggggcgggtaaaagatggaccagatgaaaaataaattgacacagaaaatcagtaagtggttggcacattgtgcgcacgggaaragtggcttcggatctttaacatagccttgtctttgaaatggtcattctcccatccaagtactaaccaggactgaccctgcttagcttcacgagatcagac

SEQ ID NO: 274730 - DNA, 201 bp, Homo sapiens
gggttttgccatgttgcccaggcttttattggcatggagggcagggttatatgcttatttgctagaacctgtaagtatggggcgggtaaaagatggaccasatgaaaaataaattgacacagaaaatcagtaagtggttggcacattgtgcgcacgggaaaagtggcttcggatctttaacatagccttgtctttgaaatg

SEQ ID NO: 274731 - DNA, 201 bp, Homo sapiens
gtgtggcctcacgcacagcctcccttgtctgggtctgtctccacagcaactgcatgtccagccagacgaagaacgtggtcagcggcgtgctgtttggcacyggcctgtgggtggccctcatcgtcaccatgcgctactccctgaaagtgctgctctcctaccacgggtggatgttcactgagcacggcaagatgagtcgtg

SEQ ID NO: 274732 - DNA, 201 bp, Homo sapiens
aaaatgggatccattcctttaaaactggccaggccgtgggagttggctgcgtgcctactaaataatatgtaaatactgttgttttgttgttgttgttgttkagatagggtctcactctgtcgccctggctggagtataatggcgtgatcatggctcactgtagcctctacctcctgagctcaagggatcctcctgcctcag

SEQ ID NO: 274733 - DNA, 201 bp, Homo sapiens
acccgccttggcctctcaaagtgctgggattatggcatgagccaccacgcctggccttgacgtttctttttataatattgtgtctgtctattttttccccwagagataaacaaattctggtgccagttttttcttgcaaagtcttcgcactcactctcctctctgcctggaaggcttttccccctggcttcccctggctcc

SEQ ID NO: 274734 - DNA, 201 bp, Homo sapiens
atgggtgctttagtttttccacatcctgggactccaattttaaaactataataataagcaaaaacttctcgggttaagggtttgaatccaggcttggttaytgagtccctgttggccttggtaaggtcttcccatctctgctcttttttttttttttcagacagagtcttgctctgtcacccaggctagggtgcagtggca

SEQ ID NO: 274735 - DNA, 201 bp, Homo sapiens
ggctgctgtcccaacctctgggggagcctgcttgtgagagaagcatgggagtcactgcagtgcccaccacacaccgggactccactctttgccaaacaaawttttttttttttttgagacagcatcttgctctgtcacccaggctggagtgcagtggtgcaatctcggctcattacaacctccgcctcccgggctcaagcg

SEQ ID NO: 274736 - DNA, 201 bp, Homo sapiens
cagcagtgcatgggtgctttagtttttccacatcctgggactccaattttaaaactataataataagcaaaaacttctcgggttaagggtttgaatccagscttggttactgagtccctgttggccttggtaaggtcttcccatctctgctcttttttttttttttcagacagagtcttgctctgtcacccaggctagggt

SEQ ID NO: 274737 - DNA, 201 bp, Homo sapiens
taccttctgcctttcaggggcctcctctcctccagagatcttggctgcactgtgaggagcctgacttcagctgggcctgtgtgcaggtgccaggccttccscggctgagcgggtcctgtgctctgtctgactctccgttccccagctgagtgggtcctgtgctctgtccggctccccgttccccagctgagtgggtcctgt

SEQ ID NO: 274738 - DNA, 201 bp, Homo sapiens
aggcaggaggattgcttgagcccaggagttcaagatcagcctgagcaacatagtgagaccctatctcttaaaaaaaagaaagaataaaaaagtggagtcayccgtgtcatgtgaggtttgtctctgagtttgtccccgacagccttgtaaggagcatgtcctttcaaagaaagctttttgctaacgttttttatctgagtg

SEQ ID NO: 274739 - DNA, 201 bp, Homo sapiens
tggactgggctgctgtcccaacctctgggggagcctgcttgtgagagaagcatgggagtcactgcagtgcccaccacacaccgggactccactctttgccmaacaaatttttttttttttttgagacagcatcttgctctgtcacccaggctggagtgcagtggtgcaatctcggctcattacaacctccgcctcccgggc

SEQ ID NO: 274740 - DNA, 201 bp, Homo sapiens
aaagatatacattttggagcaaagagtatataaccttgaagataatttgtttttgtccacttaaatattatgcagtgttaaattagtggttttctttttttatttcttattttgaagaaatatttattattttttatttttattattttttatttcttattttattttcttttttaaattttatttttgtattgatggggt

SEQ ID NO: 274741 - DNA, 201 bp, Homo sapiens
catacacaagagtgaagaggactgattaaagatccccaccattcccttccttgtttcaacaattttgccaattttgtttgatataatcctttttttttttkggctggagtattttacagcaaattctcgacatggggtgaggtctcccatgaaatcttcagggttaagcagcccttctgacacaggggcggcaagaggagc

SEQ ID NO: 274742 - DNA, 201 bp, Homo sapiens
attaatccttgggagcagggaatgggggagaattatttctgctagcgtagcttagcaaatacagccatatttttttgtcacatggaggagacccttctgcrgtaagagagaatcaggtgttggccgggtgcagtggctcacgcctgtaatcccagcactttgggaggctgaggtgggcagatcacgaggtcagaagatcga

SEQ ID NO: 274743 - DNA, 201 bp, Homo sapiens
caggggtgacacacgtcctcaagggctcccagccttctctgcaggccccggggtccctggctgcttctgcccacgtctgcagggctggcccctgcactcartgctgggcctgggttcccctgaccttccggcacaggcagcgtggaatggatgcctctaagcgcctgtctctctcctgcagttgggccgccgctgctcatc

SEQ ID NO: 274744 - DNA, 201 bp, Homo sapiens
gcctgggacagagtcatgatcacaccattgcactccagcctgggcaataaagcaagatcccatctccaaaaaaaaataatccgtaaccccatcctcatttkgtttccatatatgtgtagatacactgcacactattgcaccacacacacagaatagaaggaatgtgatggaaagtgggagcagaactggctacatctgcct

SEQ ID NO: 274745 - DNA, 201 bp, Homo sapiens
aggagctgatccaacagactgctcggttttctaaaacggcaggaagcgtgtggcacgtgagaaaagagtccttagaggcagatggacctggatttgatccyggctctgccacctggagcccaggactttgcttcctgagctcctgcatcttcacctcagaagttggggcttgaggcctaagggagtaacatgagcaacact

SEQ ID NO: 274746 - DNA, 201 bp, Homo sapiens
caccatgcccaactaattttttctttttttttttacttttatttatttatttattttgagacagaatctcactctgttgcccagactggagggcagtggcrcaatctcggctcactgcatcctccacctaccaggttcaagcaattctcaggcctcagcctcccacgtagctgggattacaggcgtgtgccaccacgccca

SEQ ID NO: 274747 - DNA, 201 bp, Homo sapiens
ggtggtggtagtgaattggatgcagagaaaaaaggtctgatgggatacagaaattggggaaagtgaataggagagaggcagaaaggagggatgaacttgaygtagatcattccacctggaggtctaggatgcccaactgttggtgggcttttgctctctaagctgtgtaggcccgacccttaacttccccacctcttgcat

SEQ ID NO: 274748 - DNA, 201 bp, Homo sapiens
tgggtggcgagaaggaaagctcgtccccggccggagatcgctcctgctgggactcttgtctaagaagttcctcaatggccacctgggaaaaaccgcccagyagctcgggttcccacgctccagggattatctagactcaccccaagctcgagccggccttcttggggaccggcgtccgggattggtggaaggagaacggcc

SEQ ID NO: 274749 - DNA, 201 bp, Homo sapiens
ttctatctctggggacagataagcaaagcagccctgccaagcggctcccagcacgtggaactgtgaatagcgcgggctccgcagtaaagcccttttcctcrttttctgcattttggtcttattgatgctgtccaggaggattctttttgtcatatgtagcaaagtatattcactttacccagagattcatttcttgtgtgc

SEQ ID NO: 274750 - DNA, 201 bp, Homo sapiens
tgggacttgtcacatgccagtcccacacaccacagcagggccaggtggggcggccaggtcccagggcctcaagccaccatcccagtctccagagcaaggaygccggccagggcttctatctctggggacagataagcaaagcagccctgccaagcggctcccagcacgtggaactgtgaatagcgcgggctccgcagtaaa

SEQ ID NO: 274751 - DNA, 201 bp, Homo sapiens
gaactatattgatagatatagaatccttccccgtgaaataagcagaacccaaagtagtatgggttcgctgattacaactatataagaaattcatgggtatyaaataacagaagagaggtcctttacataaaccatttttcctatgtgactgtgcagtgggataaaagctctcatactgctggtagaagtgtaagttgatta

SEQ ID NO: 274752 - DNA, 201 bp, Homo sapiens
gcagattgacaggaaagggacagtggtgtgccctgagcagatagaagggatggtggctgcaggatgggttggggaacatgggaggctgggagctgaggctmctgggtgctcatgatctctcctctctcctcagtacggcaagaagaagctgaaatacctgccctacaatcaccagcacgaatacttcttcctgagtgagtg

SEQ ID NO: 274753 - DNA, 201 bp, Homo sapiens
ggaggcggggagacccacagcgggagggaagtggccgctatcccactgggcagaatgcagaatgtgggggccacctctttgtctctctgacaaggtctctrcccaatatagagcaaggctcccagccagccccgctgaggtcaggagaggggctcccctattccatctccctgagggtcatcctgtgcccctcatgctgtg

SEQ ID NO: 274754 - DNA, 201 bp, Homo sapiens
gagatgccaggaggagacccaggtgctgaggaggagggacaggactgggggacggttggggacctggccccgggttgggggcgcaccttcagaatcgcccytgccccacgagagggctgctgacccccacccctaccccatggctgcccctcagcaggagggtccgtttctctcccgaaaaacagggcacagtcacttcct

SEQ ID NO: 274755 - DNA, 201 bp, Homo sapiens
ccttgagtgatgatcctagcgtctcctgacccttaggtgtttcacctgaaaagcctgggtcttcaagctgaggcatttctgttctagcctggaggcgcctrggagccctgggagactttttaagcagagagatttggcatttagatctctgggttttagaggagtgggaacgcacctaaaagtggggttgccagttacaaa

SEQ ID NO: 274756 - DNA, 201 bp, Homo sapiens
ccgtgggtgactgggtgggatgggggctttagcaggggagagttgggacctgcttggagcgaaggccactctggttgccatggccacgaggacaagcaggrgactgtgggaagctgatgctgtggtccagttgagacaagacttgggtggcagagagacagtggacagggtggagccgtgaagtcaccctcccagtacatg

SEQ ID NO: 274757 - DNA, 201 bp, Homo sapiens
acaggccatgcagaggccccggggagggagtaagctaggtcagggggctgagtaaagacaggttcttaaccccatgaggctccgtgggtgactgggtgggrtgggggctttagcaggggagagttgggacctgcttggagcgaaggccactctggttgccatggccacgaggacaagcaggagactgtgggaagctgatgc

SEQ ID NO: 274758 - DNA, 201 bp, Homo sapiens
gcctcaccttccacctcggacacctgtgctgagcctgtggcatgtcaccatacctaaactcatggcaggatgagcgccctggcagtgggaacaggccatgyagaggccccggggagggagtaagctaggtcagggggctgagtaaagacaggttcttaaccccatgaggctccgtgggtgactgggtgggatgggggcttt

SEQ ID NO: 274759 - DNA, 201 bp, Homo sapiens
tgtaatcccagccacctgggaggctgaggcaggagaattgcttgagcccaggagttcgagaccagcctgggcaacatagtgagacccccccccatctctcmaaaaaaaaaaagaaaaagaaacacattgtgctcctctcttcccctcagaagccaagaggtacaaagcagcatttgaaacagcaactatctttagtctgtg

SEQ ID NO: 274760 - DNA, 201 bp, Homo sapiens
aaagtgctgggattaccgcacccggccccctcttctttttaattttgaaattttcccaacatccttaaatgttgaaggaacaagcaaacacctgtgtatcytcaaccaagattcactagtcttaacattttgccacatttgcgtttttcctctttatatgtgtgcagttgccttttgaaaataagctgcgtcattgtgtga

SEQ ID NO: 274761 - DNA, 201 bp, Homo sapiens
ttaacattttgccacatttgcgtttttcctctttatatgtgtgcagttgccttttgaaaataagctgcgtcattgtgtgatcacatccctaaggtcttcawcatttccggagaaaaaaggaagagatgctctaacatcatcacagtacctttgtcacatttaagaaaattaatagtaattccttgatatgatcaaatatct

SEQ ID NO: 274762 - DNA, 201 bp, Homo sapiens
taggaagtgtttggcctgagcagggagcagggaaggaagcctagagagctgacattcagccaggcaggtccacatctcctgctacacagatacctctcctrggtaccctgaattgttctggctggaatgtatgtggaatggcctcacctgtaaatacagacacagctcctcattagaatggtagatgtctccctcctaccc

SEQ ID NO: 274763 - DNA, 201 bp, Homo sapiens
tgtgtccaaatatccctctttaaaaaaattattttgtttatttgtttatttattgagacagagtcacataggctggagtgcagtggtgtgatctcgactcactgcaacctctacctcctgggtgcaagcaattcttgtgactcagcctcccaagtacctgggattacaggcaccggccaccatgcccagctaatttttgta

SEQ ID NO: 274764 - DNA, 201 bp, Homo sapiens
tcatcttttttttttgagatggtgtttcgctctgtcgcccaggctggagtgcagtggtgcgatctcggctcactgcaacctccgcctcctgggttcaagcrattctcctgcctcaacctcctgagtagctgggagtacaggcgccggccaccatgcctggctaatttttgtatttttagtagtgatggggtttcaccatgt

SEQ ID NO: 274765 - DNA, 201 bp, Homo sapiens
tcctggagggtcgaggcttgtggcttggccccctcttgccacagcttctctgggttgtgcattggctgttgaaatggcagctcgagacatatgttccctcyagagtggctggtggctgactcctttccctgtgctcttggtcaacagtcaaagatcactgaggacttccgggccctgaggaagacggctgaggacatgaac

SEQ ID NO: 274766 - DNA, 201 bp, Homo sapiens
cacgtgagaaaagagtccttagaggcagatggacctggatttgatcctggctctgccacctggagcccaggactttgcttcctgagctcctgcatcttcayctcagaagttggggcttgaggcctaagggagtaacatgagcaacactcctggctccctgcctggcgcatgcccattacccctgggctcagggaggtgagg

SEQ ID NO: 274767 - DNA, 201 bp, Homo sapiens
ggatttgatcctggctctgccacctggagcccaggactttgcttcctgagctcctgcatcttcacctcagaagttggggcttgaggcctaagggagtaacrtgagcaacactcctggctccctgcctggcgcatgcccattacccctgggctcagggaggtgaggctgcccgagagccctctggaaatggctgagcagcaa

SEQ ID NO: 274768 - DNA, 201 bp, Homo sapiens
catgcacctgtaatcccagccacctgggaggctgaggcaggagaattgcttgagcccaggagttcgagaccagcctgggcaacatagtgagaccccccccmatctctcaaaaaaaaaaaagaaaaagaaacacattgtgctcctctcttcccctcagaagccaagaggtacaaagcagcatttgaaacagcaactatcttt

SEQ ID NO: 274769 - DNA, 201 bp, Homo sapiens
gactttctgcagcctcatctcaggccaccagggctgggattagggtgaaacaagtaaggcactcgcttagggtataaaatctaaggggacaccagacaaawtctaaggggacaccagacaaattcagttatcaagataaatgatgttttaatgcaatgtggttttgttttgttttttgagatggagtttcactcttgtcgc

SEQ ID NO: 274770 - DNA, 201 bp, Homo sapiens
ggctgggggtggctgggagtctgagagaggctccccttgccccatgaccagtaactggggctgaggcaggggtgcttttgtcctggaggagccactgtggwtcacctgtgttcagggagggcctcagagcctccctgggagccggggtttgacaacaactagtggcgtctcctctctcctggccagtttcattttccttct

SEQ ID NO: 274771 - DNA, 201 bp, Homo sapiens
cacagctggcttggcatggggaggagggtgactgggacagggggacccgggggtcctacgctgcctcctcgtgtgccccagtggagcctgtggggccccakgcatctcctccctggggtagctgcctctcaggaaaggactccctctggggccaccaggacctagtcctaaagatctctactctccctcagacatagggag

SEQ ID NO: 274772 - DNA, 201 bp, Homo sapiens
gcaggccccggggtccctggctgcttctgcccacgtctgcagggctggcccctgcactcagtgctgggcctgggttcccctgaccttccggcacaggcagsgtggaatggatgcctctaagcgcctgtctctctcctgcagttgggccgccgctgctcatccccatgtatttccagtaccagatcatcatgaccatgatcg

SEQ ID NO: 274773 - DNA, 201 bp, Homo sapiens
catttcccgacctgcccaaaggcagcctatgcatctattcacaaacccctggggagtgtagcatgcctgcaccagcacagaagcccaggtggctgttgccmttggcgttgggcactgagggctctgtcctggaaaaatgctggagacggcatttggggccagatcacaggagaccccgtttggtgtctgggtgcacacatg

SEQ ID NO: 274774 - DNA, 201 bp, Homo sapiens
tctccctcctacctgacatctttttcagatccagaaagtgacactaaacttgttagaagcgggggccacagcagccttgctgtgcagacccctcagcctgygttacaggcctgatggggacacagaggctcagagagtcccaggggtgacacacgtcctcaagggctcccagccttctctgcaggccccggggtccctggc

SEQ ID NO: 274775 - DNA, 201 bp, Homo sapiens
tcgctgtggaaactcgggcggcggggaacgcgggaggatgtggaacccgaggcggggggagccggaggggcgggcagaggaggtgtcgaggccctgagctyccggggagtttttactggaggcaaaagtccatagcgggagggctgagggaggggcggaggaaggggaccgcttgggggcactgggaagccagggatcctc

SEQ ID NO: 274776 - DNA, 201 bp, Homo sapiens
gggctggaggggccccaggcttggtgggcccagggtgcagattgacaggaaagggacagtggtgtgccctgagcagatagaagggatggtggctgcaggaygggttggggaacatgggaggctgggagctgaggctactgggtgctcatgatctctcctctctcctcagtacggcaagaagaagctgaaatacctgcccta

SEQ ID NO: 274777 - DNA, 201 bp, Homo sapiens
gttgcacattcattcaacaaacatttgtttagtgcctgtcacatgggctcagagtcagctttttgggttctgatcccagtcagggccacttcctgtggccytgggccatggcttaacgctgagcctcagcctcagaagtgccggccttgtagaggatcgatgccatcgggccagtgctcggctagggctgaggaagcgttg

SEQ ID NO: 274778 - DNA, 201 bp, Homo sapiens
tgaccctggtccatccccaactttgcaggtccctgaagaagtctgggaagctgtggctggacgcctaccttcacaaatgaagccacagcccccgggacacygtggggaaggggtgcaggtggggtgatggccagaggaatgatgggcttttgttctgaggggtgtccgagaggctggtgtatgcactgctcacggacccca

SEQ ID NO: 274779 - DNA, 201 bp, Homo sapiens
aagaactgagcgtgggaaagatgagagcagagagttagccacagggcagggcttcgtatcccaaacccacagttgtactttctggtttgggaggggagtaytggccatcccccagcagagccgctgcagctgaggccatcgagatgggcacagatgtgtagtggtatgtcaccatacgcatgtacatacacgtgcgtgact

SEQ ID NO: 274780 - DNA, 201 bp, Homo sapiens
ggacaggagagtcagccccgccgccagggctggctgcactccctcccttgcccctggcctgcgtctctgcctgtcaaccgcagcctgggaaggcactgttsctgatcagggggaggtccatgtgtgccacccacacccttggccgcagcccagccaggtgaaagtcatgtgtcttccttgcctcttgggctttctctgtgt

SEQ ID NO: 274781 - DNA, 201 bp, Homo sapiens
gggcctgggactttgtagttatggagcctgcacacgcacctcatgaccctgtgaggctagcagggcagggctacgtagcttgcctggaacatcggccgagrgactgccctgctgccccttgtccttgcttcacctcttgtcactgtttttttttttttttattaaaaaataaaaaatgtagagacagagtctcaccctgtt

SEQ ID NO: 274782 - DNA, 201 bp, Homo sapiens
actgtctgaagctaacctcctgggcttcctgcttgaggcagaccttcatgaacaggcttaagccacccatcccgccttgggacacacatgccgccctctcrgggaccttggactgggaccttgccattctgctcctgctggggaggtcgtgccgcctgtttctctctgtgtgtgagtttgcaggttcccagaggcagagac

SEQ ID NO: 274783 - DNA, 201 bp, Homo sapiens
tttgtctctctgacaaggtctctgcccaatatagagcaaggctcccagccagccccgctgaggtcaggagaggggctcccctattccatctccctgagggkcatcctgtgcccctcatgctgtgccacttggtcatagtggttaccacctccctccatgtgggcctgggactttgtagttatggagcctgcacacgcacct

SEQ ID NO: 274784 - DNA, 201 bp, Homo sapiens
  misc_feature (1)...(201): n = A,T,C or G
gacaccttaacttccagattgagcaccagtgagcgcggggctgcggggaggcggggagacccacagcgggagggaagtggccgctatcccactgggcagantgcagaatgtgggggccacctctttgtctctctgacaaggtctctgcccaatatagagcaaggctcccagccagccccgctgaggtcaggagaggggctc

SEQ ID NO: 274785 - DNA, 201 bp, Homo sapiens
  misc_feature (1)...(201): n = A,T,C or G
acagccacctgcaacgtggagcagtccttcttcaacgactggttcagtggacaccttaacttccagattgagcaccagtgagcgcggggctgcggggaggnggggagacccacagcgggagggaagtggccgctatcccactgggcagaatgcagaatgtgggggccacctctttgtctctctgacaaggtctctgcccaa

SEQ ID NO: 274786 - DNA, 201 bp, Homo sapiens
gtgcaccatgcaaggcactcagctcacgagcagtcgaggctcaagtcctccctgagccccgtgtctgcctggtgcgccttcctggagggtcaccatttccygacctgcccaaaggcagcctatgcatctattcacaaacccctggggagtgtagcatgcctgcaccagcacagaagcccaggtggctgttgccattggcgt

SEQ ID NO: 274787 - DNA, 201 bp, Homo sapiens
gggccagatcacaggagaccccgtttggtgtctgggtgcacacatggagctgttgctggtgagcactgtcctccttggggcccaagagcagacagagttcrggtcttagcctcatcactgccctctgctctccaggatgccttccgcgccttccaccctgacctggaattcgtgggcaagttcttgaaacccctgctgatt

SEQ ID NO: 274788 - DNA, 201 bp, Homo sapiens
ttcattacatctcatcccgagtccagggagaaccgggactgcccacctcactgcctccttgttgtcagcccgtcttgctttcctccatctgtttgttcaawaaacatctctgggttggtatcctccaaacatcacgcttacttgtttcatgccttgctcctcagtttctttgtgccagagatttttccatttgattcttcc

SEQ ID NO: 274789 - DNA, 201 bp, Homo sapiens
tctggtcatgactgcacagtgggaaagtatgagatcagagtgtgtgcagctgtggggtcctgggtccatttattccctcgtgagccatcttattaggcccygttacaggcactgtgtttattgcagcgaacaagacaggtgcaggccttcccaactggggtttatgctccagcgggggacgcaggccataaacaagtgggt

SEQ ID NO: 274790 - DNA, 201 bp, Homo sapiens
agagccctctggaaatggctgagcagcaaccaaggtcaaggcagggctcgtcatctgtctgctcccttggagttggaacctcgactgcagggttcgggtgytggggaggcagcaggagtggagatgagtctatttgcaagccattgagtcttgcctttcaatgagacaagaggaatccattagttatcagccactgcagct

SEQ ID NO: 274791 - DNA, 201 bp, Homo sapiens
caacaaaacaaaacaaaacaaacagaaaaaaagtgtagtcactctttctttcttctctttctttctttctctctctctttctttctctccctccctccctyccctccctccctcccttccttccttccttccttccttccttccttccttcctttccttctttctttctaatctggatgttgaagtagtctctttctttct

SEQ ID NO: 274792 - DNA, 201 bp, Homo sapiens
gtctagtcccaccagctgcactggcaagaaggcgtctttcttgtgcgtggtggccagagaagcctctcctttcccgacatcttctcacccccgacacttcyggaacgctggctttggggcaggagataggggtgggaggctgtgaggatctggttgttcagttaccagcggcgtttggaagtccccagccagtgccgcggt

SEQ ID NO: 274793 - DNA, 201 bp, Homo sapiens
cccctccaagccctctgtcctgctggaaggagatgccaggaggagacccaggtgctgaggaggagggacaggactgggggacggttggggacctggccccrggttgggggcgcaccttcagaatcgcccttgccccacgagagggctgctgacccccacccctaccccatggctgcccctcagcaggagggtccgtttctc

SEQ ID NO: 274794 - DNA, 201 bp, Homo sapiens
tctctaagctgccagggattccattttctgccaaagtacaggctattgttattcttctaggaaacagtttgccagctttaattagaggtgtctagaaaacrgaactgatgaacttgaggccctctgataagtggggacaaaggcttcattttctcggcgaggctttgtaatgtagagccgttggctgtcctgacagatgtt

SEQ ID NO: 274795 - DNA, 201 bp, Homo sapiens
ctgatcacctaggaccagcctagattccccacagccaagcaggcacaaatgcagccaccgttgcctctgacagttctggaatctgtcacctccttgtcagygccgtgggttctggtttaggcctctgtcatttcatgtctgagccgctggaataacttcctagtctccccctctccagtgggtggggatctattttaagac

SEQ ID NO: 274796 - DNA, 201 bp, Homo sapiens
ccccagctcagtttgggtttggtgtgatgaggccagaccctccctcgcagctccgtgaggacaagggctttgtctcttggttcacctcccaggcagagcayggcagctggcttagggtaggcaacatctgcaccacattctgggaacacggagctggccattgttcctgggcaaggcgggcttcccggtgcccggaaggag

SEQ ID NO: 274797 - DNA, 201 bp, Homo sapiens
agcagaactggctacatctgcctccctcctcaccttgaaggccaccttattggaacgtgaggtcctgccctcggccaatgttggccccaaggccatctccrgcctctcctgagcgctcccttcctcctttcctgttcagctgctggcacccgacccctgatcacctaggaccagcctagattccccacagccaagcaggca

SEQ ID NO: 274798 - DNA, 201 bp, Homo sapiens
aaatgttatcgatgagtttgtttccattaaagccagaagtgcacttttttttttttttttttttttttttttttgcctcaggctctgatatggcgccaccsagcactgctggtcacagttataccgaggagctttcctctggcttctggagcactctacactcccccttcctctcccagggcctcccgtaggctcttgcct

SEQ ID NO: 274799 - DNA, 201 bp, Homo sapiens
ttgcaccacacacacagaatagaaggaatgtgatggaaagtgggagcagaactggctacatctgcctccctcctcaccttgaaggccaccttattggaacrtgaggtcctgccctcggccaatgttggccccaaggccatctccagcctctcctgagcgctcccttcctcctttcctgttcagctgctggcacccgacccc

SEQ ID NO: 274800 - DNA, 201 bp, Homo sapiens
attgtgttcccagggccctccttgactccgctttgcctccctggctccatgtgcccgggactcacagccccctcctgcctgcctcagctcgccctcctgcrctagtttgtgtcgcccccaactcaacccctcaagacccaacagtgtgcgcagagcaagtggtgctctgtttggtggtggaaaatgcaagttttatttttc

SEQ ID NO: 274801 - DNA, 201 bp, Homo sapiens
cccctgcctcttgtcccaagttccttcttcctcgcaatgccattgtgttcccagggccctccttgactccgctttgcctccctggctccatgtgcccgggrctcacagccccctcctgcctgcctcagctcgccctcctgcgctagtttgtgtcgcccccaactcaacccctcaagacccaacagtgtgcgcagagcaagt

SEQ ID NO: 274802 - DNA, 201 bp, Homo sapiens
tccctttctgctgcagatcctgcaccatttagcatccaagctcccaccaggcaccaccagaaccacccttcatagcaccttggtcatgccctgtgggtacygctcctctccttgtatccactctcctccccgtccggccctgcccctgcctcttgtcccaagttccttcttcctcgcaatgccattgtgttcccagggccc

SEQ ID NO: 274803 - DNA, 201 bp, Homo sapiens
gcaggagggttgtagtatttagaggcaggagacctgggttccagccccagctttatgaattcccaggcctggagggcagctccatctccccagctgagatmtgggtgggagctgtccaatttctgtggctgtagcctcagcatccccaggaagcagttctgagatgaaagtggagaatggcatcaatttcttcatgcccag

SEQ ID NO: 274804 - DNA, 201 bp, Homo sapiens
agaggaaagaggtgacaaaccctaagatctttgaaggaggcttcccggggagatttacatgctctggcaaggttccctgttcccggggccacgtcctggaycctgagatgctcccacgcttcaccctcctggaattttgctgtatctgacaccactggccactccctcttgcagttcttcctgttggcttccaggtcccca

SEQ ID NO: 274805 - DNA, 201 bp, Homo sapiens
cagcctgtcccaggtgccaatagtgtggaggttgggggaccctggcttagaggaaagaggtgacaaaccctaagatctttgaaggaggcttcccggggagrtttacatgctctggcaaggttccctgttcccggggccacgtcctggatcctgagatgctcccacgcttcaccctcctggaattttgctgtatctgacacc

SEQ ID NO: 274806 - DNA, 201 bp, Homo sapiens
ccctggaatagcacgtctcttttccctgaaaatactcttgacctgatcctctgctaccatcccttttcggctcggctagtgggtcacaggcattttttaaraaaccgtgggcccagttttctcctgcacgaagtgttgctttgtcagtctgttctagacacaaatagaacaaagaccaagcaaaggacttgatgccagcaa

SEQ ID NO: 274807 - DNA, 201 bp, Homo sapiens
ggggccacctctttgtctctctgacaaggtctctgcccaatatagagcaaggctcccagccagccccgctgaggtcaggagaggggctcccctattccatytccctgagggtcatcctgtgcccctcatgctgtgccacttggtcatagtggttaccacctccctccatgtgggcctgggactttgtagttatggagcctg

SEQ ID NO: 274808 - DNA, 201 bp, Homo sapiens
taatagcctagatcctcctaggctttttttcaggaacgctttttacataattctgtgtttatttttttatttacttcatcacagcacatttccagtgccawggtagtattcggtcttgtccttttcattgaccaccctggacatgtaggtgaggaactagtaagagatggtgggtggtgtggtttgtgcaccatgcaaggc

SEQ ID NO: 274809 - DNA, 201 bp, Homo sapiens
gctgaggtcaggagaggggctcccctattccatctccctgagggtcatcctgtgcccctcatgctgtgccacttggtcatagtggttaccacctccctccwtgtgggcctgggactttgtagttatggagcctgcacacgcacctcatgaccctgtgaggctagcagggcagggctacgtagcttgcctggaacatcggcc

SEQ ID NO: 274810 - DNA, 201 bp, Homo sapiens
acatgccaccttaatgatggcctcctcagcccttgcactccctggggccactcccgtcctggtccctgaccctggtccatccccaactttgcaggtccctraagaagtctgggaagctgtggctggacgcctaccttcacaaatgaagccacagcccccgggacaccgtggggaaggggtgcaggtggggtgatggccaga

SEQ ID NO: 274811 - DNA, 201 bp, Homo sapiens
gttcctatgcctggcattggacaatgacgatgcccaggacccagcccagccctcctccattagagcctctgggcatcaggctgcccaaggtgcaggctctratggggaagaaaccggtgccgtcatggggacctcaggtagccagatgtggcctgaggagtctgtgctgtggcctcctctgtcctcaaggttaggctccag

SEQ ID NO: 274812 - DNA, 201 bp, Homo sapiens
gtcacatttaagaaaattaatagtaattccttgatatgatcaaatatctggtccatattcattttttctcattcaactcccgaaaaacctggtataacttmttttttccttcaagtgagagcctgtcacattaaagaattgcaggatgttgttttgtttgtttgtttgtttgttttttgagtcaaagtctcactctgtcgc

SEQ ID NO: 274813 - DNA, 201 bp, Homo sapiens
ctactaaaatacaaaaattagccgggtgtggtggggggtgcctgtaatcccagctactttgtgggggtgaggcaggagaatcgcttgaacccaggaggcaraggttgcagtgagccgagattgcaccactgcactccagcctgggtgacagagccagactctgtctctaaataaataaataaataaaaaatttgctgaatc

SEQ ID NO: 274814 - DNA, 201 bp, Homo sapiens
tgggagattgggatggggcagaggcaggctcatggaggaattcacgggatttccttaatgcagtcttttttttttttttgagacagagtctcgctctgtcrcccaggctggagtgcagtggtgctgtcttggctcactgcaacctccgcctccagggctcacgccattctcctgcctcagcctcctgagtagctgggacta

SEQ ID NO: 274815 - DNA, 201 bp, Homo sapiens
gtaacatgagcaacactcctggctccctgcctggcgcatgcccattacccctgggctcagggaggtgaggctgcccgagagccctctggaaatggctgagsagcaaccaaggtcaaggcagggctcgtcatctgtctgctcccttggagttggaacctcgactgcagggttcgggtgttggggaggcagcaggagtggaga

SEQ ID NO: 274816 - DNA, 201 bp, Homo sapiens
atctccacactcttagatcacttgttccataaagttctggtccgcagggctgccacctactgcactgtgtgccctgtgcttgcccgtgctgcacttcccamatcctaggcaaagtgcccagttgtgcagcattcgatcagagattagccttgctccccagaggacatgggcacggccataaacaaatcctggcaccaggtg

SEQ ID NO: 274817 - DNA, 201 bp, Homo sapiens
ttaaaatagatgagataggttagaaatcactatctccgctgggtgcggtggcttatgcctgtaatcccagcactttgggaggccgaggtgggcagatcacstgaggtcgggagttcgagaccaacctcaccaacatggagaaaccctgtctctactaaaaatacaaaattagctgggtgtggtggcacatgccatgtaatc

SEQ ID NO: 274818 - DNA, 201 bp, Homo sapiens
gagaaccgcccatgacaacaagcagcctgtcccaggtgccaatagtgtggaggttgggggaccctggcttagaggaaagaggtgacaaaccctaagatctytgaaggaggcttcccggggagatttacatgctctggcaaggttccctgttcccggggccacgtcctggatcctgagatgctcccacgcttcaccctcctg

SEQ ID NO: 274819 - DNA, 201 bp, Homo sapiens
ggatccctcctgtgcatctccacactcttagatcacttgttccataaagttctggtccgcagggctgccacctactgcactgtgtgccctgtgcttgcccrtgctgcacttcccacatcctaggcaaagtgcccagttgtgcagcattcgatcagagattagccttgctccccagaggacatgggcacggccataaacaaa

SEQ ID NO: 274820 - DNA, 201 bp, Homo sapiens
catggtgaaaccctgtctctactaaaaatataaaaattagccgggcatggtggcgggtgcttgtaatcccagctactcaggaggctgaggcagtagaaccrtttgaacccatgaggtggaggttgcagtgagctgagatcgcaccactgcactccagcctgggcgacagagtgagaccctgtctcaaaaaaaaaaaaaaaa

SEQ ID NO: 274821 - DNA, 201 bp, Homo sapiens
gaggcggagcttgcagtgagcaacttctttttttttgtttgtttttgactgtgcttgttccctaaggaacaaagtattaaacaggaaaagaaatcaccctrtgttcctaaaaggggatggcagagtggggacaatgtgatgagcccatggggctttcagagccaggagcgcacctatgacctggggcactggttctcaggg

SEQ ID NO: 274822 - DNA, 201 bp, Homo sapiens
gcggggctctttggccacagagcactgccccaccagcctccattgcttctttccttggaggggacatggcataggggcttcctgccctgcctgcctctctstgctgcagaaaggaagtcagcatccctgtcttgctcttcatttccactggagaatgcgaggatccctcctgtgcatctccacactcttagatcacttgtt

SEQ ID NO: 274823 - DNA, 201 bp, Homo sapiens
cccaatcctcctcctcctctgggccgactggggtggagaccggatctgggacccggggaggcggcgctgcggtgaaagtcccagcggtggagaacagggcaagcatctaccgcgcgcgccgggacccacgcgtcctccccttcctcggggtttgtctggaggcagggactccccaagaggggcgctcgggccagacggctt

SEQ ID NO: 274824 - DNA, 201 bp, Homo sapiens
tccactaagtgttgtcacttgactgagccccatctcctcatctataaggtacacctgtacctgtttcaatgagactgatttgtggcaaagcacccagcaaytgtaaccactagatgaatgcaatggggtgttatcaggcaaacgggaataagaacaagtattatgaaacagctagaatggaaagtatgcaaagaggaattt

SEQ ID NO: 274825 - DNA, 201 bp, Homo sapiens
caccctgactgtgaatttaagagcagccaagtcaaattttatctccaagtcttggacccatatatccaatctaactccatttggaggtgtcccagccattkcaaatccaacatattcaatgtaagtcctctcctcttctcccacaacctaatcctgatggtctccatgttaatgaatggctccatcatccacccagtggct

SEQ ID NO: 274826 - DNA, 201 bp, Homo sapiens
ttatttcttccttgttctggatgttctcagtgcttacctgaccttaacactgagttccctccaaaaatcagtgctcacatctctcctaacagaggactagratgacctactcttccctgaccttttctctgtctcataaaaatgtaatagtctcgtcatttctggtcctgctccagcgctttctgtataactttcatggac

SEQ ID NO: 274827 - DNA, 201 bp, Homo sapiens
gcccggcctgttgattactgttttatcgcttgctaactgaagttgtccttttcaccctgactgtgaatttaagagcagccaagtcaaattttatctccaaktcttggacccatatatccaatctaactccatttggaggtgtcccagccattgcaaatccaacatattcaatgtaagtcctctcctcttctcccacaacct

SEQ ID NO: 274828 - DNA, 201 bp, Homo sapiens
tcagcgctttgggaggtcaaggcaggaggattgcttgaagccaagagtttgagaccagcctgggccacatagcaagaccctgtctctactaaaaataaaaraattagccggggatggtggtgcatgcttgtagtcccagctactggggaggctgaggccggaggatggcttgagcctgggatttgaaggctgcggtgagct

SEQ ID NO: 274829 - DNA, 201 bp, Homo sapiens; identical to SEQ ID NO: 54602

SEQ ID NO: 274830 - DNA, 201 bp, Homo sapiens
ggtcttgcttcatcctcttattttgtacagaaggcttttgtttgggatgtctgctcacactcaaagacagagaggccttactgtctttatgtctgcagtcygtggagtgaatgaaggatgctcagggctgacaccagcatgaaatgtgatgggagaggttggggactgtgtgaatgtgaggaaagggagcccatctgcccc

SEQ ID NO: 274831 - DNA, 201 bp, Homo sapiens
cttgaacccgggaggtagaggttgcagtgagccgagactgcatcactgccctccagcctgggcgacagaggaagactccgtctcaaaaaaaaaaaagaaaraagaaaaaagaaagaaaatgaaatgaggcaaaaagtaggctttgaaaatgttatcgatgagtttgtttccattaaagccagaagtgcacttttttttttt

SEQ ID NO: 274832 - DNA, 201 bp, Homo sapiens
cttgccaaggctcaggaggccacacagaacaaagggactgtttctgggggttcttcagctggttgtgccgtgaccatggccattggcgccaagatgcaagycttggggacagggtggacctggttcccacccacagcctcttccctcaggaatccatgctctccctgtgatttggacaatcattttactcacctggatgag

SEQ ID NO: 274833 - DNA, 201 bp, Homo sapiens; identical to SEQ ID NO: 54604

SEQ ID NO: 274834 - DNA, 201 bp, Homo sapiens
gaagcttagagcaggactcaggggcctgttctgtgggccactgcaggccccgagactggccacctcgagagcaacgtctgcagtgctggctcctccagcamctccgtccactggagactcatgaaaggctcctgtgaggcctccctggctcggacctctccatggccggcctcagccctggccttaataatagtcttcctg

SEQ ID NO: 274835 - DNA, 201 bp, Homo sapiens; identical to SEQ ID NO: 54605

SEQ ID NO: 274836 - DNA, 201 bp, Homo sapiens
cagccttgttttgttcttcttttgccatatccccgttttctgagggggctggtgagaccattatcccggtagcagtgtaaaggggcctcagaagccgtgcsgtgcctgagatcctcctcctcctcccatccgggaaaccacctctgctgctctgactgtctgaagctaacctcctgggcttcctgcttgaggcagaccttc

SEQ ID NO: 274837 - DNA, 201 bp, Homo sapiens; identical to SEQ ID NO: 54599

SEQ ID NO: 274838 - DNA, 201 bp, Homo sapiens
agacccacagcgggagggaagtggccgctatcccactgggcagaatgcagaatgtgggggccacctctttgtctctctgacaaggtctctgcccaatataragcaaggctcccagccagccccgctgaggtcaggagaggggctcccctattccatctccctgagggtcatcctgtgcccctcatgctgtgccacttggtc

SEQ ID NO: 274839 - DNA, 201 bp, Homo sapiens
actccatctggggctggcgcatgctctgagctcagtcatggcagggctggattctggccttgtgggggcctgaagtgctatccccgagggttgaaggttcygggaactgctcctaagaagggcctgttacaagcgagctcggttccctggtggcttgcatggctcatccccacccctctctccccacagggtgcctctgcc

SEQ ID NO: 274840 - DNA, 201 bp, Homo sapiens
ggatgcctctaagcgcctgtctctctcctgcagttgggccgccgctgctcatccccatgtatttccagtaccagatcatcatgaccatgatcgtccataaraactgggtggtgagttggggacacagctggcttggcatggggaggagggtgactgggacagggggacccgggggtcctacgctgcctcctcgtgtgcccc

SEQ ID NO: 274841 - DNA, 201 bp, Homo sapiens
cggaaggctgaggtaggagaacctgggaggcggaggttgcagtgagctgagattgcaccactgcactccagcctgggcgacaagagcaaaactctgtctcaaaaaaaaaaaaaaaaaaaatggaagagaatcacagcagaggaagtagcatgaacaaaaaatgctttcattacatctcatcccgagtccagggagaaccgg

SEQ ID NO: 274842 - DNA, 201 bp, Homo sapiens
tcatttgtgtcttcaacacatgtttttatgttttttcaggacctaccctggctggtactgtgctgggagccgctggggaccccaggccctggccggtccaygcttctcagccaccctacacaggccacccatacgtgctcccttttagggcctgaaccttcaaagcctctgtgagatactccctggttctgcctttcagct

SEQ ID NO: 274843 - DNA, 201 bp, Homo sapiens
ggaaggctgaggtaggagaacctgggaggcggaggttgcagtgagctgagattgcaccactgcactccagcctgggcgacaagagcaaaactctgtctcaaaaaaaaaaaaaaaaaaaatggaagagaatcacagcagaggaagtagcatgaacaaaaaatgctttcattacatctcatcccgagtccagggagaaccggg

SEQ ID NO: 274844 - DNA, 201 bp, Homo sapiens
acctgggaggcggaggttgcagtgagctgagattgcaccactgcactccagcctgggcgacaagagcaaaactctgtctcaaaaaaaaaaaaaaaaaaaawggaagagaatcacagcagaggaagtagcatgaacaaaaaatgctttcattacatctcatcccgagtccagggagaaccgggactgcccacctcactgcct

SEQ ID NO: 274845 - DNA, 201 bp, Homo sapiens
tcgagcctctaagctttctttctttcttttcttttttttttttttttttgagacagactcttgctctgttgctcaggctaaagtgaagttggtatgatctkggcctcctgggttcacaggattctcctgcctcagactcctgagtagttgggattacaggtgcccgccaccacgcccagataatttttgtagttttagtag

SEQ ID NO: 274846 - DNA, 201 bp, Homo sapiens
gcccttcccccccagttcatgtagacaggtctcgtctccctctagccatatggtattctgttgtacttctgaaccataacaggacctacattattttatawggtagacaaattgagtgtcagtagttcataatttctttcttttcttttcttttcttttttttttgagacagagtcttactctcttgcccagtctagagtg

SEQ ID NO: 274847 - DNA, 201 bp, Homo sapiens
tcaggctaaagtgaagttggtatgatcttggcctcctgggttcacaggattctcctgcctcagactcctgagtagttgggattacaggtgcccgccaccaygcccagataatttttgtagttttagtagagacggggtttctccgtgttggccaggctggccttgaacgcctgacctcaagtgatccacacgcttcagcct

SEQ ID NO: 274848 - DNA, 201 bp, Homo sapiens
ccctgtctctaaaaaaatacatatttttttagttagccaggcatggtagcacgtgcctagtctcagttattggggaggctgaggtgggtggatcccttgasctgagcccaggaggttgaggctacagtgagctatgatcacaccactgcactccagcctgggtaacagagcaaagctatgtctcaaaaaagaaaaaaaaag

SEQ ID NO: 274849 - DNA, 201 bp, Homo sapiens
ccaggctggccttgaacgcctgacctcaagtgatccacacgcttcagcctcccaaagtgaagcctctgagctttcactctctgactttttttttttttttytctctctctctctctctcatgggttttgaggcctgccagtttccagggccctgaggttactgcaaaggccacagctgtccgttgctgttcccacccatgg

SEQ ID NO: 274850 - DNA, 201 bp, Homo sapiens
cccgatgtgaacatgctgcacgtgtttgttctgggcgaatggcagcccatcgaggtacgactaagaggatggtgttgacctaggaagtgtttgtcctgggsgaatggcagaccatcgaggtacaactaaggagatggtgttgacctaggaagtgtttggcctgggcgaatggcagccatcgaggtacgactaaggggttgg

SEQ ID NO: 274851 - DNA, 201 bp, Homo sapiens
cccgagcaagcaggtggcgtgtagttgcccattgcatttcagtgggctgcggtccagcttctagaggcctgagtgtgaggtgtgtgcacatctggggcacrcacttggtgccagggcagaggagagggcaggttgcacctaacttcatctttccccgcaggacctggcctgggccgtcagctactacatccggttcttcat

SEQ ID NO: 274852 - DNA, 201 bp, Homo sapiens
ggggtttcaccatgttggccaggctggtcttgaactcctgacttcgtgatccgcccacctcgccctcccaaagtgctgggattacgggtgtaagccaccgygcctggcccataatttcttttgaataaaagccccaccaatgcgttccacaaaaaaatgttcttatttaatacattctttttttttatgtagagcctctat

SEQ ID NO: 274853 - DNA, 201 bp, Homo sapiens
ttgctcctcagtttctttgtgccagagatttttccatttgattcttcccaggaattttgttccttttgacaacaaacgcaaatgtgtcatttgattcctcsagcctctaagctttctttctttcttttcttttttttttttttttttgagacagactcttgctctgttgctcaggctaaagtgaagttggtatgatcttgg

SEQ ID NO: 274854 - DNA, 201 bp, Homo sapiens
ttttgtttttgtttttgtttttgagacaaggtcatgctctgtcaccttggctagagcgtagtggcgcaatctcggttcactgcagcctcaacctcctgggmtcaagccatcgttctgcctcagcctcccgagtagctgggactacaggcacccgccaccatgcccggctaattcttgtatttttagtagagatggggtttc

SEQ ID NO: 274855 - DNA, 201 bp, Homo sapiens
cgcaatctcggttcactgcagcctcaacctcctgggctcaagccatcgttctgcctcagcctcccgagtagctgggactacaggcacccgccaccatgccyggctaattcttgtatttttagtagagatggggtttcaccatgttggccaggctggtctcgaactcctgacctcaagtgatccgcctacctcagcttccca

SEQ ID NO: 274856 - DNA, 201 bp, Homo sapiens
cagaggattaaagtagttaaaaaaatatttaacaatgaagaagttgatgtattaaaagtcataacattctaagtgtaaatgctttatttataccaaaacaraacttattatacttttgcttcagttgaatgtaattagaaattagttaagaccgggcgaggtggcttggccgggtgtggtggctcatgcctgtaatcccag

SEQ ID NO: 274857 - DNA, 201 bp, Homo sapiens
atcaggatgaactgagggaaatggaaaaacatgcaaccctctaaacatgttcgtgtgtcattttttaatggttgattttttttccagaggattaaagtagwtaaaaaaatatttaacaatgaagaagttgatgtattaaaagtcataacattctaagtgtaaatgctttatttataccaaaacagaacttattatactttt

SEQ ID NO: 274858 - DNA, 201 bp, Homo sapiens
tccgtctcaaaacaacaacaacaacaacaacaacaaaacaaaacaaaacaaacagaaaaaaagtgtagtcactctttctttcttctctttctttctttctytctctctttctttctctccctccctcccttccctccctccctcccttccttccttccttccttccttccttccttccttcctttccttctttctttctaa

SEQ ID NO: 274859 - DNA, 201 bp, Homo sapiens
ttcatcaggtgcctgggctttgctgattcatccctgggccctccactggcactgatgatggctttggcatgagaagaggctcggacggctccactttgccyggggacctcccatcctggccccttggcaggggctgtcctgggctggttgggagagtggatctgttcccactgtggctgggcccccggaggcccctgcgct

SEQ ID NO: 274860 - DNA, 201 bp, Homo sapiens
cgaatggcagaccatcgaggtacaactaaggagatggtgttgacctaggaagtgtttggcctgggcgaatggcagccatcgaggtacgactaaggggttgrtgttgacctaggaagtgtttggcctgagcagggagcagggaaggaagcctagagagctgacattcagccaggcaggtccacatctcctgctacacagata

SEQ ID NO: 274861 - DNA, 201 bp, Homo sapiens
cataaaccatttttcctatgtgactgtgcagtgggataaaagctctcatactgctggtagaagtgtaagttgattaaactggaaaaaatagtttgacaacttatatagaaatttaagattttttttttttttgagatggagtctcgctctgtcgcccaggctggagtgcagtggcctgatctcagcttgctgcaagctcca

SEQ ID NO: 274862 - DNA, 201 bp, Homo sapiens
ttgctgggagcttcagggctgagcaagaaagggcagcaggaatcccccagagggacaggtggggcatctgggtgggctgaggccatcaggcaggacggtawgatgtggacgggtggcctggagaccctgggtaaggctgggccccctgggaatgaggccgggcccttgggccttcctttgttccctgacactcatcccctc

SEQ ID NO: 274863 - DNA, 201 bp, Homo sapiens
tcctcatcgcccccttcctctgccttcccctcccttccccctcaccgcagccatggcgcccagaccaagaaagcagagcagaggttccgcaattcttttctaagattgtctgactagagggttcaaagccctctaatccaaggccggcttgtgtctctagggaggttgcagaaaggcgccagaatgtggatggcgcggaca

SEQ ID NO: 274864 - DNA, 201 bp, Homo sapiens
aaaacaacaacaacaacaacaacaacaaaacaaaacaaaacaaacagaaaaaaagtgtagtcactctttctttcttctctttctttctttctctctctctytctttctctccctccctcccttccctccctccctcccttccttccttccttccttccttccttccttccttcctttccttctttctttctaatctggatg

SEQ ID NO: 274865 - DNA, 201 bp, Homo sapiens
caacaacaacaacaacaacaaaacaaaacaaaacaaacagaaaaaaagtgtagtcactctttctttcttctctttctttctttctctctctctttctttcyctccctccctcccttccctccctccctcccttccttccttccttccttccttccttccttccttcctttccttctttctttctaatctggatgttgaagt

SEQ ID NO: 274866 - DNA, 201 bp, Homo sapiens
ctcccaagtacctgggattacaggcaccggccaccatgcccagctaatttttgtatttttagtagagatggggtttttccatgttggcgaggctggtctcraactcctggcctcaagtgatctgcccgcctcagcctcacaaagtgctgagattacaggcatgagccaccacgcctggcctattttttaattttctttttt

SEQ ID NO: 274867 - DNA, 201 bp, Homo sapiens
gatcaggatgaactgagggaaatggaaaaacatgcaaccctctaaacatgttcgtgtgtcattttttaatggttgattttttttccagaggattaaagtarttaaaaaaatatttaacaatgaagaagttgatgtattaaaagtcataacattctaagtgtaaatgctttatttataccaaaacagaacttattatacttt

SEQ ID NO: 274868 - DNA, 201 bp, Homo sapiens
gtacctgggattacaggcaccggccaccatgcccagctaatttttgtatttttagtagagatggggtttttccatgttggcgaggctggtctcgaactccwggcctcaagtgatctgcccgcctcagcctcacaaagtgctgagattacaggcatgagccaccacgcctggcctattttttaattttctttttttcttcac

SEQ ID NO: 274869 - DNA, 201 bp, Homo sapiens
ggagtgcagtggtgcgatctcggctcactgcaacctccgcctcctgggttcaagcgattctcctgcctcaacctcctgagtagctgggagtacaggcgccrgccaccatgcctggctaatttttgtatttttagtagtgatggggtttcaccatgttggccaggctggtctcgaactcttgactcgtgatccacccgcctt

SEQ ID NO: 274870 - DNA, 201 bp, Homo sapiens
gcctcaacctcctgagtagctgggagtacaggcgccggccaccatgcctggctaatttttgtatttttagtagtgatggggtttcaccatgttggccaggstggtctcgaactcttgactcgtgatccacccgccttggcctcccaaagtgctgggattacaggcgtgagccactgcacccggcagataaattgtttatct

SEQ ID NO: 274871 - DNA, 201 bp, Homo sapiens
ggcccttggcttgccggctgcagatctcactggtggccaaccacccctgagctggtcaccagtttcgcagcgagcagcttgcctggccctgagcctgaagyggcctgagaacctggtctctgtccagaatctcaggggcaaagggagagggtgcacatagtggagtgctttgtttcattttatactcttctctgttggatc

SEQ ID NO: 274872 - DNA, 201 bp, Homo sapiens
ggccgaggcgggcagatcatgaggtcaggagttcgagaccagcctggccagcatggtgaaaccccgtctctactaaaaatacaaaaaattagcctggcatsgtggtgtgcacctgtagtcccagctactcaggaggctgaggcaggagaattgcttgaacccgggaggcggagcttgcagtgagcaacttctttttttttg

SEQ ID NO: 274873 - DNA, 201 bp, Homo sapiens
attcctctctgctcagtgctctgaggctacagggtgacaaggcaggtgtgcctatgctgagggccatggtgactctccattctgctgacttcctgagcccygtctctggatcaggtccgaaccacaaagccatggtgtactactcattatgaagacaggcacacacctttcttgtcttttggctcagcggattgtattttt

SEQ ID NO: 274874 - DNA, 201 bp, Homo sapiens
ggatcacctgaagccaggagttttgagaccagcctgagcaacatgggcgaaaccctgtctctacaaaaagctgggcgtggtgatgcgcgcctgtaatctasctactttggaggctgaggtaggaggatggcttgagcccaggagtttgaggctgcagtgagctgtgatcacaccactgcactcaagcctgggcaacagagt

SEQ ID NO: 274875 - DNA, 201 bp, Homo sapiens
tcctgttggacagcagttgagacagagggaccaggattcctctctgctcagtgctctgaggctacagggtgacaaggcaggtgtgcctatgctgagggccmtggtgactctccattctgctgacttcctgagccctgtctctggatcaggtccgaaccacaaagccatggtgtactactcattatgaagacaggcacacac

SEQ ID NO: 274876 - DNA, 201 bp, Homo sapiens
gttgggccagggcaatggttcacacctgtaatcctagtactttgggaggccaaggctggaggatcacttgagcacaggcattcgagaccagcctgggcaartaagtgagacccccccatctctataaaaacttaaaaaaaattatccaggtaaggccagacacagtggctcatgcctgtaataccagcactttgggagcct

SEQ ID NO: 274877 - DNA, 201 bp, Homo sapiens
taaagttttcttttttaaaaaagtgtggtcaaccattttggtcatttgacgtgtacagttcagtggcatcaaataagcacatttacattgttatgtaaccrtcaccaccatccagttctcatcttccccaaattgaaattccacatccattaagcactcactcctcattctcccacctctcagcccctggcaggcaccatt

SEQ ID NO: 274878 - DNA, 201 bp, Homo sapiens
gggagggcctcagagcctccctgggagccggggtttgacaacaactagtggcgtctcctctctcctggccagtttcattttccttctcctccatccctttycaggaaggtgccagatgacaatctaggggaaagacaggacagaaacaccgaaaaatgtcatttgatgacaagagtggctttggggtgtgtggtccggggc

SEQ ID NO: 274879 - DNA, 201 bp, Homo sapiens
ggaacgctttttacataattctgtgtttatttttttatttacttcatcacagcacatttccagtgccaaggtagtattcggtcttgtccttttcattgacmaccctggacatgtaggtgaggaactagtaagagatggtgggtggtgtggtttgtgcaccatgcaaggcactcagctcacgagcagtcgaggctcaagtcc

SEQ ID NO: 274880 - DNA, 201 bp, Homo sapiens
tgtattttcttatctgtaaagtgaaagtattgaactaaacagtctctatctcgaaaatctctaaatgttatttgaagttttttctttacagtacaatgggrtagatgagacaaacatctgaaaatgtatggagagtgtttgctaaataacctgttagtagtttaatgcagaacaaacagaatatatagctgtaaataggag

SEQ ID NO: 274881 - DNA, 201 bp, Homo sapiens
cattgtgtagctgtcaatgccttagctttagaagaataaaacgcatatctccacctcctatgtcatttgacagcttattaataaaacttgataatcattaygcatccacacatatgatggaaagaggaacaatattaaaacatgacatagaacctcagttcccaagccctgtcacaaacctttatagggtatgaggctcct

SEQ ID NO: 274882 - DNA, 201 bp, Homo sapiens
ctagtctggcaaatgttatgttaatagtttatcacgctatggtgataatgagaccaaggttgcattttgatgccaggtaaggttattctgtttagtcacawactcctgaccctagccagctgactgcttgaaaagatatactgtagttgctttagtataagcaattactaaaaaattaattgatataatttaaaattttag

SEQ ID NO: 274883 - DNA, 201 bp, Homo sapiens
tccaaggtaggaccttaggaacattcatgaagtggtaagggggataaggagcccataaagggaattaacatttggaaagcatccactatctttatatttgwttatgacaacagacataaacaggaagtattaacctccttttatttccattttatcatggaaaaacctgaggctcagagacattaagtaacttgcccaagg

SEQ ID NO: 274884 - DNA, 201 bp, Homo sapiens
cagaatttggcacactggctctcccggatccatgcaagaatgtttttgaacgtttcatgtccaggtttgagctgcctggtaaagctgcaggtgatagtgaygattatttaaactattacgatatataaccatctatacaaacataaatcttgaaaatagatttttttgtgtatgtgagaggatgttgaaactgctttctcc

SEQ ID NO: 274885 - DNA, 201 bp, Homo sapiens
ccaatgaagaagatggtggggttattctttctgtggtgatcactcccaaccaggtaaatatatttccctatcaccagtcagaaagaaaagtagcactgagwcatctgataaatcaaggatgcacactcatctgtcgatagtttactttgattccttttcccttctcttcccctccttactatttacatacccttttatctc

SEQ ID NO: 274886 - DNA, 201 bp, Homo sapiens
tatggagaagctgtgttgggagttcccaggatcacccctaggtttgataattcattaggaggattcataagactcaaaataggtcaggcgaggtagctcaygcctgtaattccagcactttgggagcccaaggcaggaggactgcttgagcccaggagttcgagacaagcctgggcaacatagtgagataccatctttatt

SEQ ID NO: 274887 - DNA, 201 bp, Homo sapiens
atgtggtggaaaaacgcactggacaggtggagtattttgagtatatttatcatgaaaattgttggaaacaaaggcaaatttccatatagttgatttttttwaaatcttccctggttaaaagtgcataagacacttttaatcaaggatattaccttcttctataggttgagctagctacttattaattagtacgatggattt

SEQ ID NO: 274888 - DNA, 201 bp, Homo sapiens
ttcctctagagaagaatttcacttgcttatataatttgaagcaggattcagtccatgcaagagctggactatttcttgtttattcttattcatagggtacmgacctatgaggtcccaacccaaaggactagaggtttactaggccttcctcttcttggaaaatcgtaaattcaaacttttgtcactctagccctcaaaact

SEQ ID NO: 274889 - DNA, 201 bp, Homo sapiens
gttcatctatgttgtagcatgtatcagaattgcattcccttttaaggttaaataatattcgattgtatacacacacacacacacacacacacacacacacwtatatttgtttattcatctgttgatggatacttgggttgtttccatctttggagtattatgaataatgctgctatgaacattggcatacaaatatccaaa

SEQ ID NO: 274890 - DNA, 201 bp, Homo sapiens
gacaatcctactaaagtctaagcatgttgattgaatatctttttatactcctgattcataatgctattatatttgcctactttttacctctctaaagagayagtatcttaaatttactctatctggatctcattacaaaaaaaaatttagtaatgactgcaccttaaaaaaaattagtctttgaatttatcatcagtatac

SEQ ID NO: 274891 - DNA, 201 bp, Homo sapiens
ttgacttttccagaatgtcacatagttggaatcatacagtatgtagacttttcagactgacttttttcacttagcaatatgcatttaaggttcctctgtgwcttttgtggcttgagaactcatttctttttatcgctgaaatgtgtattcattcatttattgaaggacatcttggttggttccaattcttggcaattatga

SEQ ID NO: 274892 - DNA, 201 bp, Homo sapiens
ttttaaaacttttttgtagagacaggggccttgttatgttgccaaggcttttctcaaacttctgggctcaagtgatcctcctgcctcagcctcccaaagtsctgggattacaagtgtgagctaccacacctggcctctatttttggagaaatgactgttcaggtccattgcccattttttatttatttttaattaattaat

SEQ ID NO: 274893 - DNA, 201 bp, Homo sapiens
gcaggaggaggagcacacgaaccctgaccctgcttcttggtgcaggccactccaggccttgcttctgtaagagactctgtggctggctccagagctgcccrgcccccataaagggggctgaaaggaggatgggtggtccttgaggaggggaagggtctgcagagaatcgctcagacaccaggtattacccagctattcccc

SEQ ID NO: 274894 - DNA, 201 bp, Homo sapiens
tctcctcccacaatttcaagttctctgactaatcaggttgtgctgggaacctgtcccatttccttatctttatatttgaaatgaagatctatcactctgtycctcatttttatctcatgttttcttactgatatttatttattttctcctgtttgaaggtacaatcattggtttgatgggatggcgctgcttcaccagttc

SEQ ID NO: 274895 - DNA, 201 bp, Homo sapiens
ctcggctcactgcaatctccgcctcccaggttcacgccattctcctgccttagcctcccaagtagctgggactacaggcgcatgccaccatgcccagttarttttttgtattttttagtagagatgggatttcaccacgttagccaggacggtcttgatctcctgacctcgtgatccacccacctcggcctcccaaagtgc

SEQ ID NO: 274896 - DNA, 201 bp, Homo sapiens
cagtaaacatgtatttctggctggcatttgtttagggcatcagtaacgtgtccaggcattcagacaagtccccataactggcacatttcagacaactctartttgccaaataacatttttattgtttgctggaaccttttaggaatgacaaggaactatataattttcattgaacaacctctaaagatgaacctgtggaaa

SEQ ID NO: 274897 - DNA, 201 bp, Homo sapiens
tctatcattgatgggcatttgagttggttgcaagtctttgctattgtgaacagtgcttggctgctatcttaatgtttcctacgaattagagatgaagttarcattatagtacaatgaatcattggttgatcactttggatgtgctgtttcaaaacgttagctaattattttcatagagctaacatttttaagatccagatc

SEQ ID NO: 274898 - DNA, 201 bp, Homo sapiens; identical to SEQ ID NO: 54613

SEQ ID NO: 274899 - DNA, 201 bp, Homo sapiens; identical to SEQ ID NO: 54614

SEQ ID NO: 274900 - DNA, 201 bp, Homo sapiens
ctagctatctttatcagattatcctaatagtgccttttaatgaataaacattcttaacttaatatggcccagtatacagtctcttcctttatgacttataygttgtacatcttgttttagacatcttctcatggcaaggtaatgaaaatattatcctatgttatcttctagagaagtcaagtatctgtatatgcattattc

SEQ ID NO: 274901 - DNA, 201 bp, Homo sapiens; identical to SEQ ID NO: 54617

SEQ ID NO: 274902 - DNA, 201 bp, Homo sapiens
ggggtttcaccatgttggccaggctggtcttgaactcctgacctcaagtgatccacccaccttggcctcccaaagtgctgggattacaggaatgagtcacygcacctggccggcaattgatttttgtttgttgattttatattcactaatatagtaattacacttacaaattctaataattatagattcttttagattttt

SEQ ID NO: 274903 - DNA, 201 bp, Homo sapiens
ggattacaggcgcctgccaccacacccggctaatttttgtatttttagtagagacggggttttgccatgttggccaggctggtctcgaactcctgacctcmggtgacccacccacctcagcctcccaaaatgctgagattacaggcatgagccactcgcccggccaaaaggaaattttttaaaactaaatacaacaagaag

SEQ ID NO: 274904 - DNA, 201 bp, Homo sapiens
agtcaagatgctctgttaatgggagaaaatttttgcaatctacccatctgacaaagggctaatatccagaatctacaaagaacttaaacaaatttacaagaaaaaaatcaaacaaccccatcaaaaagtgggcaaaggatacgaacagatacttctcaaaagaagacatttatgtagccagacacatgaaaaaatgctcat

SEQ ID NO: 274905 - DNA, 201 bp, Homo sapiens
atctccacctcctatgtcatttgacagcttattaataaaacttgataatcattatgcatccacacatatgatggaaagaggaacaatattaaaacatgacrtagaacctcagttcccaagccctgtcacaaacctttatagggtatgaggctcctcactgacctacataagaggaaaataagaattaagcaaccactacaa

SEQ ID NO: 274906 - DNA, 201 bp, Homo sapiens
agtctcgctgtgtcgcccaggctggagtgcagtggtgcaacctcggctcactgcaagctccgcctcccaggttcacatcattctcctgcctcagcctcccragtagctgggactacaggtgcccgccaccacgcctggctaatttttttgtatttttagtagagacggggtttcaccgtgttagccaggatggtctcgatc

SEQ ID NO: 274907 - DNA, 201 bp, Homo sapiens
tttcctcgctatttctacggatttgttttaaacaattacagttatatgtagtattttttgctccactttaataaaacttcacactatcataagcctttttwtccatgttgctaccaagtctgaacgatcattatttttaatggctagatgaattccaggaattattgttttttaaaaaaatattgtggtaaaatatagata

SEQ ID NO: 274908 - DNA, 201 bp, Homo sapiens
gtggaacatctatactctggtgttctacaaatagttcagactctctcaaaaccgagccattgacttttcccagtgcttgttcttcatgtcttctccatccsagttaaagcatcaccagccagccagtcattcaggtccaacattttggaccctctctttgtcgctgtctacatcctatcagtcatctctgacttgtttctg

SEQ ID NO: 274909 - DNA, 201 bp, Homo sapiens
ttgcctgggctcctcgttggcttcttcaatctgtatgctgttctttgtattccaggatgccggtcacacagtttcactctcctgtttcacaacttcacactttcctgttgaaggtcattaagccttagtctaagtgctggtggtcgtgggcagacctgtttctccaacattatcacctgctccgcccacatgctaccccct

SEQ ID NO: 274910 - DNA, 201 bp, Homo sapiens
atggtgataatgagaccaaggttgcattttgatgccaggtaaggttattctgtttagtcacatactcctgaccctagccagctgactgcttgaaaagatayactgtagttgctttagtataagcaattactaaaaaattaattgatataatttaaaattttaggcaaccttaaagcccacaaatagtaatcatacatgaaa

SEQ ID NO: 274911 - DNA, 201 bp, Homo sapiens
aacaacaaggcaaaataagagattttgtctgagcacagtggctcacacctgtaatcacagcactttgggaagatgaggtgggaggattgcttgagaccagragttcgaggctgcaatgagctatgatcacaccactgtactccagactgggtgatagtgcaaggccctgtctctaaaaaaaatgaagaagaagccagtgga

SEQ ID NO: 274912 - DNA, 201 bp, Homo sapiens
taaaaagaaaagaaaaggaaaaaaagataaaaagcaagctgagaacatgcaacccaagctattctaagcagttcccttttttataaaggaacaggaaataygtatagtaaagctgggagacagtaaacatgtatttctggctggcatttgtttagggcatcagtaacgtgtccaggcattcagacaagtccccataactgg

SEQ ID NO: 274913 - DNA, 201 bp, Homo sapiens
tcctatcagtcatctctgacttgtttctggagtttgtcctttgctcactggtgctgcttcagtttaggtgcttatcttctcttgcttgaattattgcctgsgctcctcgttggcttcttcaatctgtatgctgttctttgtattccaggatgccggtcacacagtttcactctcctgtttcacaacttcacactttcctgt

SEQ ID NO: 274914 - DNA, 201 bp, Homo sapiens
gcctgggcaacatagcaagactccatctctacaaaaaacaaaaattaaacaaaagtaaaaagaataaagttacatgaatctgggcagaatactaaatagcrtcagcacctttagtctctaccattctctagacaggatttcaggatccatagtctaggctcccagttcctggactatcgccactgtaatgattgtccccct

SEQ ID NO: 274915 - DNA, 201 bp, Homo sapiens
ttcatcatttatttaatattaaaaataatttgaaatagcttatttaatacctaataagtaagaaacatggcaaagagagccaagatatgtgtttaaaagcmtatgtggctgggcacggtggctcacgcttgtaatcccagcagtttgggaggctgaggcaggcagatcacttgagctcaggaatttgagaccagcctggac

SEQ ID NO: 274916 - DNA, 201 bp, Homo sapiens
attacaagtgtgagctaccacacctggcctctatttttggagaaatgactgttcaggtccattgcccattttttatttatttttaattaattaattaattwatttatttttaacttttaattaaaaagtaaactttaatattgaaaatgcaaacttggggaagacagaaaagatcacacacaaggctgtcacttcacactt

SEQ ID NO: 274917 - DNA, 201 bp, Homo sapiens
gtactatattttcaggaattatagaaggtattattcattcacttaaaggtacctctgtagaaataacctaaaactgcagaacaatctgaaagatctaaacrtggtgtgcttagaaactgcagattttagatctaatgtatactgcattaataaacgatataaagtgttgaaaaaaatgaaaaaccaataactcttcagtat

SEQ ID NO: 274918 - DNA, 201 bp, Homo sapiens
aaattagccagacatagtggcatgtgcctgtggtcccagctactcaggaggatgaggtgggaggatcacttgagaccagaaggttgaggctgcagtgagtygtgactgcaccactgcactccagcctgagtgacagagtaagaccctgtctcaaaaaaaaaaaaaagaagtaatttcagcaatgccttcaaaatatatcaa

SEQ ID NO: 274919 - DNA, 201 bp, Homo sapiens
cttaagcaagcaatgtttaaatcaaagcatatttgcttctacattctgtattctacttttatatatactggacctgccacttcagaggggaaaatctttcyaattttcttattttgaactttttggacctgtttcctaaaggaaagggaaaaagaagaaaactaaaaaaaatttttttcattgtttgtgttttcccctgca

SEQ ID NO: 274920 - DNA, 201 bp, Homo sapiens
agtggcttatgcttataattccagcactttgggaggccaaggcgggtgtattgcttgagctcacgagttgagaccagcctggacaatatagcaagacctcwtctctacaaaaaatacaaaaattagccagacatagtggcatgtgcctgtggtcccagctactcaggaggatgaggtgggaggatcacttgagaccagaag

SEQ ID NO: 274921 - DNA, 201 bp, Homo sapiens
tcataatatgacaaatactatttcaccattctaaactacatttttttttttttttgagatggagtcttgctctgttgccaggcaggagtgcagtggcgcartctcggctcactgcaacctctgcctcccaggttcaagcgattctcctgcctcagccactggagtagctgggactgcaggtgtcctctgccatgcctggct

SEQ ID NO: 274922 - DNA, 201 bp, Homo sapiens
catttaaaaagcgaagccacaaacttttccttacagttttcaatgtttaactatttaagtagatcatttctagtgtaatcatatggacaaaaatgattatytaggaaggacagttatcttatttgtctactttagcataatcttgataaagctgaaaaattgtaaagtaaatggaaactttaatacatataagatatgaag

SEQ ID NO: 274923 - DNA, 201 bp, Homo sapiens
aggccgaggtgggtggatcacaaggtcaggagatcgagaccatcctggctaacatggtgaaaccccgtatctactaaaaatacaaaaaattagctgggtgwggtggcacgtgcctgtgatcccagctactcaggaggctgaggcaggagaattgcttgaacccgggaggcagaggttgcagtgagctgagatcgtgccact

SEQ ID NO: 274924 - DNA, 201 bp, Homo sapiens
agatctgcccattaaaaatctccagtggtctcaaatttgcaggtagattggagcaaatttattgctgtgaatggagcaactgcacatcctcattatgaccyggatggaacagcatacaatatggggaactcctttgggccatatggtaaagttgcaataaaggtctttttagaaataattgagaccaggcacggtgtgtat

SEQ ID NO: 274925 - DNA, 201 bp, Homo sapiens
aaagctgaaaaattgtaaagtaaatggaaactttaatacatataagatatgaagataactatttctaaaagcttaggaacttgttctttttctttctttctttttttttttttttttaatgagacggggttttgccatgttgcccaggctggtctcaagcaatccacctgcctcagcctcctaaattgctgggattacagg

SEQ ID NO: 274926 - DNA, 201 bp, Homo sapiens
ttcttcactgtctttttagctcaccagtgccttcaggcagctgttttaaacattttgtccataatttctagttgttttcaatggggtagttgatccatatratgtaatctaccattatttgaagcgtcttttgggttagctatggttttgcaagagaaaacaattgtaaatataattaaaagtcatttttaaaaagttggt

SEQ ID NO: 274927 - DNA, 201 bp, Homo sapiens
cagataaggaggattcttcaatgctgttataggaaacagcaaacatccttctaagtaaaatatttcagcaaaatggatccatgaacccagcagtttttggttctatctatcttgatcattaaaaaaatcaattttataataaattaactctgttaaccaagtagataactttgtaactcattcataatatgacaaatacta

SEQ ID NO: 274928 - DNA, 201 bp, Homo sapiens
tgaagtgatatctcattgtggttttgatttgcattttcctaatgactaatgatgttgagcatatgtttaagtagttagggaaaaacttgccccagtatccrgttggtttctgtgggtttccttttcatcccaaacctggcccctttgttcttcactgtctttttagctcaccagtgccttcaggcagctgttttaaacatt

SEQ ID NO: 274929 - DNA, 201 bp, Homo sapiens
agataaggaggattcttcaatgctgttataggaaacagcaaacatccttctaagtaaaatatttcagcaaaatggatccatgaacccagcagtttttggthctatctatcttgatcattaaaaaaatcaattttataataaattaactctgttaaccaagtagataactttgtaactcattcataatatgacaaatactat

SEQ ID NO: 274930 - DNA, 201 bp, Homo sapiens
gatttgtgctgtcaagataatggaagaaccctagaagtttaccagttacagaatctcaggaaggctggggaagggcttgatcaggtaaacattagaatttrtcaagagtcatcaaaataattttgaactccaagatctggctttggctttggaattacatgtttctctctctctctctctctcttttttcttttgagactg

SEQ ID NO: 274931 - DNA, 201 bp, Homo sapiens
ggaggattcttcaatgctgttataggaaacagcaaacatccttctaagtaaaatatttcagcaaaatggatccatgaacccagcagtttttggttctatctatcttgatcattaaaaaaatcaattttataataaattaactctgttaaccaagtagataactttgtaactcattcataatatgacaaatactatttcacc

SEQ ID NO: 274932 - DNA, 201 bp, Homo sapiens
ttcctcctcctcctcctccttctctctcttccttgttctccttcctttcctcctcctcctccttctctctcttccttgttctccttcctttccttcctttycttccttcccttcccttcccttcccttcccttcccttcccttcccttcccttctttccctccctccctcattgctctttcttcttccttcttcttctttt

SEQ ID NO: 274933 - DNA, 201 bp, Homo sapiens
tcctcctcctcctccttctctctcttccttgttctccttcctttcctcctcctcctccttctctctcttccttgttctccttcctttccttcctttccttccttcccttcccttcccttcccttcccttcccttcccttcccttcccttctttccctccctccctcattgctctttcttcttccttcttcttcttttgctt

SEQ ID NO: 274934 - DNA, 201 bp, Homo sapiens
acaataattccctgttccccccacctccagtccctggtaacctctattctactttctgtttctatgaatttgcctattttaggtacttcatgtaagtgggrtcatacaatacttgtccttttgtgtctggcttatttcacttagcataatgttttcaaagttcatctatgttgtagcatgtatcagaattgcattcccttt

SEQ ID NO: 274935 - DNA, 201 bp, Homo sapiens
tcacttgagaccagaaggttgaggctgcagtgagtcgtgactgcaccactgcactccagcctgagtgacagagtaagaccctgtctcaaaaaaaaaaaaargaagtaatttcagcaatgccttcaaaatatatcaaaaatccaaccacttcacaccacctccatggccaccactctactttgagtcactatcccttctcac

SEQ ID NO: 274936 - DNA, 201 bp, Homo sapiens
gagggaaggagttggacatgagtgcaaatggagactgtagttgttggaataggggaagggagtaaaggaacagaatttgaggatattcctggctgctatcttttttttttttttgagtttaagaacttcaactctatgacctgtctattcaccatacatatgagacaggtccattataatccttacctcattatataatag

SEQ ID NO: 274937 - DNA, 201 bp, Homo sapiens
ctcctaaattgctgggattacaggtgtgagccactgtgcccggcctggagctcattctgatttgttaaacatcagccatcccatatcctctcatgctattmtcttagctgtggagtaaagattagaattttcttaggattcaccacaataggggttttctaaaatgtgaggttttttttttttttttttttgacaggggta

SEQ ID NO: 274938 - DNA, 201 bp, Homo sapiens
aattacctattttaattctctacacagtgttatcagtgtctggtattttttatttgttatttgagtgttaagctctgttcccccactagaatgtaatttgwtgagggtagagactttttctagttcatcctgtatccccactacctgtaacagtggtctgcacctgaatagcattcaataaatcgatgccaataaatgaaa

SEQ ID NO: 274939 - DNA, 201 bp, Homo sapiens
tgatgttgctgtagcagaaggactagtctggcaaatgttatgttaatagtttatcacgctatggtgataatgagaccaaggttgcattttgatgccaggtraggttattctgtttagtcacatactcctgaccctagccagctgactgcttgaaaagatatactgtagttgctttagtataagcaattactaaaaaattaa

SEQ ID NO: 274940 - DNA, 201 bp, Homo sapiens
ttaggaattttacagcttagtggaggagacaggcaaatttttgatgaaaaaaagataattttcaatattgtcttttcttttctagaatgaaagcaattttmtcctagttttggatgccaagaactttgaagagctgggccgagcagaggtacctgtgcagatgccttatgggttccatggtaccttcatacccatctgatg

SEQ ID NO: 274941 - DNA, 201 bp, Homo sapiens
acaacttggatttcttggcatgggctggttctgtggaatatgcattaatatctgcttcctctgtgaggttaatatttccattccatccctttgattacagwtaaagaaactgtagcctagaggagaagaaaggagactttttaaacaaaatgtcctgctttttctgctctgtagactattgtaaatttgaagccctctgtg

SEQ ID NO: 274942 - DNA, 201 bp, Homo sapiens
tgagagtttccttctctatcttttcaaagcatcctctttgtacttctgatactgtagttcccagattttagtatgcttaagaatacctgcttgtccttccycagagattctgatttattaggaccagaatggagtccaggaaactgcattttagcagtaacaccaggtatttctgttgcaagtagtcctcataccagactc

SEQ ID NO: 274943 - DNA, 201 bp, Homo sapiens
gatttggtaaaatattttttgtgcttttggtttcctctgcacagttttcaaaaggtacatgggaaatactcctcagaaaaaagccgtctttgggcagtgtsggggtctgccatgtgttgcaccgctgctgaccacagtggaagaggctccacggggcatctctgctcgagtctggggacattttcctaagtggctcaatgg

SEQ ID NO: 274944 - DNA, 201 bp, Homo sapiens
ggagcaaatttattgctgtgaatggagcaactgcacatcctcattatgacctggatggaacagcatacaatatggggaactcctttgggccatatggtaamgttgcaataaaggtctttttagaaataattgagaccaggcacggtgtgtatataaagatgaatactacaggtttgttttttactggcacaagtagagaga

SEQ ID NO: 274945 - DNA, 201 bp, Homo sapiens
gacctacagggagaggcagtgacctagggaagggcagtgtaacccttcacctatggataagaatagccctgctcacttgtgaatctcttatcactctgttrgatgccatttaacagatccatgtcagcatgcagacacagtgatgacatgccaaaggtctatcttcaattaaatttttttcatcaatgatttaattgaaga

SEQ ID NO: 274946 - DNA, 201 bp, Homo sapiens
ttgaaagatttgaaagaaatgggatagtaacaacttgctaaaagaatgcaaatctcacttcttcagagtaatagtgtccctatatgttagctcatttttcyagcctagatttctgaatcactcttaaacttttatgagataaagaattctattttatagcacttaattatttatttgaccacccctctatgttaggcagta

SEQ ID NO: 274947 - DNA, 201 bp, Homo sapiens
ttacatgtcatataggggagtagaatgtctcgtgtgcttcaagctgaatttttgaaagatttgaaagaaatgggatagtaacaacttgctaaaagaatgcmaatctcacttcttcagagtaatagtgtccctatatgttagctcatttttctagcctagatttctgaatcactcttaaacttttatgagataaagaattct

SEQ ID NO: 274948 - DNA, 201 bp, Homo sapiens
tcaagatcagcctgggcaagatggcaagacctcatctctacaaaaaaatttaaaaatatacaaattttgagtataattccttattggatatgtggttgcawtttttttccccagcccataggtcgccttttcgttttgttgattgtttcctttgctgtgcagaaacttttaaatttgatgtcaacttgtcagtttttgcaa

SEQ ID NO: 274949 - DNA, 201 bp, Homo sapiens
ttttttgagacagtgtgacggtctcactctgtcaccaaggctggagtgcagtggtgtgatctcagctcactgcaacctctgcctcctgagttcgagcaatmctcccacctcagcttcctgagtagctgggactacaggcatgtgccaccattcctggctaattttcatatttttttggtagagatggggtttcaccatgtt

SEQ ID NO: 274950 - DNA, 201 bp, Homo sapiens
aaaagatacattttattagattaggagagttcccttttactcctagtttactgagattttttgtcatgaatggatgttggactttatcaactgtttttttyctgcactattgagataatcatataacgtttatcctttattctgtgaacatggtgaagtacattgactgattctttaaaaaatgttcataacagccattga

SEQ ID NO: 274951 - DNA, 201 bp, Homo sapiens
ttagctatggttttgcaagagaaaacaattgtaaatataattaaaagtcatttttaaaaagttggtaacttctgaagccatggtgaccttttataaaaaaraaagctaataactctttatgaatcttaagaatagcactaaatctttactcactaaaaatatttctgcatgctacagagatcatatagactaggtatatgg

SEQ ID NO: 274952 - DNA, 201 bp, Homo sapiens
gagtgcagtggtgctatctcggctcactgcagcctctgcctcctgggttcaagcaattctcctgcctcagcctctcgagtagctgggactacaggcacctrtcaccacgcccggctaatgtatttgtatttttagttgagatggggttttgccatgttggccaggctagtctcgaactcctgacctcaggtaatccgcccg

SEQ ID NO: 274953 - DNA, 201 bp, Homo sapiens
atgttgaaactgctttctccctttgagtgtgtgcttagcgtcgtctacagtaagctgtggtacttaaataactctagggtttggtttcagccatgactgayaatactaatgtcaactatgtgcggtacaagggtgattactacctctgcactgagaccaactttatgaataaagtggacattgaaactctggaaaaaacag

SEQ ID NO: 274954 - DNA, 201 bp, Homo sapiens
cccgcagcacgccgatgacgtcgccggcctcgtccagctccatgtcgccctccgtcgccaggatgcgctgcacggtctgcaggacgttggttgccatggtracatcgccgcagacaaacatgtggccccgctcgaggcacagcacgcggtgcacctccgcagccagctccgtcctcaggatgtcctgcacgtaggtctgcg

SEQ ID NO: 274955 - DNA, 201 bp, Homo sapiens
tcgcttgcctctcgggagcagacctgagttccagccctggctccattgcttgctacctgtgccgttgagcgggtcacttcccttcctgtgctctcgtgccytcgtctgtcagatggcaacaatggcaatgtgctctccagagcacagccaaggccaggcttgtgaacacacagattatgtctgtatagcctatgatggagt

SEQ ID NO: 274956 - DNA, 201 bp, Homo sapiens
taagcagtaaagcttgctcatggctgttgcacatctctgtgactcttgtttctggcaggccccactcctggcagctgagtgctgcacctgccttctcgatyacgagcctgagaactgcacgggggagcagcccagactggctggaaaccatgttttcagagtgcagggtcaagtggcgtgtaggactctgtcaaaagaatg

SEQ ID NO: 274957 - DNA, 201 bp, Homo sapiens; identical to SEQ ID NO: 54638

SEQ ID NO: 274958 - DNA, 201 bp, Homo sapiens
cacagattatgtctgtatagcctatgatggagttgctggcacatagtaacgtcagtaaatgggagcaaagaccacctgggggtgaggaatgggcttggccrgtgggtggggctgagtaaggactggtgcctggaccaaggctgtcaggatcaccctgggcaaagcactgaggctcagccctatccccgagctggcaatcag

SEQ ID NO: 274959 - DNA, 201 bp, Homo sapiens
cttctcgatcacgagcctgagaactgcacgggggagcagcccagactggctggaaaccatgttttcagagtgcagggtcaagtggcgtgtaggactctgtyaaaagaatgacccctttccccaccacatacccacaactgcacaggttaaaacagaaatcttgtcattttataattgtaatccacgccgggtgcagtagct

SEQ ID NO: 274960 - DNA, 201 bp, Homo sapiens; identical to SEQ ID NO: 54640

SEQ ID NO: 274961 - DNA, 201 bp, Homo sapiens; identical to SEQ ID NO: 54642

SEQ ID NO: 274962 - DNA, 201 bp, Homo sapiens
ctgccctccttggggtgcagccctcattcctcctcctttccatgcagcttcaccagcagcagcagcagcaggagccgtggggtgaggctgcagcctccatsctgtccaggccctgctccagcccctcacagccaccctcgcctgatgaggagaagccatcctggtcaagtgacggtgaggagggtggggcctgcaggggac

SEQ ID NO: 274963 - DNA, 201 bp, Homo sapiens
acaccctcaggtcagagccgttccctggccctgggggtttgggctgggtgggagttcgcttgcctctcgggagcagacctgagttccagccctggctccaytgcttgctacctgtgccgttgagcgggtcacttcccttcctgtgctctcgtgccctcgtctgtcagatggcaacaatggcaatgtgctctccagagcaca

SEQ ID NO: 274964 - DNA, 201 bp, Homo sapiens
ccagacaacagtggggaacccagaaggcccggaatctgttccccggagggtttcaggtgaccacagacacccagaaggagcctgaccgggcctcttgcackgactgagacgactcctcagggtcagtattgcctcctgtgaggggagggagaaaggacggcataggtagttggtttggagtccgacttgaagcgatgggag

SEQ ID NO: 274965 - DNA, 201 bp, Homo sapiens
ccatgcagcttcaccagcagcagcagcagcaggagccgtggggtgaggctgcagcctccatcctgtccaggccctgctccagcccctcacagccaccctcrcctgatgaggagaagccatcctggtcaagtgacggtgaggagggtggggcctgcaggggacagagcctggtggacactgggcatcatggaactgcccagc

SEQ ID NO: 274966 - DNA, 201 bp, Homo sapiens
tgagaaggcaccacctcaagaggggaggagcggggctgatcctggtcgggcggacctgagtcgggcagccgctctcccggaactggaagggaaagccaggyggctctcaggggctgttggtgtctgagccgggagggtcgaacgcccagggcactgcgccccgcaactgacgctcctgcaaggaaaagctctgggtgcgta

SEQ ID NO: 274967 - DNA, 201 bp, Homo sapiens
gagcgggtcacttcccttcctgtgctctcgtgccctcgtctgtcagatggcaacaatggcaatgtgctctccagagcacagccaaggccaggcttgtgaasacacagattatgtctgtatagcctatgatggagttgctggcacatagtaacgtcagtaaatgggagcaaagaccacctgggggtgaggaatgggcttggc

SEQ ID NO: 274968 - DNA, 201 bp, Homo sapiens
tcgtgccctcgtctgtcagatggcaacaatggcaatgtgctctccagagcacagccaaggccaggcttgtgaacacacagattatgtctgtatagcctatratggagttgctggcacatagtaacgtcagtaaatgggagcaaagaccacctgggggtgaggaatgggcttggccggtgggtggggctgagtaaggactgg

SEQ ID NO: 274969 - DNA, 201 bp, Homo sapiens
agtggggaacccagaaggcccggaatctgttccccggagggtttcaggtgaccacagacacccagaaggagcctgaccgggcctcttgcactgactgagaygactcctcagggtcagtattgcctcctgtgaggggagggagaaaggacggcataggtagttggtttggagtccgacttgaagcgatgggagcagtggtgg

SEQ ID NO: 274970 - DNA, 201 bp, Homo sapiens
tcctttgcccttatggatgtgaagcgccacggacaccctcaggtcagagccgttccctggccctgggggtttgggctgggtgggagttcgcttgcctctcrggagcagacctgagttccagccctggctccattgcttgctacctgtgccgttgagcgggtcacttcccttcctgtgctctcgtgccctcgtctgtcagat

SEQ ID NO: 274971 - DNA, 201 bp, Homo sapiens
ctctcctcttgcacccagcctgaggccttcctggccaacctcttcgtgcaccctctcctgcctccgagagatctgagcccgacagccccctgtccagctgyggccacagccagcctccttgcctccatttcccgaattgcccaggaccccaggtgaggagtggaggctgagatgcaggggcatgtggaggggggtgggctg

SEQ ID NO: 274972 - DNA, 201 bp, Homo sapiens
gcccggaatctgttccccggagggtttcaggtgaccacagacacccagaaggagcctgaccgggcctcttgcactgactgagacgactcctcagggtcagyattgcctcctgtgaggggagggagaaaggacggcataggtagttggtttggagtccgacttgaagcgatgggagcagtggtgggaatttggggtgatggg

SEQ ID NO: 274973 - DNA, 201 bp, Homo sapiens
tccactctggcgccccccagggcacagctctaagtttcttgggcacctctggggccgagtacaacaagatgcagctgcctggggtgccacctcggctcgcrgcccctccaccccgggggtgctcagcaactgcacctcgcccctggtgagtcccaagcctggcctccccttctgccttcacccccacaactcctctccaaa

SEQ ID NO: 274974 - DNA, 201 bp, Homo sapiens; identical to SEQ ID NO: 54641

SEQ ID NO: 274975 - DNA, 201 bp, Homo sapiens
tggtgggggtgggcgcgggggcgcagcccggggctgctggctggccctggacgtgaaagtctccggagcgggcctggtggggcctgcgtgccctggggcgktgtcaacaggggcagagccaaaggggcggggcaggggcgggaggaggcgggcctagaggggccggggcacaagggtgggccagagtgtgcaggggtggct

SEQ ID NO: 274976 - DNA, 201 bp, Homo sapiens; identical to SEQ ID NO: 54644

SEQ ID NO: 274977 - DNA, 201 bp, Homo sapiens
cctgcacgtaggtctgcggggcggcggggttagggcgggccctggtgggggtgggcgcgggggcgcagcccggggctgctggctggccctggacgtgaaaktctccggagcgggcctggtggggcctgcgtgccctggggcggtgtcaacaggggcagagccaaaggggcggggcaggggcgggaggaggcgggcctagag

SEQ ID NO: 274978 - DNA, 201 bp, Homo sapiens
cttcccctctaggctcaccttaggtagtaacctgcctcaccagcccccgcccccagcctgctctcctgccttctttaggcctctgcttcctccctactccrtttctgtcctctcttctgactccctctttggctttccctctcctcttgcacccagcctgaggccttcctggccaacctcttcgtgcaccctctcctgcct

SEQ ID NO: 274979 - DNA, 201 bp, Homo sapiens
gggtgggctgatcctgtaggagtggggagctggggcgctgaggggggattcagaaggggagtcctctggggtgtggcgggaggagggcatgacttttgacstgcttcatgttatgttccagctctgtgtccccaggaggcactgggggccagaagctggcccagctcccagaacttgcttctgccgagatgagtctccatg

SEQ ID NO: 274980 - DNA, 201 bp, Homo sapiens
taaaccagcagttcccaaactgctgcacagtagaaatgcccaaggatcgttaaaaaatattgacgccaaacactctgatttaattgagacagggcacaacytaagcactgagatgtttgtaagttgcccaggtgatctaatatgtagcagaatttagggactactcgtttaaacaaatgcttgaattcagctttgggacca

SEQ ID NO: 274981 - DNA, 201 bp, Homo sapiens
cattggatataagtttttaaaccagcagttcccaaactgctgcacagtagaaatgcccaaggatcgttaaaaaatattgacgccaaacactctgatttaaytgagacagggcacaacctaagcactgagatgtttgtaagttgcccaggtgatctaatatgtagcagaatttagggactactcgtttaaacaaatgcttga

SEQ ID NO: 274982 - DNA, 201 bp, Homo sapiens
gccggacatggtacattctttcactgaccctctgccgtttcctggcctggaattattttgcacaccttcgtttggaggttttacagctgacccgccaccckgagaactggaccctgcaagcccggtggcggcttgtggggctgcccgtccacttgctctttttgcggttctacaagcgtgacaaagacgagcattaccggt

SEQ ID NO: 274983 - DNA, 201 bp, Homo sapiens
ggctgagatgagagaatcacttcaacctgggaggttgaggttgcagtgagccgtgatcacattactggactccagcctgggtgacagagtgaaaccctgtcacacacacacacacacacacacacacacacacacaaaagtactgaacaaatgaaaagtcctgtctcatatgttgagccttacaacctggtaaatttccgc

SEQ ID NO: 274984 - DNA, 201 bp, Homo sapiens
gctgagatgagagaatcacttcaacctgggaggttgaggttgcagtgagccgtgatcacattactggactccagcctgggtgacagagtgaaaccctgtcacacacacacacacacacacacacacacacacacaaaagtactgaacaaatgaaaagtcctgtctcatatgttgagccttacaacctggtaaatttccgcc

SEQ ID NO: 274985 - DNA, 201 bp, Homo sapiens
ctgagatgagagaatcacttcaacctgggaggttgaggttgcagtgagccgtgatcacattactggactccagcctgggtgacagagtgaaaccctgtcacacacacacacacacacacacacacacacacacaaaagtactgaacaaatgaaaagtcctgtctcatatgttgagccttacaacctggtaaatttccgcct

SEQ ID NO: 274986 - DNA, 201 bp, Homo sapiens
tgagatgagagaatcacttcaacctgggaggttgaggttgcagtgagccgtgatcacattactggactccagcctgggtgacagagtgaaaccctgtcacacacacacacacacacacacacacacacacacaaaagtactgaacaaatgaaaagtcctgtctcatatgttgagccttacaacctggtaaatttccgcctg

SEQ ID NO: 274987 - DNA, 201 bp, Homo sapiens
gtagaatcccaataaattgttagactcagccacaaacattggatataagtttttaaaccagcagttcccaaactgctgcacagtagaaatgcccaaggatygttaaaaaatattgacgccaaacactctgatttaattgagacagggcacaacctaagcactgagatgtttgtaagttgcccaggtgatctaatatgtagc

SEQ ID NO: 274988 - DNA, 201 bp, Homo sapiens
tccctcagtaagcctccctctattccccaggacctatgatgcctactccactttctacctgaattccagtggcctcatttgtcgccatcgtctagataaaktgagtcctaggtagggctgggtggggtaaagggtagaacatttgtgtgcctcccccaactggcattaacctttctccctgcagctgatgccttcacactc

SEQ ID NO: 274989 - DNA, 201 bp, Homo sapiens
tctgtattccttggatgtggaattcatcaatgagatcctcaacatacgtaccaagtgagaattggggcacaggtagggcactggggaggaaaagcacccaraggtatatacatgacccttttcacttcccagagaagttcctagactgcttctcacagctgttccccattccttagaagccagtttggttttctaattctg

SEQ ID NO: 274990 - DNA, 201 bp, Homo sapiens
ctagcttcccaagctcttccttcagtcccacgactacagtctgtattccttggatgtggaattcatcaatgagatcctcaacatacgtaccaagtgagaaytggggcacaggtagggcactggggaggaaaagcacccaaaggtatatacatgacccttttcacttcccagagaagttcctagactgcttctcacagctgt

SEQ ID NO: 274991 - DNA, 201 bp, Homo sapiens
gatcctagtatggaggaacatctgtctgtcatgtatgagagactgagacaagaggtaagtcagtgcaaaagtggccttcgtctacagtgggaaggatgtgsgtaatccttggacgtacagggatagtcaactggattcttttttggaaccatgaggcaggcatagaaatatattataaacattttcctgagaaaatgatgt

SEQ ID NO: 274992 - DNA, 201 bp, Homo sapiens
aggttaaggcaggaggatcacttgagcccaggagtttgaggctgcagtgagctgtgatcacaccactgcactccagcctgggtgccagagagagactcggyctcaaaaaacaaacaaaaacccactgttgttctaagtgaatgctgtcaggggaggggcaaagacacagggaaccccagcgaacagactccttctccgtcc

SEQ ID NO: 274993 - DNA, 201 bp, Homo sapiens
tttgggtggccaaagcaggagggttgcttgagttcaggagtttgagaccagcctgagcaacatagcaagaccccatctctacaaaaaattaaaaatcagcygggtggcatgcacctgtagtcccaactacttgggaggttaaggcaggaggatcacttgagcccaggagtttgaggctgcagtgagctgtgatcacaccac

SEQ ID NO: 274994 - DNA, 201 bp, Homo sapiens
ttcctgaattttggcattctgcttttgtgctgatgaaataacttctggggcttgcaaaacacatgtcatgtagactgtgtttgtatagatctgggggaggraagctgcaatgcctgggcttgcatagattggcaaccccctagctagctttcttccagggtcacaaacccatgttcaaacccaggtcactagccaggtgct

SEQ ID NO: 274995 - DNA, 201 bp, Homo sapiens
agcgagactctgtctcagaaaaaaaaataaaaaataaaaaaattaaaacttagatgggcgtcttggcaggcatgctacttgggagtctgaggcaggagaaycgcttgaacctgggaggcggaggttgcagtgagctgagatcgcgccactgcactccagcctgggagacaagagcgagacttcgtctcaaaaaaaagaaaa

SEQ ID NO: 274996 - DNA, 201 bp, Homo sapiens; identical to SEQ ID NO: 54658

SEQ ID NO: 274997 - DNA, 201 bp, Homo sapiens
gaccttggagctgggggggaagagccccaacatcatcatgtcagatgccgatagtgagtttccagctggagaaggcctggccttgaaggtagccctggccrcctgtgttgtggctccagccgatcctgtcgcccccccagtgcccaatggcgttggttgctgtccctcgggcctcaggataagacgccagcgcagggcctg

SEQ ID NO: 274998 - DNA, 201 bp, Homo sapiens
tcccctttataaaaccatcagatcttgtgagacttactcactgtcacaagaatagcatgggaaagacctggccccatgattcaattacctcccacaacacrtgggaattgtgggagctacaattcaagatgagatttgggtggggacaaagccaagccatatcagtagccatgcatgcaatagcatggattaatcttgaac

SEQ ID NO: 274999 - DNA, 201 bp, Homo sapiens
tacatccggcctctagcactcttaacacatgtgactgaggacttgtgtcattatgcacagtctctttgctctgtaagctccacgctggtctctatcccagyacctggatatggtagagagcagaagctaaaagagtgtgtttatgaaatcactgagtgagaaattggtggctcatcctgcctggcccccttcctcctcctc

SEQ ID NO: 275000 - DNA, 201 bp, Homo sapiens
atctcttgaaccccagatgtggaggttgcaacgagccaagatcatgccatggcaactccagcctgggcaacagagaaagattctatctcaaaaaaaaaaawttttttttaagttaaaaataaaataaagactttggggcaatacagggggtcctgggagtgtaacccataacccccaagagtgatttctgcaatctcgttt

SEQ ID NO: 275001 - DNA, 201 bp, Homo sapiens
aagaggtgatgtggagaacacatctagggagatgggcttggagctccaggggcaagacccagatttgaaatagaaattctgacatcattggcctataactsttcatcaaaatcatagttacaggccacgtgccatggctcacgcctgtaatcttagcactttgggaggcccagacaggcggaacgcttgagcccaggagtt

SEQ ID NO: 275002 - DNA, 201 bp, Homo sapiens
acaggcccttgttggccatgatgtggggtttgatgtctttgataatggagtttgatctcagctatgggagcattttaagtagaagaattaggtggctcaatttttttttttttttttctgagccagagtcttgctctgttgctcaggctggagtgcagtgctgtgatcttggctcactgcaacctccgcctcccgggctca

SEQ ID NO: 275003 - DNA, 201 bp, Homo sapiens
gggaggctgaggcaggaggatcactgaagaccaggagttggagaccagcctgggtaacataatcagaccctgtctcttaaaaaaaaatttattgccaggcrtggttgcacgtgctggtagtccagctactcaggaagctgaggcaggagaatctcttgaaccccagatgtggaggttgcaacgagccaagatcatgccatg

SEQ ID NO: 275004 - DNA, 201 bp, Homo sapiens
ctgagggacgtgcccccatcaggcctatgcggtcatttgctgggcttcgttatacgccaaggcctgtaggcctgagaagagggagagacttcagggggcgragcggagaggaaaagcttctagtaagaatcttttcagattttcaccaggcgcggtggcttttcaccgggcacggtggctcacacctgtaatcccagcact

SEQ ID NO: 275005 - DNA, 201 bp, Homo sapiens
gttttaagagcctctatagaaatagatttaggtggccgggcatggcagctcatgccctggcataagagtgaggcctagtgacagagtgagactccgtctcaaaaaaaaaaaacaaaaagaaatagatttaggcaggctgggtgtggtggctcatgcctgtaatcccagcaccttgggaggccgaggcaggcggatcacctc

SEQ ID NO: 275006 - DNA, 201 bp, Homo sapiens
ttctgctgagcttgatggctgttgtcttcccctggaactgttagagcatggctgggggcttatcccccaatctggaatcatctgttctgctctgagagagytcgatggcaggtgcctccgtgttgccgaaccctcctacgctgctctctcactccagatcttcgggccagtgatgcagatcctgaagttcaagaccataga

SEQ ID NO: 275007 - DNA, 201 bp, Homo sapiens
taaaagcttaggaaataagccagctcgagctccattgggaaatagatgaacacctatgttacagttataggaggaaataatcctctgcatgtagcagttayaaatcattggctcaacctgtacaaataatgtatctcaaaaacaatatgtcaaggaggaaaaatgtccagcactctacaccatatgaaaccatgaaaactg

SEQ ID NO: 275008 - DNA, 201 bp, Homo sapiens
cctcaaggaacagccatcgccctaggaacccttctggccacaggatctgattaaaatctttatcctttatcacatgcagatgaggcagctgggtccagatrtgcacccaggcccataggtaacacatcctgttctccagatttactctgtgggtgtaggctggaggagccgagtcaattccctgtggctgcttttctttat

SEQ ID NO: 275009 - DNA, 201 bp, Homo sapiens
agaatagcatgggaaagacctggccccatgattcaattacctcccacaacacgtgggaattgtgggagctacaattcaagatgagatttgggtggggacamagccaagccatatcagtagccatgcatgcaatagcatggattaatcttgaacataacattgagtgaaagaacccagactgtctgggtgcggtggctcatg

SEQ ID NO: 275010 - DNA, 201 bp, Homo sapiens
caactgctatgatgtgtttggagcccagtcaccctttggtggctacaagatgtcggggagtggccgggagttgggcgagtacgggctgcaggcatacactraagtgaaaactgtgagtgtgggacctgctgggggctcagggcctgttggggcttgagggtctgctggtggctcggagcctgctgggggattggggtctgt

SEQ ID NO: 275011 - DNA, 201 bp, Homo sapiens
ccatgttttaaaggttcatccatgttgtaataagaatgtatcagaacataaaaggccaagtaatattccattgtgtgaatagaccacattttgatttttcyattaatctgttgacagacttgattgtttccaccttttggttactgtgaatagtgcagctaggggcactaacatttctttctttcttttgagaccgtctcg

SEQ ID NO: 275012 - DNA, 201 bp, Homo sapiens
tctctactaaaaaaaaaaaaatgcaaatcatgaccagcctggccaacacggtgaaacctcatctctactaaaaatacaaaaactatttgggcgtggtggtrggcgcctataatcccagctactcgggaggctgaggcaggagaatcacttgaacccgggaggcgcaggttgtggtgagccaaaatcgtgccaccgcactcc

SEQ ID NO: 275013 - DNA, 201 bp, Homo sapiens
atggtagagagcagaagctaaaagagtgtgtttatgaaatcactgagtgagaaattggtggctcatcctgcctggcccccttcctcctcctccctgccttyggagagaccatggcaatagtccagagatgctagtgacatttggggcacaaagcggactctcaccctgggcttgcaccagcccttctcagtcccagccttg

SEQ ID NO: 275014 - DNA, 201 bp, Homo sapiens
cgcactccagcctgggtgacagagtgagactccacctcaaaaaataaataattttttttttaaaaaaaagcaaaaaaaaattagccagatgtagtgatgcstgcctatactctcagctacttgggaggctgaggtgggagcccaggaggtcaaggctgcagtgagcagtgatcacaccactgcactgctgcctgagtggca

SEQ ID NO: 275015 - DNA, 201 bp, Homo sapiens
ggaagttggcccctgttagctccattccctctgtgttctgctgagcttgatggctgttgtcttcccctggaactgttagagcatggctgggggcttatccyccaatctggaatcatctgttctgctctgagagagctcgatggcaggtgcctccgtgttgccgaaccctcctacgctgctctctcactccagatcttcggg

SEQ ID NO: 275016 - DNA, 201 bp, Homo sapiens
gagccccaacatcatcatgtcagatgccgatagtgagtttccagctggagaaggcctggccttgaaggtagccctggccacctgtgttgtggctccagccratcctgtcgcccccccagtgcccaatggcgttggttgctgtccctcgggcctcaggataagacgccagcgcagggcctgcatggcctggccttggcctgt

SEQ ID NO: 275017 - DNA, 201 bp, Homo sapiens
tgagaacccagtatttctactcaaaaggaccttattgcaaagtatttggaagtttaaaagagtgggaacatggggacgcatagggagtggtgaaactggcycagggaaagtccattgcagcaagatagaggttgccaaaccgtaagcagaacaagttgaaaccgcgcctgtctggcaaacagtccaaagtggaattgaaac

SEQ ID NO: 275018 - DNA, 201 bp, Homo sapiens
gtttgggaccagcctggccaacatggtgaaagcccatctctacaaaaaatacaaaaaaaatcccacctttatttaagaaaaaaaattcaaacccagatctktttggctttgaggttggtgctttttacaacattcagaataaaattttttttttttttgagactctgttgcccaggctggagtacagtggtgcaatcttgg

SEQ ID NO: 275019 - DNA, 201 bp, Homo sapiens
gctcagtggccctgagaccctagctctgctctcggtccgctcgctgtccgctagcccgctgcgatgttgcgcgctgccgcccgcttcgggccccgcctggsccgccgcctcttgtcagccgccgccacccaggccgtgcctgcccccaaccagcagcccgaggtcttctgcaaccaggtgagcccaccggccgggctcgcg

SEQ ID NO: 275020 - DNA, 201 bp, Homo sapiens
tccagcctgggtgccagagagagactcggtctcaaaaaacaaacaaaaacccactgttgttctaagtgaatgctgtcaggggaggggcaaagacacagggraccccagcgaacagactccttctccgtcccatttagaattcccatgtagtgccccatacaattagcttctgaccacatgtgtccttggcagactgtccca

SEQ ID NO: 275021 - DNA, 201 bp, Homo sapiens
cccccaagagtgatttctgcaatctcgtttcaaattacagggtcaactgctatgatgtgtttggagcccagtcaccctttggtggctacaagatgtcgggragtggccgggagttgggcgagtacgggctgcaggcatacactgaagtgaaaactgtgagtgtgggacctgctgggggctcagggcctgttggggcttgag

SEQ ID NO: 275022 - DNA, 201 bp, Homo sapiens
tgaggcaggagcatcacttgaacctgggaggcagaggttgcagtgagccgagatcacactactgcattccagcctgggtgacagagcgagactccatctcaaaaaaaaaaaaaaatgtggggggtaaaattccatctgcatcaccgaattgctgtgaggaccaaatggggtgaggcttctgcagccacaggcagtgctggc

SEQ ID NO: 275023 - DNA, 201 bp, Homo sapiens
tgcactgctgcctgagtggcagagtgaggccctgactctttttaaaaaaaggtatttaatgtaaaaaataagactttgttgcatttcttttattctccatyggtaaccactcatgcacacacagttatgctgttgtatgtttattttttaaaaaataggctgggtgtggtggctaacccctgtagtcctaacacttgggag

SEQ ID NO: 275024 - DNA, 201 bp, Homo sapiens
ccctttattcacatcctgcatgagtgtggttcatctgttagtattgatgagccaatactggtaccttattattcacttaggtctgtagtgtatattcgggtttttttttttaatttttattttttttggagacagagttttgttctgtcacccaggctgcagtgcagtggcacgatctcgactcatgcctcccgggttcaa

SEQ ID NO: 275025 - DNA, 201 bp, Homo sapiens
ggtcttgaactcctgacctcaggtgatccacctgcctcagcctcccaaagtgctgagattacaggtgtgagccaccgcacctgtcctaacatttcttttcttttttttttttttgagacagagtcttgctctgtctccaggctggagtacagtggcacgatctcggctcactgcaacctccgtctcccaggtttgaatgat

SEQ ID NO: 275026 - DNA, 201 bp, Homo sapiens
gtggaacaggcccacttcgccctgttcttcaaccagggccagtgctgctgtgccggctcccggaccttcgtgcaggaggacatctatgatgagtttgtggwgcggagcgttgcccgggccaagtctcgggtggtcgggaacccctttgatagcaagaccgagcaggggccgcaggtgagccaggcagtgccgcagggtctg

SEQ ID NO: 275027 - DNA, 201 bp, Homo sapiens
ctttgggaagccgaggtgggtaggtcacttgaggtcaagagtttgagaccagcctggccaacatggtgaaaccttatctctactaaaaacacaaaacttarctggctgtggtggcaggtgcctgtagtcccagctactcgggaggctgaggcaggagaatcgcttgaacctgggaggcggagattgcagtgagtggagatc

SEQ ID NO: 275028 - DNA, 201 bp, Homo sapiens
cttctgccctctggggttgccaccttctgctacccagtgtagttctctgaggaagcttggatttcgagggctgctgttgtttgttgcagtggaatttcccrctcctgatgcaagcatggaagctgggcccagccttggcaactggaaacgtggttgtgatgaaggtagctgagcagacacccctcaccgccctctatgtgg

SEQ ID NO: 275029 - DNA, 201 bp, Homo sapiens
ttttaggctgggtgcagtggctcacccctgtaatcccagcactttgggaggccaaggtagacggatcacgagatcaggagatggagaccatcttggccaaygtggtgaaaccccgtctctactaaaaatacaaaaattaggcctgggcctggtggctcacacctgtaaggccgtggtggttcacacctgtaatcccagcac

SEQ ID NO: 275030 - DNA, 201 bp, Homo sapiens
attagcttctgaccacatgtgtccttggcagactgtcccaccctctctgagaaaggatgtgtcttcccctggttgagcccttcagaataggagggtgactyccaatgtcccctggctgtttgctcacaggctggctttccccctggtgtggtcaacattgtgcctggatttggccccacggctggggccgccattgcctcc

SEQ ID NO: 275031 - DNA, 201 bp, Homo sapiens
ccagcctgggcaacatagcaagaccctgtgtctagtctctactaaaaaagtaaattagtcaggtgcggtggcacatgcctgtagtcccagctatatgggargccgaggtgggaggatcacttgagcctaggagttcgaggctgcagtgagctatgattgggccactacacttagtctgagcaacagaacaagaccctgtct

SEQ ID NO: 275032 - DNA, 201 bp, Homo sapiens
cttttctccggtaggctgaggaagttgggccttttttgtgttttctgctattggccctgtgtgtttcctcttctgatcttgctttcttatgaccttggtcmatttcccagttgtcttgttgcctgcataattctaagcctgaagcctaggagaggtctgaatccgatgtctccataactctgggttccttctcccacaggt

SEQ ID NO: 275033 - DNA, 201 bp, Homo sapiens
aggcctccggataactaatgattaatgatattcatatataatcatgtctgtgatctagatctagtataactcttgttgttttatatattttattatactgraacagctcgtgccctcggtctcttgcctcagcacctggatggcttgccgcccacagccaacaatgtgttttcaatatgctccccaaactacagcaaactc

SEQ ID NO: 275034 - DNA, 201 bp, Homo sapiens; identical to SEQ ID NO: 54669

SEQ ID NO: 275035 - DNA, 201 bp, Homo sapiens
tctattcagatgaccaatttgcagatcaaggaagagaaagtcaaagcagataccaatggtgagtcactagtaactacaagctagaaaagagttccatgtgrgccgctgctttgcactcatagctgcattgtacaaagagctgtcatttcgtgtaaacttcagctgtttacaagccagtgaattagattttgttactgaagg

SEQ ID NO: 275036 - DNA, 201 bp, Homo sapiens
tggtttttgacagtgtttttttaaggcataggaaaatacgtctgacagaggtaggaggcatcattcctttctatagaaaaagataagattctaggcctctraaacaattctaacttctaggcatccatcctctgtcttcctggcttcctaggaaaccacagcttctccagggagtctatgccatgggcttcaatcgaccct

SEQ ID NO: 275037 - DNA, 201 bp, Homo sapiens
ccgactccctgaatactggtgctgaaagtttcacactagacttttactagaaagtttttcttttcttagggaccttccttttattgggtcctttgcttaaytctgttttcttttatttctattcagatgaccaatttgcagatcaaggaagagaaagtcaaagcagataccaatggtgagtcactagtaactacaagctag

SEQ ID NO: 275038 - DNA, 201 bp, Homo sapiens
cttccccaacccttgtccccatcccaggcctgctgctcctcctccccaagatgctcctcccccatcagccttcctgggcatctagaccctcccagctgggraggctgtgcttccgttgcttcccagggccacctggggccatctacccgggccttcccttgcaggatgctgcccaggaactgccagatgctgcttttctcc

SEQ ID NO: 275039 - DNA, 201 bp, Homo sapiens; identical to SEQ ID NO: 54675

SEQ ID NO: 275040 - DNA, 201 bp, Homo sapiens
ggccaacatagtgaaaccctgtctctactaaaaatacaaaagttagccaggcgtggtagtcgtcccctgttaataccagctactcaggaggctgaggcatsagaattgcttgaacctgggaggtggaggttgcagtgagccaaaattacgccactgcactccagcctgggctactgagtgagactctgtctcaaaaaaaaa

SEQ ID NO: 275041 - DNA, 201 bp, Homo sapiens
gctggagtgcagtggtgcaatcttggctcatttcaacctctgccttccaggttcaagtgattctcctgcctcagcctcctgagtagctaggattacaggcrcacaccaccacacctggctaatttttgtatttttttgtctgttcgtttgtttttgggatgaagtctcgctctgttgcccaggctggagtgcaatggcgcg

SEQ ID NO: 275042 - DNA, 201 bp, Homo sapiens
ttccggtagcaaattgtaacagcacatatgaagtggtgtcagggaagcttgttagagactctacttgaggcttttattggggggctgtcatatagtcaccmtgtgcctagcatgtaccagaattccagacttccagaaggaatgcaggtggttagcataaattacatgcaactgtttttaaaaagagttgaggcagactga

SEQ ID NO: 275043 - DNA, 201 bp, Homo sapiens; identical to SEQ ID NO: 54678

SEQ ID NO: 275044 - DNA, 201 bp, Homo sapiens
tgagtttcaccaatttaagtttcatttctgttcttccttgatccagcccacagaatctgattgcccagtctcagtctggcactggtaaaacagctgccttygtcttagccatgctcagccgagtggagccatcagacagatacccccaggtgagggcttgcggggctgggtgtcctaggttgcctgccctggggagcgcag

SEQ ID NO: 275045 - DNA, 201 bp, Homo sapiens
ttttaaacagttatactttaggtcgggcacggtggctcacgcctataatcacagcactttgggaggtcaaggcaggtggattgtctgaggtcaggagttckagaccagactggtcaaaatgatgaaaccccatctctactaaaaatacaaaaaaattagccggctgtaatggcacatggcttgtagtcccggctactcagg

SEQ ID NO: 275046 - DNA, 201 bp, Homo sapiens
aaaatcttttctgttggggagctgcccattcttgtctcactacattattattattattattgagatggaattttgctcttgttgcccgggctggagtgcartggtacggttttggcttactgcaacctctgcctctccagctcaagcgattctcctgcgtcagcctcccaagtgggattacaggcatttgccaccacactg

SEQ ID NO: 275047 - DNA, 201 bp, Homo sapiens
aaagcgaaactccttctcaaacggaaattatgcttttctatgtgttttctctgtcaaggactttattcaccaaatctgtcatctccacttttatttttaarctgtatcaggacagctagacatgtggtatgatttccttagagtgacagtttgctcctccaagtatcaactgcctttttaaatttcttccctttagaagac

SEQ ID NO: 275048 - DNA, 201 bp, Homo sapiens
attgagatggaattttgctcttgttgcccgggctggagtgcaatggtacggttttggcttactgcaacctctgcctctccagctcaagcgattctcctgcstcagcctcccaagtgggattacaggcatttgccaccacactgggctaattttgtattttagtagagatggggtttctctatgttggtcagtctggtcttg

SEQ ID NO: 275049 - DNA, 201 bp, Homo sapiens
agctcccctgtgactgggcttcggggcgtggggctctgactgttgctgtcagtgactaggggccctgctgccccctgcttaggcacccggagcctttgggsctgaatgaatgattgctgtggcctgaggtggggcacattcctgggcagggtagagacttgtgtatctttcccccagataagaagatagaaagattggaca

SEQ ID NO: 275050 - DNA, 201 bp, Homo sapiens
aacaatagaaacttatagagaaaggtagtgctttattccatgctatcttaaaaactgggcttaaggccgggcatggtggctcactcctgtaatcctagcaytttgggaggccgaggcgggcggatcacctgaggtcaggagattgagtccagcctggccaacatggcaaaaccctgtctctactaaaaatacaaaattagc

SEQ ID NO: 275051 - DNA, 201 bp, Homo sapiens
aatggctctcctaaactcatcctttatgatttttctgtcagtgtctgtgcctctccccaacatatgagctggcgcttcaaacaggaaaagtgattgagcaratgggcaaattttacccagaactgaagcttgcctatgccgttcgaggcaataaatgtgagtacggcaggcgacaactgaacagtgagcagggtagggggt

SEQ ID NO: 275052 - DNA, 201 bp, Homo sapiens
tattttcaaagtcttttccttaggtattataccaattaatatttctggggtttttttttttctttttttgagacggagctttgctcttgttgcccaggctrgagtgcaatggcgtaatctcagctcactgcaacctccgcctcccaggttcaagcgattctcctgcctcagccttcccgaatagctgggattacaggcatg

SEQ ID NO: 275053 - DNA, 201 bp, Homo sapiens
gctatcttaaaaactgggcttaaggccgggcatggtggctcactcctgtaatcctagcactttgggaggccgaggcgggcggatcacctgaggtcaggagwttgagtccagcctggccaacatggcaaaaccctgtctctactaaaaatacaaaattagctgggcacggtggcccaaacctgtaatcctagcactttggga

SEQ ID NO: 275054 - DNA, 201 bp, Homo sapiens
ccaaatggctctcctaaactcatcctttatgatttttctgtcagtgtctgtgcctctccccaacatatgagctggcgcttcaaacaggaaaagtgattgarcagatgggcaaattttacccagaactgaagcttgcctatgccgttcgaggcaataaatgtgagtacggcaggcgacaactgaacagtgagcagggtaggg

SEQ ID NO: 275055 - DNA, 201 bp, Homo sapiens
agggtttcactgtgttagccaggctggtctcgatctcctgacctcaggtgatccacctgccttggcctcccaaagtgctgggattataggcatgagccacygcgcccggccctaatttttgtatttttagtagaggtgaggtttcgccatgttggccaggctggtctcgaactcctgacctcaggtgatccaccagccttg

SEQ ID NO: 275056 - DNA, 201 bp, Homo sapiens
gggtctcattctgtttccccatctagagtgcagtggtgcaattacagcccactgcagcctcgacctcctgggcttaattaatcctctcacctcagcctcckgagtagctgggactataggcatgtgccaccatgcccagctgactttaaaaaaacttttttgtagtttgagaagctgaggcaggtggatcacttgaggtca

SEQ ID NO: 275057 - DNA, 201 bp, Homo sapiens
cttccaggttcaagtgattctcctgcctcagcctcctgagtagctaggattacaggcgcacaccaccacacctggctaatttttgtatttttttgtctgtkcgtttgtttttgggatgaagtctcgctctgttgcccaggctggagtgcaatggcgcggtctcagctcaccgcaaccttcgcctcccgggttcaagtgatt

SEQ ID NO: 275058 - DNA, 201 bp, Homo sapiens
acagcagaagagaccaagactgaggggaacactcatgtgtgttttgaaatctggaaataacttgttctcctagtcctagaaggatgggcagggctttgatytccagagctggctttgcctttgaaatacctatgaaaatcacctgggtctccacagtggaaagaggccagaagatcagtgagcagattgtcattggcaccc

SEQ ID NO: 275059 - DNA, 201 bp, Homo sapiens
ccccatctagagtgcagtggtgcaattacagcccactgcagcctcgacctcctgggcttaattaatcctctcacctcagcctccggagtagctgggactayaggcatgtgccaccatgcccagctgactttaaaaaaacttttttgtagtttgagaagctgaggcaggtggatcacttgaggtcaggagtttgagaccagc

SEQ ID NO: 275060 - DNA, 201 bp, Homo sapiens; identical to SEQ ID NO: 54672

SEQ ID NO: 275061 - DNA, 201 bp, Homo sapiens
tttccccatctagagtgcagtggtgcaattacagcccactgcagcctcgacctcctgggcttaattaatcctctcacctcagcctccggagtagctgggaytataggcatgtgccaccatgcccagctgactttaaaaaaacttttttgtagtttgagaagctgaggcaggtggatcacttgaggtcaggagtttgagacc

SEQ ID NO: 275062 - DNA, 201 bp, Homo sapiens; identical to SEQ ID NO: 54673

SEQ ID NO: 275063 - DNA, 201 bp, Homo sapiens
tctgccatgtgagtagcagcggcagtggcaggcctggcccctccctctcagccagctccccacagggctcaggaggactggatgcccctgagcgccatggraagaagggaagtgctttttgaagatgtaagagacaggctctcctttagtgggggtaatggtagtatcccaagggatacatagcctaaagatagagcccct

SEQ ID NO: 275064 - DNA, 201 bp, Homo sapiens
agataggtgtcattctgcccacttcacagcagaagagaccaagactgaggggaacactcatgtgtgttttgaaatctggaaataacttgttctcctagtcstagaaggatgggcagggctttgatttccagagctggctttgcctttgaaatacctatgaaaatcacctgggtctccacagtggaaagaggccagaagatc

SEQ ID NO: 275065 - DNA, 201 bp, Homo sapiens
taaaacaattctaacttctaggcatccatcctctgtcttcctggcttcctaggaaaccacagcttctccagggagtctatgccatgggcttcaatcgacchtccaagatacaagagaacgcattacccatgatgcttgctgaaccgtgagtatgcagatgaagcgcatctcacccagtgtgattagatcaatcttccccaa

SEQ ID NO: 275066 - DNA, 201 bp, Homo sapiens
ggggccctgctgccccctgcttaggcacccggagcctttgggcctgaatgaatgattgctgtggcctgaggtggggcacattcctgggcagggtagagacytgtgtatctttcccccagataagaagatagaaagattggacacagatgatttggacgagattgagaaaatagccaactgagaagctccaccagccactga

SEQ ID NO: 275067 - DNA, 201 bp, Homo sapiens
ctctaaaacaattctaacttctaggcatccatcctctgtcttcctggcttcctaggaaaccacagcttctccagggagtctatgccatgggcttcaatcgwccctccaagatacaagagaacgcattacccatgatgcttgctgaaccgtgagtatgcagatgaagcgcatctcacccagtgtgattagatcaatcttccc

SEQ ID NO: 275068 - DNA, 201 bp, Homo sapiens
ttacaggcgtgagccactgtgcctggcccttccttgtgttttataattatgtgatactgcattgtgtcgatctaccacgatttttttttttttttttttttgagatgaagtttcactcgttgcccaggctggagtgcaatgatgtgatctcggctcaccgcaacctccacctccggggttcaagcgattctcctgcttcag

SEQ ID NO: 275069 - DNA, 201 bp, Homo sapiens
agtcctagaaggatgggcagggctttgatttccagagctggctttgcctttgaaatacctatgaaaatcacctgggtctccacagtggaaagaggccagawgatcagtgagcagattgtcattggcacccctgggaccgtgctggactggtgctccaagctcaagttcattgatcccaagaaaatcaaggtgtttgttctg

SEQ ID NO: 275070 - DNA, 201 bp, Homo sapiens
cagtgagccaagatcacgctattgcactctagcttgagcaacagagcaagactccatctcaaaaaaaaaaattttttttttcttttttctttctttctttytttttttttttttttttaagagatgacctggccttgttgcccagcccagagtgcagcggggcaatcatggctcgctatagtctctaactcttagcctcag

SEQ ID NO: 275071 - DNA, 201 bp, Homo sapiens
agtccctcccaacctgggttgagaaaggagacctagggactcttccccaacccttgtccccatcccaggcctgctgctcctcctccccaagatgctcctcycccatcagccttcctgggcatctagaccctcccagctggggaggctgtgcttccgttgcttcccagggccacctggggccatctacccgggccttccctt

SEQ ID NO: 275072 - DNA, 201 bp, Homo sapiens
ttgctcttgttgcccaggctggagtgcaatggcgtaatctcagctcactgcaacctccgcctcccaggttcaagcgattctcctgcctcagccttcccgartagctgggattacaggcatgcgccaccacacccagctaattttgtattttttagtagagacaggttttctccatgttggtcaggctggtctcaaactccc

SEQ ID NO: 275073 - DNA, 201 bp, Homo sapiens
taggcatccatcctctgtcttcctggcttcctaggaaaccacagcttctccagggagtctatgccatgggcttcaatcgaccctccaagatacaagagaaygcattacccatgatgcttgctgaaccgtgagtatgcagatgaagcgcatctcacccagtgtgattagatcaatcttccccaaactgcgtttttgtgcctg

SEQ ID NO: 275074 - DNA, 201 bp, Homo sapiens
tcccaagtagctgggactacaggcgcccgccactacgcccggctaattttttgtatttttagtagagacggggtttcaccgtgttagccaggatggtcttsatctcctgacctcgtgatccgcccgcctcagcctcccaaagtgctgggattacaggcgtgagccaccgcgcccggccgtcatttggtatgtcttaatgtg

SEQ ID NO: 275075 - DNA, 201 bp, Homo sapiens
ctacaggcgcccgccactacgcccggctaattttttgtatttttagtagagacggggtttcaccgtgttagccaggatggtcttgatctcctgacctcgtratccgcccgcctcagcctcccaaagtgctgggattacaggcgtgagccaccgcgcccggccgtcatttggtatgtcttaatgtgcctcaggacctagcac

SEQ ID NO: 275076 - DNA, 201 bp, Homo sapiens; identical to SEQ ID NO: 54683

SEQ ID NO: 275077 - DNA, 201 bp, Homo sapiens; identical to SEQ ID NO: 54684

SEQ ID NO: 275078 - DNA, 201 bp, Homo sapiens
tacgtgtttgggtacagaaggatatatctataggacttttgccaccagatgtgaggctttgcacccttggcttaggcagattcacttttacaccacaaacratctgtctcttactggttttctcccaattccattttaccttgctttttgaggaatttagagttgaatatattgagaaagttttgagtgagggagcagatg

SEQ ID NO: 275079 - DNA, 201 bp, Homo sapiens
  misc_feature (1)...(201): n = A,T,C or G
tgaaagcatcatgaggagacggggcctgacctcaccctgcaaagacatcaacacatttattcatggcaacaagcgcagcatcaaggccatctgtgaaaacnagaatggaaaccctcacagagaaaacctaagaataagcaagtcttctttccaggtcaccacttgcaagctacatggaggttccccctggcctccatgcca

SEQ ID NO: 275080 - DNA, 201 bp, Homo sapiens
aatcacatggcagtgggatgggagtgtttcctgacctgccgatggtactggcacctgagcaagcattcctagtcctttttggtctgggcctcttgttctaycacaaccacaagctgtttaaaataaaatgtcaagtcacaggcaggtcattttatcctgcgtgaatcaattgaagaattgaagtcctggtcagctgtgatt

SEQ ID NO: 275081 - DNA, 201 bp, Homo sapiens
tcctgacctgccgatggtactggcacctgagcaagcattcctagtcctttttggtctgggcctcttgttctatcacaaccacaagctgtttaaaataaaaygtcaagtcacaggcaggtcattttatcctgcgtgaatcaattgaagaattgaagtcctggtcagctgtgattgttggctttgcaaggaaagagaaggaac

SEQ ID NO: 275082 - DNA, 201 bp, Homo sapiens
cccccatcttttccccatggatgcctcatttcctattagggaggcatttttttattttttgtttttatttttttccgagacggagtctcgctctgtcgccmaggctggagtgcagtggcgcgatctcggctcactgcaagctccgcctcccgggttcacgccattctcctgcctcagcctcccaagtagctgggactacag

SEQ ID NO: 275083 - DNA, 201 bp, Homo sapiens
tttggtcacaaagaatcaggatgagagaaagtagataaaaccatggaaactcgaggtgccaccggaagagcaaaccaaagtatattgatctgctgaagctrtaatccaagtactaagtataccttcagaagttgtatgcattgttcttggggcaaaaaggaaatcaaacatctgcccttcctcccacaacctctttacttc

SEQ ID NO: 275084 - DNA, 201 bp, Homo sapiens
cgtgagccaccgcgcccggccgtcatttggtatgtcttaatgtgcctcaggacctagcacagtccctggtacccagtagagacctatgtaatgttcgttaktcaattaataaatacatgaattaaagagtgagagtggattttgtaatgttacgactgatagagaaatactcagtgattctaagggatggggaagaacggt

SEQ ID NO: 275085 - DNA, 201 bp, Homo sapiens
ccactacgcccggctaattttttgtatttttagtagagacggggtttcaccgtgttagccaggatggtcttgatctcctgacctcgtgatccgcccgcctyagcctcccaaagtgctgggattacaggcgtgagccaccgcgcccggccgtcatttggtatgtcttaatgtgcctcaggacctagcacagtccctggtacc

SEQ ID NO: 275086 - DNA, 201 bp, Homo sapiens
ctcccaagtagctgggactacaggcgcccgccactacgcccggctaattttttgtatttttagtagagacggggtttcaccgtgttagccaggatggtctygatctcctgacctcgtgatccgcccgcctcagcctcccaaagtgctgggattacaggcgtgagccaccgcgcccggccgtcatttggtatgtcttaatgt

SEQ ID NO: 275087 - DNA, 201 bp, Homo sapiens
attctcctgcctcagcctcccaagtagctgggactacaggcgcccgccactacgcccggctaattttttgtatttttagtagagacggggtttcaccgtgktagccaggatggtcttgatctcctgacctcgtgatccgcccgcctcagcctcccaaagtgctgggattacaggcgtgagccaccgcgcccggccgtcatt

SEQ ID NO: 275088 - DNA, 201 bp, Homo sapiens
gtgtagggggaggggcagtgtactaatagctgtcacacaaccttctctggaagtgctttcctggctgtatgaaatcgatggaataacgtgcttagcatccrttcatgaaaccaaatgatgtgatacgataaataggatgtgatatgataaatgataaatagtacagtggaaaagcatcctactggaagaccatatcttact

SEQ ID NO: 275089 - DNA, 201 bp, Homo sapiens
ctgggggtctgtgaaacagttggtaccctgctgctgtctgatattggaaactatgagatctataaggtgatcctggtgacctttggcccactgtttttacrcaagcaatggatctacagccctgctttgatgatggagataagcaattttgcaactacattacaaggatcagaagattgaatgttcagggttagtctcttg

SEQ ID NO: 275090 - DNA, 201 bp, Homo sapiens
  misc_feature (1)...(201): n = A,T,C or G
tcaaggccatctgtgaaaacaagaatggaaaccctcacagagaaaacctaagaataagcaagtcttctttccaggtcaccacttgcaagctacatggaggntccccctggcctccatgccagtaccgagccacagcggggttcagaaacgttgttgttgcttgtgaaaatggcttacctgtccacttggatcagtcaattt

SEQ ID NO: 275091 - DNA, 201 bp, Homo sapiens
agattgcgtcactgcactctagcctgggtgacagagcaagactccgtcttaaaaaaaaaaaaaaaaaaaattgtgtggtgcattggaaagcttccaggccsgcgaatgcaatgagttccttgggcaatacatgtctctttctctgttcctcagttggctcttctttaatatgaggggtggacagagtctcagaggcccctc

SEQ ID NO: 275092 - DNA, 201 bp, Homo sapiens
ctctttctctgttcctcagttggctcttctttaatatgaggggtggacagagtctcagaggcccctcccactcttgttctatgactccatggagtggtacsatgttagtaacaggacatgaggcactctagtaatgtggagatgaactatcgtttggcagagaggatggaaaaaatcattccaggaaaagaggaatggctt

SEQ ID NO: 275093 - DNA, 201 bp, Homo sapiens
aggacatgaggcactctagtaatgtggagatgaactatcgtttggcagagaggatggaaaaaatcattccaggaaaagaggaatggctttagctattgttsaaaacagataatcaggttataagcaggcaagagtaagaggtttgtcaagttattgttggaagcattggtcactgtgactcaaattaaagtagctggataa

SEQ ID NO: 275094 - DNA, 201 bp, Homo sapiens
aaaataaaatgtcaagtcacaggcaggtcattttatcctgcgtgaatcaattgaagaattgaagtcctggtcagctgtgattgttggctttgcaaggaaaragaaggaacactccaaaatgctaaatgctttgaagaatagtgacatgcaaggaagaaaattccatgcaatttggagaagaaacatttttctaggaatcta

SEQ ID NO: 275095 - DNA, 201 bp, Homo sapiens
atcatagaatataattccttgttgtattttaaacacaaatgactaagtgcttagatgcattctaatgaaatagtaatttttcccccaaaccctacttttcrtttcaacaaaacttccttgtgccaagtttaaaagaaaaacataaaactgtctttttgcattgtgggcagattgtgtatcctccaaaggttgtccagtgaa

SEQ ID NO: 275096 - DNA, 201 bp, Homo sapiens
cagtccctggtacccagtagagacctatgtaatgttcgttattcaattaataaatacatgaattaaagagtgagagtggattttgtaatgttacgactgayagagaaatactcagtgattctaagggatggggaagaacggttggagctagaggttgtgctcaggaaactattaaatagacgttccgcaggaagggattga

SEQ ID NO: 275097 - DNA, 201 bp, Homo sapiens
atgtttctcaaactttgtcttccagaacaaatctctaatccattcaggtgggttaatatctaacccaatcatgcccagcgaaaaggtgaatgaccctcctygtttgttcaagagcagtgtccttggttttcatgtccctgccaggactgggacactatatattaggaacactatataatcagaacctggagaggcctccag

SEQ ID NO: 275098 - DNA, 201 bp, Homo sapiens
cactgcaagaatcaagccgattcacaattcacatcaattccaggagtgacggccagatggcagcatctggctagtcagttggtgagtgagtccacctccartcttgattaaactctgctgctgggaagtagcaattctgagcataaatgtctttgatatcctgaatattttgggtgtgggatgagagaggcagtagatagt

SEQ ID NO: 275099 - DNA, 201 bp, Homo sapiens
gtggtggccgcctgtaatcccagctacttgggaggctgaggcaggagaattgcctgaacctgggaggtggaggttgcagtgagccaagatagcaccactgygatctagcctgggcgatagaacaagactctgtctcaaaaaaaaaaaaaaaacaggccgggcgcggtggctcacgcctgtaatcccagcactttgggaggc

SEQ ID NO: 275100 - DNA, 201 bp, Homo sapiens
ggagtcaataatatatgcaactctgtagtcattcattattttatccagattgacagaagcagaggaaaccaagaaaaatggaagtggtaaaaaaaaaaaaatgcagtaattgccaatatttactgagcatttaccctgtgctaggccttgttataggcgcttagattgattttcttttcataacatccctaagaggtaggt

SEQ ID NO: 275101 - DNA, 201 bp, Homo sapiens
gatctttcccccattttctctacttggctgctccctgagaggactgcataggatagaaatgcctttttcttttcttttcgtttttttttttttttttttttgagatggagtctcactctgtcgcccaggcttaagtgcaatggcacaatctcggctcactgcaacctctctctcctgggttcaagtgattctcctgcctca

SEQ ID NO: 275102 - DNA, 201 bp, Homo sapiens
atttcctagagaagacattagtaacattcctatccaccactgccacctaacgactcttttaggtactagcagctctggttccgtttcctgatttctgatttctgggattctggcaccaggcagaagaatgttgactgtgtaaggcagacctttgacattagaagtcagtatttgttcattacagagcaagagacttaattg

SEQ ID NO: 275103 - DNA, 201 bp, Homo sapiens
gagcttgcagtgagccgagattgcgccactgcagtccgcagtccggcctgggcgacagagcgagactccgtctcaaaaaaaaaaaaaaaaaaaaaaaaaaagaaaagaaaagaaaaaaaggacagagaacagctgggactaattccactgacaaaaagctgacagacagttacgtgtttgggtacagaaggatatatctat

SEQ ID NO: 275104 - DNA, 201 bp, Homo sapiens
cactacgcccggctaattttttgtatttttagtagagacggggtttcaccgtgttagccaggatggtcttgatctcctgacctcgtgatccgcccgcctcrgcctcccaaagtgctgggattacaggcgtgagccaccgcgcccggccgtcatttggtatgtcttaatgtgcctcaggacctagcacagtccctggtaccc

SEQ ID NO: 275105 - DNA, 201 bp, Homo sapiens
tctctactaaaaatacaaaaaattagccgggcgcggtggcgggcgcctgtagtcccagctactcgggaggctgaggcaggagaatggcgtgaacccgggargcggagcttgcagtgagccgagattgcgccactgcagtccgcagtccggcctgggcgacagagcgagactccgtctcaaaaaaaaaaaaaaaaaaaaaaa

SEQ ID NO: 275106 - DNA, 201 bp, Homo sapiens
gaacctgggaggcggaggttacagtgaacagagattgcgtcactgcactctagcctgggtgacagagcaagactccgtcttaaaaaaaaaaaaaaaaaaaattgtgtggtgcattggaaagcttccaggccggcgaatgcaatgagttccttgggcaatacatgtctctttctctgttcctcagttggctcttctttaata

SEQ ID NO: 275107 - DNA, 201 bp, Homo sapiens; identical to SEQ ID NO: 54680

SEQ ID NO: 275108 - DNA, 201 bp, Homo sapiens; identical to SEQ ID NO: 54682

SEQ ID NO: 275109 - DNA, 201 bp, Homo sapiens
cttaccttatttctcctgccccttgctttcttttctaggcacctctaagatactgatggctctgcagaggacccattcattgcttctgcttttgctgctgwccctgctggggctggggctggtccagccctcctatggccaggatggcatgtaccagcgattcctgcggcaacacgtgcaccctgaggagacaggtggcag

SEQ ID NO: 275110 - DNA, 201 bp, Homo sapiens
tacaggcgcccgccactacgcccggctaattttttgtatttttagtagagacggggtttcaccgtgttagccaggatggtcttgatctcctgacctcgtgrtccgcccgcctcagcctcccaaagtgctgggattacaggcgtgagccaccgcgcccggccgtcatttggtatgtcttaatgtgcctcaggacctagcaca

SEQ ID NO: 275111 - DNA, 201 bp, Homo sapiens; identical to SEQ ID NO: 88300

SEQ ID NO: 275112 - DNA, 201 bp, Homo sapiens
tactttggcacttatatctaatgaggtgtccttggtcttaatatctaatgcagagcgagtttggacagagattctaaacaggttcaccagctcatactccyttctgtgaacagcaatatccccacaagttatacagcattggcacctcctgcaagtacggtatttcctagagaagacattagtaacattcctatccaccac

SEQ ID NO: 275113 - DNA, 201 bp, Homo sapiens
aggaagaagcgggtgagaaacaaaacttctttccattgtcctgcccgtttctgcggacttgttctgaggccgaggtaggttcacactcctgctcctcctcytcctctctggtagcttcataaggggcgtttaggccggggagtcctttcctagtagaggcagcttgggactccttggggaggagtttgcgggacggggctg

SEQ ID NO: 275114 - DNA, 201 bp, Homo sapiens
ttattaaaacaatttcagcaccactcagggggctagggaaatctcagatgagccaagaccctccctcgtgacagtaaaaatcttataatcaagtcataatrtaatcagtagaaacccaagggacatcattatctgtggcacaggaccaccttcccagaagcagcctcaggtattcaagacttacttaaccacagagccact

SEQ ID NO: 275115 - DNA, 201 bp, Homo sapiens
ttttctctacttggctgctccctgagaggactgcataggatagaaatgcctttttcttttcttttcgtttttttttttttttttttttgagatggagtctyactctgtcgcccaggcttaagtgcaatggcacaatctcggctcactgcaacctctctctcctgggttcaagtgattctcctgcctcagcctcccaaatag

SEQ ID NO: 275116 - DNA, 201 bp, Homo sapiens
aacaatttcagcaccactcagggggctagggaaatctcagatgagccaagaccctccctcgtgacagtaaaaatcttataatcaagtcataatgtaatcartagaaacccaagggacatcattatctgtggcacaggaccaccttcccagaagcagcctcaggtattcaagacttacttaaccacagagccactaacaagt

SEQ ID NO: 275117 - DNA, 201 bp, Homo sapiens
cctggctaatttttgtgtttttagtagagacagggtttcaccgttttggccaggttggtcttgaactcctgacctcgggagatccgcccaccttggcctcycaaagtgctgggattacaggcatgagccactgagccgggccactttttccttatcagtcagtttttacaagtcattagggaggtagactttacctctctg

SEQ ID NO: 275118 - DNA, 201 bp, Homo sapiens
ttcaagacttacttaaccacagagccactaacaagttttgcaagaggataggtttattacatacgcttcaattcaagcaattcttttactgatgacaagcmgagtaaaataatttttgaatttatggtaatagtcaatgtaggtttccttcgaacagcaactttcagtggcccctttaaagttagctctgattgtctagaa

SEQ ID NO: 275119 - DNA, 201 bp, Homo sapiens
tgaacctgggaggcggaggttacagtgaacagagattgcgtcactgcactctagcctgggtgacagagcaagactccgtcttaaaaaaaaaaaaaaaaaaaattgtgtggtgcattggaaagcttccaggccggcgaatgcaatgagttccttgggcaatacatgtctctttctctgttcctcagttggctcttctttaat

SEQ ID NO: 275120 - DNA, 201 bp, Homo sapiens
atgagaaagtcccagtttctggtaaactatttgggcccttttctcaagttctccaaccagtgctatttccttgaggtgaggcaaagttactcaagatcatygctgccactcaaggccttgatagggcaagtgaaaggcatggaccattattatattgatcacagcataagctgtgaaaacccacatcttctccaaacatct

SEQ ID NO: 275121 - DNA, 201 bp, Homo sapiens
ttgaacctgggaggcggaggttacagtgaacagagattgcgtcactgcactctagcctgggtgacagagcaagactccgtcttaaaaaaaaaaaaaaaaaaaattgtgtggtgcattggaaagcttccaggccggcgaatgcaatgagttccttgggcaatacatgtctctttctctgttcctcagttggctcttctttaa

SEQ ID NO: 275122 - DNA, 201 bp, Homo sapiens
gatggtgaaacctcgtctctactaaaaatacaaaaattagccgggcacggtggtgagcacctgtaaccccagctactcgggaggctgagacaggagactckcttgaacctgggaggcggaggttacagtgaacagagattgcgtcactgcactctagcctgggtgacagagcaagactccgtcttaaaaaaaaaaaaaaaa

SEQ ID NO: 275123 - DNA, 201 bp, Homo sapiens
gtagtttgtaaactttctgtgacgtatgctgagtctatccaaactgtcgggaattggagcctcccgggaaccaaacactccccaaagatcatacacctacrgagttcccccaagagacacacaactgcagtttcatgtaggttcaccttttctctctttttatactctgtccacacaaacctggcagccacgcagtcagtc

SEQ ID NO: 275124 - DNA, 201 bp, Homo sapiens
cacaagatcaggagttcgagaccagcctggccaagatggtgaaacctcgtctctactaaaaatacaaaaattagccgggcacggtggtgagcacctgtaaycccagctactcgggaggctgagacaggagactctcttgaacctgggaggcggaggttacagtgaacagagattgcgtcactgcactctagcctgggtgac

SEQ ID NO: 275125 - DNA, 201 bp, Homo sapiens
  misc_feature (1)...(201): n = A,T,C or G
caggcgtgagccaccgcgcccggccgtcatttggtatgtcttaatgtgcctcaggacctagcacagtccctggtacccagtagagacctatgtaatgttcnttattcaattaataaatacatgaattaaagagtgagagtggattttgtaatgttacgactgatagagaaatactcagtgattctaagggatggggaagaa

SEQ ID NO: 275126 - DNA, 201 bp, Homo sapiens; identical to SEQ ID NO: 54691

SEQ ID NO: 275127 - DNA, 201 bp, Homo sapiens
catgttgctcaggctggtcttgaactcatgagctcaggcgatccactctcctcagcctcccaaagtgctgggattacagatataagccaccatacacaacttttttttttttttgagatggagtttcactctgttgcccaggctggagtgctaaatagcagaatcactgctcactgcaacctctgcctgctgggttcaagc

SEQ ID NO: 275128 - DNA, 201 bp, Homo sapiens
cacacccagctaatttttattccatttttagtagagacggggtttcaccgtggtgaccaggctggtttcgaattcctgacctcaagtgatccgcccccctyggcctcccaaagtgctaggattacaggcatgagccaccacgcccaacttcctcccacattttttaagtccgtggcccagatcttcctccctaactttcct

SEQ ID NO: 275129 - DNA, 201 bp, Homo sapiens
aatttttattccatttttagtagagacggggtttcaccgtggtgaccaggctggtttcgaattcctgacctcaagtgatccgcccccctcggcctcccaamgtgctaggattacaggcatgagccaccacgcccaacttcctcccacattttttaagtccgtggcccagatcttcctccctaactttcctgggatcagatt

SEQ ID NO: 275130 - DNA, 201 bp, Homo sapiens
ttttattccatttttagtagagacggggtttcaccgtggtgaccaggctggtttcgaattcctgacctcaagtgatccgcccccctcggcctcccaaagtkctaggattacaggcatgagccaccacgcccaacttcctcccacattttttaagtccgtggcccagatcttcctccctaactttcctgggatcagattgtc

SEQ ID NO: 275131 - DNA, 201 bp, Homo sapiens
ctaatcagagccccatttcaagtgctcagtagcccctttggccaaccttcaactccatgggacaatgtgggtccaatgaccttcccagcagaaggcagacrggggacaaggcagaccccataggaccaggccacagcaggggctgaggatgcccggttaacggatgcctggggaacaggatgccagaaatcacacatgacc

SEQ ID NO: 275132 - DNA, 201 bp, Homo sapiens
ggatcacgaggtcaggagcttgaaaccatgctcgctaactcggtgaaaccccatctctactaaaaatacaaaaaattagccaggcgtggtggcgggcgccygtagtcccagctacttgggaggctgaggcaggagaatggcgtgaaccccggaggcggagcttgcagtgagcggagatcgcgccactgcactacagcatgg

SEQ ID NO: 275133 - DNA, 201 bp, Homo sapiens
gtggtttatgctcatagtcgcagagttttgggagggtgaggcaggaggatggcttgagcccaagagttcgagatcagcctgagcaacatggtgaaacccastctctacaaaaattacaaaaaaattaggcaggcgtggtggcacgcacctgcagtcccagctaatcaggaggctgaggtgggaagattccttgagcctggg

SEQ ID NO: 275134 - DNA, 201 bp, Homo sapiens; identical to SEQ ID NO: 54698

SEQ ID NO: 275135 - DNA, 201 bp, Homo sapiens
aaacctgcaacatggagtgtaggaaaaaatatgatgatcaggagaaatgctcttattttaaagtttagtaagaagagagtccggttcccaacagctccctsctgcagggcctgtgatgcagaggctggacagggctggcccggaaaggggccccagctccatccatccccatctctgtggcctgggcaggttaccccgcct

SEQ ID NO: 275136 - DNA, 201 bp, Homo sapiens
accccaatgtcaccctgaccatctccgccgcccgcctctactactactgggaaagagattaccgaagggcgctctgcaggctgagtcaggcaggggcccgygtgaagattatggacgatgaaggtgagaggtggaggggtcaggggagcgtgagcgggaggaacagcatgaaagatggatggatctgcaatgccatggctg

SEQ ID NO: 275137 - DNA, 201 bp, Homo sapiens; identical to SEQ ID NO: 54700

SEQ ID NO: 275138 - DNA, 201 bp, Homo sapiens; identical to SEQ ID NO: 54701

SEQ ID NO: 275139 - DNA, 201 bp, Homo sapiens
ctgggaaggaagcaaaaattctcagggctgtggaggggttggggaggcccagagccatgcagggggctgtgtttagtggacatcagccctgagggctcccrggagcgctctctacattggctggtttctctcttgtgtcttcagaaacacagtggagcgaatgtatcgagacacattctcctacaacttttataatagacc

SEQ ID NO: 275140 - DNA, 201 bp, Homo sapiens
ctggaactgggagaattgaaccaaaggatgattagagcaatgtggaattttgttcacagtgctttgatggattttctgtaacatttactttgcttaaatascaagtcttaggagagggtgtggggagggaatggtctctgaagcacaagataaatcgtatcttccaaggatgtctccactgtgggcagaggaggatgcaga

SEQ ID NO: 275141 - DNA, 201 bp, Homo sapiens
tgggcagaggaggatgcagatgaccccaaacacacgctcctcctccactatcagcattcactgtttataaatgacacgagtaacatggaatatagtggcckggtgcggtggctcacacctgtcatcccagcactttggtaggctgaggtgggtggattgcctgaggtcgggagttcgagaccatcctgatcaacatggata

SEQ ID NO: 275142 - DNA, 201 bp, Homo sapiens
tctcggctcactacaacctccgcctcccaggttcaagcgattctcctgcctcagcctccacagtggctgggattacaggcacccactaccacgcttggctwatttttatatttttagtagagactgggttgcaccatgttggtgagactggtctcaaactcctgacctcaagtgatgggcctacctcggcctcccaaagtg

SEQ ID NO: 275143 - DNA, 201 bp, Homo sapiens
ctcggctcactacaacctccgcctcccaggttcaagcgattctcctgcctcagcctccacagtggctgggattacaggcacccactaccacgcttggctawtttttatatttttagtagagactgggttgcaccatgttggtgagactggtctcaaactcctgacctcaagtgatgggcctacctcggcctcccaaagtgc

SEQ ID NO: 275144 - DNA, 201 bp, Homo sapiens
gttcaagcgattctcctgcctcagcctccacagtggctgggattacaggcacccactaccacgcttggctaatttttatatttttagtagagactgggttkcaccatgttggtgagactggtctcaaactcctgacctcaagtgatgggcctacctcggcctcccaaagtgctgggattacaggcatgagccataatgtcc

SEQ ID NO: 275145 - DNA, 201 bp, Homo sapiens; identical to SEQ ID NO: 54693

SEQ ID NO: 275146 - DNA, 201 bp, Homo sapiens
gacacattctcctacaacttttataatagacccatcctttctcgtcggaataccgtctggctgtgctacgaagtgaaaacaaagggtccctcaaggccccstttggacgcaaagatctttcgaggccaggtaccacccggacttcaatcactttgcaggcaggagctaagccagctgggaaagcaaaccacgcactgataa

SEQ ID NO: 275147 - DNA, 201 bp, Homo sapiens
aaaggcaaccagagaccagagaggccatagaaagggatctaaggccctcgggagagacgggaactgagcacctgggtcttagaccggaggagcaaactgcmagacagggtggccggggacaccagcctccacccttctgtgacatagggacaagagctcagcctgccagggaacaactctgggcaggagatgtggaaggaa

SEQ ID NO: 275148 - DNA, 201 bp, Homo sapiens
cctgattcctcgatgtcaaggacacatcctcacagggtggtgaaccctcgctcctcaccctgccgcccccacagcagccactgacctcccacccaccctgycgtgtcccacccaaccctgcggccccctcctcccaggcaggagattttttcagagtgtgtttggggagggagccgtctgtgtgctgggcaggcctggcct

SEQ ID NO: 275149 - DNA, 201 bp, Homo sapiens
cgttggggggctgaggagagtgggtgcgggagggacagcatgaggggcaggtgtgtctgcaatgccgtggggcggggcagtgtcccgggaagcctgcaggratggcgccagtgtccactgcaactggcagtcaggagacctgggcttggaggggagggcccagggctgggagagaagcctgctgggccctcactgctttct

SEQ ID NO: 275150 - DNA, 201 bp, Homo sapiens
acagcaacgtgaatctcaccatcttcaccgcccgcctctactacttctgggatacagattaccaggaggggctccgcagcctgagtcaggaaggggcctcygtggagatcatgggctacaaaggtgagacgttggggggctgaggagagtgggtgcgggagggacagcatgaggggcaggtgtgtctgcaatgccgtgggg

SEQ ID NO: 275151 - DNA, 201 bp, Homo sapiens
ggcctacctcggcctcccaaagtgctgggattacaggcatgagccataatgtccagccaagaactttgttctcttttgcattttactaatgcgttggagartgggtgggagaaatactgggaaggtggggaatgtactcctggaacgaccagagctggaccctgagctggaagaggtcagcctgcccctgctgcccatgcc

SEQ ID NO: 275152 - DNA, 201 bp, Homo sapiens; identical to SEQ ID NO: 54704

SEQ ID NO: 275153 - DNA, 201 bp, Homo sapiens; identical to SEQ ID NO: 54695

SEQ ID NO: 275154 - DNA, 201 bp, Homo sapiens
aaagaatcatcatcatcggacaggtgaaatgtgaggaaggaattgagctgaaatgttcaagcaattattttagggcgaagagttttattgtctgttgcatyttcctaatgggttgggagacgtgtggcagaaaaactgggaggttgagggtgtcccattggtaggcccagagctgtggttccagctgggagaggtcacccc

SEQ ID NO: 275155 - DNA, 201 bp, Homo sapiens
  misc_feature (1)...(201): n = A,T,C or G
agcatcccctcctctttctctctcccagtctttctgcctgggaaagcagcagacattcccagggctgtccagtgagtggtgttcagtgggcatcagctccnaggaatccaggggggtctctgcattggggtttctctattgtgccttcagaaacccgatggaggcaatgtatccacacatattctacttccactttaaaaa

SEQ ID NO: 275156 - DNA, 201 bp, Homo sapiens
gtctccaaatacagttatcctgtgaggaggtggggatgagggtttcaacatatcaatgtggggaagatacaatttagtccatgacaatgggtcaagcttgsgtggggcatgcaggggtccctgttctgtgtgtctgtctcccaggcgagtcctgccctgactctcacagcccctccctccagaccttgctgcaccctgggc

SEQ ID NO: 275157 - DNA, 201 bp, Homo sapiens
acacatattctacttccactttaaaaacctacgcaaagcctatggtcggaacgaaagctggctgtgcttcaccatggaagttgtaaagcaccactcacctrtctcctggaagaggggcgtcttccgaaaccaggtagcaccaaagtcctatttacaccccaaataggagctaagcagctaggaatgcagaaaacacaataa

SEQ ID NO: 275158 - DNA, 201 bp, Homo sapiens
caggtgcccaccaccacacccagctaatttttattccatttttagtagagacggggtttcaccgtggtgaccaggctggtttcgaattcctgacctcaagygatccgcccccctcggcctcccaaagtgctaggattacaggcatgagccaccacgcccaacttcctcccacattttttaagtccgtggcccagatcttcc

SEQ ID NO: 275159 - DNA, 201 bp, Homo sapiens
gaggcagaggttgcagtgagccgagatcttgccactgccccccagcctgggtgacagagcaagactctgtcactcaaaaagataaagaggaacggccaggygcagtggttcacgcctgtaatctcagcactttgggaggccaaggcgggggatcacgaggtcaggagcttgaaaccatgctcgctaactcggtgaaacccc

SEQ ID NO: 275160 - DNA, 201 bp, Homo sapiens
caccacacccagctaatttttattccatttttagtagagacggggtttcaccgtggtgaccaggctggtttcgaattcctgacctcaagtgatccgccccsctcggcctcccaaagtgctaggattacaggcatgagccaccacgcccaacttcctcccacattttttaagtccgtggcccagatcttcctccctaacttt

SEQ ID NO: 275161 - DNA, 201 bp, Homo sapiens
ggggagggcccagggctgggagagaagcctgctgggccctcactgctttctccttgttttttctcagattttaaatattgttgggaaaactttgtgtacartgatgatgagccattcaagccttggaaaggactaaaatacaactttctattcctggacagcaagctgcaggagattctcgagtgaggggtctccccgggc

SEQ ID NO: 275162 - DNA, 201 bp, Homo sapiens
tcccagggctgtccagtgagtggtgttcagtgggcatcagctccgaggaatccaggggggtctctgcattggggtttctctattgtgccttcagaaacccratggaggcaatgtatccacacatattctacttccactttaaaaacctacgcaaagcctatggtcggaacgaaagctggctgtgcttcaccatggaagttg

SEQ ID NO: 275163 - DNA, 201 bp, Homo sapiens
ccattggtaggcccagagctgtggttccagctgggagaggtcaccccggcccttctgcccctgccagcatcccctcctctttctctctcccagtctttctrcctgggaaagcagcagacattcccagggctgtccagtgagtggtgttcagtgggcatcagctccgaggaatccaggggggtctctgcattggggtttctc

SEQ ID NO: 275164 - DNA, 201 bp, Homo sapiens
aagatcacaaaaggaaaggagaagtatcttttctctttttgaagctagggggctggatatcagtattttagcagaaataattcaaccatttaagggacttyacaatatggaggtttataggggatgatggttaactttcaatcctcactgaactctgagatttaataattctgttatgtttagagaccacatttgtttcat

SEQ ID NO: 275165 - DNA, 201 bp, Homo sapiens; identical to SEQ ID NO: 54706

SEQ ID NO: 275166 - DNA, 201 bp, Homo sapiens
gctgcttttctcagcgccgaagccgcgccatgctcgtcctcagaagcgccctgactcgggcgctggcctcacggacgctggcgcctcaggtaccggccacsggggtacccaagccttcacccgacgggaggggaggggcggggcggggagtgttccgggtacgtgcgagcaatgcgcatgcgctctccgccacgcgcgccc

SEQ ID NO: 275167 - DNA, 201 bp, Homo sapiens
gaatgaaacccagaaaagtacaggtgatttaaaattgaattttttatttttcttaattcttttcttcccacagataattttgctcatcgaactgaagttcrgaaagccttggccaaagataaggaatggcaagaacaattcctcattccaaatttggctctcattgataaacaagagagtgagattacttatctggtacca

SEQ ID NO: 275168 - DNA, 201 bp, Homo sapiens
aagaaataccctcttcatttacatagggtgtacacagagtaaatgactttgcaactttacttcatcctcttcatttatatacggcttacaccacatagccmatgggacacctctagagggtactgaaaccctagaaaattctgtaaccagggcccttgagccacttgctcaggcccactcctaccctgtggagtgtgcttt

SEQ ID NO: 275169 - DNA, 201 bp, Homo sapiens
tgtaaaagtatttccataaattataactaatcttaaatcattaaatacagctttgcttataaaactgagtatttgggggaaacagattaagtgaaactgcyaagctatattactttaatctaacttttgtgtcttctttcttgtttctcagtttgaaagtaattgcttaagatttgtcttcttgctgatttcacttcttgc

SEQ ID NO: 275170 - DNA, 201 bp, Homo sapiens
ctcttttaagtgaagtggaggtcgttgctggtgggaatgatccctaacttggagataagggaggatggacgactcatgatttctgccctagcagctaaaartcatccctgcaacaaaattcttaactcccatccggctcccccaccatacccggctcccctgcagtcttccttctctggcaccacctgtccacatctctct

SEQ ID NO: 275171 - DNA, 201 bp, Homo sapiens
tcatgttaaatttgattcagggtgtatctgaacttgactacccaccaccaccaaagaaaaacagtctttctctaaactagcactataagttaaatgcctcaatcaagtaagaatagttcacatatactgagtattaactagtgccaaccgctatattctaaactcttttcatgtgttaatttaatcctcatacaaccctgg

SEQ ID NO: 275172 - DNA, 201 bp, Homo sapiens
tttacatcttatttatttagaatgttaacttatgaaaccttcaaatgctgaatagctgttttccctgatacatcaaaatgattaaattttttaaactgaasgaacctcggctgggcacggtagctcaggcctgtaatcccagcacttttggaggctgagggggtggatcacctgaggtcaggagttcgagaccagcctggc

SEQ ID NO: 275173 - DNA, 201 bp, Homo sapiens
gcagagaggtcaggctcaaatacacgtctatcacaacatctaaaacttaactcggaaaaaacctccacgattttaaatacaaagcactgcacatgcacgcrctcaacacctctccttctttccccatggtcaacacacccacaacccctgcacatttaccaatctacacaactgagcactggagcgaatgaggtgagtgag

SEQ ID NO: 275174 - DNA, 201 bp, Homo sapiens
ctccagttgtgaggcacagggattattcagagcgaaagatttgcaaagcctattttgggaaataattgtattcactgatatcaggatttaaaatgtcattrgcactaaaattcattttccaatggaaaacgtaaaagtcaatttttatatctaaaaagaggtaatggatatataaacatgtttatgtgttttagaaataaa

SEQ ID NO: 275175 - DNA, 201 bp, Homo sapiens
ttcctctgaatgtacttttattgattttttaaaaataatattatttggggtagggagattatctctaagcaaaaaagtaatatatgttttgtataaatatkaaaacccccctcataaaaatttacccattttccaccagttttatatatatctatatagggagatatagtaaatatgtatatatattgaggtaaatttata

SEQ ID NO: 275176 - DNA, 201 bp, Homo sapiens
tagttgggcatggtggcaaacacctgtagtcctagctacttgggaggctgaggtgggaggattgcttgagccaggagttcaaggctacagtaagctatgawtgcaccactgcactccaacccctgaacgacatagtgagaccctgtctcttaaaaaaaaaaagtaacgaagaaaggataaatgtctaagaatagctaacaa

SEQ ID NO: 275177 - DNA, 201 bp, Homo sapiens
tacctacttaggtgtcccctcagctctcagcactatctaaataaaatagttcacttctctgacagtgtcaaatcttggttctcctcctctgtgtacatcaytgcttggaaatttttacatgcttttcctacttgtcccagagtttctttctctccaccagccctatacttctgtccaaagtgtacaatacttttcaagtat

SEQ ID NO: 275178 - DNA, 201 bp, Homo sapiens
  misc_feature (1)...(201): n = A,T,C or G
atagtcgtgcagctgggagacataagtcccatgaggatcccagagttgtggcagctggtaagctgtttgactaggcatgaattatttttagaacaaatgtntttcagtcagtaactctatatgcctttctatgaaatgtttttccagttcgggaaagtgtcaactacctagtatctcagcagaatatgcttctgattccta

SEQ ID NO: 275179 - DNA, 201 bp, Homo sapiens
aactttgtagtgtatttaggttacaaaaaatttacaaagtcttccttggatctttacctacttaggtgtcccctcagctctcagcactatctaaataaaayagttcacttctctgacagtgtcaaatcttggttctcctcctctgtgtacatcactgcttggaaatttttacatgcttttcctacttgtcccagagtttct

SEQ ID NO: 275180 - DNA, 201 bp, Homo sapiens
ccattgctgatgtgaatgaaacccagaaaagtacaggtgatttaaaattgaattttttatttttcttaattcttttcttcccacagataattttgctcatygaactgaagttcggaaagccttggccaaagataaggaatggcaagaacaattcctcattccaaatttggctctcattgataaacaagagagtgagattac

SEQ ID NO: 275181 - DNA, 201 bp, Homo sapiens
tggtaaagagtcatccaattttggctttcagtatagattttcatttttcagtatagattttcattctgttaaatgtaacataaaacttagttcttggatgyatattattttagatacatacaggttaactaagacttttgaaaagcaataccaaaaaaataaattcagttcttattcttcccagtggtacacctctaaccc

SEQ ID NO: 275182 - DNA, 201 bp, Homo sapiens
acgcgcgcccagacctggggccccggtgaggttctagcgtgagccccggaaccccaagacaggggtacccggaacgcgcgtgaggaggaggccgctgctakgggaatacccccagccggggtcgtctcgcgggcagtggtggtcagaaggcttttctagcctggatgccacacccaccgggacactcccatggcgccggct

SEQ ID NO: 275183 - DNA, 201 bp, Homo sapiens; identical to SEQ ID NO: 54705

SEQ ID NO: 275184 - DNA, 201 bp, Homo sapiens
gaagttcctttggaaaaaaataaaattaattctttgttttatatagaaacatacagtgattgttgtggtaaaaataaatgggagctcttaccccatccttwaaaaaaatgagcataaaataatgagatatttttcaaattgagaccttgcagatttgtaaagcttaactgtgttatagagaaagctgacatggtcagtaga

SEQ ID NO: 275185 - DNA, 201 bp, Homo sapiens
actgagttttgatgaataaaatactaaagaacttaagtgatcaaaactgaagttcctttggaaaaaaataaaattaattctttgttttatatagaaacatwcagtgattgttgtggtaaaaataaatgggagctcttaccccatcctttaaaaaaatgagcataaaataatgagatatttttcaaattgagaccttgcaga

SEQ ID NO: 275186 - DNA, 201 bp, Homo sapiens
atagaaaatactgtttttaaaaacttgttactaagctaaatctgttattataatatacaataagaccctgatttggttttactcatattttctaaaggaartacaataaatttccatagaggttttctctatactgttaacattataccactttcaattttcttctttgtataatgtaaaattttaataataagcacaatt

SEQ ID NO: 275187 - DNA, 201 bp, Homo sapiens
tggtgtaatcaacttaaggaaatggcacatgctattcaaacttaagtaagatggatttataagaatatcacgaatgcctgtgtgtataccatgagtgcatrtatatatgtgtgtgtgcgtatgtgtgtgtgtatgtgtatacatatatacacatagatacctacatagaggataatcttaggcgaggtatttcttacagaa

SEQ ID NO: 275188 - DNA, 201 bp, Homo sapiens
gttcatgctcatgtcaatctaggctacacaaaactagttggagtgttccacacagagtacggagcactcaacagaggtacaattgtccatttcttcttatmtgaaattgtaatatatattgtgacctaagttccttgggtcaggttctttctcattatagagtatgttttattatttattgccaaatgtttagttttttgt

SEQ ID NO: 275189 - DNA, 201 bp, Homo sapiens
atacccccagccggggtcgtctcgcgggcagtggtggtcagaaggcttttctagcctggatgccacacccaccgggacactcccatggcgccggctgtttsgtttttgctgcccagctatgtcgcggctgcggcccagcgagcgctcccatgttgtcacctggcgctgtggagccgcgggtggagtcgtagctttccaagc

SEQ ID NO: 275190 - DNA, 201 bp, Homo sapiens; identical to SEQ ID NO: 54709

SEQ ID NO: 275191 - DNA, 201 bp, Homo sapiens
atactttgacctgaactgtaatttccatttttttcaagaacctaaaagagttttcttctagtaaacatttttttcattatgcctgccaaaagttacgtgcrtagttaataaagttctttgatgtgcataactgtaacacgtatgctcttgactaaagatgcaatattggctaataggaaaacttttgtaaatttgttagaa

SEQ ID NO: 275192 - DNA, 201 bp, Homo sapiens
ggctaaaggtgacagtgaacccccactaggaaacagtaactacacactcagcatatttaagagtagttgtctttattgacacctctatgtaaacaaatgtrtatgtgaagcaggagaatagggtcttgaggcagggaacctaaggacttcctagaactaaatcaaacccttcagctatgacaagaaataccctcttcattt

SEQ ID NO: 275193 - DNA, 201 bp, Homo sapiens
gatgggcaataataaaaaattggtcaggaaaacctcatacattgctattaaacagtctggcactacttagtaaagatgaatatgtacataacttatgaccsagcaattccactcctgggtatgtaatccagagtagtggtttgtaatttccagtacacagatcctgagtgaatctatagatagaattcagagggtctgata

SEQ ID NO: 275194 - DNA, 201 bp, Homo sapiens
taacaattccatctttattggcaacaacttctaactaaaattaaccatttcctttatgaaggtaggcaacaaaccacaatattagcaggacctgtgacttygtaaccaataaatattatagacaatgtcaaattccatttatagttgttgtaaatacataaaaatttcttccacacttatcactacttcaaaattacatct

SEQ ID NO: 275195 - DNA, 201 bp, Homo sapiens
gtagtgtgtatgtgtgtgtgtgtatatatgtgtgtatgcgtgtgtgtgtttaagctcaacttcaaaatatccccttgatcagtagtgaccagacctccatygacagcacatctgctgtctacctgacaccagcagggtctgtgcgtgttcaagcatgtgtggaggtttacatgagtgagatcattatggccttcatctgga

SEQ ID NO: 275196 - DNA, 201 bp, Homo sapiens
aaatctttctctttttttttgaggcagggtctctgtcacccaggctggagtgcagtggcacaatcacagctcactgaagcctcagtctcccaggctcaagygatcctcctgcctcagcctcccgagtatgggagtacaggcatgtaccaccatgcctggctaatattttgggggggtttagtaaacaaagggtctcactat

SEQ ID NO: 275197 - DNA, 201 bp, Homo sapiens
cactgtgcccagcctatacttgaatctttaatgttcatcccaaaccctaaaggtagacattacccccattttatggaaaaggacactgaggctcagaaagrtgctgtgacccggccaaggcccccttgctagtgagtgcaaagccaggactcgaactgtcccccagcttctgtctcctcctgggccaggcttcccctgagc

SEQ ID NO: 275198 - DNA, 201 bp, Homo sapiens
gccacaccttggtcctcatcttggtcccttccaatctgaaacctcgtgcctggctcgtctgccacctacatttctctttccagctgctgttttgtaaaaaraaaaagaaaaaagaagcccaaactagtgagagtaatatctaattatctcattttttgtaggtctgtgataaagaacttagtcatcccttccacctcctac

SEQ ID NO: 275199 - DNA, 201 bp, Homo sapiens
ccaaatctttttctagtgtgtcgacttccttttgtgtgccccagttcttctgcctctttccctcacagatggctcagcgacttcttctgaggaggttcctrgcctctgtcatctccaggaagccctctcagggtcagtggccacccctcacttccagagccctgcagaccccacaatgcagtcctggtggcctgactgtaa

SEQ ID NO: 275200 - DNA, 201 bp, Homo sapiens
gtcagtggccacccctcacttccagagccctgcagaccccacaatgcagtcctggtggcctgactgtaacacccaacccagcccggacaatatacaccacsaggatctccttgacaacctttaatatccaggatggacctgactttcaagaccgagtggtcaacagtgagacaccagtggttgtggatttccacgcacagt

SEQ ID NO: 275201 - DNA, 201 bp, Homo sapiens
aaagaacttagtcatcccttccacctcctactgtgaagaacagaccctgggtcccacactgaaatcccctctagtcacccattcccaccccccagggagckgcctcccaggcagggggtgcagaaaatgattgatgggctggggaaccctggagagcctcgactccggaagtctcaaggtgcctcctcctctccttagctg

SEQ ID NO: 275202 - DNA, 201 bp, Homo sapiens
aaaatttgccgggcgtggcagtgcacgcctgtaatcgcagctacttgggaggctgaggcaggagaatcgcttgaacctgggaggcagaggttgcggtgagmtgagaacacaccattgcactctagtctgggcaacagagcaagactccatctcaaaaataataataataataaaaataaacttgcagaacacgggagagaa

SEQ ID NO: 275203 - DNA, 201 bp, Homo sapiens
tcttaaacaggaaacaccgggcttcccaaggtaaggaccccagcaccatgggaggggcccgtcgctgtaccaggctgagggccttacattcagccctgtgmcctggccctggtccctgccaccacctcctcctgctctggagctggcttggtggtgcctgtgtctcaggcagccctagggagttggaggcagtgacctcac

SEQ ID NO: 275204 - DNA, 201 bp, Homo sapiens
ctgtgcacttccatgtaaggcagtgtttacaggcaccggcacctcctgatgtgtgagccagacacaggagcagcagagcttcagccgcctcctcagggtcragggaagtcccattccagctcaggtttcctgtgagcccctagtgcgggtagtgtgtatgtgtgtgtgtgtatatatgtgtgtatgcgtgtgtgtgtttaa

SEQ ID NO: 275205 - DNA, 201 bp, Homo sapiens
ccagagtgctggcattacaggcatgagccaccgcgcccggccaccaagactgcatttctaacaagctcccaggtgatgccagggctgggtgtcctgagccracatggagagaagccaatgttctgaaggccccatactgactttttcattctgaaggccccagattgactttctggttctgaaggccccggactgactttc

SEQ ID NO: 275206 - DNA, 201 bp, Homo sapiens
tctgcaatgagccgaggaggaggttgcaacatcccgcagcacccagcactgtgcctttcccttggtaggcccttagctgagttaacagatggatgccatcrgggtgggacaggagaagacataccaggacacggagctcagtggcggtgcaggcgagctacgggttagcagaaagagactgcgcacacgtacacactcccc

SEQ ID NO: 275207 - DNA, 201 bp, Homo sapiens
cctggttaagatgagcaggacctgcccagactcaggaggcacctcccaggtacctggcactgttttgagggtctcagctcagcacagccccgcgggaaggygttgcccttcagattccacctgagacctgccccgagaggttgaggagccttccccaggtcacaaagcccctgagtggctgagctgggattcaaggccagg

SEQ ID NO: 275208 - DNA, 201 bp, Homo sapiens
accacgttggccggccttgtctcgaattcctgacctcagatgattcaccttcctcagcctcccaaagtgctgggattacaggcaggagctgccgcgcctgkcctacaccacatcattttggaacagttgctcaccctttgagcctcagtattctcatcgttaaaatgatcctgcccacagccaggagagtgtgagatagtg

SEQ ID NO: 275209 - DNA, 201 bp, Homo sapiens
acttctcctgcctcagcctcccaaagtgctggaattacaggcgtgagccaccacgcccggcctaatttttgtatttttggtagagacaaggtttcaccacrttggccggccttgtctcgaattcctgacctcagatgattcaccttcctcagcctcccaaagtgctgggattacaggcaggagctgccgcgcctggcctac

SEQ ID NO: 275210 - DNA, 201 bp, Homo sapiens
caagctggtctggaactcttgaactcaagcaatcctccagcctcagtctcccagaaggctgggattatagatataagccactgtgcccagcctatacttgmatctttaatgttcatcccaaaccctaaaggtagacattacccccattttatggaaaaggacactgaggctcagaaaggtgctgtgacccggccaaggccc

SEQ ID NO: 275211 - DNA, 201 bp, Homo sapiens
cagcttttttttttttctttttttagagggggtctcgctcttttcacccaggtggagtgaagtggcgcaatctcggctcactgcgacctccatctcccgcrttcaagcacttctcctgcctcagcctcccaaagtgctggaattacaggcgtgagccaccacgcccggcctaatttttgtatttttggtagagacaaggtt

SEQ ID NO: 275212 - DNA, 201 bp, Homo sapiens
tggcagtgcccttagtatctccatcctgcatctgagaacactgaggcttagtgactgaggggcgtgccccagctcacctggctggtaggagccggattgcrtccgccagaacctgagctctgctttatttatgtatttatttatttatttatttatttatttatgagatggagtctcactctgtcacccaggctggagtgc

SEQ ID NO: 275213 - DNA, 201 bp, Homo sapiens
ggcagaagcacaacagagtttgatcccctggactgcaaagtcaaacagatcttgtttcagatcccagcttttttttttttctttttttagagggggtctcrctcttttcacccaggtggagtgaagtggcgcaatctcggctcactgcgacctccatctcccgcgttcaagcacttctcctgcctcagcctcccaaagtgc

SEQ ID NO: 275214 - DNA, 201 bp, Homo sapiens
ctctcctctgcctgttcatctctccttcctcctccctccaggcctggcgactcttgatcttttcactgtctacctaattctgccagaatgttatgtagttsattttttcaataatcgtttttccaagaaccctctcatatctaaaagcttttacaaagcacttggcattttgcatttgaagcatgaaatcctttaatgcgt

SEQ ID NO: 275215 - DNA, 201 bp, Homo sapiens
gccacctacatttctctttccagctgctgttttgtaaaaagaaaaagaaaaaagaagcccaaactagtgagagtaatatctaattatctcattttttgtakgtctgtgataaagaacttagtcatcccttccacctcctactgtgaagaacagaccctgggtcccacactgaaatcccctctagtcacccattcccacccc

SEQ ID NO: 275216 - DNA, 201 bp, Homo sapiens
ttcctgcccctcacccccttaaccccccagcagtcactgatctcattttttgttgttgttctttttgaggattttatgtttttagggcagttttaggttcrtggcaaaattgagaggaaggggaaggtacagagacttcccataagtcccctgtcctcccgcatgcccagcctcccacactatcaacagcccataccaggg

SEQ ID NO: 275217 - DNA, 201 bp, Homo sapiens
atgaaagaggccgctttattcctcagagtatacaagtccaggtttcactcttactagaccagctcaaatagaggcacccatccctgaaccagtctcctgcrgcaagaaatgggtggttgggagcggggtgagaacaggctggccgccccttgagctacgcagggagtggggagtgattacccaaaggaacatcagtctgca

SEQ ID NO: 275218 - DNA, 201 bp, Homo sapiens
tcaagtgattcgcccacctcggcctcccagagtgctggcattacaggcatgagccaccgcgcccggccaccaagactgcatttctaacaagctcccaggtratgccagggctgggtgtcctgagccaacatggagagaagccaatgttctgaaggccccatactgactttttcattctgaaggccccagattgactttctg

SEQ ID NO: 275219 - DNA, 201 bp, Homo sapiens
gatctgcccacctcagcctcccaaaatgctgggattacaggtgtgagccaccgcgcccagcctgagctctgctttatactcaaatctttctctttttttttgaggcagggtctctgtcacccaggctggagtgcagtggcacaatcacagctcactgaagcctcagtctcccaggctcaagcgatcctcctgcctcagcct

SEQ ID NO: 275220 - DNA, 201 bp, Homo sapiens
ggtacattcctttatccatctacccacatgttcagtgagcagtcatttgggagctcgatgtgccaagcatttgtgattctgacacaagatgagatcttgtytccaagcaagatctctcctagtctagcaggagagaacagcaggtagaaagatcatctcaatatagaagtgctaaaagaagaggcgcataaaggaagaagg

SEQ ID NO: 275221 - DNA, 201 bp, Homo sapiens
gggtttcaccatgttggccaggctggtctcaaactcctgacctcaggtgatctacccacctcggcctcccaaagtgctgggattatgggcacgagccaccrtgccaggtggagcctctcttttatccacctcccccaacccccaccccacaaggaggcaggagattccatttcctcatgatccactcctgaggcgggaata

SEQ ID NO: 275222 - DNA, 201 bp, Homo sapiens
agtggccacccctcacttccagagccctgcagaccccacaatgcagtcctggtggcctgactgtaacacccaacccagcccggacaatatacaccacgagratctccttgacaacctttaatatccaggatggacctgactttcaagaccgagtggtcaacagtgagacaccagtggttgtggatttccacgcacagtgag

SEQ ID NO: 275223 - DNA, 201 bp, Homo sapiens
gaagacgtttcttcagcgggtggcccccgggccctgcagtacccctgcaccgagagaagagccatgttcctctaggcctgcccatggctttgggaagtcastgccctggataagccaccagccttccccacaaaggctcaggagtggcagttgagaagtattcactcccaattcacttggacccccttgtcctctccaccc

SEQ ID NO: 275224 - DNA, 201 bp, Homo sapiens
  misc_feature (1)...(201): n = A,T,C or G
agcagcacgggaaggtggtgatggccaaggtggatattgatgaccacacagacctcgccattgagtatgaggtatggattgacagggagttgccacagggnagccagtataggaggtgtcaggcccagggatagctggtgtaggaggtatcttggggagcacaggtagccagtaagcaaggtgtcttggtttttccagagc

SEQ ID NO: 275225 - DNA, 201 bp, Homo sapiens
gcttatttgccgggcgctgtgctgagcctttacttgcgttatttcattcagctttcatgccctctaatggcagtgcccttagtatctccatcctgcatctkagaacactgaggcttagtgactgaggggcgtgccccagctcacctggctggtaggagccggattgcgtccgccagaacctgagctctgctttatttatgt

SEQ ID NO: 275226 - DNA, 201 bp, Homo sapiens
aatggttttctcaaatgcccacgaatgccaggcagggatcccaggcagcagagacctcacaatgccagtctggtgggccacagcctcatccacgttccacrtaacctatgcaggtccctgagggaactgagtaaatgcttcacagaccaagaatgttgtccttgccatctgcctgcaacctgctaataagcgtcaggttgt

SEQ ID NO: 275227 - DNA, 201 bp, Homo sapiens
tctgcccgtgaggctgatcatggccgtgagtcatgctggctgtgctcacggaatcctcctggtgatcctgtttgaccaattccaggacactgacctcaccrgggatgccgctggctctgggctgtcagcccacggtcattctctgggtgccacattgggccccatgactgtggatggggttggcagacacctgctggaagc

SEQ ID NO: 275228 - DNA, 201 bp, Homo sapiens
ttctgtttaaatggttttctcaaatgcccacgaatgccaggcagggatcccaggcagcagagacctcacaatgccagtctggtgggccacagcctcatccrcgttccacataacctatgcaggtccctgagggaactgagtaaatgcttcacagaccaagaatgttgtccttgccatctgcctgcaacctgctaataagcg

SEQ ID NO: 275229 - DNA, 201 bp, Homo sapiens
gtggggccagagcacaatgctggggcgcctcgactcccgagccctggccctttccaccggaccccactgccgctccttaaaaggcaccgtttgccacgcaytttctaaacacattacctcatcgaattccactcttgtgaggcaagtattatttccatatcataagtgaaaaaaacagttcagagaaatcgacttgcccaa

SEQ ID NO: 275230 - DNA, 201 bp, Homo sapiens
cctatcttgttctgtttaaatggttttctcaaatgcccacgaatgccaggcagggatcccaggcagcagagacctcacaatgccagtctggtgggccacarcctcatccacgttccacataacctatgcaggtccctgagggaactgagtaaatgcttcacagaccaagaatgttgtccttgccatctgcctgcaacctgc

SEQ ID NO: 275231 - DNA, 201 bp, Homo sapiens
aggcgtgagccacagcgaccggcctatcttgttctgtttaaatggttttctcaaatgcccacgaatgccaggcagggatcccaggcagcagagacctcacratgccagtctggtgggccacagcctcatccacgttccacataacctatgcaggtccctgagggaactgagtaaatgcttcacagaccaagaatgttgtcc

SEQ ID NO: 275232 - DNA, 201 bp, Homo sapiens
tgagaacactgaggcttagtgactgaggggcgtgccccagctcacctggctggtaggagccggattgcgtccgccagaacctgagctctgctttatttatktatttatttatttatttatttatttatttatgagatggagtctcactctgtcacccaggctggagtgcagtggtgcaatctccactgactccagcctcca

SEQ ID NO: 275233 - DNA, 201 bp, Homo sapiens
cataactcttcagcagacaccccctgagggccagccatgtgcagggactatggtaactactgcagatgcaaagaagcccacaggccctgctccagtgtctygtggggtggcgggaatgccgaggaccgtccccgggaggctgttgtgggagtgggcactgaaggcctgcggtgaagcctgggaagtgagaaggagatgcct

SEQ ID NO: 275234 - DNA, 201 bp, Homo sapiens
agcaagacacagcccctgccttccaggagttcacagcaaacacatggacacatctaaagtctaaatgctacaggagagatgacatttaccaccatggtgayagagtacagactggccgcaagccctgaaaagcagcacatctgcaaaaggagattgtcgggtaaagcatgggaaggaggtgatgcttgagaaaagttgttt

SEQ ID NO: 275235 - DNA, 201 bp, Homo sapiens
cacccacatcagcccagggacagcctttgaaggggcctgaggcactaacaaggacaaggactgtgtcctgtgacctgctgtgtttgtccccaaagtgtccrtgaggagtggggtgcagggcctgccacgtaaagttagtgggtgagggcgggatggtctggcctgcgtgcctttcctaactaccatgtgcatggtttttga

SEQ ID NO: 275236 - DNA, 201 bp, Homo sapiens
caagaatgttgtccttgccatctgcctgcaacctgctaataagcgtcaggttgtgtatggccaagcctctcctctcatgctgtccagtagaagtccctgagtttctggaccctgtcactcatcacagcagcaagctaatgtgctctcgtggggcctgtgttggacttttccttgtgccctctgtagccactgttttttgaa

SEQ ID NO: 275237 - DNA, 201 bp, Homo sapiens
gcaaactctttcgggccctgctctgcctggagacagggtttgccacccacatcagcccagggacagcctttgaaggggcctgaggcactaacaaggacaargactgtgtcctgtgacctgctgtgtttgtccccaaagtgtccgtgaggagtggggtgcagggcctgccacgtaaagttagtgggtgagggcgggatggtc

SEQ ID NO: 275238 - DNA, 201 bp, Homo sapiens
cttgcccgcgtgggaccccaatagaactcagcccttccatgccagcccttcctgctgcctccctcctgtctggctcctggggcccatgcttagagcccagsctccagccctgagtgcttccgagctggcggactgcccaggggccatcagaggatggtggtgctgctgctgatccggggaccgctgtcttccctcccatac

SEQ ID NO: 275239 - DNA, 201 bp, Homo sapiens
ccaagaatgttgtccttgccatctgcctgcaacctgctaataagcgtcaggttgtgtatggccaagcctctcctctcatgctgtccagtagaagtccctgagtttctggaccctgtcactcatcacagcagcaagctaatgtgctctcgtggggcctgtgttggacttttccttgtgccctctgtagccactgttttttga

SEQ ID NO: 275240 - DNA, 201 bp, Homo sapiens
tctctctctctttgctgctgggcagaagcacaacagagtttgatcccctggactgcaaagtcaaacagatcttgtttcagatcccagcttttttttttttytttttttagagggggtctcgctcttttcacccaggtggagtgaagtggcgcaatctcggctcactgcgacctccatctcccgcgttcaagcacttctcct

SEQ ID NO: 275241 - DNA, 201 bp, Homo sapiens
ctttgaggcactccagctgcctttgcagaccactagagggcaccaaagaatgcctgggaaggccctggtggcttcaggcgcttcctggagcaaactctttygggccctgctctgcctggagacagggtttgccacccacatcagcccagggacagcctttgaaggggcctgaggcactaacaaggacaaggactgtgtcct

SEQ ID NO: 275242 - DNA, 201 bp, Homo sapiens
gctcccaggtgatgccagggctgggtgtcctgagccaacatggagagaagccaatgttctgaaggccccatactgactttttcattctgaaggccccagaytgactttctggttctgaaggccccggactgactttctgtggggaggaactgctctttggaaggccgtgtctcagctgccgctctcagcacagactgcttg

SEQ ID NO: 275243 - DNA, 201 bp, Homo sapiens; identical to SEQ ID NO: 54727

SEQ ID NO: 275244 - DNA, 201 bp, Homo sapiens
gctggacttgtacacttccagtaaatgttagtgttctcactcttcccttgagctaggtagtatctataatctgagccatacttcgatacattctatggaartgcaggagatatagattatttttaccctagtataataagataaagaatcatgaaggatttagcccgtaagctgcatatcagaggaagtgtagaattttga

SEQ ID NO: 275245 - DNA, 201 bp, Homo sapiens
ctggggtgggaggatcacttacttgagcccaggaacttgaaactgcagtgagccgtgagcacttcagcctgggcaacagtgtgagaccctgtcacaaaacragatcagttcagtataagattttaaaatcttttaacattttctttttctttagggaaagtggaaaaataaggaacggattctcatcttttcttccagagg

SEQ ID NO: 275246 - DNA, 201 bp, Homo sapiens; identical to SEQ ID NO: 54731

SEQ ID NO: 275247 - DNA, 201 bp, Homo sapiens
gcggcggcggctctgtgcgccttttcttgggttacttacttgactacagccttgcttaatttcagagtagcccgggtgttaacggtaggtcggttttagcwattctcccggccagactgggcacggagtttgcagctaatccttgtgcacgtggccgtcttcctggaggcggcgggttttaaaacctttacccggcccacg

SEQ ID NO: 275248 - DNA, 201 bp, Homo sapiens
ctaagtgctaaggactgccacatgttgctttttgggcctttttttttttttttttaactgtttttattgaaaaatggacctgggatagaattcaaagcactttttaagttggagtcagagcctatttctaaatgccaggttatttatttatttttaagcagtgggttattttacaggcaagaacagtatggccgggcatgg

SEQ ID NO: 275249 - DNA, 201 bp, Homo sapiens
taagtgctaaggactgccacatgttgctttttgggcctttttttttttttttttaactgtttttattgaaaaatggacctgggatagaattcaaagcactttttaagttggagtcagagcctatttctaaatgccaggttatttatttatttttaagcagtgggttattttacaggcaagaacagtatggccgggcatggt

SEQ ID NO: 275250 - DNA, 201 bp, Homo sapiens
gcatgtgagttgaacacatcatcctaacctctgagggtagacatgcctgaactaatagataacataaatatttgttgttcggaagttgccttttaattccrtaatcagtagctattaaataaatttgactacatatccttttaatctaacttgaattagatttataaaaacaatttagggattgatttaagtttcaagagt

SEQ ID NO: 275251 - DNA, 201 bp, Homo sapiens
cattttttaaccctgtagtgtctagtattatgctaaatccatagtaggtactcaaaaaattatcagtcaacatatataaagtaaaataagtccattaaacrtatatatatataaaacccacatggtaaaaagtgttttgccagtattaaaagtgatttgtgtggaactggctattaaggtattacaaactgaataggttac

SEQ ID NO: 275252 - DNA, 201 bp, Homo sapiens
ttcaggtaagctttacttgatttttaattataccttttttttaattgagtttatttatttatgttttgagacagagtctcgctcttgttgcccaggctggmctgcagtggcacaatcttggctcactgcaacctccacctcccgggttcaagcttctgctccctcagtctcctgagtagctgggattacaagcacccatca

SEQ ID NO: 275253 - DNA, 201 bp, Homo sapiens
gccatttaccaagtttcacccccaccttgattttatggattatcaattatttcaggcacatttataatgaggttatagccagtataccttttgggaataaygtaaccaaaccaaaatgaaatgtttcctttttattaaagatcatagaagaagatgctgctcttgtagaaataggacctcgttttgtcttaaatctcataa

SEQ ID NO: 275254 - DNA, 201 bp, Homo sapiens
taaatttacattttaaagcaaaattttcaaaacttagaagaattaggatcattttttcactattagccttctttagagcacaaatttttgaacctctgctrtaataccacattattctatgtgctgtagaaactgttcaacagagcaatgtccctgtcattatggaacttacattctaatggagacaggccataaacaagg

SEQ ID NO: 275255 - DNA, 201 bp, Homo sapiens
ctgaagcaggagaatcatttgaacctgggaggtggaggttgcggcgagccgagatcgtgccattgcactccagcctgggcaacaagagcgaaactgcatcrcaaaaaaaaaaaaaaaaaaaaggagggaggtttccagtaatcagaagtgagaccattttagatgctaggcccaaaaatatgatagataatttcacccaag

SEQ ID NO: 275256 - DNA, 201 bp, Homo sapiens
cttaagtgagctctacctacttctattcatgactgttagttgatacagagtatggatttcctaataagccattatatatttaactttatagaaagggaataacttgaagatccatgagatacttgggttcctaatttgtagaaagtgctgtaaaggatacagtaaaatagaagtttctctctcaaagcttagaagtttctc

SEQ ID NO: 275257 - DNA, 201 bp, Homo sapiens
  misc_feature (1)...(201): n = A,T,C or G
gtgcttcattcatttctgtttgttttgtctgaacaagcatattgaaatttcctcaggagaaggattatgtcccattttttaaccctgtagtgtctagtatnatgctaaatccatagtaggtactcaaaaaattatcagtcaacatatataaagtaaaataagtccattaaacatatatatatataaaacccacatggtaaa

SEQ ID NO: 275258 - DNA, 201 bp, Homo sapiens; identical to SEQ ID NO: 54722

SEQ ID NO: 275259 - DNA, 201 bp, Homo sapiens; identical to SEQ ID NO: 54723

SEQ ID NO: 275260 - DNA, 201 bp, Homo sapiens; identical to SEQ ID NO: 54724

SEQ ID NO: 275261 - DNA, 201 bp, Homo sapiens
cgtcttcctggaggcggcgggttttaaaacctttacccggcccacggggaagcgacttacagggtgctcagatccagcgttctttcttactagttgttcarttgttttttttttttaatgtttttggagagtagtgcttttccttggttatttctcgctattatttctccagtgattagtatgcccatatactgccatagt

SEQ ID NO: 275262 - DNA, 201 bp, Homo sapiens
tggaggaagaagagagggaccggatcccaggccccgtttgcaaggtaggaggggatgtccccgggctacacctgcggcggcggctctgtgcgccttttctkgggttacttacttgactacagccttgcttaatttcagagtagcccgggtgttaacggtaggtcggttttagcaattctcccggccagactgggcacggag

SEQ ID NO: 275263 - DNA, 201 bp, Homo sapiens
cggcaaccaagaggaaacggcgtggaggctttgcagttcaggcgaagaagccaaaaagaaacgaaatagatgcggagccgccagctaagcggcacgccacrgcagaggaggtggaggaagaagagagggaccggatcccaggccccgtttgcaaggtaggaggggatgtccccgggctacacctgcggcggcggctctgtg

SEQ ID NO: 275264 - DNA, 201 bp, Homo sapiens; identical to SEQ ID NO: 54726

SEQ ID NO: 275265 - DNA, 201 bp, Homo sapiens
tttccatgacaacttcctataagtactaatagatttcagaaaatattgatgatttgccatttaccaagtttcacccccaccttgattttatggattatcarttatttcaggcacatttataatgaggttatagccagtataccttttgggaataacgtaaccaaaccaaaatgaaatgtttcctttttattaaagatcata

SEQ ID NO: 275266 - DNA, 201 bp, Homo sapiens
caccgatcctcccttttgcctcagctgctgtggggctggagtagccgcggacgccgagatgaccacacggatggtggcgtccaagatggagctacacgcgytatctacgggccgcgagccccgcgtggccacggtcactcgcatcctgcgccagacgctcttcaggtgcgggggcagggctaacaggaccccggcaggggt

SEQ ID NO: 275267 - DNA, 201 bp, Homo sapiens; identical to SEQ ID NO: 54736

SEQ ID NO: 275268 - DNA, 201 bp, Homo sapiens
tgctggtccccccacagggtacctgcacacactggtgcagaacctggtcaacaatggctacgtgcgggacgagactgtgcgcgccgccccctatgactggyggctggagcccggtgagtgtctctgcggatgaccggcttggggtggggcaggtgccccagaccccagctgccctgaccccttccacccgctgcaggccag

SEQ ID NO: 275269 - DNA, 201 bp, Homo sapiens
ccggtgagtgtctctgcggatgaccggcttggggtggggcaggtgccccagaccccagctgccctgaccccttccacccgctgcaggccagcaggaggagwactaccgcaagctcgcagggctggtggaggagatgcacgctgcctatgggaagcctgtcttcctcattggccacagcctcggctgtctacacttgctcta

SEQ ID NO: 275270 - DNA, 201 bp, Homo sapiens
ggcccagactgctgaagggtttaaaccagagaaagaatgtgaccagatttccaatttagaaagacccgctctctgcagggtaaggagtagcctgggggtcsgggggcggggggcaagaattgcaaggtaaccagggaggccagtgcaatgtccaggtgggagaggatgctagctgagactagaagtgctaggaaaaggatg

SEQ ID NO: 275271 - DNA, 201 bp, Homo sapiens
ggcaccagggctggaatggggccgcccggctccccatggcagtgggtgacgctgctgctggggctgctgctccctcctgccgcccccttctggctcctcawtgtgctcttccccccgcacaccacgcccaaggctgagctcagtaaccacacacggcccgtcatcctcggtaagcccccaccaggcccctgatgcaccacg

SEQ ID NO: 275272 - DNA, 201 bp, Homo sapiens
agtgtctctgcggatgaccggcttggggtggggcaggtgccccagaccccagctgccctgaccccttccacccgctgcaggccagcaggaggagtactacygcaagctcgcagggctggtggaggagatgcacgctgcctatgggaagcctgtcttcctcattggccacagcctcggctgtctacacttgctctatttcct

SEQ ID NO: 275273 - DNA, 201 bp, Homo sapiens
agattgagcatctggctgagcctacactcagcaggttgtgggccaggggtagccaggcctggctccctgtcccaccttgctccatatccacaggtgacaamcagggcatccccatcatgtccagcatcaagctgaaagaggagcagcgcataaccaccacctccccctggatgtttccctctcgcatggcgtggcctgagg

SEQ ID NO: 275274 - DNA, 201 bp, Homo sapiens
tgagcatctggctgagcctacactcagcaggttgtgggccaggggtagccaggcctggctccctgtcccaccttgctccatatccacaggtgacaaccagsgcatccccatcatgtccagcatcaagctgaaagaggagcagcgcataaccaccacctccccctggatgtttccctctcgcatggcgtggcctgaggacca

SEQ ID NO: 275275 - DNA, 201 bp, Homo sapiens; identical to SEQ ID NO: 54749

SEQ ID NO: 275276 - DNA, 201 bp, Homo sapiens
ccccttccacccgctgcaggccagcaggaggagtactaccgcaagctcgcagggctggtggaggagatgcacgctgcctatgggaagcctgtcttcctcaytggccacagcctcggctgtctacacttgctctatttcctgctgcgccagccccaggcctggaaggaccgctttattgatggcttcatctctcttggggct

SEQ ID NO: 275277 - DNA, 201 bp, Homo sapiens
gggaccgcgacgggccaggtgaccggaagaggccggcccaagagaacctgggctacaggaaaaggcgatgtcagtcatcgggcgccagcccacaggaaggrgcggggatagcacctaggagctgggcatagagaggtggggcctaggccccagcttgtggccgaccccgcccatcctcgagcaggtaccagggccacgtgg

SEQ ID NO: 275278 - DNA, 201 bp, Homo sapiens; identical to SEQ ID NO: 54756

SEQ ID NO: 275279 - DNA, 201 bp, Homo sapiens
atggggccgcccggctccccatggcagtgggtgacgctgctgctggggctgctgctccctcctgccgcccccttctggctcctcaatgtgctcttccccchgcacaccacgcccaaggctgagctcagtaaccacacacggcccgtcatcctcggtaagcccccaccaggcccctgatgcaccacgccagaccctggggag

SEQ ID NO: 275280 - DNA, 201 bp, Homo sapiens; identical to SEQ ID NO: 54759

SEQ ID NO: 275281 - DNA, 201 bp, Homo sapiens
ctggcccacagcaggcatggcccaagcccccggtgctgctggtccccccacagggtacctgcacacactggtgcagaacctggtcaacaatggctacgtgygggacgagactgtgcgcgccgccccctatgactggcggctggagcccggtgagtgtctctgcggatgaccggcttggggtggggcaggtgccccagaccc

SEQ ID NO: 275282 - DNA, 201 bp, Homo sapiens
cccggctccccatggcagtgggtgacgctgctgctggggctgctgctccctcctgccgcccccttctggctcctcaatgtgctcttccccccgcacaccaygcccaaggctgagctcagtaaccacacacggcccgtcatcctcggtaagcccccaccaggcccctgatgcaccacgccagaccctggggagcctgggccc

SEQ ID NO: 275283 - DNA, 201 bp, Homo sapiens
tggcccacagcaggcatggcccaagcccccggtgctgctggtccccccacagggtacctgcacacactggtgcagaacctggtcaacaatggctacgtgcrggacgagactgtgcgcgccgccccctatgactggcggctggagcccggtgagtgtctctgcggatgaccggcttggggtggggcaggtgccccagacccc

SEQ ID NO: 275284 - DNA, 201 bp, Homo sapiens
aggaggggctccctagaacggccggccctggtctcaggctccccccacccggccactgcaggccgcagctgctggtgctgctgaagctggacgaggacctscacgtgaagtacccgcggctcctcaccttcgcctcccagctcaaggctggcaagggcctgaccattgttggttctgtcatccaggggagcttcttggaga

SEQ ID NO: 275285 - DNA, 201 bp, Homo sapiens
tgtcttcctcattggccacagcctcggctgtctacacttgctctatttcctgctgcgccagccccaggcctggaaggaccgctttattgatggcttcatcwctcttggggctccctggggtggctccatcaagcccatgctggtcttggcctcaggtgagaaggcctcgaacacttaggtccagcgatgggtgagaccaag

SEQ ID NO: 275286 - DNA, 201 bp, Homo sapiens
tgtgcccctttccggcaatctctggccacaacccccactggccaggccgtccctcccactggccctagggcccctcccactcccacaccagataaggacakcccagtgccgctttctctggcagtaggcaccagggctggaatggggccgcccggctccccatggcagtgggtgacgctgctgctggggctgctgctccct

SEQ ID NO: 275287 - DNA, 201 bp, Homo sapiens
tctctggccacaacccccactggccaggccgtccctcccactggccctagggcccctcccactcccacaccagataaggacagcccagtgccgctttctcyggcagtaggcaccagggctggaatggggccgcccggctccccatggcagtgggtgacgctgctgctggggctgctgctccctcctgccgcccccttctgg

SEQ ID NO: 275288 - DNA, 201 bp, Homo sapiens
cccccaaggcgggccctgggggtgagggaggccaggctggggtctggggcccaaggtgtggaatgggggtgacaggacccagcttccttcctggtgcacacaggtgtttggccacgggaaggtgaatggtgaacccacatgggcactcctcctgacggcactcatcgccgagctgggcatcctcatcgcctccctcgacat

SEQ ID NO: 275289 - DNA, 201 bp, Homo sapiens
ttcctcattggccacagcctcggctgtctacacttgctctatttcctgctgcgccagccccaggcctggaaggaccgctttattgatggcttcatctctcytggggctccctggggtggctccatcaagcccatgctggtcttggcctcaggtgagaaggcctcgaacacttaggtccagcgatgggtgagaccaagctga

SEQ ID NO: 275290 - DNA, 201 bp, Homo sapiens
catgtgctccaccctagccccaacacgctgccccttggctactggctgctgagtggcacccccgccccgcagggttgtctacaaccggagctctgggctcrtgtccaacgcccctggtgtccagatccgcgtccctggctttggcaagacctactctgtggagtacctggacagcagcaagctggcaggtttgtgtcagag

SEQ ID NO: 275291 - DNA, 201 bp, Homo sapiens
cccactcccacaccagataaggacagcccagtgccgctttctctggcagtaggcaccagggctggaatggggccgcccggctccccatggcagtgggtgaygctgctgctggggctgctgctccctcctgccgcccccttctggctcctcaatgtgctcttccccccgcacaccacgcccaaggctgagctcagtaaccac

SEQ ID NO: 275292 - DNA, 201 bp, Homo sapiens
caggcctgggcctcaaaatggagatggatcccaggtcttgtgggaccctgggatgtttggggactttactatctagcaccccagtaggcctgtcctggccrgagaagactggtaggggccgagtggggtttgaaggcagccggcccggcccagcccaggagcgctatttattgcatatttattgtttggatgtcaccatca

SEQ ID NO: 275293 - DNA, 201 bp, Homo sapiens
ggagtacctggacagcagcaagctggcaggtttgtgtcagagggcagggctggggctccaggcctgggtgctggcccacagcaggcatggcccaagccccmggtgctgctggtccccccacagggtacctgcacacactggtgcagaacctggtcaacaatggctacgtgcgggacgagactgtgcgcgccgccccctatg

SEQ ID NO: 275294 - DNA, 201 bp, Homo sapiens
ttgggccagacaggccccatcccccttttcctatgggaccaaggctatctcctgcaattgtcctcaggcccagctggtcaaggatcggcactcggccctgmggctggagagcctgtactcggacgaggaagatgagtctgcagtgggggctgacaagatccagatgacgtggaccagggacaagtacatgactgagacctg

SEQ ID NO: 275295 - DNA, 201 bp, Homo sapiens
cgcatccacatagacagaaccccctgggcggcaccaggggctcaccagctgtggtggaatctgcagggctgagaaggagtggggtgacgggatccgaggcytgtccctgagcgctgcccgctacgcgctgttgcggctggaggaggggcctcctcacaccaagaactggcggtgagttcccgccagaccctggccagggcg

SEQ ID NO: 275296 - DNA, 201 bp, Homo sapiens
gtggggggtgggtctggtcactgcagcatctggggtgacgggggtaagggtcacggggggaatccagagtccagagtgagggctgctgctcacagtgcccrgctgcctggggaatcagctagaagccaagctggacaaaccagatgtggtgaactggatgtgctaccgcaagacagaggacttcttcaccatctggctgga

SEQ ID NO: 275297 - DNA, 201 bp, Homo sapiens
cttgtggccgaccccgcccatcctcgagcaggtaccagggccacgtgggtgcatcgctgatcgtgggcggcgtagacctgactggaccgcagctctacggygtgcatccccatggctcctacagccgtctgcccttcacagccctgggtgagcgcttctgtcccttctcctcgaactctgcccctgtgaccttggcctcac

SEQ ID NO: 275298 - DNA, 201 bp, Homo sapiens
gggtctggtcactgcagcatctggggtgacgggggtaagggtcacggggggaatccagagtccagagtgagggctgctgctcacagtgcccggctgcctgsggaatcagctagaagccaagctggacaaaccagatgtggtgaactggatgtgctaccgcaagacagaggacttcttcaccatctggctggatctcaacat

SEQ ID NO: 275299 - DNA, 201 bp, Homo sapiens
cgataacaccaggtacagccatgtgctccaccctagccccaacacgctgccccttggctactggctgctgagtggcacccccgccccgcagggttgtctamaaccggagctctgggctcgtgtccaacgcccctggtgtccagatccgcgtccctggctttggcaagacctactctgtggagtacctggacagcagcaagc

SEQ ID NO: 275300 - DNA, 201 bp, Homo sapiens
gtcagagggcagggctggggctccaggcctgggtgctggcccacagcaggcatggcccaagcccccggtgctgctggtccccccacagggtacctgcacayactggtgcagaacctggtcaacaatggctacgtgcgggacgagactgtgcgcgccgccccctatgactggcggctggagcccggtgagtgtctctgcgga

SEQ ID NO: 275301 - DNA, 201 bp, Homo sapiens
tgccctgaccccttccacccgctgcaggccagcaggaggagtactaccgcaagctcgcagggctggtggaggagatgcacgctgcctatgggaagcctgtyttcctcattggccacagcctcggctgtctacacttgctctatttcctgctgcgccagccccaggcctggaaggaccgctttattgatggcttcatctctc

SEQ ID NO: 275302 - DNA, 201 bp, Homo sapiens
cccggtgctgctggtccccccacagggtacctgcacacactggtgcagaacctggtcaacaatggctacgtgcgggacgagactgtgcgcgccgccccctrtgactggcggctggagcccggtgagtgtctctgcggatgaccggcttggggtggggcaggtgccccagaccccagctgccctgaccccttccacccgctg

SEQ ID NO: 275303 - DNA, 201 bp, Homo sapiens; identical to SEQ ID NO: 54751

SEQ ID NO: 275304 - DNA, 201 bp, Homo sapiens; identical to SEQ ID NO: 54752

SEQ ID NO: 275305 - DNA, 201 bp, Homo sapiens; identical to SEQ ID NO: 54753

SEQ ID NO: 275306 - DNA, 201 bp, Homo sapiens; identical to SEQ ID NO: 54754

SEQ ID NO: 275307 - DNA, 201 bp, Homo sapiens
ccaccttgctccatatccacaggtgacaaccagggcatccccatcatgtccagcatcaagctgaaagaggagcagcgcataaccaccacctccccctggawgtttccctctcgcatggcgtggcctgaggaccacgtgttcatttccacacccagcttcaactacacaggccgtgacttccaacgcttctttgcagacctg

SEQ ID NO: 275308 - DNA, 201 bp, Homo sapiens
aaaggggcagtgaacacagaaagtgaatcccagctatctgctcccagggtttgttcttgtagccccagagcctgcctgcccagcccttgcctgccttccasttgctcgcaggagtgcctttgcccagggatgtgcttcactgaggatggatctgccagagctagggccagaccccccgaggccccacctgctcttccctag

SEQ ID NO: 275309 - DNA, 201 bp, Homo sapiens
cccagcccctggcagctgacctggccaaagcccttctgccctgcataagccccgacataagtacctgccctggtgtggggaggggccaaaagcttgtcccktagaggaatgacgtcccttctcccaccacactgtgactctcagttgtctaacccagggggggcggagtgggggacggggtgtgcctgaggtcttggctgg

SEQ ID NO: 275310 - DNA, 201 bp, Homo sapiens
agggggggcggagtgggggacggggtgtgcctgaggtcttggctggggcatcacaagctgtggtcagtcacagccacaccagactctgggccaagccccascactccttccttggcccccacccaccaaggacaagatgcccagcccaggatcggtgagcaggagaggcccatccatgcccggcccctattaggcccagcc

SEQ ID NO: 275311 - DNA, 201 bp, Homo sapiens
caggagaggcccatccatgcccggcccctattaggcccagcccccatgcccccagacctatctgttcccaccttggactttggcaataaaggagcgccagrctgggtgtttgctctgcagaggcaggggtcagcggccttggcctcagcacctcagcgccttcccttcctcagggaagcctgggctttggctactgggggg

SEQ ID NO: 275312 - DNA, 201 bp, Homo sapiens
ggactttggcaataaaggagcgccagactgggtgtttgctctgcagaggcaggggtcagcggccttggcctcagcacctcagcgccttcccttcctcaggkaagcctgggctttggctactggggggacagcagggagagggggtgtaagcaggggagggtaagtgtgctttgtacctgggggttgagggtatgggaggtg

SEQ ID NO: 275313 - DNA, 201 bp, Homo sapiens; identical to SEQ ID NO: 54764

SEQ ID NO: 275314 - DNA, 201 bp, Homo sapiens
gtaagatgtgcccttgctcctccttcaccttctgccatgattgtgaggcctccccagccatgtggaactgtgagtccatgaaacctctttttctttataarttacccagtcctgggtatttcttcatagcagtatgaaaatggactaatacagtcagcttctgcacaatatttccattttcccacattatgtcttgggcct

SEQ ID NO: 275315 - DNA, 201 bp, Homo sapiens
ctttttatctagtggggtatctcaacccacattttcttctgcaaatttctgcaagggcatgtgagtaacactgagtctttggagtgttttcagaacctagrtgtgtccagctgtgaaactcagagatgtaactgctgacatcctccctattttgcatctcaggtcacccgatgacccgtgcctttatcacccatgctggtt

SEQ ID NO: 275316 - DNA, 201 bp, Homo sapiens
tgtatcaaaagaagaaaaaacacccccaaaagctggaaattcactgaaggcagagaaaaggggtgcagacgctctgcttctgcttccccagcagttcctcygacccccccaaaatattctccagcgggtttcccaagaggtcaaaggagaatgggtcctggccgccgaagaactccctgaagacgtcggctgggtcgcgga

SEQ ID NO: 275317 - DNA, 201 bp, Homo sapiens; identical to SEQ ID NO: 54776

SEQ ID NO: 275318 - DNA, 201 bp, Homo sapiens
ggtcctgtagatgatctacagggcactggacatgtttatgttgctcctttagtaataagcctgtcattctgatttgatgaaaggagatgaaaggagctggkagtgtgtctgatggtggcctactaacttatgtcttcagcttaaaaagaaagtagcttcaaaagggttccagaaacactttccatggacgtgtcactcttt

SEQ ID NO: 275319 - DNA, 201 bp, Homo sapiens
ctaccctctggccctgtcctacctttgccatgctgtttctgctccttatgcaagccttgcctctgagctttttcagagagaggtgtcagtggtggatcttstcagccatgcatctgtgtggctgttccgaggggactttgtgatggactaccccaggccgatcatgcccaacatggtcttcattgggggcatcaactgtgc

SEQ ID NO: 275320 - DNA, 201 bp, Homo sapiens; identical to SEQ ID NO: 54879

SEQ ID NO: 275321 - DNA, 201 bp, Homo sapiens
ctgctccttatgcaagccttgcctctgagctttttcagagagaggtgtcagtggtggatcttgtcagccatgcatctgtgtggctgttccgaggggacttygtgatggactaccccaggccgatcatgcccaacatggtcttcattgggggcatcaactgtgccaacgggaagccactatctcaggtctgtattggtgcct

SEQ ID NO: 275322 - DNA, 201 bp, Homo sapiens; identical to SEQ ID NO: 54864

SEQ ID NO: 275323 - DNA, 201 bp, Homo sapiens
acctgcacatgtactcctgaatctaaaataaaagttgagtatgtataagaggaagtcattcatcataaaggtctccatcctcatcatcttccattgagtgrgctgtggaggaggaggagtagatgttggtcttactgtcttagggtggcagaagcagaagaggtagaggaggtggaagtggaggcaggagaggcaggtgca

SEQ ID NO: 275324 - DNA, 201 bp, Homo sapiens
caacatatcctacattgctttttatctagtggggtatctcaacccacattttcttctgcaaatttctgcaagggcatgtgagtaacactgagtctttggartgttttcagaacctagatgtgtccagctgtgaaactcagagatgtaactgctgacatcctccctattttgcatctcaggtcacccgatgacccgtgcctt

SEQ ID NO: 275325 - DNA, 201 bp, Homo sapiens
atgttccttaaggtgttgcctgacacacactgcttagctcatccatgaaggtatcaagaaaacctgcagaatataattctgtccagtgcaacaaatattcyggttgattttctttgtgcagggctgcatttgtctgtttggattgctgtaaaggatacctgaggctgggtaatttataaagaaaagaggtttaattggctc

SEQ ID NO: 275326 - DNA, 201 bp, Homo sapiens
gctgcctgtcccatcactaccgtaggacatgcagaaggaagaaaggcccccacttcccagggagccaaaggaacgaaatcctgtatcaaaagaagaaaaamcacccccaaaagctggaaattcactgaaggcagagaaaaggggtgcagacgctctgcttctgcttccccagcagttcctctgacccccccaaaatattct

SEQ ID NO: 275327 - DNA, 201 bp, Homo sapiens; identical to SEQ ID NO: 54794

SEQ ID NO: 275328 - DNA, 201 bp, Homo sapiens
gaaattttctagaagaatggcaattatgaacaatatgtctttgatcatacataggtcttgtgtggagctactgcataatgaggccctgatcaggcacctgmatgctacttcctttgatgtggttctaacagacccctttcacctctgcgcggcggtgctggctaagtacctgtcgattcctgctgtgtttttcttgaggaa

SEQ ID NO: 275329 - DNA, 201 bp, Homo sapiens; identical to SEQ ID NO: 54797

SEQ ID NO: 275330 - DNA, 201 bp, Homo sapiens; identical to SEQ ID NO: 54973

SEQ ID NO: 275331 - DNA, 201 bp, Homo sapiens; identical to SEQ ID NO: 54976

SEQ ID NO: 275332 - DNA, 201 bp, Homo sapiens
cctgtcccatgggttgtgtccaaaggtggaatctgttatcaatgtggatttctaatgggagtaacttcctccataagggaagcctcagcctcaccagcaayggcagacatggccaggcatgtagacacagaggtagtgagatggaaagtgggcacagcccagagagcctgcccacctcatcctggggcgaccaggacaagg

SEQ ID NO: 275333 - DNA, 201 bp, Homo sapiens
gtgcagcccagacccctcctcatctccagaccctggaagctgatgccttgggcagctcctcctatttcccaggcaccaggaatgtgagcttctccctcccyacagtcctgctgtcctcagggcccctatgtctctgaaggcaccaccatcttccaagatacatgggcctccgcagggtctaggagtgccagacacgtaacc

SEQ ID NO: 275334 - DNA, 201 bp, Homo sapiens
ttacatttcagtattctaatgtgtgtgtgttgattagtgatgtgtaaataattcagcagaacattgaaatagttttaatgagaaaaagaggaagtcactcytagtctctttgaatttttggtgagttccaacagaattgatgactggttttaggggaaaagaattcaggcttcatctataccatccatggtaggtgcagct

SEQ ID NO: 275335 - DNA, 201 bp, Homo sapiens
agtgctgaactgaacattctgtcctaccactagcaaataatcattgtctgcctcaggcttaagtttaataaatagcaaattgcatacagatattttacaaygattgaaagacaaacagaggtcctatccgtgtagtcccaacgataagaacaggtgttggcatgaagtgtttataaattcttgggtacagctgttctgaaa

SEQ ID NO: 275336 - DNA, 201 bp, Homo sapiens
ggagaacatggaattgtggttttctctttgggatcaatggtctcagaaattccagagaagaaagctatggcaattgctgatgctttgggcaaaatccctcrgacagtaagaagattctataccatggcctcatatctattttcacaggagcgctaatcccagacttccagcttccagattaattctcttaattggaacctt

SEQ ID NO: 275337 - DNA, 201 bp, Homo sapiens
gcccaacatggtcttcattgggggcatcaactgtgccaacgggaagccactatctcaggtctgtattggtgccttcatccaatcaatgttccaggcaaaayactttttaaaaaatgtatttacttacaagtgcttccatatctacttatctttccaaagattttattttggcttctttataacagataaactgttgagggg

SEQ ID NO: 275338 - DNA, 201 bp, Homo sapiens
tggagaacatggaattgtggttttctctttgggatcaatggtctcagaaattccagagaagaaagctatggcaattgctgatgctttgggcaaaatccctyagacagtaagaagattctataccatggcctcatatctattttcacaggagcgctaatcccagacttccagcttccagattaattctcttaattggaacct

SEQ ID NO: 275339 - DNA, 201 bp, Homo sapiens
agaggacccctgttttctagttagtatagcagatttgttttctaatcatattatgttctttctttacgttctgctctttttgcccctcccaggtcctgtgrcggtacactggaacccgaccatcgaatcttgcgaacaacacgatacttgttaagtggctaccccaaaacgatctgcttggtatgttgggcggattggatg

SEQ ID NO: 275340 - DNA, 201 bp, Homo sapiens
ctccaaccagccatggtctccaaaaaggatgggaaaaagaggttggggaaaagagagggccttgactttggctgcctgaagaactgtttttcttaaagtargctttatatcagtctttttcctcggccacaggagggaagagggtggtgggagtgagtttagtctgaccggggctgaagacatcctgttgtttaggactgc

SEQ ID NO: 275341 - DNA, 201 bp, Homo sapiens
aaagggagggagtgtgacgaggcgtgtccagccttctgtcccgtcgtggctgtgactcagttttgaaggtttctttggggtcccgctggccaggagggttygattcacttgttgtgggagacgggcggcacttagtattttcttttcagtttacacgttcctgggcatccctattaagatgtgcagataaacacgcacatg

SEQ ID NO: 275342 - DNA, 201 bp, Homo sapiens
acctctcttctttacacctgctgatttctctgttaacaatttgaacagttggcagtagccactgtgaaaaggcaagggtgaggggatggggataactgaamtggttccagggattctggggcatgaaataaaaacatagaatgtcaggattcttttaattgggacataatatagttgtacacatttggggggttcatgtga

SEQ ID NO: 275343 - DNA, 201 bp, Homo sapiens
agtttagggaaaatacctaggagccctgtgatttggagagtgaaaactctttattaccgttgttactttaactctttccaggatggcctgcctccttcgckcatttcagagaatttctgcaggggttttcttcttagcactttggggcatggttgtaggtgacaagctgctggtggtccctcaggacggaagccactggct

SEQ ID NO: 275344 - DNA, 201 bp, Homo sapiens
gggcagtcttgtaggactgagcccttaacctgtggggtccgtgctaactcagaattcagttcagaatggaattgaattgtaggatacccagctggtgttasagaataggtccgtgtgcaagaaaaattcccgcacatcatggacataacagacaacgtcaatgatgaggaatccagcaagttcgggatagagaattggcag

SEQ ID NO: 275345 - DNA, 201 bp, Homo sapiens
ggtgaggtggggttattcaggtggcagccgatgcaatgattcagaagggacagctgggggttgggggacaggggggctggggccctgaaatgggaccatgrcagctgggtctgagagacagtggtagaaacatccagattcagcacttacttgctggcttggatgcagggtctagaacgaaaagagaagaaaagtcacttc

SEQ ID NO: 275346 - DNA, 201 bp, Homo sapiens
cttgttctttgtactttttcctctggctattcatccgtattgtttgcaatatcctttgtaataaaccaaacctagtaaataaactgttttcttcagttctrtgagccattctagcaaatgattgactccaagaaagagggtgtgtgaacctctgatttttgccaagtcagacagaagttgtgggtaacctggggacctact

SEQ ID NO: 275347 - DNA, 201 bp, Homo sapiens
tcaaaggaagtttggggaacagcaagggatccagaatggctagagggtaagaggcagagggagggggcaagcagaagggctagagaggaggaatgagcttrgacaggtgggctggggtctatcccagagttttgagagcaaggcagaggactctgaattttctgtgcccaggaagctgctgaccaaggttccagaagtggt

SEQ ID NO: 275348 - DNA, 201 bp, Homo sapiens
ctggttatgttccccatgggggccagccctgtccttggagtggcccctctaatcatgttgctcaggcttcttctcccttcctgggccccagaacacctccrgtgccaaacttgtgggtgggaacaggaactcgcgtgccagccaggtgtgcatgactagctctgggcaagtctgttctagtaattcaaggtaccacctctc

SEQ ID NO: 275349 - DNA, 201 bp, Homo sapiens
gtttatataacctctagttacataacctgaaacccggacttggcacttggtaagcacgcaatgaacagtcatagtaagctggccaagggtagagttcagtktgaacaaagcaatttgagaacatcaaaggaagtttggggaacagcaagggatccagaatggctagagggtaagaggcagagggagggggcaagcagaagg

SEQ ID NO: 275350 - DNA, 201 bp, Homo sapiens
agtgaaaactctttattaccgttgttactttaactctttccaggatggcctgcctccttcgctcatttcagagaatttctgcaggggttttcttcttagcwctttggggcatggttgtaggtgacaagctgctggtggtccctcaggacggaagccactggcttagtatgaaggatatagttgaggttctcagtgaccggg

SEQ ID NO: 275351 - DNA, 201 bp, Homo sapiens
attttaagtctcaaacattttgcaggtcctttgaaatcttgcaggtgggtcctggctccattacttatgggtcgtaggtcatacaagggtctgaaagagtkagcaccttagaagcaaacctctccatagggtccacgtttccagaccttcctattcccaacatgaaattaccttcatgcacatctttgggtctctcctcta

SEQ ID NO: 275352 - DNA, 201 bp, Homo sapiens
aactttgaacttcagagagatgatctgaaattggaacttatgtttaaaagggaagcagagcataaaagtttggaaaatttgcagcctgaccatgtggtagmaaagaaaaacccattttatggggagaaattcaaaccagctacagaaatactggctatagaaatttgcataagtaaggaggagccaaatgttaattgccaa

SEQ ID NO: 275353 - DNA, 201 bp, Homo sapiens
tatagcagtgtgagaatggactaatatattaaattggtgccatggagagtggagtactgctataaagatacttgaaaatgtggaagtgactttggaactgrgtaacaggcagaggttggaacagtttggagagctcagaagaagacaggaagatgtgggaaagtttggaacttcctagagacttgttgaatggttttgacc

SEQ ID NO: 275354 - DNA, 201 bp, Homo sapiens
tttcctgaggctcccccctccagccacctggaactgtgagtcaattaaagctctttcctttatgaattaccgagtcttgggtatgtctttatagcagtgtragaatggactaatatattaaattggtgccatggagagtggagtactgctataaagatacttgaaaatgtggaagtgactttggaactgggtaacaggcag

SEQ ID NO: 275355 - DNA, 201 bp, Homo sapiens
agacgggcggcacttagtattttcttttcagtttacacgttcctgggcatccctattaagatgtgcagataaacacgcacatgcttcatgtggcatctccyttagttaaacatcttttttttttttcctttcctgtgagtcttcctgaaacaggtgagcccaggtggagcctccgcctgcgttaggacctaacctttctac

SEQ ID NO: 275356 - DNA, 201 bp, Homo sapiens
agatttatcatgatttggctctgtatcccccaccaaatctcatcttgaattgtaatccccataatccccacgtgtcaaggacaggatctggtgggaggtgmttggatcatgggggcagtttcgcacctgctggtctcatcatagtgagtgagttcttatgagatctgatggttttataaggggccattgtcccttcacttg

SEQ ID NO: 275357 - DNA, 201 bp, Homo sapiens
tgagaggaagaagaggcagacatgaatgtttatcaaaggatggactaggactgatgtgactcatggagactgttcgtttgtaaaggcaccatcttcatggytgtgcatgtccttcattgggaaggagcagggacactacattgagacttgacccatctggattttttgtttgcacaattttcaggggaaagatgatgcaac

SEQ ID NO: 275358 - DNA, 201 bp, Homo sapiens
agagaacactagcaaggctaattttcgagtgtggtaaagaacaggctaatgtattcaatagtgaggccactgactctgtctcaacatgaagtcacactagrtttatcatgatttggctctgtatcccccaccaaatctcatcttgaattgtaatccccataatccccacgtgtcaaggacaggatctggtgggaggtgatt

SEQ ID NO: 275359 - DNA, 201 bp, Homo sapiens
gcatgttccaccctcaccccgggctcatcaggagggttcttaagatgcagacagttttaagggggttggaggaatagttgagaagctgagatgttgcaccyacagctgagaatccctttctagcactctgtgtcctcacaaatccccagaaatcgtcctcccctggggagttctcaagcccttacagacctgccctctctg

SEQ ID NO: 275360 - DNA, 201 bp, Homo sapiens
aatagaacatgggagccccttgaatgtggcaagagcaccctcccaggcatgttccaccctcaccccgggctcatcaggagggttcttaagatgcagacagytttaagggggttggaggaatagttgagaagctgagatgttgcacccacagctgagaatccctttctagcactctgtgtcctcacaaatccccagaaatcg

SEQ ID NO: 275361 - DNA, 201 bp, Homo sapiens
gaggacccctgttttctagttagtatagcagatttgttttctaatcatattatgttctttctttacgttctgctctttttgcccctcccaggtcctgtggyggtacactggaacccgaccatcgaatcttgcgaacaacacgatacttgttaagtggctaccccaaaacgatctgcttggtatgttgggcggattggatgt

SEQ ID NO: 275362 - DNA, 201 bp, Homo sapiens
acgttctgctctttttgcccctcccaggtcctgtggcggtacactggaacccgaccatcgaatcttgcgaacaacacgatacttgttaagtggctaccccraaacgatctgcttggtatgttgggcggattggatgtataggtcaaaccagggtcaaattaagaaaatggcttaagcacagctattctaaaggattgttga

SEQ ID NO: 275363 - DNA, 201 bp, Homo sapiens
tacgttctgctctttttgcccctcccaggtcctgtggcggtacactggaacccgaccatcgaatcttgcgaacaacacgatacttgttaagtggctacccyaaaacgatctgcttggtatgttgggcggattggatgtataggtcaaaccagggtcaaattaagaaaatggcttaagcacagctattctaaaggattgttg

SEQ ID NO: 275364 - DNA, 201 bp, Homo sapiens
agccttcggcattcagaagaggaattcagactgtgcaagatctgaggccaggctccagctcccccagtcccttggtgagcaggagctccctgaacccaccrtgggtctttgctagggttgtcttgcccatgtgtgctttagatagcagcacctcttcttccatggtgtatatggagaatcctcaacaaagtcttcccaaga

SEQ ID NO: 275365 - DNA, 201 bp, Homo sapiens
ctttggagtgttttcagaacctagatgtgtccagctgtgaaactcagagatgtaactgctgacatcctccctattttgcatctcaggtcacccgatgaccsgtgcctttatcacccatgctggttcccatggtgtttatgaaagcatatgcaatggcgttcccatggtgatgatgcccttgtttggtgatcagatggacaa

SEQ ID NO: 275366 - DNA, 201 bp, Homo sapiens; identical to SEQ ID NO: 55088

SEQ ID NO: 275367 - DNA, 201 bp, Homo sapiens
tggagtgttttcagaacctagatgtgtccagctgtgaaactcagagatgtaactgctgacatcctccctattttgcatctcaggtcacccgatgacccgtrcctttatcacccatgctggttcccatggtgtttatgaaagcatatgcaatggcgttcccatggtgatgatgcccttgtttggtgatcagatggacaatgc

SEQ ID NO: 275368 - DNA, 201 bp, Homo sapiens
aagttgtactcagttatattgagaaactgggctctaatgaatgtactttttgagccctgtgaccctgtatctggtgcttgaccttgtttgtgtctcaactstattcccagcatgtcgtcctagagaacattctgtattatgatatgtaattatcaacatgcacttttaattattaggaattaaattaaagtgatcaaaata

SEQ ID NO: 275369 - DNA, 201 bp, Homo sapiens
tggtgatcagatggacaatgcaaagcgcatggagactaagggagctggagtgaccctgaatgttctggaaatgacttctgaagatttagaaaatgctctaraagcagtcatcaatgacaaaaggtaagaaagaagatacagaagaatactttggtcatggcattcatgataaaattgtttcaaatatgaaaacatttacgt

SEQ ID NO: 275370 - DNA, 201 bp, Homo sapiens
aaaatctggtagtcttcttaagcagccatgagcataaagagaggattgttcataccacaggtgttccaggcataacgaaactgtctttgtgtttagttacwaggagaacatcatgcgcctctccagccttcacaaggaccgcccggtggagccgctggacctggccgtgttctgggtggagtttgtgatgaggcacaaggg

SEQ ID NO: 275371 - DNA, 201 bp, Homo sapiens
tccggcattttgttttttgggaccctaatgaaatggttacaggtctccaggtctcttggggctcacagggtcatgcctttccttgcccagtgtacttggtragaaggtacaggtgtttccatggagggtgttcattttagggatttcaagagggtcatctttgcaccacaggaaatgcccccttttacactctgaaaacct

SEQ ID NO: 275372 - DNA, 201 bp, Homo sapiens
aatggcacccatcctcccctatggttaaatgttacgttactatagcatattatcacaactcattaaccaacatttgatacattatgatgaactaaagtctrtgttctctgcagatgtcattaatttttacctaatgtcctttttcatttctaggatcccatcctggataccaaatgacatttagcccatcacgcccccttc

SEQ ID NO: 275373 - DNA, 201 bp, Homo sapiens; identical to SEQ ID NO: 54993

SEQ ID NO: 275374 - DNA, 201 bp, Homo sapiens
aaaagctgcattttttataataaaattttatgtagataatcatgatacagaattactctttgacaaattatctatggatgtaatgactctagtttcagactttttttttctgaaatatgtgagcgttccccaacagtctggtctattttcctaccttaattttctacttttggtcttgaatttgttgatagggcacagagg

SEQ ID NO: 275375 - DNA, 201 bp, Homo sapiens
aggagggacgtggccgtctcagagggctgcttggtttctgtccaagctggcccttggggaagccctttggccacccaggtggtgattcctgctgtaagaasatgagaggctgagccaccaggcagtcccagatgtcctgaaacaacttatcccagccctgcccagggccttctctctagccctgtgcacctcatcacctgc

SEQ ID NO: 275376 - DNA, 201 bp, Homo sapiens
aggggtgcagacgctctgcttctgcttccccagcagttcctctgacccccccaaaatattctccagcgggtttcccaagaggtcaaaggagaatgggtccyggccgccgaagaactccctgaagacgtcggctgggtcgcggaagctgaagacgtactcgaaggggtcctcgaagggcctgccgcctgtgcagccgccctc

SEQ ID NO: 275377 - DNA, 201 bp, Homo sapiens
gttaactctatgcagttatgacttaatgctgcaaacttacctttgttacttttctcttgactacaaatggtgtcatgtatagtctgtaagtgtttgtgtgyataagttttgataaattttaactatttaaaatagatttgtgtctataatatggtagtaaatgataaaatagactcgttgctatatatattttaggcattc

SEQ ID NO: 275378 - DNA, 201 bp, Homo sapiens
ggactttgtgatggattaccccaggccgatcatgcccaacatggtcttcattgggggcatcaactgtgccaacaggaagccactatctcaggtcggtgttygtgccttcatccaatcaatgttccaggcaaaacagtttttaaaaattgtatttacttacaattgcttccatatctacttatctttctggtgcttttattt

SEQ ID NO: 275379 - DNA, 201 bp, Homo sapiens
tccctacagtcctgctgtcctcagggcccctatgtctctgaaggcaccaccatcttccaagatacatgggcctccgcagggtctaggagtgccagacacgwaaccagaaatcagatgacatcactatctaaataaaacaccactacatggaaatagaacaccactacatggaaatagaacatgggagccccttgaatgtgg

SEQ ID NO: 275380 - DNA, 201 bp, Homo sapiens; identical to SEQ ID NO: 54817

SEQ ID NO: 275381 - DNA, 201 bp, Homo sapiens
ttcttccagtttttcaatgtgaacatattctctagtgttaactacattgctcaaaacttcactgtcatctcagtggagcagaacgaattgggaactgtggyacagatcactcttgctatgccccttagagaattagagaacactagcaaggctaattttcgagtgtggtaaagaacaggctaatgtattcaatagtgaggc

SEQ ID NO: 275382 - DNA, 201 bp, Homo sapiens
aagagaagcagcaatatgtatgcattgcagagacacaggcgagccccaatttaggaggttaggaggtcagtgctaagggccttgttttctttgcttagagyatgagttgccatcttctctggacagagagtatttggttgcctaaaggtaaaatctaaattttgctctgggacaaattccaaaaaaaattagctttaatca

SEQ ID NO: 275383 - DNA, 201 bp, Homo sapiens
gcaaacctttcctcagaggtgaccctagaagaagggaccctttgtgatggaaaaggtcttcatttggggcataacctgtgccaacagaaaggtactttctygttgtgtttatggtgcctcacccaaaaaatattacagatacacttggctttcatcaacctaatttgatatgtcccaagcatagcaataggatagttctgt

SEQ ID NO: 275384 - DNA, 201 bp, Homo sapiens
ccatcttctctggacagagagtatttggttgcctaaaggtaaaatctaaattttgctctgggacaaattccaaaaaaaattagctttaatcaaatttactyttactttatctttctgaaccttcaaggtccaaaagcattggttaataattctgcttctaaacttaacattgcagcacagggcatgttctgcccccaaggc

SEQ ID NO: 275385 - DNA, 201 bp, Homo sapiens
tcagcctatccagttcagttgccttttgctctcatgccttatgcaaacctttcctcagaggtgaccctagaagaagggaccctttgtgatggaaaaggtcytcatttggggcataacctgtgccaacagaaaggtactttcttgttgtgtttatggtgcctcacccaaaaaatattacagatacacttggctttcatcaac

SEQ ID NO: 275386 - DNA, 201 bp, Homo sapiens
agtgagtatcttcacacatgtaagttccctcgtctgatgtacaaaaaactgaactcatttttcaaaagccttaacagtctgtcttattctgatacttcttktatggttattgtatgagaatcaactacccaggcacctcggagcatgttgatttcagagttcagtgtcagaccccatgagcccctgtgggatggtgccagc

SEQ ID NO: 275387 - DNA, 201 bp, Homo sapiens
tgaaggagggcactggagtgatggcgtgtttagaatgtgcaagttgagcggtcactgagaggcagctcagcagagtgctctcgcaaggattgggcgggcamcttcccactgcgtgcgatgtatcttaggaaagccatttaaaataggagacggttactttccatcaagtccctggtatggtccatggaagcagggttgtca

SEQ ID NO: 275388 - DNA, 201 bp, Homo sapiens
ctctcaccttctgtcatgattgtaagtttcctgaggcctccccagtcatgtggaactgtgagtcaattaaacctctttcttttataaattacccagtctcrgctgcgtctttatagcaggctgagaatagactaatacaagattggtggtgattgaagttatactgaaagggtttaaaggagagtctgagaaaaggaaatg

SEQ ID NO: 275389 - DNA, 201 bp, Homo sapiens
agcctgaccatgtggtagaaaagaaaaacccattttatggggagaaattcaagccagatgcagaaatactagctaaagaaatttgaataaataaggaggarccaaatgttaatcaccaagacaatggggaaaatggctccagggcatgtcagagacctttgcagcagaccctcccatcacaggcctggaggcctaggaagg

SEQ ID NO: 275390 - DNA, 201 bp, Homo sapiens
atcaaggtcccccatcatctcacctttcctggctcatgggctttattttatgccactcttcatgctcagaagcacctggcggtttagtttttttgtgttgytctaaaggaatacctggggctgggtaatgtataaggaagagataatatctggccctcagttctgcaggctgtataagaatcatggtaccaacatctgttt

SEQ ID NO: 275391 - DNA, 201 bp, Homo sapiens
aactggagcaaaggtcactcttgctaagctttagcaaagaaactcgtggcatttttgcccctgccctagagctctttggaactacgaacttgagagagatratctgaaattggaacttatgtttaaaagggaagcagagcataaaagtttggaaaatttgcagcctgaccatgtggtagaaaagaaaaacccattttatgg

SEQ ID NO: 275392 - DNA, 201 bp, Homo sapiens
gacctcaaacacttcctttaaaaagataagctattttgtagtttaaaaaacatttgttctgtttctttctcattcatcttttcttaagtattttacacggttttttttttttggtcactactgtgaatgtgttatttttttgcatttctatctctagctgattatctactcattactcagctatctcatcaaaatattgat

SEQ ID NO: 275393 - DNA, 201 bp, Homo sapiens
actcacgagggcctggggctggtgagagtggcggggagagagggctcaccttgggagaaggatggtcagtgtctggggctttcctggtcatgttccaaatyaggcttggcaggagtcctgctgtgcaaattgcgtttgctgagccctgtcagaggtctcctgtgtctcacatctagggtgaccagcatcctggcttcctca

SEQ ID NO: 275394 - DNA, 201 bp, Homo sapiens; identical to SEQ ID NO: 54934

SEQ ID NO: 275395 - DNA, 201 bp, Homo sapiens
ttcgagatggccaggagaggaaagcttgggagcagggaaggttgagatatatgtgggttactgggaatgcgtgatggtgaagtcacagatgacccacatgktgtctaagtgctaaagaagaattctgggaaaatgaaatgcatttgggaagggaaaatctaattaaaagcctaaactaaaaatacaaaattcttggtaaag

SEQ ID NO: 275396 - DNA, 201 bp, Homo sapiens
ctccccgggaatcatcctcccctggagagttcccaaagcccttgcaggcctgccttctctgtgccttcctgcctgcgccctctggtggacagctccattcrctgcctgtcccatgggttctgtccaaaggtggaatctattatcaatgtggatttctaatgggggtaacttcctccctaagggaagcctcagcttcaccag

SEQ ID NO: 275397 - DNA, 201 bp, Homo sapiens
tctctttgggatcaatggtctcagaaattccagagaagaaagctatggcaattgctgatgctttgggcaaaatccctcagacagtaagaagattctatacyatggcctcatatctattttcacaggagcgctaatcccagacttccagcttccagattaattctcttaattggaaccttagatttggcttttccctgccac

SEQ ID NO: 275398 - DNA, 201 bp, Homo sapiens
caaggctgccagcacccgcgcacaggtcagaggcttggcgacctgggccgcctggagggccgccccttatgacgcagccacatctcattggccgaggcctktgagcgcctcgcatcccaagatgcagtgctcctgggactggccctgctctctgtgaggctctgtgaggccctgtgatgctccaagaccaggccccgccca

SEQ ID NO: 275399 - DNA, 201 bp, Homo sapiens
tgtagatggagaatcctcaacaaagcctttccaagaatctgatcatcacatcttgagctcagcctccctgcagctttttttatattgacagccacttcagrgagagtcctctttgagctttacaagaaatatcctggtgtgaaaaacgaccaaaaccagatagccagcctccccactccctgtttaaagaaagctggctta

SEQ ID NO: 275400 - DNA, 201 bp, Homo sapiens
ctttacaagaaatatcctggtgtgaaaaacgaccaaaaccagatagccagcctccccactccctgtttaaagaaagctggcttagcaatgttgtctgcatyttggatgtgctgtgttacccatatgtgggaagaaagagtattaagagttagcaaatagggtcacatccagcagagaccatatggttggggactagggcaa

SEQ ID NO: 275401 - DNA, 201 bp, Homo sapiens
tctcaggggctatctggttaggtattgcttgctacagagccaaactatgtcaccagaacccatttatatgtttccatttcttgtctctgtttcctcggccrtggcatccttctcagtgtcataatacccaagcagcaggggcttcagcctgagttcttttcccaggattcctagttaaagttcttctgcctcattggctct

SEQ ID NO: 275402 - DNA, 201 bp, Homo sapiens; identical to SEQ ID NO: 54768

SEQ ID NO: 275403 - DNA, 201 bp, Homo sapiens; identical to SEQ ID NO: 54771

SEQ ID NO: 275404 - DNA, 201 bp, Homo sapiens; identical to SEQ ID NO: 54772

SEQ ID NO: 275405 - DNA, 201 bp, Homo sapiens
gcagtggtgtgatcttggcccactgcaacctccgcctcctgggttcaagcagttctcccacctcagccgcccgagcagctggaactacaggtgtgcaccamcatgcctggctaatttttgtattttttatagagacagagttttgccatgttggtcagtctggtctcaaactccttacctcaagtgatccacccgcctcag

SEQ ID NO: 275406 - DNA, 201 bp, Homo sapiens; identical to SEQ ID NO: 54875

SEQ ID NO: 275407 - DNA, 201 bp, Homo sapiens
accataagctactgttgtctggaaaacatacaaatagatatctcagcaaaagctactcatatattcttgttcttttgggtaaatcattgtcagtgactgatttttttttatgaaaggataaaaacacgccctctattggggtcaggttttgtgctggtatttctcccacctactgtatcataggagcttagattcccagct

SEQ ID NO: 275408 - DNA, 201 bp, Homo sapiens
tggtttggctctgtgtcccccaccaaatctcatcttgaattgtaatccccataatccccacgtgttgaggacaggacatggtgggaggtccccacctcctmatctcatcatagtgagtgagttcttatgagatctgatggttttataaggggcccttatcccttcacttgcaagctattcctctttctctctttcatgtaa

SEQ ID NO: 275409 - DNA, 201 bp, Homo sapiens
gtatttagtagtgagtccattgactgtttcccaacatgaggtcacactagatttaatatggtttggctctgtgtcccccaccaaatctcatcttgaattgyaatccccataatccccacgtgttgaggacaggacatggtgggaggtccccacctcctaatctcatcatagtgagtgagttcttatgagatctgatggttt

SEQ ID NO: 275410 - DNA, 201 bp, Homo sapiens
ttcgagtgtggtaaagaacaggctagtgtatttagtagtgagtccattgactgtttcccaacatgaggtcacactagatttaatatggtttggctctgtgycccccaccaaatctcatcttgaattgtaatccccataatccccacgtgttgaggacaggacatggtgggaggtccccacctcctaatctcatcatagtga

SEQ ID NO: 275411 - DNA, 201 bp, Homo sapiens
tccattctcagagctcaaatgccatactaggagaacgagtgctctcttcagagctgtcagacagggatgtttaagtctgctgttccccacatgttcagaakttgtctgctgccttttgttcagatatgccctgcccacagaggtggagtctatagcggcagtagcccttgctgagctgcggtggactctgttcagttccag

SEQ ID NO: 275412 - DNA, 201 bp, Homo sapiens
  misc_feature (1)...(201): n = A,T,C or G
gctctaccctctggccctgtcctacctttgccatgctgtttctgctccttatgcaagccttgcctctgagctttttcagagagaggtgtcagtggtggatnttgtcagccatgcatctgtgtggctgttccgaggggactttgtgatggactaccccaggccgatcatgcccaacatggtcttcattgggggcatcaactg

SEQ ID NO: 275413 - DNA, 201 bp, Homo sapiens
tgctgtttctgctccttatgcaagccttgcctctgagctttttcagagagaggtgtcagtggtggatcttgtcagccatgcatctgtgtggctgttccgasgggactttgtgatggactaccccaggccgatcatgcccaacatggtcttcattgggggcatcaactgtgccaacgggaagccactatctcaggtctgtat

SEQ ID NO: 275414 - DNA, 201 bp, Homo sapiens
tggtcttcattgggggcatcaactgtgccaacaggaagccactatctcaggtctgtattggtgccttcatccaatcaatgttccaggcaaaacactttttwaaaaaatgtatttatttaaaattgcttccatatttacttatctttccaaatatttcatttctgcttctccttgtcataatagccttcagtgagataaact

SEQ ID NO: 275415 - DNA, 201 bp, Homo sapiens; identical to SEQ ID NO: 54858

SEQ ID NO: 275416 - DNA, 201 bp, Homo sapiens
tgtccgtgtcttctgctgagatggccacaggactccaggttcccctgccgtggctggccacaggactgctgcttctcctcagtgtccagccctgggctgaragtggaaaggtgttggtggtgcccattgatggcagccactggctcagcatgcgggaggtcttgcgggagctccatgccagaggccaccaggcagtggtcc

SEQ ID NO: 275417 - DNA, 201 bp, Homo sapiens
ggctggtgagagtggcggggagagagggctcaccttgggagaaggatggtcagtgtctggggctttcctggtcatgttccaaatcaggcttggcaggagtyctgctgtgcaaattgcgtttgctgagccctgtcagaggtctcctgtgtctcacatctagggtgaccagcatcctggcttcctcaggactgttcaggtttt

SEQ ID NO: 275418 - DNA, 201 bp, Homo sapiens
gagagtggcggggagagagggctcaccttgggagaaggatggtcagtgtctggggctttcctggtcatgttccaaatcaggcttggcaggagtcctgctgkgcaaattgcgtttgctgagccctgtcagaggtctcctgtgtctcacatctagggtgaccagcatcctggcttcctcaggactgttcaggttttagcactg

SEQ ID NO: 275419 - DNA, 201 bp, Homo sapiens
ctggggctttcctggtcatgttccaaatcaggcttggcaggagtcctgctgtgcaaattgcgtttgctgagccctgtcagaggtctcctgtgtctcacatytagggtgaccagcatcctggcttcctcaggactgttcaggttttagcactgaacatcacatgtcctagggaacccctcagtttgggcaagccctgccaca

SEQ ID NO: 275420 - DNA, 201 bp, Homo sapiens
atttctgggtattctattctgttccaatgatctttttgtgaaatatttgattactatagatttgtaataagtcttgaaattaggtaataattgctctccatttttttttctattttttaaaagttatttttgctattgtaggtcttttacatttccctatgaattttagaatcagtttgccaatttgtacaaaaagatagc

SEQ ID NO: 275421 - DNA, 201 bp, Homo sapiens; identical to SEQ ID NO: 54995

SEQ ID NO: 275422 - DNA, 201 bp, Homo sapiens
gactcacgagggcctggggctggtgagagtggcggggagagagggctcaccttgggagaaggatggtcagtgtctggggctttcctggtcatgttccaaawcaggcttggcaggagtcctgctgtgcaaattgcgtttgctgagccctgtcagaggtctcctgtgtctcacatctagggtgaccagcatcctggcttcctc

SEQ ID NO: 275423 - DNA, 201 bp, Homo sapiens
tgataaaattgtttcaaatatgaaaacatttacgtagcatttaatagcgttgtttcaaatataaaaacaaatacataaaaatctggatttttatttcttcyttttttttttttttttttttgagatggagtcttgctctgtcacctaggctggagtgcagtggtgcaatcttggcttactgcaacctccacctcccacgtt

SEQ ID NO: 275424 - DNA, 201 bp, Homo sapiens
actattaagattgctacatggttatacagttttagtttatttatatggtatgttacttagatttatttttaaagcttatttattttatcattaattatggkgaaatacacatagcataaaccttgtcatcttcaccactttaggtgcacagttcagtatccagtgtattcacattgctgtgcaaccaacaccaccattcat

SEQ ID NO: 275425 - DNA, 201 bp, Homo sapiens
aggtcatcactctcaagtttaaagttccacagattcctagagcatggactcaatgcagccaagttctttgttaaggcatagcaagggtgacctttgctcamgttccaaataacttcctcattttcacatgagacctcattagcctggccctcactgctgatttttctatcagtattttggtcacaagcatttaaccagtct

SEQ ID NO: 275426 - DNA, 201 bp, Homo sapiens
cactaatttactttctgtctgtatggatttgcctattctgggcatttcatggaaatggaagcctttatgactggcttctttcacttagttttgtggcttawccatgttgtagcatgaatcagtatttcattcctttacatggccgaatattccattgtatggatttaccgcattttttttatccattcatcagttggtgga

SEQ ID NO: 275427 - DNA, 201 bp, Homo sapiens
tatgtatttatgactatacgtgtaaagccagcggagttctcacagaggaattcagaactcaaagaaggctttccggcaaagagccttggatatggcccaaycacagaagtaaattgtcattgacagaaggatggacacttcatattgctccttccttgtttcagatgccaggatgtgtctgggaaaagcatgcagttggtt

SEQ ID NO: 275428 - DNA, 201 bp, Homo sapiens
aagatgaagaaagcaaatgtagcaggcacagcgtggggtggacagtcagctgtccgtgtcttctgctgagatggccacaggactccaggttcccctgccgyggctggccacaggactgctgcttctcctcagtgtccagccctgggctgagagtggaaaggtgttggtggtgcccattgatggcagccactggctcagcat

SEQ ID NO: 275429 - DNA, 201 bp, Homo sapiens
acagtgatagattaatggttaataattaactagaggagggcactctgtcttccaattacacgttgatttgctaagtggctcagtgacaaggtaattaagaygaagaaagcaaatgtagcaggcacagcgtggggtggacagtcagctgtccgtgtcttctgctgagatggccacaggactccaggttcccctgccgtggct

SEQ ID NO: 275430 - DNA, 201 bp, Homo sapiens
tggtttaggaaatcagggtgcctcctctcctacctgtctttgatgttctttatcttgtaagtattgtgctagtggaaatccaatttcttatcctgcaagtyatccagtccccgggaaggaggagtgctctccccagggcctctcagtctgcccctcctctcctctccaactgtcctgaccacacctccccacccagggctc

SEQ ID NO: 275431 - DNA, 201 bp, Homo sapiens
tgttcacagccttgtgttgggaattggatgagaaacaagagcttgaacttggatgttccccagagtgagcacagggtcagacgtgtttttcaagatagtcrtgatcggtcttttccagggtggggcccacagtgaaaaacagtgatagattaatggttaataattaactagaggagggcactctgtcttccaattacacgt

SEQ ID NO: 275432 - DNA, 201 bp, Homo sapiens; identical to SEQ ID NO: 54905

SEQ ID NO: 275433 - DNA, 201 bp, Homo sapiens
tgtagatacttttgtggggctgtgattctgcctaccacagacactaagcttaaagtgaaacccacatcttattcaaggcttggaggttttcctctattcgrccatttaaatttaatttttgttccttttctccatagtcttctattctccaggcttcagagctatcagcttaccattcaattatctccttttttcctgatc

SEQ ID NO: 275434 - DNA, 201 bp, Homo sapiens
cagaacaccaaataccattgttttcacttagaaatgggagctaaatagtgggtacttttgggcataaagatggcaacaatagacactatggactcctaaargggagaggaaaggctgcaagagttgaaaaactattgggtactatgctcagtacttgggtgatgggagcaatcatgccccaaacatcagcatcacacaata

SEQ ID NO: 275435 - DNA, 201 bp, Homo sapiens
  misc_feature (1)...(201): n = A,T,C or G
atgcaagccttgcctctgagctttttcagagagaggtgtcagtggtggatcttgtcagccatgcatctgtgtggctgttccgaggggactttgtgatggantaccccaggccgatcatgcccaacatggtcttcattgggggcatcaactgtgccaacgggaagccactatctcaggtctgtattggtgcctttatccaat

SEQ ID NO: 275436 - DNA, 201 bp, Homo sapiens; identical to SEQ ID NO: 55103

SEQ ID NO: 275437 - DNA, 201 bp, Homo sapiens
ttttggaatttcatggtacttttccacttttagggagatgcagtgcagcgtcttcaagtctcccactcttacgcctgtctccttcacttgtaagagccctygtgattacactgtcctgcccagatacccaggacaatctccccatcttaaaactcttaatttaatcatatctgtgaagtctcttccacctgtaacggaaca

SEQ ID NO: 275438 - DNA, 201 bp, Homo sapiens
tgtgtcacctggagacctttgccatgttcgtgccaatttactgagtgcatgaaagatcatttacaccaaaatctttatcatgtattatctgtgacagacaygccattatcatttttattacattgatttcctttgttattttgtcacccttacttacttggtttggttgacccttagatttgaaatttttctacaaatata

SEQ ID NO: 275439 - DNA, 201 bp, Homo sapiens
ggctcatcttggatgctttgtttacttggataagcttaatgatgagagaatctacatctaaattgttatatttagcattattctctgcattttaaagcacrtgcagcaaaaatccagcaccctatttgggccaccgaccttgtgtccagccccactgctcggccctgggcacacttgccagcccctccattgcaatatcga

SEQ ID NO: 275440 - DNA, 201 bp, Homo sapiens
caagagcaccctcccaggcatgttccaccctcaccccgggctcatcaggagggttcttaagatgcagacagttttaagggggttggaggaatagttgagargctgagatgttgcacccacagctgagaatccctttctagcactctgtgtcctcacaaatccccagaaatcgtcctcccctggggagttctcaagccctta

SEQ ID NO: 275441 - DNA, 201 bp, Homo sapiens
gttatagtgagcacccaataaatattatctgttatcattcttattattttagtttaattgcatttattttatgctgaatttcttccagagccataggtaawttttttcttcagtttcttctgggatatctttttcttctgtgcaacctcatcctcaggtttaggaacaatttgttccttatcagtaaagatcatcttgaat

SEQ ID NO: 275442 - DNA, 201 bp, Homo sapiens
gacagcgggaggggctcactttctcagtgcgccactgctcaaacctctaggggagcatacagacgggcaggttgtggggctctgacctcaccggcagtgtytagaggtggatgtttacagctcctgaagctccagtgggcgtgggttatggccttcttttagttttgccctctatagtcagcttgtgttaaccagctcaat

SEQ ID NO: 275443 - DNA, 201 bp, Homo sapiens
cttacaattgcttccatatctacttatctttctggtgcttttatttctgcttgtcgtaatagccttcagtgagataaactgttaaggggtctctagtagcrtatttcaggttttaaatggtcaatgagaggaagaagaggcagacatgaatgtttatcaaaggatggactaggactgatgtgactcatggagactgttcgt

SEQ ID NO: 275444 - DNA, 201 bp, Homo sapiens
tgcagacctggggatggaatatggttacagagcaagaaaagatctgtgcttcccccattcctctaagtttctggctccagtttaagatccaaattcaaagktagcttttggtggacaagactaaggcctcccactaaaattgtttacttcaagtatttattttcaaagttttccaacctatacaaaggagagacttagtgt

SEQ ID NO: 275445 - DNA, 201 bp, Homo sapiens
actgtctttgtgtttagttacaaggagaacatcatgcgcctctccagccttcacaaggaccgcccggtggagccgctggacctggccgtgttctgggtggmgtttgtgatgaggcacaagggcgcgccacacctgcgccccgcagcccacgacctcacctggtaccagtaccattccttggacgtgattggtttcctcttg

SEQ ID NO: 275446 - DNA, 201 bp, Homo sapiens
tccccagcagttcctctgacccccccaaaatattctccagcgggtttcccaagaggtcaaaggagaatgggtcctggccgccgaagaactccctgaagacstcggctgggtcgcggaagctgaagacgtactcgaaggggtcctcgaagggcctgccgcctgtgcagccgccctccgcccccgcctcgccatagcggtcat

SEQ ID NO: 275447 - DNA, 201 bp, Homo sapiens; identical to SEQ ID NO: 54770

SEQ ID NO: 275448 - DNA, 201 bp, Homo sapiens
ttggggcttggtggctttcaaagctctttctataataacagtggcatcttcagtggtgtaatccttctggactttcatgacattctctatccagattctctttcctagtattgacaaccttttccatagaaaactgtgtgtaatgagttctaaatttccttaagacacctgattgagagactgaattagagatgttgggtt

SEQ ID NO: 275449 - DNA, 201 bp, Homo sapiens
atttcattcctttacatggccgaatattccattgtatggatttaccgcattttttttatccattcatcagttggtggacatttgggttgtttcccattttyagccatgaaaaataatgttgttgtgaacatttgtatacgataaaccctgatgttctaattttcgagcccatgtgcctaacctctatacctgactgcctgc

SEQ ID NO: 275450 - DNA, 201 bp, Homo sapiens
ttagccatgaaaaataatgttgttgtgaacatttgtatacgataaaccctgatgttctaattttcgagcccatgtgcctaacctctatacctgactgcctscctgtgttgacaggaaacttcttgggaaatgtcctatctccatccttttgggaatgtcacatgcagtgaaatgcgcctagagtgggtttgacttacatca

SEQ ID NO: 275451 - DNA, 201 bp, Homo sapiens
aataagaccttgtttctacaaaaaatttaaaaattggccagacatagtggtgcatgactaattccagctactctggaggctgaggcaggaggatggcttgmgcccaggagttggaggctgcagttagccatgcttgtgccactacactccagcccgggcaacagggcaagactctgtatctaaaaacaacaacaacaacaa

SEQ ID NO: 275452 - DNA, 201 bp, Homo sapiens
gtgtggtcccattccttccttccagcggcttcttctggccacctcaatgtcaggatgtcctgctcacatatcaataccattaaaacctgacttctttccckgcactgttgaagctccttcttgaggctcacattatggatataattttgattctttcttcagtggtatagataactacttgtaacctaagaacaacttggt

SEQ ID NO: 275453 - DNA, 201 bp, Homo sapiens
attcactatcaagagaacagcatgggaaagacctgcccccatgattcaattttcccaccaggatcctcccacaacagtgggaattgtgggagttacaattsaagatgagatttaggtggggacacagccaaaccatatgattccaccctggtccctcccaaatctcatgtcctcacatttcaaaaccaatcatgccctccc

SEQ ID NO: 275454 - DNA, 201 bp, Homo sapiens
tgaaaaaccaaattcacacaccaatgaatttggtttctaaatccattaagggagccatccttttttttttttttttcttgagactgagcctcgttctgtcrcccaggctggagggcagtggccggatctccgctcactgcaaccttcacctcccgggtttaagaaattctcccacctcagtctcctgagtaactgggactg

SEQ ID NO: 275455 - DNA, 201 bp, Homo sapiens
tattattcactttataaaaggattctttagtttctatataatttatcatataatttatttagaattttatttcccccattagatttaaaactccaatttayataaaaagttgccataatagacatctgatccataagtttcctgcacagaaagaaatactccattataagaagcatagtatctttaagagaaaaacaactc

SEQ ID NO: 275456 - DNA, 201 bp, Homo sapiens; identical to SEQ ID NO: 55030

SEQ ID NO: 275457 - DNA, 201 bp, Homo sapiens
atttgtctttttgcacattagtatgtaaacactctttaatactttctttacattactatatttccatattcgtagcctctgatgaattcttcatcatgtgsatccccagcagctttacttctctcattgaaccctgactgctatagaatggaagtagtggctgtggcaaagtagtgccttgtacactttttgacttgaaat

SEQ ID NO: 275458 - DNA, 201 bp, Homo sapiens
gtatggtccatggaggcagggttgtcaatgtcatttcggcatttcagaggcctctcagggtttggatatggcagaagacaaccagcaatgattatgcattrcagagatgcaggtgagccccaatttcttgccagctgggaagtcggtgctaaggggccttgctgtctttccttggaacataggataccaatttctttctgg

SEQ ID NO: 275459 - DNA, 201 bp, Homo sapiens
cttcacagttactgatcctcccactctgttaaagactgttccttcagaggacccctgttttctagttagtatagcagatttgttttctaatcatattatgytctttctttacgttctgctctttttgcccctcccaggtcctgtggcggtacactggaacccgaccatcgaatcttgcgaacaacacgatacttgttaagt

SEQ ID NO: 275460 - DNA, 201 bp, Homo sapiens
atacatcataattactgtctgtttttttctctttgatgtatttaaaaatgcttttatacagtactaatccttcttccccatttgctttagtttcagtgccyataagggttcatgttgtaatagaagtcaatagcagtcttaaataactggaagcctttccatgaggcttgtattgtgtaaggccattttttttttctggca

SEQ ID NO: 275461 - DNA, 201 bp, Homo sapiens
atgagttctaaatttccttaagacacctgattgagagactgaattagagatgttgggtttggaagcacgtagaccattttgacaccttcagtgttgaactyatggattctgggtggctagggaatggtccaatatcgaaagaactttaaaagacagtcccttgctggcaatgcattttctgccttcacggacaaagccttg

SEQ ID NO: 275462 - DNA, 201 bp, Homo sapiens
tctgaaattctccaaacacctgttacggagtatgatctctacagccacacatcaatttggttgttgcgaacggactttgttttggactatcccaaacccgwgatgcccaacatgatcttcattggtggtatcaactgccatcagggaaagccgttgcctatggtaagttatctctcctttagcaccttaagaatacttcac

SEQ ID NO: 275463 - DNA, 201 bp, Homo sapiens
cagagacgctcctcacctcccagatggggtctcgccgggcagaggcgctcctcacatcccagatggggcggcggggcagaggcgctccccacatctcagasgatgggcggccgggcagagacgctcctcacttcctagatgtgatggcggctgggaagaggcgctcctcacttcctagatgggatggcggccgggtgaaga

SEQ ID NO: 275464 - DNA, 201 bp, Homo sapiens
cctactgtatcatagcagcttagaatcccagctgctggctcgggctgcagttctctcatggctcgcacagggtggaccagccccattcccctatgtgtttstctgctgctgacctgtggctttgctgaggcagggaagctgctggtagtgcccatggatgggagtcactggttcaccatgcagtcggtggtggagaaactt

SEQ ID NO: 275465 - DNA, 201 bp, Homo sapiens
tgagttctaaatttccttaagacacctgattgagagactgaattagagatgttgggtttggaagcacgtagaccattttgacaccttcagtgttgaactcrtggattctgggtggctagggaatggtccaatatcgaaagaactttaaaagacagtcccttgctggcaatgcattttctgccttcacggacaaagccttga

SEQ ID NO: 275466 - DNA, 201 bp, Homo sapiens
taaataaacccataaagccatttgagagattcttgggggattcattggaccactgaaaatctacagtgagaaaagaattgccatgttgatgaaacaggaaractttccttgtccccctcacagagcatgtgacagcgggaggggctcactttctcagtgcgccactgctcaaacctctaggggagcatacagacgggcagg

SEQ ID NO: 275467 - DNA, 201 bp, Homo sapiens
caccctgtaattgcctagttgtgagtttgtctctgttcacctgacccctcctttcaggcaaggaccatttctaacttggctttctgtcccgagttcctagmatagtaggtagggctcacacattccataaatatttggtggataagggaattagcaatggattctgctttggttccaaagcagagattaattggattgctt

SEQ ID NO: 275468 - DNA, 201 bp, Homo sapiens; identical to SEQ ID NO: 55032

SEQ ID NO: 275469 - DNA, 201 bp, Homo sapiens; identical to SEQ ID NO: 55033

SEQ ID NO: 275470 - DNA, 201 bp, Homo sapiens
ttaaataactggaagcctttccatgaggcttgtattgtgtaaggccattttttttttctggcactgcttcttctacatcttctttctcatcaagtagtgawtggaaagcactaatctctatcaggtcatctattaattcctcgagtgtggtgtctattgactcttgaatttctccaagattcatattttgaaacactttat

SEQ ID NO: 275471 - DNA, 201 bp, Homo sapiens
acagaaaatcaaacaccgcatgttctcactcataagtgggagttgaacagtgagaatgcgtagacgcagggaggggaacaacacacaccagggcttgtggsggggtgaggggtgaggggaggaacttagaggataggtcaataggtgcagcaaaccaccatggcatatgtatcccagaacttcaagtaaataataataata

SEQ ID NO: 275472 - DNA, 201 bp, Homo sapiens
gtttgcacatgtatgtgtttgtgtatgtgcaggtgtgtttgcgtgcagtgtcccagaccctgcacaggggatttcttgaagatctcctgtaacaaaatctycttgagtctatccaggagaattacagccagggatgtaattaaatactttaacaatgatggcagatggccccatctccaatttcaacatgggatttggagg

SEQ ID NO: 275473 - DNA, 201 bp, Homo sapiens
ccaaagattttattttggcttctttataacagataaactgttgaggggcctagtgtatttcaagttttcagtggtcactgagaggaagaagaggcacggaygagggtctgtcagaggatggacaaggactgctgtgactcacggacagtgtttgtaaaggcaccatcttcatggttgtgcatgtccttcagctcggcagga

SEQ ID NO: 275474 - DNA, 201 bp, Homo sapiens
tggagcattcagtctttcaccatcaaggatgatattaactgtgggtgcctccaagatgtccttcattagtttaagatacttccctttattttccgagtttkttgagaattttttatcacaaatcgattttggatttttgtcaaacactttttccatacctattgagataattatatgcttatacttttttagtttatttat

SEQ ID NO: 275475 - DNA, 201 bp, Homo sapiens
ctctgtttagagaaagctggcttagcaatgttgtatgtcttttggatgtgctgtgttattcacatatgagaagaaagagtttcaagggttagcaaatagcrtcacattcagcagagaacatgtggttggggactagggcaatggtgactcctcagacctcagctgcagcctgataaatatggttaacagagtagaaggcag

SEQ ID NO: 275476 - DNA, 201 bp, Homo sapiens
tgaaaaaagaccaaaaccagatagccagcctgaacactctctgtttagagaaagctggcttagcaatgttgtatgtcttttggatgtgctgtgttattcayatatgagaagaaagagtttcaagggttagcaaatagcgtcacattcagcagagaacatgtggttggggactagggcaatggtgactcctcagacctcagc

SEQ ID NO: 275477 - DNA, 201 bp, Homo sapiens; identical to SEQ ID NO: 54942

SEQ ID NO: 275478 - DNA, 201 bp, Homo sapiens
gtctctaaagagaggtctgctgttagtctgatgaacttcttttcgtgtgtaacaggacctttctctctggctgcccttaacatttttccttcatttcaacsttggtgaatctgatgattatgtgtcttggagttgcttttctcgaggagtatctttatggtgttctctgtgtttcctgaatttgaatgttggcctgtcttg

SEQ ID NO: 275479 - DNA, 201 bp, Homo sapiens
aaaagatctgtgctttccccattgctctaagattctggctatagtccaagatccaaattcaaagttaacttttggttgacaagactaaggcctcccactaraattgtttacttcaagtatttattttcaaagttttcaaacatacaaaatgaaaagactatagtgtaatgtgcacctgtatatcaatccttaggctaaata

SEQ ID NO: 275480 - DNA, 201 bp, Homo sapiens
accacctctctcattcctaatattgataatttctttcttctctctttttttttcagatcaaggtggctagagctttaccaaattaattgatctcaacaaaycagctttggtttcattaattttctcaacaaaccagctttggtttcattaattttgcctgttttttaaatgcattttccatttcattgatttctgttctga

SEQ ID NO: 275481 - DNA, 201 bp, Homo sapiens
gcgggtttcccaagaggtcaaaggagaatgggtcctggccgccgaagaactccctgaagacgtcggctgggtcgcggaagctgaagacgtactcgaagggktcctcgaagggcctgccgcctgtgcagccgccctccgcccccgcctcgccatagcggtcatagatatcgcgtttcttggcgtccgacaacacctcgtagg

SEQ ID NO: 275482 - DNA, 201 bp, Homo sapiens; identical to SEQ ID NO: 54968

SEQ ID NO: 275483 - DNA, 201 bp, Homo sapiens
tctgcttctgcttccccagcagttcctctgacccccccaaaatattctccagcgggtttcccaagaggtcaaaggagaatgggtcctggccgccgaagaaytccctgaagacgtcggctgggtcgcggaagctgaagacgtactcgaaggggtcctcgaagggcctgccgcctgtgcagccgccctccgcccccgcctcgc

SEQ ID NO: 275484 - DNA, 201 bp, Homo sapiens
gctgagtgtggtggctcacacatgtaatcacagcactttaggaggccaaggcaggaagatcacttaagcccaggagtttgagaccagcctggacaacatasggagacactgtctctacaaaaaatgttttaaaaattagctgggcctggtggcatatgcctgtggtcccagctactcaggaggctgaggtgggaggatctc

SEQ ID NO: 275485 - DNA, 201 bp, Homo sapiens
tgctttttaaaaatttctcacaccagttaccctaaatcatctttctaaggttcaaagttccacaaatcactaggtcaggggcaaaatgctgccagtctctttgctaaaacataacaagagtcacctttcctccagttcccaacgagttcctcatctccatttgaaaccacctcagtctggactttattgtccatattgcta

SEQ ID NO: 275486 - DNA, 201 bp, Homo sapiens; identical to SEQ ID NO: 54924

SEQ ID NO: 275487 - DNA, 201 bp, Homo sapiens
ggaagatggcaggtgcagcatgaagccaaatgtttggaatcatagcatgttctttcccttcatccctatgtcccagggtctctttacttcataaacatggscaagtggaaatcctactttatgtctcttctgtataatccctttgtcatggcttaacttagtggcctgtgcccctccccactgctcctggaaccacaaccc

SEQ ID NO: 275488 - DNA, 201 bp, Homo sapiens
cttgaacttggatgttccccagaggcagcacagggtcagatgagcttttcaagataggcgtgattggtctttcccagggttgggcccataacgaaaggcarttatagattaatgggtaataagtaactggaggagggcactttgtcttccaattacatgctgatttgctaggtggctcaatgacaaggtaattaaggcgaa

SEQ ID NO: 275489 - DNA, 201 bp, Homo sapiens
tagtggcctgtgcccctccccactgctcctggaaccacaacccacattgttacaagcccctgaaggaagttataaacaccttatcttctactaggacaggwgcccctggaactgtctggctgggcaagccatacttacctgcacttccctattccatctgtgagtgattcagacttgactattgttatcacactaaactaa

SEQ ID NO: 275490 - DNA, 201 bp, Homo sapiens; identical to SEQ ID NO: 55049

SEQ ID NO: 275491 - DNA, 201 bp, Homo sapiens; identical to SEQ ID NO: 55054

SEQ ID NO: 275492 - DNA, 201 bp, Homo sapiens; identical to SEQ ID NO: 55055

SEQ ID NO: 275493 - DNA, 201 bp, Homo sapiens
gagctctgttccctttgcaaccttcctggagtcttattgctatctagatgaactcaaagcaagatgctgccgcccccatgactttgatcattgtaagctgscaatcctcttgggaggctgctcccagcttggactgagctgagtcttcgcatgccttgaacaatgaatttgcatcctggttatgttccccatgggggccag

SEQ ID NO: 275494 - DNA, 201 bp, Homo sapiens; identical to SEQ ID NO: 55056

SEQ ID NO: 275495 - DNA, 201 bp, Homo sapiens; identical to SEQ ID NO: 55057

SEQ ID NO: 275496 - DNA, 201 bp, Homo sapiens; identical to SEQ ID NO: 55058

SEQ ID NO: 275497 - DNA, 201 bp, Homo sapiens
ttctaaatttccttaagacacctgattgagagactgaattagagatgttgggtttggaagcacgtagaccattttgacaccttcagtgttgaactcatggrttctgggtggctagggaatggtccaatatcgaaagaactttaaaagacagtcccttgctggcaatgcattttctgccttcacggacaaagccttgatgga

SEQ ID NO: 275498 - DNA, 201 bp, Homo sapiens
gctctgggcaagtctgttctagtaattcaaggtaccacctctcactgggacagcctagtttctacacaggtcttgctctgggaccgccctcagcagtgtgrttagcaggcagggccagtgtgaccctccctttctgggcctcagttgagaaacctgaagctcaggagaggagtcactcccctggcagatgggtggctgggc

SEQ ID NO: 275499 - DNA, 201 bp, Homo sapiens; identical to SEQ ID NO: 54907

SEQ ID NO: 275500 - DNA, 201 bp, Homo sapiens
aaatacctaggagccctgtgatttggagagtgaaaactctttattaccgttgttactttaactctttccaggatggcctgcctccttcgctcatttcagagaatttctgcaggggttttcttcttagcactttggggcatggttgtaggtgacaagctgctggtggtccctcaggacggaagccactggcttagtatgaag

SEQ ID NO: 275501 - DNA, 201 bp, Homo sapiens; identical to SEQ ID NO: 55059

SEQ ID NO: 275502 - DNA, 201 bp, Homo sapiens
gttgacaagactaaggcctcccactaaaattgtttacttcaagtatttattttcaaagttttcaaacatacaaaatgaaaagactatagtgtaatgtgcamctgtatatcaatccttaggctaaataattttcagtgttttgctgtattaattcatctatccccttattctgaccttttaaagaaactttttggctgtcat

SEQ ID NO: 275503 - DNA, 201 bp, Homo sapiens
aggagaacttagactcggccttttccagatgagcttcagtgtaagagtgggtttcatgaagagcaaaggtcctaggaaatttaagtaagccatttaccaaygctcagaagaaagaacttgaagagcacttggaaatgagctgtgtctccccaagaaagagggagagaaagaggggagagatgtggtgcagaccctagggag

SEQ ID NO: 275504 - DNA, 201 bp, Homo sapiens
tcctccagttatattttggctcttgaataggttttgctttatacatagtgattagattggtgcatgtaggtttgaggtttgagacttatattttcttcacwgtttgctgttatcattaaataataatccttaaaatacattttatctgatatcagtaatgtgactcctatgttattttttgaattccccatctcttttaat

SEQ ID NO: 275505 - DNA, 201 bp, Homo sapiens; identical to SEQ ID NO: 55061

SEQ ID NO: 275506 - DNA, 201 bp, Homo sapiens
accatgtattttcaaatggcctgtcttcaagctcagtaattatttcttgtgtttggtccattctgctattaaaggactttgatgcattcttcattatgccrattgcatttttcagctccagaatttctgcttgattctttctaatgatttcaatctctttgttaaatttatatgctggaattctgaattcctcctctgtgt

SEQ ID NO: 275507 - DNA, 201 bp, Homo sapiens
actgggaatgcgtgatggtgaagtcacagatgacccacatggtgtctaagtgctaaagaagaattctgggaaaatgaaatgcatttgggaagggaaaatckaattaaaagcctaaactaaaaatacaaaattcttggtaaagtttaggagttatgttaaatgtctcattttggctggtgaagtctcatcagaacagggaaa

SEQ ID NO: 275508 - DNA, 201 bp, Homo sapiens
gtctggagtgcagtggtgggatcttggctcattgcaacctccacctcccaggttcaactgattctcctgcctcagcctcccaagtagctggaactacaggygcatggcaccacatccagctaattttctttttttttgtattttttatggagatggagtttcatcatattggccaggctgatctcaaatgcctgatctcaa

SEQ ID NO: 275509 - DNA, 201 bp, Homo sapiens
tacaccctttggccgagtgtgaggctctgccacttcctgaacccacactgagtttattgtggcccaaggggtcacccagaggcctttagagatataaaaamgtatatatgattttatatcacctacgatagggagatatccataaaaaaaggaaacattaaactctacatggtttcagttattttgattataaatctttta

SEQ ID NO: 275510 - DNA, 201 bp, Homo sapiens
atccttgtggccatcaccactatgactgtgctggatcagacctgaaaccagcacagctctgggtctcacccaaggcctgctgtaaccacctcctggctactgcctatgtttgctcaacgcccttgggctttacaatcagcaggtgatacagccagccagacctgcatccctcccttcagaatggcaaggtcccccaggccc

SEQ ID NO: 275511 - DNA, 201 bp, Homo sapiens
cagagtgtgagtctcatctgcctgatgagaaggaagcattacttagtgatagagtatgtgtttgcacatgtatgtgtttgtgtatgtgcaggtgtgtttgygtgcagtgtcccagaccctgcacaggggatttcttgaagatctcctgtaacaaaatctccttgagtctatccaggagaattacatccagggatgtaatta

SEQ ID NO: 275512 - DNA, 201 bp, Homo sapiens
tgtggagtgggcactcttacaggtttccatggcgaaagcgggggtacagttgtgttcttttctttctaaaaggctttctaaaaagccttctgtttaatttytggaaaagaagcctaacttgttcactacatagtcgtccttcttcctctctggtaacacttgttggtctgtggaaatactaatttaatggatcctgaggtt

SEQ ID NO: 275513 - DNA, 201 bp, Homo sapiens
actaataaaggcctgtccttggggaagacttctgttcacatgcgctccagtgaatttccctttctggtcattctctaccccagcacgccccccacccccgmcccgccccacccacccacctgttcatttccttcttagcatgcttcacgatttctaagttcctgctcatgtgtttaaattgtgagtctggctcacctcatg

SEQ ID NO: 275514 - DNA, 201 bp, Homo sapiens
atatgagaaaaaattaactgaaaatttttcttctggctctaggaatttgaagcctacattaatgcttctggagaacatggaattgtggttttctctttggratcaatggtctcagaaattccagagaagaaagctatggcaattgctgatgctttgggcaaaatccctcagacagtaagaagattctataccatggcctca

SEQ ID NO: 275515 - DNA, 201 bp, Homo sapiens
taatacttccaattctggctgcacaatacttgccccatagtccatggtcaataaatacaaatttgagttgtttttgctcatctttcccttttgacttcaamtcagtcatcagaatttccccaaatgcctttcccctggatcttgggccagtggaatgagtacaatttaacttaattgaatttgcttatctatttggtttcc

SEQ ID NO: 275516 - DNA, 201 bp, Homo sapiens
cagagatgtaactgctgacatcctccctattttgcatctcaggtcacccgatgacccgtgcctttatcacccatgctggttcccatggtgtttatgaaagsatatgcaatggcgttcccatggtgatgatgcccttgtttggtgatcagatggacaatgcaaagcgcatggagactaagggagctggagtgaccctgaatg

SEQ ID NO: 275517 - DNA, 201 bp, Homo sapiens; identical to SEQ ID NO: 54912

SEQ ID NO: 275518 - DNA, 201 bp, Homo sapiens
tgttccccagagcgagcgcaaggtcagatgagtttttcaagataggagtgatcggtctttcccagggtggggcccataatgcaagacaattatagattaaygggtaataagtaactggaggagggcactctgtcttcaattacatgttgatttgctaggtgtctcagtgacaaggtaattaagacgaaggaaacaattcta

SEQ ID NO: 275519 - DNA, 201 bp, Homo sapiens
ctgaactgaacattctgtcctaccactagcaaataatcattgtctgcctcaggcttaagtttaataaatagcaaattgcatacagatattttacaacgatygaaagacaaacagaggtcctatccgtgtagtcccaacgataagaacaggtgttggcatgaagtgtttataaattcttgggtacagctgttctgaaagtaa

SEQ ID NO: 275520 - DNA, 201 bp, Homo sapiens
tcatttgtgttattaatttcttcttgtgtaaagtctgacagcttgtgtcttttaagaaatttgtccattccatctaagttgtagattttattggcatgaasttgttcatgtttcttattgttttaatacctgtagaatttatggtgatactactgctctcattcctgatattggtaatttatatcttctgtcttttttcct

SEQ ID NO: 275521 - DNA, 201 bp, Homo sapiens
gtgacatgaaatgggtgtccacagccttgtgttgggaattgaatgagaaagaagagcttgaacttggatgttccccagaggcagcacagggtcagatgagyttttcaagataggcgtgattggtctttcccagggttgggcccataacgaaaggcagttatagattaatgggtaataagtaactggaggagggcactttgt

SEQ ID NO: 275522 - DNA, 201 bp, Homo sapiens; identical to SEQ ID NO: 54775

SEQ ID NO: 275523 - DNA, 201 bp, Homo sapiens; identical to SEQ ID NO: 54778

SEQ ID NO: 275524 - DNA, 201 bp, Homo sapiens
gggatatggccataatcaaatgaacatggctttgccattctaatggagaggaaggcattgattagctacaaactgtgaaacatactttgaaagaaaaggaygtaaagagagctgatcatagggggccttgcaggataaggagtggcaatcttgggagaagttggggggatggtgtgccaagcagggaagatggcaggtgca

SEQ ID NO: 275525 - DNA, 201 bp, Homo sapiens
actttgaaagaaaaggacgtaaagagagctgatcatagggggccttgcaggataaggagtggcaatcttgggagaagttggggggatggtgtgccaagcarggaagatggcaggtgcagcatgaagccaaatgtttggaatcatagcatgttctttcccttcatccctatgtcccagggtctctttacttcataaacatgg

SEQ ID NO: 275526 - DNA, 201 bp, Homo sapiens
acagaggtgaaggcttgactaagggaacaggtccaggttaaaatccattttcccaactctgtcccatgctttgtctctggaccttgagccagggaccagcraactacagcctgtgagcccaatctgcccaaaggcctgttttttgtttttttttttccttttatgttgagacctgtttttatatggcccagagctaagaat

SEQ ID NO: 275527 - DNA, 201 bp, Homo sapiens
tacacaggtcttgctctgggaccgccctcagcagtgtggttagcaggcagggccagtgtgaccctccctttctgggcctcagttgagaaacctgaagctcaggagaggagtcactcccctggcagatgggtggctgggccagaagcagataccaggctttctgactcctgctctaggattctcaccacgtactggctagac

SEQ ID NO: 275528 - DNA, 201 bp, Homo sapiens
tctcatttccagttcataattaaatttcccccattttcttgaacaacatctttccatgtagatcaatggaatagaatggagaattcagaaataaacccatwcgttcttggccaattgacaagatgtcaaattttgataagggtgtcaagatcattcaaatgggaaagaatagtctcttcaacagaagacccaccctggggt

SEQ ID NO: 275529 - DNA, 201 bp, Homo sapiens
acacaggtcttgctctgggaccgccctcagcagtgtggttagcaggcagggccagtgtgaccctccctttctgggcctcagttgagaaacctgaagctcaggagaggagtcactcccctggcagatgggtggctgggccagaagcagataccaggctttctgactcctgctctaggattctcaccacgtactggctagact

SEQ ID NO: 275530 - DNA, 201 bp, Homo sapiens
tccagttcataattaaatttcccccattttcttgaacaacatctttccatgtagatcaatggaatagaatggagaattcagaaataaacccatacgttctkggccaattgacaagatgtcaaattttgataagggtgtcaagatcattcaaatgggaaagaatagtctcttcaacagaagacccaccctggggtccttaat

SEQ ID NO: 275531 - DNA, 201 bp, Homo sapiens
cacaggtcttgctctgggaccgccctcagcagtgtggttagcaggcagggccagtgtgaccctccctttctgggcctcagttgagaaacctgaagctcaggagaggagtcactcccctggcagatgggtggctgggccagaagcagataccaggctttctgactcctgctctaggattctcaccacgtactggctagactt

SEQ ID NO: 275532 - DNA, 201 bp, Homo sapiens
taaatttcccccattttcttgaacaacatctttccatgtagatcaatggaatagaatggagaattcagaaataaacccatacgttcttggccaattgacargatgtcaaattttgataagggtgtcaagatcattcaaatgggaaagaatagtctcttcaacagaagacccaccctggggtccttaatctccagcatcaga

SEQ ID NO: 275533 - DNA, 201 bp, Homo sapiens
acaggtcttgctctgggaccgccctcagcagtgtggttagcaggcagggccagtgtgaccctccctttctgggcctcagttgagaaacctgaagctcaggagaggagtcactcccctggcagatgggtggctgggccagaagcagataccaggctttctgactcctgctctaggattctcaccacgtactggctagactta

SEQ ID NO: 275534 - DNA, 201 bp, Homo sapiens
tttccatgtagatcaatggaatagaatggagaattcagaaataaacccatacgttcttggccaattgacaagatgtcaaattttgataagggtgtcaagawcattcaaatgggaaagaatagtctcttcaacagaagacccaccctggggtccttaatctccagcatcagactccaagaccatttgcagagatcatccaga

SEQ ID NO: 275535 - DNA, 201 bp, Homo sapiens; identical to SEQ ID NO: 54780

SEQ ID NO: 275536 - DNA, 201 bp, Homo sapiens
caggtcttgctctgggaccgccctcagcagtgtggttagcaggcagggccagtgtgaccctccctttctgggcctcagttgagaaacctgaagctcaggagaggagtcactcccctggcagatgggtggctgggccagaagcagataccaggctttctgactcctgctctaggattctcaccacgtactggctagacttat

SEQ ID NO: 275537 - DNA, 201 bp, Homo sapiens
cccttcctgccttgcattctggtgcttggtttacttccttgctaataaatgtcttttgtgtcatcttgtttttgtttttgtttttttccagaatagggcaytgtcatctgtattaaaaccctgttcaggcagatatgctttcccctcaataattatcttcatggcatctgggaactcatttgtctccttttgcttggcaga

SEQ ID NO: 275538 - DNA, 201 bp, Homo sapiens
aagtattcagtcttttagcagattaggtcttaactggagattttttgagtagatgccccccacattatgagattgaggaaattttcatctattcctagctygttgagtattcttatcatacctgaggtgtttggttttgtcaaatgctttttctgtgtctattgaaatgaacatggttttctttttggtcccctattctag

SEQ ID NO: 275539 - DNA, 201 bp, Homo sapiens; identical to SEQ ID NO: 54781

SEQ ID NO: 275540 - DNA, 201 bp, Homo sapiens
aggtggttgtagtcaggccagaggtgagttggcaactgggaagatcactgaattgcacagtgaagacttcttcaaccttatacaccctggaggatctggamcaggagttcatggcttttgccaatgctcaatgggaagcagaagtacgacgcttattttctctattaatgagttcatccaaatgtttagaatttaattttt

SEQ ID NO: 275541 - DNA, 201 bp, Homo sapiens
gcttttttttttttttttgcattgagtgaatattttctagtgcaacatgtaaaatcctttaatgtttttctttccactatttaaaaagttgtgttctgagyggttgttctagggcttagcacatcgattttaacttaccagtatctacttcagatttataccaacttaattccagttaaatattgaaatgtcattcctata

SEQ ID NO: 275542 - DNA, 201 bp, Homo sapiens
tcacaggatgagtttggaagtattctctcctcttcatttttctgtaatagtttgagtggaactggtattaattcttttaaaaatggttggtagaattcagyagtgaatccatctggtcctgggcttttctttgatgagagactttttattactgcttcaatcttgttacttatattggtttgttgaggttttctatttctt

SEQ ID NO: 275543 - DNA, 201 bp, Homo sapiens; identical to SEQ ID NO: 54782

SEQ ID NO: 275544 - DNA, 201 bp, Homo sapiens
tctgggacaaattccaaaaaaaattagctttaatcaaatttacttttactttatctttctgaaccttcaaggtccaaaagcattggttaataattctgctwctaaacttaacattgcagcacagggcatgttctgcccccaaggcaaagaccataagctactgttgtctggaaaacatacaaatagatatctcagcaaaag

SEQ ID NO: 275545 - DNA, 201 bp, Homo sapiens
cacctctcttttgctttaagttgtcatataatgactttgcattttctcaaatcacattggcatctataaatacgcctttcttatagcaatgctacacccaygttaaagctgcattttcaatatgagacaaaaacgtatttcagaaaaaaatgcaaggtttggctcctgctggcatagctgcagcaatgtcttcatgaatct

SEQ ID NO: 275546 - DNA, 201 bp, Homo sapiens
ttgctgtgtttcctttttcatttctgattttatctgagtgttttctctttttcttagtctagctcaaggtttgccaattttgtttatcttttttttttttwaaaaaactttttgtttcattggtctttgcattgtttatttagcctcaatttaatttattttttccctgatctttattatttctttccttctacaaagttt

SEQ ID NO: 275547 - DNA, 201 bp, Homo sapiens
agccatcttgtgctcctacaaggattataccccgaggttgtctgcagaatctctcactaaatgttccttaaggtgttgcctgacacacactgcttagctcrtccatgaaggtatcaagaaaacctgcagaatataattctgtccagtgcaacaaatattctggttgattttctttgtgcagggctgcatttgtctgtttgg

SEQ ID NO: 275548 - DNA, 201 bp, Homo sapiens
ggattatttgagcccaggagttcaaggttccagtgagctatgtttgcatcattgcacctcagcctgggcaacagagcaagaccctgaccaactccccaccyccccccaaatcaatgcaacctgtgatcactttatttgggcaacttccccaaattcttgactcagtgaatttgttgcagggcttttcttttttaatctctt

SEQ ID NO: 275549 - DNA, 201 bp, Homo sapiens
tgctgtgtttcctttttcatttctgattttatctgagtgttttctctttttcttagtctagctcaaggtttgccaattttgtttatctttttttttttttwaaaaactttttgtttcattggtctttgcattgtttatttagcctcaatttaatttattttttccctgatctttattatttctttccttctacaaagtttg

SEQ ID NO: 275550 - DNA, 201 bp, Homo sapiens
gcagaagctgtttagtttaattagatcccatttctcaattttggcttttggttgtcattgcttttggtgttttagttatgaagtctttgcccatgcctatktcctgaatggtattgcctaggtttttttctagagttttcatggttttaggtcttatgtttaagtctttaatccatcttgagttaatttttgtataaggtg

SEQ ID NO: 275551 - DNA, 201 bp, Homo sapiens
gattgtcagtactgaatatatcccattgtatgaatacaccacaattttatttatccattctactgttgatgggctttgggttgtatctagcttttcactaytgtgaacaatgttacaacgaacattcttttacattctgaaacacatgtgagtgggtttttagagtatatacctaggggtggagctgctgcgttggagggc

SEQ ID NO: 275552 - DNA, 201 bp, Homo sapiens
tttgcttggtccagaactgagttcaagtcctgaatttccttgtgaattttctgtctcgttgatctgtctaatattgacaatggagtgttaaagtctcccastattattgtatgggagcctaagtctctttgtaggtctctaagaacttgctttatgggtgctcctgtattgggcgcatatatatttaggatggttagctct

SEQ ID NO: 275553 - DNA, 201 bp, Homo sapiens
tgtaggtctgatttctactccccaccccactccttcttgtcactgaaaagtcatggaattctggaatctcagggttgacagtgactgtgaagcagagtgcygtacactggtatccatctctgggagagaaataccatgcaccaattaggttgggttgccaatcccagggcaggactctaaacacctcagcagtctttacta

SEQ ID NO: 275554 - DNA, 201 bp, Homo sapiens
agtttttttttagtggatttcgtaggattttctacattccagatcatgttatctacaaatagagatagcgttacttcttcctttctaataaggataacatktatttcttttgcttatctaattgccctggcttgaacctctagtaccgtgttgaatagaagtggaaagaggagattcttatcttgttcctgatcttaggtg

SEQ ID NO: 275555 - DNA, 201 bp, Homo sapiens
cttttatttctgcttgtcgtaatagccttcagtgagataaactgttaaggggtctctagtagcgtatttcaggttttaaatggtcaatgagaggaagaagrggcagacatgaatgtttatcaaaggatggactaggactgatgtgactcatggagactgttcgtttgtaaaggcaccatcttcatggttgtgcatgtcctt

SEQ ID NO: 275556 - DNA, 201 bp, Homo sapiens
tcttctttctctccttcctccagcccctggcagccattaatcaactttctgtccttatgaatttgcctatttctatggattccattcacaaaatacatgartagctttttccctttagcataaagagttttgtatattgatcttgtacttcaacatttctgaacttgtttatttgttctaatagtttttttttagtggatt

SEQ ID NO: 275557 - DNA, 201 bp, Homo sapiens
taaagtcagctagataaaagaaaatgttattaagaaaattttaaggtttgagaaaaaattttagggttgagaaaaaatgtattaagtattcattaagtggsagtggatcatcataaagatcttccttttgattgtcctccactgagtaggctgaggaggaagaggaggggttggtcttgctttttcagggatggcagatga

SEQ ID NO: 275558 - DNA, 201 bp, Homo sapiens
ctatgtttttttatgttagatttttctcttgtcaataagttaaagatatctttacaggtcaatgcatacagatttgacatgttcttttaataattgcatgrtagtctttactttggatgcaatgtagttttccaaccaattaagattgatagagatttaagtgttttccacttttggggtttatgagcaataataagaatt

SEQ ID NO: 275559 - DNA, 201 bp, Homo sapiens
atttaataagatgtaactatttttcagagtggttgtacatatccctgattgctaaggcattagttatgtacatgactgattatattgagggttttaaaatrtacttatcagtcatttggatttcctcttttgcccattcaagtctattgcccactgggttgtctactcgaattatgtatgcattctggatactagttcttt

SEQ ID NO: 275560 - DNA, 201 bp, Homo sapiens
ttttctatcaaagtttttggagtattacaaattttatttcttttttctttttcttttttaaattttaaccaaccattttcacccccccttccctacttacmctttccaccttctggtaattaccaatgaactctctacctccatgagacccacttttttagctccacatataaatgagaacatgtggtatttgtctttctg

SEQ ID NO: 275561 - DNA, 201 bp, Homo sapiens
ccacagtcctgctctccccagtgctcccatgtcgctgaaggcaccaccatcttccaagatacatgggcctccccagggtctaggagtcctagacgtgggastagaaattagatgacattggtgtctaaacaaaacaccactgcatggagatagaacaggggagccccctgaatgtggtgagagcaccctcccaggtgtgtt

SEQ ID NO: 275562 - DNA, 201 bp, Homo sapiens
tacctcttattttggcggagcatatagttccaaaatattattaatattgttggtctagccagcttaaattaggatttggtcacttgcaattgaaaaagtcktgacaaatacaagagtaagattcttggcaaatgcatagttgctaaatccaggtgaaacacctggtgtctgatctaagtatattattttgttagggatgga

SEQ ID NO: 275563 - DNA, 201 bp, Homo sapiens
agagaagtaggagacagtgacatgaaatgggggttcacagccttgtgttgggaattgaatgagaaacaagagcttgaacttggatgttccccagagcgagygcaaggtcagatgagtttttcaagataggagtgatcggtctttcccagggtggggcccataatgcaagacaattatagattaacgggtaataagtaactg

SEQ ID NO: 275564 - DNA, 201 bp, Homo sapiens
attattttgttagggatggagtatacatttttatctattgttctggcttcttacaaagttcagtagactttgtaacacagtcacattctctctcatattgrcagatgtttggtgaaagagtgactgttcaaccaactcatgggaaaatgcaaccaagcgctttctaaaaatcagggagactacagttgtaggcctttcaaa

SEQ ID NO: 275565 - DNA, 201 bp, Homo sapiens; identical to SEQ ID NO: 54793

SEQ ID NO: 275566 - DNA, 201 bp, Homo sapiens
aaaaactgaactcatttttcaaaagccttaacagtctgtcttattctgatacttcttttatggttattgtatgagaatcaactacccaggcacctcggagyatgttgatttcagagttcagtgtcagaccccatgagcccctgtgggatggtgccagctgactgccatgttcctgctgtttattgcttgggtgccattaca

SEQ ID NO: 275567 - DNA, 201 bp, Homo sapiens
ctgagagccccaaacagagatttacccacatatttattgacagcaagcctgtgataagcatcatttctatagattatagattaactaaaagtattccttaygggaaacaaagggatgggctctggctaattatctgcagcagaaacatgtccttaaggcacagatggctcatgttattatttgtagtttaggaacacctta

SEQ ID NO: 275568 - DNA, 201 bp, Homo sapiens
gagggttcgattcacttgttgtgggagacgggcggcacttagtattttcttttcagtttacacgttcctgggcatccctattaagatgtgcagataaacasgcacatgcttcatgtggcatctcccttagttaaacatcttttttttttttcctttcctgtgagtcttcctgaaacaggtgagcccaggtggagcctccgc

SEQ ID NO: 275569 - DNA, 201 bp, Homo sapiens; identical to SEQ ID NO: 54799

SEQ ID NO: 275570 - DNA, 201 bp, Homo sapiens
gtggaagagtaaggcaggatcacttccctcttattcccatgttggtgtgactttgcgactttgaccaaagccttacctgcctcctctgcccaaggagggacgtggccgtctcagagggctgcttggtttctgtccaagctggcccttggggaagccctttggccacccaggtggtgattcctgctgtaagaacatgagagg

SEQ ID NO: 275571 - DNA, 201 bp, Homo sapiens
  misc_feature (1)...(201): n = A,T,C or G
ggactgctgcttctcctcagtgtccagccctgggctgagagtgggaaggtgctggtggtgcccactgatggcagccactggctcagcatgcgggaggcctngcgggacctccatgcgagaggccaccaggtggtggtcctcaccctggaggtgaatatgtacatcaaagaagagaactttttcaccctgacaacgtatgcc

SEQ ID NO: 275572 - DNA, 201 bp, Homo sapiens
ccactatcccaggtgtgtattggagtgggacttttacatgcgtatattctttcagatgtattactttggatcgattaactagccccagatatatgctgagyaagcattctgagataatttaaaatgccctcttttgttaatttttgactcctaggtttgagtctgtctttggcatcatcttctggatgatttcttggtatc

SEQ ID NO: 275573 - DNA, 201 bp, Homo sapiens
tgcttctcctcagtgtccagccctgggctgagagtgggaaggtgctggtggtgcccactgatggcagccactggctcagcatgcgggaggccttgcgggasctccatgcgagaggccaccaggtggtggtcctcaccctggaggtgaatatgtacatcaaagaagagaactttttcaccctgacaacgtatgccatttcat

SEQ ID NO: 275574 - DNA, 201 bp, Homo sapiens
ctctaagaggttggacttatcaaagcacttttctcctcgttatcctccattaattacagtaccaagcaccacccatgtgttgcctacaccccacagccttyggccgagttgaggatctgccacttcctgaacccacgctgagtttattgtggctcacagggtcacctagaggcctttaaagatataaaaacctatatatga

SEQ ID NO: 275575 - DNA, 201 bp, Homo sapiens
  misc_feature (1)...(201): n = A,T,C or G
aaggtgctggtggtgcccactgatggcagccactggctcagcatgcgggaggccttgcgggacctccatgcgagaggccaccaggtggtggtcctcacccnggaggtgaatatgtacatcaaagaagagaactttttcaccctgacaacgtatgccatttcatggacccaggacgaatttgatcgccttttgctgggtcac

SEQ ID NO: 275576 - DNA, 201 bp, Homo sapiens
gcagcagtgttggtacctaagttataaggcaaagtcccctttacctttccttgtgctttcctcaagcagaatgagttttgctccatagccatcacagctgrgaatgtgctgaatctcacctagagccagtaagtctcagaggctcaccaaggcccttgacgtagtacgaggtttcactgctggtattcaggttccaaggtc

SEQ ID NO: 275577 - DNA, 201 bp, Homo sapiens; identical to SEQ ID NO: 55104

SEQ ID NO: 275578 - DNA, 201 bp, Homo sapiens
atagtgggagactttaacaccccactgtcaacattagacagatcaacgagacagaaagttaacaaggatacccaggaattgaactcagctctgcaccaagyggacctaatagacatctacagaactctccaccccaaatcaacagaatatacattcttttcagcaccacaccacacctactccaaaattgaccacatagtt

SEQ ID NO: 275579 - DNA, 201 bp, Homo sapiens
aagaataaataaataaataaataaataaacgctctctcagtgggtgggtgtcagctgagtttggtctgggtttcctttctgctctaacagaatagcactgmtttcagtgcctcccaattgtctcccaccagggctcagggattctctttatgccacaccgccactgtgggttcagggggttgggtgacataggagatgcag

SEQ ID NO: 275580 - DNA, 201 bp, Homo sapiens
ggtcctgagagtaatgagctccctcgtattggaggtgtccaagcacaggctgaggaactcccatttggctggatgggcaaacttggagtggaaattccacwtaagcaaccttggccctagatgtctctgagttttgttcctgttgtcttgcagtgcatagaaagatttcccaaaggccaatatttcattgttgtacctatg

SEQ ID NO: 275581 - DNA, 201 bp, Homo sapiens
ttgctttttaaaaatttctcacaccagttaccctaaatcatctttctaaggttcaaagttccacaaatcactaggtcaggggcaaaatgctgccagtctctttgctaaaacataacaagagtcacctttcctccagttcccaacgagttcctcatctccatttgaaaccacctcagtctggactttattgtccatattgct

SEQ ID NO: 275582 - DNA, 201 bp, Homo sapiens
caacgagaacaaagacacaacataccagaatctctgggacacattcaaagcagtgtgtagagggaaatttatagcactaaatgcccacaagagaaagcagraaagatctaaaattgacaccctaacatcacaattaaaagaactagaaaagcaagagcaaacacattcaaaagctagtaaaaggcaagaaataactaagat

SEQ ID NO: 275583 - DNA, 201 bp, Homo sapiens; identical to SEQ ID NO: 54979

SEQ ID NO: 275584 - DNA, 201 bp, Homo sapiens
gtgtaaacgaaccttgtattcctagaataatcccacttgattgtgttgtataatccttttacatgttactgaatttggtttgacagcattttattgaggasttttgcatcatatccataagagatattggaagtcttattttcttgcggagccttggtctgtgtttgctatctgaatattactggccttgtagaagaaact

SEQ ID NO: 275585 - DNA, 201 bp, Homo sapiens
cagcaggcaaagaaagagagcttgtgcaggaaaacttccatttttaaaaccaccagatctcgtgagacttacttactactatgagaacatcacgggaaacrcccagccccatgattcaattatctccctccaggttccttccatgacacgtggaaattgtgggagttccaattcaagatgagctttgggtggggacacagc

SEQ ID NO: 275586 - DNA, 201 bp, Homo sapiens
ttaatgcagtctgataatctcttttaattgagttgtttaatccattcacatttaatactattattgatgtagatggatttatgtctaccatcatttttttmttttcttttttttttgagacaaaatctcattctgttacccagactggagtgcagtggtgtgatcttggcccactgcaacctccgcctcctgggttcaagc

SEQ ID NO: 275587 - DNA, 201 bp, Homo sapiens
gttagccaggatggtctcgatctcctaacctcgtgatccgcccgccttggcctcccaaagtgctggaattacaggggtgagccaccacacccagcctggaygccatgacttttaaggagagagtaaggaaccacatcttctacttagaggagcatttattttgcccatattttttcaaaaatgccttaaacatagcctctg

SEQ ID NO: 275588 - DNA, 201 bp, Homo sapiens; identical to SEQ ID NO: 54909

SEQ ID NO: 275589 - DNA, 201 bp, Homo sapiens
tgggattacaggtgtgagccactgtgcctggccccattttactttttatgctctatatctctcatgtatttatttgttcctctgttctgcctttattgcttttttttttttttttgcattgagtgaatattttctagtgcaacatgtaaaatcctttaatgtttttctttccactatttaaaaagttgtgttctgagcggt

SEQ ID NO: 275590 - DNA, 201 bp, Homo sapiens
gggaggaggattgcttgagcccaggagtctgagagcagcctgggcaacatgctgagactccatctctacaaaaaattaaaaaattatccaggtgtgatggygcacacctgtggtcccagctactcgggaggctgaggcaggaggatcacttgatcccaggaggtggaggctgcagtgtgccatgttcacgccacctcactc

SEQ ID NO: 275591 - DNA, 201 bp, Homo sapiens
tccgagatacggaaagctatgtgtgattttatatcacctatcatgttaagatatgtataaaataggaaacatattggccatatatcattttatatattttkggttttacatgtctaaaaaatacatgtttttttgtatgtattaaaggataggtatgtataagaggttttatagaagtggaaagttatattttttgcatat

SEQ ID NO: 275592 - DNA, 201 bp, Homo sapiens; identical to SEQ ID NO: 54980

SEQ ID NO: 275593 - DNA, 201 bp, Homo sapiens
aaatgggatattgtttcttcatattaaatagaagtatttctccaaaaagctgttggttagaacactgaatttatgtcttacatttctgctcttatagttcygcatccacttgtttcattaagcaaactttcccttaaagtgcaggaaagtgaaaaaatcctaagtgcacagcttgataaattatcacaaattcacgtagtg

SEQ ID NO: 275594 - DNA, 201 bp, Homo sapiens
aagtggaaagttatattttttgcatatctttatgaattataataaaggaaggaaaattctcaaagaggaattcagatatcaaagagtgccctttgacaaaragccttggttacaacatacctacaaaagtgaactgtcattgaaagacctatggacactggatttctctttccttatttagaagggcaggctgtgtcttgg

SEQ ID NO: 275595 - DNA, 201 bp, Homo sapiens; identical to SEQ ID NO: 54982

SEQ ID NO: 275596 - DNA, 201 bp, Homo sapiens
gatccaccacactcagaagtatcattttctctaagagactcaaaagtgtattagggagaatttatttaaaaataaaataaatgggatattgtttcttcatrttaaatagaagtatttctccaaaaagctgttggttagaacactgaatttatgtcttacatttctgctcttatagttctgcatccacttgtttcattaagc

SEQ ID NO: 275597 - DNA, 201 bp, Homo sapiens
ctgtgcctgtgtgtgtccacgcgtgtttgtgtgtgtgcatgcacacatgtgtcagcatgcagtgtctcagatcctacataggggtttttcctgaaggtctycagtagcaaaaactcattgagtctatccaggggaattacatccaatgctgtaattaaatactttaacaaagatagcagatcatcattcaagagaacatca

SEQ ID NO: 275598 - DNA, 201 bp, Homo sapiens; identical to SEQ ID NO: 54984

SEQ ID NO: 275599 - DNA, 201 bp, Homo sapiens
agatcctacataggggtttttcctgaaggtctccagtagcaaaaactcattgagtctatccaggggaattacatccaatgctgtaattaaatactttaacmaagatagcagatcatcattcaagagaacatcaagatagttttaattaagaaaaaaaaaaggaatcactgccaggcttttttagtttttggtgagttccag

SEQ ID NO: 275600 - DNA, 201 bp, Homo sapiens
ttggcagacctatttttcagatgatgaaactgaggcacagaggggttgagtgacttgcccaaggttatgcctcaagtaagtgggggagccagaattcaagmccatacattctttgtaaaaaaaaaaaaaaaaaaaaggaaagaaaaaaaggctgagtgtggtggctcacacatgtaatcacagcactttaggaggccaagg

SEQ ID NO: 275601 - DNA, 201 bp, Homo sapiens; identical to SEQ ID NO: 54945

SEQ ID NO: 275602 - DNA, 201 bp, Homo sapiens; identical to SEQ ID NO: 55064

SEQ ID NO: 275603 - DNA, 201 bp, Homo sapiens
ctgtgggttcaattttgtgtgaatcacatcctgctgattgctgagtgggcgtgtgggagggtgtgcctggaggagaacttagactcggccttttccagatragcttcagtgtaagagtgggtttcatgaagagcaaaggtcctaggaaatttaagtaagccatttaccaacgctcagaagaaagaacttgaagagcacttg

SEQ ID NO: 275604 - DNA, 201 bp, Homo sapiens
gatatgcattttccagcacaattatctccaacctccacaagattaatgatcttaaccatgcattcagactctcttcagaacaacatggtgagatatcaatrttgtcttcttgatgcaagtttcccttgaatgatttaaacttcagatgggtggactgtctccttagggagaatttgcaaattaaatataataaaagctaac

SEQ ID NO: 275605 - DNA, 201 bp, Homo sapiens
acttcttccacgtactatattataggagcttagaatcccagctgctggctctgggctgaagttctctgatggctcgtgcagggtggactggcctccttccmctatatgtgtgtctactgctgacctgtggctttgccaaggcagggaagctgctggtagtgcccatggatgggagccactggttcaccatgcagtcggtgg

SEQ ID NO: 275606 - DNA, 201 bp, Homo sapiens
tttcataagtacttcagctgtgacacttgcataaacttgggtaaaaactcagcgttatctagattaaatatgataatacatgcagatgactggcatgtggmtatgaatcagcaatacccgtaattgggtgggtgatatgcattttccagcacaattatctccaacctccacaagattaatgatcttaaccatgcattcaga

SEQ ID NO: 275607 - DNA, 201 bp, Homo sapiens
ttatgagtaaatcattggcagtgaatgtgaatttttttttaaatgaatgaataagtacacgccttcttttgagggcaggttctatctgtacttcttccacktactatattataggagcttagaatcccagctgctggctctgggctgaagttctctgatggctcgtgcagggtggactggcctccttccactatatgtgtg

SEQ ID NO: 275608 - DNA, 201 bp, Homo sapiens
cactttttctgcatgattcctgccccagaggggtcaacaagaaagggcatcccactggctgactcatgcagggaagctgtcagtaattaattagcaaggcmgggaagttgtaccccaagtcttggtttcaacactagaggactttaggaggtggttcaatgtagtgtttgagcacgcggaccctggagtcctccaagcctg

SEQ ID NO: 275609 - DNA, 201 bp, Homo sapiens
acgaggcctaccggggtactcccagcacctcgtagtagtccactatgctggactgccaaagagcctgcggggcactggcacagcgagcggcaaggctgccrgcacccgcgcacaggtcagaggcttggcgacctgggccgcctggagggccgccccttatgacgcagccacatctcattggccgaggcctgtgagcgcctc

SEQ ID NO: 275610 - DNA, 201 bp, Homo sapiens; identical to SEQ ID NO: 54996

SEQ ID NO: 275611 - DNA, 201 bp, Homo sapiens
ctaggacaggagcccctggaactgtctggctgggcaagccatacttacctgcacttccctattccatctgtgagtgattcagacttgactattgttatcayactaaactaaactggggttcactcacccagcacagtaagaccaaacatctacactgagatttgcaatgggagaaaggaaggcatttatgtgcagggcaca

SEQ ID NO: 275612 - DNA, 201 bp, Homo sapiens
gtttaattggctcacagttttgcagcctttatacgaaacacagtgctagcatctgcttctggtgaggcctcaggaagcttacaatcatgacagaaggtgayggggagctggtgtgtcacatggcaagagcaggagcaagagagagacaggagagatggcacatactttctttttaattttaatttttatttctggggtaca

SEQ ID NO: 275613 - DNA, 201 bp, Homo sapiens
agtgtccaaacccttcctcctatattcctagattactaacgaccaattcagaccacatgacattcctgcaaagggtcaagaacatgctctaccctctggcyctgtcctacctttgccatgctgtttctgctccttatgcaagccttgcctctgagctttttcagagagaggtgtcagtggtggatcttgtcagccatgcat

SEQ ID NO: 275614 - DNA, 201 bp, Homo sapiens; identical to SEQ ID NO: 55028

SEQ ID NO: 275615 - DNA, 201 bp, Homo sapiens
tgcctcttgctctcttttaggaattctttttcctactgtgatatatgtaagtacttataaatttaaacttaaaattcaaaaaatataccaggatgtgaaakaaacattattaaatataggtgttttgctgtgagtgtttcttggaataggtagggctttgtatagtaggttttggtcttttggtcagcttgggaaaatttt

SEQ ID NO: 275616 - DNA, 201 bp, Homo sapiens; identical to SEQ ID NO: 55029

SEQ ID NO: 275617 - DNA, 201 bp, Homo sapiens; identical to SEQ ID NO: 55076

SEQ ID NO: 275618 - DNA, 201 bp, Homo sapiens
gaccctggaagctgatgccttgggctgctcctcctatttcctgggcaccaggaatatgagctactccctccccacagtcctgctctccccagtgctcccawgtcgctgaaggcaccaccatcttccaagatacatgggcctccccagggtctaggagtcctagacgtgggagtagaaattagatgacattggtgtctaaac

SEQ ID NO: 275619 - DNA, 201 bp, Homo sapiens
cccttttccatttccatggagatgcagtgcagcatcttcaagtctctaattcttacatctgtctctttcacttgcaagagcccttgtgattacattgtccygcccggacatccagcataatctccccatgtcaaaacccttaatataatcacatctataaagtctcttccacctgtaatggaatatattcccaggtttgcg

SEQ ID NO: 275620 - DNA, 201 bp, Homo sapiens
tgaggccaggctccagctcccccggtcccttggtgagcaggagctccctgaacccaccatgggtctttgctagggttgtcttgcacatgtgtgctttagayagcagcacctcttcttccatggtgtagatggagaatcctcaacaaagcctttccaagaatctgatcatcacatcttgagctcagcctccctgcagctttt

SEQ ID NO: 275621 - DNA, 201 bp, Homo sapiens
ctgcccggacatccagcataatctccccatgtcaaaacccttaatataatcacatctataaagtctcttccacctgtaatggaatatattcccaggtttgmgcaactacaatgtagatactttgtggggctgtgattctgcctaccacagacactaagcttaaagtgaaacccacatcttattcaaaacttggaggttttc

SEQ ID NO: 275622 - DNA, 201 bp, Homo sapiens
gataatctgtttacgttttaaaaggggatttatttgaaaaacatataaaaacacgacagaccacttcataggccactttacaccataaaataggtaataayaacatacaggtatctttgcaagcgtaaaccctcaggtgtactaatgaccttcatataggtgtatcaattgtgagaagatgaatcatattcttaaagtaat

SEQ ID NO: 275623 - DNA, 201 bp, Homo sapiens
gtgttacccatatgtgggaagaaagagtattaagagttagcaaatagggtcacatccagcagagaccatatggttggggactagggcaatggtgactcctyagacctcagctgcagcctgataaacgtggttaagagagaagtaggagacagtgacatgaaatgggggttcacagccttgtgttgggaattgaatgagaaa

SEQ ID NO: 275624 - DNA, 201 bp, Homo sapiens
ttcagatgatctgccctcctcagcctcccaaagtcctgggattacaggcatgggccaccacgcccggccaagaaatgttatctttcacagatgcagatgtrcaaaagggacatctcttcattattgaggacatttcaacatttgtacgtacatgcctaatgcttacacacttactcttgtgctaatgcacttccatggagt

SEQ ID NO: 275625 - DNA, 201 bp, Homo sapiens
atttctttccagtttaacaaattattttgtgcgaattcatgtactcatcaattatcaaattttataaaactgcccttcttgaaagtatatgtaataatttraaaattatagatcatattcaggctacattttaaaatacgatgtttagaaaagtaccaaaaaccacagcaagaaatgaaacttccgttttttgttaattct

SEQ ID NO: 275626 - DNA, 201 bp, Homo sapiens
ccttttttcattttttaaaaacaatactttcaaagagcaaaaattttagaatttgatgaggtttattctagtgaagtttttatcgtttgtactttttgtaycctaaggaagctttgtttaccccaagatatagtttctacattctcttaaaaacactaaagagttccagtttatatgtttagctctgtgagattgggagag

SEQ ID NO: 275627 - DNA, 201 bp, Homo sapiens
tactcttgtgctaatgcacttccatggagtcaaatttgtgagcataaaatgaattagaattctccataagtctatacacagtctctgccttcagtattggraatgatatgaagatgaaatacatagcatagcaaattgtaaaaataatgctgacaatttaaccttgtgaaaaaacctaaaaagaagaaaaagtaaaagaaa

SEQ ID NO: 275628 - DNA, 201 bp, Homo sapiens; identical to SEQ ID NO: 54884

SEQ ID NO: 275629 - DNA, 201 bp, Homo sapiens
ttccttgtaaccttgtgttttgggaacctagcaactctactccccactaagtgacaacccatgcaggtttgcccagattattcccagtttaacactggaartctcacgtcctgggagactcttcattccccaaggagcagggacagcaggtcactgtcactggagcactggaagctggccacatcattagcagattcagaa

SEQ ID NO: 275630 - DNA, 201 bp, Homo sapiens; identical to SEQ ID NO: 55080

SEQ ID NO: 275631 - DNA, 201 bp, Homo sapiens
gtgggtgatcactgtcctggtctccctgaagcaaggacgcctctctggcctcagggtgcctgtcaggcaagtctctcctgtccctggaggttcacagagcmgcatccctgcaagagcaatgctaagtggggttggctttgagccccagccattctcttaacaattcttttagttaagtatcagttcccccatcccctcact

SEQ ID NO: 275632 - DNA, 201 bp, Homo sapiens
gtccagctgtgaaactcagagatgtaactgctgacatcctccctattttgcatctcaggtcacccgatgacccgtgcctttatcacccatgctggttcccrtggtgtttatgaaagcatatgcaatggcgttcccatggtgatgatgcccttgtttggtgatcagatggacaatgcaaagcgcatggagactaagggagct

SEQ ID NO: 275633 - DNA, 201 bp, Homo sapiens
ggtcaatggtagtgcagttcagggtttcaatggccactgagaggaaggagaggcagggacgaggatctgtcaaaggatgggcaagagtggtgtgactcacsgagactgttcgtttgtaaaagcaccatcttcatggctgtggatgtgcttcagctgggcaggagcagggacactacactgagaactgatccatccaatctt

SEQ ID NO: 275634 - DNA, 201 bp, Homo sapiens
ttttccatgaaactttttattttagaagaaatttagatttatgcaaggttgcaagaactagcacagagaattttcatatcctgtgcctagtttcctcctcttttttttttttttttttgagacaaagtgtcactctgtcacccaggctggagtgcagtggggcaatcttggctcactgcaacctctgcctcctgggttcaa

SEQ ID NO: 275635 - DNA, 201 bp, Homo sapiens
gagagtcctctttgagctttacaagaaatatcctggtgtgaaaaaagaccaaaaccagatagccagcctgaacactctctgtttagagaaagctggcttakcaatgttgtatgtcttttggatgtgctgtgttattcacatatgagaagaaagagtttcaagggttagcaaatagcgtcacattcagcagagaacatgtgg

SEQ ID NO: 275636 - DNA, 201 bp, Homo sapiens
tttccatgaaactttttattttagaagaaatttagatttatgcaaggttgcaagaactagcacagagaattttcatatcctgtgcctagtttcctcctcttttttttttttttttttgagacaaagtgtcactctgtcacccaggctggagtgcagtggggcaatcttggctcactgcaacctctgcctcctgggttcaaa

SEQ ID NO: 275637 - DNA, 201 bp, Homo sapiens
cagctgtgaaactcagagatgtaactgctgacatcctccctattttgcatctcaggtcacccgatgacccgtgcctttatcacccatgctggttcccatgktgtttatgaaagcatatgcaatggcgttcccatggtgatgatgcccttgtttggtgatcagatggacaatgcaaagcgcatggagactaagggagctgga

SEQ ID NO: 275638 - DNA, 201 bp, Homo sapiens
ctccgctcactgcaaccttcacctcccgggtttaagaaattctcccacctcagtctcctgagtaactgggactgcaggcatgtgccactgctcctggcaatttttttttttttttttttagtagagatgaggtttcgcaatgttagccaggctggtcttgaactcctgacctcatgtgatctgcccgcctcggcctcccaa

SEQ ID NO: 275639 - DNA, 201 bp, Homo sapiens
agctttgtaatgtcttgaaatgagtagtattagctctctaatttttttcaaagttgtttttgctattgtaggttttctacatttctgtatgaattttagartcagtttgccaatttgcacaaaaaaaagcctgttgggattttggttgaaatcatatttaagttacagttcaactggggagaaacagcatcctaacaattt

SEQ ID NO: 275640 - DNA, 201 bp, Homo sapiens
atagtttagagaattttcatctaccctgtgtccagtttccaccattgttaaatctcatgtttctatggcacatccatcacaactcattcaccaatattgaygcataatgatgagctaaaagctaaagtctgtttccttcagatttcattaatttttacttaatttccctgttcttttatgggatcccagtgataccacctg

SEQ ID NO: 275641 - DNA, 201 bp, Homo sapiens; identical to SEQ ID NO: 54892

SEQ ID NO: 275642 - DNA, 201 bp, Homo sapiens; identical to SEQ ID NO: 54789

SEQ ID NO: 275643 - DNA, 201 bp, Homo sapiens
agattttcatgatgttcgccccgctgacattctcttccatagtgttgacaatcctttccatagaaaaccatgtgtaatgagccttaaagtgccttgtaacyccttgttctaatggctgaattagagatgatgtttgaggacatggagaccactttggctccttttgtgttgaattcatggggttctggatggctagaggca

SEQ ID NO: 275644 - DNA, 201 bp, Homo sapiens
ggcactgcttcttctacatcttctttctcatcaagtactgattggaaagcactcatctctatcaggtcatctattgattccctgagtgtggcatctattgkctcttgaatttctccaagagtcatattttgaaataccttatccccaacattttgttgctgtatccataatcccttcatgacttccttgattggctctgtc

SEQ ID NO: 275645 - DNA, 201 bp, Homo sapiens; identical to SEQ ID NO: 55090

SEQ ID NO: 275646 - DNA, 201 bp, Homo sapiens
tgactaagcaaatgtctagtaccagttagggtgtcctggaaggaaccatcttgtgcttctacaagaattatgccctgaggttggctgttgaatccctcackaaatgctcctcagtgtgttgcctaacacacactgctgagctcacccattaaaatctgcatgatggaattcagcccaatgcaatgagaattcccatggact

SEQ ID NO: 275647 - DNA, 201 bp, Homo sapiens
ctaacacacactgctgagctcacccattaaaatctgcatgatggaattcagcccaatgcaatgagaattcccatggacttcctctgtgcaaggcaaagcaygggtgctgtggaaggaggatgaaaacaggtagaagatgtaatctcatcctcaaggggtgctcggtagaatggaggaaacaatacatagattcctgaagat

SEQ ID NO: 275648 - DNA, 201 bp, Homo sapiens
tgttcagaatgcagaagcagagtgggcagagagagacagctcatcagagtgcttgggcaagcatagggacggcgactcaccactgcagacaatgtatctgwggaaagccatttaaaataggtgacagtcacattccatcaaatttctggaagggtccatggaggcagggttgtcaatctcattacagcatttcagaggcct

SEQ ID NO: 275649 - DNA, 201 bp, Homo sapiens
gcaagcatagggacggcgactcaccactgcagacaatgtatctgaggaaagccatttaaaataggtgacagtcacattccatcaaatttctggaagggtcyatggaggcagggttgtcaatctcattacagcatttcagaggcctcagaagatttggaaatgaaaaaagacaagcagcacttgtggctcacctgtgtcaca

SEQ ID NO: 275650 - DNA, 201 bp, Homo sapiens; identical to SEQ ID NO: 55094

SEQ ID NO: 275651 - DNA, 201 bp, Homo sapiens; identical to SEQ ID NO: 55045

SEQ ID NO: 275652 - DNA, 201 bp, Homo sapiens
caccaaacatgatgaaaaatacagtagagccatgagagatcactttttactctgacatgcaatttattggagagatgaaatgctcaaacagagagtataartgttatatcacatgcacttaagccacacttcagctcactggaatagcaacaggaggtagctacaaaattattacagtagtgtagtatatactataggtaa

SEQ ID NO: 275653 - DNA, 201 bp, Homo sapiens
gcagccactggctcagcatgcgggaggccttgcgggacctccatgcgagaggccaccaggtggtggtcctcaccctggaggtgaatatgtacatcaaagargagaactttttcaccctgacaacgtatgccatttcatggacccaggacgaatttgatcgccttttgctgggtcacactcaatcgttctttgaaacagaac

SEQ ID NO: 275654 - DNA, 201 bp, Homo sapiens; identical to SEQ ID NO: 55046

SEQ ID NO: 275655 - DNA, 201 bp, Homo sapiens; identical to SEQ ID NO: 55047

SEQ ID NO: 275656 - DNA, 201 bp, Homo sapiens
gcaaataatcattgtctgcctcaggcttaagtttaataaatagcaaattgcatacagatattttacaacgattgaaagacaaacagaggtcctatccgtgyagtcccaacgataagaacaggtgttggcatgaagtgtttataaattcttgggtacagctgttctgaaagtaaagttcactttcaatcctaaaaaaagtcc

SEQ ID NO: 275657 - DNA, 201 bp, Homo sapiens; identical to SEQ ID NO: 55048

SEQ ID NO: 275658 - DNA, 201 bp, Homo sapiens
attgtctgcctcaggcttaagtttaataaatagcaaattgcatacagatattttacaacgattgaaagacaaacagaggtcctatccgtgtagtcccaacrataagaacaggtgttggcatgaagtgtttataaattcttgggtacagctgttctgaaagtaaagttcactttcaatcctaaaaaaagtccgctattcctc

SEQ ID NO: 275659 - DNA, 201 bp, Homo sapiens; identical to SEQ ID NO: 55102

SEQ ID NO: 275660 - DNA, 201 bp, Homo sapiens
aaggcgaaggaaacaaatgtagcaggcacagcgtggggtggacagtcagctgtcggtggcttctgctgagatggccagaggactccaggttcccctgccgyggctggccacaggactgctgctcctcctcagtgtccagccctgggctgagagtggaaaggtgttggtggtgcccactgatggcagcccctggctcagcat

SEQ ID NO: 275661 - DNA, 201 bp, Homo sapiens
aaataaaaatttctttggcatatggaaatcttgtttaaaaagtttagaaaacattttttaaaactccaatatgaaaagctgggtgcagtggcatgcgcctrtggtcccaggtacttgggaggctcaggtgggaggatcattgagctcaggagtttcagcacctgtggttttttgatttatttatttaaaacacaacaaaaa

SEQ ID NO: 275662 - DNA, 201 bp, Homo sapiens
gcctagtgtatttcaagttttcagtggtcactgagaggaagaagaggcacggacgagggtctgtcagaggatggacaaggactgctgtgactcacggacastgtttgtaaaggcaccatcttcatggttgtgcatgtccttcagctcggcaggatcagggacactacattcagaactgatccatcctggggtttttgcttg

SEQ ID NO: 275663 - DNA, 201 bp, Homo sapiens
ttcatggggttctggatggctagaggcattgtccaatatcaaaagtaatttaaaagacagtcctttagtggcaaggtatttctgatttcagagacaaagcrttggttttcatggaaccagtttggaaaaagtgtttctgttgtactggccttcttgttctacaacaaaaagactgggagctggcgtttattttttccctta

SEQ ID NO: 275664 - DNA, 201 bp, Homo sapiens; identical to SEQ ID NO: 54859

SEQ ID NO: 275665 - DNA, 201 bp, Homo sapiens
ccattcatctgcagaactctcttcatcttcccaaactgaagcttgggacccattaaacaataattgcccattcccctctcctccaagccctggtgtaaccrcccgggggattcaccttgcctgctgcctagacagagtcaatataacaagacaggggaattgcaatagagaaagagtaattaatgcagaactagccgtgtg

SEQ ID NO: 275666 - DNA, 201 bp, Homo sapiens
tggacaaggactgctgtgactcacggacagtgtttgtaaaggcaccatcttcatggttgtgcatgtccttcagctcggcaggatcagggacactacattcrgaactgatccatcctggggtttttgcttgcctgattttcagctgaacggtgatgcaacagtaaattagaattgtggacatgataatttttagtggtccca

SEQ ID NO: 275667 - DNA, 201 bp, Homo sapiens
tttaaaattgaattttaaagattatttatattctggatatttatcctttaccagtctgtagatgttttttttaaagtaaactctttttgtttgtttgtttwtatttttttatttttattttttattattgtactttaagttttagagtacatgtgcacaatgtgcaggttagttacatatgtatacatgtgccatgttggt

SEQ ID NO: 275668 - DNA, 201 bp, Homo sapiens
tagcttgatgggtttggcattgaatctataaattaccttgggcagtatggccattttcacgatattgattcttcctatccatgagcatggaatgttcttcsatttgtttgtgtcttcttttatttcgttgagcagtggtttgtagttctccttgaagaggtccttcacatcccttttaagttggattcctaggtattttat

SEQ ID NO: 275669 - DNA, 201 bp, Homo sapiens
ttaaagattatttatattctggatatttatcctttaccagtctgtagatgttttttttaaagtaaactctttttgtttgtttgtttttatttttttatttwtattttttattattgtactttaagttttagagtacatgtgcacaatgtgcaggttagttacatatgtatacatgtgccatgttggtgtgctgcacccatt

SEQ ID NO: 275670 - DNA, 201 bp, Homo sapiens
tcctgggactttgctgaagttgcttatcagcttaaggagactttgggctgagacaatggggttttctaaatatacaatcatgtcatctgcaaacagggacwatttgacttcctcttttcctaattgaatgctctttatttctttctcttgcctgattgccctggccagaacttccaacagtatgttgagtaggagtggtga

SEQ ID NO: 275671 - DNA, 201 bp, Homo sapiens
ctgtagaggatgtggagaaataggaacacttttacactgttggtgggactgtaaactttttattttacaataaatttagatttaaagcaagggtgcaaaawattgcactaagaattcccatatatcttttgccagtttcccctattgctaaatgttagtttactgtgcacatttttttttattatactttaagttctaggg

SEQ ID NO: 275672 - DNA, 201 bp, Homo sapiens
ttgacttagggtggagagttctgtagatgtctattaggtctgcttggtgcagagctgagttcaggtcctggatatccttgttaacctttggtcttgttgawctgtctaatatcgacagtgggatgttaaagtctctcattattattgtgtgggagtctaagtctctgtgtaggtctctaagaacttgctttatgaatctag

SEQ ID NO: 275673 - DNA, 201 bp, Homo sapiens
tgcagctaattttttgcatttttagtagagatagggtttcaccatgttggccaggctggtctccaactcctggcctcccgtgatacgcccaccttgacctyccaaagtgctgggactacaggtgtgagccaccacgcccagcacacatagaatttttgactccctaaaaatttaactattaatagcctactgtgcactaga

SEQ ID NO: 275674 - DNA, 201 bp, Homo sapiens
ggagagttctgtagatgtctattaggtctgcttggtgcagagctgagttcaggtcctggatatccttgttaacctttggtcttgttgaactgtctaatatygacagtgggatgttaaagtctctcattattattgtgtgggagtctaagtctctgtgtaggtctctaagaacttgctttatgaatctaggtgctcctgtat

SEQ ID NO: 275675 - DNA, 201 bp, Homo sapiens
agtgctgggactacaggtgtgagccaccacgcccagcacacatagaatttttgactccctaaaaatttaactattaatagcctactgtgcactagaagccktaccaataacagaaacagttgcttaacacatatttggcatgttatatgtgttatatactgtattatcataatgaagtcagctagagaaaagaaaatgtta

SEQ ID NO: 275676 - DNA, 201 bp, Homo sapiens
actattaatagcctactgtgcactagaagccttaccaataacagaaacagttgcttaacacatatttggcatgttatatgtgttatatactgtattatcayaatgaagtcagctagagaaaagaaaatgttattaagaaaatcttaaggaagagaaaattaagtattcattaagtggaagtggatcatgataaaggtcttc

SEQ ID NO: 275677 - DNA, 201 bp, Homo sapiens
tgttgattcctctggtgtggtgtctattcattcttgaatttctcacagattcatatcttgaaagaccatatcccccaccttttgttgctgaattagagatrttgggtttgcaggcaagtagaccactttgacaccttcagtgttgaactcatgggttctgggtggctaggggcattgtccaaaaatcaaaagaactttgaa

SEQ ID NO: 275678 - DNA, 201 bp, Homo sapiens
acagatttgacaagttctattaataattgcataaaatactttactttggatgcaatgtagtttttaaccaattaatattgatatagatttaggcattttgyattttttgtctttatgaatagggccgtgtaaacactctttaatactttccttacatgaatatatttccatattcttgcttttatcttagttgactagagc

SEQ ID NO: 275679 - DNA, 201 bp, Homo sapiens; identical to SEQ ID NO: 54873

SEQ ID NO: 275680 - DNA, 201 bp, Homo sapiens
aaaaaggattctttactgaactgtgatttgacattttcatttgtttcatttcaaatttctttccagtttaacaaattattttgtgccaatgcgtgtactcrtcagtagcaaattttataaaactgcccttcttgaagatatgtatttataacttataaaattgtggatcatattcagcctacatttttaagtaccatgttt

SEQ ID NO: 275681 - DNA, 201 bp, Homo sapiens
taaacctccaaaacaagatgccggaagttgccagtcctcagaagccttcacagttactgatcctcccactctgttaaagactgttccttcagaggaccccygttttctagttagtatagcagatttgttttctaatcatattatgttctttctttacgttctgctctttttgcccctcccaggtcctgtggcggtacactg

SEQ ID NO: 275682 - DNA, 201 bp, Homo sapiens
ttaacaaattattttgtgccaatgcgtgtactcgtcagtagcaaattttataaaactgcccttcttgaagatatgtatttataacttataaaattgtggawcatattcagcctacatttttaagtaccatgtttagaaaagtaccaaaaaccacagtaagaaatgaaacttcccttttttgttaattctatatgcccgccc

SEQ ID NO: 275683 - DNA, 201 bp, Homo sapiens
tgtggatcatattcagcctacatttttaagtaccatgtttagaaaagtaccaaaaaccacagtaagaaatgaaacttcccttttttgttaattctatatgmccgccccagaggaaatggtcttagttttgtgaacattcttttaatgtttttaaaaaagtactttaggtatatacaatatctaatgtaaattctcacacct

SEQ ID NO: 275684 - DNA, 201 bp, Homo sapiens
ggcattcagaagaggaattcagactgtgcaagatctgaggccaggctccagctcccccagtcccttggtgagcaggagctccctgaacccaccatgggtcyttgctagggttgtcttgcccatgtgtgctttagatagcagcacctcttcttccatggtgtatatggagaatcctcaacaaagtcttcccaagaatctgat

SEQ ID NO: 275685 - DNA, 201 bp, Homo sapiens
atcctcaacaaagtcttcccaagaatctgatcatcacatcttgagctcagcctccctgcagctttttctatattgacagccacttcagagagagtcctctytgatccttacaagaaatatcctggtgcgaaaaacgaccaaaaccacatagccagcctccacgctgttcagagaaagctggcttagcaatgttgtatggtt

SEQ ID NO: 275686 - DNA, 201 bp, Homo sapiens
caccaccacagtcagcaaatttttgtatttttagtagacatggggttttgccatgttggccaggttggtcttgaactcctgacttcagatgatctgccctyctcagcctcccaaagtcctgggattacaggcatgggccaccacgcccggccaagaaatgttatctttcacagatgcagatgtacaaaagggacatctctt

SEQ ID NO: 275687 - DNA, 201 bp, Homo sapiens
ggtgtataaaatatatgcatttatatgcctttaaggaatatacatatgataggatttatagatgtggaaggttatgtattaatgtatatatttataaatakaaaataaatataattatcaaagaagaattcagatcataaagagtgccctttggcaaagagccctggatatggctcaaccacaaaagtaaattgtcataga

SEQ ID NO: 275688 - DNA, 201 bp, Homo sapiens
ctcctcacttcccagacggggtggcggccgggcagaggctgcaatctcggcactttgggaggccaaggcaggcggctgggaggtgtaggttgtagtgagcsgagatcacgccactgcactccagcctgggcaccattgagcactgagtgaacgagactccgtctgcaatcccggcacctcgggaggccgaggttggcggat

SEQ ID NO: 275689 - DNA, 201 bp, Homo sapiens
tagagcaccacaccctgtaattgcctagttgtgagtttgtctctgttcacctgacccctcctttcaggcaaggaccatttctaacttggctttctgtccckagttcctagcatagtaggtagggctcacacattccataaatatttggtggataagggaattagcaatggattctgctttggttccaaagcagagattaat

SEQ ID NO: 275690 - DNA, 201 bp, Homo sapiens
aggcttaagtttaataaatagcaaattgcatacagatattttacaacgattgaaagacaaacagaggtcctatccgtgtagtcccaacgataagaacaggygttggcatgaagtgtttataaattcttgggtacagctgttctgaaagtaaagttcactttcaatcctaaaaaaagtccgctattcctccagatgtgctta

SEQ ID NO: 275691 - DNA, 201 bp, Homo sapiens
ccagtatctttttagaaatgccctagaaatagcctctgaaattctccaaacccctgtcacggcatatgatctctacagtcacacatcaatttggttgttgygaacggactttgttttggactatcccaaacccgtgatgcccaacatgatcttcattggtggtatcaactgtcatcagggaaagccattgcctatggtaag

SEQ ID NO: 275692 - DNA, 201 bp, Homo sapiens
ggacagtcagctgtcggtggcttctgctgagatggccagaggactccaggttcccctgccgcggctggccacaggactgctgctcctcctcagtgtccagmcctgggctgagagtggaaaggtgttggtggtgcccactgatggcagcccctggctcagcatgcgggaggccttgcgggagctccatgccagaggccacca

SEQ ID NO: 275693 - DNA, 201 bp, Homo sapiens
tcctttaggagctcttgtaaggcaggcctggtggtgacaaaatctctcagcatttgcttgtctataaaggattttatttctccttcacttatgaagcttastttggctgcatatgaatttctgggttgaaaattcttttctttaagaatgttgaatattggcccccactctcttctgtcttgtagggtttctgcagagaga

SEQ ID NO: 275694 - DNA, 201 bp, Homo sapiens
tgcaataggttcgaacatgcacttttagcttggagaggtttgttactaccaaacttctgaagcctacttctgtcaactcgtcaaagtcattctctttccakctttgctccattgctagcaaggagctgtgatcctttggaggagatgtgcttatgcgctatggtttttagaattttcagcttttctgctctagtttccccc

SEQ ID NO: 275695 - DNA, 201 bp, Homo sapiens
cttggatgtccaggcagacgtttgctgcatggatagagtccttatagagaacctctgctagagaagggtggtaaagaaatgtgaggttggagcccccacasagagtctccactggggcactgcctagtggagttgtgagaagaaggccacagtccttcagaacccagaagggcagatccaatagcttgcactgtgtgcctg

SEQ ID NO: 275696 - DNA, 201 bp, Homo sapiens
cattttaaaaggagatttttcaattctaaaaattctttaaataaaatgctcttgcagggacaacatagtaggtcaacattgttcccatctccacaaaaagttttttttttaattagctaggtgtggtagcatttctgtagtcctagctactgggaatgctgaggaggaaggatcacttgagcccaggaattcgtggttaca

SEQ ID NO: 275697 - DNA, 201 bp, Homo sapiens
gagtgtgtccaatggtgacctattaacttatgtcttcagcttaaaaagaaagtaccttcaaaagggttccagaaacactttccatggacatgtcactcttyagtagcccccaaagcaagaccatcatattgctgccctgctgtgtgacttcttagcccctagagcaccacaccctgtaattgcctagttgtgagtttgtct

SEQ ID NO: 275698 - DNA, 201 bp, Homo sapiens
atatttccatattcttgcttttatcttagttgactagagccctacatgtagggttacaggatttccatgaattgagaaggattggcatttttttgctattrtgtcttcctgttcaggaatatgtatgtctcactatttattcagatcttgttttatatacataaataaaatttttcactatataagcattttctgtttctt

SEQ ID NO: 275699 - DNA, 201 bp, Homo sapiens
gtttgctgcatggatagagtccttatagagaacctctgctagagaagggtggtaaagaaatgtgaggttggagcccccacacagagtctccactggggcaytgcctagtggagttgtgagaagaaggccacagtccttcagaacccagaagggcagatccaatagcttgcactgtgtgcctggaagagccacagacatcaa

SEQ ID NO: 275700 - DNA, 201 bp, Homo sapiens; identical to SEQ ID NO: 54935

SEQ ID NO: 275701 - DNA, 201 bp, Homo sapiens; identical to SEQ ID NO: 54886

SEQ ID NO: 275702 - DNA, 201 bp, Homo sapiens
gggggaagggacttgacttgtctcagatgagaccttggactatggacttttgagctagtgctgaaatgagttaagactttggaggacagttgggaaggcaygattggtttttaaatgtgaaaagacatgagatttgggatgggccagagggcagaatgatatgatttgactgtgtgtttccacccaaatctcatctcatat

SEQ ID NO: 275703 - DNA, 201 bp, Homo sapiens
aaacctatatatgattttatatcacctatgatagagggttatctataaaatatgaaacatcaaactatatatggtttcatttattttgattataaatatcttttatgagatatgaaataaatgtgtttatgtgtctattaaagaatatggatgtatgaaagtttttatacttgtggaagattacatatattaatgtatgta

SEQ ID NO: 275704 - DNA, 201 bp, Homo sapiens
ggcttaagtttaataaatagcaaattgcatacagatattttacaacgattgaaagacaaacagaggtcctatccgtgtagtcccaacgataagaacaggtrttggcatgaagtgtttataaattcttgggtacagctgttctgaaagtaaagttcactttcaatcctaaaaaaagtccgctattcctccagatgtgcttaa

SEQ ID NO: 275705 - DNA, 201 bp, Homo sapiens
aacctatatatgattttatatcacctatgatagagggttatctataaaatatgaaacatcaaactatatatggtttcatttattttgattataaatatcttttatgagatatgaaataaatgtgtttatgtgtctattaaagaatatggatgtatgaaagtttttatacttgtggaagattacatatattaatgtatgtat

SEQ ID NO: 275706 - DNA, 201 bp, Homo sapiens
tttaataaatagcaaattgcatacagatattttacaacgattgaaagacaaacagaggtcctatccgtgtagtcccaacgataagaacaggtgttggcatraagtgtttataaattcttgggtacagctgttctgaaagtaaagttcactttcaatcctaaaaaaagtccgctattcctccagatgtgcttaaagtcaaat

SEQ ID NO: 275707 - DNA, 201 bp, Homo sapiens
gatccaaattcaaagttagcttttggtggacaagactaaggcctcccactaaaattatttacttcaagtttttattttcaaagttttcaaacatacacaayggagagactcagtgtaatgagcacccacttatccattcttaggttaaataattttcactattttgctctactaattcatctatccctttattctatcttt

SEQ ID NO: 275708 - DNA, 201 bp, Homo sapiens
agaagaaaaaacacccccaaaagctggaaattcactgaaggcagagaaaaggggtgcagacgctctgcttctgcttccccagcagttcctctgaccccccmaaaatattctccagcgggtttcccaagaggtcaaaggagaatgggtcctggccgccgaagaactccctgaagacgtcggctgggtcgcggaagctgaaga

SEQ ID NO: 275709 - DNA, 201 bp, Homo sapiens
tgttctgaaagtaaagttcactttcaatcctaaaaaaagtccgctattcctccagatgtgcttaaagtcaaatgtggactggaattacttggtgtcaatgsggagtaactgctctttgctatttattatgaaggactttaactcaactctccatcttcctccacttccaccctttcttggccattctcaatgattctcttg

SEQ ID NO: 275710 - DNA, 201 bp, Homo sapiens
gcttttggtggacaagactaaggcctcccactaaaattatttacttcaagtttttattttcaaagttttcaaacatacacaatggagagactcagtgtaaygagcacccacttatccattcttaggttaaataattttcactattttgctctactaattcatctatccctttattctatctttttaaagaaaacttttaaa

SEQ ID NO: 275711 - DNA, 201 bp, Homo sapiens
tgaaagtaaagttcactttcaatcctaaaaaaagtccgctattcctccagatgtgcttaaagtcaaatgtggactggaattacttggtgtcaatgcggagyaactgctctttgctatttattatgaaggactttaactcaactctccatcttcctccacttccaccctttcttggccattctcaatgattctcttggtggt

SEQ ID NO: 275712 - DNA, 201 bp, Homo sapiens
gttcactttcaatcctaaaaaaagtccgctattcctccagatgtgcttaaagtcaaatgtggactggaattacttggtgtcaatgcggagtaactgctctwtgctatttattatgaaggactttaactcaactctccatcttcctccacttccaccctttcttggccattctcaatgattctcttggtggtgattttttta

SEQ ID NO: 275713 - DNA, 201 bp, Homo sapiens
gatgggagcaatcatgccccaaacatcagcatcacacaatatactcaggtaacctgcacatgtactcctgaatctaaaataaaagttgagtatgtataagwggaagtgaatcatcataaaggtctccatcctcatcatcttccattgagtgggctgtggaggaggaggagtagatgttgattttgctgtctcagggtggca

SEQ ID NO: 275714 - DNA, 201 bp, Homo sapiens
gcaatcatgccccaaacatcagcatcacacaatatactcaggtaacctgcacatgtactcctgaatctaaaataaaagttgagtatgtataagtggaagtsaatcatcataaaggtctccatcctcatcatcttccattgagtgggctgtggaggaggaggagtagatgttgattttgctgtctcagggtggcagaggcag

SEQ ID NO: 275715 - DNA, 201 bp, Homo sapiens
aatcatgccccaaacatcagcatcacacaatatactcaggtaacctgcacatgtactcctgaatctaaaataaaagttgagtatgtataagtggaagtgawtcatcataaaggtctccatcctcatcatcttccattgagtgggctgtggaggaggaggagtagatgttgattttgctgtctcagggtggcagaggcagaa

SEQ ID NO: 275716 - DNA, 201 bp, Homo sapiens; identical to SEQ ID NO: 55093

SEQ ID NO: 275717 - DNA, 201 bp, Homo sapiens
gcaggagaggcaggtgcacttggtgtaaccttatggaaatacatcataattactgtctgtttttttctctttgatgtatttaaaaatgcttttatacagtrctaatccttcttccccatttgctttagtttcagtgcccataagggttcatgtcttaatagaagtcaatagcagtcttaaataattggaagcatttctatg

SEQ ID NO: 275718 - DNA, 201 bp, Homo sapiens
agtatcccaaacccgtgatgcccaatatgatcttcattggtggtatcaactgtcatcagggaaagccagtgcctatggtaagttatctcccctttagcacwttaagaataatctggctttggaaattaaaagatttcttacagaatcataatttatcatttacatttgtcccatttggaatttctttctggtttaaggaat

SEQ ID NO: 275719 - DNA, 201 bp, Homo sapiens
agtggatgtagctctcagcagatgggggaagccagaaggggatggaatgggaagggtttcccctggagtcagaccgctcagtggcccgggctcggtggccygggctcggtggcctgggctctcctccgactgcctcagccaaactccgcgttgttctgctggtcagtggcctgccggtgcctgttggtgagttcttctcaa

SEQ ID NO: 275720 - DNA, 201 bp, Homo sapiens
gttaattctatatgcccgccccagaggaaatggtcttagttttgtgaacattcttttaatgtttttaaaaaagtactttaggtatatacaatatctaatgyaaattctcacacctattttgttaaaataaaatctagtattgggctggacatattcttcttttctttgcatttttcacttgccaataaattataaatacct

SEQ ID NO: 275721 - DNA, 201 bp, Homo sapiens
ttaaggttttgttttttgcatatgtatcttgtatccagccacattactaacttatcttattattttgtagtatacagtagatgtacaatatacaatgtcawctgcaaagaattcccttctctgatatttataccacttattttgctttgctggagcttatacttccaaagcactattgagtaatattgtgagagtagccag

SEQ ID NO: 275722 - DNA, 201 bp, Homo sapiens
taggctaggagatgcaaatggcagaaatctaagaggttagacttgtctaagcacttttctcccctttaccctccataaattatagtatcctccattaattrtagtaacaggcaccacttatgtgttgcctgcaccccacaacctttggctgagggtaaggccctgccacttcctgaacccacactgaatttattgtgcctc

SEQ ID NO: 275723 - DNA, 201 bp, Homo sapiens; identical to SEQ ID NO: 54795

SEQ ID NO: 275724 - DNA, 201 bp, Homo sapiens
tgagctttttcagagagaggtgtcagtggtggatattctcagtcatgcatctgtgtggctgttccgaggggactttgtgatggactaccccaggccaatcrtgcccaacatggtcttcattgggggcatcaactgtgccaacaggaagccactatctcaggtctgtattggtgccttcatccaatcaatgttccaggcaaa

SEQ ID NO: 275725 - DNA, 201 bp, Homo sapiens
gctctgtcctccctcactcatttggctccttgagccgactgtcccttggaggatttcctggagaaacggtggggggaagtgatacccggctcggagcagcrggaacacataggagacctgaggctgaagtgatacagaggcattcggatgaagacagggctcatgcttggcaagagtaggagatttgcttagttggataat

SEQ ID NO: 275726 - DNA, 201 bp, Homo sapiens; identical to SEQ ID NO: 55099

SEQ ID NO: 275727 - DNA, 201 bp, Homo sapiens
atctggctttggaaattaaaaaaggattccttactgaactgtgatttgacattttcgtttgttgcatttcaaatttctttccagtttaacaaattattttstgcgaattcatgtactcatcaattatcaaattttataaaactgcccttcttgaaagtatatgtaataatttaaaaattatagatcatattcaggctacat

SEQ ID NO: 275728 - DNA, 201 bp, Homo sapiens
ttcagatgccaggatgtgtctgggaaaagcatgcagttggttacatcttgctgggaaacaggattcagagtctgagtctcatctgtctgatgagaaggaarcattacttgatgatagagtatgtgtttgcacatgtatgtgtttgtgtatgtgcaggtgtgtttgcgtgcagtgtcccagaccctgcacaggggatttctt

SEQ ID NO: 275729 - DNA, 201 bp, Homo sapiens; identical to SEQ ID NO: 54904

SEQ ID NO: 275730 - DNA, 201 bp, Homo sapiens
ctcctatattcctagattactaacgaccaattcagaccacatgacattcctgcaaagggtcaagaacatgctctaccctctggccctgtcctacctttgcyatgctgtttctgctccttatgcaagccttgcctctgagctttttcagagagaggtgtcagtggtggatcttgtcagccatgcatctgtgtggctgttccg

SEQ ID NO: 275731 - DNA, 201 bp, Homo sapiens; identical to SEQ ID NO: 54932

SEQ ID NO: 275732 - DNA, 201 bp, Homo sapiens; identical to SEQ ID NO: 54800

SEQ ID NO: 275733 - DNA, 201 bp, Homo sapiens
actttcaatcctaaaaaaagtccgctattcctccagatgtgcttaaagtcaaatgtggactggaattacttggtgtcaatgcggagtaactgctctttgcyatttattatgaaggactttaactcaactctccatcttcctccacttccaccctttcttggccattctcaatgattctcttggtggtgatttttttaccat

SEQ ID NO: 275734 - DNA, 201 bp, Homo sapiens
ctttcaatcctaaaaaaagtccgctattcctccagatgtgcttaaagtcaaatgtggactggaattacttggtgtcaatgcggagtaactgctctttgctrtttattatgaaggactttaactcaactctccatcttcctccacttccaccctttcttggccattctcaatgattctcttggtggtgatttttttaccatc

SEQ ID NO: 275735 - DNA, 201 bp, Homo sapiens
tactgcattagagattaaaacagaattaaaaagacatattaattgggcaatttagtaagaataaacccatgacacaatagcaaatcttatttttatgtaamttttattaagacaaaatgtagtgagaagagtggcatcgttttacagtttttgcatctctctttagtacttggctctatagagaggtggattctcatgtca

SEQ ID NO: 275736 - DNA, 201 bp, Homo sapiens
tctgctccttatgcaagccttgcctctgagctttttcagagggaggtgtcagtggtggatcttctcagccatgcatctgtgtggctgttccgaggggactytgtgatggattaccccaggccgatcatgcccaacatggtcttcattgggggcatcaactgtgccaacaggaagccactatctcaggtcggtgttcgtgcc

SEQ ID NO: 275737 - DNA, 201 bp, Homo sapiens
aggaaataatcattgtctgcctcaggcttaagtttaataaatagcaaattgcatacagatatttacaatgatcgaaagacaaacagaggtcctatccgtgyagtcccaacaataaagacaggcattggcataaagtgtttataaattcttgggtacagctgttctgaaagtaaagttcactttcaatcctaaaaaaagtcc

SEQ ID NO: 275738 - DNA, 201 bp, Homo sapiens
ggcataaagtgtttataaattcttgggtacagctgttctgaaagtaaagttcactttcaatcctaaaaaaagtccgctattcctccagatgtgcttaaagkcaaatgtggactggaattacttggtgtcaatggggagcaactgctctatgccgtttattatgaaggactttaactcaactctccatcttcctccacttcc

SEQ ID NO: 275739 - DNA, 201 bp, Homo sapiens
agcatttctatgaggcttgtattgtgtaaggccaattttttttctggcactgcttcttctacatcttctttctcatcaagtactgattggaaagcactcatctctatcaggtcatctattgattccctgagtgtggcatctattgtctcttgaatttctccaagagtcatattttgaaataccttatccccaacattttgt

SEQ ID NO: 275740 - DNA, 201 bp, Homo sapiens
tgttctgaaagtaaagttcactttcaatcctaaaaaaagtccgctattcctccagatgtgcttaaaggcaaatgtggactggaattacttggtgtcaatgsggagcaactgctctatgccgtttattatgaaggactttaactcaactctccatcttcctccacttccaccctttcttggccattctcaatgattctcttg

SEQ ID NO: 275741 - DNA, 201 bp, Homo sapiens
aaatattctccagcgggtttcccaagaggtcaaaggagaatgggtcccggccgccaaagaactccctgaagacctcggcggggtcacggaagctgaagacstactcgaaggggtccttgaagggcctgccgcctgcgcagccgccctccgccctcgcctcgccatagcggtcatagatatcgcgtttctacgcgtccgaca

SEQ ID NO: 275742 - DNA, 201 bp, Homo sapiens
gcatttctatgaggcttgtattgtgtaaggccaattttttttctggcactgcttcttctacatcttctttctcatcaagtactgattggaaagcactcatctctatcaggtcatctattgattccctgagtgtggcatctattgtctcttgaatttctccaagagtcatattttgaaataccttatccccaacattttgtt

SEQ ID NO: 275743 - DNA, 201 bp, Homo sapiens
tgaaagtaaagttcactttcaatcctaaaaaaagtccgctattcctccagatgtgcttaaaggcaaatgtggactggaattacttggtgtcaatggggagyaactgctctatgccgtttattatgaaggactttaactcaactctccatcttcctccacttccaccctttcttggccattctcaatgattctcttggtggt

SEQ ID NO: 275744 - DNA, 201 bp, Homo sapiens
tttctatgaggcttgtattgtgtaaggccaattttttttctggcactgcttcttctacatcttctttctcatcaagtactgattggaaagcactcatctctatcaggtcatctattgattccctgagtgtggcatctattgtctcttgaatttctccaagagtcatattttgaaataccttatccccaacattttgttgct

SEQ ID NO: 275745 - DNA, 201 bp, Homo sapiens
gttcactttcaatcctaaaaaaagtccgctattcctccagatgtgcttaaaggcaaatgtggactggaattacttggtgtcaatggggagcaactgctctwtgccgtttattatgaaggactttaactcaactctccatcttcctccacttccaccctttcttggccattctcaatgattctcttggtggtgattttttta

SEQ ID NO: 275746 - DNA, 201 bp, Homo sapiens
ttctatgaggcttgtattgtgtaaggccaattttttttctggcactgcttcttctacatcttctttctcatcaagtactgattggaaagcactcatctctatcaggtcatctattgattccctgagtgtggcatctattgtctcttgaatttctccaagagtcatattttgaaataccttatccccaacattttgttgctg

SEQ ID NO: 275747 - DNA, 201 bp, Homo sapiens
actttcaatcctaaaaaaagtccgctattcctccagatgtgcttaaaggcaaatgtggactggaattacttggtgtcaatggggagcaactgctctatgcygtttattatgaaggactttaactcaactctccatcttcctccacttccaccctttcttggccattctcaatgattctcttggtggtgatttttttaccat

SEQ ID NO: 275748 - DNA, 201 bp, Homo sapiens
tatgaggcttgtattgtgtaaggccaattttttttctggcactgcttcttctacatcttctttctcatcaagtactgattggaaagcactcatctctatcaggtcatctattgattccctgagtgtggcatctattgtctcttgaatttctccaagagtcatattttgaaataccttatccccaacattttgttgctgtat

SEQ ID NO: 275749 - DNA, 201 bp, Homo sapiens
ctttcaatcctaaaaaaagtccgctattcctccagatgtgcttaaaggcaaatgtggactggaattacttggtgtcaatggggagcaactgctctatgccrtttattatgaaggactttaactcaactctccatcttcctccacttccaccctttcttggccattctcaatgattctcttggtggtgatttttttaccatc

SEQ ID NO: 275750 - DNA, 201 bp, Homo sapiens
tttttcttaaagtaggctttatatcagtctttttcctcggccacaggagggaagagggtggtgggagtgagtttagtctgaccggggctgaagacatcctrttgtttaggactgcggttctccaacgttccagccccggtgcccatttgcttttgttcatctggattatgcctatcatatgtactgcattagagattaaaa

SEQ ID NO: 275751 - DNA, 201 bp, Homo sapiens
atgaggcttgtattgtgtaaggccaattttttttctggcactgcttcttctacatcttctttctcatcaagtactgattggaaagcactcatctctatcaggtcatctattgattccctgagtgtggcatctattgtctcttgaatttctccaagagtcatattttgaaataccttatccccaacattttgttgctgtatc

SEQ ID NO: 275752 - DNA, 201 bp, Homo sapiens
atctcagcaaaagctactcatatattcttgttcttttgggtaaatcattgtcagtgactgatttttttttatgaaaggataaaaacacgccctctattggrgtcaggttttgtgctggtatttctcccacctactgtatcataggagcttagattcccagctgcttgctctcagctgcagttctctgatggcttgcacagg

SEQ ID NO: 275753 - DNA, 201 bp, Homo sapiens
ggcctgtgagcgcctcgcatcccaagatgcagtgctcctgggactggccctgctctctgtgaggctctgtgaggccctgtgatgctccaagaccaggcccsgcccactccggcctccaaccagccatggtctccaaaaaggatgggaaaaagaggttggggaaaagagagggccttgactttggctgcctgaagaactgtt

SEQ ID NO: 275754 - DNA, 201 bp, Homo sapiens
taagaagaataaacccatgacacactaacaaacctttttatgtaactttttttgagacaaaatgtagtgagaagagtggcatcgttttacagtttttgcayctctctttagtacttggctctatagagaggtggattctcatgtcagcttctgcattctatctattgtgatattacacatcccccatgtagcttctggaaa

SEQ ID NO: 275755 - DNA, 201 bp, Homo sapiens
agtttttgcatctctctttagtacttggctctatagagaggtggattctcatgtcagcttctgcattctatctattgtgatattacacatcccccatgtarcttctggaaaactccactgtacacttgtgggagaatgacaatgagaaaatcaagtaacattattacggaaatagttttgactttgtaaaattctcctgaa

SEQ ID NO: 275756 - DNA, 201 bp, Homo sapiens
tgaggcttgtattgtgtaaggccaattttttttctggcactgcttcttctacatcttctttctcatcaagtactgattggaaagcactcatctctatcaggtcatctattgattccctgagtgtggcatctattgtctcttgaatttctccaagagtcatattttgaaataccttatccccaacattttgttgctgtatcc

SEQ ID NO: 275757 - DNA, 201 bp, Homo sapiens
aggcttgtattgtgtaaggccaattttttttctggcactgcttcttctacatcttctttctcatcaagtactgattggaaagcactcatctctatcaggtcatctattgattccctgagtgtggcatctattgtctcttgaatttctccaagagtcatattttgaaataccttatccccaacattttgttgctgtatccat

SEQ ID NO: 275758 - DNA, 201 bp, Homo sapiens
tgtcataaatcctgtgaagtcatgtgcaacatctggtcacagttttctccagaagaaatgtactgtttggggcttggtggctttcaaagctctttctatartaacagtggcatcttcagtggtgtaatccttctggactttcatgacattctctatccagattctctttcctagtattgacaaccttttccatagaaaact

SEQ ID NO: 275759 - DNA, 201 bp, Homo sapiens
ttgatggaaccaatccagaaaacgcgttcttattgttgagtccttctttttgtacaacaataaaactgtcagtgagtgttgatcttttcctttcaaggctygaggtttggcagttctactgatgagggcagtcctgactgtaaacttgactgcatttacacaaaacagtagagttagcctatcccttcctgccttacattc

SEQ ID NO: 275760 - DNA, 201 bp, Homo sapiens
actctttattaccgttgttactttaactctttccaggatggcctgcctccttcgctcatttcagagaatttctgcaggggttttcttcttagcactttggkgcatggttgtaggtgacaagctgctggtggtccctcaggacggaagccactggcttagtatgaaggatatagttgaggttctcagtgaccggggtcatga

SEQ ID NO: 275761 - DNA, 201 bp, Homo sapiens; identical to SEQ ID NO: 55070

SEQ ID NO: 275762 - DNA, 201 bp, Homo sapiens
gtgttgcctgcaccccacaacctttggctgagggtaaggccctgccacttcctgaacccacactgaatttattgtgcctcacagcgtcacccagaggcctwtagagatataaaaacctatatatgattttatatcacctatgatagagggttatctataaaatatgaaacatcaaactatatatggtttcatttattttga

SEQ ID NO: 275763 - DNA, 201 bp, Homo sapiens; identical to SEQ ID NO: 55071

SEQ ID NO: 275764 - DNA, 201 bp, Homo sapiens; identical to SEQ ID NO: 54774

SEQ ID NO: 275765 - DNA, 201 bp, Homo sapiens
ttgtttcttccaggctctgtcctccctcactcatttggctccttgagccgactgtcccttggaggatttcctggagaaacggtggggggaagtgataccckgctcggagcagcgggaacacataggagacctgaggctgaagtgatacagaggcattcggatgaagacagggctcatgcttggcaagagtaggagatttgc

SEQ ID NO: 275766 - DNA, 201 bp, Homo sapiens; identical to SEQ ID NO: 55075

SEQ ID NO: 275767 - DNA, 201 bp, Homo sapiens
ttttggaaaactagcacattacctggattttgcatctcaaggataattctgtaagcaggaacccttcctcctttagaaggaagtaaaggagaggaaaatgmtgtaaaacttacatattaataattttttactctatctcaaacacgcatgcctttaatcatagtcttaagaggaagatatctaattcataacttactgtat

SEQ ID NO: 275768 - DNA, 201 bp, Homo sapiens
ttgatgttaagtggtattttcattcaatttgcaattgttcattgctagtacagttgacccttgaacaatgtggagattagggataccaacctcgcaggtaktctaaaatccacatatcattttgacccccataacttaactattaatagcctactgtatagcagaagccttaccaataacgtaaatagccaatgaacacat

SEQ ID NO: 275769 - DNA, 201 bp, Homo sapiens
atccctcagacagtaagaagattctataccatggcctcatatctattttcacaggagcgctaatcccagacttccagcttccagattaattctcttaattrgaaccttagatttggcttttccctgccacttcccaactattaatccaaaggttttttttgttgttgtggttgttgtcattgttttcaatttgactctcaa

SEQ ID NO: 275770 - DNA, 201 bp, Homo sapiens
cacatcttgagctcagcctccctgcagctttttttatattgacagccacttcagagagagtcctctttgagctttacaagaaatatcctggtgtgaaaaaygaccaaaaccagatagccagcctccccactccctgtttaaagaaagctggcttagcaatgttgtctgcattttggatgtgctgtgttacccatatgtggg

SEQ ID NO: 275771 - DNA, 201 bp, Homo sapiens; identical to SEQ ID NO: 55012

SEQ ID NO: 275772 - DNA, 201 bp, Homo sapiens
acatcccccatgtagcttctggaaaactccactgtacacttgtgggagaatgacaatgagaaaatcaagtaacattattacggaaatagttttgactttgyaaaattctcctgaaaaattactggggatccctaggatttcctggctcatactttgagaatcgctagtctagcagagtagtccctggtattctgaagggat

SEQ ID NO: 275773 - DNA, 201 bp, Homo sapiens
tcccaggttcccaatcaggtccatttatgcaaatgaaggatggaaacttgcttagttcttattggtcactgcagctgcattctgattggttgatgaagctragccctgagtggctgaggtgggtgagctttaattggttggttcaggtgagcgctgaaaatctcaactataaaaaggtacaggttttcaggatactcagag

SEQ ID NO: 275774 - DNA, 201 bp, Homo sapiens
gaaagagggagagaaagaggggagagatgtggtgcagaccctagggaggaaggagttcagaaaaaccatcctcagggtgttcttgctacaaaccaaaaaaygcagcatggtggtggggaggatgactctgtcctccctgacttttagatgagcccaagggaaaaggcaaagacaaagcccttaagagccagaggactcacg

SEQ ID NO: 275775 - DNA, 201 bp, Homo sapiens
aacctctaggggagcatacagacgggcaggttgtggggctctgacctcaccggcagtgtctagaggtggatgtttacagctcctgaagctccagtgggcgkgggttatggccttcttttagttttgccctctatagtcagcttgtgttaaccagctcaattacaccctctaccttgtcgcaaggacagagggctttctgta

SEQ ID NO: 275776 - DNA, 201 bp, Homo sapiens
gagttcagaaaaaccatcctcagggtgttcttgctacaaaccaaaaaatgcagcatggtggtggggaggatgactctgtcctccctgacttttagatgagsccaagggaaaaggcaaagacaaagcccttaagagccagaggactcacgagggcctggggctggtgagagtggcggggagagagggctcaccttgggagaa

SEQ ID NO: 275777 - DNA, 201 bp, Homo sapiens
aaatcacattggcatctataaataagcctttcttatagcaatcctacacccacattaaagttgcattttcaatatgagacaaaaatgtatttcacaaaaaratgcgaggtttggctcctgctggcatagctgcagcaatgtcttcatgaatcttttcttctcttttctttctttctctctctctcttttttctttttctct

SEQ ID NO: 275778 - DNA, 201 bp, Homo sapiens
ggatttattgagtggatgtagctctcagcagatgggggaagccagaaggggatggaatgggaagggtttcccctggagtcagaccgctcagtggcccgggctcggtggcccgggctcggtggcctgggctctcctccgactgcctcagccaaactccgcgttgttctgctggtcagtggcctgccggtgcctgttggtgag

SEQ ID NO: 275779 - DNA, 201 bp, Homo sapiens
agttcagaaaaaccatcctcagggtgttcttgctacaaaccaaaaaatgcagcatggtggtggggaggatgactctgtcctccctgacttttagatgagcscaagggaaaaggcaaagacaaagcccttaagagccagaggactcacgagggcctggggctggtgagagtggcggggagagagggctcaccttgggagaag

SEQ ID NO: 275780 - DNA, 201 bp, Homo sapiens
aggccgagatgggcagattgcctgagctcaggagttcgagaccagcctgggcaacatggtgaaaccccgtctccactaaaatacaaaaagttagctgggcrtggcagcgtgcgcctgtaatcccagctactgaggctgaggcaggagaatcgtttgaacccaggaagtggaggttgcagtgagcctagatcttaccactgc

SEQ ID NO: 275781 - DNA, 201 bp, Homo sapiens
gatttattgagtggatgtagctctcagcagatgggggaagccagaaggggatggaatgggaagggtttcccctggagtcagaccgctcagtggcccgggctcggtggcccgggctcggtggcctgggctctcctccgactgcctcagccaaactccgcgttgttctgctggtcagtggcctgccggtgcctgttggtgagt

SEQ ID NO: 275782 - DNA, 201 bp, Homo sapiens
caagaccaggcgaggagatgcaagttgtaggacgctaagaggatagacttgtcaaagtgtctctcccctgtttaccctccatcaattacagcaccagccaycactcaggtattgcctgcagcctcaccctctagccaagtgtgtggcctgccactttctgaacccatgctgagttttttgtggctcaaagggtcacccaaa

SEQ ID NO: 275783 - DNA, 201 bp, Homo sapiens
tttattgagtggatgtagctctcagcagatgggggaagccagaaggggatggaatgggaagggtttcccctggagtcagaccgctcagtggcccgggctcggtggcccgggctcggtggcctgggctctcctccgactgcctcagccaaactccgcgttgttctgctggtcagtggcctgccggtgcctgttggtgagttc

SEQ ID NO: 275784 - DNA, 201 bp, Homo sapiens
gttcagaaaaaccatcctcagggtgttcttgctacaaaccaaaaaatgcagcatggtggtggggaggatgactctgtcctccctgacttttagatgagccmaagggaaaaggcaaagacaaagcccttaagagccagaggactcacgagggcctggggctggtgagagtggcggggagagagggctcaccttgggagaagg

SEQ ID NO: 275785 - DNA, 201 bp, Homo sapiens
ctccatcaattacagcaccagccaccactcaggtattgcctgcagcctcaccctctagccaagtgtgtggcctgccactttctgaacccatgctgagtttkttgtggctcaaagggtcacccaaagggatttagagatgtagaaattatatatgattctataccacctataatggtatatgatagagagatctataaaata

SEQ ID NO: 275786 - DNA, 201 bp, Homo sapiens
tctgtcctccctgacttttagatgagcccaagggaaaaggcaaagacaaagcccttaagagccagaggactcacgagggcctggggctggtgagagtggcsgggagagagggctcaccttgggagaaggatggtcagtgtctggggctttcctggtcatgttccaaatcaggcttggcaggagtcctgctgtgcaaattgc

SEQ ID NO: 275787 - DNA, 201 bp, Homo sapiens
cattaaaacggttttgttttgtatttttaatagagacggggtttcaccatgttggccaggctggtctctgactcctgacctcaagtgatccgcccgcctcsgcctttcaaagtgttgagattacaggtgtgaaccaccacacccggacttaaagtggttttaatgagaaaaaaagaaaatcacttccacttttcttgactt

SEQ ID NO: 275788 - DNA, 201 bp, Homo sapiens
cctgggctctcctccgactgcctcagccaaactccgcgttgttctgctggtcagtggcctgccggtgcctgttggtgagttcttctcaatgtccagctgtycttgcgtccctccgctgatgtgctcctcccgatgtccagctacctgtgtgtctgcctgctagggtcttggggtttttataggcacatgatgggggcgtgg

SEQ ID NO: 275789 - DNA, 201 bp, Homo sapiens
cccattgctctcgcattctgtttttgatccaaattcaaatttacctgttactgggcaagcccaaggcctccctccaagattatttatttcaactttttatyatcaaagttttcgaacatataccaaggagaggctatggcataatgtgtacccatatagccattcttaagttaaataattttcaatatcttgctgtactgc

SEQ ID NO: 275790 - DNA, 201 bp, Homo sapiens
actagaggactttaggaggtggttcaatgtagtgtttgagcacgcggaccctggagtcctccaagcctgatttcataagtacttcagctgtgacacttgcrtaaacttgggtaaaaactcagcgttatctagattaaatatgataatacatgcagatgactggcatgtggctatgaatcagcaatacccgtaattgggtgg

SEQ ID NO: 275791 - DNA, 201 bp, Homo sapiens
tcagatgatgaaactgaggcacagaggggttgagtgacttgcccaaggttatgcctcaagtaagtgggggagccagaattcaagcccatacattctttgtaaaaaaaaaaaaaaaaaaaaggaaagaaaaaaaggctgagtgtggtggctcacacatgtaatcacagcactttaggaggccaaggcaggaagatcacttaa

SEQ ID NO: 275792 - DNA, 201 bp, Homo sapiens
atcttgttttggttggtgttacagaataacaccctcagcaaacatgagttcgtcttgtttttgttggtgttacagaataacatgcagctggctcttttttwaaaaatttaatattaaacgtccttcattgaacaaatatctgttgagagtctttgagtgactgggatatggccataatcaaatgaacatggctttgccatt

SEQ ID NO: 275793 - DNA, 201 bp, Homo sapiens
cctcaccagcaatggcagacatggccaggcatgtagacacagaggtagtgagatggaaagtgggcacagcccagagagcctgcccacctcatcctggggcraccaggacaaggaagcatcagcaatcttgcgagcacatgtaggagtgactttctggagcaggacgagcctcatgggcatgagaccattgtgagtgctcag

SEQ ID NO: 275794 - DNA, 201 bp, Homo sapiens; identical to SEQ ID NO: 54899

SEQ ID NO: 275795 - DNA, 201 bp, Homo sapiens
tgtgtccagctgtgaaactcagagatgtaactgctgacatcctccctattttgcatctcaggtcacccgatgacccgtgcctttatcacccatgctggttyccatggtgtttatgaaagcatatgcaatggcgttcccatggtgatgatgcccttgtttggtgatcagatggacaatgcaaagcgcatggagactaaggga

SEQ ID NO: 275796 - DNA, 201 bp, Homo sapiens; identical to SEQ ID NO: 54798

SEQ ID NO: 275797 - DNA, 201 bp, Homo sapiens
gcttattttctctattaatgagttcatccaaatgtttagaatttaatttttcacattgcaggagtttgtttaatgactgaaaattagtagaatacttaaargagagttcttttgatgcggtgtttctggatcctttagatatgtgtggcttaattgttgccaaatatttctccctcctctcggtggtcttcgccagaggaa

SEQ ID NO: 275798 - DNA, 201 bp, Homo sapiens
aaggggtgcagaccctctgcttctgcttcccagggagttcctctgaccccccaaaatattctccagcgggtttcccaagaggtcaaaggagaatgggtccyggccgccaaagaactccctgaagacctcggcggggtcacggaagctgaagacgtactcgaaggggtccttgaagggcctgccgcctgcgcagccgccctc

SEQ ID NO: 275799 - DNA, 201 bp, Homo sapiens; identical to SEQ ID NO: 54977

SEQ ID NO: 275800 - DNA, 201 bp, Homo sapiens
cgccgaagaactccctgaagacgtcggctgggtcgcggaagctgaagacgtactcgaaggggtcctcgaagggcctgccgcctgtgcagccgccctccgcscccgcctcgccatagcggtcatagatatcgcgtttcttggcgtccgacaacacctcgtaggcctcggccacctgcttgaatctcctctccgcttcctcct

SEQ ID NO: 275801 - DNA, 201 bp, Homo sapiens; identical to SEQ ID NO: 275709

SEQ ID NO: 275802 - DNA, 201 bp, Homo sapiens; identical to SEQ ID NO: 275708

SEQ ID NO: 275803 - DNA, 201 bp, Homo sapiens; identical to SEQ ID NO: 275519

SEQ ID NO: 275804 - DNA, 201 bp, Homo sapiens; identical to SEQ ID NO: 275711

SEQ ID NO: 275805 - DNA, 201 bp, Homo sapiens; identical to SEQ ID NO: 275335

SEQ ID NO: 275806 - DNA, 201 bp, Homo sapiens; identical to SEQ ID NO: 275712

SEQ ID NO: 275807 - DNA, 201 bp, Homo sapiens; identical to SEQ ID NO: 275326

SEQ ID NO: 275808 - DNA, 201 bp, Homo sapiens; identical to SEQ ID NO: 275446

SEQ ID NO: 275809 - DNA, 201 bp, Homo sapiens; identical to SEQ ID NO: 275481

SEQ ID NO: 275810 - DNA, 201 bp, Homo sapiens; identical to SEQ ID NO: 275316

SEQ ID NO: 275811 - DNA, 201 bp, Homo sapiens; identical to SEQ ID NO: 275567

SEQ ID NO: 275812 - DNA, 201 bp, Homo sapiens; identical to SEQ ID NO: 275376

SEQ ID NO: 275813 - DNA, 201 bp, Homo sapiens; identical to SEQ ID NO: 275483

SEQ ID NO: 275814 - DNA, 201 bp, Homo sapiens; identical to SEQ ID NO: 275378

SEQ ID NO: 275815 - DNA, 201 bp, Homo sapiens; identical to SEQ ID NO: 54924

SEQ ID NO: 275816 - DNA, 201 bp, Homo sapiens; identical to SEQ ID NO: 275690

SEQ ID NO: 275817 - DNA, 201 bp, Homo sapiens; identical to SEQ ID NO: 275656

SEQ ID NO: 275818 - DNA, 201 bp, Homo sapiens; identical to SEQ ID NO: 275658

SEQ ID NO: 275819 - DNA, 201 bp, Homo sapiens; identical to SEQ ID NO: 54932

SEQ ID NO: 275820 - DNA, 201 bp, Homo sapiens; identical to SEQ ID NO: 275733

SEQ ID NO: 275821 - DNA, 201 bp, Homo sapiens; identical to SEQ ID NO: 54934

SEQ ID NO: 275822 - DNA, 201 bp, Homo sapiens; identical to SEQ ID NO: 275734

SEQ ID NO: 275823 - DNA, 201 bp, Homo sapiens; identical to SEQ ID NO: 275800

SEQ ID NO: 275824 - DNA, 201 bp, Homo sapiens; identical to SEQ ID NO: 54935

SEQ ID NO: 275825 - DNA, 201 bp, Homo sapiens; identical to SEQ ID NO: 275736

SEQ ID NO: 275826 - DNA, 201 bp, Homo sapiens; identical to SEQ ID NO: 275704

SEQ ID NO: 275827 - DNA, 201 bp, Homo sapiens; identical to SEQ ID NO: 54942

SEQ ID NO: 275828 - DNA, 201 bp, Homo sapiens; identical to SEQ ID NO: 275706

SEQ ID NO: 275829 - DNA, 201 bp, Homo sapiens
gaaagacaggatcttgggatgtccagctccctgactgtgagaacctgggggcgaagcatcccagtacatgatatctcagtgctgggcccattcagagtggrggctgctccctctaaccactcccacctgcctccaacagatcagtgagcgctatggccctgtgttcaccattcacttggggccccggcgggtcgtggtgct

SEQ ID NO: 275830 - DNA, 201 bp, Homo sapiens
ctcactccatgctccagggtaatcaacaagtccaaaattgattgacctctatgtccacaaacactagagttctccaaacctgtctctccccaccccctccytggccagatcatggcaacctgctgatcactcagtgcacttcctagtgccaacctcactgagaaacaaagttcccgaatttctatctcccacctttttaag

SEQ ID NO: 275831 - DNA, 201 bp, Homo sapiens
tttcagcatcagggtcctagcaggaaagacaggatcttgggatgtccagctccctgactgtgagaacctgggggcgaagcatcccagtacatgatatctcrgtgctgggcccattcagagtgggggctgctccctctaaccactcccacctgcctccaacagatcagtgagcgctatggccctgtgttcaccattcacttg

SEQ ID NO: 275832 - DNA, 201 bp, Homo sapiens
tccatgctccagggtaatcaacaagtccaaaattgattgacctctatgtccacaaacactagagttctccaaacctgtctctccccaccccctccctggcyagatcatggcaacctgctgatcactcagtgcacttcctagtgccaacctcactgagaaacaaagttcccgaatttctatctcccacctttttaaggaact

SEQ ID NO: 275833 - DNA, 201 bp, Homo sapiens
gtccccaactcctccatgcctgccactcccctcacctggggcaccctagttccccctgcagcccctgtgtactttcaccaatccccccaacctgcctcatyacacacaccttcctcctccctcccagggcactgaagtgttccctatgctgggctccgtgctgagagaccccaggttcttctccaacccccgggacttcaa

SEQ ID NO: 275834 - DNA, 201 bp, Homo sapiens; identical to SEQ ID NO: 55116

SEQ ID NO: 275835 - DNA, 201 bp, Homo sapiens
agtttcgggatttcttcctccctaaggtgctgtctcccctccaccaccaccactcagactacggggacttccagcctctctctgtgtccccagaatcctgmccccattagtgttctagactctgtcccactccctcaatcagtcaaaaaagacttccccaaccaccacatctgttccacctttccacttagacagtcctga

SEQ ID NO: 275836 - DNA, 201 bp, Homo sapiens
cctccgtgtcataggtggagctatgtcaaccaccgtgttttacctattcggactatcatccctgctctaagacccctagacacctaaacacattcccctcmtcccccagccaaggtccatgaggagattgacagagtgatcggcaagaaccggcagcccaagtttgaggaccgggccaagatgccctacacagaggcagtg

SEQ ID NO: 275837 - DNA, 201 bp, Homo sapiens
tgtgcccatagccctctagatagattcttaaaaagcaccccttcctcacgtaaaatagcttagtatagcatcacatggcctgaacatccctgtcctggggrgttttccagagacctggcgggcggctgtcctgccttctctgcacactttcctactcggcacgctttgaacaccagggtgtaatctgagctcgctaccagg

SEQ ID NO: 275838 - DNA, 201 bp, Homo sapiens
ctcttcggtgatgaaacacctgccaggaccacagcaacaggcctttaaggagctgcaagggctggaggacttcatcgccaagaaggtggagcacaaccagygcacgctggatcccaattccccacgggacttcatcgactcctttctcatccgcatgcaggaggtacatcccagcagccagtgcaggcaggtgcaaagcca

SEQ ID NO: 275839 - DNA, 201 bp, Homo sapiens
gcttctcttctgattctcttattctttctacccggactctctctctctctctctctctctctctctctctctctctctctctctctctctctctctctcgygctctcgtgtttctctgactgagagtgtagctctcctgggcactcgcgctgaatccatctctctcccacaccactccctctctacaccacccttggggag

SEQ ID NO: 275840 - DNA, 201 bp, Homo sapiens
gggcgaagcatcccagtacatgatatctcagtgctgggcccattcagagtgggggctgctccctctaaccactcccacctgcctccaacagatcagtgagmgctatggccctgtgttcaccattcacttggggccccggcgggtcgtggtgctgtgcggacatgatgccgtcaaggaggctctggtggaccaggctgagga

SEQ ID NO: 275841 - DNA, 201 bp, Homo sapiens
ttctatcccccaaagctcctccctcagaggtccccaactcctccatgcctgccactcccctcacctggggcaccctagttccccctgcagcccctgtgtaytttcaccaatccccccaacctgcctcattacacacaccttcctcctccctcccagggcactgaagtgttccctatgctgggctccgtgctgagagacccc

SEQ ID NO: 275842 - DNA, 201 bp, Homo sapiens
caaacttcctgtttcagagacatgaaacttctatcccccaaagctcctccctcagaggtccccaactcctccatgcctgccactcccctcacctggggcascctagttccccctgcagcccctgtgtactttcaccaatccccccaacctgcctcattacacacaccttcctcctccctcccagggcactgaagtgttccc

SEQ ID NO: 275843 - DNA, 201 bp, Homo sapiens
gtgtcctaaggcagggagatgggtggcacggggtgggggctgcccagttggctggggctttgtggcaggggattgaccagtgtggaccagagtcttaggaragggagtcttggagtttcagcatcagggtcctagcaggaaagacaggatcttgggatgtccagctccctgactgtgagaacctgggggcgaagcatccca

SEQ ID NO: 275844 - DNA, 201 bp, Homo sapiens
catgaaacttctatcccccaaagctcctccctcagaggtccccaactcctccatgcctgccactcccctcacctggggcaccctagttccccctgcagccyctgtgtactttcaccaatccccccaacctgcctcattacacacaccttcctcctccctcccagggcactgaagtgttccctatgctgggctccgtgctga

SEQ ID NO: 275845 - DNA, 201 bp, Homo sapiens
ttgccttagggacacaaatctcaggtccctcaaacaccctgcctagtggaacatggaccccatgtctcccaaacttcctgtttcagagacatgaaacttctatcccccaaagctcctccctcagaggtccccaactcctccatgcctgccactcccctcacctggggcaccctagttccccctgcagcccctgtgtacttt

SEQ ID NO: 275846 - DNA, 201 bp, Homo sapiens
tgtaaaaaaaaaaaaaaaaaaaaaaaaaaaatcctgacaatcccaactacatcaaccactgctgttccatctactgagccctcacccacaagcacgacttrtgcacgtgcattagaatagcaagcacttctacagcactaccgtgtgccaggcactgcgttaagtgctttaagatagtccgccatggaacacttataacag

SEQ ID NO: 275847 - DNA, 201 bp, Homo sapiens
acccagtctccaaggacacctggatagctcaacagatgatccccaaaacagagcctgctggcaggatgcataccctcagctcagctctctcacctgggcayatgttcccatccccaacttaccgtaatttgtaacaggtgctccctacccagttcttctgaatattttaacacctggacaagtgactgcgtcaacccgcct

SEQ ID NO: 275848 - DNA, 201 bp, Homo sapiens; identical to SEQ ID NO: 55114

SEQ ID NO: 275849 - DNA, 201 bp, Homo sapiens
agcgcggcatcgaggaacgcatccaggaggaggcgggcttcctcatcgacgccctccggggcacgcacggtgagtaggggaccccgagtgcgagggcgggracccgcgctttctgcctggggatggggactaggtggggaaaggggcccgcacttccagccctggagtctggcgctgggattcggctcaacagggccctgc

SEQ ID NO: 275850 - DNA, 201 bp, Homo sapiens
aacagatgatccccaaaacagagcctgctggcaggatgcataccctcagctcagctctctcacctgggcacatgttcccatccccaacttaccgtaatttstaacaggtgctccctacccagttcttctgaatattttaacacctggacaagtgactgcgtcaacccgcctcctgcatacctgaacacctggtgctgcaaa

SEQ ID NO: 275851 - DNA, 201 bp, Homo sapiens
acctggacaagtgactgcgtcaacccgcctcctgcatacctgaacacctggtgctgcaaaatccagcccatcataatcatttcacatctacacaaatgtcmcagattagcccactggaatatctggccaagggccctctacttcacccacttaaatgcctgaaaacatggacaggtgccctaaccaataccctaaacacat

SEQ ID NO: 275852 - DNA, 201 bp, Homo sapiens; identical to SEQ ID NO: 55115

SEQ ID NO: 275853 - DNA, 201 bp, Homo sapiens
tctctctctctctctctctctcgtgctctcgtgtttctctgactgagagtgtagctctcctgggcactcgcgctgaatccatctctctcccacaccactcyctctctacaccacccttggggagccccttggaactggtccgctcctgctaccaccaccccctgacctctctccacccccgcgttcacctccccaggcgtg

SEQ ID NO: 275854 - DNA, 201 bp, Homo sapiens
gatccccaaaacagagcctgctggcaggatgcataccctcagctcagctctctcacctgggcacatgttcccatccccaacttaccgtaatttgtaacagrtgctccctacccagttcttctgaatattttaacacctggacaagtgactgcgtcaacccgcctcctgcatacctgaacacctggtgctgcaaaatccagc

SEQ ID NO: 275855 - DNA, 201 bp, Homo sapiens
aaaacagagcctgctggcaggatgcataccctcagctcagctctctcacctgggcacatgttcccatccccaacttaccgtaatttgtaacaggtgctccytacccagttcttctgaatattttaacacctggacaagtgactgcgtcaacccgcctcctgcatacctgaacacctggtgctgcaaaatccagcccatcat

SEQ ID NO: 275856 - DNA, 201 bp, Homo sapiens
caaaatccagcccatcataatcatttcacatctacacaaatgtcacagattagcccactggaatatctggccaagggccctctacttcacccacttaaatrcctgaaaacatggacaggtgccctaaccaataccctaaacacataaatatctagatagattattccctgacacccaaataagtgttccccaaccctttcc

SEQ ID NO: 275857 - DNA, 201 bp, Homo sapiens; identical to SEQ ID NO: 55117

SEQ ID NO: 275858 - DNA, 201 bp, Homo sapiens; identical to SEQ ID NO: 55118

SEQ ID NO: 275859 - DNA, 201 bp, Homo sapiens
actgctgttccatctactgagccctcacccacaagcacgacttatgcacgtgcattagaatagcaagcacttctacagcactaccgtgtgccaggcactgygttaagtgctttaagatagtccgccatggaacacttataacagctcttgaaggaggttcaatcatggccccaattgtacaaatgaggaaactgaggccca

SEQ ID NO: 275860 - DNA, 201 bp, Homo sapiens
ttgaagaacctggtgatgaccaccctgaacctcttctttgcgggcactgagaccgtgagcaccaccctgcgctacggtttcctgctgctcatgaagcaccyagaggtggagggtaagactggaaagggaggaaagtgaagggccccagaccctcaaaactcccctgagcctggtgcagtgtacccacctatcccagatccc

SEQ ID NO: 275861 - DNA, 201 bp, Homo sapiens
accctgtgattctgacacaacctggtttaacaggatcctgctgcaacaatgcgaatggctgatgtctgttctgttatgaatggtctacctccgtgtcatakgtggagctatgtcaaccaccgtgttttacctattcggactatcatccctgctctaagacccctagacacctaaacacattcccctcctcccccagccaag

SEQ ID NO: 275862 - DNA, 201 bp, Homo sapiens
tggatgtcagcctcccatgtgggaaggctttagggaatccaaagctcagggagaaaggatcaagggagggattcctccacagtaagtttcaagatttttarggaagaaataggatgctgttgcttaaaattctgtgcttgtatctcagaaaaactctttttttctgactcttcatcttgccatctctgtactactttctct

SEQ ID NO: 275863 - DNA, 201 bp, Homo sapiens
aactgaagctcagggaggatcggagtctcctctgaaagtctctcaggccataatattccacccctcctccctagagagtgcagccgggggtcagtaggggktgaggctgcactgagagtgggcttcaccttcacccctcctgcctctcctcctcaggaaagcggtactgttttggagaaggcctggccagaatggagctct

SEQ ID NO: 275864 - DNA, 201 bp, Homo sapiens
catagccagaaggagtttccaaaggtaaagccacatctccagagtatggttcagcaggactggggtgggagtcccggaatttacttttttttttttttttkggggggacagagtcttgctctgttgcccaggctggagtgcagtggcatgatctcagctcactgcaacctccgcctgctgggttcaagcaattctcctgcc

SEQ ID NO: 275865 - DNA, 201 bp, Homo sapiens
tagagatggggtttcaccatgctggccaggctggttttaaactcctgacctcattatccacacgcctcagtctctcaaagtgctgggattacaggtgtgarccaccgcgcctcacccagaatttacatttctaataagctcctaggtaatacagatgatattagtctgtaaactacacttttgagtagtaatgtggtctag

SEQ ID NO: 275866 - DNA, 201 bp, Homo sapiens
gggcagatcacttgaggtcgagagttccagaccagcctgaccaacatggagaaaccccatttctactaaatatacaaaattagctgggcatggtggtgcaygcctgtaatcccagctactcgggaggctgaggcaggagaatcatttgaacccgggaggcagaagttgcagtgagccgagattgcgccgttgcactccagc

SEQ ID NO: 275867 - DNA, 201 bp, Homo sapiens
gaagtgtcttacagatatcctggggcaaaatttcgtaattgcacctcagggtacccgtttgggcttgttactttaatgatcccatggctgatggcatttcytaaggttagactcgtttttatacctcaacctaatcagacatccaggtctggattttctcctcaccaagtacaggtgaaaatgaggggctctggcaccttc

SEQ ID NO: 275868 - DNA, 201 bp, Homo sapiens
gagttccagaccagcctgaccaacatggagaaaccccatttctactaaatatacaaaattagctgggcatggtggtgcatgcctgtaatcccagctactcrggaggctgaggcaggagaatcatttgaacccgggaggcagaagttgcagtgagccgagattgcgccgttgcactccagcctggatgacccggcaagactc

SEQ ID NO: 275869 - DNA, 201 bp, Homo sapiens
cactctagtggccggtagtgtgggctttagagacacccatagtgggtcaggtttatgctcttgtgacccccggcatgttatttaccctcccttggcctcartttctttgtcttcagattagaagaatatcatttatcagggttattgggaagattcagtgagaaattctgtttaatgcatttactctgtgcccagcaaata

SEQ ID NO: 275870 - DNA, 201 bp, Homo sapiens
ctgctttaccaaaaggcttcggagttcaagaattaaaaatactgcagtcagatttactatttgaacagagccgcagtgcggtgcaggcaaaaagggctgayagcccaggtcgacttgttccttgtggggcaggtaagagatccaggttagacctgccctggagtaactgctcccctgactgagagtggccccagagggtcg

SEQ ID NO: 275871 - DNA, 201 bp, Homo sapiens
agttccagaccagcctgaccaacatggagaaaccccatttctactaaatatacaaaattagctgggcatggtggtgcatgcctgtaatcccagctactcgrgaggctgaggcaggagaatcatttgaacccgggaggcagaagttgcagtgagccgagattgcgccgttgcactccagcctggatgacccggcaagactca

SEQ ID NO: 275872 - DNA, 201 bp, Homo sapiens
cccacggcctgcctggctacatgcagcccaggacagctttgaatgtggcccaagacaaattcttaaactttcttaaaacattatgagatttttcttgcgatttttttttttttttttttttttttttttttttttttagctcatcaactatcgtttgcgttcgtgtattttgtgtgtggcccaagacaatttttattcttc

SEQ ID NO: 275873 - DNA, 201 bp, Homo sapiens
agctttgaatgtggcccaagacaaattcttaaactttcttaaaacattatgagatttttcttgcgattttttttttttttttttttttttttttttttttwttagctcatcaactatcgtttgcgttcgtgtattttgtgtgtggcccaagacaatttttattcttccaatgtggcccagggaagccaaaatactggacac

SEQ ID NO: 275874 - DNA, 201 bp, Homo sapiens
ctttgaatgtggcccaagacaaattcttaaactttcttaaaacattatgagatttttcttgcgattttttttttttttttttttttttttttttttttttwagctcatcaactatcgtttgcgttcgtgtattttgtgtgtggcccaagacaatttttattcttccaatgtggcccagggaagccaaaatactggacactt

SEQ ID NO: 275875 - DNA, 201 bp, Homo sapiens; identical to SEQ ID NO: 55150

SEQ ID NO: 275876 - DNA, 201 bp, Homo sapiens
aaaaaccaagaaagctcaagactatgtagtgaattttgcaaaactaatttctttcactttaaaggaaatgagagtttttttttaagtgatggcgattgaattttttttttttttctcgatctcggctcattgcaatctccacctcccgggtccaggcgattctcctgccttggcctcccaagtaggtgggaatataggcat

SEQ ID NO: 275877 - DNA, 201 bp, Homo sapiens
ggttgcacactccttatgagaatataatgcctgatgatctgtcagtgtcttccataacccccatatgggactgtctagttgcaggaaaacaagctcagggstcctactgattctaccttatggtgagttgtataattatttcatcatgtattacgatgtaataataatagaaatacagtgcacagtaaatgtaattcactt

SEQ ID NO: 275878 - DNA, 201 bp, Homo sapiens; identical to SEQ ID NO: 55151

SEQ ID NO: 275879 - DNA, 201 bp, Homo sapiens
tggcctcccaagtaggtgggaatataggcatgcgccaccacgcccggctaatttttttgtatttttagtagaaacagggtttcaccacattggccaggctrgtctcgaactcctgacctcaagtgattcgcccacctcggcctcccaaagtgctgagattacaggcatgaaccactgcgcctggccggtaattgagatttt

SEQ ID NO: 275880 - DNA, 201 bp, Homo sapiens
gggtttctatgaacatttgtgtacaagtttttgtgtgaacatatattctttttttttttttttttttttttttttttttttagatggagtcttgctctgtygcccaggctggagtacagtggcacaatcttggctcactgcaagctctggattcacgccattctcctgcctcagcctcccgagtagctgggactacaggtg

SEQ ID NO: 275881 - DNA, 201 bp, Homo sapiens
gttgcccaggctggagtacagtggcacaatcttggctcactgcaagctctggattcacgccattctcctgcctcagcctcccgagtagctgggactacagrtgcccgccaccacgcccagctaattttttgtattttttgtagagacggggtttcaccgtgttaaccaggattgtctcgatctcctgaccttgtgatccgc

SEQ ID NO: 275882 - DNA, 201 bp, Homo sapiens
aaagcaagtgagtctgcaaccctttacatgccgtttccagtgaaaactggagtagtgaggacatttccttctcgtgtcctttaatgttgagtagaggatgsagactccttagaaatgtatcagatatataacattaagaaaaacttgaaacaataattttggggattggtagaatttggggtttctttgatctttcattaa

SEQ ID NO: 275883 - DNA, 201 bp, Homo sapiens
gagtacagtggcacaatcttggctcactgcaagctctggattcacgccattctcctgcctcagcctcccgagtagctgggactacaggtgcccgccaccaygcccagctaattttttgtattttttgtagagacggggtttcaccgtgttaaccaggattgtctcgatctcctgaccttgtgatccgcctgcctcagcctc

SEQ ID NO: 275884 - DNA, 201 bp, Homo sapiens
gaatttttttccataagaaatccttttagataggaaagaaagaaggccaggcatagtggcacctgtaatcctaacactttgggaggccaaggtgggcggayagcttgaggccaggagttcgagaccagcctggccaacatggcgaaaccccgtctctactaaaaatacaaaaattagctgggcgtggtggcgcatgcctgt

SEQ ID NO: 275885 - DNA, 201 bp, Homo sapiens
aaaatacaaaattagctgggcgtggttgtacatgcctgtaatcccagctactcgggagactgaggcaggaaaatcgcttgaacccaggaggcggaggttgyggtgagccaagattgtgccattgcactccagcctgggcaataagagtgaaactccgtctcaaaaaaaaaaaaagcaaaaatatcactacttgaaggccag

SEQ ID NO: 275886 - DNA, 201 bp, Homo sapiens
gagagtggccccagagggtcggcatcctcccagcctaggaaggtagttcaccactctagtggccggtagtgtgggctttagagacacccatagtgggtcasgtttatgctcttgtgacccccggcatgttatttaccctcccttggcctcaatttctttgtcttcagattagaagaatatcatttatcagggttattggga

SEQ ID NO: 275887 - DNA, 201 bp, Homo sapiens
gggcgtggttgtacatgcctgtaatcccagctactcgggagactgaggcaggaaaatcgcttgaacccaggaggcggaggttgtggtgagccaagattgtrccattgcactccagcctgggcaataagagtgaaactccgtctcaaaaaaaaaaaaagcaaaaatatcactacttgaaggccaggatctccagtattctgc

SEQ ID NO: 275888 - DNA, 201 bp, Homo sapiens
aaagaagacagataagaacatctgtccagaaagataaaccttatacagtgagggtctgcccaaagcaagtgagtctgcaaccctttacatgccgtttccartgaaaactggagtagtgaggacatttccttctcgtgtcctttaatgttgagtagaggatgcagactccttagaaatgtatcagatatataacattaagaa

SEQ ID NO: 275889 - DNA, 201 bp, Homo sapiens
agcttgaaaccagtgtccatgttttactctccttgtcagggaagaggggccatgtcagttgaggtgcatggcatttgtttcctactgactatcagtccagwtggaaggaccgtactcacttggagaatggaaatccaccatcaaagcggaggcctctaggaacatgctttccgaataactgaaagttaaccagtattttca

SEQ ID NO: 275890 - DNA, 201 bp, Homo sapiens
accatgagtcacctggttaaacagaaactcacgtgtgatcagcgagatctaccatgcaggacaaagacacttgcagaaactccaaagcttagaggctcccrggaactggtgacaaagaccaagtgaatccttcattatatgacagtggggaaactaaggagtagctagaaacttctatatgaagaggcatcgccatcatgc

SEQ ID NO: 275891 - DNA, 201 bp, Homo sapiens
tcatcaactatcgtttgcgttcgtgtattttgtgtgtggcccaagacaatttttattcttccaatgtggcccagggaagccaaaatactggacacttatgkagtttgattatgcccttatcaaactccttaagtcagtggtcaacaaacaggtactgatctgtgagaacagtccctgaaaaaaaccaagaaagctcaagac

SEQ ID NO: 275892 - DNA, 201 bp, Homo sapiens; identical to SEQ ID NO: 55152

SEQ ID NO: 275893 - DNA, 201 bp, Homo sapiens
gccaccacgcccggctaatttttttgtatttttagtagaaacagggtttcaccacattggccaggctggtctcgaactcctgacctcaagtgattcgcccrcctcggcctcccaaagtgctgagattacaggcatgaaccactgcgcctggccggtaattgagatttttaaagatcttccttgatggaataaaaagttggc

SEQ ID NO: 275894 - DNA, 201 bp, Homo sapiens
atggcgtgctctgggctcactgcagccaccgcctcctgggttcaagtgattctcctgcctcagcttcatgagtagctgggactacaggcatgcgccaccaygcctggctaatttttgtatttttagtagagacggggtttcaccatgttggtcaggctggtctcaaactcctgacctcaggtgatccacccacctcggtct

SEQ ID NO: 275895 - DNA, 201 bp, Homo sapiens
atagcccaggtcgacttgttccttgtggggcaggtaagagatccaggttagacctgccctggagtaactgctcccctgactgagagtggccccagagggtsggcatcctcccagcctaggaaggtagttcaccactctagtggccggtagtgtgggctttagagacacccatagtgggtcaggtttatgctcttgtgaccc

SEQ ID NO: 275896 - DNA, 201 bp, Homo sapiens
cgagatcatgtgactgcactccagtctgagcaacagagaccctatctcaaaaaaacaaaaaatttaagtggttaccagggaatagagagtgaatgctaataggtacgaggtttctttctggggtgatgaaaattccttaaattacattaccatgatagttgtacagttctatgaatatactaaaaacaattgaattatcca

SEQ ID NO: 275897 - DNA, 201 bp, Homo sapiens
ttctcctgcctcagccttcctagtagctgggactgtaggcatgttctaccacaccggctaattcttgtatttttagtagagaggggtttcgccatgttggscaggctggtctcaaactcctgacctcaagtgatccacccgcctcaacctcccaaaatgctgggattacaggtgagagccatctcacccggcctcattaca

SEQ ID NO: 275898 - DNA, 201 bp, Homo sapiens; identical to SEQ ID NO: 55130

SEQ ID NO: 275899 - DNA, 201 bp, Homo sapiens; identical to SEQ ID NO: 55133

SEQ ID NO: 275900 - DNA, 201 bp, Homo sapiens
agtctgggaatgcttttgggatttggggatttttttttttttttttttttttgagacagagtttcacccttaccgcccaggctggagtacagtagcacgamcttggctcactgcaacctctgcctcccaggttcaagcagttctcctgcctcagcctcccgagtagctgggattacaggcgcctgccatctcacccagcta

SEQ ID NO: 275901 - DNA, 201 bp, Homo sapiens
atttggggatttttttttttttttttttttttgagacagagtttcacccttaccgcccaggctggagtacagtagcacgatcttggctcactgcaacctckgcctcccaggttcaagcagttctcctgcctcagcctcccgagtagctgggattacaggcgcctgccatctcacccagctatttttttgtatttttagtag

SEQ ID NO: 275902 - DNA, 201 bp, Homo sapiens
tttttttttttttgagacagagtttcacccttaccgcccaggctggagtacagtagcacgatcttggctcactgcaacctctgcctcccaggttcaagcarttctcctgcctcagcctcccgagtagctgggattacaggcgcctgccatctcacccagctatttttttgtatttttagtagagacgggattttgccatgt

SEQ ID NO: 275903 - DNA, 201 bp, Homo sapiens
gtagctgggattacaggcgcctgccatctcacccagctatttttttgtatttttagtagagacgggattttgccatgttgggcaggctggtcttgaactcytgacctcaggtgatccacccgcctcagcctcccaaagtgctgggattacagatataagccaccgcacccagcctttttcgggattttttaaatgtagatc

SEQ ID NO: 275904 - DNA, 201 bp, Homo sapiens
attacaggcgcctgccatctcacccagctatttttttgtatttttagtagagacgggattttgccatgttgggcaggctggtcttgaactcctgacctcargtgatccacccgcctcagcctcccaaagtgctgggattacagatataagccaccgcacccagcctttttcgggattttttaaatgtagatcatcatatac

SEQ ID NO: 275905 - DNA, 201 bp, Homo sapiens; identical to SEQ ID NO: 55137

SEQ ID NO: 275906 - DNA, 201 bp, Homo sapiens
tgtttaagtgggttcattctctgcaggtggggatgcctccatcattccgatgcttgagtttgaagatcagccttgctgtcctgtcttcagaaattgggccmacaactcatcagtagaagccagtagtaacctggaagctcctggaaatgaaagaaaatgtgaagaccctgacagtcctgtaaccaaaaagatgaggcttga

SEQ ID NO: 275907 - DNA, 201 bp, Homo sapiens
attttcatactgggactggtagtcctattggcatttagtaggtagagaccaggtatgctgctaaatattccgtaatgtacaggacagccgccacagcaaasagtgatacagtccaaagtgtcattagtggccgggcacgctggctcacacctgtaatcccagcactttgggaggccaaggtgggcggatcactcgaggtca

SEQ ID NO: 275908 - DNA, 201 bp, Homo sapiens
aggcttcagttccttataacaaggacctctccacaaggctaccagagtattcagcttcacgactcagtggctggctccccacagaacaggcaatccaagaragcaaagcagaagccacagtgtcttttatgacctagcctcagaagccagagcctatctgtaatatcttaatggttattcagatcagccctattacgtatg

SEQ ID NO: 275909 - DNA, 201 bp, Homo sapiens
gttggtatacacagcatttcccaatttctagatgcagctcatgaattgtatacatgagggaaaagaaggcaaccacgaaggtctgggtgggcttataaagtagtcaacactcacctccttaagtattccaaaccatgacctccacccagaattttgttgtttaggagcaaacgcttgttctccaaaggcctgtgatgccca

SEQ ID NO: 275910 - DNA, 201 bp, Homo sapiens; identical to SEQ ID NO: 55146

SEQ ID NO: 275911 - DNA, 201 bp, Homo sapiens
aatactactaataaacagtctacagtgtatggatggaatagatcccccacaacaaaaaattttctggcccaaaatgtctacagtgctgggttgagaaaccstgcacctgatgcattgttattcatgattgtggtaccttctggcaaagctctccaggagctacatgaccatcctgggtgctggtgggactgctgtgttctg

SEQ ID NO: 275912 - DNA, 201 bp, Homo sapiens
ctcacttggagaatggaaatccaccatcaaagcggaggcctctaggaacatgctttccgaataactgaaagttaaccagtattttcatgctcaaaccacaragtccctgggtttagctattccacattaggtctggaaggctttgggactctatagcaggtagaggatgcagcttgagtggcttctgaagcccaagaaagc

SEQ ID NO: 275913 - DNA, 201 bp, Homo sapiens
gtgcctgccaccacgcccggctaattttgtatttttagtagagatggggtttcaccatgttggccaggctggtctcaaactcctgacctcaggtgatccgsctgcttcggcctcccaaagtgctggggttacaggtgtgagccaccatgcctggcctagaaaacttttaaaccaaaaaagtagacagttgtttttatttta

SEQ ID NO: 275914 - DNA, 201 bp, Homo sapiens
caggaacaaaatgcataggacagtccaaaatgaggaagaacggtaagcacgggtgggaatctaaacaaagatttagcttgaaaccagtgtccatgttttaytctccttgtcagggaagaggggccatgtcagttgaggtgcatggcatttgtttcctactgactatcagtccagttggaaggaccgtactcacttggagaa

SEQ ID NO: 275915 - DNA, 201 bp, Homo sapiens
aagatttagcttgaaaccagtgtccatgttttactctccttgtcagggaagaggggccatgtcagttgaggtgcatggcatttgtttcctactgactatcmgtccagttggaaggaccgtactcacttggagaatggaaatccaccatcaaagcggaggcctctaggaacatgctttccgaataactgaaagttaaccagt

SEQ ID NO: 275916 - DNA, 201 bp, Homo sapiens
aaaaattagtcggacatgatggtgcatgcctgtagtctcagctacttgggaggtggaggtgggaggatcgcttgagaccagggggcagaagttgcagtgakccgagatcatgtgactgcactccagtctgagcaacagagaccctatctcaaaaaaacaaaaaatttaagtggttaccagggaatagagagtgaatgctaa

SEQ ID NO: 275917 - DNA, 201 bp, Homo sapiens
gggcgtgatggtacgtgcctgtaatcccagctacttgggaggccaaggcaggagaattgcttgaacataggaggcagaggttgcagtgagccgagatcacrccactgcactccagcctgggccacagaatgagactccatttcaaaaacaaaaaagagaaaagaaaatcataaggaatagaaaatacatttattcattaag

SEQ ID NO: 275918 - DNA, 201 bp, Homo sapiens
aaaggatgttgaattctaccaaatgctttctttgcgtatattttccccataattatatatatgtatatatgtgtgtgtgtgtgtgtgtgtgtgtgtgtgtrtgtgtgtgtgtgtatatatatatatatatatttttttttttttttttttttttttgagacagaatctcactctgtcacccaggctggagggcactgggac

SEQ ID NO: 275919 - DNA, 201 bp, Homo sapiens
tctaccaaatgctttctttgcgtatattttccccataattatatatatgtatatatgtgtgtgtgtgtgtgtgtgtgtgtgtgtgtgtgtgtgtgtgtgtrtatatatatatatatatttttttttttttttttttttttttgagacagaatctcactctgtcacccaggctggagggcactgggacagtcttggctcact

SEQ ID NO: 275920 - DNA, 201 bp, Homo sapiens
accaaatgctttctttgcgtatattttccccataattatatatatgtatatatgtgtgtgtgtgtgtgtgtgtgtgtgtgtgtgtgtgtgtgtgtgtatawatatatatatatatttttttttttttttttttttttttgagacagaatctcactctgtcacccaggctggagggcactgggacagtcttggctcactgca

SEQ ID NO: 275921 - DNA, 201 bp, Homo sapiens
tttgcgtatattttccccataattatatatatgtatatatgtgtgtgtgtgtgtgtgtgtgtgtgtgtgtgtgtgtgtgtgtgtatatatatatatatatwtttttttttttttttttttttttttgagacagaatctcactctgtcacccaggctggagggcactgggacagtcttggctcactgcaacctctgcctcct

SEQ ID NO: 275922 - DNA, 201 bp, Homo sapiens
tgcgtatattttccccataattatatatatgtatatatgtgtgtgtgtgtgtgtgtgtgtgtgtgtgtgtgtgtgtgtgtgtatatatatatatatatatwtttttttttttttttttttttttgagacagaatctcactctgtcacccaggctggagggcactgggacagtcttggctcactgcaacctctgcctcctgg

SEQ ID NO: 275923 - DNA, 201 bp, Homo sapiens
tatatatgtatatatgtgtgtgtgtgtgtgtgtgtgtgtgtgtgtgtgtgtgtgtgtgtatatatatatatatatattttttttttttttttttttttttkgagacagaatctcactctgtcacccaggctggagggcactgggacagtcttggctcactgcaacctctgcctcctgggttcaagtgattctcgtgcttca

SEQ ID NO: 275924 - DNA, 201 bp, Homo sapiens
tatatgtatatatgtgtgtgtgtgtgtgtgtgtgtgtgtgtgtgtgtgtgtgtgtgtatatatatatatatatatttttttttttttttttttttttttgmgacagaatctcactctgtcacccaggctggagggcactgggacagtcttggctcactgcaacctctgcctcctgggttcaagtgattctcgtgcttcagc

SEQ ID NO: 275925 - DNA, 201 bp, Homo sapiens
atttttttttttttttttttttttttgagacagaatctcactctgtcacccaggctggagggcactgggacagtcttggctcactgcaacctctgcctccygggttcaagtgattctcgtgcttcagcctcctgagtagctgggattacaggcatgcgccaccactcccagctagtttttgtatttttagtagagatgggg

SEQ ID NO: 275926 - DNA, 201 bp, Homo sapiens
cctggaaaaagaagacagataagaacatctgtccagaaagataaaccttatacagtgagggtctgcccaaagcaagtgagtctgcaaccctttacatgccktttccagtgaaaactggagtagtgaggacatttccttctcgtgtcctttaatgttgagtagaggatgcagactccttagaaatgtatcagatatataaca

SEQ ID NO: 275927 - DNA, 201 bp, Homo sapiens
ctgtgtagtacagtggcacaatcgtagcttacaggaacctccgcttcctgggttcaagtgattctcctgcctcagcctcccaggtagctgggactacaggygcctgccaccacgcccggctaattttgtatttttagtagagatggggtttcaccatgttggccaggctggtctcaaactcctgacctcaggtgatccgcc

SEQ ID NO: 275928 - DNA, 201 bp, Homo sapiens
gtttccatatattctatatgtcaaatctgaatttaggtgaggagatacttctaaggcagagttttgctcctgttaaccaggctggagtgcagtggcacaayttcagctcactgcagcctccgcctcccaggttcaagtgattttcctgcctcagtctccagagtagctaggattacaggcacccgccaccacgcccggcta

SEQ ID NO: 275929 - DNA, 201 bp, Homo sapiens
gtctcactgtgttagccaggctggtctcaaactcccagcctcaagctatcctcctgccttggcctcccaaagtgctgggattacaggcatgagctattgcrtccctggccgagatctggggtctttacctcttctagctagcaggttcctctttgagttggcttctaccattctccttgccttaacctcctgtatatgagg

SEQ ID NO: 275930 - DNA, 201 bp, Homo sapiens
gtagccacaagtagtgacagtgcctttttatgacaggctagtgtacctaatcacttctaaaggtttcatctaaagagaagacagaggcaaggggtgcagastctcactcatactattagtcaattctcagaatcaggattaggagcgtaaggctgaaacctcacaagatgtgaagccaacatggggcttggaaatcctata

SEQ ID NO: 275931 - DNA, 201 bp, Homo sapiens; identical to SEQ ID NO: 55127

SEQ ID NO: 275932 - DNA, 201 bp, Homo sapiens; identical to SEQ ID NO: 55129

SEQ ID NO: 275933 - DNA, 201 bp, Homo sapiens; identical to SEQ ID NO: 55132

SEQ ID NO: 275934 - DNA, 201 bp, Homo sapiens; identical to SEQ ID NO: 55123

SEQ ID NO: 275935 - DNA, 201 bp, Homo sapiens
gacattattggcagcggtggtgaagatacaatctccagctgacaaggcctgcgacacccctgataagccggtgcaaggtgagactttttcttcttggcatsctcctcactgtgagagatggtaaaattatgcattgctgtactgtgagggtacagtcgtgggtagggtgtgaactacgatgttaggcatatgtgcttgtcc

SEQ ID NO: 275936 - DNA, 201 bp, Homo sapiens
ccatagagttccagatagggaaacctcggtctgctccatttgaaagactcgaagcatggatatgagaggctgtagcatcgtgcactggttctcctttccgwacttctgatggttgtggtttttgatcaaggtctcaataccagctcagaccatgtggaccgcggatgagattgctcagctatgctatgaacactatgggat

SEQ ID NO: 275937 - DNA, 201 bp, Homo sapiens
agtggggatttactagagggcggtagagaaacactctgctgtaggggaaaggagaaaaataaaatgcctggaaaaagaagacagataagaacatctgtccrgaaagataaaccttatacagtgagggtctgcccaaagcaagtgagtctgcaaccctttacatgccgtttccagtgaaaactggagtagtgaggacatttc

SEQ ID NO: 275938 - DNA, 201 bp, Homo sapiens
tctttgataggggcttagaacatactaaacacttaataaatcatctttgccttctttttccaaacagatcccaaatcagcaaagtggaactcttcagatcrttccagaagctgctaagcagaattgcaagggacaagtggccacactccctcaggtgatgctgttgacctatgttttctcatatttaggtagacaactgtt

SEQ ID NO: 275939 - DNA, 201 bp, Homo sapiens
atttccttctcgtgtcctttaatgttgagtagaggatgcagactccttagaaatgtatcagatatataacattaagaaaaacttgaaacaataattttggrgattggtagaatttggggtttctttgatctttcattaaagatgaaaagggggcagggagatagtagaagaaaatgatccatagagttccagatagggaaa

SEQ ID NO: 275940 - DNA, 201 bp, Homo sapiens
ctggagctcaggaaagccttttttgtttttttgagagggagtctcgctctgtcacccagcctggagtgcagtggcacaatctcggctcattgcgacctccrcctcccgggttcaagcgattctcctgcctcagcctcccgagtagctgggactacaggcacgcgccatcacgcccggctaatttttttgtattttcagtag

SEQ ID NO: 275941 - DNA, 201 bp, Homo sapiens
ccttttttgtttttttgagagggagtctcgctctgtcacccagcctggagtgcagtggcacaatctcggctcattgcgacctccgcctcccgggttcaagygattctcctgcctcagcctcccgagtagctgggactacaggcacgcgccatcacgcccggctaatttttttgtattttcagtagagacagggtttcacca

SEQ ID NO: 275942 - DNA, 201 bp, Homo sapiens
tggcacaatcgtagcttacaggaacctccgcttcctgggttcaagtgattctcctgcctcagcctcccaggtagctgggactacaggtgcctgccaccacrcccggctaattttgtatttttagtagagatggggtttcaccatgttggccaggctggtctcaaactcctgacctcaggtgatccgcctgcttcggcctcc

SEQ ID NO: 275943 - DNA, 201 bp, Homo sapiens
cccagcctggagtgcagtggcacaatctcggctcattgcgacctccgcctcccgggttcaagcgattctcctgcctcagcctcccgagtagctgggactayaggcacgcgccatcacgcccggctaatttttttgtattttcagtagagacagggtttcaccacgttggccaggctggcctcgaactcctgacctcaggtg

SEQ ID NO: 275944 - DNA, 201 bp, Homo sapiens
acaatcgtagcttacaggaacctccgcttcctgggttcaagtgattctcctgcctcagcctcccaggtagctgggactacaggtgcctgccaccacgcccrgctaattttgtatttttagtagagatggggtttcaccatgttggccaggctggtctcaaactcctgacctcaggtgatccgcctgcttcggcctcccaaa

SEQ ID NO: 275945 - DNA, 201 bp, Homo sapiens
tcatagccagaaggagtttccaaaggtaaagccacatctccagagtatggttcagcaggactggggtgggagtcccggaatttactttttttttttttttkgggggggacagagtcttgctctgttgcccaggctggagtgcagtggcatgatctcagctcactgcaacctccgcctgctgggttcaagcaattctcctgc

SEQ ID NO: 275946 - DNA, 201 bp, Homo sapiens; identical to SEQ ID NO: 55134

SEQ ID NO: 275947 - DNA, 201 bp, Homo sapiens
gccgtttccagtgaaaactggagtagtgaggacatttccttctcgtgtcctttaatgttgagtagaggatgcagactccttagaaatgtatcagatatatracattaagaaaaacttgaaacaataattttggggattggtagaatttggggtttctttgatctttcattaaagatgaaaagggggcagggagatagtaga

SEQ ID NO: 275948 - DNA, 201 bp, Homo sapiens
cataaaattcacccaactaaagtatacattttaaaagtttttaggccgggcacggtggcttacgcctgtaattccaacactttgggaggctgaggcaggckgatcacctgaggtcaggagttcgagaccagtctggccaacatgatgaaaccccgtctctgctaaaaatacaaaaattagccgggcatggtggtgcacgcc

SEQ ID NO: 275949 - DNA, 201 bp, Homo sapiens
gcaggcagatcacctgaggtcaggagttcgagaccagtctggccaacatgatgaaaccccgtctctgctaaaaatacaaaaattagccgggcatggtggtkcacgcctgtagtcccagctacttgggaggctgaggcaggagaatcacttgaacctgggaggcggaggttgcagtgagtcaagatcatgccattgcactcc

SEQ ID NO: 275950 - DNA, 201 bp, Homo sapiens
catgacctccacccagaattttgttgtttaggagcaaacgcttgttctccaaaggcctgtgatgcccatggcaggagtccagggattctgcctcaggtggstcgtccaagtggattttataatgacagttcacacagggaacagcactcagatctctgaaacaaagctttccatttcttgtaaacccataggggccagcac

SEQ ID NO: 275951 - DNA, 201 bp, Homo sapiens
caggcagatcacctgaggtcaggagttcgagaccagtctggccaacatgatgaaaccccgtctctgctaaaaatacaaaaattagccgggcatggtggtgyacgcctgtagtcccagctacttgggaggctgaggcaggagaatcacttgaacctgggaggcggaggttgcagtgagtcaagatcatgccattgcactcca

SEQ ID NO: 275952 - DNA, 201 bp, Homo sapiens
gagttcgagaccagtctggccaacatgatgaaaccccgtctctgctaaaaatacaaaaattagccgggcatggtggtgcacgcctgtagtcccagctactygggaggctgaggcaggagaatcacttgaacctgggaggcggaggttgcagtgagtcaagatcatgccattgcactccagcctgggtgacagagtgagatc

SEQ ID NO: 275953 - DNA, 201 bp, Homo sapiens
ttagccgggcatggtggtgcacgcctgtagtcccagctacttgggaggctgaggcaggagaatcacttgaacctgggaggcggaggttgcagtgagtcaaratcatgccattgcactccagcctgggtgacagagtgagatcctgtctcaaaaaaaaaaaaaaaaaatttttttagtatatccacagagttgtgcaaccat

SEQ ID NO: 275954 - DNA, 201 bp, Homo sapiens
atggtggtgcacgcctgtagtcccagctacttgggaggctgaggcaggagaatcacttgaacctgggaggcggaggttgcagtgagtcaagatcatgccamtgcactccagcctgggtgacagagtgagatcctgtctcaaaaaaaaaaaaaaaaaatttttttagtatatccacagagttgtgcaaccatcaattttaga

SEQ ID NO: 275955 - DNA, 201 bp, Homo sapiens
caactactcaggaggctgaggcagaagaatctctcaaacccaggaggtggaggttgcagtgagccaggatcgtgccactgcactctagcctgggtgacagmgcaagactccatctcaaaaaataagaagaaaagactgtatcccctttcagttctggaggctagaagtccaaacaggttgttggtggggcttctgcttcct

SEQ ID NO: 275956 - DNA, 201 bp, Homo sapiens; identical to SEQ ID NO: 55128

SEQ ID NO: 275957 - DNA, 201 bp, Homo sapiens
taaaaaaattctaataatttttttttgaaaaaagatggatagggctgggcatggtggctcacacctgtaatcccagcactttgtgaggctgagctgggcgkatcacaaggtcaggagatggagaccatcctggccaacatggtgaaaccctgtctccactaaaaacacaaaaattagcctgtcgtggtggtgtgcgcctat

SEQ ID NO: 275958 - DNA, 201 bp, Homo sapiens
ccctcccctccctcagcctcagaccagaatgtgcttccagaacttctccagcaggaccccaaggcgcctctgagcctccccactcctgccccacgttcagmgcgcgcccccagagcgcctctgtcccctccagccccagcccagcttggaccagagtgcgccccagatctatgtgatccttgcctctcagacccaaaggca

SEQ ID NO: 275959 - DNA, 201 bp, Homo sapiens
tgtcagtgttaaaacaatatatggacaataacatgtctacacatttgagtttaaaattaaaataaatgttacaaagtttgcacatgttcattataaacaaygagggaaagcacaaagaacagtgcctgttaaattctggtgtatattctgctagtttgttgttgaggcaaatatgcacttcttagacaaaaatgggctgat

SEQ ID NO: 275960 - DNA, 201 bp, Homo sapiens
aagagaggagagctggccctgctggtttctggtgcatccctaagtctatcatgttcttcccactcacaggagcatccatcattggtgtgaactgccacttkgaccccaccattagtttaaaaacagtgaagctcatgaaggagggcttggaggctgcccgactgaaagctcacctgatgagccagcccttggcttaccaca

SEQ ID NO: 275961 - DNA, 201 bp, Homo sapiens
ggtgtatattctgctagtttgttgttgaggcaaatatgcacttcttagacaaaaatgggctgatattacatatactgttttgtaatactttttcacaaaayggtatatttttttcatagcacattccaccttttaaaaagtctgtttagcttgggaacagaaaatcctgaagtctagataattttaaaatgcaatagaatg

SEQ ID NO: 275962 - DNA, 201 bp, Homo sapiens
gaagagaggagagctggccctgctggtttctggtgcatccctaagtctatcatgttcttcccactcacaggagcatccatcattggtgtgaactgccactktgaccccaccattagtttaaaaacagtgaagctcatgaaggagggcttggaggctgcccgactgaaagctcacctgatgagccagcccttggcttaccac

SEQ ID NO: 275963 - DNA, 201 bp, Homo sapiens
tatgtaactgtgctggcagtagtatatatatatatatatttatatatatgtatacatatatatattattgttgttgttaattaggtcataatcaaagttgyagttttcagatgtgacatttagatacattgcaatcatgacaaatatttggatttcaaaatgacgtgtgagccatttatatttttgttgtgctttgttatc

SEQ ID NO: 275964 - DNA, 201 bp, Homo sapiens
taccattttaagaatctgtgcttaagtgcagatttgaggctttacaacaaaatcttttcatttaatccctcagcagacagttcttcaaacacacctcccayggtgttcttcaaatactctttaacgtgttaagaaagacccccccacccacagcacatacaaaggaatacacaaatgtttattttatgagcattctggttg

SEQ ID NO: 275965 - DNA, 201 bp, Homo sapiens
ggttggtgcagagctctattgtaagttctcataaaggagccgggtgtggaggctcatgcctgtaatcccagcaactcaggaggctgaggtgggaagaccasttgagcccaggagttcaagaccagcctgggcacatagggagacctagtctctcagaagttttttaaaaattagctggacatggtggtgcactcctgtagt

SEQ ID NO: 275966 - DNA, 201 bp, Homo sapiens
gctaagaacttcagtgtcctagtaatttcctagcctgtcatatagttgctcctggacctttggatttcataaacctctgaaatttcaaaataattttcagragctgatatattaatagcatgctgatttcttactttgcccagttaattctcctaacgaaaacaaccaagtttttgtgaaatccaagtttcacagtcattt

SEQ ID NO: 275967 - DNA, 201 bp, Homo sapiens
aggaatcatggtgaagccaaacaaccacagactgcccacacaggtggctgagattgacacctttgctttttaatgtctgataggcaactttgtgtgctgcrtgaaattatttaaaatattatataatttttaaatggttccatgatataaagaccaaagctaggggaggagtctgttgtctggtgtcatgtgttttgttca

SEQ ID NO: 275968 - DNA, 201 bp, Homo sapiens
  misc_feature (1)...(201): n = A,T,C or G
ccagcagtctgggaagctgttggatcacttgagctcaggagttcgagaccagcctgggcaacatggcgaaaccccatatctataaaaaaacaaacaaacanacaaaaattagccagacgtggtggcacacacttgtagtcacagcaacttgggaggctgaggtgggaggattgcttgatcacttgaggtggagactgcagt

SEQ ID NO: 275969 - DNA, 201 bp, Homo sapiens
ccaagatcacgccactacactccagcctgggtgacagaatgagactccatctcaaaaaacaaacaaacaaacaaacaaacaaacaaactttgccatttggyattcatccatggaactgtgcttggaaatcttgctccaattcttatttcaccatgctaccagaattatcttttgaaaacactgtattaattacatcatcca

SEQ ID NO: 275970 - DNA, 201 bp, Homo sapiens
tacaaaaaaattaccaggcgtggtggcaggtgcctgtagtcccagctacttgggaggctgaggcaggagaattgcttgaacccaggaagcagaggttgcastgagccaagatcacgccactacactccagcctgggtgacagaatgagactccatctcaaaaaacaaacaaacaaacaaacaaacaaacaaactttgccat

SEQ ID NO: 275971 - DNA, 201 bp, Homo sapiens
tcaagaccatcctggccaacatggcgaaaccctgcctctactaaaaatacaaaaaaattaccaggcgtggtggcaggtgcctgtagtcccagctacttggraggctgaggcaggagaattgcttgaacccaggaagcagaggttgcagtgagccaagatcacgccactacactccagcctgggtgacagaatgagactcca

SEQ ID NO: 275972 - DNA, 201 bp, Homo sapiens
ccccgccgggttctcgctgcacccaaggcccaggcgctggttgggtgattgcagattttcacaggcaatttgatgtccgtgatgacagaaaaatgtcatcygaaatgtcagcctcgaaaacatggtttaagaaaaaatgggcagagtggctgtaagatactgaggaagggctgttgatgaaattgtaaaacccaattccag

SEQ ID NO: 275973 - DNA, 201 bp, Homo sapiens
tctgtccctgcagccaaaagccccttcgtattagagaagagcagaaggaaaggatggtcccagctagcaaaaaagatctctgaatttaaatataaaatctraggtgaatcagcatctaaacagacaactagtgagtcatactttggggttggtgaggatgcccttcatgggagaatcaacagatatttagttctagttcca

SEQ ID NO: 275974 - DNA, 201 bp, Homo sapiens
ttgagctcaggagttcgagaccagcctgggcaacatggcgaaaccccatatctataaaaaaacaaacaaacagacaaaaattagccagacgtggtggcacmcacttgtagtcacagcaacttgggaggctgaggtgggaggattgcttgatcacttgaggtggagactgcagtgagctgagatcacgctactgcactccag

SEQ ID NO: 275975 - DNA, 201 bp, Homo sapiens
tatctcatttaagtgacccttgttatgttttttatgtaactgtgctggcagtagtatatatatatatatatttatatatatgtatacatatatatattattgttgttgttaattaggtcataatcaaagttgtagttttcagatgtgacatttagatacattgcaatcatgacaaatatttggatttcaaaatgacgtgtg

SEQ ID NO: 275976 - DNA, 201 bp, Homo sapiens
attctaaatgcagcatcgtggatgcatgttgatggcatgagtgggtgttgagatggcaaaggactatggactatcaccagtcaaaggagggtgagaatttygccagtccctaaatgtactaaatgaatagtccacagagactgggaaggatgattcctatagatatagatattttttgtttgtccccattctcatagccac

SEQ ID NO: 275977 - DNA, 201 bp, Homo sapiens
atatctcatttaagtgacccttgttatgttttttatgtaactgtgctggcagtagtatatatatatatatatttatatatatgtatacatatatatattattgttgttgttaattaggtcataatcaaagttgtagttttcagatgtgacatttagatacattgcaatcatgacaaatatttggatttcaaaatgacgtgt

SEQ ID NO: 275978 - DNA, 201 bp, Homo sapiens
gatgctgtctctaagaaaaaaaaaaaaaaatagcattctatgccatttcaacttctttaacaattttttaaccctctctttagtttgttgatagagtaagrctagtatttaccattttaagaatctgtgcttaagtgcagatttgaggctttacaacaaaatcttttcatttaatccctcagcagacagttcttcaaacac

SEQ ID NO: 275979 - DNA, 201 bp, Homo sapiens
  misc_feature (1)...(201): n = A,T,C or G
acagttagaggtctttatgaagaagaacgtggacttcttgattgcagaggtaaagaaagatgtggtgaaagataagacaaatacacctagtacattttctntaccttttgctttcaagagtactgtgtggggttaggtgacaatcataactagcaatagtaatatttagtttttgaaatcgttttccaattcagggctact

SEQ ID NO: 275980 - DNA, 201 bp, Homo sapiens
catatctcatttaagtgacccttgttatgttttttatgtaactgtgctggcagtagtatatatatatatatatttatatatatgtatacatatatatattattgttgttgttaattaggtcataatcaaagttgtagttttcagatgtgacatttagatacattgcaatcatgacaaatatttggatttcaaaatgacgtg

SEQ ID NO: 275981 - DNA, 201 bp, Homo sapiens
tcatgcctgtaatcccagcagtctgggaagctgttggatcacttgagctcaggagttcgagaccagcctgggcaacatggcgaaaccccatatctataaamaaacaaacaaacagacaaaaattagccagacgtggtggcacacacttgtagtcacagcaacttgggaggctgaggtgggaggattgcttgatcacttgag

SEQ ID NO: 275982 - DNA, 201 bp, Homo sapiens
ccccgtctctactaaaaatacaaaaattagccaggcgtggtggcgggcgcctgtaatcccagctacttgggaggcggaggcaggagaattgcttgaaactsggaggcaaatgttgcagtgagccgaaatcgcaccacagcactccagcctgggtgaaagagcaaaactccgtctcaaaaaaaaaaaaaaaattgttttggg

SEQ ID NO: 275983 - DNA, 201 bp, Homo sapiens
ataggcaactttgtgtgctgcatgaaattatttaaaatattatataatttttaaatggttccatgatataaagaccaaagctaggggaggagtctgttgtstggtgtcatgtgttttgttcacacagggccaggaaggaatactgggagaatcttcggatagcctcaggccggccatacaacccttcaatgtcaaagccag

SEQ ID NO: 275984 - DNA, 201 bp, Homo sapiens
acaacctgggggtcaggtacattggcgggtgctgtggatttgagccctaccacatcagggcaattgcagaggagctggccccagaaaggggctttttgccrccagcttcagaaaaacatggcagctggggaagtggtttggacatgcacaccaaaccctgggttagagcaaggtaagcatctttttactaacccaaactaa

SEQ ID NO: 275985 - DNA, 201 bp, Homo sapiens
tacaaaaattagccaggcgtggtggcgggcgcctgtaatcccagctacttgggaggcggaggcaggagaattgcttgaaactgggaggcaaatgttgcagygagccgaaatcgcaccacagcactccagcctgggtgaaagagcaaaactccgtctcaaaaaaaaaaaaaaaattgttttgggagaaacgagattaaaagt

SEQ ID NO: 275986 - DNA, 201 bp, Homo sapiens
ttgaatttttatgaaaagaatgtataatgcctaatggcataatgccacttattacaggactggaacccagagttgccaccagatgggatattcaaaaataygccagagaggcctacaacctgggggtcaggtacattggcgggtgctgtggatttgagccctaccacatcagggcaattgcagaggagctggccccagaaa

SEQ ID NO: 275987 - DNA, 201 bp, Homo sapiens
ctctgataatttaatatctactctcctacaaaagctcaagcctgaagatacaagactattagaagaaacatgactaccctcagtgtattagaaaagaggtyatgcagctttctaaacattattgaattgtttgagctgttttgaaattgtaattcttttcagctattaaaaagaagagcaatgagactatattgcttgtat

SEQ ID NO: 275988 - DNA, 201 bp, Homo sapiens
catctctttaaaaacaaaaaccaaggtttctatgttccagttactctactctactagtcgtctgggagacaagagatgagtatagactcatctccagcgtyagcgctgagagctaagaacttcagtgtcctagtaatttcctagcctgtcatatagttgctcctggacctttggatttcataaacctctgaaatttcaaaa

SEQ ID NO: 275989 - DNA, 201 bp, Homo sapiens
tgaagatacaagactattagaagaaacatgactaccctcagtgtattagaaaagaggtcatgcagctttctaaacattattgaattgtttgagctgttttkaaattgtaattcttttcagctattaaaaagaagagcaatgagactatattgcttgtattttattcttatcctggttctacaatttgctaagtcttacatg

SEQ ID NO: 275990 - DNA, 201 bp, Homo sapiens
tgattgataggctagtaaccacattgagtagctgaagtcaaaggatttttgagattctttttccccaaactattaatcctagacacaaaattccttctagmaaacacgtgtctaaaaaacttttttctaaattacattctgctgctgtgcccaagaaggctaatgaacttattaagttggcctggtgaaaaggaatattta

SEQ ID NO: 275991 - DNA, 201 bp, Homo sapiens
accagttatctctaaggtccttttctccaatttttaatatggctcagctactccagagttttgggattgcaggcaagataccatcatcgagtgactgtatwacaagttttaatgaagagaccaagcagatgaagtgaggggatacttgcagtccaggcagaaggaaaaactttcccagcatgattgggaagagcgggtggg

SEQ ID NO: 275992 - DNA, 201 bp, Homo sapiens
ccactcacaggagcatccatcattggtgtgaactgccactttgaccccaccattagtttaaaaacagtgaagctcatgaaggagggcttggaggctgcccractgaaagctcacctgatgagccagcccttggcttaccacactcctgactgcaacaagcagggattcatcgatctcccagaattcccatttggtaagacc

SEQ ID NO: 275993 - DNA, 201 bp, Homo sapiens
ggagaatcacttgaacccagaaggcagaggttgcagtgagctgagattgcaccactgcactccagcctgggcgacagagtgagaatctatctcaaaaaaamaaacaaacaagcaaaaaacctcacttcctaagtggtatccaagcagacttagttctctgggaatggggcaaagaaacttcagggagcatgctgatgatcc

SEQ ID NO: 275994 - DNA, 201 bp, Homo sapiens
aacaatgtcctttatttctacttctctataatctcttgcaaggaggcttacacctaaaagacatccaataaatagccaacatattattaatttattaatakaatgaagttaattaagcaaggaaagagaaactctggcagcacaacatccaaaaaaaaagggtagccaaagatcttcaacagcttatagcttagttgatat

SEQ ID NO: 275995 - DNA, 201 bp, Homo sapiens
aatagccaacatattattaatttattaatagaatgaagttaattaagcaaggaaagagaaactctggcagcacaacatccaaaaaaaaagggtagccaaaratcttcaacagcttatagcttagttgatatcaatgatcttcccacttggttccagacttggatattgtggatatatatacttgtgagtatatgtatacac

SEQ ID NO: 275996 - DNA, 201 bp, Homo sapiens
gtgttaataaacagaaattatacctttcctcattcactctcccagttcgccagcttcatcgagagttcctcagagctggctcaaacgtcatgcagaccttyaccttctatgcgagtgaagacaagctggagaacaggggcaactatgtcttagagaagatatctgtgagtaaaaccagccgtgggacttttagaaggatat

SEQ ID NO: 275997 - DNA, 201 bp, Homo sapiens
gaagatgccacccgttgggggcaaaaaggccaagaaggtgagtctccaggggacccgagggcgctctccttcccctcccacctgctctgtatcccagcctytgggagcgcagaggggccctcggaccctgcctggtacccatcatcctcctactccctcccctccctcagcctcagaccagaatgtgcttccagaacttct

SEQ ID NO: 275998 - DNA, 201 bp, Homo sapiens
cataggtgtgcagggtctgagctaatgtcccaaggggcaaaaggcagagagagggtgaatgaaggatttctaagaaagctgatgcctgagttgaattctgmgagaggaattacattgctagaggaacagccctcaggaaagcactgagaagtggaaagagaatgacacattgagaaactggaagtttgagaatagcagaga

SEQ ID NO: 275999 - DNA, 201 bp, Homo sapiens; identical to SEQ ID NO: 55164

SEQ ID NO: 276000 - DNA, 201 bp, Homo sapiens
cggtggctcacacctgtaatcccagcactttgggaggccaaggcgtgtggatcacgaggtcaggagtttgagaacagcctggccaacatggtgaaaccccrtctctactaaaaatacaaaaattagccaggcgtggtggcgggcgcctgtaatcccagctacttgggaggcggaggcaggagaattgcttgaaactgggag

SEQ ID NO: 276001 - DNA, 201 bp, Homo sapiens
gtttgagaacagcctggccaacatggtgaaaccccgtctctactaaaaatacaaaaattagccaggcgtggtggcgggcgcctgtaatcccagctacttgrgaggcggaggcaggagaattgcttgaaactgggaggcaaatgttgcagtgagccgaaatcgcaccacagcactccagcctgggtgaaagagcaaaactcc

SEQ ID NO: 276002 - DNA, 201 bp, Homo sapiens
tgaaggagggcttggaggctgcccgactgaaagctcacctgatgagccagcccttggcttaccacactcctgactgcaacaagcagggattcatcgatctyccagaattcccatttggtaagaccaacatttgatgaatcatctcaatatcttcatttgatatgcatataaactcaagtaaatctatacccagagatcttt

SEQ ID NO: 276003 - DNA, 201 bp, Homo sapiens
tgagaacagcctggccaacatggtgaaaccccgtctctactaaaaatacaaaaattagccaggcgtggtggcgggcgcctgtaatcccagctacttgggasgcggaggcaggagaattgcttgaaactgggaggcaaatgttgcagtgagccgaaatcgcaccacagcactccagcctgggtgaaagagcaaaactccgtc

SEQ ID NO: 276004 - DNA, 201 bp, Homo sapiens
aattcacctatggctcaaaaacactagtggcacatagcagaaaaagcaaggaagacatttagaatcaagactttggggtgcaagtcctagctttgccccamctccctgcagaacattgggtaaatcaccccacttctctgtccttcaattttctcaactgtaggataacaagtttctaatgccttgctggaaaactccaca

SEQ ID NO: 276005 - DNA, 201 bp, Homo sapiens
  misc_feature (1)...(201): n = A,T,C or G
tgcttgatcacttgaggtggagactgcagtgagctgagatcacgctactgcactccagcctgggcaacagagtgagattgtgtctcaaaaaatgaaaaaanaacttcctgattcctgatgaagagaggagagctggccctgctggtttctggtgcatccctaagtctatcatgttcttcccactcacaggagcatccatca

SEQ ID NO: 276006 - DNA, 201 bp, Homo sapiens
ctgccaggttcaagcgattctcctgtctcagcctccccagtagctgggattacaggcgctcaccaccacacgcagctaatttttgtctttttagtagagayggggtttcaccatgttggccaggctggtctcgaactcctgacctcaagtgatccacccgcctcagcctcccaaagtactgggattacaggcgtgagccac

SEQ ID NO: 276007 - DNA, 201 bp, Homo sapiens
agggtggaaggtatttgcagcttgccaacaacgtgttctgcttgccaaggacagatctcccttaatgtacacaattcacagaattcagaggccaaggatawttttccttggaattagagggtctgaggcttgtgtacatggcagagaataatgaacgaaatttttgaaccacttaacttgaactatatacagtcattggtt

SEQ ID NO: 276008 - DNA, 201 bp, Homo sapiens
agttcgtctctgcaagcttggtcgccctgggatggattcctcctcctcttcctccgcggcgggtttgggtgcagtggacccgcagttgcagcatttcatckaggtagagactcaaaagcagcgcttccagcagctggtgcaccagatgactgaactttgttgggtgaggagcctggggctgggacctgaacactgtaccta

SEQ ID NO: 276009 - DNA, 201 bp, Homo sapiens
tttatcctttcacccttttattctgtagttaacttaaaggcatttagttcaaacagcattgtggagttaaaaccaaattcattgaaaggttacttcacttrtattttgccattttcttgctctggaatatcccagctctgccattttctggccctatgattttgggtaaagtatctctgtgccacagttttcctctttgta

SEQ ID NO: 276010 - DNA, 201 bp, Homo sapiens
ggaaatttactccctggggaagatgccatatgagagatttactaacagtgagactgctgaacacattgcccaaggcctacgtctctacaggcctcatctgscttcagagaaggtatataccatcatgtacagttgctggcatgaggtaagtgctttattaggatctcttaaattatttccttgaatctacttgcccattta

SEQ ID NO: 276011 - DNA, 201 bp, Homo sapiens
aatacctttttttttttttaagatgagatctcgctctgtttccaaggctggagtgcagtcatttccatgtagtatgtacttttcccgagtactgccatgastcacttgccattttcaaggaatagcagcccactgactcaacaccctcacagacacacccaggatcaatactttgtatccttcaatccaatcaggttgaca

SEQ ID NO: 276012 - DNA, 201 bp, Homo sapiens
atcctaatgcaacaagtcctgaatcccttgcaggtatgtcctggatgatgaatacacaagctcagtaggctccaaatttccagtccggtggtccccaccgraagtcctgatgtatagcaagttcagcagcaaatctgacatttgggcttttggtaagtggataagattacacagattatacagctcaaaggataagaaatg

SEQ ID NO: 276013 - DNA, 201 bp, Homo sapiens
caagcctccaaatcctaatgcaacaagtcctgaatcccttgcaggtatgtcctggatgatgaatacacaagctcagtaggctccaaatttccagtccggtdgtccccaccggaagtcctgatgtatagcaagttcagcagcaaatctgacatttgggcttttggtaagtggataagattacacagattatacagctcaaag

SEQ ID NO: 276014 - DNA, 201 bp, Homo sapiens
tatcaagcctccaaatcctaatgcaacaagtcctgaatcccttgcaggtatgtcctggatgatgaatacacaagctcagtaggctccaaatttccagtccsgtggtccccaccggaagtcctgatgtatagcaagttcagcagcaaatctgacatttgggcttttggtaagtggataagattacacagattatacagctca

SEQ ID NO: 276015 - DNA, 201 bp, Homo sapiens
atatcaagcctccaaatcctaatgcaacaagtcctgaatcccttgcaggtatgtcctggatgatgaatacacaagctcagtaggctccaaatttccagtcyggtggtccccaccggaagtcctgatgtatagcaagttcagcagcaaatctgacatttgggcttttggtaagtggataagattacacagattatacagctc

SEQ ID NO: 276016 - DNA, 201 bp, Homo sapiens
actttgtatccttcaatccaatcaggttgacactcattattaaccatcacaaacttctttataaattgttatggaatgagctccaatacatattgttaaakttaaaaagcaagattaaagactaccatttgtgtaaaaagggggggggattaaaatatatgtatgcatatttgcttgaataagcattaattaactcttgaa

SEQ ID NO: 276017 - DNA, 201 bp, Homo sapiens
actcacgggggcggtcccagaggcagctagctgtggttccggttccgtcgcggagacacgtgaaggtcggtgcggagttcgtctctgcaagcttggtcgcyctgggatggattcctcctcctcttcctccgcggcgggtttgggtgcagtggacccgcagttgcagcatttcatcgaggtagagactcaaaagcagcgctt

SEQ ID NO: 276018 - DNA, 201 bp, Homo sapiens
atcactgaaataaaagctatataagattcaactctgtgattgagaaggcatcctattgcagttattatctgcaacccggagagatttagcatgggctgatyccaaggttaaaatgtagtcagtcagtctgggtacctgctctgtgtaaggtacagcacagtattccaggggttcctgacctttttgagagaaaagagaacc

SEQ ID NO: 276019 - DNA, 201 bp, Homo sapiens
cctgctatccaaaaagactgcaaaccaatttaataatttttttcaccttctaggggttttgatgtgggaaatttactccctggggaagatgccatatgagwgatttactaacagtgagactgctgaacacattgcccaaggcctacgtctctacaggcctcatctggcttcagagaaggtatataccatcatgtacagttg

SEQ ID NO: 276020 - DNA, 201 bp, Homo sapiens
ctaaaatggacctacttgttgggagcctctagtgcaaatccatgaaatctggggaaatgaacatctctaaaagcttcaagtccctgtttagattttccccrtaaaggtgctagaaggactttttttttttttttttttgagacggagtcttgctctgtcgcccaggctggagtgcagcggtgggatctcggctcactgcaa

SEQ ID NO: 276021 - DNA, 201 bp, Homo sapiens
tgcaaaccaatttaataatttttttcaccttctaggggttttgatgtgggaaatttactccctggggaagatgccatatgagagatttactaacagtgagmctgctgaacacattgcccaaggcctacgtctctacaggcctcatctggcttcagagaaggtatataccatcatgtacagttgctggcatgaggtaagtgc

SEQ ID NO: 276022 - DNA, 201 bp, Homo sapiens
ccttgaattctggattctagccactctaacactttactttttctttggttttagaaagcagatgagcgtcccactttcaaaattcttctgagcaatattcyagatgtcatggatgaagaatcctgagctcgccaataagcttcttggttctacttctcttctccacaagccccaatttcactttctcagaggaaatcccaa

SEQ ID NO: 276023 - DNA, 201 bp, Homo sapiens
atgatgtaacataacttaattttaggagggtctggctgctctttgggcaacatcacatggtgaagaagttgtaacagtagcagtagtagtaagaataatgrcattttgaaatccaggaaaatgagactttaaaatgcatataccttgtaactatatgtccccgttgacttttttttccctacaaaatttaatgtgaggcca

SEQ ID NO: 276024 - DNA, 201 bp, Homo sapiens; identical to SEQ ID NO: 55170

SEQ ID NO: 276025 - DNA, 201 bp, Homo sapiens; identical to SEQ ID NO: 55172

SEQ ID NO: 276026 - DNA, 201 bp, Homo sapiens
tttttttcaccttctaggggttttgatgtgggaaatttactccctggggaagatgccatatgagagatttactaacagtgagactgctgaacacattgccyaaggcctacgtctctacaggcctcatctggcttcagagaaggtatataccatcatgtacagttgctggcatgaggtaagtgctttattaggatctcttaa

SEQ ID NO: 276027 - DNA, 201 bp, Homo sapiens
tccaaatcctaatgcaacaagtcctgaatcccttgcaggtatgtcctggatgatgaatacacaagctcagtaggctccaaatttccagtccggtggtcccyaccggaagtcctgatgtatagcaagttcagcagcaaatctgacatttgggcttttggtaagtggataagattacacagattatacagctcaaaggataag

SEQ ID NO: 276028 - DNA, 201 bp, Homo sapiens; identical to SEQ ID NO: 55173

SEQ ID NO: 276029 - DNA, 201 bp, Homo sapiens
cctaatgcaacaagtcctgaatcccttgcaggtatgtcctggatgatgaatacacaagctcagtaggctccaaatttccagtccggtggtccccaccggamgtcctgatgtatagcaagttcagcagcaaatctgacatttgggcttttggtaagtggataagattacacagattatacagctcaaaggataagaaatgca

SEQ ID NO: 276030 - DNA, 201 bp, Homo sapiens; identical to SEQ ID NO: 55175

SEQ ID NO: 276031 - DNA, 201 bp, Homo sapiens
ccaactgattctaatctttgaggttgatctaggaagactaggacccctgctatccaaaaagactgcaaaccaatttaataatttttttcaccttctagggkttttgatgtgggaaatttactccctggggaagatgccatatgagagatttactaacagtgagactgctgaacacattgcccaaggcctacgtctctacag

SEQ ID NO: 276032 - DNA, 201 bp, Homo sapiens; identical to SEQ ID NO: 55176

SEQ ID NO: 276033 - DNA, 201 bp, Homo sapiens
aggacccctgctatccaaaaagactgcaaaccaatttaataatttttttcaccttctaggggttttgatgtgggaaatttactccctggggaagatgccakatgagagatttactaacagtgagactgctgaacacattgcccaaggcctacgtctctacaggcctcatctggcttcagagaaggtatataccatcatgta

SEQ ID NO: 276034 - DNA, 201 bp, Homo sapiens; identical to SEQ ID NO: 55177

SEQ ID NO: 276035 - DNA, 201 bp, Homo sapiens
cttctaggggttttgatgtgggaaatttactccctggggaagatgccatatgagagatttactaacagtgagactgctgaacacattgcccaaggcctacstctctacaggcctcatctggcttcagagaaggtatataccatcatgtacagttgctggcatgaggtaagtgctttattaggatctcttaaattatttcct

SEQ ID NO: 276036 - DNA, 201 bp, Homo sapiens
ccgcgggactcgcgacaacgtcggggattcggggtggggggcgggcacctggcagcaacccttgattttctcaggttcctgtggcctagccggatgggagragggtgactccgcttctctggggactgtcattccggacctcggctttgttggtgtagaggactgggtatcaaagaagacttatgccactggacacccagc

SEQ ID NO: 276037 - DNA, 201 bp, Homo sapiens
ttgatgtgggaaatttactccctggggaagatgccatatgagagatttactaacagtgagactgctgaacacattgcccaaggcctacgtctctacaggcytcatctggcttcagagaaggtatataccatcatgtacagttgctggcatgaggtaagtgctttattaggatctcttaaattatttccttgaatctacttg

SEQ ID NO: 276038 - DNA, 201 bp, Homo sapiens
aatcctaatgcaacaagtcctgaatcccttgcaggtatgtcctggatgatgaatacacaagctcagtaggctccaaatttccagtccggtggtccccaccsgaagtcctgatgtatagcaagttcagcagcaaatctgacatttgggcttttggtaagtggataagattacacagattatacagctcaaaggataagaaat

SEQ ID NO: 276039 - DNA, 201 bp, Homo sapiens
caaatcctaatgcaacaagtcctgaatcccttgcaggtatgtcctggatgatgaatacacaagctcagtaggctccaaatttccagtccggtggtccccaycggaagtcctgatgtatagcaagttcagcagcaaatctgacatttgggcttttggtaagtggataagattacacagattatacagctcaaaggataagaa

SEQ ID NO: 276040 - DNA, 201 bp, Homo sapiens
atgcaacaagtcctgaatcccttgcaggtatgtcctggatgatgaatacacaagctcagtaggctccaaatttccagtccggtggtccccaccggaagtcytgatgtatagcaagttcagcagcaaatctgacatttgggcttttggtaagtggataagattacacagattatacagctcaaaggataagaaatgcaatgg

SEQ ID NO: 276041 - DNA, 201 bp, Homo sapiens
gttccctttgtgattctgtatcttgtcctgagcaggagaagtgcatggacaagcctgggccaaagttggacagtcgggctgaggcctgttttgtgaactgsgttgagcgcttcattgatacaagccagttcatcttgaatcgactggaacagacccagaaatccaagccagttttctcagaaagcctttctgactgatctc

SEQ ID NO: 276042 - DNA, 201 bp, Homo sapiens
atcaagcctccaaatcctaatgcaacaagtcctgaatcccttgcaggtatgtcctggatgatgaatacacaagctcagtaggctccaaatttccagtccgktggtccccaccggaagtcctgatgtatagcaagttcagcagcaaatctgacatttgggcttttggtaagtggataagattacacagattatacagctcaa

SEQ ID NO: 276043 - DNA, 201 bp, Homo sapiens
tctaggggttttgatgtgggaaatttactccctggggaagatgccatatgagagatttactaacagtgagactgctgaacacattgcccaaggcctacgthtctacaggcctcatctggcttcagagaaggtatataccatcatgtacagttgctggcatgaggtaagtgctttattaggatctcttaaattatttccttg

SEQ ID NO: 276044 - DNA, 201 bp, Homo sapiens
aaacctatgctttcgattgttgtgctacactgttcttccatatcattttattttattttattttattttattttattttattttattttatttatttatttagagacggagtctctctctgtcatccaggctggagtgcagtggcacgatctcggctcactacaacctccgcctctcgggatcaagcaattctcctgcctc

SEQ ID NO: 276045 - DNA, 201 bp, Homo sapiens
cccaaaacctatgctttcgattgttgtgctacactgttcttccatatcattttattttattttattttattttattttattttattttattttatttatttatttagagacggagtctctctctgtcatccaggctggagtgcagtggcacgatctcggctcactacaacctccgcctctcgggatcaagcaattctcctg

SEQ ID NO: 276046 - DNA, 201 bp, Homo sapiens
gtaagcaaatatcaagcctccaaatcctaatgcaacaagtcctgaatcccttgcaggtatgtcctggatgatgaatacacaagctcagtaggctccaaatytccagtccggtggtccccaccggaagtcctgatgtatagcaagttcagcagcaaatctgacatttgggcttttggtaagtggataagattacacagatta

SEQ ID NO: 276047 - DNA, 201 bp, Homo sapiens
tatccccaaaacctatgctttcgattgttgtgctacactgttcttccatatcattttattttattttattttattttattttattttattttattttatttatttatttagagacggagtctctctctgtcatccaggctggagtgcagtggcacgatctcggctcactacaacctccgcctctcgggatcaagcaattct

SEQ ID NO: 276048 - DNA, 201 bp, Homo sapiens
gatctatccccaaaacctatgctttcgattgttgtgctacactgttcttccatatcattttattttattttattttattttattttattttattttattttatttatttatttagagacggagtctctctctgtcatccaggctggagtgcagtggcacgatctcggctcactacaacctccgcctctcgggatcaagcaa

SEQ ID NO: 276049 - DNA, 201 bp, Homo sapiens
gcctgtgtgtgtttgtgacactcttgtgaccgtgccaagaaaacgtaagcaaatatcaagcctccaaatcctaatgcaacaagtcctgaatcccttgcagktatgtcctggatgatgaatacacaagctcagtaggctccaaatttccagtccggtggtccccaccggaagtcctgatgtatagcaagttcagcagcaaat

SEQ ID NO: 276050 - DNA, 201 bp, Homo sapiens
tatgtcctggatgatgaatacacaagctcagtaggctccaaatttccagtccggtggtccccaccggaagtcctgatgtatagcaagttcagcagcaaatmtgacatttgggcttttggtaagtggataagattacacagattatacagctcaaaggataagaaatgcaatgggaaaattcacactttgcaacctccacag

SEQ ID NO: 276051 - DNA, 201 bp, Homo sapiens
acatacacagatcaatcaatatgattcatcatatcaacacaatggaggataaaaaatgatgtgggtgggcatggtggctcacgcctgtaatcccagcactytgggaggccaaggtgggcggatcacaaggtcaggagatcgagaccacggtgaaaccccgtctctactaaaaatacaaaaaattagccgggcgtggtggtg

SEQ ID NO: 276052 - DNA, 201 bp, Homo sapiens
ggatgatgaatacacaagctcagtaggctccaaatttccagtccggtggtccccaccggaagtcctgatgtatagcaagttcagcagcaaatctgacattygggcttttggtaagtggataagattacacagattatacagctcaaaggataagaaatgcaatgggaaaattcacactttgcaacctccacagagatattg

SEQ ID NO: 276053 - DNA, 201 bp, Homo sapiens
gatgaatacacaagctcagtaggctccaaatttccagtccggtggtccccaccggaagtcctgatgtatagcaagttcagcagcaaatctgacatttgggyttttggtaagtggataagattacacagattatacagctcaaaggataagaaatgcaatgggaaaattcacactttgcaacctccacagagatattgttct

SEQ ID NO: 276054 - DNA, 201 bp, Homo sapiens
gatttactaacagtgagactgctgaacacattgcccaaggcctacgtctctacaggcctcatctggcttcagagaaggtatataccatcatgtacagttgytggcatgaggtaagtgctttattaggatctcttaaattatttccttgaatctacttgcccatttagctggccattcagccaccaaagactgatagctgca

SEQ ID NO: 276055 - DNA, 201 bp, Homo sapiens
ggggaaccaactgattctaatctttgaggttgatctaggaagactaggacccctgctatccaaaaagactgcaaaccaatttaataatttttttcaccttytaggggttttgatgtgggaaatttactccctggggaagatgccatatgagagatttactaacagtgagactgctgaacacattgcccaaggcctacgtct

SEQ ID NO: 276056 - DNA, 201 bp, Homo sapiens
gattctaatctttgaggttgatctaggaagactaggacccctgctatccaaaaagactgcaaaccaatttaataatttttttcaccttctaggggttttgmtgtgggaaatttactccctggggaagatgccatatgagagatttactaacagtgagactgctgaacacattgcccaaggcctacgtctctacaggcctca

SEQ ID NO: 276057 - DNA, 201 bp, Homo sapiens
ctaatctttgaggttgatctaggaagactaggacccctgctatccaaaaagactgcaaaccaatttaataatttttttcaccttctaggggttttgatgtrggaaatttactccctggggaagatgccatatgagagatttactaacagtgagactgctgaacacattgcccaaggcctacgtctctacaggcctcatctg

SEQ ID NO: 276058 - DNA, 201 bp, Homo sapiens
tctttgaggttgatctaggaagactaggacccctgctatccaaaaagactgcaaaccaatttaataatttttttcaccttctaggggttttgatgtgggawatttactccctggggaagatgccatatgagagatttactaacagtgagactgctgaacacattgcccaaggcctacgtctctacaggcctcatctggctt

SEQ ID NO: 276059 - DNA, 201 bp, Homo sapiens
atctttgaggttgatctaggaagactaggacccctgctatccaaaaagactgcaaaccaatttaataatttttttcaccttctaggggttttgatgtgggraatttactccctggggaagatgccatatgagagatttactaacagtgagactgctgaacacattgcccaaggcctacgtctctacaggcctcatctggct

SEQ ID NO: 276060 - DNA, 201 bp, Homo sapiens
aatctttgaggttgatctaggaagactaggacccctgctatccaaaaagactgcaaaccaatttaataatttttttcaccttctaggggttttgatgtggraaatttactccctggggaagatgccatatgagagatttactaacagtgagactgctgaacacattgcccaaggcctacgtctctacaggcctcatctggc

SEQ ID NO: 276061 - DNA, 201 bp, Homo sapiens
  misc_feature (1)...(201): n = A,T,C or G
tttgatgtgggaaatttactccctggggaagatgccatatgagagatttactaacagtgagactgctgaacacattgcccaaggcctacgtctctacaggnctcatctggcttcagagaaggtatataccatcatgtacagttgctggcatgaggtaagtgctttattaggatctcttaaattatttccttgaatctactt

SEQ ID NO: 276062 - DNA, 201 bp, Homo sapiens
tttcaccttctaggggttttgatgtgggaaatttactccctggggaagatgccatatgagagatttactaacagtgagactgctgaacacattgcccaagrcctacgtctctacaggcctcatctggcttcagagaaggtatataccatcatgtacagttgctggcatgaggtaagtgctttattaggatctcttaaatta

SEQ ID NO: 276063 - DNA, 201 bp, Homo sapiens
gaagatgccatatgagagatttactaacagtgagactgctgaacacattgcccaaggcctacgtctctacaggcctcatctggcttcagagaaggtatatrccatcatgtacagttgctggcatgaggtaagtgctttattaggatctcttaaattatttccttgaatctacttgcccatttagctggccattcagccacc

SEQ ID NO: 276064 - DNA, 201 bp, Homo sapiens
gatgcattaagcaaaaacagtgcctgtcacagcacgcatgcaatgttatttgaatgaatctgaaagttgggcacaaactgccatagcctcatttccctacrtcgggagaggaaaactccatcaaaaaacgaaagccaggggcccaggatagccaactaatcgacccagtcaactaactgacccagtgcacaactctggtag

SEQ ID NO: 276065 - DNA, 201 bp, Homo sapiens; identical to SEQ ID NO: 55179

SEQ ID NO: 276066 - DNA, 201 bp, Homo sapiens
gagactcaaaagcagcgcttccagcagctggtgcaccagatgactgaactttgttgggtgaggagcctggggctgggacctgaacactgtacctactttcyctctgtccttgtaccgcgggactcgcgacaacgtcggggattcggggtggggggcgggcacctggcagcaacccttgattttctcaggttcctgtggcct

SEQ ID NO: 276067 - DNA, 201 bp, Homo sapiens
gggatgcaaggttgattagacatacacagatcaatcaatatgattcatcatatcaacacaatggaggataaaaaatgatgtgggtgggcatggtggctcamgcctgtaatcccagcactttgggaggccaaggtgggcggatcacaaggtcaggagatcgagaccacggtgaaaccccgtctctactaaaaatacaaaaaa

SEQ ID NO: 276068 - DNA, 201 bp, Homo sapiens; identical to SEQ ID NO: 55181

SEQ ID NO: 276069 - DNA, 201 bp, Homo sapiens
tgcaacaagtcctgaatcccttgcaggtatgtcctggatgatgaatacacaagctcagtaggctccaaatttccagtccggtggtccccaccggaagtccygatgtatagcaagttcagcagcaaatctgacatttgggcttttggtaagtggataagattacacagattatacagctcaaaggataagaaatgcaatggg

SEQ ID NO: 276070 - DNA, 201 bp, Homo sapiens
gcaccggcgccaaggtgtgggaggcggcggggtggagttggacgcctgcctcgcgccgacgcagtgcactcacgggggcggtcccagaggcagctagctgwggttccggttccgtcgcggagacacgtgaaggtcggtgcggagttcgtctctgcaagcttggtcgccctgggatggattcctcctcctcttcctccgcgg

SEQ ID NO: 276071 - DNA, 201 bp, Homo sapiens
ccatatgagagatttactaacagtgagactgctgaacacattgcccaaggcctacgtctctacaggcctcatctggcttcagagaaggtatataccatcahgtacagttgctggcatgaggtaagtgctttattaggatctcttaaattatttccttgaatctacttgcccatttagctggccattcagccaccaaagact

SEQ ID NO: 276072 - DNA, 201 bp, Homo sapiens
agatttactaacagtgagactgctgaacacattgcccaaggcctacgtctctacaggcctcatctggcttcagagaaggtatataccatcatgtacagttrctggcatgaggtaagtgctttattaggatctcttaaattatttccttgaatctacttgcccatttagctggccattcagccaccaaagactgatagctgc

SEQ ID NO: 276073 - DNA, 201 bp, Homo sapiens
ttactaacagtgagactgctgaacacattgcccaaggcctacgtctctacaggcctcatctggcttcagagaaggtatataccatcatgtacagttgctgrcatgaggtaagtgctttattaggatctcttaaattatttccttgaatctacttgcccatttagctggccattcagccaccaaagactgatagctgcacac

SEQ ID NO: 276074 - DNA, 201 bp, Homo sapiens
taacagtgagactgctgaacacattgcccaaggcctacgtctctacaggcctcatctggcttcagagaaggtatataccatcatgtacagttgctggcatkaggtaagtgctttattaggatctcttaaattatttccttgaatctacttgcccatttagctggccattcagccaccaaagactgatagctgcacacattc

SEQ ID NO: 276075 - DNA, 201 bp, Homo sapiens
aaccaatttaataatttttttcaccttctaggggttttgatgtgggaaatttactccctggggaagatgccatatgagagatttactaacagtgagactgmtgaacacattgcccaaggcctacgtctctacaggcctcatctggcttcagagaaggtatataccatcatgtacagttgctggcatgaggtaagtgcttta

SEQ ID NO: 276076 - DNA, 201 bp, Homo sapiens
ggacccctgctatccaaaaagactgcaaaccaatttaataatttttttcaccttctaggggttttgatgtgggaaatttactccctggggaagatgccatvtgagagatttactaacagtgagactgctgaacacattgcccaaggcctacgtctctacaggcctcatctggcttcagagaaggtatataccatcatgtac

SEQ ID NO: 276077 - DNA, 201 bp, Homo sapiens
ctctgcctcctgggttcaagagattctcctgcctcagcctcctgagtagctgggattacaggcgcgtgccaccacacctggctaatttttttgaatttttrgtagagacggggtttcaccatattggccaggctggtcttgaactcctgacctcgtgatccactcgccttggtcttcaaagtatatgctgggattacaggc

SEQ ID NO: 276078 - DNA, 201 bp, Homo sapiens
tttccccattgtaatacctttttttttttttaagatgagatctcgctctgtttccaaggctggagtgcagtcatttccatgtagtatgtacttttcccgastactgccatgactcacttgccattttcaaggaatagcagcccactgactcaacaccctcacagacacacccaggatcaatactttgtatccttcaatcca

SEQ ID NO: 276079 - DNA, 201 bp, Homo sapiens; identical to SEQ ID NO: 55183

SEQ ID NO: 276080 - DNA, 201 bp, Homo sapiens
atgccaaggacacacagcattcattcttttcactcagtgcactctgaactatcgagatttcctggaaagctcttatgaaatgccaatatcaagggaattaraaacttttatattaattcttaagaatgttcatgttgattttccttttactttaatcaagatggttaattaggaaaaaatcatcctggcagtagagaagtc

SEQ ID NO: 276081 - DNA, 201 bp, Homo sapiens
agacttgagagtggtcactgaaccttcaggagctgaggggagggcagccggccggccctgggcgggagccaggtgcgggccggaggggaggcaggtgtggrgccgggcgggagtcaggtgcggggtctaaggacaggtgcggggccgggtgggagccaggtgcaggggtgcggcgggagctgggtgcggggcctaaggaca

SEQ ID NO: 276082 - DNA, 201 bp, Homo sapiens
gatgagcttaacaaaaaatctcatctcatcatgttttaagaaagtttacgaatttgtgttggaccacatgttggacaagcttggtctagatcattagaccragactctgagagtcatcagggtgagatggaactggagccgaggctgtgtggatggggagaagggaagcgagtctcaagctgggtgggacacgtggggctg

SEQ ID NO: 276083 - DNA, 201 bp, Homo sapiens; identical to SEQ ID NO: 55188

SEQ ID NO: 276084 - DNA, 201 bp, Homo sapiens; identical to SEQ ID NO: 55189

SEQ ID NO: 276085 - DNA, 201 bp, Homo sapiens; identical to SEQ ID NO: 55190

SEQ ID NO: 276086 - DNA, 201 bp, Homo sapiens
gcaggacagtctggctggagcctgtggaacggcagtggggctcctcccaggtgctcctccctgctggcctcaatgagccctctatcctagcacacgccccygctgaaaggcacactgaaggagccaaccctctcccctctggacgtggcaagggtttcctgtcggggcagccccaggcatcttcacggccaggactcaggt

SEQ ID NO: 276087 - DNA, 201 bp, Homo sapiens
gaccgagctgctggtgcgaagagcaggcccgactgttccaggcagggggaactgcaggctctgccagggccagtgtggtcaggggacagaaggaggtctaygtagccagccggcaggcagaggagatggtacagtgtgagggctgagcgggagcagagtgggttcaccccaggacctgaggaagccgctgaagctgggagt

SEQ ID NO: 276088 - DNA, 201 bp, Homo sapiens
gggttcctctggatcagccccgaggaggctccgatgagcccaaatccctgatgcagctcacaggcagctctcggtggaacgggaggaggcttcaagggagsgggtgctgcaggttccctgcatgggataaccgagaacacagaaccttccagaatcctggagagcagggaggggcgggttgctgtgagctggtgggccctg

SEQ ID NO: 276089 - DNA, 201 bp, Homo sapiens; identical to SEQ ID NO: 55186

SEQ ID NO: 276090 - DNA, 201 bp, Homo sapiens; identical to SEQ ID NO: 55187

SEQ ID NO: 276091 - DNA, 201 bp, Homo sapiens
gtgaccactcttccatcagcagacacatctctctcccaaacacctttcccccttagtgacccctggaaaagccgtctcttagtgtcccagctccatttctyattttattcttgaggttgtatgccctatggcctttcctaccacattttcaacaaagcagaggtttggaaatgtgaggctcttggtgtcaagtgaatccgg

SEQ ID NO: 276092 - DNA, 201 bp, Homo sapiens
ccatagcaggcattaataagtgtttctttgagatgcgccacccgtgttctctcaggcgctgttagcatgagtgtgtgaaggccttggcttctgccttggcygtgctgaagagtctgtaggtcagtggggtttgctctttaccatggcagtgaacacagtgggcactctgaggcctgcctgcctgctctctgggtgtgggaa

SEQ ID NO: 276093 - DNA, 201 bp, Homo sapiens
caggaatcaggtaacgttttcaaggagtctggcccatagcaggcattaataagtgtttctttgagatgcgccacccgtgttctctcaggcgctgttagcaygagtgtgtgaaggccttggcttctgccttggctgtgctgaagagtctgtaggtcagtggggtttgctctttaccatggcagtgaacacagtgggcactct

SEQ ID NO: 276094 - DNA, 201 bp, Homo sapiens; identical to SEQ ID NO: 55193

SEQ ID NO: 276095 - DNA, 201 bp, Homo sapiens
ggaggacccagccagggaagcttctcaggccgggattcactgagctatagttggagggcagagatatggaacctctgcccagggccagtgttctcgatcgragcaccgggagctgtctccccacgccccactgtggcacttggcggctgtccagagacaggcagctctcaccaaggcggcgcagacgtgggcctggtgccc

SEQ ID NO: 276096 - DNA, 201 bp, Homo sapiens
cctgcggccgagccaggccccgcagtgagccgagcagttctttggcgccaaggcacagacacgctggcctccaggcagtcagggcagcgcagactctggtmcctgcagtcatttgcattaatagaaaggcgccaggggacagacactgccaaaaacaacaacagatacgaaaaagaaggagtgtttttatttggtttggat

SEQ ID NO: 276097 - DNA, 201 bp, Homo sapiens
ctccaggcagtcagggcagcgcagactctggtccctgcagtcatttgcattaatagaaaggcgccaggggacagacactgccaaaaacaacaacagatacraaaaagaaggagtgtttttatttggtttggatgtgtttggtattccaatgctgcaggagcctaacccagaggaagtggagactcctttactgcacatctg

SEQ ID NO: 276098 - DNA, 201 bp, Homo sapiens
ttcccacgttgccagctgggacaggggagatggagtaattttgctgtggaaagacttcacgtcttgccgaatgaaagtaagcaaagatactgctagagtcrggaatctagagtcgggaattcattaagccaagggagtaagaatggccacagagtagtgaaatactgtttcttctggaaaagtcagcctccagcgcctgca

SEQ ID NO: 276099 - DNA, 201 bp, Homo sapiens; identical to SEQ ID NO: 55195

SEQ ID NO: 276100 - DNA, 201 bp, Homo sapiens; identical to SEQ ID NO: 55184

SEQ ID NO: 276101 - DNA, 201 bp, Homo sapiens
gcagcctcttcgcataggcagtgatttgcgattactttaaagctcaccttttttcttcccctctctgttcgctgctgtcagcataatgattgtgttccttycctatgggatccatctgttttgtaaacaataaagcgtctgagggagtgtagttttctgtctcccggtctgtgctgactgtttgcagaggcctggccacga

SEQ ID NO: 276102 - DNA, 201 bp, Homo sapiens
gatcagccggccttaaagtagtgagatgatcctggattttcccagggagcccagtgtaatcacagggtccttaagaacagaagagggaagcagaagagccrgagggagatgatggccaagagccttggggaagtgcagtgggcgggctttggagggggaggaggggccaccaggcagggaatgtgggtgcctccagaagct

SEQ ID NO: 276103 - DNA, 201 bp, Homo sapiens
gaataggaaggcgtgcagtgttgcacagcgacctgggagaggtcctgctcctgggagtgcagggggaaaaacccactgaggctttctctgcaggctgagaygtttgtccttcagatggaaggcattgggatctactagacttggaatccagacttgctttttggaaaaattattctgtcagttttgtggagggtgatttga

SEQ ID NO: 276104 - DNA, 201 bp, Homo sapiens
gatccgctatctcccagctcttcctccctctccctctgaggagctttgctgagaaaggtccctccaggcctggaccacagaccctccctgcagccccaccscaggcctctcagcaggacagtctggctggagcctgtggaacggcagtggggctcctcccaggtgctcctccctgctggcctcaatgagccctctatccta

SEQ ID NO: 276105 - DNA, 201 bp, Homo sapiens
ggggctggtgacgacgacacctcacgatgtctgacagcagtctatgcaggcaccgttgttctgtgctggcaagcaccgtcttcccgggcctgcagctcagwtgtggcagctgagcagctcgatctttggggtgcttgatccaggttgtgggttcataatatgcctaaggtggggcccccggtagagtgcagaggggctgtt

SEQ ID NO: 276106 - DNA, 201 bp, Homo sapiens
aaaggcgccaggggacagacactgccaaaaacaacaacagatacgaaaaagaaggagtgtttttatttggtttggatgtgtttggtattccaatgctgcargagcctaacccagaggaagtggagactcctttactgcacatctgtctgctccaggccaggcactgttctaggagccaggatacagaggtggagacagaaa

SEQ ID NO: 276107 - DNA, 201 bp, Homo sapiens
cagaggagacttgagagtggtcactgaaccttcaggagctgaggggagggcagccggccggccctgggcgggagccaggtgcgggccggaggggaggcagktgtggagccgggcgggagtcaggtgcggggtctaaggacaggtgcggggccgggtgggagccaggtgcaggggtgcggcgggagctgggtgcggggccta

SEQ ID NO: 276108 - DNA, 201 bp, Homo sapiens
gcgacttggggcagcctgtggatggaagggaggaaccagaagagcaggtgcccggcggctggggggactgacctgagtggcaggtgtgagccccacccagrggcctcggctgctgaagttggccacagagtggtctcctgggagaagtgggccggagatttgacaggaatggtgaaggtgaggacagtggctctccggagt

SEQ ID NO: 276109 - DNA, 201 bp, Homo sapiens
ctccctgaaccccagcagggggagggcatgtgtgagctgtgccaacccccctggagtggagcctgatgccagcctttttgttcaccagaaaggaggtgctrcttccacagggcagggacaggctttggggaggcacggtggccagtgtcttcctccagagaggagctggggaggtgccaaggacgctggcagaggagctgc

SEQ ID NO: 276110 - DNA, 201 bp, Homo sapiens; identical to SEQ ID NO: 55191

SEQ ID NO: 276111 - DNA, 201 bp, Homo sapiens
ccccgtcagccttcccctcccacctgactctcctgcgcttctctctttagagggaccacagagcaccagcctgcatggaacttccttcctcactcagcttyccacgttgccagctgggacaggggagatggagtaattttgctgtggaaagacttcacgtcttgccgaatgaaagtaagcaaagatactgctagagtcggg

SEQ ID NO: 276112 - DNA, 201 bp, Homo sapiens
ggcgatgatcccatcccgttattttcacacactctggaaaaggacaccttcccagatgtgtggtgccatttggaatgtgcctttcaactgagaaggtcgcyttttggctaaaattcctccaggtgtaacatcgatgatacaaattaagcagacacagcctctttacaaggcagtaactgcaaaccgtagagggttctgaag

SEQ ID NO: 276113 - DNA, 201 bp, Homo sapiens
ctgatgtattcatgtcagcacctgagtcacagcccaggtgcccggaagcagcctcttcgcataggcagtgatttgcgattactttaaagctcacctttttkcttcccctctctgttcgctgctgtcagcataatgattgtgttccttccctatgggatccatctgttttgtaaacaataaagcgtctgagggagtgtagtt

SEQ ID NO: 276114 - DNA, 201 bp, Homo sapiens
cactcagtgcactctgaactatcgagatttcctggaaagctcttatgaaatgccaatatcaagggaattagaaacttttatattaattcttaagaatgttyatgttgattttccttttactttaatcaagatggttaattaggaaaaaatcatcctggcagtagagaagtctgtttggggagacgttctgttttttgtttt

SEQ ID NO: 276115 - DNA, 201 bp, Homo sapiens; identical to SEQ ID NO: 134354

SEQ ID NO: 276116 - DNA, 201 bp, Homo sapiens; identical to SEQ ID NO: 134355

SEQ ID NO: 276117 - DNA, 201 bp, Homo sapiens; identical to SEQ ID NO: 134356

SEQ ID NO: 276118 - DNA, 201 bp, Homo sapiens; identical to SEQ ID NO: 134358

SEQ ID NO: 276119 - DNA, 201 bp, Homo sapiens; identical to SEQ ID NO: 134360

SEQ ID NO: 276120 - DNA, 201 bp, Homo sapiens
caactacagaaccagtttaatcatggaaccagaatgattcagtagttaactactttcagtactagttttataaagatcaataaagtcttgttttgctgatwagtgaagctgttaataagagtataaagatatttgtgacaaactttatagtattttttaatctcttacagtaatagaagcaccttgcatcttttaaaatta

SEQ ID NO: 276121 - DNA, 201 bp, Homo sapiens
cttttctgtttgccaaattatatgagttatctcattaaaaccacacaaaaacttaatatgaagaatgataaaaataattacataaaaatagtgaaattagstgagaaaatcttgccctcaagttggaagatgttatctctgagtaccttgaaaaagtgcattttcttttgcttactgataacaggcaaataatccagttaa

SEQ ID NO: 276122 - DNA, 201 bp, Homo sapiens
cctgctagaaagcaatttagtaatgaatatgaagaacattgagtaattttttttttttttggagatggagtttcgcttttgtcgcccaggctggagtgcartggcgcgatctcggctcactgcaacctccgcctcctgggttcaagtgattctcctgcctcagcctcctgaatagctgagattacaggcacccaccaccac

SEQ ID NO: 276123 - DNA, 201 bp, Homo sapiens
tggcgcgatctcggctcactgcaacctccgcctcctgggttcaagtgattctcctgcctcagcctcctgaatagctgagattacaggcacccaccaccacrcctggctaatttttgtatttttagtagagacagggttttaccatgtcagtcaggctggtcttgaactcctgacctcaggtgatccacccacctcggcctc

SEQ ID NO: 276124 - DNA, 201 bp, Homo sapiens; identical to SEQ ID NO: 134362

SEQ ID NO: 276125 - DNA, 201 bp, Homo sapiens
tcattagttcagaaagaaatccaaaagttcagttctctgagttgcttcaacacataagtatattagttttatgaaagattttttttttatttcataaaacyttaatacttctgccagaatcagaagtgcattgtgctctggtacaatttacatgaactttggttcccaccacctgttagctgcgcagcgttttgccaatta

SEQ ID NO: 276126 - DNA, 201 bp, Homo sapiens; identical to SEQ ID NO: 134363

SEQ ID NO: 276127 - DNA, 201 bp, Homo sapiens
atttacatggaagaaattaagaaaatttcaatctttctattattttaccaatcagaccagtcaccaaaagaatactgtgtagttacggtatctatcaatayacttcaaaatagatttgaggaaaacgctgtattcgaagggatcttacctgattttaccatttttcctaggtgctaaattgctcaaggtattatacagaga

SEQ ID NO: 276128 - DNA, 201 bp, Homo sapiens; identical to SEQ ID NO: 134364

SEQ ID NO: 276129 - DNA, 201 bp, Homo sapiens
aatcccagctacttgggaacgtgaggcaggagaatttcttgaacctgggtggcggaggttgcagtgagccgagatcacaccattgcactccagcctgggtracagagcgagactccatctcaagaaaaagagagagagaaaaaaagaaacatccctgcatagggattgtaccctttgcattcccatgtgcaatatgtgtga

SEQ ID NO: 276130 - DNA, 201 bp, Homo sapiens
tccttttatatatggaatcaagttgacaaccagtcactgagttaggcctagaacaccaatctgtttactctttagttgaatatattttcatgatagcataygtgtcagtagcttagcttttatattgaatttatttttccataagtgttgaaaagccataatgaaagtaactattccccctattgtttgtggtaaaaatcc

SEQ ID NO: 276131 - DNA, 201 bp, Homo sapiens; identical to SEQ ID NO: 134366

SEQ ID NO: 276132 - DNA, 201 bp, Homo sapiens; identical to SEQ ID NO: 55202

SEQ ID NO: 276133 - DNA, 201 bp, Homo sapiens; identical to SEQ ID NO: 134367

SEQ ID NO: 276134 - DNA, 201 bp, Homo sapiens; identical to SEQ ID NO: 134368

SEQ ID NO: 276135 - DNA, 201 bp, Homo sapiens; identical to SEQ ID NO: 55204

SEQ ID NO: 276136 - DNA, 201 bp, Homo sapiens; identical to SEQ ID NO: 55205

SEQ ID NO: 276137 - DNA, 201 bp, Homo sapiens
ctgtttaaaagatgaccatattttcaattttgagtaatacatattattcctactgttttttttcttttgccatgtttctagaaaacagctgtgtaacttaytgagcgttattttggtgttactgtataaaacatgcataataaatattcttatttatctcatgttacaagattggtcctggaattttcacagtttacgtta

SEQ ID NO: 276138 - DNA, 201 bp, Homo sapiens; identical to SEQ ID NO: 134370

SEQ ID NO: 276139 - DNA, 201 bp, Homo sapiens; identical to SEQ ID NO: 134372

SEQ ID NO: 276140 - DNA, 201 bp, Homo sapiens; identical to SEQ ID NO: 134373

SEQ ID NO: 276141 - DNA, 201 bp, Homo sapiens; identical to SEQ ID NO: 134375

SEQ ID NO: 276142 - DNA, 201 bp, Homo sapiens; identical to SEQ ID NO: 134376

SEQ ID NO: 276143 - DNA, 201 bp, Homo sapiens; identical to SEQ ID NO: 134377

SEQ ID NO: 276144 - DNA, 201 bp, Homo sapiens; identical to SEQ ID NO: 134380

SEQ ID NO: 276145 - DNA, 201 bp, Homo sapiens; identical to SEQ ID NO: 134382

SEQ ID NO: 276146 - DNA, 201 bp, Homo sapiens
ttattaccattacataatgcaaagcatatactttttaaggtttgcctttgaaaattagaaaaagagagcatatttaagaacataaaagtacaattttattkatgtaatatatagcatttacttttactgataaaatgttttgagtgttcaggttgtttgttttaatgaatgaatataattgaattttagaactgaaaagga

SEQ ID NO: 276147 - DNA, 201 bp, Homo sapiens; identical to SEQ ID NO: 134383

SEQ ID NO: 276148 - DNA, 201 bp, Homo sapiens
atatacacaaaaatttgtgtgtgccccactcagatcatgccagacgtaaggcctagcttaaatgtccaatgtgcaggatatcaaatttatattttaatatsgaaaatgcagtgtatcatttcattaaagggaaaaaggcaggagactgtatatgcaaatataagtctagatattttccaaaaattaccacctaaaaaaaga

SEQ ID NO: 276149 - DNA, 201 bp, Homo sapiens; identical to SEQ ID NO: 134384

SEQ ID NO: 276150 - DNA, 201 bp, Homo sapiens; identical to SEQ ID NO: 134385

SEQ ID NO: 276151 - DNA, 201 bp, Homo sapiens; identical to SEQ ID NO: 134386

SEQ ID NO: 276152 - DNA, 201 bp, Homo sapiens; identical to SEQ ID NO: 55197

SEQ ID NO: 276153 - DNA, 201 bp, Homo sapiens; identical to SEQ ID NO: 55198

SEQ ID NO: 276154 - DNA, 201 bp, Homo sapiens; identical to SEQ ID NO: 134388

SEQ ID NO: 276155 - DNA, 201 bp, Homo sapiens; identical to SEQ ID NO: 55199

SEQ ID NO: 276156 - DNA, 201 bp, Homo sapiens
tgaaaccttatctctactaaaaatgcaaaaaattagccggtcatggtggcacacgcctgtaatccagctacttgggaggttgaggcaggagaatctctggraaccaggaggtggaggttgcagtgagccgagattgcgctactgcactccagcctgggcaacagagcgagactccatctcaaaataatactaatagtaata

SEQ ID NO: 276157 - DNA, 201 bp, Homo sapiens; identical to SEQ ID NO: 134389

SEQ ID NO: 276158 - DNA, 201 bp, Homo sapiens; identical to SEQ ID NO: 134390

SEQ ID NO: 276159 - DNA, 201 bp, Homo sapiens
tcagtgcttgtacatggatggtgtttagggagaccactgagctcattctcatgattgctgccaatcgtaatagctgatactggctgggtgcggtggctcaygcctgtaatcccagcactttgggaggccgaggcaggcagatcccaaggtccggagatggagaccatcctggctaacacagtgaaaccttatctctactaa

SEQ ID NO: 276160 - DNA, 201 bp, Homo sapiens
taccaagaagaaaccagttttgcaggtaattatttttttaattacataattattgatctcctgatagtgtctagtgagttacaaatttcactgagaatttyactgagaatcttgtccctatacttgtgttacttaggcagagattgtttcattcatatttgtacctgagcgcttacaatactgggcagaacagattttcaa

SEQ ID NO: 276161 - DNA, 201 bp, Homo sapiens; identical to SEQ ID NO: 134392

SEQ ID NO: 276162 - DNA, 201 bp, Homo sapiens; identical to SEQ ID NO: 134394

SEQ ID NO: 276163 - DNA, 201 bp, Homo sapiens; identical to SEQ ID NO: 134395

SEQ ID NO: 276164 - DNA, 201 bp, Homo sapiens; identical to SEQ ID NO: 134396

SEQ ID NO: 276165 - DNA, 201 bp, Homo sapiens; identical to SEQ ID NO: 134397

SEQ ID NO: 276166 - DNA, 201 bp, Homo sapiens; identical to SEQ ID NO: 134398

SEQ ID NO: 276167 - DNA, 201 bp, Homo sapiens; identical to SEQ ID NO: 134399

SEQ ID NO: 276168 - DNA, 201 bp, Homo sapiens; identical to SEQ ID NO: 55206

SEQ ID NO: 276169 - DNA, 201 bp, Homo sapiens; identical to SEQ ID NO: 55207

SEQ ID NO: 276170 - DNA, 201 bp, Homo sapiens; identical to SEQ ID NO: 134401

SEQ ID NO: 276171 - DNA, 201 bp, Homo sapiens; identical to SEQ ID NO: 55208

SEQ ID NO: 276172 - DNA, 201 bp, Homo sapiens; identical to SEQ ID NO: 134403

SEQ ID NO: 276173 - DNA, 201 bp, Homo sapiens; identical to SEQ ID NO: 134405

SEQ ID NO: 276174 - DNA, 201 bp, Homo sapiens; identical to SEQ ID NO: 134406

SEQ ID NO: 276175 - DNA, 201 bp, Homo sapiens; identical to SEQ ID NO: 134407

SEQ ID NO: 276176 - DNA, 201 bp, Homo sapiens; identical to SEQ ID NO: 134408

SEQ ID NO: 276177 - DNA, 201 bp, Homo sapiens; identical to SEQ ID NO: 134409

SEQ ID NO: 276178 - DNA, 201 bp, Homo sapiens; identical to SEQ ID NO: 134410

SEQ ID NO: 276179 - DNA, 201 bp, Homo sapiens; identical to SEQ ID NO: 134411

SEQ ID NO: 276180 - DNA, 201 bp, Homo sapiens
tcctttactttcattttagcagagttttaggaaggagtaaagactgtcctttcatcagaagtccaatttctttaacatttttaaaaatgtggtatgatacytctgtataaatttttattatatggtagataatgtataaaatggaattttataaataaatttattgtattttatgtagaaaagaaagtagaaggagtttat

SEQ ID NO: 276181 - DNA, 201 bp, Homo sapiens; identical to SEQ ID NO: 134412

SEQ ID NO: 276182 - DNA, 201 bp, Homo sapiens; identical to SEQ ID NO: 134415

SEQ ID NO: 276183 - DNA, 201 bp, Homo sapiens; identical to SEQ ID NO: 134421

SEQ ID NO: 276184 - DNA, 201 bp, Homo sapiens; identical to SEQ ID NO: 134419

SEQ ID NO: 276185 - DNA, 201 bp, Homo sapiens; identical to SEQ ID NO: 134426

SEQ ID NO: 276186 - DNA, 201 bp, Homo sapiens; identical to SEQ ID NO: 134429

SEQ ID NO: 276187 - DNA, 201 bp, Homo sapiens; identical to SEQ ID NO: 134431

SEQ ID NO: 276188 - DNA, 201 bp, Homo sapiens; identical to SEQ ID NO: 134432

SEQ ID NO: 276189 - DNA, 201 bp, Homo sapiens; identical to SEQ ID NO: 134434

SEQ ID NO: 276190 - DNA, 201 bp, Homo sapiens; identical to SEQ ID NO: 134436

SEQ ID NO: 276191 - DNA, 201 bp, Homo sapiens; identical to SEQ ID NO: 134437

SEQ ID NO: 276192 - DNA, 201 bp, Homo sapiens; identical to SEQ ID NO: 134438

SEQ ID NO: 276193 - DNA, 201 bp, Homo sapiens; identical to SEQ ID NO: 134439

SEQ ID NO: 276194 - DNA, 201 bp, Homo sapiens; identical to SEQ ID NO: 134440

SEQ ID NO: 276195 - DNA, 201 bp, Homo sapiens; identical to SEQ ID NO: 134441

SEQ ID NO: 276196 - DNA, 201 bp, Homo sapiens; identical to SEQ ID NO: 134442

SEQ ID NO: 276197 - DNA, 201 bp, Homo sapiens; identical to SEQ ID NO: 134443

SEQ ID NO: 276198 - DNA, 201 bp, Homo sapiens; identical to SEQ ID NO: 134444

SEQ ID NO: 276199 - DNA, 201 bp, Homo sapiens; identical to SEQ ID NO: 134445

SEQ ID NO: 276200 - DNA, 201 bp, Homo sapiens
accagatggaaataagagtcttgctctgtcacccaggctggagtgcagtggcacaatctcagctcactgcaacctccacttcccgggtttaagcaattctyctgcctcagcctcccaaatagctgggattacaagtgcccaccaccacactggctaatatttgtatttttagtagaaataggatttcaccatgttggccag

SEQ ID NO: 276201 - DNA, 201 bp, Homo sapiens
atttctgctgttccagctgtcctaattctccacctgaaaagatttcatcaggtaagtttcttcagtagcaccataattttcatcatgtgttttacagagcrttaagtcctatagaatattgtcaagaattagacaataaccagtaacttattgcattttaaaatgtgtcatgtgagatttactgctcatctagccataata

SEQ ID NO: 276202 - DNA, 201 bp, Homo sapiens; identical to SEQ ID NO: 134449

SEQ ID NO: 276203 - DNA, 201 bp, Homo sapiens; identical to SEQ ID NO: 134450

SEQ ID NO: 276204 - DNA, 201 bp, Homo sapiens; identical to SEQ ID NO: 134451

SEQ ID NO: 276205 - DNA, 201 bp, Homo sapiens; identical to SEQ ID NO: 134455

SEQ ID NO: 276206 - DNA, 201 bp, Homo sapiens; identical to SEQ ID NO: 134457

SEQ ID NO: 276207 - DNA, 201 bp, Homo sapiens
acaagccctcttaggtgagtctgataatcacctgaatttggaaactattcaatcagaattagattaattggattctggacacagctatttttattagttayatgatcttggacaagttactaaaaacctgtatgggtctatattttccattgaccattaattttctgttggtacataatatttgtacatatttatgaggta

SEQ ID NO: 276208 - DNA, 201 bp, Homo sapiens
ttggtacataatatttgtacatatttatgaggtatatgtgatattttgatacatgcatagaatgtatcatgatcaagtcaggtatcggggaacctgccccratattcacataggttcttttctattttccttaagcatcggccagcttgagaaataaagggacagagtacaaaagagagaaattctaaagctgggcgtcca

SEQ ID NO: 276209 - DNA, 201 bp, Homo sapiens
tggtacataatatttgtacatatttatgaggtatatgtgatattttgatacatgcatagaatgtatcatgatcaagtcaggtatcggggaacctgccccartattcacataggttcttttctattttccttaagcatcggccagcttgagaaataaagggacagagtacaaaagagagaaattctaaagctgggcgtccag

SEQ ID NO: 276210 - DNA, 201 bp, Homo sapiens
tttggggtccctgacttcccacagtagtcagggtatttgggatatcagttaccttaagcatttatcatttctttgcattgagaacatttcagattttctcrtagctaccttgaaatatgtaatctatgttgttaactgtagttaccatactgttctatggaacattagaactattccttctaactctgtctttgtactcac

SEQ ID NO: 276211 - DNA, 201 bp, Homo sapiens
tcagttcatctttatccttgagtaaatggaaagaatactctgattcttagtgactacttgttttaaaatgtaggctttattattcaggtacggtgaggctraaagatcaggagataattgccactgaagaaatagtgtgttattcatagttcccaagaagtgggggcccaccatgctgcacaggaccacacagggaagcac

SEQ ID NO: 276212 - DNA, 201 bp, Homo sapiens
gtcagggtatttgggatatcagttaccttaagcatttatcatttctttgcattgagaacatttcagattttctcatagctaccttgaaatatgtaatctatgttgttaactgtagttaccatactgttctatggaacattagaactattccttctaactctgtctttgtactcactaacatacctctctttttagcttctc

SEQ ID NO: 276213 - DNA, 201 bp, Homo sapiens
actgtagttaccatactgttctatggaacattagaactattccttctaactctgtctttgtactcactaacatacctctctttttagcttctccactacamccccactcactcttttctaagcctctgatatctatcattctactctctactttcatgagatcttttttttttttttttttttttccgagacagagtctcg

SEQ ID NO: 276214 - DNA, 201 bp, Homo sapiens; identical to SEQ ID NO: 134458

SEQ ID NO: 276215 - DNA, 201 bp, Homo sapiens
gcttctccactacaaccccactcactcttttctaagcctctgatatctatcattctactctctactttcatgagatcttttttttttttttttttttttcygagacagagtctcgctctgttgcccaggctggagtacagtggcgcgatcttggctcactgcaagctctgcctcccaggttcatgccattctcctgcctca

SEQ ID NO: 276216 - DNA, 201 bp, Homo sapiens; identical to SEQ ID NO: 134459

SEQ ID NO: 276217 - DNA, 201 bp, Homo sapiens; identical to SEQ ID NO: 134460

SEQ ID NO: 276218 - DNA, 201 bp, Homo sapiens
ggagtacagtggcgcgatcttggctcactgcaagctctgcctcccaggttcatgccattctcctgcctcagcctcccaagtagctgggactacaggtgccygccatcaagcccggttaatttttgtattttcagtagagacagggtttcaccttgttagccaggatggtctccatctcctgacctcatgatccacccgcct

SEQ ID NO: 276219 - DNA, 201 bp, Homo sapiens; identical to SEQ ID NO: 134461

SEQ ID NO: 276220 - DNA, 201 bp, Homo sapiens; identical to SEQ ID NO: 134463

SEQ ID NO: 276221 - DNA, 201 bp, Homo sapiens; identical to SEQ ID NO: 134464

SEQ ID NO: 276222 - DNA, 201 bp, Homo sapiens
gggagcactatgggagactggggtctatttcatccctgcagtctcgaccataagagacggctacgcccaggggggccattcataggcctacccccaggcgygcattctctttctcaggtatgttccttgctgagaaaaagaattcagcgatatttctcccatttgcttttgaaagaagagaaatatggctctgttccgcca

SEQ ID NO: 276223 - DNA, 201 bp, Homo sapiens; identical to SEQ ID NO: 134466

SEQ ID NO: 276224 - DNA, 201 bp, Homo sapiens
ccataagagacggctacgcccaggggggccattcataggcctacccccaggcgcgcattctctttctcaggtatgttccttgctgagaaaaagaattcagygatatttctcccatttgcttttgaaagaagagaaatatggctctgttccgccagctcaccagaggtcagagtttaaggttatctctcctattccctgaac

SEQ ID NO: 276225 - DNA, 201 bp, Homo sapiens
gcgcgcattctctttctcaggtatgttccttgctgagaaaaagaattcagcgatatttctcccatttgcttttgaaagaagagaaatatggctctgttccrccagctcaccagaggtcagagtttaaggttatctctcctattccctgaacaattgctgttattctgttcttttttcaaggtgcccagatttcatattgct

SEQ ID NO: 276226 - DNA, 201 bp, Homo sapiens
cgcattctctttctcaggtatgttccttgctgagaaaaagaattcagcgatatttctcccatttgcttttgaaagaagagaaatatggctctgttccgccygctcaccagaggtcagagtttaaggttatctctcctattccctgaacaattgctgttattctgttcttttttcaaggtgcccagatttcatattgctcaa

SEQ ID NO: 276227 - DNA, 201 bp, Homo sapiens
aatatggctctgttccgccagctcaccagaggtcagagtttaaggttatctctcctattccctgaacaattgctgttattctgttcttttttcaaggtgcycagatttcatattgctcaaacacacatgctgtacaatttgtgcagttaacgcaattatcacatggtcctgaggcaacatacatcctcctcagctgacagg

SEQ ID NO: 276228 - DNA, 201 bp, Homo sapiens
ccctgaacaattgctgttattctgttcttttttcaaggtgcccagatttcatattgctcaaacacacatgctgtacaatttgtgcagttaacgcaattatyacatggtcctgaggcaacatacatcctcctcagctgacaggattaagagattaaagtaaagacaggcataggaaatcacaagggtattgattggggaagt

SEQ ID NO: 276229 - DNA, 201 bp, Homo sapiens
ttattctgttcttttttcaaggtgcccagatttcatattgctcaaacacacatgctgtacaatttgtgcagttaacgcaattatcacatggtcctgaggcracatacatcctcctcagctgacaggattaagagattaaagtaaagacaggcataggaaatcacaagggtattgattggggaagtgataagtgtccatgca

SEQ ID NO: 276230 - DNA, 201 bp, Homo sapiens
ttcaaggtgcccagatttcatattgctcaaacacacatgctgtacaatttgtgcagttaacgcaattatcacatggtcctgaggcaacatacatcctcctyagctgacaggattaagagattaaagtaaagacaggcataggaaatcacaagggtattgattggggaagtgataagtgtccatgcaatctttatgatttat

SEQ ID NO: 276231 - DNA, 201 bp, Homo sapiens
aacctgtccaaattagcaaagatgtagtagtgttgataaggatgaactgagatagagacattttcatttaccagcattgggagtgtaagttggtaacaccwgctagaaagcaatttagtaatgaatatgaagaacattgagtaattttttttttttttggagatggagtttcgcttttgtcgcccaggctggagtgcaatg

SEQ ID NO: 276232 - DNA, 201 bp, Homo sapiens; identical to SEQ ID NO: 134357

SEQ ID NO: 276233 - DNA, 201 bp, Homo sapiens; identical to SEQ ID NO: 134359

SEQ ID NO: 276234 - DNA, 201 bp, Homo sapiens; identical to SEQ ID NO: 134361

SEQ ID NO: 276235 - DNA, 201 bp, Homo sapiens
tgggagcactatgggagactggggtctatttcatccctgcagtctcgaccataagagacggctacgcccaggggggccattcataggcctacccccaggcrcgcattctctttctcaggtatgttccttgctgagaaaaagaattcagcgatatttctcccatttgcttttgaaagaagagaaatatggctctgttccgcc

SEQ ID NO: 276236 - DNA, 201 bp, Homo sapiens; identical to SEQ ID NO: 134365

SEQ ID NO: 276237 - DNA, 201 bp, Homo sapiens
ttcagtagagacagggtttcaccttgttagccaggatggtctccatctcctgacctcatgatccacccgcctcagtctcccaaagtgctgggattacaggygtgagccactgcgcctgccccaactttttttttttttttttttttttttttttagctctcacataagagtgagaacatgggatatttgcctttctgtgcc

SEQ ID NO: 276238 - DNA, 201 bp, Homo sapiens
gttagccaggatggtctccatctcctgacctcatgatccacccgcctcagtctcccaaagtgctgggattacaggtgtgagccactgcgcctgccccaactttttttttttttttttttttttttttttagctctcacataagagtgagaacatgggatatttgcctttctgtgcctagcttgccttacttaacataatga

SEQ ID NO: 276239 - DNA, 201 bp, Homo sapiens
gggtgcaagtatccttttgatacactggttttcttttctttggataaatgtctagtagtgggattgctggatcttatggtagttatattttagtttgttgttgttgttgttgttgttgtttgagacagagtctcgctccatcgcccaggctgaagtgctgtggcacagtctcagctcactgcaacctcttcctcctgggtt

SEQ ID NO: 276240 - DNA, 201 bp, Homo sapiens
gtgcaagtatccttttgatacactggttttcttttctttggataaatgtctagtagtgggattgctggatcttatggtagttatattttagtttgttgttgttgttgttgttgttgtttgagacagagtctcgctccatcgcccaggctgaagtgctgtggcacagtctcagctcactgcaacctcttcctcctgggttca

SEQ ID NO: 276241 - DNA, 201 bp, Homo sapiens
gataaatgtctagtagtgggattgctggatcttatggtagttatattttagtttgttgttgttgttgttgttgttgtttgagacagagtctcgctccatcrcccaggctgaagtgctgtggcacagtctcagctcactgcaacctcttcctcctgggttcaagtgattctcatgcctcagcctccatctcccaagtagctg

SEQ ID NO: 276242 - DNA, 201 bp, Homo sapiens
cctccatctcccaagtagctgggactacaggcatgtgccaccacgcccagctaatttttgtatttttattagagacagggtttcaccatgttccccaggctggtggtctcaaactcctgacctcaagtgatctacccacctcagtctcccaaagtgctgggattacaggtgtgagccatcgcacccagccctattttagtt

SEQ ID NO: 276243 - DNA, 201 bp, Homo sapiens
ctccatctcccaagtagctgggactacaggcatgtgccaccacgcccagctaatttttgtatttttattagagacagggtttcaccatgttccccaggctggtggtctcaaactcctgacctcaagtgatctacccacctcagtctcccaaagtgctgggattacaggtgtgagccatcgcacccagccctattttagttt

SEQ ID NO: 276244 - DNA, 201 bp, Homo sapiens; identical to SEQ ID NO: 134369

SEQ ID NO: 276245 - DNA, 201 bp, Homo sapiens
tccatctcccaagtagctgggactacaggcatgtgccaccacgcccagctaatttttgtatttttattagagacagggtttcaccatgttccccaggctggtggtctcaaactcctgacctcaagtgatctacccacctcagtctcccaaagtgctgggattacaggtgtgagccatcgcacccagccctattttagtttt

SEQ ID NO: 276246 - DNA, 201 bp, Homo sapiens
tgtgggtcacagacatcaagtactttacaaggtaatagaatatcacaaggcaagtggaggcagggcaagatcacaggaccacaggacagaggtgaaattaraattgctaatgaagttttgggcaccattgtcattgataacatcttatcaggagacagggttttgagagcacccggtctgaccaaaattattaggtgggta

SEQ ID NO: 276247 - DNA, 201 bp, Homo sapiens
gagtgtcgctctgtcacccgggctggagtgcagtggtgtgatcttggctcactgcaacctccacctcccaggttcaagtgattctcctgcctcagcctccygagtagctggcattacaggcacctgccatcacaccgggcttatttttttgtatttttggtagagacagggttttcaccatgttggccaggatggtcttga

SEQ ID NO: 276248 - DNA, 201 bp, Homo sapiens
caggaccacaggacagaggtgaaattaaaattgctaatgaagttttgggcaccattgtcattgataacatcttatcaggagacagggttttgagagcaccyggtctgaccaaaattattaggtgggtattttcccttcctaatgagcctgggagcactatgggagactggggtctatttcatccctgcagtctcgaccata

SEQ ID NO: 276249 - DNA, 201 bp, Homo sapiens
cttacaggcataagccactgcacccagccatctccatactgttttctatgatggctgtactaattacattcccaccaaccgtgtttcagactccttttctmcacattcttgaaggcatcttattatttgtcttttttgataataaccattcaactggggtaaaatgatatttcattgtggttttaatctgcatttcctgga

SEQ ID NO: 276250 - DNA, 201 bp, Homo sapiens
tcaaggtgcccagatttcatattgctcaaacacacatgctgtacaatttgtgcagttaacgcaattatcacatggtcctgaggcaacatacatcctcctcrgctgacaggattaagagattaaagtaaagacaggcataggaaatcacaagggtattgattggggaagtgataagtgtccatgcaatctttatgatttatg

SEQ ID NO: 276251 - DNA, 201 bp, Homo sapiens
gtgtgatttctaaaggaagaaatgggtaaggcaggctaagcaggcttaggattggctagtttgaataatattagtgggctctgggatataggagctgtctytagttatcaggtgcctggtcctagagtgattacagcaagtggatagtgtcccagagtgtaagagcccagtgaaggaggttgttggggtatgcgctctggg

SEQ ID NO: 276252 - DNA, 201 bp, Homo sapiens
aaggtgcccagatttcatattgctcaaacacacatgctgtacaatttgtgcagttaacgcaattatcacatggtcctgaggcaacatacatcctcctcagytgacaggattaagagattaaagtaaagacaggcataggaaatcacaagggtattgattggggaagtgataagtgtccatgcaatctttatgatttatgtt

SEQ ID NO: 276253 - DNA, 201 bp, Homo sapiens
tttgtataaggtgtaaggaagggatccattttcagctttctacatatggctagccagttttcccagcaccatttattaaatagggaatcctttccccattkcttgtttttctcaggtttgtcaaagatcagatggttgtagatgtgtggtattatttctgcgggttctgttctgttccattggtctatatctctgttttgg

SEQ ID NO: 276254 - DNA, 201 bp, Homo sapiens; identical to SEQ ID NO: 134371

SEQ ID NO: 276255 - DNA, 201 bp, Homo sapiens
gtgtaaggaagggatccattttcagctttctacatatggctagccagttttcccagcaccatttattaaatagggaatcctttccccattgcttgtttttstcaggtttgtcaaagatcagatggttgtagatgtgtggtattatttctgcgggttctgttctgttccattggtctatatctctgttttggtaccagtact

SEQ ID NO: 276256 - DNA, 201 bp, Homo sapiens; identical to SEQ ID NO: 55211

SEQ ID NO: 276257 - DNA, 201 bp, Homo sapiens
ccttcacatcccttgtaagttggattcctaggtattttattctctttgaagcaattgtgaatgggagttcactcatgatttggctctctgtctattattgrtgtataagaatgcttgtgatttttgcacgttgattttgtatcctgagactttgctgaagttgcttatcagcttaaggagattttgggttgagatgatggg

SEQ ID NO: 276258 - DNA, 201 bp, Homo sapiens; identical to SEQ ID NO: 134374

SEQ ID NO: 276259 - DNA, 201 bp, Homo sapiens
cggctactgaagcttgtgcatttgtcacgtagttctcctgtcatggttttcagctcaatcaggtcatttaaggacttctctacactgattattctagtcakccctttgtctaatcttttttcaaggtttttaacttatttgcattgggttcgaacttcctcatttagctaggagaagtttgatcatctgaagccttcttct

SEQ ID NO: 276260 - DNA, 201 bp, Homo sapiens; identical to SEQ ID NO: 134378

SEQ ID NO: 276261 - DNA, 201 bp, Homo sapiens
gctctgatttttagaattttcagcttttctgctctgttttttccccatctttgtggttttatctacctttggtctttgatgatggtgactgacagatgggrttttggtgtggatgtcctgtttgttagttttccttctaacagtcaggaccctcagctgcaggtctgttggagtttgctggaggtccactccagaccctgt

SEQ ID NO: 276262 - DNA, 201 bp, Homo sapiens; identical to SEQ ID NO: 134379

SEQ ID NO: 276263 - DNA, 201 bp, Homo sapiens; identical to SEQ ID NO: 134381

SEQ ID NO: 276264 - DNA, 201 bp, Homo sapiens; identical to SEQ ID NO: 134387

SEQ ID NO: 276265 - DNA, 201 bp, Homo sapiens; identical to SEQ ID NO: 134391

SEQ ID NO: 276266 - DNA, 201 bp, Homo sapiens; identical to SEQ ID NO: 134393

SEQ ID NO: 276267 - DNA, 201 bp, Homo sapiens
atctatcttgagttgatttttgtatatggtgagagataacattctagttgtattcttctgcatatggataaccagttttcccagtaccatttgttgaagarggcgtccttcccccagtgtttgttcttggcccctttgtcagaaatcagttggctgtaagtatgtggatttctttattctgttgcactggtctatgtgtct

SEQ ID NO: 276268 - DNA, 201 bp, Homo sapiens
cagaaatcagttggctgtaagtatgtggatttctttattctgttgcactggtctatgtgtctgtttttataccatgaccatactgttttggttactgtagwcttgtacattttgaagtcaggtagtgtgaggcttccagctttctcccttttgcccaggattgctttagtgattctggctcttttttggttctatacaaat

SEQ ID NO: 276269 - DNA, 201 bp, Homo sapiens
gagttttttgttgaagtctttaggttatcctatatgtaagattatgtcgtctgtgaagaggaacaatttgacttcttttccaatttggatgccttttatgtttttttttttttttcttttttaagttctagggtacatgtgcacaacgtgcaggtttgttacatatgtatacatgtgccatgttggtgtgctgcacccatt

SEQ ID NO: 276270 - DNA, 201 bp, Homo sapiens; identical to SEQ ID NO: 23743

SEQ ID NO: 276271 - DNA, 201 bp, Homo sapiens
ttgaagtcaggtagcctgatgcctccagctttgttcttttggcttaggattgtcttggaaatgcaggctctttttggtcccatatgaactttaaagtagtwttttccaattctgtgaagaaagtcattggtagcttgatggggatggcattgaatctataaattaccttgggcagtatggccattttcacaatattgattc

SEQ ID NO: 276272 - DNA, 201 bp, Homo sapiens
gcactgtggtctgagagacaatttgttataatttctgttcttttacatttgctgaggagtgcttgacttccaactgtgtggtcaattttggaataagtgtratgtgctgagaagaatgtatattctgttgatttggggtggagagttctgttcatgtctactaggtccacttgatgcagagctgagttcaattcctggcta

SEQ ID NO: 276273 - DNA, 201 bp, Homo sapiens
gttcttttacatttgctgaggagtgcttgacttccaactgtgtggtcaattttggaataagtgtgatgtgctgagaagaatgtatattctgttgatttggsgtggagagttctgttcatgtctactaggtccacttgatgcagagctgagttcaattcctggctatccttgttaactttctgtctcattgatctgtctaat

SEQ ID NO: 276274 - DNA, 201 bp, Homo sapiens
ccagaggtggagtctacagaggcaggcaggcctccttgagctgtggtgggctccacccagttcgagcttcctggccggccgctttgtttaccaactgttartattatatgtataataggaaagtttgtttccaaaaaaaagtactatataaattcagcggagtggaacttgttggctaatgttatttttcctgattttgca

SEQ ID NO: 276275 - DNA, 201 bp, Homo sapiens
cagttcgagcttcctggccggccgctttgtttaccaactgttagtattatatgtataataggaaagtttgtttccaaaaaaaagtactatataaattcagyggagtggaacttgttggctaatgttatttttcctgattttgcagataaaaaaaattgaggcaagacactttttataacttactcttcttcccctgaataa

SEQ ID NO: 276276 - DNA, 201 bp, Homo sapiens
ttcccaaacttaggttatttttttcccgtaattttcttccagatctatggcaaccaagcaacactgtgtcataatagtttatagtttacttttgttactttttaatttgtttaaaaaacagatacattttcagtgtttaaaaatgaacaagtatggaaaggcttatacagtaactgaaaagtctcctttgggaagccaagg

SEQ ID NO: 276277 - DNA, 201 bp, Homo sapiens; identical to SEQ ID NO: 134402

SEQ ID NO: 276278 - DNA, 201 bp, Homo sapiens
tcccaaacttaggttatttttttcccgtaattttcttccagatctatggcaaccaagcaacactgtgtcataatagtttatagtttacttttgttactttttaatttgtttaaaaaacagatacattttcagtgtttaaaaatgaacaagtatggaaaggcttatacagtaactgaaaagtctcctttgggaagccaaggt

SEQ ID NO: 276279 - DNA, 201 bp, Homo sapiens; identical to SEQ ID NO: 134404

SEQ ID NO: 276280 - DNA, 201 bp, Homo sapiens; identical to SEQ ID NO: 134413

SEQ ID NO: 276281 - DNA, 201 bp, Homo sapiens; identical to SEQ ID NO: 134416

SEQ ID NO: 276282 - DNA, 201 bp, Homo sapiens; identical to SEQ ID NO: 134417

SEQ ID NO: 276283 - DNA, 201 bp, Homo sapiens; identical to SEQ ID NO: 134420

SEQ ID NO: 276284 - DNA, 201 bp, Homo sapiens; identical to SEQ ID NO: 134422

SEQ ID NO: 276285 - DNA, 201 bp, Homo sapiens; identical to SEQ ID NO: 134424

SEQ ID NO: 276286 - DNA, 201 bp, Homo sapiens; identical to SEQ ID NO: 134425

SEQ ID NO: 276287 - DNA, 201 bp, Homo sapiens; identical to SEQ ID NO: 134423

SEQ ID NO: 276288 - DNA, 201 bp, Homo sapiens; identical to SEQ ID NO: 134427

SEQ ID NO: 276289 - DNA, 201 bp, Homo sapiens; identical to SEQ ID NO: 134430

SEQ ID NO: 276290 - DNA, 201 bp, Homo sapiens; identical to SEQ ID NO: 134428

SEQ ID NO: 276291 - DNA, 201 bp, Homo sapiens; identical to SEQ ID NO: 134433

SEQ ID NO: 276292 - DNA, 201 bp, Homo sapiens; identical to SEQ ID NO: 134435

SEQ ID NO: 276293 - DNA, 201 bp, Homo sapiens; identical to SEQ ID NO: 55203

SEQ ID NO: 276294 - DNA, 201 bp, Homo sapiens; identical to SEQ ID NO: 134446

SEQ ID NO: 276295 - DNA, 201 bp, Homo sapiens
cccaaacttaggttatttttttcccgtaattttcttccagatctatggcaaccaagcaacactgtgtcataatagtttatagtttacttttgttactttttaatttgtttaaaaaacagatacattttcagtgtttaaaaatgaacaagtatggaaaggcttatacagtaactgaaaagtctcctttgggaagccaaggtg

SEQ ID NO: 276296 - DNA, 201 bp, Homo sapiens; identical to SEQ ID NO: 134447

SEQ ID NO: 276297 - DNA, 201 bp, Homo sapiens
ccaaacttaggttatttttttcccgtaattttcttccagatctatggcaaccaagcaacactgtgtcataatagtttatagtttacttttgttactttttaatttgtttaaaaaacagatacattttcagtgtttaaaaatgaacaagtatggaaaggcttatacagtaactgaaaagtctcctttgggaagccaaggtgg

SEQ ID NO: 276298 - DNA, 201 bp, Homo sapiens; identical to SEQ ID NO: 55213

SEQ ID NO: 276299 - DNA, 201 bp, Homo sapiens
caaacttaggttatttttttcccgtaattttcttccagatctatggcaaccaagcaacactgtgtcataatagtttatagtttacttttgttactttttaatttgtttaaaaaacagatacattttcagtgtttaaaaatgaacaagtatggaaaggcttatacagtaactgaaaagtctcctttgggaagccaaggtggg

SEQ ID NO: 276300 - DNA, 201 bp, Homo sapiens; identical to SEQ ID NO: 134448

SEQ ID NO: 276301 - DNA, 201 bp, Homo sapiens
actttatctctacaaaaaattaaaaaattagccaggtatggtggtacatacttgtagtagtaactacatgggaggctgaggtgggaggatcacttgagtcygagagtttgaggctgcagtgagctgtgattgtgccactgcactctagcctgggcaacagagcaagatgctgtctctaaaagagatttttcttttaaagaa

SEQ ID NO: 276302 - DNA, 201 bp, Homo sapiens
tgcccttaaagggaaatatttatggacatccatctaggtccctttttctctcaagctaaatgtaatgtcagcaaagccacattcttattcccagggtttgrgcattgtagggagcagagtccctaagcaatgcctgtgtttctagttcattgacatccctgaacgccttctctatggtagctttagggctgtatatcagaa

SEQ ID NO: 276303 - DNA, 201 bp, Homo sapiens
agttgacaaccagtcactgagttaggcctagaacaccaatctgtttactctttagttgaatatattttcatgatagcatatgtgtcagtagcttagctttyatattgaatttatttttccataagtgttgaaaagccataatgaaagtaactattccccctattgtttgtggtaaaaatccccatgtaaatgaataatctt

SEQ ID NO: 276304 - DNA, 201 bp, Homo sapiens
aggctgaggtgggaggattgcttgtgcctgggaggtcaaggctacagtgagccatgaccacctcactgcacttcagcctgggtaacagcaatctcaaaagaaaaaaaaaaaattagaaatctagaaatctttttaaacccaaattcttcaactacacgtgcttctggtgatttttggctggagggcattgacagaaattaa

SEQ ID NO: 276305 - DNA, 201 bp, Homo sapiens
gctggattgcagtggcaggatctcggctcactgcaacctctgccttccgggttcaagcgattctcctgcctcagcctcccaagtacctgggactccaggcrcctgccaccacacccggctaatgtctgttgttttttaaattagagacggggtttcaccatgttggctgggttggtctcaaactcctgacctcaagtgatc

SEQ ID NO: 276306 - DNA, 201 bp, Homo sapiens; identical to SEQ ID NO: 134452

SEQ ID NO: 276307 - DNA, 201 bp, Homo sapiens; identical to SEQ ID NO: 134453

SEQ ID NO: 276308 - DNA, 201 bp, Homo sapiens; identical to SEQ ID NO: 134454

SEQ ID NO: 276309 - DNA, 201 bp, Homo sapiens
ttaggtgggtattttcccttcctaatgagcctgggagcactatgggagactggggtctatttcatccctgcagtctcgaccataagagacggctacgcccyggggggccattcataggcctacccccaggcgcgcattctctttctcaggtatgttccttgctgagaaaaagaattcagcgatatttctcccatttgcttt

SEQ ID NO: 276310 - DNA, 201 bp, Homo sapiens; identical to SEQ ID NO: 134456

SEQ ID NO: 276311 - DNA, 201 bp, Homo sapiens; identical to SEQ ID NO: 134462

SEQ ID NO: 276312 - DNA, 201 bp, Homo sapiens; identical to SEQ ID NO: 134465

SEQ ID NO: 276313 - DNA, 201 bp, Homo sapiens; identical to SEQ ID NO: 134467

SEQ ID NO: 276314 - DNA, 201 bp, Homo sapiens; identical to SEQ ID NO: 134468

SEQ ID NO: 276315 - DNA, 201 bp, Homo sapiens; identical to SEQ ID NO: 134469

SEQ ID NO: 276316 - DNA, 201 bp, Homo sapiens; identical to SEQ ID NO: 134470

SEQ ID NO: 276317 - DNA, 201 bp, Homo sapiens; identical to SEQ ID NO: 134471

SEQ ID NO: 276318 - DNA, 201 bp, Homo sapiens; identical to SEQ ID NO: 134472

SEQ ID NO: 276319 - DNA, 201 bp, Homo sapiens; identical to SEQ ID NO: 134473

SEQ ID NO: 276320 - DNA, 201 bp, Homo sapiens; identical to SEQ ID NO: 134474

SEQ ID NO: 276321 - DNA, 201 bp, Homo sapiens
gttttattctcttttgcattttcctaatgggttggggagtgggtgggcagaaatactgagagggtggggaatatacccctggaaaggccagagttgggccygagctgggagagatcaccccagcccccctgccagcatcccctcctcttcctctcccctcagtcttcctgcctgggaaggcagcagaaattctcagggctg

SEQ ID NO: 276322 - DNA, 201 bp, Homo sapiens
gctgctcctcctggctggcagggaatcccttctggctgtgtcctctgtggcctttcctctgtgcacctacctgcacctctggggtatctctgcctccaaawatcatcttttttttttttttttttttttgagacagagttttactctcgttgcccaggctggagtgcaatggcataatcttggctcactgcaacctccacc

SEQ ID NO: 276323 - DNA, 201 bp, Homo sapiens
ctcactgcaacctccaccttcagggttcaagcgattctcctgtctcagcctcctgagtagctgggactacaggcatgcgccaccacgcccggctaattttrtagttttagtagaggcgaggtttctccatgttgctcaggctggtcttgaactcgtgagctcaggtgatccaccctcctccacctcccaaagtgctgggat

SEQ ID NO: 276324 - DNA, 201 bp, Homo sapiens
gcctggaagacacagtgacgctgcatctcaaaaaaaaaaaaaattaattaattagttaatcatctgttggctgggtgcggtggctcacgcctgtaatcccrgcactttgggaggctgaggtggcggagttggaggtcagcctggccaacatggtgaaaacccacctctactgaaagtgcaaaaagtagctgggcatggtag

SEQ ID NO: 276325 - DNA, 201 bp, Homo sapiens
agttctgggattacaggcataagccaccgtgcctggccacttcctatatttcttttttcttttctttctttctttttttttttttttgagacagagttttrctcttgttgcccaggctagagtgcaatggctcaatcttggctcattcaacttccgcctcctgggttcaagcgattatcctgcctcagccacctgaatagc

SEQ ID NO: 276326 - DNA, 201 bp, Homo sapiens
ttctttctttctttttttttttttttgagacagagttttgctcttgttgcccaggctagagtgcaatggctcaatcttggctcattcaacttccgcctccygggttcaagcgattatcctgcctcagccacctgaatagcagggattacaggtgcacgccaccgcgcccagctaatttttttgtatttttaatagagaagg

SEQ ID NO: 276327 - DNA, 201 bp, Homo sapiens
aatggctcaatcttggctcattcaacttccgcctcctgggttcaagcgattatcctgcctcagccacctgaatagcagggattacaggtgcacgccaccgygcccagctaatttttttgtatttttaatagagaagggatttcaccatgttgtccaggctggtcttgacctcctgacctcaggtgatccacccaactcggc

SEQ ID NO: 276328 - DNA, 201 bp, Homo sapiens; identical to SEQ ID NO: 275135

SEQ ID NO: 276329 - DNA, 201 bp, Homo sapiens; identical to SEQ ID NO: 275136

SEQ ID NO: 276330 - DNA, 201 bp, Homo sapiens
tgccaccacacccggctaatttttgtagttttagtagagaccaggtctcaccatgttggccaggttggtctcgaactcctcactgtcatgcgtgtctgtayagaaaaccacctaaacaggctttgtgtaagcaataacgccatttattcacttgggtgcaagtgggctgagtctgaaaagagagtcagcgaagggagataa

SEQ ID NO: 276331 - DNA, 201 bp, Homo sapiens
ctcagtcttcctgcctgggaaggcagcagaaattctcagggctgtggaggggtgggggaggcccagggccgtcccgggagctgtgttcagtggacatgagscccgaggactccaggagggctccctgcatgggccggtttctctcttgtgccttcagaaatccgatggagcggatgtatcgagacacattctacgacaact

SEQ ID NO: 276332 - DNA, 201 bp, Homo sapiens; identical to SEQ ID NO: 275140

SEQ ID NO: 276333 - DNA, 201 bp, Homo sapiens
attgctgggattgctggtgtgagccacagcgcctagcccatttctcctttttataaaacctgttgctgtctctgttctcccaacatggtgaacaccacccrgactgcgtgtatgtcccaaattctttctttgcaaatgaaatgtgaaattagaggctcttctccacactttaaatttgacttgtcattttctaggcagatg

SEQ ID NO: 276334 - DNA, 201 bp, Homo sapiens; identical to SEQ ID NO: 275141

SEQ ID NO: 276335 - DNA, 201 bp, Homo sapiens
tatgcatccctgcaccgcacgctaaaggagattctcaggtgagggtctccctctggcctcatcgtctctctcctctcgcctcctgctcatcctcctgaggmctcccctggctgggccctcctgccctccgtcctgcccccctgcctgccctcatggttacaccccctcacccacactcctcatgctccctccaccttggtg

SEQ ID NO: 276336 - DNA, 201 bp, Homo sapiens; identical to SEQ ID NO: 275142

SEQ ID NO: 276337 - DNA, 201 bp, Homo sapiens
ctgggcagtcctggcctacagcggtgctggccacggaaacacccaggactcaggaatgaagcacaagtgtttccagtccccacacgctaaaaaggcgacargaaccggtgaaagtaattttaatattctatttaatccagtgtagctaacatattacttcaacgctgattaacataaaattcttcgcgagatagtgaagtt

SEQ ID NO: 276338 - DNA, 201 bp, Homo sapiens; identical to SEQ ID NO: 275143

SEQ ID NO: 276339 - DNA, 201 bp, Homo sapiens; identical to SEQ ID NO: 275144

SEQ ID NO: 276340 - DNA, 201 bp, Homo sapiens; identical to SEQ ID NO: 54693

SEQ ID NO: 276341 - DNA, 201 bp, Homo sapiens; identical to SEQ ID NO: 275147

SEQ ID NO: 276342 - DNA, 201 bp, Homo sapiens; identical to SEQ ID NO: 275148

SEQ ID NO: 276343 - DNA, 201 bp, Homo sapiens; identical to SEQ ID NO: 275151

SEQ ID NO: 276344 - DNA, 201 bp, Homo sapiens; identical to SEQ ID NO: 275154

SEQ ID NO: 276345 - DNA, 201 bp, Homo sapiens; identical to SEQ ID NO: 275155
  misc_feature (1)...(201): n = A,T,C or G

SEQ ID NO: 276346 - DNA, 201 bp, Homo sapiens
  misc_feature (1)...(201): n = A,T,C or G
acacatattctacttccactttaaaaacctacgcaaagcctatggtcggaacgaaagctggctgtgcttcaccatggaagttgtaaagcaccactcacctntctcctggaagaggggcgtcttccgaaaccaggtagcaccaaagtcctatttacaccccaaataggagctaagcagctaggaatgcagaaaacacaataa

SEQ ID NO: 276347 - DNA, 201 bp, Homo sapiens; identical to SEQ ID NO: 275158

SEQ ID NO: 276348 - DNA, 201 bp, Homo sapiens; identical to SEQ ID NO: 275160

SEQ ID NO: 276349 - DNA, 201 bp, Homo sapiens
aatcctagctactccggaggctgaggcaagagaatcgcttgaacccaaggggcagaagttgtggtgagctgagatcgtgccgttgcactcccgcctgtgcwacagagcaagactccatctcagaaaaaaataataaaaaaataaagaggaaggagaaggatggaataagggaaactcaatgaataaaacgccctggggcct

SEQ ID NO: 276350 - DNA, 201 bp, Homo sapiens
aactcctgacctcaagcgatccgccccgcttggcctcccaacgttctaggattacaggcatgagccaccacgcccaacttcctcccacattttttaagtcsgtggcccagatcttcctccctaactttcctgggatcagattgtcgaggggttttgcctcttaccaaaaggccttgtttagcgcccagcgccctcactctt

SEQ ID NO: 276351 - DNA, 201 bp, Homo sapiens
tcttcctgtgagtgagaggccccttctgcctccagagcgacctccatccacccccgaggctgccctccccacagcctgggagccccaacctggctccttcyatctccctggcataaccgaatttgtcataaaactggacgtagtaagtgggcatgaatagtcacaagcccgacagtcggaagctttgagcaacatccttca

SEQ ID NO: 276352 - DNA, 201 bp, Homo sapiens; identical to SEQ ID NO: 54691

SEQ ID NO: 276353 - DNA, 201 bp, Homo sapiens
accccagcttgggcaacaggagagaccctgtctcaaaaataaataaataagaaaatgccctggggcttcaggcctgccctcttctcccatcgccccacccmtacactcctcctgctcctggtctgagctccccctgccctcctcctcctccttccccaggtggatcctgagacccattgtcatgcagaaaggtgcttcctc

SEQ ID NO: 276354 - DNA, 201 bp, Homo sapiens; identical to SEQ ID NO: 275127

SEQ ID NO: 276355 - DNA, 201 bp, Homo sapiens; identical to SEQ ID NO: 275128

SEQ ID NO: 276356 - DNA, 201 bp, Homo sapiens; identical to SEQ ID NO: 275129

SEQ ID NO: 276357 - DNA, 201 bp, Homo sapiens; identical to SEQ ID NO: 275130

SEQ ID NO: 276358 - DNA, 201 bp, Homo sapiens; identical to SEQ ID NO: 275131

SEQ ID NO: 276359 - DNA, 201 bp, Homo sapiens; identical to SEQ ID NO: 275132

SEQ ID NO: 276360 - DNA, 201 bp, Homo sapiens; identical to SEQ ID NO: 275133

SEQ ID NO: 276361 - DNA, 201 bp, Homo sapiens; identical to SEQ ID NO: 54698

SEQ ID NO: 276362 - DNA, 201 bp, Homo sapiens; identical to SEQ ID NO: 54700

SEQ ID NO: 276363 - DNA, 201 bp, Homo sapiens; identical to SEQ ID NO: 54701

SEQ ID NO: 276364 - DNA, 201 bp, Homo sapiens
ctattctcacaatgagattttgaaatgcgctgtgtattttacacgtgccaacgtttctaatcagagccccatttcaagtgctcagtagcccctttggccarccttcaactccatgggacaatgtgggtccaatgaccttcccagcagaaggcagacaggggacaaggcagaccccataggaccaggccacagcaggggctg

SEQ ID NO: 276365 - DNA, 201 bp, Homo sapiens; identical to SEQ ID NO: 275139

SEQ ID NO: 276366 - DNA, 201 bp, Homo sapiens
ctaatcagagccccatttcaagtgctcagtagcccctttggccaaccttcaactccatgggacaatgtgggtccaatgaccttcccagcagaaggcagacrggggacaaggcagaccccataggaccaggccacagcaggggctgaggatgcctggttaatggatgcctgggggaaaggatgccagaattcgcacttgagg

SEQ ID NO: 276367 - DNA, 201 bp, Homo sapiens
gtgctcagtagcccctttggccaaccttcaactccatgggacaatgtgggtccaatgaccttcccagcagaaggcagacaggggacaaggcagaccccatrggaccaggccacagcaggggctgaggatgcctggttaatggatgcctgggggaaaggatgccagaattcgcacttgagggcatgatgagacaggaaaaga

SEQ ID NO: 276368 - DNA, 201 bp, Homo sapiens; identical to SEQ ID NO: 91024

SEQ ID NO: 276369 - DNA, 201 bp, Homo sapiens; identical to SEQ ID NO: 91026

SEQ ID NO: 276370 - DNA, 201 bp, Homo sapiens
aggtgattcacctgccttggcctctgaaagttctgggattacaggcataagccaccgtgcctggccacttcctatatttcttttttcttttctttctttctttttttttttttttgagacagagttttgctcttgttgcccaggctagagtgcaatggctcaatcttggctcattcaacttccgcctcctgggttcaagcg

SEQ ID NO: 276371 - DNA, 201 bp, Homo sapiens; identical to SEQ ID NO: 275146

SEQ ID NO: 276372 - DNA, 201 bp, Homo sapiens
ctacttgggaggatgaagtgggaggactgcttgagccggggaggtggaggctggagtaaactgagatcgcgccacagaactccagtttgagcaacagatcragaccctgcctgaaaataaatcaataaatacactcaacctaaatggatatgaatatatgtaagttgaaaaccagttttgagaaacatcctttgtaagttt

SEQ ID NO: 276373 - DNA, 201 bp, Homo sapiens
gtgcccatggtgggctttcccacagggcaagagaacatttctcctttttttttttgaagtggagtctcgccctgtcacccaggctggagtgcaatggcgcrgtctccgctcactgcaacctccacctctgttgttcaagtgattctcctgtctcagcctcccgagtagctgggattacaggcgtgcaccaccacaccgggc

SEQ ID NO: 276374 - DNA, 201 bp, Homo sapiens; identical to SEQ ID NO: 275149

SEQ ID NO: 276375 - DNA, 201 bp, Homo sapiens; identical to SEQ ID NO: 275150

SEQ ID NO: 276376 - DNA, 201 bp, Homo sapiens; identical to SEQ ID NO: 54704

SEQ ID NO: 276377 - DNA, 201 bp, Homo sapiens
aggactgagacggggacatttacagtgaacagaaatgtgttggctcgagttctggactccaggaagtccaacgtcaaggcaccagcaactttccagggccygcgagctgcacagtcacatgggggtgaaggttgttgccagaagctcaggggatgctccagacagagtggcctgggatgtcgagtcactggtgctccgtga

SEQ ID NO: 276378 - DNA, 201 bp, Homo sapiens
gcttcaacagcaggactgagacggggacatttacagtgaacagaaatgtgttggctcgagttctggactccaggaagtccaacgtcaaggcaccagcaacyttccagggcctgcgagctgcacagtcacatgggggtgaaggttgttgccagaagctcaggggatgctccagacagagtggcctgggatgtcgagtcactg

SEQ ID NO: 276379 - DNA, 201 bp, Homo sapiens
tacacatcttggagcccttgcccagagtgtgcaggggaggtggccgagttcctggccaggcacagcaacgtgaatctcaccatcttcaccgcccgcctctrctacttctgggatacagattaccaggaggggctctgcagcctgagtcaggaaggggcctccgtgaagatcatgggctacaaaggtgagacgtggggggct

SEQ ID NO: 276380 - DNA, 201 bp, Homo sapiens; identical to SEQ ID NO: 54695

SEQ ID NO: 276381 - DNA, 201 bp, Homo sapiens
taaataaaacccatgtgggccgggcgcagtggctcatgtctgtaatcccagcactttgagaggcctaggtgggtggatcacctgaggtcagcagttcaagrccagcctggccaacatggtgaaaccctgtctctactaaaaatacaaaaattatccaggtgtggtggcgggcacctataatcccagctacttgggaggctg

SEQ ID NO: 276382 - DNA, 201 bp, Homo sapiens; identical to SEQ ID NO: 275156

SEQ ID NO: 276383 - DNA, 201 bp, Homo sapiens; identical to SEQ ID NO: 275159

SEQ ID NO: 276384 - DNA, 201 bp, Homo sapiens; identical to SEQ ID NO: 275161

SEQ ID NO: 276385 - DNA, 201 bp, Homo sapiens
ccgcggccatagaagatgcccccgggccgggtgcccacagggcaggcatttattttctcacagatctggaggctgcaagtccaaggtggaggggtgggtgrggttgtgtcctctgtggccgctcctcctggctggcagggggtcccttccagccctgtcctctctggcctttcctctgtgcacctgcactcctggggtctc

SEQ ID NO: 276386 - DNA, 201 bp, Homo sapiens
ttttctcacagatctggaggctgcaagtccaaggtggaggggtgggtggggttgtgtcctctgtggccgctcctcctggctggcagggggtcccttccagmcctgtcctctctggcctttcctctgtgcacctgcactcctggggtctctctgcctctaaatgtcctccttgtttatggaccccagtcagacaggattagg

SEQ ID NO: 276387 - DNA, 201 bp, Homo sapiens
cacgcctgtcccttctcaaatccctcccacagggatggagatgcagaaagagtcaagcaaacactcagtgatcaaggtcccatttgagtaaggtttttttktttttttttttttgagacagcgtctccctctgttgcccaggctggagtgctgtggtgcgatctcggctcactgcaacctctgcctcccggttctagcaat

SEQ ID NO: 276388 - DNA, 201 bp, Homo sapiens
cctgtcccttctcaaatccctcccacagggatggagatgcagaaagagtcaagcaaacactcagtgatcaaggtcccatttgagtaaggtttttttgtttktttttttttgagacagcgtctccctctgttgcccaggctggagtgctgtggtgcgatctcggctcactgcaacctctgcctcccggttctagcaattccc

SEQ ID NO: 276389 - DNA, 201 bp, Homo sapiens
tcccttctcaaatccctcccacagggatggagatgcagaaagagtcaagcaaacactcagtgatcaaggtcccatttgagtaaggtttttttgtttttttktttttgagacagcgtctccctctgttgcccaggctggagtgctgtggtgcgatctcggctcactgcaacctctgcctcccggttctagcaattcccttgt

SEQ ID NO: 276390 - DNA, 201 bp, Homo sapiens
ttccactttaaaaacctactgaaagcctgtggtcggaacgaaagctggctgtgcttcaccatggaagttacaaagcaccactcagctgtcttccggaagargggcgtcttccgaaaccaggtagcaccaaagtcctatttacaccctaaataggagctaagcagctgggaacgcagaaaacacaatacgtgacgtgccccg

SEQ ID NO: 276391 - DNA, 201 bp, Homo sapiens
aagagctcagcctgccagggaacaactctgggcaggagatgtggaaggaaggagctcagtgtgggggcacgcatggcatcctggggggacatctgagggcmcccccacccactattcctccctccaatggtggcctctgagtgtgaaggcaagggggaagcagacacctgcccctcactctccctccctaccacatagcta

SEQ ID NO: 276392 - DNA, 201 bp, Homo sapiens
accctaaataggagctaagcagctgggaacgcagaaaacacaatacgtgacgtgccccgcgtgggctctgctatgtgtactttcctcttacatttctttcttttttttttttttaagacagagtctccctcatgcaacctctgcctcccgggttcaagcgattctcctgcctcagcctcatgggtagctgggattacaggt

SEQ ID NO: 276393 - DNA, 201 bp, Homo sapiens
cctcgctcctcaccctgccgcccccacagcagccactgacctcccacccaccctgtcgtgtcccacccaaccctgcggccccctcctcccaggcaggagatttttttcagagtgtgtttggggagggagccgtctgtgtgctgggcaggcctggcctacagcagtgctggcctcggaaacacccaggactcaggatggaag

SEQ ID NO: 276394 - DNA, 201 bp, Homo sapiens; identical to SEQ ID NO: 91027

SEQ ID NO: 276395 - DNA, 201 bp, Homo sapiens
cagataccaaatcacaaccaggacctcaggccgtgccaggcaagggtgagatcacacaccccacacttaaacagtcaactctgttctgcctgccccaaggttttttttttttttttttttttgctctagcagctaaacaagcactgcctccagataaagatgaaaacaatcacagctcacccagcgcccggacgcggagca

SEQ ID NO: 276396 - DNA, 201 bp, Homo sapiens; identical to SEQ ID NO: 275162

SEQ ID NO: 276397 - DNA, 201 bp, Homo sapiens
cccccctgccagcatcccctcctcttcctctcccctcagtcttcctgcctgggaaggcagcagaaattctcagggctgtggaggggtgggggaggcccagrgccgtcccgggagctgtgttcagtggacatgagccccgaggactccaggagggctccctgcatgggccggtttctctcttgtgccttcagaaatccgatg

SEQ ID NO: 276398 - DNA, 201 bp, Homo sapiens
cctgattcctcgatgtcaaggacacatcctcacagggtggtgaaccctcgctcctcaccctgccgcccccacagcagccactgacctcccacccaccctgycgtgtcccacccaaccctgcggccccctcctcccaggcaggagatttttttcagagtgtgtttggggagggagccgtctgtgtgctgggcaggcctggcc

SEQ ID NO: 276399 - DNA, 201 bp, Homo sapiens; identical to SEQ ID NO: 275163

SEQ ID NO: 276400 - DNA, 201 bp, Homo sapiens
tgcctgttcttctctgcttttgccccttgacaggtatgggccagcagtttcctgccagatattgcccagcgtgaggagcgatctcagcaggcctataagastcagcatggagagcccctgctaatggagtacagccgccaggagctactcaggaaggtgggagagagccaagccctgtgtccccaaggagtccctaacttt

SEQ ID NO: 276401 - DNA, 201 bp, Homo sapiens
tgtggaggcttggaggtaaaggacctgcctgttcttctctgcttttgccccttgacaggtatgggccagcagtttcctgccagatattgcccagcgtgagragcgatctcagcaggcctataagagtcagcatggagagcccctgctaatggagtacagccgccaggagctactcaggaaggtgggagagagccaagccct

SEQ ID NO: 276402 - DNA, 201 bp, Homo sapiens
agagtcaggctctgattccagatctagcctccatcatgaagaagctcttgaccaagtatgacaacctctttgagacgtcctttccctactccatgggctgkcatggtgaggcttttcaagtacctatatttagccccaacaccatttctgggctcctggggctcagcctagtgaactgcaacctcaaaggagcaagccttg

SEQ ID NO: 276403 - DNA, 201 bp, Homo sapiens
cctggttgggtttgggagtaggtgctaacctggataactgtaaaagggctctctctccccactgtctctcttctttctgtcaggggctcccacaggatcaraggctggggccaactggaaccattggcagctgcacgctcattactaccctccgctcctgcgctctgccactgtccggaaattcatggttggctacgaaat

SEQ ID NO: 276404 - DNA, 201 bp, Homo sapiens
gcagctgcacgctcattactaccctccgctcctgcgctctgccactgtccggaaattcatggttggctacgaaatgcttgctcaggctcagagggacctcrcccctgagcaggtcaggactcagaacagtctggcgtctccagactctcacatgcagtatgtgcaggcacctgatacttctgttgcccttgtgctccagtc

SEQ ID NO: 276405 - DNA, 201 bp, Homo sapiens
tgttgatccagggtcatatccttactcgccctagaatgtaagctcaggcagggcagaggccatgcctgacatgtgcatcccaatgctttacacagcctagktgcctagcacatgctagatgcttggtaaatatttgctgaatgaaagatcaaatgaatgattgcagcaagcaagtcctgtaggcatcctggagcccaagga

SEQ ID NO: 276406 - DNA, 201 bp, Homo sapiens
ggtgtggtggctcatgccttaatcccagcactttgggaggtcaagatgggaggattgcttgagcccagaagttcgagactagcctgggaaacataggaagscctcgtctctacaaaaaaaatttaaaaagttagccaggtatggtggcatatacttgtggtcccagatacttgggaggctgagataggatcacttgggccc

SEQ ID NO: 276407 - DNA, 201 bp, Homo sapiens
tcttgactgtctgcccccagaccatcagcatatccgctacaacccgctgcaggatgagtgggtgctggtgtcagctcaccgcatgaagcggccctggcagkgtcaagtggagccccagcttctgaagacagtgccccgccatgaccctctcaaccctctgtgtcctggggccatccgagccaacggagaggtaagcctgta

SEQ ID NO: 276408 - DNA, 201 bp, Homo sapiens
ctccccactgtctctcttctttctgtcaggggctcccacaggatcagaggctggggccaactggaaccattggcagctgcacgctcattactaccctccgytcctgcgctctgccactgtccggaaattcatggttggctacgaaatgcttgctcaggctcagagggacctcacccctgagcaggtcaggactcagaacag

SEQ ID NO: 276409 - DNA, 201 bp, Homo sapiens
gaggcttggaggtaaaggacctgcctgttcttctctgcttttgccccttgacaggtatgggccagcagtttcctgccagatattgcccagcgtgaggagcsatctcagcaggcctataagagtcagcatggagagcccctgctaatggagtacagccgccaggagctactcaggaaggtgggagagagccaagccctgtgt

SEQ ID NO: 276410 - DNA, 201 bp, Homo sapiens
aggacctgcctgttcttctctgcttttgccccttgacaggtatgggccagcagtttcctgccagatattgcccagcgtgaggagcgatctcagcaggcctvtaagagtcagcatggagagcccctgctaatggagtacagccgccaggagctactcaggaaggtgggagagagccaagccctgtgtccccaaggagtccct

SEQ ID NO: 276411 - DNA, 201 bp, Homo sapiens
cctatgtcaccttgatgacttcctatccattctgtcttcctaggaacgtctggtcctaaccagtgagcactggttagtactggtccccttctgggcaacayggccctaccagacactgctgctgccccgtcggcatgtgcggcggctacctgagctgacccctgctgagcgtgatggtcagtctcccaagtaggatcctgg

SEQ ID NO: 276412 - DNA, 201 bp, Homo sapiens
caccttgatgacttcctatccattctgtcttcctaggaacgtctggtcctaaccagtgagcactggttagtactggtccccttctgggcaacatggccctvccagacactgctgctgccccgtcggcatgtgcggcggctacctgagctgacccctgctgagcgtgatggtcagtctcccaagtaggatcctggggctagg

SEQ ID NO: 276413 - DNA, 201 bp, Homo sapiens
gaggtaaaggacctgcctgttcttctctgcttttgccccttgacaggtatgggccagcagtttcctgccagatattgcccagcgtgaggagcgatctcagyaggcctataagagtcagcatggagagcccctgctaatggagtacagccgccaggagctactcaggaaggtgggagagagccaagccctgtgtccccaagg

SEQ ID NO: 276414 - DNA, 201 bp, Homo sapiens
taacctggataactgtaaaagggctctctctccccactgtctctcttctttctgtcaggggctcccacaggatcagaggctggggccaactggaaccattrgcagctgcacgctcattactaccctccgctcctgcgctctgccactgtccggaaattcatggttggctacgaaatgcttgctcaggctcagagggacctc

SEQ ID NO: 276415 - DNA, 201 bp, Homo sapiens
tctctcttctttctgtcaggggctcccacaggatcagaggctggggccaactggaaccattggcagctgcacgctcattactaccctccgctcctgcgctytgccactgtccggaaattcatggttggctacgaaatgcttgctcaggctcagagggacctcacccctgagcaggtcaggactcagaacagtctggcgtct

SEQ ID NO: 276416 - DNA, 201 bp, Homo sapiens
ctgtcaggggctcccacaggatcagaggctggggccaactggaaccattggcagctgcacgctcattactaccctccgctcctgcgctctgccactgtccrgaaattcatggttggctacgaaatgcttgctcaggctcagagggacctcacccctgagcaggtcaggactcagaacagtctggcgtctccagactctcac

SEQ ID NO: 276417 - DNA, 201 bp, Homo sapiens
gtagcacagccaagccctacctctcggttatcttttctcccgtcaccacccagtaaggtcatgtgcttccacccctggtcggatgtaacgctgccactcawgtcggtccctgagatccgggctgttgttgatgcatgggcctcagtcacagaggagctgggtgcccagtacccttgggtgcaggtttgtgaggtcgcccct

SEQ ID NO: 276418 - DNA, 201 bp, Homo sapiens
agagggagctagagagctctgaggactgatcttgactgtctgcccccagaccatcagcatatccgctacaacccgctgcaggatgagtgggtgctggtgtyagctcaccgcatgaagcggccctggcagggtcaagtggagccccagcttctgaagacagtgccccgccatgaccctctcaaccctctgtgtcctggggcc

SEQ ID NO: 276419 - DNA, 201 bp, Homo sapiens
gggtggtgtggacggagaaagtgaaaggtgaggcacggccctgcagattttccagcggatcccccggtggcctcatgtcgcgcagtggaaccgatcctcascaacgccagcaggcgtcagaggcggacgccgcagcagcaaccttccgggcaaacggtaactgcaccgcggcagggactcgctggggcgcggagccgagcc

SEQ ID NO: 276420 - DNA, 201 bp, Homo sapiens
cgtagcacagccaagccctacctctcggttatcttttctcccgtcaccacccagtaaggtcatgtgcttccacccctggtcggatgtaacgctgccactcrtgtcggtccctgagatccgggctgttgttgatgcatgggcctcagtcacagaggagctgggtgcccagtacccttgggtgcaggtttgtgaggtcgcccc

SEQ ID NO: 276421 - DNA, 201 bp, Homo sapiens
tctcccgtcaccacccagtaaggtcatgtgcttccacccctggtcggatgtaacgctgccactcatgtcggtccctgagatccgggctgttgttgatgcakgggcctcagtcacagaggagctgggtgcccagtacccttgggtgcaggtttgtgaggtcgccccttcccctggatgggcagggagggggtgatgaagctt

SEQ ID NO: 276422 - DNA, 201 bp, Homo sapiens
ctcttctttctgtcaggggctcccacaggatcagaggctggggccaactggaaccattggcagctgcacgctcattactaccctccgctcctgcgctctgycactgtccggaaattcatggttggctacgaaatgcttgctcaggctcagagggacctcacccctgagcaggtcaggactcagaacagtctggcgtctcca

SEQ ID NO: 276423 - DNA, 201 bp, Homo sapiens
cgctcattactaccctccgctcctgcgctctgccactgtccggaaattcatggttggctacgaaatgcttgctcaggctcagagggacctcacccctgagyaggtcaggactcagaacagtctggcgtctccagactctcacatgcagtatgtgcaggcacctgatacttctgttgcccttgtgctccagtcattgcacaa

SEQ ID NO: 276424 - DNA, 201 bp, Homo sapiens
ttgctccctgtcccttttccaggctgcagagagactaagggcacttcctgaggttcattaccacctggggcagaaggacagggagacagcaaccatcgccygaccacgccgaccacagggccttgaatccttttttgttttcaacagtcttgctgaattaagcagaaagggccttgaatcctggcctggaatttgggcaga

SEQ ID NO: 276425 - DNA, 201 bp, Homo sapiens
ctgcagattttccagcggatcccccggtggcctcatgtcgcgcagtggaaccgatcctcagcaacgccagcaggcgtcagaggcggacgccgcagcagcarccttccgggcaaacggtaactgcaccgcggcagggactcgctggggcgcggagccgagccctccccttccttaggaagctttcgtcccctccgaaggttg

SEQ ID NO: 276426 - DNA, 201 bp, Homo sapiens
gggctctctctccccactgtctctcttctttctgtcaggggctcccacaggatcagaggctggggccaactggaaccattggcagctgcacgctcattacbaccctccgctcctgcgctctgccactgtccggaaattcatggttggctacgaaatgcttgctcaggctcagagggacctcacccctgagcaggtcaggac

SEQ ID NO: 276427 - DNA, 201 bp, Homo sapiens
tctgtcttcctaggaacgtctggtcctaaccagtgagcactggttagtactggtccccttctgggcaacatggccctaccagacactgctgctgccccgtyggcatgtgcggcggctacctgagctgacccctgctgagcgtgatggtcagtctcccaagtaggatcctggggctaggcactggatggaggttgctcccag

SEQ ID NO: 276428 - DNA, 201 bp, Homo sapiens
ggtcagcatctggaccccaggctgagagtcaggctctgattccagatctagcctccatcatgaagaagctcttgaccaagtatgacaacctctttgagacrtcctttccctactccatgggctggcatggtgaggcttttcaagtacctatatttagccccaacaccatttctgggctcctggggctcagcctagtgaact

SEQ ID NO: 276429 - DNA, 201 bp, Homo sapiens
cggagccgagccctccccttccttaggaagctttcgtcccctccgaaggttggaacgctcatcccgagccagaccgacaaggcgtacagtctgcaggcctstacgagcagcaggccaattggcgctgggaaagtccaatcctgggcctctagctcctgagcgggacagggccgagagggcgctcccgagcttgggcctgct

SEQ ID NO: 276430 - DNA, 201 bp, Homo sapiens
gctaacctggataactgtaaaagggctctctctccccactgtctctcttctttctgtcaggggctcccacaggatcagaggctggggccaactggaaccaytggcagctgcacgctcattactaccctccgctcctgcgctctgccactgtccggaaattcatggttggctacgaaatgcttgctcaggctcagagggacc

SEQ ID NO: 276431 - DNA, 201 bp, Homo sapiens
atacctggttgggtttgggagtaggtgctaacctggataactgtaaaagggctctctctccccactgtctctcttctttctgtcaggggctcccacaggawcagaggctggggccaactggaaccattggcagctgcacgctcattactaccctccgctcctgcgctctgccactgtccggaaattcatggttggctacga

SEQ ID NO: 276432 - DNA, 201 bp, Homo sapiens
aggaggcggatgttgcagtgagcctagattgcaccactgtactccagcctgggcgacagagcgagactccatctaaaaaaaaaaaaaaaaaaaaaaaaaargaaacttggcagagaaattaaggataaagaaaggattatctagaggagaatacaggattgagggaacatgtttttgtattggttctggcttctgtggcat

SEQ ID NO: 276433 - DNA, 201 bp, Homo sapiens
tggctagacctcttgagggacttctgctgcagagagtgatactcctttacctcaggacccagtgatcatccccttttccaagcaaagtctgctcgaggagyctggtaactatggatttcccctcttacaactttcaaaccagagttggagactcagcattggggttcggccctgcccgtagcacagccaagccctacctct

SEQ ID NO: 276434 - DNA, 201 bp, Homo sapiens
ggagagagggagctagagagctctgaggactgatcttgactgtctgcccccagaccatcagcatatccgctacaacccgctgcaggatgagtgggtgctgdtgtcagctcaccgcatgaagcggccctggcagggtcaagtggagccccagcttctgaagacagtgccccgccatgaccctctcaaccctctgtgtcctgg

SEQ ID NO: 276435 - DNA, 201 bp, Homo sapiens
ctctttgagacgtcctttccctactccatgggctggcatggtgaggcttttcaagtacctatatttagccccaacaccatttctgggctcctggggctcakcctagtgaactgcaacctcaaaggagcaagccttgaaacagttgctgggggaagtggccagagtagagatgctgggactgagggtggagcagcaaacttg

SEQ ID NO: 276436 - DNA, 201 bp, Homo sapiens
gttctggggagtaacatttctgtttccacagggtgtggtcaggagggagttgacttggtgtcttttggctaacagagctccgtatccctatctgatagatmtttgaaaacaaaggtgccatgatgggctgttctaacccccacccccactgccaggtaagggtgtcaggggctccagtgggtttcttggctgagtctgagc

SEQ ID NO: 276437 - DNA, 201 bp, Homo sapiens
ggctcccacaggatcagaggctggggccaactggaaccattggcagctgcacgctcattactaccctccgctcctgcgctctgccactgtccggaaattcwtggttggctacgaaatgcttgctcaggctcagagggacctcacccctgagcaggtcaggactcagaacagtctggcgtctccagactctcacatgcagta

SEQ ID NO: 276438 - DNA, 201 bp, Homo sapiens
tacctctcggttatcttttctcccgtcaccacccagtaaggtcatgtgcttccacccctggtcggatgtaacgctgccactcatgtcggtccctgagatcbgggctgttgttgatgcatgggcctcagtcacagaggagctgggtgcccagtacccttgggtgcaggtttgtgaggtcgccccttcccctggatgggcagg

SEQ ID NO: 276439 - DNA, 201 bp, Homo sapiens
ctctccccactgtctctcttctttctgtcaggggctcccacaggatcagaggctggggccaactggaaccattggcagctgcacgctcattactaccctcygctcctgcgctctgccactgtccggaaattcatggttggctacgaaatgcttgctcaggctcagagggacctcacccctgagcaggtcaggactcagaac

SEQ ID NO: 276440 - DNA, 201 bp, Homo sapiens
tgatcttgactgtctgcccccagaccatcagcatatccgctacaacccgctgcaggatgagtgggtgctggtgtcagctcaccgcatgaagcggccctggyagggtcaagtggagccccagcttctgaagacagtgccccgccatgaccctctcaaccctctgtgtcctggggccatccgagccaacggagaggtaagcct

SEQ ID NO: 276441 - DNA, 201 bp, Homo sapiens
cggatcccccggtggcctcatgtcgcgcagtggaaccgatcctcagcaacgccagcaggcgtcagaggcggacgccgcagcagcaaccttccgggcaaacdgtaactgcaccgcggcagggactcgctggggcgcggagccgagccctccccttccttaggaagctttcgtcccctccgaaggttggaacgctcatcccga

SEQ ID NO: 276442 - DNA, 201 bp, Homo sapiens
ctcccgagcttgggcctgctggtgggtgagacccaggagagagggagctagagagctctgaggactgatcttgactgtctgcccccagaccatcagcatawccgctacaacccgctgcaggatgagtgggtgctggtgtcagctcaccgcatgaagcggccctggcagggtcaagtggagccccagcttctgaagacagtg

SEQ ID NO: 276443 - DNA, 201 bp, Homo sapiens
tcaggggctcccacaggatcagaggctggggccaactggaaccattggcagctgcacgctcattactaccctccgctcctgcgctctgccactgtccggarattcatggttggctacgaaatgcttgctcaggctcagagggacctcacccctgagcaggtcaggactcagaacagtctggcgtctccagactctcacatg

SEQ ID NO: 276444 - DNA, 201 bp, Homo sapiens
tcaccgcatgaagcggccctggcagggtcaagtggagccccagcttctgaagacagtgccccgccatgaccctctcaaccctctgtgtcctggggccatcygagccaacggagaggtaagcctgtagagccctgcatctgcaggctgggccacggggagtagttccctcttagaactgtcctccacccacagggatagtga

SEQ ID NO: 276445 - DNA, 201 bp, Homo sapiens
ccgcatgaagcggccctggcagggtcaagtggagccccagcttctgaagacagtgccccgccatgaccctctcaaccctctgtgtcctggggccatccgarccaacggagaggtaagcctgtagagccctgcatctgcaggctgggccacggggagtagttccctcttagaactgtcctccacccacagggatagtgaacc

SEQ ID NO: 276446 - DNA, 201 bp, Homo sapiens
gggcctgcccgctcctgtccatccgcaggtcttccttcaggcctggctggtcaagggtcctggccaaagaggtaggtggtgagctcaagccggaggccccragcataggagcgaagagtatagaagagggtgaggaagtcctgggtgctgaagacagtgtcggccagcgcgaaggccagggtggatgggatgacgccccgg

SEQ ID NO: 276447 - DNA, 201 bp, Homo sapiens
ccttccctactcccttgtagcctgtccagtctttgaagcccaccaggtaactggtggtatggggcagtgagtgcttctagcctatccttgtcggtaggtgratccccagtacgatagcaccttcctgtttgacaacgacttcccagctctgcagcctgatgcccccagtccaggtaacctggctccaactgctgctgggga

SEQ ID NO: 276448 - DNA, 201 bp, Homo sapiens
tcatacagcaggaactcaggatctgcatggtgtatgtccctgtctgtaaacatgggctccagcaagtggatatgtgcgggcctgcccgctcctgtccatcygcaggtcttccttcaggcctggctggtcaagggtcctggccaaagaggtaggtggtgagctcaagccggaggccccgagcataggagcgaagagtataga

SEQ ID NO: 276449 - DNA, 201 bp, Homo sapiens
gactgatcttgactgtctgcccccagaccatcagcatatccgctacaacccgctgcaggatgagtgggtgctggtgtcagctcaccgcatgaagcggcccwggcagggtcaagtggagccccagcttctgaagacagtgccccgccatgaccctctcaaccctctgtgtcctggggccatccgagccaacggagaggtaag

SEQ ID NO: 276450 - DNA, 201 bp, Homo sapiens
caggtaacctggctccaactgctgctggggaggagggtggctagacctcttgagggacttctgctgcagagagtgatactcctttacctcaggacccagtratcatccccttttccaagcaaagtctgctcgaggagtctggtaactatggatttcccctcttacaactttcaaaccagagttggagactcagcattgggg

SEQ ID NO: 276451 - DNA, 201 bp, Homo sapiens
tacaacccgctgcaggatgagtgggtgctggtgtcagctcaccgcatgaagcggccctggcagggtcaagtggagccccagcttctgaagacagtgccccrccatgaccctctcaaccctctgtgtcctggggccatccgagccaacggagaggtaagcctgtagagccctgcatctgcaggctgggccacggggagtagt

SEQ ID NO: 276452 - DNA, 201 bp, Homo sapiens
tttcaaaccagagttggagactcagcattggggttcggccctgcccgtagcacagccaagccctacctctcggttatcttttctcccgtcaccacccagtraggtcatgtgcttccacccctggtcggatgtaacgctgccactcatgtcggtccctgagatccgggctgttgttgatgcatgggcctcagtcacagagga

SEQ ID NO: 276453 - DNA, 201 bp, Homo sapiens
ccagagttggagactcagcattggggttcggccctgcccgtagcacagccaagccctacctctcggttatcttttctcccgtcaccacccagtaaggtcaygtgcttccacccctggtcggatgtaacgctgccactcatgtcggtccctgagatccgggctgttgttgatgcatgggcctcagtcacagaggagctgggt

SEQ ID NO: 276454 - DNA, 201 bp, Homo sapiens
gtcactcaaacaaatataaatgagagaatggaaaagcagatctcctgttcctgtctcacctctttgggtaatatgaacagccagtgggacaggtaaaaccyctgtttctcagtcctcagctccctgccccctacctctgaaggtagcctcttcctattccagtctgaggaccctagggcagagatcaagtaaatgacccat

SEQ ID NO: 276455 - DNA, 201 bp, Homo sapiens
gtttttaagaaacttggcaggccgggcacggtggctcacgcctgtaatcccaatactttgggaggcagaggcaggcggatcacctgaggtcaggaatttgrgaccagcctggccaacgtggtgaaaccctgtctctactacaaatacaaaaattagctgggtgtggtggtgcatgcctgtaatcccagctacaggggaggc

SEQ ID NO: 276456 - DNA, 201 bp, Homo sapiens
gagttggagactcagcattggggttcggccctgcccgtagcacagccaagccctacctctcggttatcttttctcccgtcaccacccagtaaggtcatgtrcttccacccctggtcggatgtaacgctgccactcatgtcggtccctgagatccgggctgttgttgatgcatgggcctcagtcacagaggagctgggtgcc

SEQ ID NO: 276457 - DNA, 201 bp, Homo sapiens
ggagactcagcattggggttcggccctgcccgtagcacagccaagccctacctctcggttatcttttctcccgtcaccacccagtaaggtcatgtgcttcyacccctggtcggatgtaacgctgccactcatgtcggtccctgagatccgggctgttgttgatgcatgggcctcagtcacagaggagctgggtgcccagta

SEQ ID NO: 276458 - DNA, 201 bp, Homo sapiens
ctggataactgtaaaagggctctctctccccactgtctctcttctttctgtcaggggctcccacaggatcagaggctggggccaactggaaccattggcakctgcacgctcattactaccctccgctcctgcgctctgccactgtccggaaattcatggttggctacgaaatgcttgctcaggctcagagggacctcaccc

SEQ ID NO: 276459 - DNA, 201 bp, Homo sapiens
gcacagccaagccctacctctcggttatcttttctcccgtcaccacccagtaaggtcatgtgcttccacccctggtcggatgtaacgctgccactcatgtyggtccctgagatccgggctgttgttgatgcatgggcctcagtcacagaggagctgggtgcccagtacccttgggtgcaggtttgtgaggtcgccccttcc

SEQ ID NO: 276460 - DNA, 201 bp, Homo sapiens
ctctctctccccactgtctctcttctttctgtcaggggctcccacaggatcagaggctggggccaactggaaccattggcagctgcacgctcattactacyctccgctcctgcgctctgccactgtccggaaattcatggttggctacgaaatgcttgctcaggctcagagggacctcacccctgagcaggtcaggactca

SEQ ID NO: 276461 - DNA, 201 bp, Homo sapiens
cctggacaacagagggagaccctgtctctaaaaaaaaaagaaaagaaaaaggggccgggcactgtggctcacacctgtaatcccagcactttgggaggccraggcgggtggatcacctgaggttgggaatttgagaccagcctaaccaacatggagaaaccctgtctctactaaaaatacaaaattagctgggcgtggtgg

SEQ ID NO: 276462 - DNA, 201 bp, Homo sapiens
gaagctctgcgtacccagccagagccagacgacctgggtcagcaccgctgcgacagccaggagcagcgcggcccacgcccaccgccggcccacggcccackgcatcccggcgggcggcctggcacggcgcagctcaggagggagccggggcctgaggctttgcgctcacggcctcggagcccgccggctgcccacgaagcg

SEQ ID NO: 276463 - DNA, 201 bp, Homo sapiens
tttataaagcagttagtgcctcacatggtgagaattttatgtgatggttatatatataaaacataaaggaactggaaaaaagtagcctcatacatttttgmccttaaagaaagaaactgaggccgggcgaggtggctcataactgtaatcccaacactttgggaggctgaggcagacggaacacttgagtccaggtattcg

SEQ ID NO: 276464 - DNA, 201 bp, Homo sapiens
tcggttatcttttctcccgtcaccacccagtaaggtcatgtgcttccacccctggtcggatgtaacgctgccactcatgtcggtccctgagatccgggctsttgttgatgcatgggcctcagtcacagaggagctgggtgcccagtacccttgggtgcaggtttgtgaggtcgccccttcccctggatgggcagggagggg

SEQ ID NO: 276465 - DNA, 201 bp, Homo sapiens
ggcagggagggggtgatgaagctttggttctggggagtaacatttctgtttccacagggtgtggtcaggagggagttgacttggtgtcttttggctaacaragctccgtatccctatctgatagatctttgaaaacaaaggtgccatgatgggctgttctaacccccacccccactgccaggtaagggtgtcaggggctcc

SEQ ID NO: 276466 - DNA, 201 bp, Homo sapiens
ccagtgatcatccccttttccaagcaaagtctgctcgaggagtctggtaactatggatttcccctcttacaactttcaaaccagagttggagactcagcaytggggttcggccctgcccgtagcacagccaagccctacctctcggttatcttttctcccgtcaccacccagtaaggtcatgtgcttccacccctggtcgg

SEQ ID NO: 276467 - DNA, 201 bp, Homo sapiens
tcttggcagcccagcccttatcctccttaattgctccctgtcccttttccaggctgcagagagactaagggcacttcctgaggttcattaccacctggggyagaaggacagggagacagcaaccatcgcctgaccacgccgaccacagggccttgaatccttttttgttttcaacagtcttgctgaattaagcagaaaggg

SEQ ID NO: 276468 - DNA, 201 bp, Homo sapiens
cttccacccctggtcggatgtaacgctgccactcatgtcggtccctgagatccgggctgttgttgatgcatgggcctcagtcacagaggagctgggtgccyagtacccttgggtgcaggtttgtgaggtcgccccttcccctggatgggcagggagggggtgatgaagctttggttctggggagtaacatttctgtttcca

SEQ ID NO: 276469 - DNA, 201 bp, Homo sapiens
ctggtcggatgtaacgctgccactcatgtcggtccctgagatccgggctgttgttgatgcatgggcctcagtcacagaggagctgggtgcccagtaccctygggtgcaggtttgtgaggtcgccccttcccctggatgggcagggagggggtgatgaagctttggttctggggagtaacatttctgtttccacagggtgtg

SEQ ID NO: 276470 - DNA, 201 bp, Homo sapiens
ctgctcatacagcaggaactcaggatctgcatggtgtatgtccctgtctgtaaacatgggctccagcaagtggatatgtgcgggcctgcccgctcctgtcyatccgcaggtcttccttcaggcctggctggtcaagggtcctggccaaagaggtaggtggtgagctcaagccggaggccccgagcataggagcgaagagta

SEQ ID NO: 276471 - DNA, 201 bp, Homo sapiens
ggatgtaacgctgccactcatgtcggtccctgagatccgggctgttgttgatgcatgggcctcagtcacagaggagctgggtgcccagtacccttgggtgmaggtttgtgaggtcgccccttcccctggatgggcagggagggggtgatgaagctttggttctggggagtaacatttctgtttccacagggtgtggtcagg

SEQ ID NO: 276472 - DNA, 201 bp, Homo sapiens
tcccgtcaccacccagtaaggtcatgtgcttccacccctggtcggatgtaacgctgccactcatgtcggtccctgagatccgggctgttgttgatgcatgrgcctcagtcacagaggagctgggtgcccagtacccttgggtgcaggtttgtgaggtcgccccttcccctggatgggcagggagggggtgatgaagctttg

SEQ ID NO: 276473 - DNA, 201 bp, Homo sapiens
agggggtgatgaagctttggttctggggagtaacatttctgtttccacagggtgtggtcaggagggagttgacttggtgtcttttggctaacagagctccrtatccctatctgatagatctttgaaaacaaaggtgccatgatgggctgttctaacccccacccccactgccaggtaagggtgtcaggggctccagtgggt

SEQ ID NO: 276474 - DNA, 201 bp, Homo sapiens
atggatatccctgctcatacagcaggaactcaggatctgcatggtgtatgtccctgtctgtaaacatgggctccagcaagtggatatgtgcgggcctgccygctcctgtccatccgcaggtcttccttcaggcctggctggtcaagggtcctggccaaagaggtaggtggtgagctcaagccggaggccccgagcatagga

SEQ ID NO: 276475 - DNA, 201 bp, Homo sapiens
tctggggagtaacatttctgtttccacagggtgtggtcaggagggagttgacttggtgtcttttggctaacagagctccgtatccctatctgatagatctytgaaaacaaaggtgccatgatgggctgttctaacccccacccccactgccaggtaagggtgtcaggggctccagtgggtttcttggctgagtctgagcca

SEQ ID NO: 276476 - DNA, 201 bp, Homo sapiens
ccatcagcatatccgctacaacccgctgcaggatgagtgggtgctggtgtcagctcaccgcatgaagcggccctggcagggtcaagtggagccccagcttmtgaagacagtgccccgccatgaccctctcaaccctctgtgtcctggggccatccgagccaacggagaggtaagcctgtagagccctgcatctgcaggctg

SEQ ID NO: 276477 - DNA, 201 bp, Homo sapiens
tgccccttgacaggtatgggccagcagtttcctgccagatattgcccagcgtgaggagcgatctcagcaggcctataagagtcagcatggagagcccctgytaatggagtacagccgccaggagctactcaggaaggtgggagagagccaagccctgtgtccccaaggagtccctaactttcttatcccatgagagaggtg

SEQ ID NO: 276478 - DNA, 201 bp, Homo sapiens
ggaggcttggaggtaaaggacctgcctgttcttctctgcttttgccccttgacaggtatgggccagcagtttcctgccagatattgcccagcgtgaggagygatctcagcaggcctataagagtcagcatggagagcccctgctaatggagtacagccgccaggagctactcaggaaggtgggagagagccaagccctgtg

SEQ ID NO: 276479 - DNA, 201 bp, Homo sapiens
aggagggagttgacttggtgtcttttggctaacagagctccgtatccctatctgatagatctttgaaaacaaaggtgccatgatgggctgttctaaccccsacccccactgccaggtaagggtgtcaggggctccagtgggtttcttggctgagtctgagccagcactgtggacatgggaacaggattaatggatgggaca

SEQ ID NO: 276480 - DNA, 201 bp, Homo sapiens
taggtgctaacctggataactgtaaaagggctctctctccccactgtctctcttctttctgtcaggggctcccacaggatcagaggctggggccaactggraccattggcagctgcacgctcattactaccctccgctcctgcgctctgccactgtccggaaattcatggttggctacgaaatgcttgctcaggctcagag

SEQ ID NO: 276481 - DNA, 201 bp, Homo sapiens
tatgtcaccttgatgacttcctatccattctgtcttcctaggaacgtctggtcctaaccagtgagcactggttagtactggtccccttctgggcaacatgrccctaccagacactgctgctgccccgtcggcatgtgcggcggctacctgagctgacccctgctgagcgtgatggtcagtctcccaagtaggatcctgggg

SEQ ID NO: 276482 - DNA, 201 bp, Homo sapiens
gagggagttgacttggtgtcttttggctaacagagctccgtatccctatctgatagatctttgaaaacaaaggtgccatgatgggctgttctaacccccamccccactgccaggtaagggtgtcaggggctccagtgggtttcttggctgagtctgagccagcactgtggacatgggaacaggattaatggatgggacaga

SEQ ID NO: 276483 - DNA, 201 bp, Homo sapiens
gagttgacttggtgtcttttggctaacagagctccgtatccctatctgatagatctttgaaaacaaaggtgccatgatgggctgttctaacccccaccccyactgccaggtaagggtgtcaggggctccagtgggtttcttggctgagtctgagccagcactgtggacatgggaacaggattaatggatgggacagaggaa

SEQ ID NO: 276484 - DNA, 201 bp, Homo sapiens
cttggtgtcttttggctaacagagctccgtatccctatctgatagatctttgaaaacaaaggtgccatgatgggctgttctaacccccacccccactgccrggtaagggtgtcaggggctccagtgggtttcttggctgagtctgagccagcactgtggacatgggaacaggattaatggatgggacagaggaaatatgcc

SEQ ID NO: 276485 - DNA, 201 bp, Homo sapiens
taatggatgggacagaggaaatatgccaatgatgtggaggcttggaggtaaaggacctgcctgttcttctctgcttttgccccttgacaggtatgggccarcagtttcctgccagatattgcccagcgtgaggagcgatctcagcaggcctataagagtcagcatggagagcccctgctaatggagtacagccgccaggag

SEQ ID NO: 276486 - DNA, 201 bp, Homo sapiens
tctgtcaggggctcccacaggatcagaggctggggccaactggaaccattggcagctgcacgctcattactaccctccgctcctgcgctctgccactgtcbggaaattcatggttggctacgaaatgcttgctcaggctcagagggacctcacccctgagcaggtcaggactcagaacagtctggcgtctccagactctca

SEQ ID NO: 276487 - DNA, 201 bp, Homo sapiens
ctacaacccgctgcaggatgagtgggtgctggtgtcagctcaccgcatgaagcggccctggcagggtcaagtggagccccagcttctgaagacagtgcccygccatgaccctctcaaccctctgtgtcctggggccatccgagccaacggagaggtaagcctgtagagccctgcatctgcaggctgggccacggggagtag

SEQ ID NO: 276488 - DNA, 201 bp, Homo sapiens
gatgggacagaggaaatatgccaatgatgtggaggcttggaggtaaaggacctgcctgttcttctctgcttttgccccttgacaggtatgggccagcagtytcctgccagatattgcccagcgtgaggagcgatctcagcaggcctataagagtcagcatggagagcccctgctaatggagtacagccgccaggagctact

SEQ ID NO: 276489 - DNA, 201 bp, Homo sapiens
cctgttcttctctgcttttgccccttgacaggtatgggccagcagtttcctgccagatattgcccagcgtgaggagcgatctcagcaggcctataagagtyagcatggagagcccctgctaatggagtacagccgccaggagctactcaggaaggtgggagagagccaagccctgtgtccccaaggagtccctaactttct

SEQ ID NO: 276490 - DNA, 201 bp, Homo sapiens
ggtaggtggtgagctcaagccggaggccccgagcataggagcgaagagtatagaagagggtgaggaagtcctgggtgctgaagacagtgtcggccagcgcraaggccagggtggatgggatgacgccccggccgtactccaccatccatgtgtttggcccccactccacagctgttgcctcaccaggcccgtgtactaccg

SEQ ID NO: 276491 - DNA, 201 bp, Homo sapiens
atcagaggctggggccaactggaaccattggcagctgcacgctcattactaccctccgctcctgcgctctgccactgtccggaaattcatggttggctacdaaatgcttgctcaggctcagagggacctcacccctgagcaggtcaggactcagaacagtctggcgtctccagactctcacatgcagtatgtgcaggcacc

SEQ ID NO: 276492 - DNA, 201 bp, Homo sapiens
cattctgtcttcctaggaacgtctggtcctaaccagtgagcactggttagtactggtccccttctgggcaacatggccctaccagacactgctgctgcccygtcggcatgtgcggcggctacctgagctgacccctgctgagcgtgatggtcagtctcccaagtaggatcctggggctaggcactggatggaggttgctcc

SEQ ID NO: 276493 - DNA, 201 bp, Homo sapiens
tggcatagctactagatggatggcacctggatccctaaatactgcttggaacagagctccctgttacccccagaattgactgtagtgctaagccattgagktttgggagtgtttgttacagcaattaagattacttaccctgacaaatatagggcaaaagatgtgttacaatataccatgcagctaagagtagagaccaga

SEQ ID NO: 276494 - DNA, 201 bp, Homo sapiens
gctgaccacactccggctcctatgtcaccttgatgacttcctatccattctgtcttcctaggaacgtctggtcctaaccagtgagcactggttagtactgktccccttctgggcaacatggccctaccagacactgctgctgccccgtcggcatgtgcggcggctacctgagctgacccctgctgagcgtgatggtcagtc

SEQ ID NO: 276495 - DNA, 201 bp, Homo sapiens
aggaatcccccaggaggcatggatttgcaacctggggtgagtggagaggagccagccagggcctactatgcctgacacggtggtattgggggtgaagagtyggtttcaggttggccaacttacctggactccacattcagtcacaaattgacttttgatgttgtttctaaatgcagttatacatatagtctttcggatttg

SEQ ID NO: 276496 - DNA, 201 bp, Homo sapiens
gtaaaagggctctctctccccactgtctctcttctttctgtcaggggctcccacaggatcagaggctggggccaactggaaccattggcagctgcacgctyattactaccctccgctcctgcgctctgccactgtccggaaattcatggttggctacgaaatgcttgctcaggctcagagggacctcacccctgagcaggt

SEQ ID NO: 276497 - DNA, 201 bp, Homo sapiens
acctctcggttatcttttctcccgtcaccacccagtaaggtcatgtgcttccacccctggtcggatgtaacgctgccactcatgtcggtccctgagatccrggctgttgttgatgcatgggcctcagtcacagaggagctgggtgcccagtacccttgggtgcaggtttgtgaggtcgccccttcccctggatgggcaggg

SEQ ID NO: 276498 - DNA, 201 bp, Homo sapiens
ttatcttttctcccgtcaccacccagtaaggtcatgtgcttccacccctggtcggatgtaacgctgccactcatgtcggtccctgagatccgggctgttgytgatgcatgggcctcagtcacagaggagctgggtgcccagtacccttgggtgcaggtttgtgaggtcgccccttcccctggatgggcagggagggggtga

SEQ ID NO: 276499 - DNA, 201 bp, Homo sapiens
aactgtaaaagggctctctctccccactgtctctcttctttctgtcaggggctcccacaggatcagaggctggggccaactggaaccattggcagctgcasgctcattactaccctccgctcctgcgctctgccactgtccggaaattcatggttggctacgaaatgcttgctcaggctcagagggacctcacccctgagc

SEQ ID NO: 276500 - DNA, 201 bp, Homo sapiens
cgctacaacccgctgcaggatgagtgggtgctggtgtcagctcaccgcatgaagcggccctggcagggtcaagtggagccccagcttctgaagacagtgcyccgccatgaccctctcaaccctctgtgtcctggggccatccgagccaacggagaggtaagcctgtagagccctgcatctgcaggctgggccacggggagt

SEQ ID NO: 276501 - DNA, 201 bp, Homo sapiens
ctgaggactgatcttgactgtctgcccccagaccatcagcatatccgctacaacccgctgcaggatgagtgggtgctggtgtcagctcaccgcatgaagckgccctggcagggtcaagtggagccccagcttctgaagacagtgccccgccatgaccctctcaaccctctgtgtcctggggccatccgagccaacggagag

SEQ ID NO: 276502 - DNA, 201 bp, Homo sapiens
aatcgcttgaacctgggaggtggaggttgcagtgagccaagatcacgccactgcactccagcctgggtggcagagtgagactctctctcaaacaaacaaamaaaagtaccaggggaggaattaatttgaattttatcctagtgttagccaattggtcccatccaaggaaaatttagaaaagggaaggggatgtgtaaagga

SEQ ID NO: 276503 - DNA, 201 bp, Homo sapiens
aacccgctgcaggatgagtgggtgctggtgtcagctcaccgcatgaagcggccctggcagggtcaagtggagccccagcttctgaagacagtgccccgccmtgaccctctcaaccctctgtgtcctggggccatccgagccaacggagaggtaagcctgtagagccctgcatctgcaggctgggccacggggagtagttcc

SEQ ID NO: 276504 - DNA, 201 bp, Homo sapiens
ctttcctgataaacttgctttcacttcacactatggactcaccttgaattctttcttgtgtgagatccaagaatcctctcttggggtctggattgggatcyctttactgtaacaacacctctgggatctggcagggagggagctggttaggcccatcttagtcattctcctcttcctccaaaaaatgaccttggggagtca

SEQ ID NO: 276505 - DNA, 201 bp, Homo sapiens
actgtaaaagggctctctctccccactgtctctcttctttctgtcaggggctcccacaggatcagaggctggggccaactggaaccattggcagctgcacvctcattactaccctccgctcctgcgctctgccactgtccggaaattcatggttggctacgaaatgcttgctcaggctcagagggacctcacccctgagca

SEQ ID NO: 276506 - DNA, 201 bp, Homo sapiens
cactttcctgataaacttgctttcacttcacactatggactcaccttgaattctttcttgtgtgagatccaagaatcctctcttggggtctggattgggayctctttactgtaacaacacctctgggatctggcagggagggagctggttaggcccatcttagtcattctcctcttcctccaaaaaatgaccttggggagt

SEQ ID NO: 276507 - DNA, 201 bp, Homo sapiens
cctggataactgtaaaagggctctctctccccactgtctctcttctttctgtcaggggctcccacaggatcagaggctggggccaactggaaccattggcrgctgcacgctcattactaccctccgctcctgcgctctgccactgtccggaaattcatggttggctacgaaatgcttgctcaggctcagagggacctcacc

SEQ ID NO: 276508 - DNA, 201 bp, Homo sapiens
ctgtctctcttctttctgtcaggggctcccacaggatcagaggctggggccaactggaaccattggcagctgcacgctcattactaccctccgctcctgcrctctgccactgtccggaaattcatggttggctacgaaatgcttgctcaggctcagagggacctcacccctgagcaggtcaggactcagaacagtctggcg

SEQ ID NO: 276509 - DNA, 201 bp, Homo sapiens
tccaatgtgaaatggggaagaggtttagacaatatttagatggctctttaaaagtactgggggccagctgtttgggaggctgaggcaggaggatcacttgmagtcaggagttcaagaccagcctggccaacatgtgaaaccccgtctctactaaaaatacataaattagcccagtgtggtggcacacagctctaattccag

SEQ ID NO: 276510 - DNA, 201 bp, Homo sapiens
acagatcaacaaatctttattaatagaaacagacagatggacagagaatgcagcaggggctgtgtgaaaactgtgatatgtgtgtgtgtgtgtgtgtgtgtatgtgttgtgtgtgtgtaaaaggccttctccaggccaggaagggccccttggaattaggcccacctgtctagatcctctcctcagtggtgggtcctgggc

SEQ ID NO: 276511 - DNA, 201 bp, Homo sapiens
ggtaactatggatttcccctcttacaactttcaaaccagagttggagactcagcattggggttcggccctgcccgtagcacagccaagccctacctctcgsttatcttttctcccgtcaccacccagtaaggtcatgtgcttccacccctggtcggatgtaacgctgccactcatgtcggtccctgagatccgggctgttg

SEQ ID NO: 276512 - DNA, 201 bp, Homo sapiens
ggacagaggaaatatgccaatgatgtggaggcttggaggtaaaggacctgcctgttcttctctgcttttgccccttgacaggtatgggccagcagtttccygccagatattgcccagcgtgaggagcgatctcagcaggcctataagagtcagcatggagagcccctgctaatggagtacagccgccaggagctactcagg

SEQ ID NO: 276513 - DNA, 201 bp, Homo sapiens
aatgatgtggaggcttggaggtaaaggacctgcctgttcttctctgcttttgccccttgacaggtatgggccagcagtttcctgccagatattgcccagcrtgaggagcgatctcagcaggcctataagagtcagcatggagagcccctgctaatggagtacagccgccaggagctactcaggaaggtgggagagagccaa

SEQ ID NO: 276514 - DNA, 201 bp, Homo sapiens
agtttcctgccagatattgcccagcgtgaggagcgatctcagcaggcctataagagtcagcatggagagcccctgctaatggagtacagccgccaggagcyactcaggaaggtgggagagagccaagccctgtgtccccaaggagtccctaactttcttatcccatgagagaggtgtgtaaaggagaaagctagaggtgaa

SEQ ID NO: 276515 - DNA, 201 bp, Homo sapiens
gggcacattcttttcttctgcttcccttgcctatttgctgaccacactccggctcctatgtcaccttgatgacttcctatccattctgtcttcctaggaaygtctggtcctaaccagtgagcactggttagtactggtccccttctgggcaacatggccctaccagacactgctgctgccccgtcggcatgtgcggcggct

SEQ ID NO: 276516 - DNA, 201 bp, Homo sapiens
ggcacattcttttcttctgcttcccttgcctatttgctgaccacactccggctcctatgtcaccttgatgacttcctatccattctgtcttcctaggaacrtctggtcctaaccagtgagcactggttagtactggtccccttctgggcaacatggccctaccagacactgctgctgccccgtcggcatgtgcggcggcta

SEQ ID NO: 276517 - DNA, 201 bp, Homo sapiens
ctggttagtactggtccccttctgggcaacatggccctaccagacactgctgctgccccgtcggcatgtgcggcggctacctgagctgacccctgctgagsgtgatggtcagtctcccaagtaggatcctggggctaggcactggatggaggttgctcccagtagggtcagcatctggaccccaggctgagagtcaggctc

SEQ ID NO: 276518 - DNA, 201 bp, Homo sapiens
tctcccaagtaggatcctggggctaggcactggatggaggttgctcccagtagggtcagcatctggaccccaggctgagagtcaggctctgattccagatstagcctccatcatgaagaagctcttgaccaagtatgacaacctctttgagacgtcctttccctactccatgggctggcatggtgaggcttttcaagtacc

SEQ ID NO: 276519 - DNA, 201 bp, Homo sapiens
  misc_feature (1)...(201): n = A,T,C or G
gtcacagaggagctgggtgcccagtacccttgggtgcaggtttgtgaggtcgccccttcccctggatgggcagggagggggtgatgaagctttggttctgnggagtaacatttctgtttccacagggtgtggtcaggagggagttgacttggtgtcttttggctaacagagctccgtatccctatctgatagatctttgaa

SEQ ID NO: 276520 - DNA, 201 bp, Homo sapiens; identical to SEQ ID NO: 276400

SEQ ID NO: 276521 - DNA, 201 bp, Homo sapiens
aatgtgactgcgtgtgtcagtgtgcatggagctggaggtgcatgtggctgtgcaagtgtgggattatgtgtgtatctgtcaatgcacatttttggtgggaytgggttgtgtgtttgtgtgagagggactgtgaccacatgagggaatgtgttttgggaaggtctctgtggggtttgagaccatgtctgccagcgtgagagt

SEQ ID NO: 276522 - DNA, 201 bp, Homo sapiens
cgacatgtcctgggctccgaacgtctcctggggagcggcatgattgaatcagggattccctagccccaggtccccttctccgtcattctcaggacgaggckgcccagttctcaggtaatctgaggctgatgcccccgagaagcctcagttgccaccacgggacagggtgggcttggagatttgggaggcactggaagttaa

SEQ ID NO: 276523 - DNA, 201 bp, Homo sapiens; identical to SEQ ID NO: 276408

SEQ ID NO: 276524 - DNA, 201 bp, Homo sapiens
gaactccgagcactggtgagagacaaagccaaagaaaagggcagaggccccatcccaaagcatctatcagctgaaccagttccaaaagacaggcaggtggsacatgccctgcccacacaggcacggcaattgctgtcccagacttcagacttgtttgcctacagccctgtcttagcttaagtcctgccccttggcctccac

SEQ ID NO: 276525 - DNA, 201 bp, Homo sapiens; identical to SEQ ID NO: 276413

SEQ ID NO: 276526 - DNA, 201 bp, Homo sapiens; identical to SEQ ID NO: 276425

SEQ ID NO: 276527 - DNA, 201 bp, Homo sapiens; identical to SEQ ID NO: 276427

SEQ ID NO: 276528 - DNA, 201 bp, Homo sapiens
aaaggagaatcttgccagatagtaatacctgcagggcagaaaaaccaaagtgagggatgtcgaagaggacaactgagtggttactttttttttttttttttccgagagtctcactctgttgcccaggctggagtgcagtggtgcaatctgggctcactgcaacctctgcctcctgggttcaagcaattctcctgcctcagc

SEQ ID NO: 276529 - DNA, 201 bp, Homo sapiens
ctctcctgaccctttactaataaaccctttggcggagactgagataacccacattgttggagagacagctgcctttctatgccccaggctgaggctgagayggggtgggaaggatggatccccaaagcctgggttcttggcctcagtgattccagtggacaggcgtccaggtgagtaggacatccagaagatttggacttg

SEQ ID NO: 276530 - DNA, 201 bp, Homo sapiens; identical to SEQ ID NO: 276439

SEQ ID NO: 276531 - DNA, 201 bp, Homo sapiens; identical to SEQ ID NO: 276441

SEQ ID NO: 276532 - DNA, 201 bp, Homo sapiens; identical to SEQ ID NO: 276442

SEQ ID NO: 276533 - DNA, 201 bp, Homo sapiens; identical to SEQ ID NO: 276443

SEQ ID NO: 276534 - DNA, 201 bp, Homo sapiens; identical to SEQ ID NO: 276444

SEQ ID NO: 276535 - DNA, 201 bp, Homo sapiens; identical to SEQ ID NO: 55632

SEQ ID NO: 276536 - DNA, 201 bp, Homo sapiens; identical to SEQ ID NO: 276445

SEQ ID NO: 276537 - DNA, 201 bp, Homo sapiens
atttctaacagccttaccccacttggtgcatcaatttttctcctaggaagcctcagttttggagaggaagagccaggctttagcctcccatctcaggggtsggggatttttgactctacctctccccacagatgagcagcagctgctcagggctgagcagggtcctggtggccgtggctacagccctggtgtctgcctcct

SEQ ID NO: 276538 - DNA, 201 bp, Homo sapiens; identical to SEQ ID NO: 276447

SEQ ID NO: 276539 - DNA, 201 bp, Homo sapiens
tggaccaggtgggggtaaataccagaattcccaacagctggactggaggggttaatgggagtggctgagctggtgccagtgcttggtgccaggggtgggcsccaagggcagtggagggggagttgctggcacagtctgttgcctccggcttttgttctgggccctaagcccaggactgagatggagggtgtgagggggtgt

SEQ ID NO: 276540 - DNA, 201 bp, Homo sapiens; identical to SEQ ID NO: 276450

SEQ ID NO: 276541 - DNA, 201 bp, Homo sapiens; identical to SEQ ID NO: 276449

SEQ ID NO: 276542 - DNA, 201 bp, Homo sapiens; identical to SEQ ID NO: 276452

SEQ ID NO: 276543 - DNA, 201 bp, Homo sapiens; identical to SEQ ID NO: 276451

SEQ ID NO: 276544 - DNA, 201 bp, Homo sapiens; identical to SEQ ID NO: 276453

SEQ ID NO: 276545 - DNA, 201 bp, Homo sapiens
attttccttagcatcccaaaattcagcttgggcagagtcccatggagctttctctcttggtgctcaaaccactgtgacaggctggggttctgggggtggaygcagatgctgcgttgagccaggtgaagcctgggtagagaaaggtccaaagctatgaccatagcttggggatgagattagggtcatccccaatgaccctaa

SEQ ID NO: 276546 - DNA, 201 bp, Homo sapiens; identical to SEQ ID NO: 276456

SEQ ID NO: 276547 - DNA, 201 bp, Homo sapiens; identical to SEQ ID NO: 276457

SEQ ID NO: 276548 - DNA, 201 bp, Homo sapiens
agctgtggcatggtctgacttatgcttgacatcttgtctttgtccattgtcacctcatctcacttccagggacccagtgtcctggtttcgggatggggagmcaaagctgctccagggacctgactctgggctagggcatgaactggtcctggcccaggcagacagcactgatgagggcacctacatctgccagaccctgga

SEQ ID NO: 276549 - DNA, 201 bp, Homo sapiens
tttgggttctattgcaaatgcagttagaagccaatggagagctgtggcatggtctgacttatgcttgacatcttgtctttgtccattgtcacctcatctcmcttccagggacccagtgtcctggtttcgggatggggagccaaagctgctccagggacctgactctgggctagggcatgaactggtcctggcccaggcaga

SEQ ID NO: 276550 - DNA, 201 bp, Homo sapiens
gctggggccctggcactggggctctggtaagtgactgccattggtccctcagcctctgatcctcacacatgctctgatgcccatagaccacattcatctcyacccttcatgactgcccgctgaacctgtctgattctggaactacctccccatacctccatcccccatgccccacttgattttaactgattcctctcctga

SEQ ID NO: 276551 - DNA, 201 bp, Homo sapiens; identical to SEQ ID NO: 276458

SEQ ID NO: 276552 - DNA, 201 bp, Homo sapiens; identical to SEQ ID NO: 276460

SEQ ID NO: 276553 - DNA, 201 bp, Homo sapiens; identical to SEQ ID NO: 276464

SEQ ID NO: 276554 - DNA, 201 bp, Homo sapiens; identical to SEQ ID NO: 276468

SEQ ID NO: 276555 - DNA, 201 bp, Homo sapiens
gagccaccacacgcggcctcagcccatttcataatacagatgaccggtctgagtctaatggatgatcaagtttaagatttcccctcccctctcaggagtgwctggctaaggctcctttaaacacacactttgggaagtggtggggaagtgatggagacccatagcctaccctgactttgtgtcttgatgcccttagtgcgc

SEQ ID NO: 276556 - DNA, 201 bp, Homo sapiens; identical to SEQ ID NO: 276469

SEQ ID NO: 276557 - DNA, 201 bp, Homo sapiens; identical to SEQ ID NO: 276471

SEQ ID NO: 276558 - DNA, 201 bp, Homo sapiens
gatgtgagcttgcagagcatctgtgagtacccaccccagacctcccccagacccccatcacagagaccccaaatggactcagatctctccactcccagagytcccagtttcctcccaacctagactccatttcacacagagaaggccctgtggagcctgagaaggcaaagggatcagagcccaggaggcatggttatttca

SEQ ID NO: 276559 - DNA, 201 bp, Homo sapiens; identical to SEQ ID NO: 276475

SEQ ID NO: 276560 - DNA, 201 bp, Homo sapiens; identical to SEQ ID NO: 276476

SEQ ID NO: 276561 - DNA, 201 bp, Homo sapiens
atgcctgtccctgcaggctcccagttcctctcagcctctcatccccttccctcccctcccctccccgccaccctgtctccatttccatctgctggctcctsgcccacccccagcctctggcagcagccagggcatctggatctgcttaactacacagccccagcctgcaccctagccccatccagcttcacaaactggaga

SEQ ID NO: 276562 - DNA, 201 bp, Homo sapiens; identical to SEQ ID NO: 276479

SEQ ID NO: 276563 - DNA, 201 bp, Homo sapiens; identical to SEQ ID NO: 276482

SEQ ID NO: 276564 - DNA, 201 bp, Homo sapiens
cagtgataagccctggaccaggtgggggtaaataccagaattcccaacagctggactggaggggttaatgggagtggctgagctggtgccagtgcttggtsccaggggtgggcgccaagggcagtggagggggagttgctggcacagtctgttgcctccggcttttgttctgggccctaagcccaggactgagatggaggg

SEQ ID NO: 276565 - DNA, 201 bp, Homo sapiens; identical to SEQ ID NO: 276483

SEQ ID NO: 276566 - DNA, 201 bp, Homo sapiens
cccccagcctctggcagcagccagggcatctggatctgcttaactacacagccccagcctgcaccctagccccatccagcttcacaaactggagaccaacsaagtgtcaagagccaggcccagctgagtggcccaagtagccagaccaaggagccaggttcaggcgagaagcctggcagccagggcaggggtgggcctcag

SEQ ID NO: 276567 - DNA, 201 bp, Homo sapiens
tctaatggatgatcaagtttaagatttcccctcccctctcaggagtgtctggctaaggctcctttaaacacacactttgggaagtggtggggaagtgatgragacccatagcctaccctgactttgtgtcttgatgcccttagtgcgccctgacccaccccagggcctgcgggtagagtcagtaccaggttacccccgacg

SEQ ID NO: 276568 - DNA, 201 bp, Homo sapiens; identical to SEQ ID NO: 276484

SEQ ID NO: 276569 - DNA, 201 bp, Homo sapiens
ctgacctctgtctccagattataacatgatgctttgatccagtgagccccccaccacccaggttttaacagtctgcttcttatctgtcattctcacaaagkggggaggggggtaaaggaagagccttacctcagaagtgccctccacaggggtccagtatgggcagccaggcaggtccgtgaagctgtgttgtcctggagt

SEQ ID NO: 276570 - DNA, 201 bp, Homo sapiens
ctgatctctgagtatctcttggtgctgtggcccccatgcctgtccctgcaggctcccagttcctctcagcctctcatccccttccctcccctcccctcccygccaccctgtctccatttccatctgctggctcctcgcccacccccagcctctggcagcagccagggcatctggatctgcttaactacacagccccagcct

SEQ ID NO: 276571 - DNA, 201 bp, Homo sapiens; identical to SEQ ID NO: 276485

SEQ ID NO: 276572 - DNA, 201 bp, Homo sapiens; identical to SEQ ID NO: 276487

SEQ ID NO: 276573 - DNA, 201 bp, Homo sapiens
cctggagtgactgccgggtaagtgccccacctgcctgttggtctgacactcatgaccctttcttgactctgcctagtcctcatgtcccgcccctcccatcyttgcccgctctgtccgtaatcctcacctctctatctgtcctaaccgtctaactatccttattcaacagaaaattcaactggtatgttttgagcatctgcc

SEQ ID NO: 276574 - DNA, 201 bp, Homo sapiens; identical to SEQ ID NO: 276489

SEQ ID NO: 276575 - DNA, 201 bp, Homo sapiens; identical to SEQ ID NO: 276488

SEQ ID NO: 276576 - DNA, 201 bp, Homo sapiens; identical to SEQ ID NO: 276491

SEQ ID NO: 276577 - DNA, 201 bp, Homo sapiens
gggatttttgactctacctctccccacagatgagcagcagctgctcagggctgagcagggtcctggtggccgtggctacagccctggtgtctgcctcctcyccctgcccccaggcctggggccccccaggtgagaagaaccctgctctacaacctcccaactctgacttgtgacttgccaccctcactgtggccccttccc

SEQ ID NO: 276578 - DNA, 201 bp, Homo sapiens; identical to SEQ ID NO: 276494

SEQ ID NO: 276579 - DNA, 201 bp, Homo sapiens; identical to SEQ ID NO: 276496

SEQ ID NO: 276580 - DNA, 201 bp, Homo sapiens
agagaaaaggggacaccgagcttggtcaggcttgctctcagtgacatgtggccctccccctcagatcacagggactctgtggagcaggtagctgtgctggygtctttgggaatcctttctttcctgggactggtggctggggccctggcactggggctctggtaagtgactgccattggtccctcagcctctgatcctcac

SEQ ID NO: 276581 - DNA, 201 bp, Homo sapiens; identical to SEQ ID NO: 276499

SEQ ID NO: 276582 - DNA, 201 bp, Homo sapiens; identical to SEQ ID NO: 276501

SEQ ID NO: 276583 - DNA, 201 bp, Homo sapiens; identical to SEQ ID NO: 276503

SEQ ID NO: 276584 - DNA, 201 bp, Homo sapiens; identical to SEQ ID NO: 276505

SEQ ID NO: 276585 - DNA, 201 bp, Homo sapiens; identical to SEQ ID NO: 276512

SEQ ID NO: 276586 - DNA, 201 bp, Homo sapiens; identical to SEQ ID NO: 276513

SEQ ID NO: 276587 - DNA, 201 bp, Homo sapiens; identical to SEQ ID NO: 276514

SEQ ID NO: 276588 - DNA, 201 bp, Homo sapiens; identical to SEQ ID NO: 276515

SEQ ID NO: 276589 - DNA, 201 bp, Homo sapiens; identical to SEQ ID NO: 276516

SEQ ID NO: 276590 - DNA, 201 bp, Homo sapiens
ggtgaggcctggtgtagacgccaaagtcttgtcaggagtgggcggggcagggtgatgtatgatctgaaaggccgggagtgactaacgactgtcagtgtgtrtgtgcctgtgaggctgtgtctgtgtgacagtatcattgtgtgcgattctgagtgtcacttggtgcagctgtcagctaatgtgactgcgtgtgtcagtgtg

SEQ ID NO: 276591 - DNA, 201 bp, Homo sapiens; identical to SEQ ID NO: 276517

SEQ ID NO: 276592 - DNA, 201 bp, Homo sapiens; identical to SEQ ID NO: 276518

SEQ ID NO: 276593 - DNA, 201 bp, Homo sapiens; identical to SEQ ID NO: 276401

SEQ ID NO: 276594 - DNA, 201 bp, Homo sapiens; identical to SEQ ID NO: 276402

SEQ ID NO: 276595 - DNA, 201 bp, Homo sapiens
tccccaccaggaagaagacagtcctaggagctgatagccagaggtaggacgtgagggagcatgtgggggctccagctgggtcccacagtaggcattttcaragccaaagaccacatcctcccttctaggaggagtccatccacagggccctggccatgcccacaggatcccctaggggctgcccgctgtgttgtccacggg

SEQ ID NO: 276596 - DNA, 201 bp, Homo sapiens; identical to SEQ ID NO: 276403

SEQ ID NO: 276597 - DNA, 201 bp, Homo sapiens
cctgggctgctggccagaaccctggctttgtgagtggctgcagcttggctctgctccagcccacaggggctaaaggggcgggtagggagtgtgtagggagygtgtacgtggctttgtgtccttggctcctccagactctcacatgtgcgggcaccatatacttctgctgcccttgtgccccaatcattgcacaaacagaaa

SEQ ID NO: 276598 - DNA, 201 bp, Homo sapiens
accaggaagaagacagtcctaggagctgatagccagaggtaggacgtgagggagcatgtgggggctccagctgggtcccacagtaggcattttcaaagccraagaccacatcctcccttctaggaggagtccatccacagggccctggccatgcccacaggatcccctaggggctgcccgctgtgttgtccacggggctga

SEQ ID NO: 276599 - DNA, 201 bp, Homo sapiens; identical to SEQ ID NO: 276404

SEQ ID NO: 276600 - DNA, 201 bp, Homo sapiens; identical to SEQ ID NO: 276406

SEQ ID NO: 276601 - DNA, 201 bp, Homo sapiens; identical to SEQ ID NO: 276407

SEQ ID NO: 276602 - DNA, 201 bp, Homo sapiens
cagaaattattatccaatgctgctttattatttggctattgggggcttcagcccattttccttagcatcccaaaattcagcttgggcagagtcccatggarctttctctcttggtgctcaaaccactgtgacaggctggggttctgggggtggatgcagatgctgcgttgagccaggtgaagcctgggtagagaaaggtcc

SEQ ID NO: 276603 - DNA, 201 bp, Homo sapiens; identical to SEQ ID NO: 276409

SEQ ID NO: 276604 - DNA, 201 bp, Homo sapiens; identical to SEQ ID NO: 276410

SEQ ID NO: 276605 - DNA, 201 bp, Homo sapiens
actggactctttggcctctccttatatcccccaacctggggcctcccttcccctggaagcacagccagctgtaccctaaggaaacatttggtgaggagtgraaagagggggagtttgtatctgatttttcatttgattgtgtccacgtgtgttcaaaggcatgcccttttgttaactgtgcctcttgagtctgtgtgtgaa

SEQ ID NO: 276606 - DNA, 201 bp, Homo sapiens; identical to SEQ ID NO: 276411

SEQ ID NO: 276607 - DNA, 201 bp, Homo sapiens; identical to SEQ ID NO: 276412

SEQ ID NO: 276608 - DNA, 201 bp, Homo sapiens; identical to SEQ ID NO: 276414

SEQ ID NO: 276609 - DNA, 201 bp, Homo sapiens; identical to SEQ ID NO: 276415

SEQ ID NO: 276610 - DNA, 201 bp, Homo sapiens; identical to SEQ ID NO: 276416

SEQ ID NO: 276611 - DNA, 201 bp, Homo sapiens; identical to SEQ ID NO: 276417

SEQ ID NO: 276612 - DNA, 201 bp, Homo sapiens; identical to SEQ ID NO: 276418

SEQ ID NO: 276613 - DNA, 201 bp, Homo sapiens; identical to SEQ ID NO: 276419

SEQ ID NO: 276614 - DNA, 201 bp, Homo sapiens; identical to SEQ ID NO: 276420

SEQ ID NO: 276615 - DNA, 201 bp, Homo sapiens; identical to SEQ ID NO: 276421

SEQ ID NO: 276616 - DNA, 201 bp, Homo sapiens; identical to SEQ ID NO: 276422

SEQ ID NO: 276617 - DNA, 201 bp, Homo sapiens
tgcctttcctgcctctctgtctctctctgtgcccctatgcctgccttccctgctgatcttgatctctggctagttgggggcctgtaacagtgatgagatgygggtctgccccggctaagagctccctgagagagggggcttagaccatgatgaagagttgcttttaggcggtgctgtgagccctggtaggggctgtgtgcg

SEQ ID NO: 276618 - DNA, 201 bp, Homo sapiens; identical to SEQ ID NO: 276423

SEQ ID NO: 276619 - DNA, 201 bp, Homo sapiens; identical to SEQ ID NO: 276424

SEQ ID NO: 276620 - DNA, 201 bp, Homo sapiens; identical to SEQ ID NO: 276426

SEQ ID NO: 276621 - DNA, 201 bp, Homo sapiens; identical to SEQ ID NO: 276428

SEQ ID NO: 276622 - DNA, 201 bp, Homo sapiens; identical to SEQ ID NO: 276429

SEQ ID NO: 276623 - DNA, 201 bp, Homo sapiens; identical to SEQ ID NO: 276430

SEQ ID NO: 276624 - DNA, 201 bp, Homo sapiens; identical to SEQ ID NO: 276431

SEQ ID NO: 276625 - DNA, 201 bp, Homo sapiens
tccctattgctgtcttactagagatacctctgtgtgtttcttcacagctttgttcccctggtctctctgtgtgggtgcatttccagttttgcctttcctgyctctctgtctctctctgtgcccctatgcctgccttccctgctgatcttgatctctggctagttgggggcctgtaacagtgatgagatgcgggtctgcccc

SEQ ID NO: 276626 - DNA, 201 bp, Homo sapiens; identical to SEQ ID NO: 276433

SEQ ID NO: 276627 - DNA, 201 bp, Homo sapiens
gtccctattgctgtcttactagagatacctctgtgtgtttcttcacagctttgttcccctggtctctctgtgtgggtgcatttccagttttgcctttcctkcctctctgtctctctctgtgcccctatgcctgccttccctgctgatcttgatctctggctagttgggggcctgtaacagtgatgagatgcgggtctgccc

SEQ ID NO: 276628 - DNA, 201 bp, Homo sapiens; identical to SEQ ID NO: 276434

SEQ ID NO: 276629 - DNA, 201 bp, Homo sapiens; identical to SEQ ID NO: 276435

SEQ ID NO: 276630 - DNA, 201 bp, Homo sapiens
ttggagattatactcagaaattattatccaatgctgctttattatttggctattgggggcttcagcccattttccttagcatcccaaaattcagcttgggyagagtcccatggagctttctctcttggtgctcaaaccactgtgacaggctggggttctgggggtggatgcagatgctgcgttgagccaggtgaagcctgg

SEQ ID NO: 276631 - DNA, 201 bp, Homo sapiens; identical to SEQ ID NO: 276436

SEQ ID NO: 276632 - DNA, 201 bp, Homo sapiens; identical to SEQ ID NO: 276437

SEQ ID NO: 276633 - DNA, 201 bp, Homo sapiens; identical to SEQ ID NO: 276438

SEQ ID NO: 276634 - DNA, 201 bp, Homo sapiens; identical to SEQ ID NO: 276440

SEQ ID NO: 276635 - DNA, 201 bp, Homo sapiens
tgagccaactggacacactcagacagacacacagacaggtggaggccctgctctgctctactcctactcctgaagggtccgtgctcttcctcttctggtcktgttcccagagccctttccccgcctgccccttcgttctccatccacttcaccactgccttcctccttctgctcccccttgtccagaatctctctctccta

SEQ ID NO: 276636 - DNA, 201 bp, Homo sapiens; identical to SEQ ID NO: 276459

SEQ ID NO: 276637 - DNA, 201 bp, Homo sapiens
aagagttgcttttaggcggtgctgtgagccctggtaggggctgtgtgcgtgtgtgactgcgtgagtgtatgaatatgtgtaagtgtgtctgagtctgaggyggtgtggctgtgcccgtgtgactgtgagtgaccgcatgtgagagtgtatgagtctgagggtaactgtgggtcttgtgtatctggcaccaagggaccaaag

SEQ ID NO: 276638 - DNA, 201 bp, Homo sapiens
gggagagagataggagctgaagaaggaaaggaaggcaagggctggctcacaaggggctttgaaagccagtaaaaggaatttgggttctattgcaaatgcasttagaagccaatggagagctgtggcatggtctgacttatgcttgacatcttgtctttgtccattgtcacctcatctcacttccagggacccagtgtcctg

SEQ ID NO: 276639 - DNA, 201 bp, Homo sapiens
ctcaatacccccgaggaatagaaagaagaccaatgtagctggagttttcagtgggtgagggggagagagataggagctgaagaaggaaaggaaggcaaggsctggctcacaaggggctttgaaagccagtaaaaggaatttgggttctattgcaaatgcagttagaagccaatggagagctgtggcatggtctgacttatg

SEQ ID NO: 276640 - DNA, 201 bp, Homo sapiens
ccatgctccctaggagctggccatgccctatcaggctcctcctcctaggtaccttgacttccaacctaggccttggccttgagcacaggacgtgacccccrtccccaccagcgtatggacacttattgggtcttgccttcctttagggaccataccaaaggagataccagcatggggccagctacacacgcagccagaggt

SEQ ID NO: 276641 - DNA, 201 bp, Homo sapiens
gtgtcttggatcagtgctaggtcccctccttcattcttaatgtgcctgggcccagagctaggtccactcccgtatcttcagtgtgttgaagaggctccctyagagctgggctcctctactcatcttcagagtgttaagcttagaactgagtcacctccctcattctcagggtgtctgggccaagatccggtcttactgtct

SEQ ID NO: 276642 - DNA, 201 bp, Homo sapiens
tcattttaaaacatgctgggaatccaagttgggtctcctcattttaatgatgtctaggctgagggctgggcctttcattcttgagtccctgggctcagaaktgggtctctttccctcctctcagggtactgaggaaggaccccaggtggacttcccttcagggtattagtattagtactaatactcttccagggtattaga

SEQ ID NO: 276643 - DNA, 201 bp, Homo sapiens; identical to SEQ ID NO: 276465

SEQ ID NO: 276644 - DNA, 201 bp, Homo sapiens
gtcattttaaaacatgctgggaatccaagttgggtctcctcattttaatgatgtctaggctgagggctgggcctttcattcttgagtccctgggctcagargtgggtctctttccctcctctcagggtactgaggaaggaccccaggtggacttcccttcagggtattagtattagtactaatactcttccagggtattag

SEQ ID NO: 276645 - DNA, 201 bp, Homo sapiens; identical to SEQ ID NO: 276466

SEQ ID NO: 276646 - DNA, 201 bp, Homo sapiens
attcactcaagaagcacttcaaaagtccacccgcagatctcaggtggtttctttttttctttctcttcctttttttgttgagatagggtctcactttgtgsccaggctggatgaagttcagtggtgtgatcttggctcactgaagcctgcaactcctgggctcaagctatcccctcacctcagcctcccaagtagctggga

SEQ ID NO: 276647 - DNA, 201 bp, Homo sapiens
gcatgggagtgggacactaaaactctagctggaatttgggccaattcatcttccttggatgaaaataggaattgctcttttattcactcaagaagcacttsaaaagtccacccgcagatctcaggtggtttctttttttctttctcttcctttttttgttgagatagggtctcactttgtgcccaggctggatgaagttca

SEQ ID NO: 276648 - DNA, 201 bp, Homo sapiens
cttcccttcccagggccttgggtgggagggaaggagggaggaggcaggagcagggagggggcctggctaggggcggcagagctccagggcttagagggggyggggcagggaaggggaaggaggggatggctctggggtcccagaactgagtggagtaggagacgggggctgtagctggtgagaggaagtcctagaggctat

SEQ ID NO: 276649 - DNA, 201 bp, Homo sapiens; identical to SEQ ID NO: 276467

SEQ ID NO: 276650 - DNA, 201 bp, Homo sapiens; identical to SEQ ID NO: 276473

SEQ ID NO: 276651 - DNA, 201 bp, Homo sapiens; identical to SEQ ID NO: 276472

SEQ ID NO: 276652 - DNA, 201 bp, Homo sapiens; identical to SEQ ID NO: 276478

SEQ ID NO: 276653 - DNA, 201 bp, Homo sapiens; identical to SEQ ID NO: 276477

SEQ ID NO: 276654 - DNA, 201 bp, Homo sapiens; identical to SEQ ID NO: 276481

SEQ ID NO: 276655 - DNA, 201 bp, Homo sapiens; identical to SEQ ID NO: 276480

SEQ ID NO: 276656 - DNA, 201 bp, Homo sapiens
ttggtgggactgggttgtgtgtttgtgtgagagggactgtgaccacatgagggaatgtgttttgggaaggtctctgtggggtttgagaccatgtctgccakcgtgagagtgggtggctggctttgtgtgtgccaatgtgtgacttcagcagtagcagagcaaaagtgaggtttgtgactatgtgtgtgtcctgggtcctaa

SEQ ID NO: 276657 - DNA, 201 bp, Homo sapiens
aacctcccaactctgacttgtgacttgccaccctcactgtggccccttcccatgcctaacttgtgacaccacccctgctcctgtcatccaacctgggtccyctctctaccctgttctctgacctctgtctccagattataacatgatgctttgatccagtgagccccccaccacccaggttttaacagtctgcttcttatc

SEQ ID NO: 276658 - DNA, 201 bp, Homo sapiens
aagctgtgttgtcctggagtgactgccgggtaagtgccccacctgcctgttggtctgacactcatgaccctttcttgactctgcctagtcctcatgtccckcccctcccatccttgcccgctctgtccgtaatcctcacctctctatctgtcctaaccgtctaactatccttattcaacagaaaattcaactggtatgttt

SEQ ID NO: 276659 - DNA, 201 bp, Homo sapiens; identical to SEQ ID NO: 276486

SEQ ID NO: 276660 - DNA, 201 bp, Homo sapiens
gtgcagtggtgcaatctcggctaactgcaacctccacctcctgggttcaagcaattcttctgtctcagcctcccgagtagctgggactacaggtgcccgcygccatgcctggctaatttttgtatttttagtagagatggggtttcaccatattgcccaggctggtctcgaactcatgacctcacgatctgcccacctcgg

SEQ ID NO: 276661 - DNA, 201 bp, Homo sapiens; identical to SEQ ID NO: 276492

SEQ ID NO: 276662 - DNA, 201 bp, Homo sapiens; identical to SEQ ID NO: 276497

SEQ ID NO: 276663 - DNA, 201 bp, Homo sapiens; identical to SEQ ID NO: 276498

SEQ ID NO: 276664 - DNA, 201 bp, Homo sapiens
gtaggggctgtgtgcgtgtgtgactgcgtgagtgtatgaatatgtgtaagtgtgtctgagtctgaggcggtgtggctgtgcccgtgtgactgtgagtgacygcatgtgagagtgtatgagtctgagggtaactgtgggtcttgtgtatctggcaccaagggaccaaaggcatttcctggtgctggggcccaaagaatggag

SEQ ID NO: 276665 - DNA, 201 bp, Homo sapiens
tctgcttcttatctgtcattctcacaaagtggggaggggggtaaaggaagagccttacctcagaagtgccctccacaggggtccagtatgggcagccaggsaggtccgtgaagctgtgttgtcctggagtgactgccgggtaagtgccccacctgcctgttggtctgacactcatgaccctttcttgactctgcctagtcc

SEQ ID NO: 276666 - DNA, 201 bp, Homo sapiens; identical to SEQ ID NO: 276500

SEQ ID NO: 276667 - DNA, 201 bp, Homo sapiens
tgacaccacccctgctcctgtcatccaacctgggtcctctctctaccctgttctctgacctctgtctccagattataacatgatgctttgatccagtgagscccccaccacccaggttttaacagtctgcttcttatctgtcattctcacaaagtggggaggggggtaaaggaagagccttacctcagaagtgccctccac

SEQ ID NO: 276668 - DNA, 201 bp, Homo sapiens; identical to SEQ ID NO: 276507

SEQ ID NO: 276669 - DNA, 201 bp, Homo sapiens; identical to SEQ ID NO: 276508

SEQ ID NO: 276670 - DNA, 201 bp, Homo sapiens; identical to SEQ ID NO: 276511

SEQ ID NO: 276671 - DNA, 201 bp, Homo sapiens
tcatgtccaactgctataccccctgcatcccaccctccagctatagccgcttctctcctaatcccatacccagctgtcactccgttctttaccccctcccygcaatgcaaagctcctattcatctttatccagtcctttccaggaagctgggagctgcctagggtgggggtatgctgccaagttcagtgcccctggctcct

SEQ ID NO: 276672 - DNA, 201 bp, Homo sapiens
gcgcactaggtttgcctgtcccccggaaggggtggggtgttcatgtctcccagaggaggcggagtcgaaacgtcatcttacggggtgaggccaggggcggrgtcggttgattaagatgcgggcaaaggaccctcttttataggtgtcaggtcaggttttggagctacaccttggggggccgaggcttccgcagcaggcagc

SEQ ID NO: 276673 - DNA, 201 bp, Homo sapiens; identical to SEQ ID NO: 276519
  misc_feature (1)...(201): n = A,T,C or G

SEQ ID NO: 276674 - DNA, 201 bp, Homo sapiens; identical to SEQ ID NO: 264005

SEQ ID NO: 276675 - DNA, 201 bp, Homo sapiens; identical to SEQ ID NO: 264006

SEQ ID NO: 276676 - DNA, 201 bp, Homo sapiens; identical to SEQ ID NO: 264007

SEQ ID NO: 276677 - DNA, 201 bp, Homo sapiens; identical to SEQ ID NO: 264008

SEQ ID NO: 276678 - DNA, 201 bp, Homo sapiens; identical to SEQ ID NO: 264009

SEQ ID NO: 276679 - DNA, 201 bp, Homo sapiens
tgcactgttgtgacctcacattcattagaagccaggaacacctaagtgtaggaagaactcttcactggtgaactgtttttagttacacaccagatttcctaaaaaaaaggccatgattcaaaataataaacaccaaactcatcaacattatccctcaggggaaaggagggcatgccaccagattgagctccttgtaatgtt

SEQ ID NO: 276680 - DNA, 201 bp, Homo sapiens; identical to SEQ ID NO: 264010

SEQ ID NO: 276681 - DNA, 201 bp, Homo sapiens; identical to SEQ ID NO: 264011

SEQ ID NO: 276682 - DNA, 201 bp, Homo sapiens; identical to SEQ ID NO: 264012

SEQ ID NO: 276683 - DNA, 201 bp, Homo sapiens
aagttagactgtgaatgtcaggttgagatgattacactttgtcctgtattgtcatttaagggaaaataatgaaggtgtttcatttgggcagtgacatgatyagatctttctctttgggaatatctctgctgtggattagcagttcaagacactagactcaagaaaaccacataggggttcctgcaatagttcacaccagaa

SEQ ID NO: 276684 - DNA, 201 bp, Homo sapiens
acacctgtaatcccagcactttcagaggccaaggcaggaggatcactgaggctaaaagttcaagataacctgggctacgtagtgagaccctgtctgtaccaaaaaaaaaaaaaaaaaaaatagaagtattagctgggagtggtggttgcgtacctgtagtcttagccatttgaggggctgaggcaggaggattgcttgagc

SEQ ID NO: 276685 - DNA, 201 bp, Homo sapiens
agagctcaaaagctgcttcttagtcaggtgcagtggctcatgtctataatcccagcactttgggaggccgaggtgggtggatcacttgagtgcaggagttygagaccagcctggacaacgtggtgaaaccccatctctacaaaaaaatcgttaaaaattagctgggcatggtagtgtgcgcctgtagtcccagctacttgg

SEQ ID NO: 276686 - DNA, 201 bp, Homo sapiens; identical to SEQ ID NO: 264013

SEQ ID NO: 276687 - DNA, 201 bp, Homo sapiens; identical to SEQ ID NO: 264014

SEQ ID NO: 276688 - DNA, 201 bp, Homo sapiens; identical to SEQ ID NO: 264016

SEQ ID NO: 276689 - DNA, 201 bp, Homo sapiens; identical to SEQ ID NO: 264017

SEQ ID NO: 276690 - DNA, 201 bp, Homo sapiens; identical to SEQ ID NO: 264019

SEQ ID NO: 276691 - DNA, 201 bp, Homo sapiens; identical to SEQ ID NO: 264020

SEQ ID NO: 276692 - DNA, 201 bp, Homo sapiens; identical to SEQ ID NO: 264021

SEQ ID NO: 276693 - DNA, 201 bp, Homo sapiens; identical to SEQ ID NO: 264022

SEQ ID NO: 276694 - DNA, 201 bp, Homo sapiens; identical to SEQ ID NO: 264023

SEQ ID NO: 276695 - DNA, 201 bp, Homo sapiens; identical to SEQ ID NO: 264024

SEQ ID NO: 276696 - DNA, 201 bp, Homo sapiens
aattggaaaatacaggaaaacacaagaaggaaaaaaaatgaccttctattcaaatataatcactttagtatttagtatatatgtccttttagtacttcgtrtatatacatttgcatatttttacaagaacattattggtatgtacatcaccactttgtatcttgcttctactttattcttctacagcatgaatttataagt

SEQ ID NO: 276697 - DNA, 201 bp, Homo sapiens
tatgcctcagtctcctgatctgtacactagaggtaataatatctccttcagaggggtattttaagaagtaaagatgatacatagtgtacagaacaatgctrtaagtattagttgttgatgttgttattgctattaaggagtgtcttgtgcaaaataaatatttcgtttgagggaataaaacaattaaaagaatgggcaact

SEQ ID NO: 276698 - DNA, 201 bp, Homo sapiens; identical to SEQ ID NO: 264029

SEQ ID NO: 276699 - DNA, 201 bp, Homo sapiens; identical to SEQ ID NO: 264030

SEQ ID NO: 276700 - DNA, 201 bp, Homo sapiens; identical to SEQ ID NO: 264031

SEQ ID NO: 276701 - DNA, 201 bp, Homo sapiens
ttttaatgtagtctattaattgtggaatggcatcatgtcttaaaaatatatatgtatctcagttaaagaatattttatggctaaaaaatgctgacaatcayctgagcctttagcaagtcataatctttttcttggggagggtctcgtctcaatgtcgatggctgccgacctatcagggttgtggttgttgaaggttgaggt

SEQ ID NO: 276702 - DNA, 201 bp, Homo sapiens; identical to SEQ ID NO: 264035

SEQ ID NO: 276703 - DNA, 201 bp, Homo sapiens
aatcatcttcaagcagctttcttccactcccacccaccatagagatagatctctctttcctttaccttcctgtagcactttgttatctatacctctcatgkgcacttaccccagctccaattctggatgtcttgttctcctagtgagattgtgagctcttcaaggtaaggatcatgtctttgtgcttccttcttttgtgac

SEQ ID NO: 276704 - DNA, 201 bp, Homo sapiens
tgatgtttacagttgggctggaaactttccccgttttggtagattctggagttatattcacagggtctgccctctgactgagctgcaaagatcaccaaaasagaaaggtagaaggggataaagttaagattccaaaccaccgcctgaaactcatacatattttctgctgttaaattcaatttatggtaaagttccctacaa

SEQ ID NO: 276705 - DNA, 201 bp, Homo sapiens; identical to SEQ ID NO: 264036

SEQ ID NO: 276706 - DNA, 201 bp, Homo sapiens; identical to SEQ ID NO: 264037

SEQ ID NO: 276707 - DNA, 201 bp, Homo sapiens; identical to SEQ ID NO: 264039

SEQ ID NO: 276708 - DNA, 201 bp, Homo sapiens; identical to SEQ ID NO: 264042

SEQ ID NO: 276709 - DNA, 201 bp, Homo sapiens; identical to SEQ ID NO: 264043

SEQ ID NO: 276710 - DNA, 201 bp, Homo sapiens; identical to SEQ ID NO: 264044

SEQ ID NO: 276711 - DNA, 201 bp, Homo sapiens; identical to SEQ ID NO: 264049

SEQ ID NO: 276712 - DNA, 201 bp, Homo sapiens
tcagcttgtctccaattcaagtgatcataatttcaaaattgatttctgaaataataaaatcttatgctactggtatggttgttttttgttgttgtttgagrtagagtattactgtgttgcccaggctggagtgcagtggctattcacaggtgtgaacatagtgcactgcagcctcaaactcctggcctcaaaggatctccc

SEQ ID NO: 276713 - DNA, 201 bp, Homo sapiens
gctgaggcagaattgcttgaacctgggaggcgaaggttgcagtgagccaaaatcatgccattgcactccagcctgggcaaaaagagtgaaactctgtctcaaaaaaaaaaagaaagtaatcagcacatatggacaaatttaggaatgaaccactgaacaaacctaaggcatctccaaatcaaagggtagtaatgaatatgc

SEQ ID NO: 276714 - DNA, 201 bp, Homo sapiens
taactcactttccccagattgtttcctcaggcctcacgtgatcattttataagaaaagaatccgaatttatcaacaatgtctagtactgttcttttagtgaaaaaaaaaaaggtagtataataaattctcacttaacaatgttgataggttcatggaaactgtgacttttaagcgaagtgacatataacaaaaccattttt

SEQ ID NO: 276715 - DNA, 201 bp, Homo sapiens
cattcaaagttggaatcaggttcttccaaacttctgttaatgtagatactttgacctcctcccatgaatcacaaatgttcttaatgacatctagaatgatkaatcctttccaaaaggtttcccacttattttgcccagattcatcagaggaatcacagttttggcagcaatagccctatgaaatgtatttcttcaataata

SEQ ID NO: 276716 - DNA, 201 bp, Homo sapiens
gcacacaggcattagacctgtttgtactcttccagaaggaatgtttgccttctctaaaaagatgagtactccagttactccaaagtttgaacaaaagaagycaacccccccaaagaataaatattctattctttcatgcacatagttaaacaagaggcaaagctactctctactgttacctgtcagaataatagttatttt

SEQ ID NO: 276717 - DNA, 201 bp, Homo sapiens
ttgaaatataatacctaactgggtaataatttggatgccatgatttaatccatttgacatgctaaaattcctcattaaaatattccaagttaccaaaatcwctaatgttatcattttctgagaacaggaagcttgcatttgactcatattcccatacctcctcctcacacacacacacacacacacacacactcatagaaa

SEQ ID NO: 276718 - DNA, 201 bp, Homo sapiens
ggtatgttgtacttgtttgtttttggaggttcccactttagttccagcccactgcctgggttggaagtccgagaggaaacgaacgcggggagttctccggraggctgacttatacttcctcacggatgcaggagacggggtaagcccttcccgcctccctccgcgggcaggaggctatgctaaccaagcagccagccagaa

SEQ ID NO: 276719 - DNA, 201 bp, Homo sapiens
gtttgctaggatttccacttgttaaaaagaatcccagagggccagccatggtggctcatccctataatcccagcacattgggaggccgaggtggatagatsacttgagctcaggaattctagaccagcctgggcaacatggtgaaaacctgtctctacaaaaaatacaaaaattagctggatgtggtggcacatgcttatg

SEQ ID NO: 276720 - DNA, 201 bp, Homo sapiens; identical to SEQ ID NO: 264053

SEQ ID NO: 276721 - DNA, 201 bp, Homo sapiens; identical to SEQ ID NO: 264054

SEQ ID NO: 276722 - DNA, 201 bp, Homo sapiens; identical to SEQ ID NO: 264055

SEQ ID NO: 276723 - DNA, 201 bp, Homo sapiens; identical to SEQ ID NO: 264056

SEQ ID NO: 276724 - DNA, 201 bp, Homo sapiens; identical to SEQ ID NO: 264058

SEQ ID NO: 276725 - DNA, 201 bp, Homo sapiens; identical to SEQ ID NO: 264061

SEQ ID NO: 276726 - DNA, 201 bp, Homo sapiens; identical to SEQ ID NO: 264063

SEQ ID NO: 276727 - DNA, 201 bp, Homo sapiens; identical to SEQ ID NO: 264064

SEQ ID NO: 276728 - DNA, 201 bp, Homo sapiens; identical to SEQ ID NO: 264065

SEQ ID NO: 276729 - DNA, 201 bp, Homo sapiens
tgttcctgctgccatgctttccagagatccagccccacctgcttggactttcacccaccacacatgcatctccgttgtgcttcatgtagttttcaggttcagagaccccttccagtgttatacaccttctcccagctaatccttcacccgcaataaacaacagcagtatcgtttatcctgtatttactgggtgccagcact

SEQ ID NO: 276730 - DNA, 201 bp, Homo sapiens
ttcctgctgccatgctttccagagatccagccccacctgcttggactttcacccaccacacatgcatctccgttgtgcttcatgtagttttcaggttcagagaccccttccagtgttatacaccttctcccagctaatccttcacccgcaataaacaacagcagtatcgtttatcctgtatttactgggtgccagcacttt

SEQ ID NO: 276731 - DNA, 201 bp, Homo sapiens
cctcctccttgaagcaccccacactcctagagctatcatgtccccctgtgatgcttaatactgagtgtcaacttgcttggattgaaggatacaaagtattkatcctgggtgtttctatgagggtgttgtcaaaggagattaacatttaagtcagtgggctggggaagacagattcacccttaatctgggtgggcacagtct

SEQ ID NO: 276732 - DNA, 201 bp, Homo sapiens; identical to SEQ ID NO: 264068

SEQ ID NO: 276733 - DNA, 201 bp, Homo sapiens; identical to SEQ ID NO: 264069

SEQ ID NO: 276734 - DNA, 201 bp, Homo sapiens; identical to SEQ ID NO: 264070

SEQ ID NO: 276735 - DNA, 201 bp, Homo sapiens
tctctttagtgaagctgttctctgtggtaagagagaactgtgtgatgctttaaggtcattatttatagataaaagaaatgatgtacagtcactggtgccayctgctcactatgttccatgacatctattacaggcagagaattttttgtgggcctttccaaaaggacaaatcaacgaggtgctgaaatcttggctgatact

SEQ ID NO: 276736 - DNA, 201 bp, Homo sapiens; identical to SEQ ID NO: 264073

SEQ ID NO: 276737 - DNA, 201 bp, Homo sapiens; identical to SEQ ID NO: 264074

SEQ ID NO: 276738 - DNA, 201 bp, Homo sapiens; identical to SEQ ID NO: 264076

SEQ ID NO: 276739 - DNA, 201 bp, Homo sapiens
tgcactttgggaggccgatgtgggcagatcacttgaggtcaggagttcgagaccagtctggacaacatagtgaaactccatctctacacacacacacacamacacacaaaattagccgggcattgtggcacacgccagtagtcccagctactcaggaggctgaggcacgagaattgcttgaacccaggaggcagaggttgc

SEQ ID NO: 276740 - DNA, 201 bp, Homo sapiens
cactttgggaggccgatgtgggcagatcacttgaggtcaggagttcgagaccagtctggacaacatagtgaaactccatctctacacacacacacacacamacacaaaattagccgggcattgtggcacacgccagtagtcccagctactcaggaggctgaggcacgagaattgcttgaacccaggaggcagaggttgcag

SEQ ID NO: 276741 - DNA, 201 bp, Homo sapiens
tctctggaatgggggtcttatgatctacaaacaaggtatgtcagataatttctttatggcctgttttcacagaaatagggcagaaggaatgttggagtaayatttttaggttttatgtctggctttggagaaaaaggcattttggtttctatgacccgccctggggaagagggattctagtttctgaggctagcctcagtg

SEQ ID NO: 276742 - DNA, 201 bp, Homo sapiens
ggacctgagagggaggaacaaaagtcgttttgtttggtgatgcgagttgaccgggcagccactgaagccctcacccgggaaggcagtgagctgtttgcttktttacagcgaaggtgagaggcaagttatctgttgaaagagtagaacggggaagaggagtgtgtctctgagtcaggaatatttgtggacttcaaagaggcg

SEQ ID NO: 276743 - DNA, 201 bp, Homo sapiens; identical to SEQ ID NO: 264085

SEQ ID NO: 276744 - DNA, 201 bp, Homo sapiens
tcccaaagggctgggattacaggcacgagccactgtgcctggccaaaagtcaatgtttaaatgtcaaataatgtaaacaaataatctaaaagatgatgtargagaaataacagggtgtgaggattgaattttttaaattaaaacttttgtgtagataattaatgcctacagtgccaaaatcaaaaggtacaaaaggatatg

SEQ ID NO: 276745 - DNA, 201 bp, Homo sapiens
ttagagtggaaacttctcttttctttttaaagatgtatcctatgatatggtctttagtggaaacccatgttttctataaaaatgaaactgatttttctatrtaatattcttgcccatttctctccaaaatgatttatctgtcagcattctcacagaagaaaaatttgctttccaaggcaatttcctttcccttttttccct

SEQ ID NO: 276746 - DNA, 201 bp, Homo sapiens
gggaggtagaggttgcagtgagccgagattgtgccattgcactccagcctgggttacagagtgagaccatgtctcgaaaaaaccaaaaccaaaaacaaacraacaaacaaacaaaacccaaccacctcagaggtaagagttcaggtaatagggacagtgaggctttctccataaagccactagaagtttggaacctctact

SEQ ID NO: 276747 - DNA, 201 bp, Homo sapiens
ttgcaaaaagctctgaaaaactgaaaaaatagctaatataaaagtttggggaactaccatttgacccagcaatcccaatccccttctacccaaaggaaaakaaatagttctaccaaacagacactgtcactcatatatttatcatagcactactcacaagagcaaagtaatgtaatcaacctaggtgtccatcagtgatgt

SEQ ID NO: 276748 - DNA, 201 bp, Homo sapiens
ttacactgtgctaggagaaagtaataagcagcataagagcggtgtggggaccaagggccctttgaagtttcactgaaaaatcaactctcaaaaggaagatkaataagagaaaaggcatataaatttatttagcatgtacacatgggagccttcagaatgaagacccaaagacacaggagaaattgatctattttatgctta

SEQ ID NO: 276749 - DNA, 201 bp, Homo sapiens
agagatagttcttggggacacagaggaatgcagcccacggcgccatcaatacatgtgcactgatgtttacagttgggctggaaactttccccgttttggtwgattctggagttatattcacagggtctgccctctgactgagctgcaaagatcaccaaaagagaaaggtagaaggggataaagttaagattccaaaccacc

SEQ ID NO: 276750 - DNA, 201 bp, Homo sapiens
ctgcctagattctccttcgcctctctgagcagcattccttccttctggggatgggacatgaccttctctggaatgggggtcttatgatctacaaacaaggkatgtcagataatttctttatggcctgttttcacagaaatagggcagaaggaatgttggagtaatatttttaggttttatgtctggctttggagaaaaagg

SEQ ID NO: 276751 - DNA, 201 bp, Homo sapiens; identical to SEQ ID NO: 264094

SEQ ID NO: 276752 - DNA, 201 bp, Homo sapiens
aacccagggactagcaaaaacgagaagccaatactacccctagatggaataatggaaggcaacagcattatcagaacccagctgagagctggaaccatagrataggggccgccagcagaagctatgattgtagaaggatggagctgttgctacaaccatgaaaaagcaggaagggagccagagaaataaataccccaatct

SEQ ID NO: 276753 - DNA, 201 bp, Homo sapiens
caaaactttagcaatagtgaaaagatcaggggctcagggagagagaaggagggttaaacaggtaaagcacaggggattttgtgggcagcaaaactattctrtatgatactataattacagatatgtaatttgtcaaaacccattaacttcacagcacaaagaataaacctcaatgtatgcaaacttaaaaaaaaaatcatt

SEQ ID NO: 276754 - DNA, 201 bp, Homo sapiens
gtctgagggttttataaggggaaacccctttcacttgattctcattttctctcttgccttgtggccatgtaagacgtgcatttttgccttccaccatgatwgtaaggcctccccagtcacatggaactgtgagtccataaaatctctttttctttataaattacccagtctcgggtatgtctttatcagcagtgtgaaaac

SEQ ID NO: 276755 - DNA, 201 bp, Homo sapiens; identical to SEQ ID NO: 264095

SEQ ID NO: 276756 - DNA, 201 bp, Homo sapiens
ttctcgtggtagtgaataagtctcatgagatctgatggtttaataaaggagagttcccggctaggcgcggttgctcacgcctgtaatcccagcactttggraggccgaggcgggtggatcacaaggtcaggagatcgagaccttcctggctaacacagtgaaaccctgtctctactaaaaatacaaaaattagctgggtgt

SEQ ID NO: 276757 - DNA, 201 bp, Homo sapiens; identical to SEQ ID NO: 264096

SEQ ID NO: 276758 - DNA, 201 bp, Homo sapiens
gcaccaggaaccaattcaaatggatgggaaagcagggatatgggtactgtgttaaaaggagaagtgacagcattcctgaacactgaaaaggacatttccarcatccgaagagatgctacattttccagcttgctagagagaaaggctgaaagataaaaacttttgttgacttcctctgcaaacgagcatttaactgaaaag

SEQ ID NO: 276759 - DNA, 201 bp, Homo sapiens
ctttgggaggccgaggcgggtggatcacaaggtcaggagatcgagaccttcctggctaacacagtgaaaccctgtctctactaaaaatacaaaaattagcygggtgtggtggcgggtgcctgtagtcccagctactcaggaggctgaggcaggagaatggtgtgaacgcgggaggcagagcttgcagtgagccgagattgc

SEQ ID NO: 276760 - DNA, 201 bp, Homo sapiens; identical to SEQ ID NO: 264097

SEQ ID NO: 276761 - DNA, 201 bp, Homo sapiens
atcatgtgtaaaatctgggtccccaaattcattctggttatactgatgagcaagataatcaatagtaattttaatttatagtgagaatttattttcccagrcatgtcagagaatacatttcaccaatgtagccctgacagcaaaggctggtcctcagggacttgggaatgtggccccaagtggcccactgaaagcgtgaag

SEQ ID NO: 276762 - DNA, 201 bp, Homo sapiens
gtcttaaaggtttgttattttacttttggtcccacttcccaatgtcagtgtcagagctgtccttgagactcctcaaatttgggcagggcgtggtagctcaygcctgtaatcccagcactttgggaggtggaggcgggtggatcacctgaggtcaggagttcgagaccagcctagccaacatggtgaaaccctgtctctgct

SEQ ID NO: 276763 - DNA, 201 bp, Homo sapiens; identical to SEQ ID NO: 264098

SEQ ID NO: 276764 - DNA, 201 bp, Homo sapiens
ttaatgtgttaatagttactttgttcaaaactgagatgatgttgggatatctttacctccttggcactccattcacacctaatgtgtgttcctgccttctrttttctacttgtcacttttcttcatctcttttattttattgcggttaaacacacataacatttgcaattttaaccattattaagtgtacaattcaagtga

SEQ ID NO: 276765 - DNA, 201 bp, Homo sapiens; identical to SEQ ID NO: 264100

SEQ ID NO: 276766 - DNA, 201 bp, Homo sapiens; identical to SEQ ID NO: 264099

SEQ ID NO: 276767 - DNA, 201 bp, Homo sapiens; identical to SEQ ID NO: 264102

SEQ ID NO: 276768 - DNA, 201 bp, Homo sapiens; identical to SEQ ID NO: 264103

SEQ ID NO: 276769 - DNA, 201 bp, Homo sapiens; identical to SEQ ID NO: 264104

SEQ ID NO: 276770 - DNA, 201 bp, Homo sapiens; identical to SEQ ID NO: 264105

SEQ ID NO: 276771 - DNA, 201 bp, Homo sapiens
ttatatgtgttggagttgttttgttacagcagctatagatatgtaaatagatctacctactgtcctttgaaaatgcctttcccttagaattctcattctcyccttcagttactcacatccaaaaattatttaaggcctaaaccaagtccaatcatcttcaagcagctttcttccactcccacccaccatagagatagatct

SEQ ID NO: 276772 - DNA, 201 bp, Homo sapiens
cgcgcgccaggccctcccccgccgccggccgccgtgttgcctggggagtcgcgccattggccctcgggctagtagttcacaacttcccgtcggggggcgagtgtgtgtgtgtgtgtgtgtgtcagagagtcagagagaagttcattgttcacacctcccggctgccggcagccttctggaggatccgattcaatgtggttg

SEQ ID NO: 276773 - DNA, 201 bp, Homo sapiens
agctaggactacaggtgcacaccaccatgcctagctaagttttttaaaactttctgtagagatgggggtctcactatgttgcccaggctggtctcgaactsttggactcaagccatcctcccacctcgacctcccaaactgttgggattacaggcatgagcctccacactgggcttgtttttcaactcctttgagatgtca

SEQ ID NO: 276774 - DNA, 201 bp, Homo sapiens
gcgcgccaggccctcccccgccgccggccgccgtgttgcctggggagtcgcgccattggccctcgggctagtagttcacaacttcccgtcggggggcgagtgtgtgtgtgtgtgtgtgtgtcagagagtcagagagaagttcattgttcacacctcccggctgccggcagccttctggaggatccgattcaatgtggttgt

SEQ ID NO: 276775 - DNA, 201 bp, Homo sapiens
cgcgccaggccctcccccgccgccggccgccgtgttgcctggggagtcgcgccattggccctcgggctagtagttcacaacttcccgtcggggggcgagtktgtgtgtgtgtgtgtgtgtcagagagtcagagagaagttcattgttcacacctcccggctgccggcagccttctggaggatccgattcaatgtggttgta

SEQ ID NO: 276776 - DNA, 201 bp, Homo sapiens; identical to SEQ ID NO: 264110

SEQ ID NO: 276777 - DNA, 201 bp, Homo sapiens
gacatctcaggctcatttcataagcaggggcttttcatctgaatggacaagcaggcataatctcaagcaacaaatcccattttaaaatgtgtgtgtggtgyctgtagtcccagctactcaggaggctgaggcaggagaatcacttgaacccaggaggtggaggttgcagtgagatgagatagcgccactgcactccagcct

SEQ ID NO: 276778 - DNA, 201 bp, Homo sapiens; identical to SEQ ID NO: 264112

SEQ ID NO: 276779 - DNA, 201 bp, Homo sapiens
aaaatgtgtgtgtggtgcctgtagtcccagctactcaggaggctgaggcaggagaatcacttgaacccaggaggtggaggttgcagtgagatgagatagcrccactgcactccagcctagcaacagagcaagactctgtctaaaaaaaaaaaaaaaaaaaaaaaagtgtgtgtgtaatgtcatcctagttcactttgtcat

SEQ ID NO: 276780 - DNA, 201 bp, Homo sapiens; identical to SEQ ID NO: 264113

SEQ ID NO: 276781 - DNA, 201 bp, Homo sapiens
tgaagatacatacatcagcattttcctctgtttgaatatgtgtaagtaaacctttgcctttattaaaagacgttttgggctgggtgtggtggctcacgccwgtaatcccagcactttgggaggccaaggtgggcggatcatgaggtcaggagttcaaaaccagcctggccaacatggtgaaacccccatctctactaaaaa

SEQ ID NO: 276782 - DNA, 201 bp, Homo sapiens; identical to SEQ ID NO: 264114

SEQ ID NO: 276783 - DNA, 201 bp, Homo sapiens
gggcaaaaactggaagcatttcctttgaaaactggcacaaggcagggatgctctctctcactactcctgttcaacatagtgttggaagttctggccaggayaatcaggcaggagaaagaaataaagggtattcaattaggaaaaaaggaagtcaaattgtccctgtttgcagatgacatgattctatatttagaaaacccc

SEQ ID NO: 276784 - DNA, 201 bp, Homo sapiens; identical to SEQ ID NO: 264115

SEQ ID NO: 276785 - DNA, 201 bp, Homo sapiens
aacatattcagagagaaatcagtattttttttgcctcagagtattatgtttttcttaaaagattttcttaaaagttataaataaattaatttataaacctrtttttatcttgaaagaattaaagaaacttggtattttttcattgtagctgactatttaataaagtgcataatacttttttcaagtaaaatacctctcctt

SEQ ID NO: 276786 - DNA, 201 bp, Homo sapiens
tcaacgaataaacaaatggaagaacattccatgctcatggataggaagaatcaatattgtgaaaatgactatactgcccaaggtaatttatagattcaatrccatccccatcaagctaccaatgactttcttcagagaattggaaaaaactactttaaagttcatatggaaccaacaaagagcccccattgccaagacaat

SEQ ID NO: 276787 - DNA, 201 bp, Homo sapiens; identical to SEQ ID NO: 264116

SEQ ID NO: 276788 - DNA, 201 bp, Homo sapiens
tgactatactgcccaaggtaatttatagattcaatgccatccccatcaagctaccaatgactttcttcagagaattggaaaaaactactttaaagttcatrtggaaccaacaaagagcccccattgccaagacaatcctaagccaaaagaacaaagctggaggcatcatgctacctgacttcaaactatactacaaggcta

SEQ ID NO: 276789 - DNA, 201 bp, Homo sapiens; identical to SEQ ID NO: 264117

SEQ ID NO: 276790 - DNA, 201 bp, Homo sapiens
aagccaaaagaacaaagctggaggcatcatgctacctgacttcaaactatactacaaggctacagtaaccaaaacagcatggtactggtaccaaaacagakatatagaccaatggaacagaacagagccctcagaaataataccacacatctacaaccatctgatctttgacaaacctaacaaacataagaaatggggaaa

SEQ ID NO: 276791 - DNA, 201 bp, Homo sapiens; identical to SEQ ID NO: 264118

SEQ ID NO: 276792 - DNA, 201 bp, Homo sapiens; identical to SEQ ID NO: 264120

SEQ ID NO: 276793 - DNA, 201 bp, Homo sapiens; identical to SEQ ID NO: 264122

SEQ ID NO: 276794 - DNA, 201 bp, Homo sapiens; identical to SEQ ID NO: 264125

SEQ ID NO: 276795 - DNA, 201 bp, Homo sapiens; identical to SEQ ID NO: 264126

SEQ ID NO: 276796 - DNA, 201 bp, Homo sapiens; identical to SEQ ID NO: 264127

SEQ ID NO: 276797 - DNA, 201 bp, Homo sapiens; identical to SEQ ID NO: 264130

SEQ ID NO: 276798 - DNA, 201 bp, Homo sapiens; identical to SEQ ID NO: 264132

SEQ ID NO: 276799 - DNA, 201 bp, Homo sapiens; identical to SEQ ID NO: 264135

SEQ ID NO: 276800 - DNA, 201 bp, Homo sapiens
aggaaacaacaggtgctggagaggatgtggagaaataggaacacttttacactgttggtgggactataaactagttcaatcattgtggaagatagtgtggygattcctcaaggatctagaactagaaataccatttgacccagccgtccctttactgggtatatacccaaaggattataaatcatgctgctataaagacat

SEQ ID NO: 276801 - DNA, 201 bp, Homo sapiens
tttacactgttggtgggactataaactagttcaatcattgtggaagatagtgtggtgattcctcaaggatctagaactagaaataccatttgacccagccrtccctttactgggtatatacccaaaggattataaatcatgctgctataaagacatttgcacacttatgtttattgcagcactattcacaatagcaaaaac

SEQ ID NO: 276802 - DNA, 201 bp, Homo sapiens
gattataaatcatgctgctataaagacatttgcacacttatgtttattgcagcactattcacaatagcaaaaacttggaaccaacccagatgtccatcaaygatagactggattaagaaaatgtggcacatatacaccatggaatactatgcagccataaaaaaggatgagttcatgtcctttgtagggacatggatgaag

SEQ ID NO: 276803 - DNA, 201 bp, Homo sapiens; identical to SEQ ID NO: 264141

SEQ ID NO: 276804 - DNA, 201 bp, Homo sapiens
tctcactcataggtgggaattgaacagtgagaacacttggacataggatggagaacatcacacactggggcctgtcgtggggtggcgggaggagggagggwtagcattaggagatatacctaatgtaaatgatgagtgaatgggtgcagcacaccaacatggcacatgtatacatatgtaacaaacctgcatgttgtgcac

SEQ ID NO: 276805 - DNA, 201 bp, Homo sapiens; identical to SEQ ID NO: 264142

SEQ ID NO: 276806 - DNA, 201 bp, Homo sapiens
tctattaaaaatcatcacaagtttcttccagaggttaaaaataaagttaaaataaagggaaaaaaaaattttttaaattatcacaagaatattagccaccwtgcctggcctaatattctgttaaggagaccttttttcacctttatttttagtattgttcttgaatttatggccaatgcaataaaatataaaacagatata

SEQ ID NO: 276807 - DNA, 201 bp, Homo sapiens; identical to SEQ ID NO: 264144

SEQ ID NO: 276808 - DNA, 201 bp, Homo sapiens
ctgcactttgggaggccgatgtgggcagatcacttgaggtcaggagttcgagaccagtctggacaacatagtgaaactccatctctacacacacacacacacacacacaaaattagccgggcattgtggcacacgccagtagtcccagctactcaggaggctgaggcacgagaattgcttgaacccaggaggcagaggttg

SEQ ID NO: 276809 - DNA, 201 bp, Homo sapiens
gcagaggacaaggatgccctctgtcaccactcctattcaacatagtattggtagttctggccagggaaatcaggcaagagaaagaaataaagggtattcarataggaagagaggaagtcaaattgtctctgtttgcagatgacatgattgtatatttagaaaaccccatcatctcagcccaatatctccctaagctgataa

SEQ ID NO: 276810 - DNA, 201 bp, Homo sapiens; identical to SEQ ID NO: 264145

SEQ ID NO: 276811 - DNA, 201 bp, Homo sapiens
agagccctcagaaataacaccacacatctacaaccatctgatctttgacaaacctgacaaaaacaagcaatgaggaaaggattccctatttaataaatggygttgggaaaactggctagccatatgcagaaaactgaaactgggtcccttccttacaccttatacaaaaattaagatagattaaagacttaaatgtgacaa

SEQ ID NO: 276812 - DNA, 201 bp, Homo sapiens; identical to SEQ ID NO: 264146

SEQ ID NO: 276813 - DNA, 201 bp, Homo sapiens
attgacaaatgagatatatttaactaaagagctctgcacagcaaaagaaactaccatcaaagtgaacaggcaacctacaggatgggagaaaatttttgcartctatccatctgacaaagggctaatatccagaatctacaaggaacttaaacagatttacaggaaaaaaacaaacccatcaaaaagtgggtaaaagatatg

SEQ ID NO: 276814 - DNA, 201 bp, Homo sapiens; identical to SEQ ID NO: 264148

SEQ ID NO: 276815 - DNA, 201 bp, Homo sapiens; identical to SEQ ID NO: 264147

SEQ ID NO: 276816 - DNA, 201 bp, Homo sapiens
agagaaagtttatttttaaaatatgttacccagacttttttttttttttttttttaagatggagtttcactcttgtcgtccaggctggaatgcaatggtgygatcttggctaactgcaacctctgtctcccggtttcaagtgattctcctgtctcagcctcccgaatagctggggttacaggcacatgccaccatgcctgg

SEQ ID NO: 276817 - DNA, 201 bp, Homo sapiens
aatgaattcatgtcctttgcagggacatggatgaagctggaaaccctcattctcagcaaactaacacaggaacagaaaaccatacactgcatgttctcatwcataagtgggagttgaacaatgagaacacatggacacagggaggggaacatcacacacaggggcctgttggggggtgggaggctaggggagggatagcat

SEQ ID NO: 276818 - DNA, 201 bp, Homo sapiens; identical to SEQ ID NO: 264149

SEQ ID NO: 276819 - DNA, 201 bp, Homo sapiens
ctccccgctgttcccactcacccagcacagtagactgatccagccctgccaggaggtggctgtccttcaccagcgccaactcctggctgcacgctgtgctycacagagccttccagcccagccagcttggctgtcggggtctcagatttcaactcaaggtgccagcagagtcccttcactaaaatcatattttttcacctg

SEQ ID NO: 276820 - DNA, 201 bp, Homo sapiens; identical to SEQ ID NO: 264150

SEQ ID NO: 276821 - DNA, 201 bp, Homo sapiens; identical to SEQ ID NO: 55693

SEQ ID NO: 276822 - DNA, 201 bp, Homo sapiens
tcccaccagctctatagggatgactgtgggcatgtgtgtggttgagactgcctgtgtgtcttgggattaaatgaatgaaaagcctagatgtacaaatcaawttgattctccacttctgaggatggtaaaacataatccttcttttcttccttttccttgattcccactgtaggtttatgagaaactgaaggaccatatgct

SEQ ID NO: 276823 - DNA, 201 bp, Homo sapiens; identical to SEQ ID NO: 264151

SEQ ID NO: 276824 - DNA, 201 bp, Homo sapiens
  misc_feature (1)...(201): n = A,T,C or G
ggttaaccagttcccaccagctctatagggatgactgtgggcatgtgtgtggttgagactgcctgtgtgtcttgggattaaatgaatgaaaagcctagatntacaaatcaaattgattctccacttctgaggatggtaaaacataatccttcttttcttccttttccttgattcccactgtaggtttatgagaaactgaag

SEQ ID NO: 276825 - DNA, 201 bp, Homo sapiens; identical to SEQ ID NO: 264153

SEQ ID NO: 276826 - DNA, 201 bp, Homo sapiens
tttctattagtgtcagaagatgctaataaaattcatacctgtaatttaaaagcagtttaacctgaaatacttaagttatatcttgtcaaatttttccagcrgtgttggtaagaaaataaacctaaagtatagttgagagggttttaaactgtgaagagaaggcctagtgtggtggcttatgcctgtttaataccagcactt

SEQ ID NO: 276827 - DNA, 201 bp, Homo sapiens
tctgttgatgtagttaatttcattaattcattttctgatatttgaccagtcttgcaaccccagcatgaaatcaaatttgatcatgatgtattctctttttaacacagtgttgaatttagttcgataacattttgttatgactattatttttgtggcctataatttatatttcttgttatccttgtctggttttgataaaag

SEQ ID NO: 276828 - DNA, 201 bp, Homo sapiens
tcaagtgattctgtttttaaaaatatgctttgtttgatcatcacagaacaatctatgaactgttaattgaagttttgacatatgctttctattagtgtcaraagatgctaataaaattcatacctgtaatttaaaagcagtttaacctgaaatacttaagttatatcttgtcaaatttttccagcggtgttggtaagaaaa

SEQ ID NO: 276829 - DNA, 201 bp, Homo sapiens
tgttgatgtagttaatttcattaattcattttctgatatttgaccagtcttgcaaccccagcatgaaatcaaatttgatcatgatgtattctctttttaacacagtgttgaatttagttcgataacattttgttatgactattatttttgtggcctataatttatatttcttgttatccttgtctggttttgataaaagag

SEQ ID NO: 276830 - DNA, 201 bp, Homo sapiens; identical to SEQ ID NO: 264157

SEQ ID NO: 276831 - DNA, 201 bp, Homo sapiens
tcactttgagaaatacaggtctgaatcattcatccctctttagccacattgatcatctgacctaccagatgattattcactgcccccctgattcagccgtktgtctctcaaaaataacaatagtattaataatatccctgtttactgagggcttccccggtgccaggcagggtgccaggcatcccaggtgtattatcttat

SEQ ID NO: 276832 - DNA, 201 bp, Homo sapiens; identical to SEQ ID NO: 264160

SEQ ID NO: 276833 - DNA, 201 bp, Homo sapiens; identical to SEQ ID NO: 264161
  misc_feature (1)...(201): n = A,T,C or G

SEQ ID NO: 276834 - DNA, 201 bp, Homo sapiens; identical to SEQ ID NO: 264162

SEQ ID NO: 276835 - DNA, 201 bp, Homo sapiens
gaagcctaagttttagtgaaggaaactgtatttacagaaagtcagtaaataatgttaattgtctaataatgttgtatctttagattttgagtattttttawgtttaatactttaaagaaaaatcagccgttagaggcctatcaaattttacatgactccaacttactttttagggaaaaaatgcaacttctctgtttgttt

SEQ ID NO: 276836 - DNA, 201 bp, Homo sapiens; identical to SEQ ID NO: 264164

SEQ ID NO: 276837 - DNA, 201 bp, Homo sapiens; identical to SEQ ID NO: 264166

SEQ ID NO: 276838 - DNA, 201 bp, Homo sapiens
gcgttctaggccaaatggcagagctatggtttgaacttaaaagagcaaaatcgatttcaaaaccctttcaaaatggcactcttttgatgagagtagtccartttcttctcaagagactgtcaccatatttattcacccatttcattttattcctataataaaagcttccaagctttggcctccctgatacctaagtgagca

SEQ ID NO: 276839 - DNA, 201 bp, Homo sapiens; identical to SEQ ID NO: 264167

SEQ ID NO: 276840 - DNA, 201 bp, Homo sapiens; identical to SEQ ID NO: 264169

SEQ ID NO: 276841 - DNA, 201 bp, Homo sapiens; identical to SEQ ID NO: 264168

SEQ ID NO: 276842 - DNA, 201 bp, Homo sapiens; identical to SEQ ID NO: 264170

SEQ ID NO: 276843 - DNA, 201 bp, Homo sapiens
aaaagaataaataatgaactaatttaaaaataaataaattttatatttaaccagggcaagcttaaggtaaaagatcaactttcacctgtaactttgatggraatcctccatctgaggacaccattaagtgatttctgacgctaaactggggctaatggggctgcctggatcccctaagaattttgctttagaagtactacc

SEQ ID NO: 276844 - DNA, 201 bp, Homo sapiens
gggaaaaatgaacatatcaatgtattaagctcaataaagtccgttttcctaaaaacagtccttcattgctgaagtgtgaaagcatgtaaactataatctamtggatttggtatttttattattcttttttactaatatatacattctaacactttttgaccactgcttagagaaaatagaaggcatgcttatcaaatttca

SEQ ID NO: 276845 - DNA, 201 bp, Homo sapiens
cataagccataattatcattcataattaccattcataattacatccccatttcctagcacaatacctggcatatggcaagggttcaataaatatttattgmatctatgattacacttgtgggtgagatttggtctgtcaacctaggaaggccacaaattctcctggaaagcataccttcaagcagctatatgactctggta

SEQ ID NO: 276846 - DNA, 201 bp, Homo sapiens
tgggtacactaaggtgatacagccagaatgtaggagggccaggaatcaaattcaggcttgtctgaatctaaaacccatgccttatccactgcttttatgtmttcctctaccatacatactgtagatgcttagtaaatgtttcttcaatgaacgaaaccccagatgaaagttggagaaactgagattaggaggctatgtgtc

SEQ ID NO: 276847 - DNA, 201 bp, Homo sapiens
gatcagtcctccacagcttcaagcaagacagaaaatggtgaaacacgggtcttgggtacactaaggtgatacagccagaatgtaggagggccaggaatcamattcaggcttgtctgaatctaaaacccatgccttatccactgcttttatgtattcctctaccatacatactgtagatgcttagtaaatgtttcttcaatg

SEQ ID NO: 276848 - DNA, 201 bp, Homo sapiens
atctacctgaaattcacaggacaggacatttgatgaatgttgactattattattcacttaactatggatcagggaagatttactcctttaataagaagtcrgctatacactgatgtagttagtgacatctctctactatgtgatactgcctctgggtttgggtctcctgctggtgcctgcctttgcattgcacatgatctg

SEQ ID NO: 276849 - DNA, 201 bp, Homo sapiens
ggaacagaaaaccatacactgcatgttctcattcataagtgggagttgaacaatgagaacacatggacacagggaggggaacatcacacacaggggcctgytggggggtgggaggctaggggagggatagcattaggagaaatacctaatgtagatgacgggttgatgggtgcagcaaaccaccatggcatgtgtatacct

SEQ ID NO: 276850 - DNA, 201 bp, Homo sapiens
gacacagggaggggaacatcacacacaggggcctgttggggggtgggaggctaggggagggatagcattaggagaaatacctaatgtagatgacgggttgwtgggtgcagcaaaccaccatggcatgtgtatacctatgtaacaaacctgcacatactatacatgtatcccagaacttaaagtatataataaaaaaataaa

SEQ ID NO: 276851 - DNA, 201 bp, Homo sapiens
tcatgataatgaataagtcttatgagttctgatggttttataaaaggcagttcccctacacacacactcttgcctgccaccatgtaagacatgactttgcyttttctttgccttctgccatgattgtgaggcctccccagccatgtggaactgtgagtccattaaacctctttcctttgtaaattacccagtctcaagtat

SEQ ID NO: 276852 - DNA, 201 bp, Homo sapiens
taggtagccctggcacatagtgggtcctggataaatgtcagttcttagcttctttaaaactgttggaggctaatatccgtgtgctcttaaatacaaccaamcctctttaagttggcaacataagtgttaggttttacttctaatttcaaaagaaacgtattcgagtgagtggctgagagcattcattacatgagggcagct

SEQ ID NO: 276853 - DNA, 201 bp, Homo sapiens
catcatccttaagataatgaggtttagaagttttagcccaagtgggtagtcaaggaaaatgtaatttatttttctttttccttttttttttttttttttgktttttttaagaatcagagtctcactctgttgcccaggctggaatgcagtggcacattatggctcactgcagcctcaaactcctggggttaagcaatgctc

SEQ ID NO: 276854 - DNA, 201 bp, Homo sapiens; identical to SEQ ID NO: 264181

SEQ ID NO: 276855 - DNA, 201 bp, Homo sapiens; identical to SEQ ID NO: 264182

SEQ ID NO: 276856 - DNA, 201 bp, Homo sapiens
aagattcctgaagagtagagcctagggatgtttaggcaacccttacagaaacaagccttcaagtacattttaagtacagtgtgtctcgcacgttttgaatkattcttttcagatttttttttctttggatataactattctgttttactttacatacatatatatacatacacatatatgtatatgtatatatgtgtacat

SEQ ID NO: 276857 - DNA, 201 bp, Homo sapiens
gacccagggagtgtgctgccctgcacagcctcgggacactgctccctgcatcccagtcgaaccccatctagccatagctcagaggagcccaggtcgaaccscagctcagaccacagctccagagggttgatagtttgcaaccttgataaaatgtgatgaaaatggcactttacccctgtgattctctccaaaaaatgataa

SEQ ID NO: 276858 - DNA, 201 bp, Homo sapiens; identical to SEQ ID NO: 264183

SEQ ID NO: 276859 - DNA, 201 bp, Homo sapiens
tattcatatatatattcatatatatataggtatatgtatatatgtggtaaatctaggagtttacatatccaagggaaaatttccctcaaacttgtgattgytactcaccagatcaaacattagcagtccctaagggacagtcccagtccacagccaacacacacagatcccttcttatcacttggaacagacactcctcca

SEQ ID NO: 276860 - DNA, 201 bp, Homo sapiens
caggtccatataggaactttttgtactagtttcacaatttttctttaaatctaaaactgtcccaaagagaaagtttatttttaaaatatgttacccagacttttttttttttttttttttaagatggagtttcactcttgtcgtccaggctggaatgcaatggtgtgatcttggctaactgcaacctctgtctcccggttt

SEQ ID NO: 276861 - DNA, 201 bp, Homo sapiens; identical to SEQ ID NO: 264185

SEQ ID NO: 276862 - DNA, 201 bp, Homo sapiens
catttttaccagtaggtacagttcagttaattcaatattatagaaagtaaactctctaattagatgtacattttagaatttctgcaagagtaggccaggcmcagtggctcaagtcgtaatcccagcacttcgggaagcccaggtaggcagatcacccgagatcaggaagtcaagaccagcttggccaacagggcaaaaccc

SEQ ID NO: 276863 - DNA, 201 bp, Homo sapiens
tgaggcaggagaatcacgtgaacttgggaggcggaggttgcagtgagccgagatagcaccattgcactccagcctgggtgacagtgcgagactccatctcaaaaaaaaaaaaaaaaaaaaaaaaaaagcaacacttgaaatatttgattttcgttaaagtcacaggggccttccaaattttgattttaaaattttccttct

SEQ ID NO: 276864 - DNA, 201 bp, Homo sapiens; identical to SEQ ID NO: 264187

SEQ ID NO: 276865 - DNA, 201 bp, Homo sapiens
gagatagagtcttcacagtggtaatcaaattaaaatgaggtaattagagtaggccctaattcagtataactgtggctttataagaagaggaaatttggacmtatagacatgcataccaagataatacaatgtgaatatgaagacagctatctataagccaaggaacgaggcctagaacagatgctttcctcatagccttag

SEQ ID NO: 276866 - DNA, 201 bp, Homo sapiens
atagcaccattgcactccagcctgggtgacagtgcgagactccatctcaaaaaaaaaaaaaaaaaaaaaaaaaaagcaacacttgaaatatttgattttcrttaaagtcacaggggccttccaaattttgattttaaaattttccttctattttttaaaaaacaaaaccattgtggttttcatttttctttccctgattac

SEQ ID NO: 276867 - DNA, 201 bp, Homo sapiens; identical to SEQ ID NO: 264189

SEQ ID NO: 276868 - DNA, 201 bp, Homo sapiens
ataaatagataaagtagaaatcacagttctggtgtctacctacaggataacaactggagcttcccccaaaggcctgtcaatcctggtggtcaatgtggagwttatcagagggtagacagcctgtttataatgttttccctggaaatatttggggcagtctcttttccaatgtcctgcttgtttgcaccaataccaacagtt

SEQ ID NO: 276869 - DNA, 201 bp, Homo sapiens
ataaataaagttgaaaacttatatatgcattacaaataatgctgaaacagcatgaaatgccattatagaggtgaatgcaacctgctttgggagcacagaaraagtaaatccctgctgtggaagtcaggtagccctttaccaaagaggcaatgttgaagccggtgtagagcaacaagcaggagatccaggtggaaaaaggta

SEQ ID NO: 276870 - DNA, 201 bp, Homo sapiens; identical to SEQ ID NO: 264191

SEQ ID NO: 276871 - DNA, 201 bp, Homo sapiens
ttcaatattatagaaagtaaactctctaattagatgtacattttagaatttctgcaagagtaggccaggcacagtggctcaagtcgtaatcccagcacttygggaagcccaggtaggcagatcacccgagatcaggaagtcaagaccagcttggccaacagggcaaaaccctctctctactaaaaatacaaaaaacaacaa

SEQ ID NO: 276872 - DNA, 201 bp, Homo sapiens; identical to SEQ ID NO: 264194

SEQ ID NO: 276873 - DNA, 201 bp, Homo sapiens; identical to SEQ ID NO: 264193

SEQ ID NO: 276874 - DNA, 201 bp, Homo sapiens
ataccataaatcttactatccagtgcccccatgactgagtgggcatgtctgcctagtaatatgaagcacatttccatacaaacactgaaaagtaaaagtaratgggaccataaaggtagattagaaccagattgtggaaaagatcatgttataccttcctagcatgatatttcagcagattccttaaaactgtatggatat

SEQ ID NO: 276875 - DNA, 201 bp, Homo sapiens
ataaagcactagtggtaaggatcacttcagagtgggctcactgtagaatcttaatgtgatattgtcctttcagtgcctgtaagtgatggaacatctggggtttttttttgtttttgtttttctctttgtttttgtttttgagacagagtctcgctctgtcacccaggctggagtgcagtggcgtgatctcggctctctgca

SEQ ID NO: 276876 - DNA, 201 bp, Homo sapiens; identical to SEQ ID NO: 264196

SEQ ID NO: 276877 - DNA, 201 bp, Homo sapiens; identical to SEQ ID NO: 264197

SEQ ID NO: 276878 - DNA, 201 bp, Homo sapiens
gtgagcccctctatgggcctatcccttcaagaacaatttaaattcaaaagtgcaagagagatgtccagttaagtcctttacctataccagacggtagcagrtcataacaggattacatacaagaaaagaattaatggtactgccagagaatgaataataagtatcaagtgaatgtgaaaaagtaggtgttatgtagtttgt

SEQ ID NO: 276879 - DNA, 201 bp, Homo sapiens
tgaggcaggagaattgcttgaacccaggaggcagaagttgcagtgagccaagatagtgccactgcactccagcctgggtgacagagtgagactacatctcaaaaaaaaaaaaaaattagttttattgtgacataatttccttacaataaaattacagttttaaatggataattcaatgagttttgacaagtgtatgcagtt

SEQ ID NO: 276880 - DNA, 201 bp, Homo sapiens; identical to SEQ ID NO: 264199

SEQ ID NO: 276881 - DNA, 201 bp, Homo sapiens; identical to SEQ ID NO: 264200

SEQ ID NO: 276882 - DNA, 201 bp, Homo sapiens
ggtgagcccctctatgggcctatcccttcaagaacaatttaaattcaaaagtgcaagagagatgtccagttaagtcctttacctataccagacggtagcargtcataacaggattacatacaagaaaagaattaatggtactgccagagaatgaataataagtatcaagtgaatgtgaaaaagtaggtgttatgtagtttg

SEQ ID NO: 276883 - DNA, 201 bp, Homo sapiens; identical to SEQ ID NO: 264201

SEQ ID NO: 276884 - DNA, 201 bp, Homo sapiens; identical to SEQ ID NO: 264202

SEQ ID NO: 276885 - DNA, 201 bp, Homo sapiens
tagtgcccttctgtatggctttgaaaaacagacaaaccttggccttgttgattttagccatgttttttcacattaaaaataatgagttgtatttctgtttytggacatagaccataccttgtttctctgagggaattcaattgtttacccatgtgattgaccacacagttcatcacagtgccctcctgaggttctctgtag

SEQ ID NO: 276886 - DNA, 201 bp, Homo sapiens; identical to SEQ ID NO: 264203

SEQ ID NO: 276887 - DNA, 201 bp, Homo sapiens
ccccctgttgtcttactttgtcatccagagtcatttgagttaggaccacagagtatagtgcccttctgtatggctttgaaaaacagacaaaccttggcctygttgattttagccatgttttttcacattaaaaataatgagttgtatttctgtttctggacatagaccataccttgtttctctgagggaattcaattgttt

SEQ ID NO: 276888 - DNA, 201 bp, Homo sapiens; identical to SEQ ID NO: 264205

SEQ ID NO: 276889 - DNA, 201 bp, Homo sapiens
aagtaggtactggcctttatgttagtaagtataggaatgtccccaccagaagctttaaatgataaaaaataaggctcagaaaaggaagaagcattaaagartgaagagtgattacaatttcaaatacatgccagtaactgaagaacaattcaaataggaaccaagtaggggagaggattgttcactcaaggaggtgaggtt

SEQ ID NO: 276890 - DNA, 201 bp, Homo sapiens; identical to SEQ ID NO: 264207

SEQ ID NO: 276891 - DNA, 201 bp, Homo sapiens
agacatttattttaagagtaactctcagtagaatttatcaatgaattacttcatatattctcagcattaaattatttccccactaaagatattataattcytttcctcccagtaatgaaaaattgaaactgtcctcaaataattctaaagtaggtactggcctttatgttagtaagtataggaatgtccccaccagaagct

SEQ ID NO: 276892 - DNA, 201 bp, Homo sapiens
cagtggccccaggaagtcaggtttcatgctctgggaaacacatgcttcagctccctttgtcccaggatcaccctccccagtgtgcagtacaatgtgtgggmtagagttctggagaccctgccactctactgtgtccaacctgcattgcaccctgcagccctctgttagtggggctccagggatgtgaagatacaggggttg

SEQ ID NO: 276893 - DNA, 201 bp, Homo sapiens
gtttcagcagtaggttttctggtcctgttaggccccctgatggcatgcatatgcacctgggtcaaccaatggggaggggcaatccctaggcccccaggcartgtgcttgggcactgatggaggacaggggtggtgccaggccaggcaggcctattctcaggccccccatggggcccatgggcccaggctgtggtgaacaag

SEQ ID NO: 276894 - DNA, 201 bp, Homo sapiens; identical to SEQ ID NO: 264209

SEQ ID NO: 276895 - DNA, 201 bp, Homo sapiens; identical to SEQ ID NO: 264210

SEQ ID NO: 276896 - DNA, 201 bp, Homo sapiens
taaataaaaaatactgattttattcaaccaaagacattatactttttctgcttaattaactaatcatatgaactcatgccttgttaatgataatccattaygagatgcagttgaatttgctaaatctatttcaaaagctctgcttactcaaccatttatagcacatttgacaagtaattttttctatagaagactttaaat

SEQ ID NO: 276897 - DNA, 201 bp, Homo sapiens
tggagggggtgagctgggggtcaggctgaacaacactgaggcactagagatgtgcgtgagaaagtcagctggaaagtggttcccagcttcagctgccccartggactccatgtggatcagagacacaagcttttccccaattcctaatccacaaatcatggtccaaacaaaatgactgttttataaagccactaggtttca

SEQ ID NO: 276898 - DNA, 201 bp, Homo sapiens
gcacatagatttttctcttccttcctccaacatgctaaattccctcccaccttgtgtctttgctcatatgctcggctcagtttggtaatttctctccactyctgattaatacctactcatctttcaattctcagctcagaagtcacctctccagggaagtcttcctttattcccccagacatatgggatttacgttattat

SEQ ID NO: 276899 - DNA, 201 bp, Homo sapiens
gggctctcagccaggagctgaccctcagctttaaaacaaggttaacaatatcactgacattccagctgtagcacatagatttttctcttccttcctccaayatgctaaattccctcccaccttgtgtctttgctcatatgctcggctcagtttggtaatttctctccactcctgattaatacctactcatctttcaattct

SEQ ID NO: 276900 - DNA, 201 bp, Homo sapiens; identical to SEQ ID NO: 264212

SEQ ID NO: 276901 - DNA, 201 bp, Homo sapiens
aggaggtggaggttgcagtgagtcgagattgcaccactgtacttccagcctgggcaacagattgagactccgtctcaaaaaaaaaaaaaaaaaaaaaaaaraaaaaagaaaagaaaagaaaggaattcctgcaagagtagactatgtgtccttcaggcattcctccctgattgtttttgataaataatgccagtgagctca

SEQ ID NO: 276902 - DNA, 201 bp, Homo sapiens
gccagcacaaaatgctgggtaaatgctcattgtgaatgtcacctaggaagaaagcagtggaaaggaggggatggacctgaatttaactgagttggaatttmaaataattgagaaattactggacttgactgtgtttacccggattatctacttataagaaaatgaagttacatttttacataacagaatttataagttttt

SEQ ID NO: 276903 - DNA, 201 bp, Homo sapiens
ctgacaaagaaattgtgttatttctgtggcatacaacattttaacataataaccaaaattatgattgatttctagaaatttaatgcaattttgaaaaacctttttttttttttttaagacagggtctcacactatcacccagcctggagtgcagtgatgtgatcatggctcactgcagcctctgcctcctgggctcaggcg

SEQ ID NO: 276904 - DNA, 201 bp, Homo sapiens
gcaggctgaaaacattgtaatgacaatctttgtaagtgcaaaaaaacaaaaaacaaaaaaacacttgccaacctagaattctgtatccaaagaatatatctttttttttttttttggatggagttttgctcttgtcacacaggctggagtgcagtgatctcggctcactgcaacctccacctcccaggttcaagcagttct

SEQ ID NO: 276905 - DNA, 201 bp, Homo sapiens; identical to SEQ ID NO: 264218

SEQ ID NO: 276906 - DNA, 201 bp, Homo sapiens
gaatatctagaagtcatttcaaactcagcatggccacacagttcttcaattttttctctccagccttgctcctctccctggaatttttcatattagaaatmagtacacctatccactcaattgctcaagacaaaaatctaaaagtcaccctgggcccttcctttccttcacccccacatccaatccaccaacttccgtcca

SEQ ID NO: 276907 - DNA, 201 bp, Homo sapiens; identical to SEQ ID NO: 264219

SEQ ID NO: 276908 - DNA, 201 bp, Homo sapiens
ccccacatccaatccaccaacttccgtccaccctccagaacacattccaaattcagcactttctttgtctccactgtcaccacacttgtgctcaccaccattttctttcacctggactactgcagttgctttttaactaagttccctgtttccatttgtgccttccaatccattttccacaaagcagctatccagaatttg

SEQ ID NO: 276909 - DNA, 201 bp, Homo sapiens; identical to SEQ ID NO: 264221

SEQ ID NO: 276910 - DNA, 201 bp, Homo sapiens
tgcgaaactggcatttctctgtgcttcgtaagaaaatgaagcaacttcatttcacaaggaaatgaagggggttatcagagccctgtgcgcgtgcgtgtgtrtgtgtgtacacatacatatacatatataacaattttaaatgtagagtaatgtttttcttttcttctacatttagatttcctagaatttgaaagatctttc

SEQ ID NO: 276911 - DNA, 201 bp, Homo sapiens; identical to SEQ ID NO: 264223

SEQ ID NO: 276912 - DNA, 201 bp, Homo sapiens
tggaggtcattatcctaagtgaattaaagcagaaacagaaaatcaaatactgcaatactgttctcacttaaaagtgggagctaaacaatgaatacacctgracataaagacgaaaacaacagaaactgcggactccaaaaagaggcaggaggggaggtgggaagggctgaaaaacttgctattgggtactatgttcactac

SEQ ID NO: 276913 - DNA, 201 bp, Homo sapiens
tatgctaggatactaataagttcatcatttgaagaacagacctgccaagtaggtttttttttttttctctccagttgtggtccagggaacctctgcctcaraattatctgtagggcttcaaaatgcaaaattcctatgcctcacccaaaatctgccaaaccagctttccctaagggtgaggcctgggaatatgattttctt

SEQ ID NO: 276914 - DNA, 201 bp, Homo sapiens
atgtttgttgaatgactaagcaaatgaacagaattactggagatgagtggcggttagtgattattgggacaaataggccaacggtagttttctcacctgcrggtttttagaaataaagatgaatcttcccacccttgaaatgtcgtaagagttgtttaaaagaggtcacagaggttgtatggctcttgccgtggctatgcc

SEQ ID NO: 276915 - DNA, 201 bp, Homo sapiens; identical to SEQ ID NO: 264226

SEQ ID NO: 276916 - DNA, 201 bp, Homo sapiens
acagaaactgcggactccaaaaagaggcaggaggggaggtgggaagggctgaaaaacttgctattgggtactatgttcactacttggatgatgggttcaayagaagcccaaatctcagcattatgcaacatatccatgtcacaaacccgcacatgtacccgctgaatctaaaaaaaagtttggagcaacactcacctctgc

SEQ ID NO: 276917 - DNA, 201 bp, Homo sapiens
ttattatgaatatagcttcctagtaaaactatataaggctttatttttgttttgttttatattagggagagttttgggttttttgggagttcttttagtaktttaggtttgagggagattttgcaagaacaaaaggaaaactgaacttaaaagatgttttatttaatacagaaaattgtattttttatcttttacttgttt

SEQ ID NO: 276918 - DNA, 201 bp, Homo sapiens; identical to SEQ ID NO: 264228

SEQ ID NO: 276919 - DNA, 201 bp, Homo sapiens
gggttgtaggggagagaaagtgtagggtgggaaagagataagaagatgggagaaagtggatggggagctgatgataacttacatttgtgaaatggaattgsagtttgataaataaaaaatactgattttattcaaccaaagacattatactttttctgcttaattaactaatcatatgaactcatgccttgttaatgataa

SEQ ID NO: 276920 - DNA, 201 bp, Homo sapiens
ggtgaaactcaggtttgcatgaactcagctgctttatttatttgagagcagtttggtttctatgttacaaccatcaataaaattaataatggggcaattatttttttctttttttattatactttaagttctagggtacatgtgcacagtatgcaggtttgttatatatgtatacatgtgccatgttggtatgctgcacct

SEQ ID NO: 276921 - DNA, 201 bp, Homo sapiens; identical to SEQ ID NO: 264230

SEQ ID NO: 276922 - DNA, 201 bp, Homo sapiens
ggcagcccagtccccaatcctccaggtagtgcatgcagaagattgccagcagtggtggtggtggcaggctgggcaggcctattctcaagttccaggaggaytgcccagatgccagctgttgtagacaaggtgaggcaatcccccagcctccagacagcatgcttgggtttcagcagtaggttttctggtcctgttaggccc

SEQ ID NO: 276923 - DNA, 201 bp, Homo sapiens; identical to SEQ ID NO: 264231

SEQ ID NO: 276924 - DNA, 201 bp, Homo sapiens
tgggcagcccagtccccaatcctccaggtagtgcatgcagaagattgccagcagtggtggtggtggcaggctgggcaggcctattctcaagttccaggagkattgcccagatgccagctgttgtagacaaggtgaggcaatcccccagcctccagacagcatgcttgggtttcagcagtaggttttctggtcctgttaggc

SEQ ID NO: 276925 - DNA, 201 bp, Homo sapiens; identical to SEQ ID NO: 264232

SEQ ID NO: 276926 - DNA, 201 bp, Homo sapiens
ggccagtcctcaggccctgctgttggcagcggcagaccaagcatgcctgttcttgggtcccggggtggcatatgtgggcgccagtgttagcaagtccagacgggctgattttggggcctccaggcagctttcttgggtgctggttatggcagcagtgtgccagatgactggatgagtcctcaggctccccatgggcactca

SEQ ID NO: 276927 - DNA, 201 bp, Homo sapiens; identical to SEQ ID NO: 264233

SEQ ID NO: 276928 - DNA, 201 bp, Homo sapiens
ctgggcatatatagtggtgtagtctccataggatttctttggctatacaccatcagtggtgtctgtgatttcctcagtggcgtaggctgcagttgttagtrgagattatgctgaggttttcctggggataggacgccaggtgggccagtcctcaggccctgctgttggcagcggcagaccaagcatgcctgttcttgggtc

SEQ ID NO: 276929 - DNA, 201 bp, Homo sapiens
cagagtatttctgtacactttgaagtgatacactcatttgtaaaccaaattataatgttgtgatattatagcccaggatggcaggtgttcagaaagcataycacttattaaaatggccatatgaaagcctagtacattttctgttctattgattccagtctcatttctactgcttctactttcctctgctcctcactgaac

SEQ ID NO: 276930 - DNA, 201 bp, Homo sapiens
ttcttttattctgggcatatatagtggtgtagtctccataggatttctttggctatacaccatcagtggtgtctgtgatttcctcagtggcgtaggctgcmgttgttagtggagattatgctgaggttttcctggggataggacgccaggtgggccagtcctcaggccctgctgttggcagcggcagaccaagcatgcctg

SEQ ID NO: 276931 - DNA, 201 bp, Homo sapiens
ttagattggttttcataggggaagacattttcctgtagatagatctatggtgttggttggttagggtacttttcttttattctgggcatatatagtggtgyagtctccataggatttctttggctatacaccatcagtggtgtctgtgatttcctcagtggcgtaggctgcagttgttagtggagattatgctgaggtttt

SEQ ID NO: 276932 - DNA, 201 bp, Homo sapiens
caattttttagattggttttcataggggaagacattttcctgtagatagatctatggtgttggttggttagggtacttttcttttattctgggcatatatrgtggtgtagtctccataggatttctttggctatacaccatcagtggtgtctgtgatttcctcagtggcgtaggctgcagttgttagtggagattatgctg

SEQ ID NO: 276933 - DNA, 201 bp, Homo sapiens
tcattgcattttttatttcattcattgaattcttcagtttcaggatttctctttggttcttttttatatgtctatctccttggtgaatttctcattcataycctgagttgtttttttaatttctttttattgtttatctgtgttctcttctatatcatggaacttccttaatgttgttattttgaattctttttcaggcac

SEQ ID NO: 276934 - DNA, 201 bp, Homo sapiens
tgccacacacttttaaaccatcagatcttgtgagaaatcactatcatgagaacagtaagggggaaatctgcccccatgaccaatcatctccctccgggtcmctcccccaacattgggaattacaattcaacatgagatttgggtggggacacagagccaaaccatatcagatgtttttctcttgctgtttttagaattatt

SEQ ID NO: 276935 - DNA, 201 bp, Homo sapiens; identical to SEQ ID NO: 264239

SEQ ID NO: 276936 - DNA, 201 bp, Homo sapiens; identical to SEQ ID NO: 264241

SEQ ID NO: 276937 - DNA, 201 bp, Homo sapiens; identical to SEQ ID NO: 264243

SEQ ID NO: 276938 - DNA, 201 bp, Homo sapiens; identical to SEQ ID NO: 264244

SEQ ID NO: 276939 - DNA, 201 bp, Homo sapiens
acaatgtatggtctacacactgttacagatgggtcacaaattccactgaaagctttctaaccaccagcataaagaagtgaacctggtgggtattttagtcwatgagggcctaaagatacaggcaggtcagattctgagaagtgaaaatgtgattactactaagctcagagaaaaatttcttcctggggatcccatgtggac

SEQ ID NO: 276940 - DNA, 201 bp, Homo sapiens
tattgcccaggccggtatcaaattcgtgagctcaagcagtctgcccgcctgggcctcctaaagtgctggaatgacaggcatgagccaccatgcccagtccttttttttttttttttttgagacaggatcttgctctgttgccaagtctggagtgcagtggcataatcatgtctcactgcagcctcaaattcctgggctgag

SEQ ID NO: 276941 - DNA, 201 bp, Homo sapiens
gtaaaagtgttcctatttctccacatcctctccagcacctgttgtttcctgactttttaatgattgccattctaactggtgtgagatggtatctcattgtrgttttgatttgcatttctctgatggccagtgatgatgagcattttttcatgtgtctgttggctgcataaatgtcttcttttgagaagtgtctgttcatat

SEQ ID NO: 276942 - DNA, 201 bp, Homo sapiens
gcacctgttgtttcctgactttttaatgattgccattctaactggtgtgagatggtatctcattgtggttttgatttgcatttctctgatggccagtgatratgagcattttttcatgtgtctgttggctgcataaatgtcttcttttgagaagtgtctgttcatatcctttgcccactttttgatggggttgtttgtttt

SEQ ID NO: 276943 - DNA, 201 bp, Homo sapiens
gtgagatggtatctcattgtggttttgatttgcatttctctgatggccagtgatgatgagcattttttcatgtgtctgttggctgcataaatgtcttcttytgagaagtgtctgttcatatcctttgcccactttttgatggggttgtttgtttttttcttgtaagtttgtttgagttctttgtagattctggatattaac

SEQ ID NO: 276944 - DNA, 201 bp, Homo sapiens; identical to SEQ ID NO: 264248

SEQ ID NO: 276945 - DNA, 201 bp, Homo sapiens
cccattctgtaggttgcctgttcactccgatgatagtttcttttgctgtgcagaagctccttcatttaattagatctaatggggcaattattaattgctaactactaacatagaaatataaatactccatgttattatagacaggcaggaagacagatgaatagagacaaatatatcacttataagtgataaaagtggtat

SEQ ID NO: 276946 - DNA, 201 bp, Homo sapiens; identical to SEQ ID NO: 264251

SEQ ID NO: 276947 - DNA, 201 bp, Homo sapiens
ccattctgtaggttgcctgttcactccgatgatagtttcttttgctgtgcagaagctccttcatttaattagatctaatggggcaattattaattgctaactactaacatagaaatataaatactccatgttattatagacaggcaggaagacagatgaatagagacaaatatatcacttataagtgataaaagtggtatt

SEQ ID NO: 276948 - DNA, 201 bp, Homo sapiens
tttgtcttaagcttcgcaaatattagaaaatattttatactaccttttaaatatgcaatatgatataattactaggttcactctctaatcacagcctcttyctgagcagataaaaagaaaaaggtgagggaatacatagataattttttctatttccatggctgaaagtgtgaacctgaggaaaatagagtactcctgacc

SEQ ID NO: 276949 - DNA, 201 bp, Homo sapiens; identical to SEQ ID NO: 264254

SEQ ID NO: 276950 - DNA, 201 bp, Homo sapiens
cattctgtaggttgcctgttcactccgatgatagtttcttttgctgtgcagaagctccttcatttaattagatctaatggggcaattattaattgctaactactaacatagaaatataaatactccatgttattatagacaggcaggaagacagatgaatagagacaaatatatcacttataagtgataaaagtggtattg

SEQ ID NO: 276951 - DNA, 201 bp, Homo sapiens; identical to SEQ ID NO: 264255

SEQ ID NO: 276952 - DNA, 201 bp, Homo sapiens
cctggcaaacgataagaactccataaagttcggctactaccagtcatattatcagtagcagtaacaatacctgttaggtgtgaagatcatatatatatatattttttttttttttttttgagacggagtcttgctctgtctcccaggctggagtacaatggcacgatcttagctcacggcaacctccgcctcccaggttca

SEQ ID NO: 276953 - DNA, 201 bp, Homo sapiens; identical to SEQ ID NO: 264256

SEQ ID NO: 276954 - DNA, 201 bp, Homo sapiens
ctggcaaacgataagaactccataaagttcggctactaccagtcatattatcagtagcagtaacaatacctgttaggtgtgaagatcatatatatatatattttttttttttttttttgagacggagtcttgctctgtctcccaggctggagtacaatggcacgatcttagctcacggcaacctccgcctcccaggttcaa

SEQ ID NO: 276955 - DNA, 201 bp, Homo sapiens; identical to SEQ ID NO: 264257

SEQ ID NO: 276956 - DNA, 201 bp, Homo sapiens
ggcaaacgataagaactccataaagttcggctactaccagtcatattatcagtagcagtaacaatacctgttaggtgtgaagatcatatatatatatattwtttttttttttttttgagacggagtcttgctctgtctcccaggctggagtacaatggcacgatcttagctcacggcaacctccgcctcccaggttcaagc

SEQ ID NO: 276957 - DNA, 201 bp, Homo sapiens; identical to SEQ ID NO: 264258

SEQ ID NO: 276958 - DNA, 201 bp, Homo sapiens
cggcaacctccgcctcccaggttcaagcaattctccttcttcagcctcctgagtagctgggattacagacatatacaaccacgcccagctaatttttgtattttttttttttttagtagagatggggtttaccatgttggccaggctgttcttgaactcctgacctcaaatgatcccccatctctgcctcccaaagtgctg

SEQ ID NO: 276959 - DNA, 201 bp, Homo sapiens; identical to SEQ ID NO: 264260

SEQ ID NO: 276960 - DNA, 201 bp, Homo sapiens
gtgtctagatgctatagtaatccattctcactgctataaagaactacctgagagtaggtagtttataaagaaaagaggtttaattgactcacaattctgcmggttgtacaagaggcatggctgggaggcctcaggaaacctaatcatggtggaagggtaaggaagcaccttgcttcacaaggagcaagaggaaaagagagt

SEQ ID NO: 276961 - DNA, 201 bp, Homo sapiens; identical to SEQ ID NO: 264263

SEQ ID NO: 276962 - DNA, 201 bp, Homo sapiens
atcccattttcttctggactgtaaagtttcagattagaaatgtgctgttagtctgatggagacttctttgtgtctagatgctatagtaatccattctcactgctataaagaactacctgagagtaggtagtttataaagaaaagaggtttaattgactcacaattctgccggttgtacaagaggcatggctgggaggcctc

SEQ ID NO: 276963 - DNA, 201 bp, Homo sapiens; identical to SEQ ID NO: 264262

SEQ ID NO: 276964 - DNA, 201 bp, Homo sapiens; identical to SEQ ID NO: 264265

SEQ ID NO: 276965 - DNA, 201 bp, Homo sapiens; identical to SEQ ID NO: 264264

SEQ ID NO: 276966 - DNA, 201 bp, Homo sapiens
agtaaattgttatgtccttgaacagaaaatgtcacctaaaatcattcagaataatgtcatattgagtaaaatacctggcactttagagaaatagctctcayatgaaggaaaatcaagcataactcccctagattactgaaatacaagtgcttatgaaatgctaacttttctctaaaatgctgtctttttagaaagaaatgc

SEQ ID NO: 276967 - DNA, 201 bp, Homo sapiens; identical to SEQ ID NO: 264266

SEQ ID NO: 276968 - DNA, 201 bp, Homo sapiens
cattcctggggttcaccgctagaaattctgattcagcaagactgggaaccatggcgtgattctgatgcaggtaatccatacgctgtgagaacactggctgygtctggagttcaccagatgtcagttcctacatgaaggcagggagagaaaatctattcctaaagtaaattgttatgtccttgaacagaaaatgtcacctaa

SEQ ID NO: 276969 - DNA, 201 bp, Homo sapiens
attacatttcccctccctccccaaaagctacattttgataaataaaacattcagtcttaaaacacctgatttctgtttgcagtttagagtgcagatagctrcctctcacagacactcatggagtgtcccccttcaggaagggatggaatgccctcccatttacttttgtcaaaggacgaataaaagctttaaactgtccaa

SEQ ID NO: 276970 - DNA, 201 bp, Homo sapiens; identical to SEQ ID NO: 264267

SEQ ID NO: 276971 - DNA, 201 bp, Homo sapiens
gacactcatggagtgtcccccttcaggaagggatggaatgccctcccatttacttttgtcaaaggacgaataaaagctttaaactgtccaactaatcttawtatctcttttacgactgtagaaccccaaaaggaaaaaagcctagagaaaatatgcttagcaaataatttacaaacagaaaacagaaagtcatcaactcca

SEQ ID NO: 276972 - DNA, 201 bp, Homo sapiens
gtttgcaaatgttaaaggtagctttggagatagattacaacagccattccctttatctcttcccgaagtgggaccaagtttaaacctgtgaccacatactsagaggtgactcatcgttatagggttccaaaaacaacaacaatgaaaaacaattaggagctaaatgaaaagcgctgaatctattagagtttttgtatgttt

SEQ ID NO: 276973 - DNA, 201 bp, Homo sapiens
taagtatcctattgcttggctgaaggttaataaagcatagggtgaaacatagacactaaattagaagtgacattttgaccatgaattattctgcagcctcyggggaaaacttccccactacatgacacaatactagaatttggatcatccttagaaatactgacatgcaaaagaaacacattaaattttctaccaccctcc

SEQ ID NO: 276974 - DNA, 201 bp, Homo sapiens
tcttgaagggattaggaaacgttgtcagttgagctggaaggaggagggttttgagttttgggttactgtttctctgtggaaatcacatgtattaaatgccrtaggtgttgataagtatcctattgcttggctgaaggttaataaagcatagggtgaaacatagacactaaattagaagtgacattttgaccatgaattatt

SEQ ID NO: 276975 - DNA, 201 bp, Homo sapiens
gacatgatcaagtgggccaggtgggttttccattttcctttttcctgaaagcccaccagtagacaattgatatggttaggccttatgtccctaccaaaatmtcatcttaaattgtaatcctcataatccccacatggcaagggagagaccaggtagaggtaattgaatcacgggggtggttttccccatgctgttctcatg

SEQ ID NO: 276976 - DNA, 201 bp, Homo sapiens
tttaagaccggaaatttcctcattttatagatagtagacttgccagaagaaaattagacttgcccaggtcacacggctaaatcaagagtggaagtcattgmtaaagaagatgaccttctgttgttacaatgcagtgctttccctttccttctctgtaacttcaaccccgtgagatgatctggacacccaataaggataaag

SEQ ID NO: 276977 - DNA, 201 bp, Homo sapiens; identical to SEQ ID NO: 264270

SEQ ID NO: 276978 - DNA, 201 bp, Homo sapiens; identical to SEQ ID NO: 264272

SEQ ID NO: 276979 - DNA, 201 bp, Homo sapiens; identical to SEQ ID NO: 264271

SEQ ID NO: 276980 - DNA, 201 bp, Homo sapiens; identical to SEQ ID NO: 264273

SEQ ID NO: 276981 - DNA, 201 bp, Homo sapiens; identical to SEQ ID NO: 264275

SEQ ID NO: 276982 - DNA, 201 bp, Homo sapiens; identical to SEQ ID NO: 264276

SEQ ID NO: 276983 - DNA, 201 bp, Homo sapiens
ctatgccattaaacttctctcaccctttggaacacccaaaattcaaatattttgttgctttatggtggcccataggtcacattggctttcttctttcttgtttttttttcttctttttaaagttctgaaattcttcttgatttagtatcctgttgaagttctcattgcattttttatttcattcattgaattcttcagttt

SEQ ID NO: 276984 - DNA, 201 bp, Homo sapiens
atgaagagtgtacttgggcatcatatattgtatcaatagaccatagtcagttgtttttaatactggtttagctttgatatgttaagatgggtacattatgwtatatatatatatatatatacatatacatacatatatgaatataaagatcaattatgagtgacccaaaaatgtgctttgaatattccctaaacatctcta

SEQ ID NO: 276985 - DNA, 201 bp, Homo sapiens
tacttgggcatcatatattgtatcaatagaccatagtcagttgtttttaatactggtttagctttgatatgttaagatgggtacattatgttatatatatatatatatatacatatacatacatatatgaatataaagatcaattatgagtgacccaaaaatgtgctttgaatattccctaaacatctctaactacctttt

SEQ ID NO: 276986 - DNA, 201 bp, Homo sapiens; identical to SEQ ID NO: 264278

SEQ ID NO: 276987 - DNA, 201 bp, Homo sapiens
tcatatattgtatcaatagaccatagtcagttgtttttaatactggtttagctttgatatgttaagatgggtacattatgttatatatatatatatatatacatatacatacatatatgaatataaagatcaattatgagtgacccaaaaatgtgctttgaatattccctaaacatctctaactaccttttatataccttt

SEQ ID NO: 276988 - DNA, 201 bp, Homo sapiens; identical to SEQ ID NO: 264280

SEQ ID NO: 276989 - DNA, 201 bp, Homo sapiens
catatattgtatcaatagaccatagtcagttgtttttaatactggtttagctttgatatgttaagatgggtacattatgttatatatatatatatatatacatatacatacatatatgaatataaagatcaattatgagtgacccaaaaatgtgctttgaatattccctaaacatctctaactaccttttatatacctttg

SEQ ID NO: 276990 - DNA, 201 bp, Homo sapiens
aagttttccttttctggttctaagtgactggaggtaatagatgggaatttgaacagaggaacagcctaaagtgtcagttccaagcttgtatcctaccacaytgccttccttctgtttgaaagtgtggggagttactcttcttaggcctgctttgtttctctttatagatcatgcaacagatgagtgaccaccgctacgaca

SEQ ID NO: 276991 - DNA, 201 bp, Homo sapiens; identical to SEQ ID NO: 264281

SEQ ID NO: 276992 - DNA, 201 bp, Homo sapiens
attgtatcaatagaccatagtcagttgtttttaatactggtttagctttgatatgttaagatgggtacattatgttatatatatatatatatatacatatacatacatatatgaatataaagatcaattatgagtgacccaaaaatgtgctttgaatattccctaaacatctctaactaccttttatatacctttgcttca

SEQ ID NO: 276993 - DNA, 201 bp, Homo sapiens
tctttttatttctttttatttttattattttattattattattattattattattatttttgagacagggtctcactctgttacccaggctggagtgctgyggcacgatcttggctcactgcaaccccacctcccgggctcaagagatcctcccacctcagcctcctgagtagctgggactacatgcatataccaccacaa

SEQ ID NO: 276994 - DNA, 201 bp, Homo sapiens; identical to SEQ ID NO: 55696

SEQ ID NO: 276995 - DNA, 201 bp, Homo sapiens; identical to SEQ ID NO: 264283

SEQ ID NO: 276996 - DNA, 201 bp, Homo sapiens
ttgtatcaatagaccatagtcagttgtttttaatactggtttagctttgatatgttaagatgggtacattatgttatatatatatatatatatacatatayatacatatatgaatataaagatcaattatgagtgacccaaaaatgtgctttgaatattccctaaacatctctaactaccttttatatacctttgcttcag

SEQ ID NO: 276997 - DNA, 201 bp, Homo sapiens; identical to SEQ ID NO: 264282

SEQ ID NO: 276998 - DNA, 201 bp, Homo sapiens; identical to SEQ ID NO: 264285

SEQ ID NO: 276999 - DNA, 201 bp, Homo sapiens
ccccaggtggcttttatgctcattgtattaaggccatcacctgccaatgaacaggtgaattcagtttaaaagtatgtggaagagcaaagcgtgtgtgtgtgcgcgcgcgcgcgcacgcacgtgcatgcacacacgtgtggtgttactgattaatcagattcacattattgactattctgattactggtatggcccttcttt

SEQ ID NO: 277000 - DNA, 201 bp, Homo sapiens; identical to SEQ ID NO: 264284

SEQ ID NO: 277001 - DNA, 201 bp, Homo sapiens; identical to SEQ ID NO: 264287

SEQ ID NO: 277002 - DNA, 201 bp, Homo sapiens
cccaggtggcttttatgctcattgtattaaggccatcacctgccaatgaacaggtgaattcagtttaaaagtatgtggaagagcaaagcgtgtgtgtgtgcgcgcgcgcgcgcacgcacgtgcatgcacacacgtgtggtgttactgattaatcagattcacattattgactattctgattactggtatggcccttctttc

SEQ ID NO: 277003 - DNA, 201 bp, Homo sapiens; identical to SEQ ID NO: 264286

SEQ ID NO: 277004 - DNA, 201 bp, Homo sapiens
accacacccagctactttttgtatttttagtagagatggggtttcaccatgttggtcaggctgatctcaaactcctgtcctcaggtgatccgccagcttcrgcctcccaaagtgctgggattatagatgtgagccaccgcacctgcctgttcctgatttttaaaatgatgaatggagaaaccatttcttaatcagatcgtt

SEQ ID NO: 277005 - DNA, 201 bp, Homo sapiens
tatcaaaacccctgctgggccttacatgtggccattttgcatcttactgataagtcttacgaacaaagactagaaaaataatagacggttttaaaaccttaaaagaaaagagagacaaacacatacttttaaagagcaacaaaaacccttgcaattcttccaaagactcatagcttaatcaagttttccttttctggttct

SEQ ID NO: 277006 - DNA, 201 bp, Homo sapiens
acttaccagggagccgcttcagtgagctgccttttccaactgcaatcaattcattgtttctcgtcaactccacctcggaggcatcgaatcccagctccttrccaaggaggccgtcctggtcctccatggggtccttgatactatcctcgtcacagacccactcctcgcagcactgcccggtaactttgaccagccgagggt

SEQ ID NO: 277007 - DNA, 201 bp, Homo sapiens
tggtgaaaaccccgattgtggtaatattagtgcctgatttgtttaatttaattaagcatttaatttccttctggtgtctttataaaagaaaaacagggccrggcgcggtggctcacgcctgtaatcccagcactttgggaggccgaggcgggtggatcatgaggtcaggagatcgagaccatcctggctaacacggtgaaa

SEQ ID NO: 277008 - DNA, 201 bp, Homo sapiens
aataactaccacaatggcgtgcctttggtagaatttttggaaaagagtttaaactctccctgtcaccatgaattcagcattcctcatccacaaaggaacaraccatcaaaaattggtgggcaaatgttgctggatttcactgacctagattcacattttaggaatagagcagtactcagatatgacagcagctctggtagg

SEQ ID NO: 277009 - DNA, 201 bp, Homo sapiens
tctctactaaaaatacaaaaaattagccgggcgcggtggcgggcgcctgtagtcccagctactcgggaggctgaggcaggagaatggcgtgaacccgggargcggagcttgcagtgagccgagatcgcgccactgcagtccgcagtccggcctgggcgacagagcgagactccgtctcaaaaaaaaaaaaaaaaaaaaaaa

SEQ ID NO: 277010 - DNA, 201 bp, Homo sapiens
ggaggctgaggcaggagaatggcgtgaacccgggaggcggagcttgcagtgagccgagatcgcgccactgcagtccgcagtccggcctgggcgacagagcragactccgtctcaaaaaaaaaaaaaaaaaaaaaaaaagaaaaacagaagggaggaaaaataatctcagattattaactactttaagcttttcacctacta

SEQ ID NO: 277011 - DNA, 201 bp, Homo sapiens
tctcttcttgaaaaaacaaagttgaattagcctcagtaggaatcgagagtgttgttccttcccattggaaattttataacagccagtcaaggtgaaatgcygtgtcttaaacctaggatggagcaaacaactacttggcaaaaagtagcaaccatataattataaagcactagtggtaaggatcacttcagagtgggctca

SEQ ID NO: 277012 - DNA, 201 bp, Homo sapiens
tgagatcgattataagatgagagggtttaagctggtctataccatgcatttgtgtgtattagcagaaagaacttcttctgggtggaccaactagaaaaagyggccccttctgccattctgggtagaccaggtccctaactcaaatcatttggtccctacctcaataggtctgtaactcaaatagtctagagagactaacac

SEQ ID NO: 277013 - DNA, 201 bp, Homo sapiens; identical to SEQ ID NO: 52740

SEQ ID NO: 277014 - DNA, 201 bp, Homo sapiens
ccatgcgtgtattaagaaattaaaacacaaaaccaaatagcctctgaatttgtaacaactgtttatgctccttttcctggcagcagttgcctcatctgacratattcccagagctgtatgccaacaaggctagggtggccaaaataaaatgttttggcataataagccaataaataatttgaagctatgacaccaaaacag

SEQ ID NO: 277015 - DNA, 201 bp, Homo sapiens; identical to SEQ ID NO: 264290

SEQ ID NO: 277016 - DNA, 201 bp, Homo sapiens
ccactttgagtctctgctatgaaaggcatactgacaatcccattgtaggtttaattttgtcttactatctggctgttgtattcaccagctccacaaaacartgatttttttaaatctgccatgcgtgtattaagaaattaaaacacaaaaccaaatagcctctgaatttgtaacaactgtttatgctccttttcctggcag

SEQ ID NO: 277017 - DNA, 201 bp, Homo sapiens
ttaattagcacacaggcattagacctgtttgtactcttccagaaggaatgtttgccttctctaaaaagatgagtactccagttactccaaagtttgaacaraagaagccaacccccccaaagaataaatattctattctttcatgcacatagttaaacaagaggcaaagctactctctactgttacctgtcagaataatag

SEQ ID NO: 277018 - DNA, 201 bp, Homo sapiens
gccaccacaacacatttaatacagggtaccaatctagggaaagaagaaaggaagacattattactgcattttaccatccatatggcaaaggtactagaagytaggttggtttgaacaaatgctagatatttaacagcaagtctgatcctagaaatactattatttaggccaaattagtttttagagcaacctgcatttcct

SEQ ID NO: 277019 - DNA, 201 bp, Homo sapiens; identical to SEQ ID NO: 264291

SEQ ID NO: 277020 - DNA, 201 bp, Homo sapiens
cagctttcttccactcccacccaccatagagatagatctctctttcctttaccttcctgtagcactttgttatctatacctctcatgtgcacttaccccakctccaattctggatgtcttgttctcctagtgagattgtgagctcttcaaggtaaggatcatgtctttgtgcttccttcttttgtgactctgaagtgcata

SEQ ID NO: 277021 - DNA, 201 bp, Homo sapiens
tcaaggcccaccaaaaaaatcatcttaaaaacatttgcatgccttccatctctagcagtgttagattgtttattggctgaattgatttggcaaaagatttwaaaaaaaaggatgatttctgtctcatgggctgagatcgtacatcacagcatgacctatgtgatagtctcagccatgccaacaccagtaccttcggtcttg

SEQ ID NO: 277022 - DNA, 201 bp, Homo sapiens; identical to SEQ ID NO: 264295

SEQ ID NO: 277023 - DNA, 201 bp, Homo sapiens
tgtcaaagggaaaaaggaataaattatatttaaaagtgctgttcatcctgtccagtatatactagaccatcaaaaagtattaaactgactctataggataytgtaggggtaatcatctgttggatggttggccacatagccttataaggggcctttcaacccaagactctaacttctgaaagaaaaagtctataagtgacc

SEQ ID NO: 277024 - DNA, 201 bp, Homo sapiens
ttgtgtcattgatttatcactagctagctgagggcctgcttaaccatgtacctgttagcctgtggaaaaagaaaaatgggagatgaagaggccacactttsaaggagttccggtgtggtgatgttcaatcttgctatcttgagcctttattcatttcttcatgctctaggactgccaaacaggaggtcacagtctagggag

SEQ ID NO: 277025 - DNA, 201 bp, Homo sapiens
tcttactatctggctgttgtattcaccagctccacaaaacaatgatttttttaaatctgccatgcgtgtattaagaaattaaaacacaaaaccaaatagcytctgaatttgtaacaactgtttatgctccttttcctggcagcagttgcctcatctgacgatattcccagagctgtatgccaacaaggctagggtggccaa

SEQ ID NO: 277026 - DNA, 201 bp, Homo sapiens
aaaatagatttgatgatatttagaagcatgcataatgacagaagttgcattatctctgttctagtgttgcttagacatctcagaatcatagctttgggagrgatgggtggaagttgtgtcattgatttatcactagctagctgagggcctgcttaaccatgtacctgttagcctgtggaaaaagaaaaatgggagatgaag

SEQ ID NO: 277027 - DNA, 201 bp, Homo sapiens
atcctcaccttcctaaccccgtgggagaggaattttttgttgttttgtcttgttttgtttttgttttcatttttttcatatattacatttgtgtatatttrtgggatacagctatagttttctttggtggacttttttaaaattagtaattctgttcttttgtatcacaataaattattacctaaaaatacttttaataaa

SEQ ID NO: 277028 - DNA, 201 bp, Homo sapiens
ggaaggtgaagtagataaaccaaatcatcaagtaaactgagattcatttctgtttcgttctgcagtaagtcatgtgatattttcctgggaaaattcatatycttaattatctttggtttgcaataatattaaaataactgcatttcctgagtacaattcaattgtgccattaagggatgtggtgttctttcatcattccag

SEQ ID NO: 277029 - DNA, 201 bp, Homo sapiens
aaggaatgtttgccttctctaaaaagatgagtactccagttactccaaagtttgaacaaaagaagccaacccccccaaagaataaatattctattctttcmtgcacatagttaaacaagaggcaaagctactctctactgttacctgtcagaataatagttattttaagatgaagggaggcagtcatggtccagagggcca

SEQ ID NO: 277030 - DNA, 201 bp, Homo sapiens
aaaagttgctcaatttttttccagcttaagaatttagtacaagttttatgcatgttgtttgcctagttgttggattgacgataatacctgtaaaattcctkacaatttagtgtattaattagccttcctcagaaaatcctgaggatgtttccagactgtgtgccgcttgtacgttattgcagttgtcgttgttttgcatta

SEQ ID NO: 277031 - DNA, 201 bp, Homo sapiens
gaaataatacaatattttatttgtatcttaagtttaaagtttccttagtattactcttcatagttaacatagcttaggctacaaataacataactagattrtgttgcatggctgttagcttgttgttgacattattgtttttatgaaagaacatgactattttaatgatgtccttatgaaggaatagaaaaatacacaagc

SEQ ID NO: 277032 - DNA, 201 bp, Homo sapiens
ttaagctggtctataccatgcatttgtgtgtattagcagaaagaacttcttctgggtggaccaactagaaaaagtggccccttctgccattctgggtagaycaggtccctaactcaaatcatttggtccctacctcaataggtctgtaactcaaatagtctagagagactaacacataacaaaataaaaggtaatcaaata

SEQ ID NO: 277033 - DNA, 201 bp, Homo sapiens
aagtgtggtggtttggctgggaagcaatcgtttccttgagctaaatttcctctctgtattatctgccactctttgagctagctcacctggcctttcttccrcctcttcccaaacggtatctttgattctgtttctaaggcttttattaattgttgctgaacaatctgtctcagaatttgatttgtatcatggtggcttttg

SEQ ID NO: 277034 - DNA, 201 bp, Homo sapiens
gaagctgttctctgtggtaagagagaactgtgtgatgctttaaggtcattatttatagataaaagaaatgatgtacagtcactggtgccacctgctcactrtgttccatgacatctattacaggcagagaattttttgtgggcctttccaaaaggacaaatcaacgaggtgctgaaatcttggctgatacttttaaggtag

SEQ ID NO: 277035 - DNA, 201 bp, Homo sapiens; identical to SEQ ID NO: 264296

SEQ ID NO: 277036 - DNA, 201 bp, Homo sapiens
atcaaaacccctgctgggccttacatgtggccattttgcatcttactgataagtcttacgaacaaagactagaaaaataatagacggttttaaaaccttaaaagaaaagagagacaaacacatacttttaaagagcaacaaaaacccttgcaattcttccaaagactcatagcttaatcaagttttccttttctggttcta

SEQ ID NO: 277037 - DNA, 201 bp, Homo sapiens
tcaaaacccctgctgggccttacatgtggccattttgcatcttactgataagtcttacgaacaaagactagaaaaataatagacggttttaaaaccttaaaagaaaagagagacaaacacatacttttaaagagcaacaaaaacccttgcaattcttccaaagactcatagcttaatcaagttttccttttctggttctaa

SEQ ID NO: 277038 - DNA, 201 bp, Homo sapiens
caaaacccctgctgggccttacatgtggccattttgcatcttactgataagtcttacgaacaaagactagaaaaataatagacggttttaaaaccttaaaagaaaagagagacaaacacatacttttaaagagcaacaaaaacccttgcaattcttccaaagactcatagcttaatcaagttttccttttctggttctaag

SEQ ID NO: 277039 - DNA, 201 bp, Homo sapiens
aaaacccctgctgggccttacatgtggccattttgcatcttactgataagtcttacgaacaaagactagaaaaataatagacggttttaaaaccttaaaagaaaagagagacaaacacatacttttaaagagcaacaaaaacccttgcaattcttccaaagactcatagcttaatcaagttttccttttctggttctaagt

SEQ ID NO: 277040 - DNA, 201 bp, Homo sapiens; identical to SEQ ID NO: 55698

SEQ ID NO: 277041 - DNA, 201 bp, Homo sapiens
ctttgggaggccgatgtgggcagatcacttgaggtcaggagttcgagaccagtctggacaacatagtgaaactccatctctacacacacacacacacacamacaaaattagccgggcattgtggcacacgccagtagtcccagctactcaggaggctgaggcacgagaattgcttgaacccaggaggcagaggttgcagtg

SEQ ID NO: 277042 - DNA, 201 bp, Homo sapiens
ttgggaggccgatgtgggcagatcacttgaggtcaggagttcgagaccagtctggacaacatagtgaaactccatctctacacacacacacacacacacamaaaattagccgggcattgtggcacacgccagtagtcccagctactcaggaggctgaggcacgagaattgcttgaacccaggaggcagaggttgcagtgag

SEQ ID NO: 277043 - DNA, 201 bp, Homo sapiens; identical to SEQ ID NO: 264303

SEQ ID NO: 277044 - DNA, 201 bp, Homo sapiens
ccttttgttgcgtctggactatttcataataatcttttagaaagccatggttcagaagtacctaaaaagcttaacttcttcatttgcatttggaataatarcattttaagaccggaaatttcctcattttatagatagtagacttgccagaagaaaattagacttgcccaggtcacacggctaaatcaagagtggaagtca

SEQ ID NO: 277045 - DNA, 201 bp, Homo sapiens; identical to SEQ ID NO: 264304

SEQ ID NO: 277046 - DNA, 201 bp, Homo sapiens; identical to SEQ ID NO: 264306

SEQ ID NO: 277047 - DNA, 201 bp, Homo sapiens
ttaacaatgttgataggttcatggaaactgtgacttttaagcgaagtgacatataacaaaaccatttttaccataggctaatataaacaagagttaagttyctctggcatatttctagtcacaaaaatatcacccagcttctaaatcaaaacccaaaacacttataatattaagcattgaaataaatgtcagccatatgca

SEQ ID NO: 277048 - DNA, 201 bp, Homo sapiens; identical to SEQ ID NO: 264305

SEQ ID NO: 277049 - DNA, 201 bp, Homo sapiens; identical to SEQ ID NO: 264309

SEQ ID NO: 277050 - DNA, 201 bp, Homo sapiens; identical to SEQ ID NO: 264307

SEQ ID NO: 277051 - DNA, 201 bp, Homo sapiens
tatatcttactacaaaataataaactagctggtttataatgtgtaaaaaagatttttgagaaatcattggtggtggtataatattaagtgatatcattcayatgggtagttattctcataacatcttgtatgtaactataacacttataatgtattaataatttgttttcaatcttttaatttggactagacataactctt

SEQ ID NO: 277052 - DNA, 201 bp, Homo sapiens
actaactcataactgtaataatttatatgtaaaagaaagactcaagtatttagcttttctttcctttatgaatttcatttcaagtagaccaaatacttgaggagagattttctttttagggttgcagcgagtaaatgcagattcctaataaaaaaataatggatctgtgcaatgatcaacaaatgatattaaaactgctat

SEQ ID NO: 277053 - DNA, 201 bp, Homo sapiens
tataatttatatttcttgttatccttgtctggttttgataaaagagttacattagcctcgtagaatgtattagggaatatttcctctttttctattctctrgaatcaatactatttgaattatatattccttaaactttggaaacaggctcttgtgccttctttatggagaaatttaaaactgatttagttgattaatgat

SEQ ID NO: 277054 - DNA, 201 bp, Homo sapiens
agcagactcaggcattctttgaatctgcctagtaagttccccttagaatattctttgtgtctcccgttgatggcactttcattctttttgacagtacagarcaacagtctgtttatctaacaaaataggcttttgtgaaaagttagatgtgtaaatcacacttccttacaatataactcttttttatcagaacatagccat

SEQ ID NO: 277055 - DNA, 201 bp, Homo sapiens
atgcaacagctttccctggggttttggccaaaagctatattgtccattttagtatattttatgcccatgttctctttgtcttgttaatgtgaattcacatrtagctttaaaatatgataaatattaatcaatgatcaatacaaaagcatgaaagtatttctattaaaaatcatcacaagtttcttccagaggttaaaaata

SEQ ID NO: 277056 - DNA, 201 bp, Homo sapiens
ctacgacatcatttattgttgtacatttgtatgattattggatgctttattacaatcatttgtatccattcattttctaaggcacttcttccagttcaggrtcatcaagggtggctggaggctatcctggaagctcggggtgcaaggcggcaacccaccctggacaggacaccgtcccatcacagcacactcacccacaca

SEQ ID NO: 277057 - DNA, 201 bp, Homo sapiens
tcttgagcaaatttcacccttaaatagaaattcagccaattattttaatctcataaagagccattttaaggagccctaaaatttttttcttctagtttttrttttaggttcagggggtccatgttcaggttggttacagggtaaattgcatgttgctgtagtttggtgtacaaatgagttcatcacccaggtactgagcat

SEQ ID NO: 277058 - DNA, 201 bp, Homo sapiens
gaaaagaatccgaatttatcaacaatgtctagtactgttcttttagtgaaaaaaaaaaaggtagtataataaattctcacttaacaatgttgataggttcrtggaaactgtgacttttaagcgaagtgacatataacaaaaccatttttaccataggctaatataaacaagagttaagttcctctggcatatttctagtca

SEQ ID NO: 277059 - DNA, 201 bp, Homo sapiens
tcttgatccctgttctggttatttaatgctgcacaacaaattattccaaaacgtagtgggttaaagcaatggcagcatttaatttgctcgtgaatttgcartttaagcaggacttggtggtataacatgtctctgctttgcttggtgtcagctggggttgctcaaagaggactagaatacagttgacccttgaacagcaca

SEQ ID NO: 277060 - DNA, 201 bp, Homo sapiens
tctgcatggctactcttcttatacttcaccataatactctgaggcaaaaagatactaatttctctttgaatatcttttccacatattatgtggaatttcartaaataaagggaagatgagagttcccacatttatgtattgcctaactccatactataattatttgcctataactaagagaccatttttatctagtgtttt

SEQ ID NO: 277061 - DNA, 201 bp, Homo sapiens
tacggaaaaattgtcttgttattcttacaagatgctaggtcactctccctgagttaaatttcactttgacagtttccagctgattgtgcctgggtcctaayagacacacaataagtgttagctgaactgtatgttgaattctttctaaattttacatcgaaagcacttttcaatgtgtagtaactagatgattaaaatttg

SEQ ID NO: 277062 - DNA, 201 bp, Homo sapiens
ggtaatgttaatttatgccttctttctttgtttgccagaggtttgttaattttattaatctttcctaaggaccaactattggcttggttgaactctttctyttgaatgtttcttttctgtttctgtatttccttccttcacatttctttctttttactctgttctctttttttctacatctcaagttggaattttatctca

SEQ ID NO: 277063 - DNA, 201 bp, Homo sapiens
aaaaaatcttaataagctaggcaaaatttatgtaaaactaaaggcttttaaagcccatgtcagcttttgttttgttttgacctggatcatcatccaggttyccaagtagaattctgagttcctttcagaaaagtatgaacttctttatgtagaactatgacacatcatatcaaaggctactatctgaactgttttagaaca

SEQ ID NO: 277064 - DNA, 201 bp, Homo sapiens
ttatacaactattaccactcaatttttggattaggaagagttagataagaaataaggtctgtaacattttctatgtgctctatgtcctcttttctctgtawttcaaagcctcattaataatttatcaggaaatggacagaaggaaagctgctttccaaatccagttcctgctgggaaatctgtcagtcaggcaagcagcta

SEQ ID NO: 277065 - DNA, 201 bp, Homo sapiens
ttcaatgatgaccacctttctttcttcctgttgaaaggtggcctgtcctatatcctttcagtgagacacacgtctctcctatcctaggtgaaatttaagtrtaatgtaaaatgctgttgctgcaggaatagtgtacatcaggaagaaaaggggcaaataggaagagagaaggagaagaagaaaggaggaggaactaactgg

SEQ ID NO: 277066 - DNA, 201 bp, Homo sapiens
tggggccaccacgttgccagctctgggggcgccattcttcttagggattgtgtgaatagtatgccctggagttgtgtactgcacctgtgctgccactgtcwcatgcagtggtccatctctggggtttggtttgcatgcccattgaaccctaagaacacagaacaaggagtcaagaaggcctacgctgcattcttatctctg

SEQ ID NO: 277067 - DNA, 201 bp, Homo sapiens
cttgggttaattaaaataagggatgaatttagggatgcagccggctcctctttctgatgattcagcgtgaaggaagagggtagttttgcagagaagaaatmcttccagtgtttctgtcaaggattagcctgttgatgaggaaattcagacatcaaaggtcagtgtagcttttggttaacattttgcataattcagactgac

SEQ ID NO: 277068 - DNA, 201 bp, Homo sapiens
tacttactttggacataattaatgttcctgaagaaggaatagtgtttattctgtgacatttaagcagttctttgctaagtgtcacatactgtcgctatggktggggccaccacgttgccagctctgggggcgccattcttcttagggattgtgtgaatagtatgccctggagttgtgtactgcacctgtgctgccactgtc

SEQ ID NO: 277069 - DNA, 201 bp, Homo sapiens
tgagcttaaaaaaatcacaaaaaaatctcctaatgttttaagaaactttacaaatttgtgttgggccgcattcaaagccgtcctaggccacatgtggcccrtgggccatgggttggacaagtttgttctaacaagaaaggatgatgaagatgctggctcctgactacaatgggtggatatttactgctgaacacacagcac

SEQ ID NO: 277070 - DNA, 201 bp, Homo sapiens
agaacattattggtatgtacatcaccactttgtatcttgcttctactttattcttctacagcatgaatttataagttgcatcgttttccattgttactgtrtatctggtttgtatttaaaggattcataattcaagattagtgtcatttacaaataactttctttccagatggcaaggtggatttaaataatttctatgca

SEQ ID NO: 277071 - DNA, 201 bp, Homo sapiens
ttacgagttattgatattccttccatgtattatactgtgtgtgtgtgtgcaattctgactaaatgactgacataagatttaaaatggaatcttgtatttcytggcaagggtaggataattgggtgctttgcctcccaccttcctttactcatgtgccctaactagtcagcctccaatagtgtgctaactggtcagaattgg

SEQ ID NO: 277072 - DNA, 201 bp, Homo sapiens
gccttgtttccattttctccataaatctttattgtgaaaagcctttaacctttgaattagctgaaataactcttttctacaaaaatatattctcatgactwtttataatttttttcacccaaaacacattttactttctcttggtatactttgcatatagaattacatatattaattagaatttttaacttttagtaacct

SEQ ID NO: 277073 - DNA, 201 bp, Homo sapiens
ccacaggtatggatataccttgatttatttaactactcttttattatagggctttccaattgtttctgattttaaattttaatttaattattaattaattwatttatttatttatttttgagacagagtcttgctctatcgcccaggttggagtgctgtggcacagtcttgggtcgttcaacttccatctccccaattcaa

SEQ ID NO: 277074 - DNA, 201 bp, Homo sapiens
gaaaagcctttaacctttgaattagctgaaataactcttttctacaaaaatatattctcatgactttttataatttttttcacccaaaacacattttactktctcttggtatactttgcatatagaattacatatattaattagaatttttaacttttagtaaccttaatttctagtgaaacctaggaagtaagcaatttt

SEQ ID NO: 277075 - DNA, 201 bp, Homo sapiens
atatagaattacatatattaattagaatttttaacttttagtaaccttaatttctagtgaaacctaggaagtaagcaattttgaactatcatatgccaacrttttataacaacacaagatgacaaagtatctatactttaatcatttttagcaattaatgggtcagtattctaacttacttggaaatggctgacatttcag

SEQ ID NO: 277076 - DNA, 201 bp, Homo sapiens
cctgtcctcaggtgatccgccagcttcagcctcccaaagtgctgggattatagatgtgagccaccgcacctgcctgttcctgatttttaaaatgatgaatrgagaaaccatttcttaatcagatcgttagccacagtatctagcacacttagtcacttaatataaaagtattgaattgaaaagttattttcatctgagatc

SEQ ID NO: 277077 - DNA, 201 bp, Homo sapiens
ggtcagaagacacactgttttattgaactagccttatttaccaaagatttacctgtcacatgaactgaaaggtatttgagttagtctcttagcctgttttyttttgctataacaaaataccaaagacttggtaatttgtaaagaaaagtggtttatttagctcattattctagaggctggaaagtccaagacggggcagcc

SEQ ID NO: 277078 - DNA, 201 bp, Homo sapiens
tcagtatgtgtaagatgggtatagtcgtttacaaaaattcccaaatcagaattttgtgacctcttctagaacatgtgattagcctggcccagcatgactcyttcccaagcagggccaaacagatggaagctggaagcaccattttcaccctaaagggatcaagacaaggcccagcaaactgaactagcaatatctaattgt

SEQ ID NO: 277079 - DNA, 201 bp, Homo sapiens
agtgtttattctgtgacatttaagcagttctttgctaagtgtcacatactgtcgctatgggtggggccaccacgttgccagctctgggggcgccattcttsttagggattgtgtgaatagtatgccctggagttgtgtactgcacctgtgctgccactgtctcatgcagtggtccatctctggggtttggtttgcatgccc

SEQ ID NO: 277080 - DNA, 201 bp, Homo sapiens
tctggaactgttataacactgcctattttgatatgtggccaaaaccactctactttcagattgtgtgaacactgttgtaatactcaataagcaattagtgrtgaaaaccccgattgtggtaatattagtgcctgatttgtttaatttaattaagcatttaatttccttctggtgtctttataaaagaaaaacagggccggg

SEQ ID NO: 277081 - DNA, 201 bp, Homo sapiens
ccatttttgttttaatatcaaaataatgttttgcattacttactttggacataattaatgttcctgaagaaggaatagtgtttattctgtgacatttaagyagttctttgctaagtgtcacatactgtcgctatgggtggggccaccacgttgccagctctgggggcgccattcttcttagggattgtgtgaatagtatgc

SEQ ID NO: 277082 - DNA, 201 bp, Homo sapiens
ggaactgttataacactgcctattttgatatgtggccaaaaccactctactttcagattgtgtgaacactgttgtaatactcaataagcaattagtggtgmaaaccccgattgtggtaatattagtgcctgatttgtttaatttaattaagcatttaatttccttctggtgtctttataaaagaaaaacagggccgggcgc

SEQ ID NO: 277083 - DNA, 201 bp, Homo sapiens
tatctggtttgtatttaaaggattcataattcaagattagtgtcatttacaaataactttctttccagatggcaaggtggatttaaataatttctatgcawattgacttggcttaatgccagatggataatagcagaactcaacaaaatatgaacagctaatattattattgatcttactggagtcagtttttacagtgtg

SEQ ID NO: 277084 - DNA, 201 bp, Homo sapiens
catttgcatatttttacaagaacattattggtatgtacatcaccactttgtatcttgcttctactttattcttctacagcatgaatttataagttgcatcsttttccattgttactgtatatctggtttgtatttaaaggattcataattcaagattagtgtcatttacaaataactttctttccagatggcaaggtggat

SEQ ID NO: 277085 - DNA, 201 bp, Homo sapiens
atgccctaacttgtcagcctccaacagtggccgaactggtcagcttccaatggtgcattaactggtcgtactccaacagtgtcttaactagtcggcctccracagtattgtaactactcagctttctacagaaaaaaatgacactgtattgactcaatcttacactagaagggaacaaaataaacaatttttaacagatca

SEQ ID NO: 277086 - DNA, 201 bp, Homo sapiens; identical to SEQ ID NO: 264015

SEQ ID NO: 277087 - DNA, 201 bp, Homo sapiens
tgcttcacattcatttcttatattaaagtaagcctcaatagaagtgttccttaattcaacccagaatatctctgtgctttagacatgccctggaatcatasaaattcctgaaatttattttcaaatattcattggtttgattgtaattgttgaacttgttaatcacctctaaggaactaggttttaaaagatgggtaatca

SEQ ID NO: 277088 - DNA, 201 bp, Homo sapiens
aaaaaaagaaaaacagaagggaggaaaaataatctcagattattaactactttaagcttttcacctactacctcttgggctatagcaaatcaataatcttktaaaagcaaaacgcaaaataaagtaaaataaaaattaaatgtaaactttcaaaaggcaataaaaatataatttcttttaaagcatgtattagtttcacca

SEQ ID NO: 277089 - DNA, 201 bp, Homo sapiens
gagtcactctggtttgtggaatttttacatgagttccaggacaaggatgagatgatatatttattttactttgtatcctctttaaatgttttttgaatgcrtgaatgtcaggcttgttgtcaaagtatttccatatttttattactttagaagtaactctgctctatttgtgtctcttaaactcttcactgacaattcaca

SEQ ID NO: 277090 - DNA, 201 bp, Homo sapiens
tataatagaagcagtagcattagtaatagaaacaaaaagtaactgtatatctgttctcatgatctctccctaagctcagtgaattttccatggacaaagargcagagatgtcaaaaggaaacagttgtgttttcctgggttcatagtagcccaacaagtcatggtaaatattgtgtttgctccttattttatgctgtagca

SEQ ID NO: 277091 - DNA, 201 bp, Homo sapiens; identical to SEQ ID NO: 264018

SEQ ID NO: 277092 - DNA, 201 bp, Homo sapiens
atacccactttaaaggtgagaaaactgaggctcagaatactaaataacctgaggacactggctaataagtagcagaactggaagcagcagaggtgatctgyagcagctgtgaccagagaagaaatctatgctgtgataaatagtatgaggagaaaaatggggcaaaaaatgcaagtataacattgttttaaaatgaaatgc

SEQ ID NO: 277093 - DNA, 201 bp, Homo sapiens; identical to SEQ ID NO: 55689

SEQ ID NO: 277094 - DNA, 201 bp, Homo sapiens
tcttggcccccttccaagccctggaagccatctggctattagaagaaataaagtgtcccttgttcaataggtctgttggtcagcctcatcattctgctgayggccctaccccaccatgactcttattcatttcatatgctcaggtagtgccttggttccattaactgggtttacatcttgaccccttttgttggtttccta

SEQ ID NO: 277095 - DNA, 201 bp, Homo sapiens
tgtgacaaccttagagagaggtcctgatagaaagagactactcttagaaagcttcggtcacctgtaaagacccagacctaccacttattagcaaggtgaasttggccaaaaaaacttttgatacaggtttgtcacctgtaagaaagggtgacactacttttatttattcaacaggcaattgttgtttagtgcctactacat

SEQ ID NO: 277096 - DNA, 201 bp, Homo sapiens
aagtatttccatatttttattactttagaagtaactctgctctatttgtgtctcttaaactcttcactgacaattcacactgtgtactcagcatgttgtakttttggaagaactacctgctttgcccagtgtgatgtgatctcttgttcccttgtcccctattcgagtcatctcattgtatgtctttactatcctaaaggt

SEQ ID NO: 277097 - DNA, 201 bp, Homo sapiens
gtgcatattctttaaggagccatagctcagaactgttcaccaggccccacaagcacattcacaacatttagaacgaagatgtgaaacattcaaaaggggcwttactgaaaataaacagcaaaagtcaattttggaaagggtcaactggaaaatattgccctgaaataaagagtattaaactaacagtgctataacaagtta

SEQ ID NO: 277098 - DNA, 201 bp, Homo sapiens
agagataagaagatgggagaaagtggatggggagctgatgataacttacatttgtgaaatggaattggagtttgataaataaaaaatactgattttattcraccaaagacattatactttttctgcttaattaactaatcatatgaactcatgccttgttaatgataatccattatgagatgcagttgaatttgctaaatc

SEQ ID NO: 277099 - DNA, 201 bp, Homo sapiens
cttggctaacagattggtgcatattctttaaggagccatagctcagaactgttcaccaggccccacaagcacattcacaacatttagaacgaagatgtgaracattcaaaaggggcattactgaaaataaacagcaaaagtcaattttggaaagggtcaactggaaaatattgccctgaaataaagagtattaaactaaca

SEQ ID NO: 277100 - DNA, 201 bp, Homo sapiens
atgttgctactgttcaactctctggagctagacaagtgtaggggtagaatgattctataattttaaagctcctgtaatgtgatgagttacaaagaaaccasgacaacttaagcaggcattgaaaacatagtggtgacattggtgatagcacagcttctagcacatggcagaactgtggttgactgagacatgtcagccaca

SEQ ID NO: 277101 - DNA, 201 bp, Homo sapiens
atatctgttagtacattcaataactgtctattatgtccaggctgaatgtttggtgctggggagatacagatgaattagacacttccactgcccctgaggaygtcacagtccagagagggaggcagatcagtgacagacacttgcagaacacgggggcagattttatgacagacctcagcccagtgccatggaagctcaaga

SEQ ID NO: 277102 - DNA, 201 bp, Homo sapiens
tagaaaccaaatgcaagttcagactgctgcaatttgtagcctctatccttccatttctccagaatgtctgagtccacatttttgttcaataaataaataayagtgaacataatctgttttggagagtactgtagctcctcacagtcactcgatttcattgtagatacctaaatttgttggttagtaacaatattgtgtagg

SEQ ID NO: 277103 - DNA, 201 bp, Homo sapiens
ggaaatgacctcatttttaagctttgtgccctccgtttactaatatggaaaccaaaatgctaaatatcttggttaatttttagcagtttccactagaaatraacccatatgtttggaaatccaagaaatcaatgggaaaaaatgaaatgggtatgtaacagtctgtgggaaatgtttcaagagatcttattcatgtaaaag

SEQ ID NO: 277104 - DNA, 201 bp, Homo sapiens
agagaagcaaatgtatgaacatatgacaaagggtgaatatttacaaaatcatttgccatgcttcagcctggaatcagaaggcagcttctcagaattaattrctatgcactctgcttatcctgactagggcctttcacaaccatctctaatgaaggctttaataacacacaaaaaagctaaggactaggaaggaaaaaaaaa

SEQ ID NO: 277105 - DNA, 201 bp, Homo sapiens; identical to SEQ ID NO: 264025

SEQ ID NO: 277106 - DNA, 201 bp, Homo sapiens
tgggatgcatccaataatgtagtctcttcctgtgcagctgatcttgaaagccttgaaaataaggaacaaaatgactagggagtgacttctattagatactrttagctgaaaatgagctttctgcagagattcttagactcattagagaaccattataagactaagaaggcagggctagatcccttgtaattcagatatgct

SEQ ID NO: 277107 - DNA, 201 bp, Homo sapiens
aaggaaaaagacagtaaatagggggcaatgacatttatgagaatctaatttcattatactctgcctcataggaagagaatctagatggtgttgaggttatygtactttgagtattactcaaaaccagatatgaagtaccttctgtgttatattcctaatggttattcctccaatgagtgttttacttaaaaattagttaat

SEQ ID NO: 277108 - DNA, 201 bp, Homo sapiens; identical to SEQ ID NO: 264026

SEQ ID NO: 277109 - DNA, 201 bp, Homo sapiens
aactgtatttacagaaagtcagtaaataatgttaattgtctaataatgttgtatctttagattttgagtattttttatgtttaatactttaaagaaaaatmagccgttagaggcctatcaaattttacatgactccaacttactttttagggaaaaaatgcaacttctctgtttgtttgtttttagagacagggtctcact

SEQ ID NO: 277110 - DNA, 201 bp, Homo sapiens
gatctataataaatctgcttgagagacaatggatcctagccagctctgccttggttcaaggaaaaagacagtaaatagggggcaatgacatttatgagaayctaatttcattatactctgcctcataggaagagaatctagatggtgttgaggttattgtactttgagtattactcaaaaccagatatgaagtaccttctg

SEQ ID NO: 277111 - DNA, 201 bp, Homo sapiens
ggagacagaagacacagctctgaaatataactagctggtggcttttaacaagaggttcagttgggcctcagtttgttcatctgtgaaaacaagggactggrtaattctctataaggccacttacatcccttaatattatacggttcccttgaggttaaaaacaaaatttgctacagataaaccataatggaaataatgtat

SEQ ID NO: 277112 - DNA, 201 bp, Homo sapiens
tgaggttgtaggggacactcttctagttgtaaaggctgtagaaaaggcctgagggcggatgcatattattgacaggccccctgtcattggggaggcacgtwtttatggagcccttacctgtgtcagggctctcagccaggagctgaccctcagctttaaaacaaggttaacaatatcactgacattccagctgtagcacat

SEQ ID NO: 277113 - DNA, 201 bp, Homo sapiens
aggtccctgtcagccttcaagaagtaggtgtatttcagggaggtttttaatcagttttagaattattctgcaatactaaactgcttgtttttctattgtcyacgtaggactatgcagtctccacagtgccagtggcagatgggttgcatttgaagagtttctgcagcatggctgggcctaacctgatcgcaattgggtcta

SEQ ID NO: 277114 - DNA, 201 bp, Homo sapiens
gatgcaggtcccgatatatggaagccctctataattttataatggtgctggcaagaaaaagaaagtgtggggaaataatctgacagtgtttacatgatctrtttttctaagagttatgcctatacattgtcaaacatattgaattaagtaacctgaattatttaaaatgtaggtaattcttaccaaaatttaatataagaa

SEQ ID NO: 277115 - DNA, 201 bp, Homo sapiens; identical to SEQ ID NO: 264027

SEQ ID NO: 277116 - DNA, 201 bp, Homo sapiens
ttgccaagagctccttggattagcaagtaaaacagtgctttgtcataggagtcaaaacagggatacagatgcatctcatcccacctggggacccagggaaktcttcttgaatagagtgatgacttcaacgagtctaaagaggattaggaattacccaagcagggatggggccacacacattccaggaaatgggaaaccatg

SEQ ID NO: 277117 - DNA, 201 bp, Homo sapiens; identical to SEQ ID NO: 264028

SEQ ID NO: 277118 - DNA, 201 bp, Homo sapiens
caagagctccttggattagcaagtaaaacagtgctttgtcataggagtcaaaacagggatacagatgcatctcatcccacctggggacccagggaagtctycttgaatagagtgatgacttcaacgagtctaaagaggattaggaattacccaagcagggatggggccacacacattccaggaaatgggaaaccatgcaca

SEQ ID NO: 277119 - DNA, 201 bp, Homo sapiens
ggtgatagcacagcttctagcacatggcagaactgtggttgactgagacatgtcagccacagacaggccaactttgagggccacatttatttcatagtatstagcagcagaaacagctgaaggaaagcagcttggctaacagattggtgcatattctttaaggagccatagctcagaactgttcaccaggccccacaagca

SEQ ID NO: 277120 - DNA, 201 bp, Homo sapiens
ccagggaagtcttcttgaatagagtgatgacttcaacgagtctaaagaggattaggaattacccaagcagggatggggccacacacattccaggaaatggraaaccatgcacagaagcccaagtaagagagaatagggatgagatcagaatgaggatggcaagtaggcagaggccacatcatgggggtggggtgttgggtg

SEQ ID NO: 277121 - DNA, 201 bp, Homo sapiens
tgtcataaaatcagccaagtgtactagcaagtggccacagtgaccaaagatgtgctgattaacaaagaagtttaaagtagcataaagaaataaaatgtggycttttgaatatgacctcagacaatatagtgattttgatgcatcagcaagttccaagccatctgtgccttgatgtgccaagacagcttcttgaacagcttc

SEQ ID NO: 277122 - DNA, 201 bp, Homo sapiens
taggaattacccaagcagggatggggccacacacattccaggaaatgggaaaccatgcacagaagcccaagtaagagagaatagggatgagatcagaatgmggatggcaagtaggcagaggccacatcatgggggtggggtgttgggtgggccatggtaaaacatgtggacttcattctgaggatactgggaagctactgg

SEQ ID NO: 277123 - DNA, 201 bp, Homo sapiens
tggagctgttgctacaaccatgaaaaagcaggaagggagccagagaaataaataccccaatctctgtcccctcttgtcctccagtctcctgtaagtatatyccattcaccaaaaccaacaaaaatgggatcgcaggtgatgaagtccatgaagatcagtcctccacagcttcaagcaagacagaaaatggtgaaacacggg

SEQ ID NO: 277124 - DNA, 201 bp, Homo sapiens
ctttgtcctaaaattagaatatagaagaggatcccaatatgtttttatttagaaatttttaagaccggatcattgagtacacaaaatgtctgttcgatccytttttgttggtagttttggctagttttagtagtcaacacatacagccaggcatggtggctcatgcctgtaatcccagcactttgggaggctgagacaggc

SEQ ID NO: 277125 - DNA, 201 bp, Homo sapiens
tccctggaatttttcatattagaaatcagtacacctatccactcaattgctcaagacaaaaatctaaaagtcaccctgggcccttcctttccttcaccccsacatccaatccaccaacttccgtccaccctccagaacacattccaaattcagcactttctttgtctccactgtcaccacacttgtgctcaccaccatttt

SEQ ID NO: 277126 - DNA, 201 bp, Homo sapiens; identical to SEQ ID NO: 264032

SEQ ID NO: 277127 - DNA, 201 bp, Homo sapiens
tactcacatccaaaaattatttaaggcctaaaccaagtccaatcatcttcaagcagctttcttccactcccacccaccatagagatagatctctctttccyttaccttcctgtagcactttgttatctatacctctcatgtgcacttaccccagctccaattctggatgtcttgttctcctagtgagattgtgagctcttc

SEQ ID NO: 277128 - DNA, 201 bp, Homo sapiens
agagagagtgtgtgaaggaggaactgttaaacacttataaaaccatcagatctcgtgagaactcactcattgtcacgagaaaagcatgggggaaaccaccyccatgatccaatcatctccctccctcaatgcttggagataacaggtccctcctttgatatgtgggacatggagattacaatttgagatgagatttggttg

SEQ ID NO: 277129 - DNA, 201 bp, Homo sapiens; identical to SEQ ID NO: 264033

SEQ ID NO: 277130 - DNA, 201 bp, Homo sapiens
actgctaaatttacccacattctttttgttcttagagctgtctcttagtttctccctgggtatttataaggatactgtattagtctattttcacactgctrtaaagatactacccaagactgggtaatttatacaggaaagagatttatttgattcacagttccgcatgactggggaggtctcaggcaatttgaaatcatg

SEQ ID NO: 277131 - DNA, 201 bp, Homo sapiens; identical to SEQ ID NO: 264034

SEQ ID NO: 277132 - DNA, 201 bp, Homo sapiens
tttccaccaaccaaccacagctctttgcatttttgcatatttcctttaagtcttaagaggtatacttaacaggcatacttaaaaaaaaatagttgcaatcytagttttttgtgtcttttaactgctaaatttacccacattctttttgttcttagagctgtctcttagtttctccctgggtatttataaggatactgtatt

SEQ ID NO: 277133 - DNA, 201 bp, Homo sapiens
atttttaatggttctatttgacttatctatactttctaatttctctacattaaatttgtgggatgggatatgttacctttttcacttcaagtccagggagmgtgggctttaaataaacctctcagagagattaaatatatttttgcagtttggaaacaccaaggataggtgtctgggagatacagaggattagcagctggt

SEQ ID NO: 277134 - DNA, 201 bp, Homo sapiens
taaggcatggagtaatagcccaaggtcacacaactagtaagtaagtggtagatcctatattcaaaatgaggcctcatttgttccaatatccatgagctcarctgctctcctataccatcttcctgccaggccgctctaactgcagagtaaacttgcatcagataagaggttatgccttgattaaggccttgtggtccaaac

SEQ ID NO: 277135 - DNA, 201 bp, Homo sapiens
gacgtggccgtggtgtgcgaggagacggccctcatcacccgacccggggcgccgagccggaggaaggaggtaactgccgactcgaggggcgcggccggggsgcgcgccaggccctcccccgccgccggccgccgtgttgcctggggagtcgcgccattggccctcgggctagtagttcacaacttcccgtcggggggcgag

SEQ ID NO: 277136 - DNA, 201 bp, Homo sapiens
taatagatgtattaatctacctgaaattcacaggacaggacatttgatgaatgttgactattattattcacttaactatggatcagggaagatttactcckttaataagaagtcagctatacactgatgtagttagtgacatctctctactatgtgatactgcctctgggtttgggtctcctgctggtgcctgcctttgca

SEQ ID NO: 277137 - DNA, 201 bp, Homo sapiens; identical to SEQ ID NO: 264038

SEQ ID NO: 277138 - DNA, 201 bp, Homo sapiens
ccgccttggtaggtgttaatgcttgttgagtgagtggatgaatgaatgaatgaatgaatgaaatgctaatacaagaagatagttacttcaagaccctctakggattgctgtatatttttttcatgtgatgtctgcattcccaactgtgaaaatccacagtagccaaggaattattttaaaattattgtcactgatctctgc

SEQ ID NO: 277139 - DNA, 201 bp, Homo sapiens
ttcaggattttttttttattgttttgactcttctacatggccttggcagtaacgtttggaaattgatgtgtcccagagactgggatgcatccaataatgtmgtctcttcctgtgcagctgatcttgaaagccttgaaaataaggaacaaaatgactagggagtgacttctattagatactgttagctgaaaatgagctttc

SEQ ID NO: 277140 - DNA, 201 bp, Homo sapiens
aggagcagtagcatcacatagaaaggaataaatcaccagactttagacttttgttgctaaatgtttagattatccaagcaactatgacaagaggaatcagyatgaaaaagtacaaagaaaagtacaaactaatacagggttggtttaattttgtccaacaaatcagtgtggacaagaacccgacttagtttaggttagcaa

SEQ ID NO: 277141 - DNA, 201 bp, Homo sapiens
ggcaagcgtttagtaccctgaatttggagagacctagactttcttctaaagctctaagatggatatagaatttaaaaattataagaaaataactgctgttygatgaaagaattttaaagttaagacatctgtttcctttatttgttttccattacatattttcagttaatatctaaatgggggataaactactcatcaggc

SEQ ID NO: 277142 - DNA, 201 bp, Homo sapiens
gggaggggaaaatttggtggcagcagcattccctgaatcccttgccaggggttgtacccagtaggaagcagtagcatccaggtgggggctgagacctacasagacactgggaggcatcaggatccaacatcaggatttgaccacagacactcttggggtagggaccgaaactcagcacacttactttaaccccagcatgtg

SEQ ID NO: 277143 - DNA, 201 bp, Homo sapiens
cttttatggtgctatctgtggaggagaaagcatatatgcagttcctagaacttccctacccttctttaccttccttttttaggggagctcctataacactrtgagtttgttcttttactctaggtctagatggtgattttcaaattttaagttcaactcgtaagtggatcgtaaaattactctagtaggtcactccagttt

SEQ ID NO: 277144 - DNA, 201 bp, Homo sapiens
caggaatcttgttaaaccgtaaacaaggggacttgggttctaatcctgcttctgcctctgtggcaggggagagtcatgccaacctactgggagttggtcayctgagctgtatgaccacaaatgtctcttgtgagttttacatttcatgattctgtgaactaaatatcctgtgctagtttcttttcatttaattctccagtc

SEQ ID NO: 277145 - DNA, 201 bp, Homo sapiens; identical to SEQ ID NO: 264040

SEQ ID NO: 277146 - DNA, 201 bp, Homo sapiens
accatttttagtttatcaggaatcttgttaaaccgtaaacaaggggacttgggttctaatcctgcttctgcctctgtggcaggggagagtcatgccaaccyactgggagttggtcacctgagctgtatgaccacaaatgtctcttgtgagttttacatttcatgattctgtgaactaaatatcctgtgctagtttcttttc

SEQ ID NO: 277147 - DNA, 201 bp, Homo sapiens; identical to SEQ ID NO: 264041

SEQ ID NO: 277148 - DNA, 201 bp, Homo sapiens
gaaataaggaatgaagtccaataagtcacttataaaatattcatgctgaaaactttattcatatgacatgttttatgctcacgttatatatacatttgccmagtgttcagctgtcagaaattagagatcaaatacaaaaattttgttacagtttgtactatatattttccaattctttaggtgggcagccttcaaatatta

SEQ ID NO: 277149 - DNA, 201 bp, Homo sapiens
tggcaacaaaagccaaaattgacaaatgggatctaattaaactaaagagcttctgcatgacaaaagaaactaccatcacagtgaacaggcagcctacagamtgggagaaaatttttgcaatctacccatctgacaaagggctaatatccagaatctacaaagaacttaaacaaatttacaagaaaaaaatcaaccccatca

SEQ ID NO: 277150 - DNA, 201 bp, Homo sapiens
ttagtatctgtgggcctggcctaagacatatttttgcatttaaagcgcattaggaaatttagaaatggtaaaggtaaaaagctttttgaaatttgcctttkgaaatatttttaatttagaattttagctgtgcctcattatctctacctgtcactataagttttctgtagagtttcagataaatgtacagtgtcttctctg

SEQ ID NO: 277151 - DNA, 201 bp, Homo sapiens
ccataatggaaataatgtattcacttgtaatggagcaatagattaagtgctattttagtatctgtgggcctggcctaagacatatttttgcatttaaagcrcattaggaaatttagaaatggtaaaggtaaaaagctttttgaaatttgcctttggaaatatttttaatttagaattttagctgtgcctcattatctctac

SEQ ID NO: 277152 - DNA, 201 bp, Homo sapiens
ggtgattaaagaggacagtgatgacattaactgagttggaaagtaaggatgccagcaggtttgggaaatagataagttcagttcagagtacagtgaatatraggtcaacaaatgccttggaaaagaagagaacagtgaacagtagtataatggtgaagagtggtgtgtggtgtggctctgcaggctgactctttcacaagt

SEQ ID NO: 277153 - DNA, 201 bp, Homo sapiens
acataacagaatttataagtttttaaattatctactaaacattacttaatgtcatacggcctggttcatcatctgttaaataggaagaataataccaactkcacaaaattgtataaggcttcaaggagaagattgagaaagaaaaagaaaacttcatacacttaaaagaaaaatgtaacagacaatgttaggtaagcttgg

SEQ ID NO: 277154 - DNA, 201 bp, Homo sapiens
ggacatgaccttctctggaatgggggtcttatgatctacaaacaaggtatgtcagataatttctttatggcctgttttcacagaaatagggcagaaggaawgttggagtaatatttttaggttttatgtctggctttggagaaaaaggcattttggtttctatgacccgccctggggaagagggattctagtttctgaggc

SEQ ID NO: 277155 - DNA, 201 bp, Homo sapiens
tggtttctatgacccgccctggggaagagggattctagtttctgaggctagcctcagtggggcatgggactgagggacaggagggcaggagaaggtcagasaacaaacctacacctctgaggctgcttctgaggccttcattttggggcattgttttctgagccccaacagaggaacacagaaagagctacagaaattcag

SEQ ID NO: 277156 - DNA, 201 bp, Homo sapiens; identical to SEQ ID NO: 55697

SEQ ID NO: 277157 - DNA, 201 bp, Homo sapiens; identical to SEQ ID NO: 55700

SEQ ID NO: 277158 - DNA, 201 bp, Homo sapiens
tactgagctctcattttgtgacactgttataagtgttacgtatgtattcatcaatttaattcttgcaacaatcctatgagagaggcactgaaattatccckgttagtaatgaacgtaatgtgaggtccaccaggacaggatattttaaaatctgttttgtaaatgtatatccccggtagctagactagtgcttatcacaaa

SEQ ID NO: 277159 - DNA, 201 bp, Homo sapiens; identical to SEQ ID NO: 55701

SEQ ID NO: 277160 - DNA, 201 bp, Homo sapiens
agatttgaactcagacagcttattcaagaattcttttaagaccacaagctatccttgttttaaaaatgaaacaaaataacctaccagccaaaactaaataygtgtgttttggagggaaattttaaactaccttggaaaaacgtaataacttctcttatcctcggatttaagttcttgcaaagaaacatttacttgatgtaa

SEQ ID NO: 277161 - DNA, 201 bp, Homo sapiens; identical to SEQ ID NO: 55702

SEQ ID NO: 277162 - DNA, 201 bp, Homo sapiens; identical to SEQ ID NO: 55688

SEQ ID NO: 277163 - DNA, 201 bp, Homo sapiens
aataaaaaataaaaattagccagggatagtggtgtgtatctgttgtttgtcccaggtacttaggaggctgaggtgggaggatcacttgagcctgggaagtygaggctgcagtgagccatggtcgcgccactgtacaccaacctggacgacagagcaagaccctgtctccaaaaatatataaataaataaaaataaagtgtg

SEQ ID NO: 277164 - DNA, 201 bp, Homo sapiens
tatctcttcctatgtgtttatatttgcttcctttttttacactgatacattagaaaggaaagccaaaggtcattttctctttattgtataacttttttatkattatagaactaataaatatatactcattggagagaatttggaaaattaaaaaaaattaaatttaataacacagcacttagaaatttcattaaggtggta

SEQ ID NO: 277165 - DNA, 201 bp, Homo sapiens
ttaaaatttaaaaacaatacatttacagtagcaccaaaaaagcaagaagggagggagggaggaagcaaggggggaaaaggaagggaaggaggaaaaatgcmtacatataaatctgacaaaataagtacaagatctatgtggaaaaccataaaacttggatgaaagaaatccagttccttgttaatgaattggaagactcaa

SEQ ID NO: 277166 - DNA, 201 bp, Homo sapiens
tcagccttcaagaagtaggtgtatttcagggaggtttttaatcagttttagaattattctgcaatactaaactgcttgtttttctattgtccacgtaggaytatgcagtctccacagtgccagtggcagatgggttgcatttgaagagtttctgcagcatggctgggcctaacctgatcgcaattgggtctagtgaatctg

SEQ ID NO: 277167 - DNA, 201 bp, Homo sapiens
atcaatgatcaatacaaaagcatgaaagtatttctattaaaaatcatcacaagtttcttccagaggttaaaaataaagttaaaataaagggaaaaaaaaawtttttaaattatcacaagaatattagccaccatgcctggcctaatattctgttaaggagaccttttttcacctttatttttagtattgttcttgaattta

SEQ ID NO: 277168 - DNA, 201 bp, Homo sapiens
cagtctggacaacatagtgaaactccatctctacacacacacacacacacacacaaaattagccgggcattgtggcacacgccagtagtcccagctactcrggaggctgaggcacgagaattgcttgaacccaggaggcagaggttgcagtgagatgagattgtgccactgtattccaacctgggcaacagagagagagaa

SEQ ID NO: 277169 - DNA, 201 bp, Homo sapiens
tcaatttttttccagcttaagaatttagtacaagttttatgcatgttgtttgcctagttgttggattgacgataatacctgtaaaattccttacaatttastgtattaattagccttcctcagaaaatcctgaggatgtttccagactgtgtgccgcttgtacgttattgcagttgtcgttgttttgcattaaggacagga

SEQ ID NO: 277170 - DNA, 201 bp, Homo sapiens
ggtatgcttgtaactgaaaaccagtagtgaagagataatctgaaaagcagtcagaggaaaaatactcattgtatataaaggaacaaagactaggatgacarcggaattcccattagaaacaatgcaggcgtaaaggcataagaatgatataatggacttggggactctgggggaaggttgggaggggggtgaaggataaaa

SEQ ID NO: 277171 - DNA, 201 bp, Homo sapiens
tagggtattgttttgtttattttgttttgtgggagttagtccaggtcttgatcagttcatgcccctaatttgctttcaccatgctatgccttcaagatgcygaaataccagaattaaaagtagaaagttcctgttgatttttagatgccttaaatattaaacatttaaattaactaatggaaggtgaagtagataaaccaa

SEQ ID NO: 277172 - DNA, 201 bp, Homo sapiens; identical to SEQ ID NO: 264045

SEQ ID NO: 277173 - DNA, 201 bp, Homo sapiens
cataccttcctcactaagcttcataatttctagcttctgatttaaagtgagaaatgtacaattcctcctttcacttgaacacttggaggccatggtaggayattaattggcctaatttcaatattgctatgtctccaggaataggtagacccccaggagagggagtgacggaaacaaaccagtcaatggagtagtcagaac

SEQ ID NO: 277174 - DNA, 201 bp, Homo sapiens; identical to SEQ ID NO: 264046

SEQ ID NO: 277175 - DNA, 201 bp, Homo sapiens
aactcctcatccattcaagttttatcatgagattgcagcaattcagtcatatcttcaggctgcacttctaattctagttctcttgctatttctaccacatytgcagttactttgtctactgaagtcttaaaccattcaaagttggaatcaggttcttccaaacttctgttaatgtagatactttgacctcctcccatgaat

SEQ ID NO: 277176 - DNA, 201 bp, Homo sapiens; identical to SEQ ID NO: 264047

SEQ ID NO: 277177 - DNA, 201 bp, Homo sapiens
aaggagagacctcacaatacacagggctttgagtagagcctcagaagagccttgccttagcagtgaggggaaatcactacttaataccagaaactttacayatcatgatcaaatacaggaatacctcagagatagtacaggttccattcagattattacaataaaagcaaataccacaataaagggagtcacaattttttt

SEQ ID NO: 277178 - DNA, 201 bp, Homo sapiens
taaaaacgactagaatttattttcctatgataagtagtaaaaaagatgcttctgtttttcgttagaagttgaggtcttctagaatcgtcaacttggattaygcattcttttgctcttatcactgaattacattagcataactgtaacagaaattgttgatattttactaatggtgagcccactagcatggtgggctctaaa

SEQ ID NO: 277179 - DNA, 201 bp, Homo sapiens
caaatagggtgaggacactgaggcaggactgggcttgacttaacatagaaagatatgcgaccacatatttctttctatcttttgacttcagatataaaaaygactagaatttattttcctatgataagtagtaaaaaagatgcttctgtttttcgttagaagttgaggtcttctagaatcgtcaacttggattacgcattc

SEQ ID NO: 277180 - DNA, 201 bp, Homo sapiens; identical to SEQ ID NO: 264048

SEQ ID NO: 277181 - DNA, 201 bp, Homo sapiens
tagtcacccaagtctatgccccagctctgattaaatgtactttcccaccctcagatactcattaagcataaagacctacaattagatggtcaacggtatcrctgttttctgacagatctgagctgtccctcagaaaagggcagcttttctttttatttctttttatttttattattttattattattattattattattat

SEQ ID NO: 277182 - DNA, 201 bp, Homo sapiens
atgacaatggtggcagcctgacctcaggacacatgctagtgtgaagcagcccttctactgtgggaacagggttttatttcattgacagtggccccaggaartcaggtttcatgctctgggaaacacatgcttcagctccctttgtcccaggatcaccctccccagtgtgcagtacaatgtgtgggctagagttctggagac

SEQ ID NO: 277183 - DNA, 201 bp, Homo sapiens
cctcaaaattatctgtagggcttcaaaatgcaaaattcctatgcctcacccaaaatctgccaaaccagctttccctaagggtgaggcctgggaatatgatkttcttattctccccaggtggcttttatgctcattgtattaaggccatcacctgccaatgaacaggtgaattcagtttaaaagtatgtggaagagcaaagc

SEQ ID NO: 277184 - DNA, 201 bp, Homo sapiens
agtgtgaagcagcccttctactgtgggaacagggttttatttcattgacagtggccccaggaagtcaggtttcatgctctgggaaacacatgcttcagctycctttgtcccaggatcaccctccccagtgtgcagtacaatgtgtgggctagagttctggagaccctgccactctactgtgtccaacctgcattgcaccct

SEQ ID NO: 277185 - DNA, 201 bp, Homo sapiens
cagtgcagtttcttcatctgtaaaatagaagtttgagattagataataaatgtaaaatgtttggcatggtgccctgctagttcttattgtaatataattayctatttttctgtcagtttcctccactaaactgtaatcttggaaaactgggtctgtgacctgttcatctgtatgtctcagcctttcatacagtgcataagc

SEQ ID NO: 277186 - DNA, 201 bp, Homo sapiens
aaagagggaagtgaaccgacttttattacacatttaatatctgctagaagcttgtgctaagcattttatgtacattatctgttttggggttttttttaaawaatcttcagagttaccctgtggaggataggtatagcattcccatcccattttactgctgagggaattgaggctcacagggcatatgtgactttcccaaag

SEQ ID NO: 277187 - DNA, 201 bp, Homo sapiens
aattgcttagaaaagtaagtcaatgtgagtaatagattttctagattttgttttgtttgtgtctaggttgaccaggtagcagtggttgtgtatacatgttstaaggatctctctgaggtcctcaaaccactggggtcctacttagtaaacctctggctcagagaactgcctccccagttgtctggaagaaattctgaactt

SEQ ID NO: 277188 - DNA, 201 bp, Homo sapiens
cttggagattttagtttgtttcctcactggtaaacaagaagtcagcactgataacaatccctgagaacacttcctctggaatgtatgacattccatgcttytgctttgtagtcacctccggacatgcatgagtcacactgagaggtggggaatttgcccagaccgctagatccagtgaataaagtcaggcctaagagatgt

SEQ ID NO: 277189 - DNA, 201 bp, Homo sapiens
gcttaacataatttgttgttaaggagttgcaaattaaaatgagatatcactacccacctattcaaatggctaaaattttaaaaaactgacaatatcaatcrcttggcaaggatacagaacaataggtactctttttattgctagtaagaacagccattttggtagtttctttcaaagctaaacatgatcttaccatacaat

SEQ ID NO: 277190 - DNA, 201 bp, Homo sapiens
gaggattgttcactcaaggaggtgaggttgggggatagggcagagcatggaaacagctgaagtcaactggacaggccctgtcacttcagtgacacgtggtrctttctgagatgggcacaaccttggagattttagtttgtttcctcactggtaaacaagaagtcagcactgataacaatccctgagaacacttcctctgga

SEQ ID NO: 277191 - DNA, 201 bp, Homo sapiens
tccaggctaccaaggtctcagatggaaatgagcttattgggaactggagtaaaggtcacttttgttataccttagcaaagaccttggctgcattgtgtccrtgccctagggatctatggaagtttgaactttagagtgatgacctagggtatctatctggcagaagaaatttctaagcagcaaagtgctccagatgtgccc

SEQ ID NO: 277192 - DNA, 201 bp, Homo sapiens
tatttgaaatggtgctcatcttttaacaaagcctctgtgcatccacaaaggggaaacagaacctgttccttggcctcactgttgctcagtcctcaggagcytgagctctttgaggtgataccctaccagacaggatgtgttaacacatcctcacagtgcccattagggtgtaaaaagggaaagatgttcaagagcaacaca

SEQ ID NO: 277193 - DNA, 201 bp, Homo sapiens
cccacctcacactgccattgtgctgagcccgaagggggcgtaccataaaagattgttgaacagagctgaccaccaattgatctaatccccataataaccaytcaaattagtttccataaagtggaatcattcctttggcaaaattcagaaagggcattcggaacagcaacttgacttctcagatctttcccccaaatcctg

SEQ ID NO: 277194 - DNA, 201 bp, Homo sapiens
acagtggggaaaagtcctcaaaggcatttcagagaccttcatggcagcccctcccatcacaggccctgaggcctaggaggcttccctcctaggtttcctgrgacagacccagggagtgtgctgccctgcacagcctcgggacactgctccctgcatcccagtcgaaccccatctagccatagctcagaggagcccaggtcg

SEQ ID NO: 277195 - DNA, 201 bp, Homo sapiens
acttcatctggtagttaatgtgacatgacagctcacatgaaaatgaactgcaaataaatgcttaattttaaaagatactgtatgatctcaataattgaaayattgaaggcttcttaacagagcataagtaaatgtttcaataaaaaaaagggatactcttttctacagacagccaacgacaatagactggatgactgtgat

SEQ ID NO: 277196 - DNA, 201 bp, Homo sapiens
cttgttaatgaattggaagactcaaattgttaagatgttaattattctcttcttcacctatagatttgatttattcccaattaaaattctagcaaaagctktcctgtagataatggcaaactgattctaaagcatatatggaaaggtgagaaacctagaatagctaacataatactgaagaagaatgagtggaagactcac

SEQ ID NO: 277197 - DNA, 201 bp, Homo sapiens
agcttgacaatgaattgcctatttttagttttcaaatcagggtatttttcaattatcttgcagttgattttctaaattcactcttcaattcatgagagaartggcttttatagggcaaatacatactatttgggcattagagaggacagagattattttattctttttgtattgaataattttgcaggaagctgctgctga

SEQ ID NO: 277198 - DNA, 201 bp, Homo sapiens
ttagagaggacagagattattttattctttttgtattgaataattttgcaggaagctgctgctgattacaaggagagttatatgtattaagattgataaasagaaatatttttaaggcttttagatttccctataaggagataggatttacattccaactttgattttcttcaaagggatcctgtttgcttaaattctcag

SEQ ID NO: 277199 - DNA, 201 bp, Homo sapiens
ctgatccagccctgccaggaggtggctgtccttcaccagcgccaactcctggctgcacgctgtgcttcacagagccttccagcccagccagcttggctgtyggggtctcagatttcaactcaaggtgccagcagagtcccttcactaaaatcatattttttcacctgataatttgatcattttacagttggtgggtttcat

SEQ ID NO: 277200 - DNA, 201 bp, Homo sapiens
ttggtgtagaagacagaaggacagcacagcatggtagtgaacacagcatcagtcccctcatcagggtcaaaatttactttgtcaagcaaatgagcatcctrattaaggcaggcctgttacctttctaattgtttctctagttatgtgaattcctctgtttgacctacttgaccttaacacttgtcgtttgttttttaaata

SEQ ID NO: 277201 - DNA, 201 bp, Homo sapiens
ctctaagctacttactgcaattgttccaaatgtttaatttattaattccaggcaattcataacaatttattgctatttcttagactcctgcctcactgtcwactgttattggtctgtttcatggatgacagtggttaaatgttttcatatgcactgcagtgttttttgtgatgctgtgataacttgtgggctagactaaga

SEQ ID NO: 277202 - DNA, 201 bp, Homo sapiens; identical to SEQ ID NO: 264050

SEQ ID NO: 277203 - DNA, 201 bp, Homo sapiens
atcacagtgccctcctgaggttctctgtagcgtttaaaaaggtgaaaggaatgaagaaatgaaccagttagtgcaaacatattttggtcacctgctatatktcaagtgacttgcaagaaacaaagagggaagtgaaccgacttttattacacatttaatatctgctagaagcttgtgctaagcattttatgtacattatct

SEQ ID NO: 277204 - DNA, 201 bp, Homo sapiens; identical to SEQ ID NO: 264051

SEQ ID NO: 277205 - DNA, 201 bp, Homo sapiens; identical to SEQ ID NO: 264052

SEQ ID NO: 277206 - DNA, 201 bp, Homo sapiens
tttcccacctcacactgccattgtgctgagcccgaagggggcgtaccataaaagattgttgaacagagctgaccaccaattgatctaatccccataataaycactcaaattagtttccataaagtggaatcattcctttggcaaaattcagaaagggcattcggaacagcaacttgacttctcagatctttcccccaaatc

SEQ ID NO: 277207 - DNA, 201 bp, Homo sapiens
ttaaggagttgcctatgataaaagtgaggttgactgtctttttactgctagcatactcttcatgtgcttgtcctgccttaaatgatagattttcatctccygaaggcatctctttccctttcccacctcacactgccattgtgctgagcccgaagggggcgtaccataaaagattgttgaacagagctgaccaccaattga

SEQ ID NO: 277208 - DNA, 201 bp, Homo sapiens
ttctattgtccacgtaggactatgcagtctccacagtgccagtggcagatgggttgcatttgaagagtttctgcagcatggctgggcctaacctgatcgcrattgggtctagtgaatctgcacagaaggcccttaaggtaaatacaaaactgtgctccttctaaatgtagtgggggtgcctgccacagggtttttcacatt

SEQ ID NO: 277209 - DNA, 201 bp, Homo sapiens
gtgccttcttcgttaaggagttgcctatgataaaagtgaggttgactgtctttttactgctagcatactcttcatgtgcttgtcctgccttaaatgatagmttttcatctcccgaaggcatctctttccctttcccacctcacactgccattgtgctgagcccgaagggggcgtaccataaaagattgttgaacagagctg

SEQ ID NO: 277210 - DNA, 201 bp, Homo sapiens
ctgtggaaagactataaaacatgaaaatatgctatcagttttagaatgttatccatagctatattggctcagccttaaaaagacctccagggcttgatgcyggtatgttgtcaggctctcaatacactcttgatggatggataaataaataaatgattttagatatgcagtagcaatgaagagtgtacttgggcatcatat

SEQ ID NO: 277211 - DNA, 201 bp, Homo sapiens
agttgttagtggagattatgctgaggttttcctggggataggacgccaggtgggccagtcctcaggccctgctgttggcagcggcagaccaagcatgcctrttcttgggtcccggggtggcatatgtgggcgccagtgttagcaagtccagacgggctgattttggggcctccaggcagctttcttgggtgctggttatgg

SEQ ID NO: 277212 - DNA, 201 bp, Homo sapiens
cctccgggtccctcccccaacattgggaattacaattcaacatgagatttgggtggggacacagagccaaaccatatcagatgtttttctcttgctgtttytagaattatttgtctttgactttttacactgtattagtccgttttcatactgctttaaagaactgtctaagactgggtaatttataaaggaaagaggttt

SEQ ID NO: 277213 - DNA, 201 bp, Homo sapiens; identical to SEQ ID NO: 264057

SEQ ID NO: 277214 - DNA, 201 bp, Homo sapiens
gggcctaattttgattttttaacatttgttgatacttgtttggggcctaatatctatcctgaagaatgttcttgatgtgctaataagaagaatgtgtattstgcagctattggatgaaatgttccatatatttttggtacatttggtctaaagtgcagtttaaatctaacgtgtctttgttcactttctgtcttttgctga

SEQ ID NO: 277215 - DNA, 201 bp, Homo sapiens; identical to SEQ ID NO: 264059

SEQ ID NO: 277216 - DNA, 201 bp, Homo sapiens; identical to SEQ ID NO: 264060

SEQ ID NO: 277217 - DNA, 201 bp, Homo sapiens
ttgggggagaagtttgtctggtcccatccctgaagcttgttagagagaatttgagaaagatctctggagagcaaccaaagctgatgaaagatggaagttcrgtgactggtgtggattgcacagaaggataatgcaaaagtgtggactggcagctcttttctcttcattgaaggcaggctctgagtgagtgtgtcttttaaa

SEQ ID NO: 277218 - DNA, 201 bp, Homo sapiens
gattaccaatgagcttgggtatcttttcatatgtttatgggccatttgtgtttttgttcattcatcaaatgttgtttgagtacatcccatctgccaggcastctttgagtctctcctccactttcaaagaacaataaaatagaaggaataacctagaaacaactccacacatatgtacagggccataactcagacaaagag

SEQ ID NO: 277219 - DNA, 201 bp, Homo sapiens; identical to SEQ ID NO: 264062

SEQ ID NO: 277220 - DNA, 201 bp, Homo sapiens
gaccaagtttaaacctgtgaccacatactcagaggtgactcatcgttatagggttccaaaaacaacaacaatgaaaaacaattaggagctaaatgaaaagygctgaatctattagagtttttgtatgttttctaatcacttatttcttttttacccacaccctggcaaacgataagaactccataaagttcggctactacc

SEQ ID NO: 277221 - DNA, 201 bp, Homo sapiens
acatgttaagcatacaataaatgtcatctgttattattttagtaggaaacacattttcatatgttgttttaaacaatatctaaaatctgtagagaattagkcaacattcaatagatataaccacttctgtttttgcatttgatatgagttactgtagctacccaaagacttaagaaattcatacattcagttactgttttt

SEQ ID NO: 277222 - DNA, 201 bp, Homo sapiens; identical to SEQ ID NO: 55694

SEQ ID NO: 277223 - DNA, 201 bp, Homo sapiens
tggtgttagatttgtgcattttattttcctgaccacctcattccagccaatgtatggttatccactctgtgtgccaaaaccaatcatgcctttcacggccmtttagttcagagaagttctgcactgatttttagtctcttgatgtctcaatcttacatgtataccaatcacaatggaataaagtgttgagttgtactgtga

SEQ ID NO: 277224 - DNA, 201 bp, Homo sapiens; identical to SEQ ID NO: 264066

SEQ ID NO: 277225 - DNA, 201 bp, Homo sapiens; identical to SEQ ID NO: 264067

SEQ ID NO: 277226 - DNA, 201 bp, Homo sapiens
attcatttcttcatgctctaggactgccaaacaggaggtcacagtctagggagaggcacagaaggacatgggcctaaagagggagtacattctacatagcsctttcacaactttctaactctgcaaagttaccacgtgtttcctgaggttcttttagaaatcccttttattgtatttaggagttaacaaaatatttaactg

SEQ ID NO: 277227 - DNA, 201 bp, Homo sapiens
cacttttccaagcatggaattggttctccttttatgagctcctaaaacgctataaacttccttttatatatatcataccacgtgataattgcctgtttacygttctgtatctcccactattatgtaacctgtcagggctaggatcatgtctgtattggtcaacattttgtcaccaaggccttgtatacaataggcatgtag

SEQ ID NO: 277228 - DNA, 201 bp, Homo sapiens; identical to SEQ ID NO: 264071

SEQ ID NO: 277229 - DNA, 201 bp, Homo sapiens; identical to SEQ ID NO: 264072

SEQ ID NO: 277230 - DNA, 201 bp, Homo sapiens; identical to SEQ ID NO: 264075

SEQ ID NO: 277231 - DNA, 201 bp, Homo sapiens
tagagaattagtcaacattcaatagatataaccacttctgtttttgcatttgatatgagttactgtagctacccaaagacttaagaaattcatacattcasttactgtttttgtcttcttctgaagtatgttggaaaagatgaaagatgaactctataatttctttactcatcctcactctgcagtctcttagaaaggtta

SEQ ID NO: 277232 - DNA, 201 bp, Homo sapiens
caaagtgctgggattacaggcctgagccactgtgctcagctaatctataatttcataatctctgttgatatatacataaggagaattgttatgattacaaytggctttggatcttcccaattaacttgcagtccaacaactcaagtagggctgaggactagtatagcaatgagttatgactgataacttaagatttgacaa

SEQ ID NO: 277233 - DNA, 201 bp, Homo sapiens; identical to SEQ ID NO: 264077

SEQ ID NO: 277234 - DNA, 201 bp, Homo sapiens
aagtttggtctagactatcagttactgtgggaatggaaaggaggggtgaagttggaaggtctttaagagttagactgttacccccatgagggcaggaaccrtgtgtgttctattcagctttgacccataaagctctctactcctctgctccaagtgacaaggcccctttctggcaagatccccatcatattcgtcttacta

SEQ ID NO: 277235 - DNA, 201 bp, Homo sapiens; identical to SEQ ID NO: 264078

SEQ ID NO: 277236 - DNA, 201 bp, Homo sapiens
agctgagggcctgcttaaccatgtacctgttagcctgtggaaaaagaaaaatgggagatgaagaggccacactttcaaggagttccggtgtggtgatgttyaatcttgctatcttgagcctttattcatttcttcatgctctaggactgccaaacaggaggtcacagtctagggagaggcacagaaggacatgggcctaaa

SEQ ID NO: 277237 - DNA, 201 bp, Homo sapiens
ttgacccataaagctctctactcctctgctccaagtgacaaggcccctttctggcaagatccccatcatattcgtcttactacttggattttagcatccartgtaacaagcccattcattgcctctggtgctattggatacatataattgtcaagagtgaagtaagttaaaaaaaataggctaaatttcttcactcatttg

SEQ ID NO: 277238 - DNA, 201 bp, Homo sapiens
taagggatgtggtgttctttcatcattccaggcacgatggaatctactgaaaaaagctgaccattccaggaaaggtggaatctactggaaattggtcagamacaatacacacgaaaataaaatagatttgatgatatttagaagcatgcataatgacagaagttgcattatctctgttctagtgttgcttagacatctcag

SEQ ID NO: 277239 - DNA, 201 bp, Homo sapiens
tgtgcaggaagcctaagttttagtgaaggaaactgtatttacagaaagtcagtaaataatgttaattgtctaataatgttgtatctttagattttgagtattttttatgtttaatactttaaagaaaaatcagccgttagaggcctatcaaattttacatgactccaacttactttttagggaaaaaatgcaacttctctg

SEQ ID NO: 277240 - DNA, 201 bp, Homo sapiens
agatttaaattgaataggaaaccattatttttagtgcttaaaagcacggtggtgtccccttagaaacctccaattagtagcagccattgtctaattaggtraaaataataatctatcgattgttataaaagcaagatattataattcaagtgtgtttccagatgccagtgaattgctggaaagctgcaagtttaactttcc

SEQ ID NO: 277241 - DNA, 201 bp, Homo sapiens
ttgatcagttcatgcccctaatttgctttcaccatgctatgccttcaagatgctgaaataccagaattaaaagtagaaagttcctgttgatttttagatgycttaaatattaaacatttaaattaactaatggaaggtgaagtagataaaccaaatcatcaagtaaactgagattcatttctgtttcgttctgcagtaagt

SEQ ID NO: 277242 - DNA, 201 bp, Homo sapiens
ctgtaaaattccttacaatttagtgtattaattagccttcctcagaaaatcctgaggatgtttccagactgtgtgccgcttgtacgttattgcagttgtcrttgttttgcattaaggacaggaatctctacagatggcaaccacatacttgatgcattttccagaaatcactgaagagaggtagatttcatgtgcgaaggt

SEQ ID NO: 277243 - DNA, 201 bp, Homo sapiens; identical to SEQ ID NO: 264079

SEQ ID NO: 277244 - DNA, 201 bp, Homo sapiens; identical to SEQ ID NO: 264080

SEQ ID NO: 277245 - DNA, 201 bp, Homo sapiens
ggaaaaatccatttttattttatatagcatcaataatctgttagcaaatatattttttaaatcttatgcaaatataaaatgccttggaaaaatttttattraaacagttataggaacaacacaaggaaaatagtaaaacttagagacataaaacaagataaaagggtatgtaatctgggtaatcattacttattatatact

SEQ ID NO: 277246 - DNA, 201 bp, Homo sapiens; identical to SEQ ID NO: 264081

SEQ ID NO: 277247 - DNA, 201 bp, Homo sapiens
ttctaggctaactcccatttagccacttggctctctcacttccttcaagcctttgcttagggaggcctatacagaccactttattatttaaaatttcacarctctccacctcctgcatttctgttccccttactcttcactacttttccgtaggacttactaccttctcacatactacatttacttgttgtacttatttat

SEQ ID NO: 277248 - DNA, 201 bp, Homo sapiens; identical to SEQ ID NO: 264082

SEQ ID NO: 277249 - DNA, 201 bp, Homo sapiens
aaaagatataagtggtccagcacaatcatatgtcccttttatttcacttactcttctgttctaggctaactcccatttagccacttggctctctcacttcyttcaagcctttgcttagggaggcctatacagaccactttattatttaaaatttcacaactctccacctcctgcatttctgttccccttactcttcactac

SEQ ID NO: 277250 - DNA, 201 bp, Homo sapiens; identical to SEQ ID NO: 264083

SEQ ID NO: 277251 - DNA, 201 bp, Homo sapiens
caattagaataacaattccattctctctgcctaattatagaaacttgggattcaagtacagttatatgaatggtcttgttcatctggaacattctgcatartagccattataattctatattatctgtagtaagatttgatatttgcagcttcctgagccataattctgtacgtgaaaaaggcaggcatactggaaggcag

SEQ ID NO: 277252 - DNA, 201 bp, Homo sapiens
tgtcatgtatagtgtattgactactaaatactgatgatacgtataatgtgcaggaatctctgtagcagccagggatgtaatggaagcctttttcacagctytgtagccccctggcagagagctgagagatcagaactgtgtcagacacttgggaagctgcagtcctatgacatttactcgcatgttactcagtttaggatg

SEQ ID NO: 277253 - DNA, 201 bp, Homo sapiens; identical to SEQ ID NO: 264084

SEQ ID NO: 277254 - DNA, 201 bp, Homo sapiens; identical to SEQ ID NO: 264086

SEQ ID NO: 277255 - DNA, 201 bp, Homo sapiens; identical to SEQ ID NO: 264087

SEQ ID NO: 277256 - DNA, 201 bp, Homo sapiens
gttccccaaccccaaagcttatcaaatcttgttattcagaagtttttatggagtctaatctccagtccttcccccttccctttcctggaggtcagtaggtsacatggtttggctgtgtccctacccaaatctcatcttgtagttcctataatccccacatacgctgtagaatgtcttgggacaggtgtgtggagtagagga

SEQ ID NO: 277257 - DNA, 201 bp, Homo sapiens
aatactgtatgtaatctttccttccttgtgtgctgtgaggatgactttgagctcagagaagtgctgtaaaaatccaggtgagtattgctatcctattgagygtgtgctttaattctgttattatctgcatctgtcagacatggagccttcaccgaggatagtgaggctctaaaaatttcagcatttatctgcagggctgac

SEQ ID NO: 277258 - DNA, 201 bp, Homo sapiens
aggtgacatggtttggctgtgtccctacccaaatctcatcttgtagttcctataatccccacatacgctgtagaatgtcttgggacaggtgtgtggagtasaggatggtgcagttgggttttaaatcagattcactctaattgcagatcaggctgtgttcagttctaactagaaggtaggagatcttgccagttctccaat

SEQ ID NO: 277259 - DNA, 201 bp, Homo sapiens
ttttcttcccttttttccttaatacctcatggatcctgacctttttctttaaactggtttaatacgtgtttcccttaaggttggtcattgacccaaaaatragtttgagtttctttttccatgatctcctctaaagaattctgttaatagcatactaaactggattacaaacttactgaataagtgctttgaattctgggc

SEQ ID NO: 277260 - DNA, 201 bp, Homo sapiens
atgagggtgttgtcaaaggagattaacatttaagtcagtgggctggggaagacagattcacccttaatctgggtgggcacagtctaatcagctgccagcayggctagaatataaacaggctgaaaaatgtgaaaagagagactggcctaggctcccagcctacatctttctcctgtgcgcgatgcttcctgccctagaaca

SEQ ID NO: 277261 - DNA, 201 bp, Homo sapiens
aaccagttcccaccagctctatagggatgactgtgggcatgtgtgtggttgagactgcctgtgtgtcttgggattaaatgaatgaaaagcctagatgtacraatcaaattgattctccacttctgaggatggtaaaacataatccttcttttcttccttttccttgattcccactgtaggtttatgagaaactgaaggacc

SEQ ID NO: 277262 - DNA, 201 bp, Homo sapiens; identical to SEQ ID NO: 264088

SEQ ID NO: 277263 - DNA, 201 bp, Homo sapiens
gagctttcaacaagcttcatgaattttaaatcctttttagttataaaatggggtacatggcatgtagtcagtgtggacaaggagctggcagcctcatctastcttatggaatatcaggtgtcttcaagataatgagggctcgagttgaccaggtgcattctgggtttgctctgtatatccacagagaacagagggacctct

SEQ ID NO: 277264 - DNA, 201 bp, Homo sapiens
ttaaaaaagagtatgcttaaaactcctgaattcatcctcgtaacctagttcagatgcccctcctccttgaagcaccccacactcctagagctatcatgtcyccctgtgatgcttaatactgagtgtcaacttgcttggattgaaggatacaaagtattgatcctgggtgtttctatgagggtgttgtcaaaggagattaac

SEQ ID NO: 277265 - DNA, 201 bp, Homo sapiens; identical to SEQ ID NO: 264089

SEQ ID NO: 277266 - DNA, 201 bp, Homo sapiens
tggccacacagttcttcaattttttctctccagccttgctcctctccctggaatttttcatattagaaatcagtacacctatccactcaattgctcaagayaaaaatctaaaagtcaccctgggcccttcctttccttcacccccacatccaatccaccaacttccgtccaccctccagaacacattccaaattcagcact

SEQ ID NO: 277267 - DNA, 201 bp, Homo sapiens
gcttaggagatcaaggcttcaatgagccatgtttgcaccactgcactgcagcctgggcaacagagcaagaccctgtctcaaaaataaataagtaggtaagyaaattaatccaatgtaacatgatattttcattgagcatataccctttaggaaggacagaaggacctcattattctttcacatatcttcacttgcttttta

SEQ ID NO: 277268 - DNA, 201 bp, Homo sapiens; identical to SEQ ID NO: 264090

SEQ ID NO: 277269 - DNA, 201 bp, Homo sapiens; identical to SEQ ID NO: 264091

SEQ ID NO: 277270 - DNA, 201 bp, Homo sapiens
cccagccaggacctacatttgggctgggagcagggatatgctggatggcttttagggcagcttaatgcctgcaatgtataaattgtatactgaacatacaraatatttcccatacattaatctgtttgtgtctggcagcatgcgattcctctgaattcacagaaaattatgaacacttcgagtactatttctggtgcttat

SEQ ID NO: 277271 - DNA, 201 bp, Homo sapiens
tctgctgacggccctaccccaccatgactcttattcatttcatatgctcaggtagtgccttggttccattaactgggtttacatcttgaccccttttgttkgtttcctacctagattccctgcaaaagaccccaaggctgacctctagtcctcatatgagagaatctctcaaacatactgctatgtcctcttggtgccatg

SEQ ID NO: 277272 - DNA, 201 bp, Homo sapiens; identical to SEQ ID NO: 264092

SEQ ID NO: 277273 - DNA, 201 bp, Homo sapiens
tttaatctgttgatgtagttaatttcattaattcattttctgatatttgaccagtcttgcaaccccagcatgaaatcaaatttgatcatgatgtattctcyttttaacacagtgttgaatttagttcgataacattttgttatgactattatttttgtggcctataatttatatttcttgttatccttgtctggttttgat

SEQ ID NO: 277274 - DNA, 201 bp, Homo sapiens
aagccctggaagccatctggctattagaagaaataaagtgtcccttgttcaataggtctgttggtcagcctcatcattctgctgacggccctaccccaccrtgactcttattcatttcatatgctcaggtagtgccttggttccattaactgggtttacatcttgaccccttttgttggtttcctacctagattccctgca

SEQ ID NO: 277275 - DNA, 201 bp, Homo sapiens; identical to SEQ ID NO: 264093

SEQ ID NO: 277276 - DNA, 201 bp, Homo sapiens
acgacaggccccggtgtgtgatgttccccatcctgtgtccaagtgttctcattgttcaattcccacctgtgagtgagaacatgcagtgtttggttttttgytcttgtgatagtttgttgagaatgatggtttccagcttcatccatgtccctacaaaggacatgaactcatccttttttatggctgcatagtattccatgg

SEQ ID NO: 277277 - DNA, 201 bp, Homo sapiens
tgatcaatacaaaagcatgaaagtatttctattaaaaatcatcacaagtttcttccagaggttaaaaataaagttaaaataaagggaaaaaaaaatttttwaaattatcacaagaatattagccaccatgcctggcctaatattctgttaaggagaccttttttcacctttatttttagtattgttcttgaatttatggcc

SEQ ID NO: 277278 - DNA, 201 bp, Homo sapiens
ccctttatctcttcccgaagtgggaccaagtttaaacctgtgaccacatactcagaggtgactcatcgttatagggttccaaaaacaacaacaatgaaaarcaattaggagctaaatgaaaagcgctgaatctattagagtttttgtatgttttctaatcacttatttcttttttacccacaccctggcaaacgataagaa

SEQ ID NO: 277279 - DNA, 201 bp, Homo sapiens
ctccacctcccaacttcatctgccacctgttcctgctgccatgctttccagagatccagccccacctgcttggactttcacccaccacacatgcatctccrttgtgcttcatgtagttttcaggttcagagaccccttccagtgttatacaccttctcccagctaatccttcacccgcaataaacaacagcagtatcgttt

SEQ ID NO: 277280 - DNA, 201 bp, Homo sapiens; identical to SEQ ID NO: 264101

SEQ ID NO: 277281 - DNA, 201 bp, Homo sapiens
aaatagaatagaaaatatcagagtgtattcgcaacccataatatagctaggtaatgtttcatgtaacctttgtttcatttatacacatgcacgcatctacrtgttccctcttatgctataggttgcaacataaagtgtacttcttagtgtaggtcattgtcaagaggctttatttatttatttatttatgtcgttgttgtt

SEQ ID NO: 277282 - DNA, 201 bp, Homo sapiens
gtcgtcttgatttcatcattgggatgggcttttatggtgctatctgtggaggagaaagcatatatgcagttcctagaacttccctacccttctttaccttycttttttaggggagctcctataacactgtgagtttgttcttttactctaggtctagatggtgattttcaaattttaagttcaactcgtaagtggatcgta

SEQ ID NO: 277283 - DNA, 201 bp, Homo sapiens; identical to SEQ ID NO: 264106

SEQ ID NO: 277284 - DNA, 201 bp, Homo sapiens
aagcatagttttccttctgaacttgcatcttttgcatttttcagaggcggggaggggaaaatttggtggcagcagcattccctgaatcccttgccaggggktgtacccagtaggaagcagtagcatccaggtgggggctgagacctacacagacactgggaggcatcaggatccaacatcaggatttgaccacagacactc

SEQ ID NO: 277285 - DNA, 201 bp, Homo sapiens; identical to SEQ ID NO: 264107

SEQ ID NO: 277286 - DNA, 201 bp, Homo sapiens
acatgaagttatttttctaaagaaagacaaaaaaaaagaaaaagatacctacttaaaagtagccttcctataattagctgtgtacacatgttagccaaatraggtatagatgtagtcatttttagcctgaaatgattgaaaaaggtgaaattaatgaattaatcttggtgcagtttcaaaatagtaatggaagaaaaacat

SEQ ID NO: 277287 - DNA, 201 bp, Homo sapiens; identical to SEQ ID NO: 264108

SEQ ID NO: 277288 - DNA, 201 bp, Homo sapiens
aggaggcagccaggtggggatacccactgtcctgggggcaggagacactggttttgatttttgcagtgatattaagatcaaatagctgagggatttttttyttttctttttggaacccgggttgtaggggagagaaagtgtagggtgggaaagagataagaagatgggagaaagtggatggggagctgatgataacttaca

SEQ ID NO: 277289 - DNA, 201 bp, Homo sapiens; identical to SEQ ID NO: 264109

SEQ ID NO: 277290 - DNA, 201 bp, Homo sapiens
gatttggccactttgcacacttcatttctaagtgtacttccctcttactcttatccacatgctccataatggtctggaaccccttctaggattcctgactrgcacagtttgggaacaatgtagcccactctggagttgactaaagtctactttaagtctgaaacttaaacatttcctgagtttgccatttagattctggta

SEQ ID NO: 277291 - DNA, 201 bp, Homo sapiens; identical to SEQ ID NO: 264111

SEQ ID NO: 277292 - DNA, 201 bp, Homo sapiens
gtgaaacccccatctctactaaaaatacaaaaattagctgggcgtgctggcaggcgcctgtagtcccagctactcgggaggctgaggcaggacactcactygaaacgagaaggcagaggttgcagtgagccaagatcacgccacagcactccggcctgggcaacaagagcgaaactccgtcttcatccttttgccttgatt

SEQ ID NO: 277293 - DNA, 201 bp, Homo sapiens
aagctgcttttgcagctggatgggcttataggggtaagttatcattccagtgaagatacatacatcagcattttcctctgtttgaatatgtgtaagtaaacctttgcctttattaaaagacgttttgggctgggtgtggtggctcacgcctgtaatcccagcactttgggaggccaaggtgggcggatcatgaggtcagga

SEQ ID NO: 277294 - DNA, 201 bp, Homo sapiens
gtaatgtcatcctagttcactttgtcattatcaagtaatttaataatgtacatcattttcctgaagctgatgctgctgaaggagcagtagcatcacatagraaggaataaatcaccagactttagacttttgttgctaaatgtttagattatccaagcaactatgacaagaggaatcagcatgaaaaagtacaaagaaaag

SEQ ID NO: 277295 - DNA, 201 bp, Homo sapiens
gtagtcccagctaccctggacctgggaggcagaggttgcagtgagccaagatcatgccactgcactccagcctgggtgacagagagagacaccctgtctcaaaaaaaaaacaaaacacacatacaatatgatactttaataattaaagtggtactagtgtaagaatagacataaaaattaaagaaatgtcatagtcatgga

SEQ ID NO: 277296 - DNA, 201 bp, Homo sapiens
catttagagttggtttttatgcattctcactaaggtatttcagcagggaagctgcaggaaaaaaaaaaaaacactttattttgcctaatcttgggaactcwaaaaatagacacaaatattttcataatcataaggtaatccagggagtgaatttcacttttctccagcttgattttgctaaaaaaaaaaagaccattctgg

SEQ ID NO: 277297 - DNA, 201 bp, Homo sapiens; identical to SEQ ID NO: 264119

SEQ ID NO: 277298 - DNA, 201 bp, Homo sapiens; identical to SEQ ID NO: 264121

SEQ ID NO: 277299 - DNA, 201 bp, Homo sapiens; identical to SEQ ID NO: 264123

SEQ ID NO: 277300 - DNA, 201 bp, Homo sapiens; identical to SEQ ID NO: 264124

SEQ ID NO: 277301 - DNA, 201 bp, Homo sapiens
tctctgctatgaaaggcatactgacaatcccattgtaggtttaattttgtcttactatctggctgttgtattcaccagctccacaaaacaatgattttttwaaatctgccatgcgtgtattaagaaattaaaacacaaaaccaaatagcctctgaatttgtaacaactgtttatgctccttttcctggcagcagttgcctc

SEQ ID NO: 277302 - DNA, 201 bp, Homo sapiens; identical to SEQ ID NO: 264128

SEQ ID NO: 277303 - DNA, 201 bp, Homo sapiens; identical to SEQ ID NO: 264129

SEQ ID NO: 277304 - DNA, 201 bp, Homo sapiens; identical to SEQ ID NO: 264131

SEQ ID NO: 277305 - DNA, 201 bp, Homo sapiens; identical to SEQ ID NO: 264133

SEQ ID NO: 277306 - DNA, 201 bp, Homo sapiens
atagggatgactgtgggcatgtgtgtggttgagactgcctgtgtgtcttgggattaaatgaatgaaaagcctagatgtacaaatcaaattgattctccacwtctgaggatggtaaaacataatccttcttttcttccttttccttgattcccactgtaggtttatgagaaactgaaggaccatatgctgatccccgtgagc

SEQ ID NO: 277307 - DNA, 201 bp, Homo sapiens; identical to SEQ ID NO: 264134

SEQ ID NO: 277308 - DNA, 201 bp, Homo sapiens
caatgcttagcaccaggtaataaatcccaaaagtggaattaggcatcaaatgggggaatggggacataaatggaagggatggggaatataatttggatagmtgttccccttttattagggtacttagtaggacctatatattttggttctgggtttattctctggttaggaaaaagcctaaatatgttcatcctggaggca

SEQ ID NO: 277309 - DNA, 201 bp, Homo sapiens; identical to SEQ ID NO: 264136

SEQ ID NO: 277310 - DNA, 201 bp, Homo sapiens; identical to SEQ ID NO: 264137

SEQ ID NO: 277311 - DNA, 201 bp, Homo sapiens
tctagtcccacttagacatcacttttccaagcatggaattggttctccttttatgagctcctaaaacgctataaacttccttttatatatatcataccacrtgataattgcctgtttaccgttctgtatctcccactattatgtaacctgtcagggctaggatcatgtctgtattggtcaacattttgtcaccaaggcctt

SEQ ID NO: 277312 - DNA, 201 bp, Homo sapiens; identical to SEQ ID NO: 264138

SEQ ID NO: 277313 - DNA, 201 bp, Homo sapiens
agcttcagcttcacctctgatcccaccccaagcatcccctgatccatggatcgagcgaggttctttcactgaagctcaccagactattgcttttattttgyccgggtactcttcctctttcctctcttcccttttatctgtcttaagttctcagcttactgttatcactattattagctaatatttattgggtacttgcca

SEQ ID NO: 277314 - DNA, 201 bp, Homo sapiens; identical to SEQ ID NO: 264139

SEQ ID NO: 277315 - DNA, 201 bp, Homo sapiens; identical to SEQ ID NO: 264140

SEQ ID NO: 277316 - DNA, 201 bp, Homo sapiens
tgtagggcaatgcttgtagaaatctctcacggcaccagctcaccgccttggtaggtgttaatgcttgttgagtgagtggatgaatgaatgaatgaatgaaygaaatgctaatacaagaagatagttacttcaagaccctctagggattgctgtatatttttttcatgtgatgtctgcattcccaactgtgaaaatccacag

SEQ ID NO: 277317 - DNA, 201 bp, Homo sapiens
tggtctgagaaaataagcatattctactaatttctcatcgagataatcagcttttatttcaccctccattaacagaaaaccaaaagagtaacagatctctkctagccctttgatgtctttgccacacctctccatctttgagtctgtgagatgtcccactcttttaaactgataaggaatgtaatcccatttgaatacttt

SEQ ID NO: 277318 - DNA, 201 bp, Homo sapiens
caacaacaaaaaacaaaaaaaactcctcaaatgtgaagctgagaattttgaagctcatttataaattcacaccacccttgtgggaggggagagaaggcagrtcacatctctgggctcagttggggcaaccattctaggatgctcagagagacctgctcctagaaatccagagtttcctaaaagctgggatcagagttctgg

SEQ ID NO: 277319 - DNA, 201 bp, Homo sapiens; identical to SEQ ID NO: 264143

SEQ ID NO: 277320 - DNA, 201 bp, Homo sapiens
actgaaaaaatagctaatataaaagtttggggaactaccatttgacccagcaatcccaatccccttctacccaaaggaaaagaaatagttctaccaaacaracactgtcactcatatatttatcatagcactactcacaagagcaaagtaatgtaatcaacctaggtgtccatcagtgatgtattggataaagaaaatgtg

SEQ ID NO: 277321 - DNA, 201 bp, Homo sapiens; identical to SEQ ID NO: 264152

SEQ ID NO: 277322 - DNA, 201 bp, Homo sapiens; identical to SEQ ID NO: 264154

SEQ ID NO: 277323 - DNA, 201 bp, Homo sapiens; identical to SEQ ID NO: 264155

SEQ ID NO: 277324 - DNA, 201 bp, Homo sapiens; identical to SEQ ID NO: 264156

SEQ ID NO: 277325 - DNA, 201 bp, Homo sapiens
ataatgtgcacctgaagaagccaacgtttttgtcatacaggtgcaaaataacatatcccgattacattagcagtaaaagtaaagaaagtattcaaattaargccatagaaaactagaaacttcttaggtttttcctgcccagaattaaacattgtataaacttgaaatataatacctaactgggtaataatttggatgcca

SEQ ID NO: 277326 - DNA, 201 bp, Homo sapiens; identical to SEQ ID NO: 264158

SEQ ID NO: 277327 - DNA, 201 bp, Homo sapiens; identical to SEQ ID NO: 264159

SEQ ID NO: 277328 - DNA, 201 bp, Homo sapiens; identical to SEQ ID NO: 264163

SEQ ID NO: 277329 - DNA, 201 bp, Homo sapiens; identical to SEQ ID NO: 264165

SEQ ID NO: 277330 - DNA, 201 bp, Homo sapiens; identical to SEQ ID NO: 264171

SEQ ID NO: 277331 - DNA, 201 bp, Homo sapiens; identical to SEQ ID NO: 264172

SEQ ID NO: 277332 - DNA, 201 bp, Homo sapiens; identical to SEQ ID NO: 264173

SEQ ID NO: 277333 - DNA, 201 bp, Homo sapiens; identical to SEQ ID NO: 264174

SEQ ID NO: 277334 - DNA, 201 bp, Homo sapiens
tgtgtataccaatgctatgttaaaaccattgtgcgttaataccacaaaagcaaatacagtgattccctggcattgcgaaactggcatttctctgtgcttcrtaagaaaatgaagcaacttcatttcacaaggaaatgaagggggttatcagagccctgtgcgcgtgcgtgtgtgtgtgtgtacacatacatatacatatat

SEQ ID NO: 277335 - DNA, 201 bp, Homo sapiens; identical to SEQ ID NO: 264175

SEQ ID NO: 277336 - DNA, 201 bp, Homo sapiens; identical to SEQ ID NO: 264176

SEQ ID NO: 277337 - DNA, 201 bp, Homo sapiens; identical to SEQ ID NO: 264178

SEQ ID NO: 277338 - DNA, 201 bp, Homo sapiens
ggaaaagcaatggagtagaagcagagggagagagacagactggcagaagaaaagaagtcatgagagagaagcatcactgaagcaaaggattctttggacaygtgtataccaatgctatgttaaaaccattgtgcgttaataccacaaaagcaaatacagtgattccctggcattgcgaaactggcatttctctgtgcttcg

SEQ ID NO: 277339 - DNA, 201 bp, Homo sapiens; identical to SEQ ID NO: 264177

SEQ ID NO: 277340 - DNA, 201 bp, Homo sapiens; identical to SEQ ID NO: 264179

SEQ ID NO: 277341 - DNA, 201 bp, Homo sapiens
actggggtgtatttgaagtcatgggcctagattcgctcatccaaagcaggaagcatgtaaagttggaagaaaagagatggaggctagagaactctgggaartaccaacatttaaaggaaagaatgaggaaaagcaatggagtagaagcagagggagagagacagactggcagaagaaaagaagtcatgagagagaagcatc

SEQ ID NO: 277342 - DNA, 201 bp, Homo sapiens
cttggataagatggctgttgcagtaatctaggaaaccaataattattttctggactaagtggtagcagagtggatgaagagacatgggtggatttgaatcmttttaaggggattgattggtcaaaacatggtgattgattaaatgtggaggtaaaggagaacgtgagccaaaggataacactcagattactggcttaagca

SEQ ID NO: 277343 - DNA, 201 bp, Homo sapiens
ttaaatagtatgaatttatttttaaattggtttataatagtaccctgtgttctatttaactatgtttgtgcttatagtataattttataacagtatgagcaaaaaaaaaattctcataaaaatacttaataggaatgtgttgaagtttgtgtgatagattattaacagtaagtgttatctatgcatgggtgttgggattac

SEQ ID NO: 277344 - DNA, 201 bp, Homo sapiens
cttcattctgaggatactgggaagctactggaggatttagacaagacaatggcagttagatttgcagttcagaaagactgccttggataagatggctgttkcagtaatctaggaaaccaataattattttctggactaagtggtagcagagtggatgaagagacatgggtggatttgaatcattttaaggggattgattgg

SEQ ID NO: 277345 - DNA, 201 bp, Homo sapiens; identical to SEQ ID NO: 264180

SEQ ID NO: 277346 - DNA, 201 bp, Homo sapiens
catgaggttgtaggggacactcttctagttgtaaaggctgtagaaaaggcctgagggcggatgcatattattgacaggccccctgtcattggggaggcacrtatttatggagcccttacctgtgtcagggctctcagccaggagctgaccctcagctttaaaacaaggttaacaatatcactgacattccagctgtagcac

SEQ ID NO: 277347 - DNA, 201 bp, Homo sapiens
catatatcatctctaaagagcaggataatcttggtgtgagttaatcttgatttacattttaactccactctataataaccaccaggatgtgttatattttyggtagataatgttttcttcgggtggttttcaatggtgacttctctgaatctgcatggttctcacgtaagatgtcatgaggttgtaggggacactcttcta

SEQ ID NO: 277348 - DNA, 201 bp, Homo sapiens; identical to SEQ ID NO: 264184

SEQ ID NO: 277349 - DNA, 201 bp, Homo sapiens; identical to SEQ ID NO: 264186

SEQ ID NO: 277350 - DNA, 201 bp, Homo sapiens; identical to SEQ ID NO: 264188

SEQ ID NO: 277351 - DNA, 201 bp, Homo sapiens; identical to SEQ ID NO: 264190

SEQ ID NO: 277352 - DNA, 201 bp, Homo sapiens; identical to SEQ ID NO: 264192

SEQ ID NO: 277353 - DNA, 201 bp, Homo sapiens; identical to SEQ ID NO: 264195

SEQ ID NO: 277354 - DNA, 201 bp, Homo sapiens; identical to SEQ ID NO: 264198

SEQ ID NO: 277355 - DNA, 201 bp, Homo sapiens; identical to SEQ ID NO: 264204

SEQ ID NO: 277356 - DNA, 201 bp, Homo sapiens; identical to SEQ ID NO: 264206

SEQ ID NO: 277357 - DNA, 201 bp, Homo sapiens; identical to SEQ ID NO: 264208

SEQ ID NO: 277358 - DNA, 201 bp, Homo sapiens; identical to SEQ ID NO: 264211

SEQ ID NO: 277359 - DNA, 201 bp, Homo sapiens
gcgcaggagtagcccggggcgagcgcggcgacgaagacgccaacaagctggtgtgcagcggacaggccgtgcgcagcggggtcggggtggcggcgcggtgkgcccggtgggcagggaggcgagggctgggcggcgggcgggcgtctttcgctcgaggtcccggcggagaaggcgcggagggcgcgggcgctgctcgggggc

SEQ ID NO: 277360 - DNA, 201 bp, Homo sapiens; identical to SEQ ID NO: 264213

SEQ ID NO: 277361 - DNA, 201 bp, Homo sapiens
ctctgtggccatgtgatctctgtactgtgactcccttttgctttctgccataagtggaagcttcctgaggcttttgtcagatgcccagtcttccagccagsaaaactgtgagtcaagtaaacctcttttcttcataaattatccagccttaggtattcctttatagcagctctaaagggactaagacaaggagacttagaa

SEQ ID NO: 277362 - DNA, 201 bp, Homo sapiens
agctgacaaagaaattgtgttatttctgtggcatacaacattttaacataataaccaaaattatgattgatttctagaaatttaatgcaattttgaaaaamctttttttttttttttaagacagggtctcacactatcacccagcctggagtgcagtgatgtgatcatggctcactgcagcctctgcctcctgggctcagg

SEQ ID NO: 277363 - DNA, 201 bp, Homo sapiens; identical to SEQ ID NO: 264214

SEQ ID NO: 277364 - DNA, 201 bp, Homo sapiens; identical to SEQ ID NO: 264215

SEQ ID NO: 277365 - DNA, 201 bp, Homo sapiens; identical to SEQ ID NO: 264216

SEQ ID NO: 277366 - DNA, 201 bp, Homo sapiens; identical to SEQ ID NO: 264217

SEQ ID NO: 277367 - DNA, 201 bp, Homo sapiens; identical to SEQ ID NO: 264220

SEQ ID NO: 277368 - DNA, 201 bp, Homo sapiens; identical to SEQ ID NO: 264222

SEQ ID NO: 277369 - DNA, 201 bp, Homo sapiens; identical to SEQ ID NO: 264224

SEQ ID NO: 277370 - DNA, 201 bp, Homo sapiens; identical to SEQ ID NO: 264225

SEQ ID NO: 277371 - DNA, 201 bp, Homo sapiens
aacaaaaatgtgacacagagatataagcaagcacatgctgttggaagaatggcatcaatagacttgcttgatgcgggtttgctacaaaccttcaatttgtaaaaaaaaaaacagtatctgcaaatcacaataaagcaaagtgcaataaaacaaggtatgcttgtaactgaaaaccagtagtgaagagataatctgaaaagc

SEQ ID NO: 277372 - DNA, 201 bp, Homo sapiens; identical to SEQ ID NO: 264227

SEQ ID NO: 277373 - DNA, 201 bp, Homo sapiens; identical to SEQ ID NO: 264229

SEQ ID NO: 277374 - DNA, 201 bp, Homo sapiens; identical to SEQ ID NO: 264234

SEQ ID NO: 277375 - DNA, 201 bp, Homo sapiens; identical to SEQ ID NO: 264235

SEQ ID NO: 277376 - DNA, 201 bp, Homo sapiens; identical to SEQ ID NO: 264236

SEQ ID NO: 277377 - DNA, 201 bp, Homo sapiens; identical to SEQ ID NO: 264237

SEQ ID NO: 277378 - DNA, 201 bp, Homo sapiens; identical to SEQ ID NO: 264238

SEQ ID NO: 277379 - DNA, 201 bp, Homo sapiens
gatttagaggggataaacatccaaactgtatcacactgggaatccttgaagcgaggcattctattaattctcaaatattacatttcagtcaaagccttggyaattaaaccagtgtttccaattgtattgtgtaatacagagagcaaattcttattgagcttatgaaaataatcatattaaggagaaagatggaatgtttca

SEQ ID NO: 277380 - DNA, 201 bp, Homo sapiens; identical to SEQ ID NO: 264240

SEQ ID NO: 277381 - DNA, 201 bp, Homo sapiens
ttgcattagggatattagggatgttgctgaagttacccactaggtggactaaaggatctcaggttttttaaagattcagatttgacataacagattcaacrtgctgtcagattactcacaaaaactaaggattgtgaaactttaaccatagccttattctgccaagcgaaagaagtaggcataagcaaggaaaaattaaga

SEQ ID NO: 277382 - DNA, 201 bp, Homo sapiens; identical to SEQ ID NO: 264242

SEQ ID NO: 277383 - DNA, 201 bp, Homo sapiens
agatcaaagaatgagccaggccggatactcattatatctatgggtaacaagaagtattagcaattgcacagatttctccctattcatttagtcggtagcarttctatcatatagcattccaggaatgggttaaattaaaacagacagtactaactctataaaagagatcactagtacaatttgaacaaacagttgcattag

SEQ ID NO: 277384 - DNA, 201 bp, Homo sapiens
agattgaggcaggagaattgcttgaactcaggaggtggaggttgcagtgagtcgagattgcaccactgtacttccagcctgggcaacagattgagactccrtctcaaaaaaaaaaaaaaaaaaaaaaaaaaaaaaagaaaagaaaagaaaggaattcctgcaagagtagactatgtgtccttcaggcattcctccctgatt

SEQ ID NO: 277385 - DNA, 201 bp, Homo sapiens; identical to SEQ ID NO: 264245

SEQ ID NO: 277386 - DNA, 201 bp, Homo sapiens; identical to SEQ ID NO: 264246

SEQ ID NO: 277387 - DNA, 201 bp, Homo sapiens; identical to SEQ ID NO: 264247

SEQ ID NO: 277388 - DNA, 201 bp, Homo sapiens; identical to SEQ ID NO: 264249

SEQ ID NO: 277389 - DNA, 201 bp, Homo sapiens; identical to SEQ ID NO: 264252

SEQ ID NO: 277390 - DNA, 201 bp, Homo sapiens; identical to SEQ ID NO: 264250

SEQ ID NO: 277391 - DNA, 201 bp, Homo sapiens; identical to SEQ ID NO: 264253

SEQ ID NO: 277392 - DNA, 201 bp, Homo sapiens; identical to SEQ ID NO: 264259

SEQ ID NO: 277393 - DNA, 201 bp, Homo sapiens; identical to SEQ ID NO: 264261

SEQ ID NO: 277394 - DNA, 201 bp, Homo sapiens; identical to SEQ ID NO: 264268

SEQ ID NO: 277395 - DNA, 201 bp, Homo sapiens; identical to SEQ ID NO: 264269

SEQ ID NO: 277396 - DNA, 201 bp, Homo sapiens
gcatttccaaaccccagctgattatcacaacacacaggaatccaaactttcaaagcttagctttggctcttcagtgtatcagcagctgcaaaaaatacgtkctaaggcacaggttcataggactgggatccagtgtccttaaatggtaaaactttaagtaaatttcctttactttccacttatcatagatgcagttcagtt

SEQ ID NO: 277397 - DNA, 201 bp, Homo sapiens; identical to SEQ ID NO: 264274

SEQ ID NO: 277398 - DNA, 201 bp, Homo sapiens
cagctgattatcacaacacacaggaatccaaactttcaaagcttagctttggctcttcagtgtatcagcagctgcaaaaaatacgtgctaaggcacaggtkcataggactgggatccagtgtccttaaatggtaaaactttaagtaaatttcctttactttccacttatcatagatgcagttcagttgtttaaagtgcact

SEQ ID NO: 277399 - DNA, 201 bp, Homo sapiens
tactgacagaagtgttgaaccatccacagtgggttacttctcccactcttctgaagaaggagctgttttgtcacttgttctgtttctcttttaattgctcrtagttgttcctatgagagcagacatgtgctctttgaatttaattgaacgtctgcttcagaaaaacgtgacaaggaaatattatcttcttagatttcagta

SEQ ID NO: 277400 - DNA, 201 bp, Homo sapiens
aacaactcaagtagggctgaggactagtatagcaatgagttatgactgataacttaagatttgacaaaaactttagcataggtaggtgcttcacaattgayttttaactaatatgtacaatttcttataaataaagttgaaaacttatatatgcattacaaataatgctgaaacagcatgaaatgccattatagaggtgaa

SEQ ID NO: 277401 - DNA, 201 bp, Homo sapiens
ataggtaggtgcttcacaattgatttttaactaatatgtacaatttcttataaataaagttgaaaacttatatatgcattacaaataatgctgaaacagcwtgaaatgccattatagaggtgaatgcaacctgctttgggagcacagaagaagtaaatccctgctgtggaagtcaggtagccctttaccaaagaggcaatg

SEQ ID NO: 277402 - DNA, 201 bp, Homo sapiens
ctctgaaatataactagctggtggcttttaacaagaggttcagttgggcctcagtttgttcatctgtgaaaacaagggactggataattctctataaggcyacttacatcccttaatattatacggttcccttgaggttaaaaacaaaatttgctacagataaaccataatggaaataatgtattcacttgtaatggagca

SEQ ID NO: 277403 - DNA, 201 bp, Homo sapiens
gcacataggaagactatataaatgtttgctgttaccattgctaactaaattccttctgagagctttgtcctaaaattagaatatagaagaggatcccaatrtgtttttatttagaaatttttaagaccggatcattgagtacacaaaatgtctgttcgatccctttttgttggtagttttggctagttttagtagtcaaca

SEQ ID NO: 277404 - DNA, 201 bp, Homo sapiens; identical to SEQ ID NO: 264277

SEQ ID NO: 277405 - DNA, 201 bp, Homo sapiens
tttgtaatgggttgcaatctactcttggttaatgaagtggattcttatggagatcatcatcttgccatttgagattatagtagagttaatagtgtgtgcaytgtatatttaaatgaaatcatccatctaggaagagtttagcaattctcagctaaaaagcccagaacacataaattcattcatccactcattcattgattc

SEQ ID NO: 277406 - DNA, 201 bp, Homo sapiens; identical to SEQ ID NO: 264279

SEQ ID NO: 277407 - DNA, 201 bp, Homo sapiens
aatttattgaattaaactgaagagaattgctagcatgtctgctgttaggatacagtagtatgaagtggcagctacataaaactgattactctggtggcccytgcataaagggagaaggcctcatacaactcaacagtgatatcagcaaaataacatgtctatccttgtcaagagagaaaacagggttgaaaatgacagaat

SEQ ID NO: 277408 - DNA, 201 bp, Homo sapiens; identical to SEQ ID NO: 264289

SEQ ID NO: 277409 - DNA, 201 bp, Homo sapiens; identical to SEQ ID NO: 264292

SEQ ID NO: 277410 - DNA, 201 bp, Homo sapiens; identical to SEQ ID NO: 264293

SEQ ID NO: 277411 - DNA, 201 bp, Homo sapiens; identical to SEQ ID NO: 264294

SEQ ID NO: 277412 - DNA, 201 bp, Homo sapiens
tccgtgtctgtactcacagcctgatgatgcatgccgtctatagaactacatacagtgttttttacagttaagttttttaatagcagggaaaaacaagatcwtttcctcagatgcttgactatttccctctgtaatcttaggtatagtttcaaccctatttcttttcggtaatatttgttatattagatgttggaggccaat

SEQ ID NO: 277413 - DNA, 201 bp, Homo sapiens; identical to SEQ ID NO: 264297

SEQ ID NO: 277414 - DNA, 201 bp, Homo sapiens; identical to SEQ ID NO: 264298

SEQ ID NO: 277415 - DNA, 201 bp, Homo sapiens; identical to SEQ ID NO: 264299

SEQ ID NO: 277416 - DNA, 201 bp, Homo sapiens; identical to SEQ ID NO: 264300

SEQ ID NO: 277417 - DNA, 201 bp, Homo sapiens; identical to SEQ ID NO: 264301

SEQ ID NO: 277418 - DNA, 201 bp, Homo sapiens
tgatgttttgcattaaaaaatttcagaaaatgaacagattttcagacatgctgtagtacagaatgccctcttctccagtttgttttccattgtctcccacttttttttttttttttagctcacttggaaaaaaacaaaaacaaaaacagagccacaagcatgatgagttcttaacacattgtggaacttagtagcgtttaa

SEQ ID NO: 277419 - DNA, 201 bp, Homo sapiens; identical to SEQ ID NO: 264302

SEQ ID NO: 277420 - DNA, 201 bp, Homo sapiens
ccaccacatcaacaggctaaagaagaaaagatatgtgatgatattaatgtgtagagaaaaaaacatttgacagaatctaacacccgttcatgataaaaatygcaacacatacttaagggtgacaaactcaatgcttgccctctaatattgggaacaaagcaaggatttcctctctgaccactgctgttcaaaactacagaa

SEQ ID NO: 277421 - DNA, 201 bp, Homo sapiens
atggaaaaaaatttgaaaagatgcttaacataatttgttgttaaggagttgcaaattaaaatgagatatcactacccacctattcaaatggctaaaatttwaaaaaactgacaatatcaatcgcttggcaaggatacagaacaataggtactctttttattgctagtaagaacagccattttggtagtttctttcaaagct

SEQ ID NO: 277422 - DNA, 201 bp, Homo sapiens
tggaaaaaaatttgaaaagatgcttaacataatttgttgttaaggagttgcaaattaaaatgagatatcactacccacctattcaaatggctaaaattttaaaaaactgacaatatcaatcgcttggcaaggatacagaacaataggtactctttttattgctagtaagaacagccattttggtagtttctttcaaagcta

SEQ ID NO: 277423 - DNA, 201 bp, Homo sapiens
agctgcttctaacagcctataatcagatatgggagcaaaggaatgagcttaagttggaatttatatttaaaagggaaacagagcagaaaattttggaaagktctcagcctgcctatgtagtaggaaggaaaaagcacttttagatgaaatccaaggatgtggctgatctattgcttgctagagagattaacatggataaaa

SEQ ID NO: 277424 - DNA, 201 bp, Homo sapiens; identical to SEQ ID NO: 264308

SEQ ID NO: 277425 - DNA, 201 bp, Homo sapiens; identical to SEQ ID NO: 264310

SEQ ID NO: 277426 - DNA, 201 bp, Homo sapiens; identical to SEQ ID NO: 264311

SEQ ID NO: 277427 - DNA, 201 bp, Homo sapiens; identical to SEQ ID NO: 264312

SEQ ID NO: 277428 - DNA, 201 bp, Homo sapiens; identical to SEQ ID NO: 264313

SEQ ID NO: 277429 - DNA, 201 bp, Homo sapiens; identical to SEQ ID NO: 277057

SEQ ID NO: 277430 - DNA, 201 bp, Homo sapiens; identical to SEQ ID NO: 277058

SEQ ID NO: 277431 - DNA, 201 bp, Homo sapiens; identical to SEQ ID NO: 277059

SEQ ID NO: 277432 - DNA, 201 bp, Homo sapiens; identical to SEQ ID NO: 277060

SEQ ID NO: 277433 - DNA, 201 bp, Homo sapiens; identical to SEQ ID NO: 277061

SEQ ID NO: 277434 - DNA, 201 bp, Homo sapiens; identical to SEQ ID NO: 277062

SEQ ID NO: 277435 - DNA, 201 bp, Homo sapiens; identical to SEQ ID NO: 277063

SEQ ID NO: 277436 - DNA, 201 bp, Homo sapiens; identical to SEQ ID NO: 277064

SEQ ID NO: 277437 - DNA, 201 bp, Homo sapiens; identical to SEQ ID NO: 277065

SEQ ID NO: 277438 - DNA, 201 bp, Homo sapiens; identical to SEQ ID NO: 277066

SEQ ID NO: 277439 - DNA, 201 bp, Homo sapiens; identical to SEQ ID NO: 277067

SEQ ID NO: 277440 - DNA, 201 bp, Homo sapiens; identical to SEQ ID NO: 277068

SEQ ID NO: 277441 - DNA, 201 bp, Homo sapiens; identical to SEQ ID NO: 277069

SEQ ID NO: 277442 - DNA, 201 bp, Homo sapiens; identical to SEQ ID NO: 277070

SEQ ID NO: 277443 - DNA, 201 bp, Homo sapiens; identical to SEQ ID NO: 277071

SEQ ID NO: 277444 - DNA, 201 bp, Homo sapiens; identical to SEQ ID NO: 276679

SEQ ID NO: 277445 - DNA, 201 bp, Homo sapiens; identical to SEQ ID NO: 276683

SEQ ID NO: 277446 - DNA, 201 bp, Homo sapiens; identical to SEQ ID NO: 276684

SEQ ID NO: 277447 - DNA, 201 bp, Homo sapiens; identical to SEQ ID NO: 277072

SEQ ID NO: 277448 - DNA, 201 bp, Homo sapiens; identical to SEQ ID NO: 277074

SEQ ID NO: 277449 - DNA, 201 bp, Homo sapiens; identical to SEQ ID NO: 276685

SEQ ID NO: 277450 - DNA, 201 bp, Homo sapiens; identical to SEQ ID NO: 277075

SEQ ID NO: 277451 - DNA, 201 bp, Homo sapiens; identical to SEQ ID NO: 277077

SEQ ID NO: 277452 - DNA, 201 bp, Homo sapiens; identical to SEQ ID NO: 277079

SEQ ID NO: 277453 - DNA, 201 bp, Homo sapiens; identical to SEQ ID NO: 277081

SEQ ID NO: 277454 - DNA, 201 bp, Homo sapiens; identical to SEQ ID NO: 277083

SEQ ID NO: 277455 - DNA, 201 bp, Homo sapiens; identical to SEQ ID NO: 277084

SEQ ID NO: 277456 - DNA, 201 bp, Homo sapiens; identical to SEQ ID NO: 277085

SEQ ID NO: 277457 - DNA, 201 bp, Homo sapiens; identical to SEQ ID NO: 277087

SEQ ID NO: 277458 - DNA, 201 bp, Homo sapiens; identical to SEQ ID NO: 277089

SEQ ID NO: 277459 - DNA, 201 bp, Homo sapiens
ctaacatctgatatacttaacatccataccaaggtattcctttcccaccctggaatcttttagtaggcctttgtactatattctgattctgggtgactttygtttcccctctactacccctagtctcccaaatagatgaacattgccctcatctagtgttttagttcattttctgtggcttataacagaataccacacact

SEQ ID NO: 277460 - DNA, 201 bp, Homo sapiens; identical to SEQ ID NO: 277090

SEQ ID NO: 277461 - DNA, 201 bp, Homo sapiens; identical to SEQ ID NO: 277092

SEQ ID NO: 277462 - DNA, 201 bp, Homo sapiens; identical to SEQ ID NO: 55689

SEQ ID NO: 277463 - DNA, 201 bp, Homo sapiens; identical to SEQ ID NO: 277094

SEQ ID NO: 277464 - DNA, 201 bp, Homo sapiens; identical to SEQ ID NO: 277095

SEQ ID NO: 277465 - DNA, 201 bp, Homo sapiens; identical to SEQ ID NO: 277096

SEQ ID NO: 277466 - DNA, 201 bp, Homo sapiens; identical to SEQ ID NO: 277097

SEQ ID NO: 277467 - DNA, 201 bp, Homo sapiens; identical to SEQ ID NO: 277098

SEQ ID NO: 277468 - DNA, 201 bp, Homo sapiens; identical to SEQ ID NO: 277099

SEQ ID NO: 277469 - DNA, 201 bp, Homo sapiens; identical to SEQ ID NO: 277100

SEQ ID NO: 277470 - DNA, 201 bp, Homo sapiens; identical to SEQ ID NO: 277101

SEQ ID NO: 277471 - DNA, 201 bp, Homo sapiens; identical to SEQ ID NO: 277102

SEQ ID NO: 277472 - DNA, 201 bp, Homo sapiens; identical to SEQ ID NO: 277103

SEQ ID NO: 277473 - DNA, 201 bp, Homo sapiens; identical to SEQ ID NO: 277104

SEQ ID NO: 277474 - DNA, 201 bp, Homo sapiens; identical to SEQ ID NO: 277106

SEQ ID NO: 277475 - DNA, 201 bp, Homo sapiens; identical to SEQ ID NO: 277107

SEQ ID NO: 277476 - DNA, 201 bp, Homo sapiens; identical to SEQ ID NO: 277109

SEQ ID NO: 277477 - DNA, 201 bp, Homo sapiens; identical to SEQ ID NO: 277110

SEQ ID NO: 277478 - DNA, 201 bp, Homo sapiens; identical to SEQ ID NO: 277111

SEQ ID NO: 277479 - DNA, 201 bp, Homo sapiens; identical to SEQ ID NO: 276696

SEQ ID NO: 277480 - DNA, 201 bp, Homo sapiens; identical to SEQ ID NO: 276697

SEQ ID NO: 277481 - DNA, 201 bp, Homo sapiens; identical to SEQ ID NO: 277113

SEQ ID NO: 277482 - DNA, 201 bp, Homo sapiens; identical to SEQ ID NO: 277119

SEQ ID NO: 277483 - DNA, 201 bp, Homo sapiens; identical to SEQ ID NO: 277121

SEQ ID NO: 277484 - DNA, 201 bp, Homo sapiens; identical to SEQ ID NO: 277124

SEQ ID NO: 277485 - DNA, 201 bp, Homo sapiens; identical to SEQ ID NO: 276701

SEQ ID NO: 277486 - DNA, 201 bp, Homo sapiens; identical to SEQ ID NO: 277125

SEQ ID NO: 277487 - DNA, 201 bp, Homo sapiens; identical to SEQ ID NO: 277128

SEQ ID NO: 277488 - DNA, 201 bp, Homo sapiens; identical to SEQ ID NO: 277130

SEQ ID NO: 277489 - DNA, 201 bp, Homo sapiens; identical to SEQ ID NO: 277132

SEQ ID NO: 277490 - DNA, 201 bp, Homo sapiens; identical to SEQ ID NO: 277133

SEQ ID NO: 277491 - DNA, 201 bp, Homo sapiens; identical to SEQ ID NO: 277134

SEQ ID NO: 277492 - DNA, 201 bp, Homo sapiens
aaacaatagaagtttatttggctcatgattctggatctgggaagtcctagagcatggtaccagcatctaacaaggttcatcccatggtggaaggcggaagsaagtgcacaagacagaggcactagggatcaggcttaccttataactacccattcccatgataactaacccactcccatgacaatgacattaatgcatttg

SEQ ID NO: 277493 - DNA, 201 bp, Homo sapiens
taaacaatagaagtttatttggctcatgattctggatctgggaagtcctagagcatggtaccagcatctaacaaggttcatcccatggtggaaggcggaascaagtgcacaagacagaggcactagggatcaggcttaccttataactacccattcccatgataactaacccactcccatgacaatgacattaatgcattt

SEQ ID NO: 277494 - DNA, 201 bp, Homo sapiens; identical to SEQ ID NO: 277135

SEQ ID NO: 277495 - DNA, 201 bp, Homo sapiens; identical to SEQ ID NO: 277136

SEQ ID NO: 277496 - DNA, 201 bp, Homo sapiens; identical to SEQ ID NO: 277138

SEQ ID NO: 277497 - DNA, 201 bp, Homo sapiens; identical to SEQ ID NO: 277139

SEQ ID NO: 277498 - DNA, 201 bp, Homo sapiens; identical to SEQ ID NO: 277140

SEQ ID NO: 277499 - DNA, 201 bp, Homo sapiens; identical to SEQ ID NO: 277141

SEQ ID NO: 277500 - DNA, 201 bp, Homo sapiens; identical to SEQ ID NO: 277142

SEQ ID NO: 277501 - DNA, 201 bp, Homo sapiens; identical to SEQ ID NO: 277143

SEQ ID NO: 277502 - DNA, 201 bp, Homo sapiens; identical to SEQ ID NO: 277144

SEQ ID NO: 277503 - DNA, 201 bp, Homo sapiens; identical to SEQ ID NO: 277146

SEQ ID NO: 277504 - DNA, 201 bp, Homo sapiens; identical to SEQ ID NO: 277148

SEQ ID NO: 277505 - DNA, 201 bp, Homo sapiens; identical to SEQ ID NO: 277149

SEQ ID NO: 277506 - DNA, 201 bp, Homo sapiens; identical to SEQ ID NO: 277150

SEQ ID NO: 277507 - DNA, 201 bp, Homo sapiens; identical to SEQ ID NO: 277151

SEQ ID NO: 277508 - DNA, 201 bp, Homo sapiens; identical to SEQ ID NO: 277152

SEQ ID NO: 277509 - DNA, 201 bp, Homo sapiens; identical to SEQ ID NO: 277153

SEQ ID NO: 277510 - DNA, 201 bp, Homo sapiens; identical to SEQ ID NO: 55697

SEQ ID NO: 277511 - DNA, 201 bp, Homo sapiens; identical to SEQ ID NO: 55700

SEQ ID NO: 277512 - DNA, 201 bp, Homo sapiens; identical to SEQ ID NO: 277158

SEQ ID NO: 277513 - DNA, 201 bp, Homo sapiens; identical to SEQ ID NO: 55701

SEQ ID NO: 277514 - DNA, 201 bp, Homo sapiens; identical to SEQ ID NO: 277160

SEQ ID NO: 277515 - DNA, 201 bp, Homo sapiens; identical to SEQ ID NO: 55702

SEQ ID NO: 277516 - DNA, 201 bp, Homo sapiens; identical to SEQ ID NO: 55688

SEQ ID NO: 277517 - DNA, 201 bp, Homo sapiens; identical to SEQ ID NO: 277163

SEQ ID NO: 277518 - DNA, 201 bp, Homo sapiens; identical to SEQ ID NO: 277164

SEQ ID NO: 277519 - DNA, 201 bp, Homo sapiens; identical to SEQ ID NO: 277165

SEQ ID NO: 277520 - DNA, 201 bp, Homo sapiens; identical to SEQ ID NO: 277166

SEQ ID NO: 277521 - DNA, 201 bp, Homo sapiens; identical to SEQ ID NO: 277167

SEQ ID NO: 277522 - DNA, 201 bp, Homo sapiens; identical to SEQ ID NO: 277168

SEQ ID NO: 277523 - DNA, 201 bp, Homo sapiens; identical to SEQ ID NO: 277169

SEQ ID NO: 277524 - DNA, 201 bp, Homo sapiens; identical to SEQ ID NO: 277170

SEQ ID NO: 277525 - DNA, 201 bp, Homo sapiens; identical to SEQ ID NO: 277171

SEQ ID NO: 277526 - DNA, 201 bp, Homo sapiens; identical to SEQ ID NO: 277173

SEQ ID NO: 277527 - DNA, 201 bp, Homo sapiens; identical to SEQ ID NO: 277175

SEQ ID NO: 277528 - DNA, 201 bp, Homo sapiens; identical to SEQ ID NO: 277177

SEQ ID NO: 277529 - DNA, 201 bp, Homo sapiens; identical to SEQ ID NO: 277178

SEQ ID NO: 277530 - DNA, 201 bp, Homo sapiens; identical to SEQ ID NO: 277179

SEQ ID NO: 277531 - DNA, 201 bp, Homo sapiens; identical to SEQ ID NO: 277181

SEQ ID NO: 277532 - DNA, 201 bp, Homo sapiens; identical to SEQ ID NO: 277183

SEQ ID NO: 277533 - DNA, 201 bp, Homo sapiens; identical to SEQ ID NO: 277182

SEQ ID NO: 277534 - DNA, 201 bp, Homo sapiens; identical to SEQ ID NO: 277185

SEQ ID NO: 277535 - DNA, 201 bp, Homo sapiens; identical to SEQ ID NO: 277184

SEQ ID NO: 277536 - DNA, 201 bp, Homo sapiens; identical to SEQ ID NO: 277186

SEQ ID NO: 277537 - DNA, 201 bp, Homo sapiens; identical to SEQ ID NO: 277187

SEQ ID NO: 277538 - DNA, 201 bp, Homo sapiens; identical to SEQ ID NO: 277188

SEQ ID NO: 277539 - DNA, 201 bp, Homo sapiens; identical to SEQ ID NO: 277189

SEQ ID NO: 277540 - DNA, 201 bp, Homo sapiens; identical to SEQ ID NO: 277190

SEQ ID NO: 277541 - DNA, 201 bp, Homo sapiens; identical to SEQ ID NO: 277191

SEQ ID NO: 277542 - DNA, 201 bp, Homo sapiens; identical to SEQ ID NO: 277192

SEQ ID NO: 277543 - DNA, 201 bp, Homo sapiens; identical to SEQ ID NO: 277193

SEQ ID NO: 277544 - DNA, 201 bp, Homo sapiens; identical to SEQ ID NO: 277194

SEQ ID NO: 277545 - DNA, 201 bp, Homo sapiens; identical to SEQ ID NO: 276712

SEQ ID NO: 277546 - DNA, 201 bp, Homo sapiens; identical to SEQ ID NO: 276713

SEQ ID NO: 277547 - DNA, 201 bp, Homo sapiens; identical to SEQ ID NO: 277195

SEQ ID NO: 277548 - DNA, 201 bp, Homo sapiens; identical to SEQ ID NO: 276714

SEQ ID NO: 277549 - DNA, 201 bp, Homo sapiens; identical to SEQ ID NO: 277196

SEQ ID NO: 277550 - DNA, 201 bp, Homo sapiens; identical to SEQ ID NO: 277197

SEQ ID NO: 277551 - DNA, 201 bp, Homo sapiens; identical to SEQ ID NO: 276715

SEQ ID NO: 277552 - DNA, 201 bp, Homo sapiens; identical to SEQ ID NO: 276716

SEQ ID NO: 277553 - DNA, 201 bp, Homo sapiens; identical to SEQ ID NO: 277198

SEQ ID NO: 277554 - DNA, 201 bp, Homo sapiens; identical to SEQ ID NO: 276717

SEQ ID NO: 277555 - DNA, 201 bp, Homo sapiens; identical to SEQ ID NO: 277199

SEQ ID NO: 277556 - DNA, 201 bp, Homo sapiens; identical to SEQ ID NO: 277200

SEQ ID NO: 277557 - DNA, 201 bp, Homo sapiens; identical to SEQ ID NO: 277201

SEQ ID NO: 277558 - DNA, 201 bp, Homo sapiens; identical to SEQ ID NO: 277203

SEQ ID NO: 277559 - DNA, 201 bp, Homo sapiens; identical to SEQ ID NO: 276719

SEQ ID NO: 277560 - DNA, 201 bp, Homo sapiens; identical to SEQ ID NO: 277206

SEQ ID NO: 277561 - DNA, 201 bp, Homo sapiens; identical to SEQ ID NO: 277208

SEQ ID NO: 277562 - DNA, 201 bp, Homo sapiens; identical to SEQ ID NO: 277207

SEQ ID NO: 277563 - DNA, 201 bp, Homo sapiens; identical to SEQ ID NO: 277209

SEQ ID NO: 277564 - DNA, 201 bp, Homo sapiens; identical to SEQ ID NO: 277210

SEQ ID NO: 277565 - DNA, 201 bp, Homo sapiens; identical to SEQ ID NO: 277211

SEQ ID NO: 277566 - DNA, 201 bp, Homo sapiens; identical to SEQ ID NO: 277212

SEQ ID NO: 277567 - DNA, 201 bp, Homo sapiens; identical to SEQ ID NO: 277214

SEQ ID NO: 277568 - DNA, 201 bp, Homo sapiens; identical to SEQ ID NO: 277218

SEQ ID NO: 277569 - DNA, 201 bp, Homo sapiens; identical to SEQ ID NO: 277217

SEQ ID NO: 277570 - DNA, 201 bp, Homo sapiens; identical to SEQ ID NO: 277221

SEQ ID NO: 277571 - DNA, 201 bp, Homo sapiens; identical to SEQ ID NO: 277220

SEQ ID NO: 277572 - DNA, 201 bp, Homo sapiens; identical to SEQ ID NO: 55694

SEQ ID NO: 277573 - DNA, 201 bp, Homo sapiens; identical to SEQ ID NO: 277223

SEQ ID NO: 277574 - DNA, 201 bp, Homo sapiens; identical to SEQ ID NO: 277226

SEQ ID NO: 277575 - DNA, 201 bp, Homo sapiens; identical to SEQ ID NO: 276729

SEQ ID NO: 277576 - DNA, 201 bp, Homo sapiens; identical to SEQ ID NO: 277227

SEQ ID NO: 277577 - DNA, 201 bp, Homo sapiens; identical to SEQ ID NO: 276730

SEQ ID NO: 277578 - DNA, 201 bp, Homo sapiens; identical to SEQ ID NO: 276731

SEQ ID NO: 277579 - DNA, 201 bp, Homo sapiens; identical to SEQ ID NO: 276735

SEQ ID NO: 277580 - DNA, 201 bp, Homo sapiens; identical to SEQ ID NO: 276739

SEQ ID NO: 277581 - DNA, 201 bp, Homo sapiens; identical to SEQ ID NO: 276740

SEQ ID NO: 277582 - DNA, 201 bp, Homo sapiens; identical to SEQ ID NO: 277231

SEQ ID NO: 277583 - DNA, 201 bp, Homo sapiens; identical to SEQ ID NO: 277232

SEQ ID NO: 277584 - DNA, 201 bp, Homo sapiens; identical to SEQ ID NO: 277234

SEQ ID NO: 277585 - DNA, 201 bp, Homo sapiens; identical to SEQ ID NO: 277236

SEQ ID NO: 277586 - DNA, 201 bp, Homo sapiens; identical to SEQ ID NO: 277238

SEQ ID NO: 277587 - DNA, 201 bp, Homo sapiens; identical to SEQ ID NO: 277239

SEQ ID NO: 277588 - DNA, 201 bp, Homo sapiens; identical to SEQ ID NO: 277237

SEQ ID NO: 277589 - DNA, 201 bp, Homo sapiens; identical to SEQ ID NO: 277241

SEQ ID NO: 277590 - DNA, 201 bp, Homo sapiens; identical to SEQ ID NO: 277240

SEQ ID NO: 277591 - DNA, 201 bp, Homo sapiens; identical to SEQ ID NO: 277242

SEQ ID NO: 277592 - DNA, 201 bp, Homo sapiens; identical to SEQ ID NO: 277245

SEQ ID NO: 277593 - DNA, 201 bp, Homo sapiens; identical to SEQ ID NO: 277247

SEQ ID NO: 277594 - DNA, 201 bp, Homo sapiens; identical to SEQ ID NO: 277249

SEQ ID NO: 277595 - DNA, 201 bp, Homo sapiens; identical to SEQ ID NO: 277252

SEQ ID NO: 277596 - DNA, 201 bp, Homo sapiens; identical to SEQ ID NO: 277251

SEQ ID NO: 277597 - DNA, 201 bp, Homo sapiens; identical to SEQ ID NO: 276744

SEQ ID NO: 277598 - DNA, 201 bp, Homo sapiens; identical to SEQ ID NO: 277257

SEQ ID NO: 277599 - DNA, 201 bp, Homo sapiens; identical to SEQ ID NO: 277256

SEQ ID NO: 277600 - DNA, 201 bp, Homo sapiens; identical to SEQ ID NO: 277258

SEQ ID NO: 277601 - DNA, 201 bp, Homo sapiens; identical to SEQ ID NO: 277260

SEQ ID NO: 277602 - DNA, 201 bp, Homo sapiens; identical to SEQ ID NO: 277259

SEQ ID NO: 277603 - DNA, 201 bp, Homo sapiens; identical to SEQ ID NO: 277261

SEQ ID NO: 277604 - DNA, 201 bp, Homo sapiens; identical to SEQ ID NO: 277264

SEQ ID NO: 277605 - DNA, 201 bp, Homo sapiens; identical to SEQ ID NO: 277263

SEQ ID NO: 277606 - DNA, 201 bp, Homo sapiens; identical to SEQ ID NO: 277267

SEQ ID NO: 277607 - DNA, 201 bp, Homo sapiens; identical to SEQ ID NO: 277266

SEQ ID NO: 277608 - DNA, 201 bp, Homo sapiens; identical to SEQ ID NO: 277271

SEQ ID NO: 277609 - DNA, 201 bp, Homo sapiens; identical to SEQ ID NO: 277270

SEQ ID NO: 277610 - DNA, 201 bp, Homo sapiens; identical to SEQ ID NO: 277274

SEQ ID NO: 277611 - DNA, 201 bp, Homo sapiens; identical to SEQ ID NO: 277273

SEQ ID NO: 277612 - DNA, 201 bp, Homo sapiens; identical to SEQ ID NO: 277277

SEQ ID NO: 277613 - DNA, 201 bp, Homo sapiens; identical to SEQ ID NO: 277276

SEQ ID NO: 277614 - DNA, 201 bp, Homo sapiens; identical to SEQ ID NO: 277278

SEQ ID NO: 277615 - DNA, 201 bp, Homo sapiens; identical to SEQ ID NO: 276753

SEQ ID NO: 277616 - DNA, 201 bp, Homo sapiens; identical to SEQ ID NO: 277279

SEQ ID NO: 277617 - DNA, 201 bp, Homo sapiens; identical to SEQ ID NO: 276758

SEQ ID NO: 277618 - DNA, 201 bp, Homo sapiens; identical to SEQ ID NO: 276761

SEQ ID NO: 277619 - DNA, 201 bp, Homo sapiens; identical to SEQ ID NO: 276764

SEQ ID NO: 277620 - DNA, 201 bp, Homo sapiens; identical to SEQ ID NO: 276771

SEQ ID NO: 277621 - DNA, 201 bp, Homo sapiens; identical to SEQ ID NO: 277281

SEQ ID NO: 277622 - DNA, 201 bp, Homo sapiens; identical to SEQ ID NO: 277282

SEQ ID NO: 277623 - DNA, 201 bp, Homo sapiens; identical to SEQ ID NO: 276772

SEQ ID NO: 277624 - DNA, 201 bp, Homo sapiens; identical to SEQ ID NO: 277284

SEQ ID NO: 277625 - DNA, 201 bp, Homo sapiens; identical to SEQ ID NO: 276774

SEQ ID NO: 277626 - DNA, 201 bp, Homo sapiens; identical to SEQ ID NO: 277286

SEQ ID NO: 277627 - DNA, 201 bp, Homo sapiens; identical to SEQ ID NO: 276773

SEQ ID NO: 277628 - DNA, 201 bp, Homo sapiens; identical to SEQ ID NO: 276775

SEQ ID NO: 277629 - DNA, 201 bp, Homo sapiens; identical to SEQ ID NO: 277288

SEQ ID NO: 277630 - DNA, 201 bp, Homo sapiens; identical to SEQ ID NO: 276777

SEQ ID NO: 277631 - DNA, 201 bp, Homo sapiens; identical to SEQ ID NO: 277290

SEQ ID NO: 277632 - DNA, 201 bp, Homo sapiens; identical to SEQ ID NO: 276779

SEQ ID NO: 277633 - DNA, 201 bp, Homo sapiens; identical to SEQ ID NO: 277292

SEQ ID NO: 277634 - DNA, 201 bp, Homo sapiens; identical to SEQ ID NO: 277293

SEQ ID NO: 277635 - DNA, 201 bp, Homo sapiens; identical to SEQ ID NO: 276781

SEQ ID NO: 277636 - DNA, 201 bp, Homo sapiens; identical to SEQ ID NO: 277294

SEQ ID NO: 277637 - DNA, 201 bp, Homo sapiens; identical to SEQ ID NO: 276783

SEQ ID NO: 277638 - DNA, 201 bp, Homo sapiens; identical to SEQ ID NO: 277295

SEQ ID NO: 277639 - DNA, 201 bp, Homo sapiens; identical to SEQ ID NO: 276786

SEQ ID NO: 277640 - DNA, 201 bp, Homo sapiens; identical to SEQ ID NO: 276785

SEQ ID NO: 277641 - DNA, 201 bp, Homo sapiens; identical to SEQ ID NO: 276788

SEQ ID NO: 277642 - DNA, 201 bp, Homo sapiens; identical to SEQ ID NO: 276790

SEQ ID NO: 277643 - DNA, 201 bp, Homo sapiens; identical to SEQ ID NO: 277296

SEQ ID NO: 277644 - DNA, 201 bp, Homo sapiens; identical to SEQ ID NO: 277301

SEQ ID NO: 277645 - DNA, 201 bp, Homo sapiens; identical to SEQ ID NO: 277306

SEQ ID NO: 277646 - DNA, 201 bp, Homo sapiens; identical to SEQ ID NO: 277308

SEQ ID NO: 277647 - DNA, 201 bp, Homo sapiens; identical to SEQ ID NO: 277311

SEQ ID NO: 277648 - DNA, 201 bp, Homo sapiens; identical to SEQ ID NO: 276800

SEQ ID NO: 277649 - DNA, 201 bp, Homo sapiens; identical to SEQ ID NO: 277313

SEQ ID NO: 277650 - DNA, 201 bp, Homo sapiens; identical to SEQ ID NO: 276801

SEQ ID NO: 277651 - DNA, 201 bp, Homo sapiens; identical to SEQ ID NO: 277316

SEQ ID NO: 277652 - DNA, 201 bp, Homo sapiens; identical to SEQ ID NO: 276802

SEQ ID NO: 277653 - DNA, 201 bp, Homo sapiens; identical to SEQ ID NO: 277317

SEQ ID NO: 277654 - DNA, 201 bp, Homo sapiens; identical to SEQ ID NO: 276804

SEQ ID NO: 277655 - DNA, 201 bp, Homo sapiens; identical to SEQ ID NO: 276806

SEQ ID NO: 277656 - DNA, 201 bp, Homo sapiens; identical to SEQ ID NO: 276808

SEQ ID NO: 277657 - DNA, 201 bp, Homo sapiens; identical to SEQ ID NO: 276809

SEQ ID NO: 277658 - DNA, 201 bp, Homo sapiens; identical to SEQ ID NO: 276811

SEQ ID NO: 277659 - DNA, 201 bp, Homo sapiens; identical to SEQ ID NO: 276813

SEQ ID NO: 277660 - DNA, 201 bp, Homo sapiens; identical to SEQ ID NO: 276817

SEQ ID NO: 277661 - DNA, 201 bp, Homo sapiens; identical to SEQ ID NO: 276816

SEQ ID NO: 277662 - DNA, 201 bp, Homo sapiens; identical to SEQ ID NO: 55693

SEQ ID NO: 277663 - DNA, 201 bp, Homo sapiens; identical to SEQ ID NO: 276819

SEQ ID NO: 277664 - DNA, 201 bp, Homo sapiens; identical to SEQ ID NO: 276822

SEQ ID NO: 277665 - DNA, 201 bp, Homo sapiens; identical to SEQ ID NO: 276824
  misc_feature (1)...(201): n = A,T,C or G

SEQ ID NO: 277666 - DNA, 201 bp, Homo sapiens; identical to SEQ ID NO: 276826

SEQ ID NO: 277667 - DNA, 201 bp, Homo sapiens; identical to SEQ ID NO: 276827

SEQ ID NO: 277668 - DNA, 201 bp, Homo sapiens; identical to SEQ ID NO: 276828

SEQ ID NO: 277669 - DNA, 201 bp, Homo sapiens; identical to SEQ ID NO: 276829

SEQ ID NO: 277670 - DNA, 201 bp, Homo sapiens; identical to SEQ ID NO: 277325

SEQ ID NO: 277671 - DNA, 201 bp, Homo sapiens; identical to SEQ ID NO: 276831

SEQ ID NO: 277672 - DNA, 201 bp, Homo sapiens; identical to SEQ ID NO: 276835

SEQ ID NO: 277673 - DNA, 201 bp, Homo sapiens; identical to SEQ ID NO: 276838

SEQ ID NO: 277674 - DNA, 201 bp, Homo sapiens; identical to SEQ ID NO: 276848

SEQ ID NO: 277675 - DNA, 201 bp, Homo sapiens; identical to SEQ ID NO: 276849

SEQ ID NO: 277676 - DNA, 201 bp, Homo sapiens; identical to SEQ ID NO: 276850

SEQ ID NO: 277677 - DNA, 201 bp, Homo sapiens; identical to SEQ ID NO: 276851

SEQ ID NO: 277678 - DNA, 201 bp, Homo sapiens; identical to SEQ ID NO: 277343

SEQ ID NO: 277679 - DNA, 201 bp, Homo sapiens; identical to SEQ ID NO: 276853

SEQ ID NO: 277680 - DNA, 201 bp, Homo sapiens; identical to SEQ ID NO: 276852

SEQ ID NO: 277681 - DNA, 201 bp, Homo sapiens; identical to SEQ ID NO: 276857

SEQ ID NO: 277682 - DNA, 201 bp, Homo sapiens; identical to SEQ ID NO: 276856

SEQ ID NO: 277683 - DNA, 201 bp, Homo sapiens; identical to SEQ ID NO: 276860

SEQ ID NO: 277684 - DNA, 201 bp, Homo sapiens; identical to SEQ ID NO: 276859

SEQ ID NO: 277685 - DNA, 201 bp, Homo sapiens; identical to SEQ ID NO: 276862

SEQ ID NO: 277686 - DNA, 201 bp, Homo sapiens; identical to SEQ ID NO: 276863

SEQ ID NO: 277687 - DNA, 201 bp, Homo sapiens; identical to SEQ ID NO: 276865

SEQ ID NO: 277688 - DNA, 201 bp, Homo sapiens; identical to SEQ ID NO: 276866

SEQ ID NO: 277689 - DNA, 201 bp, Homo sapiens; identical to SEQ ID NO: 276868

SEQ ID NO: 277690 - DNA, 201 bp, Homo sapiens; identical to SEQ ID NO: 276869

SEQ ID NO: 277691 - DNA, 201 bp, Homo sapiens; identical to SEQ ID NO: 276871

SEQ ID NO: 277692 - DNA, 201 bp, Homo sapiens; identical to SEQ ID NO: 276875

SEQ ID NO: 277693 - DNA, 201 bp, Homo sapiens; identical to SEQ ID NO: 276874

SEQ ID NO: 277694 - DNA, 201 bp, Homo sapiens; identical to SEQ ID NO: 276879

SEQ ID NO: 277695 - DNA, 201 bp, Homo sapiens; identical to SEQ ID NO: 276878

SEQ ID NO: 277696 - DNA, 201 bp, Homo sapiens; identical to SEQ ID NO: 276882

SEQ ID NO: 277697 - DNA, 201 bp, Homo sapiens; identical to SEQ ID NO: 276885

SEQ ID NO: 277698 - DNA, 201 bp, Homo sapiens; identical to SEQ ID NO: 276887

SEQ ID NO: 277699 - DNA, 201 bp, Homo sapiens; identical to SEQ ID NO: 276889

SEQ ID NO: 277700 - DNA, 201 bp, Homo sapiens; identical to SEQ ID NO: 276891

SEQ ID NO: 277701 - DNA, 201 bp, Homo sapiens; identical to SEQ ID NO: 276892

SEQ ID NO: 277702 - DNA, 201 bp, Homo sapiens; identical to SEQ ID NO: 276893

SEQ ID NO: 277703 - DNA, 201 bp, Homo sapiens; identical to SEQ ID NO: 276896

SEQ ID NO: 277704 - DNA, 201 bp, Homo sapiens; identical to SEQ ID NO: 277361

SEQ ID NO: 277705 - DNA, 201 bp, Homo sapiens; identical to SEQ ID NO: 277362

SEQ ID NO: 277706 - DNA, 201 bp, Homo sapiens; identical to SEQ ID NO: 276901

SEQ ID NO: 277707 - DNA, 201 bp, Homo sapiens; identical to SEQ ID NO: 276902

SEQ ID NO: 277708 - DNA, 201 bp, Homo sapiens; identical to SEQ ID NO: 276903

SEQ ID NO: 277709 - DNA, 201 bp, Homo sapiens; identical to SEQ ID NO: 276904

SEQ ID NO: 277710 - DNA, 201 bp, Homo sapiens; identical to SEQ ID NO: 276906

SEQ ID NO: 277711 - DNA, 201 bp, Homo sapiens; identical to SEQ ID NO: 276908

SEQ ID NO: 277712 - DNA, 201 bp, Homo sapiens; identical to SEQ ID NO: 276914

SEQ ID NO: 277713 - DNA, 201 bp, Homo sapiens; identical to SEQ ID NO: 276913

SEQ ID NO: 277714 - DNA, 201 bp, Homo sapiens; identical to SEQ ID NO: 276917

SEQ ID NO: 277715 - DNA, 201 bp, Homo sapiens; identical to SEQ ID NO: 277371

SEQ ID NO: 277716 - DNA, 201 bp, Homo sapiens; identical to SEQ ID NO: 276919

SEQ ID NO: 277717 - DNA, 201 bp, Homo sapiens; identical to SEQ ID NO: 276920

SEQ ID NO: 277718 - DNA, 201 bp, Homo sapiens; identical to SEQ ID NO: 276922

SEQ ID NO: 277719 - DNA, 201 bp, Homo sapiens; identical to SEQ ID NO: 276924

SEQ ID NO: 277720 - DNA, 201 bp, Homo sapiens; identical to SEQ ID NO: 276926

SEQ ID NO: 277721 - DNA, 201 bp, Homo sapiens; identical to SEQ ID NO: 276928

SEQ ID NO: 277722 - DNA, 201 bp, Homo sapiens; identical to SEQ ID NO: 276929

SEQ ID NO: 277723 - DNA, 201 bp, Homo sapiens; identical to SEQ ID NO: 276930

SEQ ID NO: 277724 - DNA, 201 bp, Homo sapiens; identical to SEQ ID NO: 276931

SEQ ID NO: 277725 - DNA, 201 bp, Homo sapiens; identical to SEQ ID NO: 276932

SEQ ID NO: 277726 - DNA, 201 bp, Homo sapiens; identical to SEQ ID NO: 276933

SEQ ID NO: 277727 - DNA, 201 bp, Homo sapiens; identical to SEQ ID NO: 276934

SEQ ID NO: 277728 - DNA, 201 bp, Homo sapiens; identical to SEQ ID NO: 277379

SEQ ID NO: 277729 - DNA, 201 bp, Homo sapiens; identical to SEQ ID NO: 277381

SEQ ID NO: 277730 - DNA, 201 bp, Homo sapiens; identical to SEQ ID NO: 277383

SEQ ID NO: 277731 - DNA, 201 bp, Homo sapiens; identical to SEQ ID NO: 277384

SEQ ID NO: 277732 - DNA, 201 bp, Homo sapiens; identical to SEQ ID NO: 276939

SEQ ID NO: 277733 - DNA, 201 bp, Homo sapiens; identical to SEQ ID NO: 276940

SEQ ID NO: 277734 - DNA, 201 bp, Homo sapiens; identical to SEQ ID NO: 276941

SEQ ID NO: 277735 - DNA, 201 bp, Homo sapiens; identical to SEQ ID NO: 276942

SEQ ID NO: 277736 - DNA, 201 bp, Homo sapiens; identical to SEQ ID NO: 276943

SEQ ID NO: 277737 - DNA, 201 bp, Homo sapiens; identical to SEQ ID NO: 276945

SEQ ID NO: 277738 - DNA, 201 bp, Homo sapiens; identical to SEQ ID NO: 276947

SEQ ID NO: 277739 - DNA, 201 bp, Homo sapiens; identical to SEQ ID NO: 276948

SEQ ID NO: 277740 - DNA, 201 bp, Homo sapiens; identical to SEQ ID NO: 276950

SEQ ID NO: 277741 - DNA, 201 bp, Homo sapiens; identical to SEQ ID NO: 276952

SEQ ID NO: 277742 - DNA, 201 bp, Homo sapiens; identical to SEQ ID NO: 276954

SEQ ID NO: 277743 - DNA, 201 bp, Homo sapiens; identical to SEQ ID NO: 276956

SEQ ID NO: 277744 - DNA, 201 bp, Homo sapiens; identical to SEQ ID NO: 276958

SEQ ID NO: 277745 - DNA, 201 bp, Homo sapiens; identical to SEQ ID NO: 276960

SEQ ID NO: 277746 - DNA, 201 bp, Homo sapiens; identical to SEQ ID NO: 276962

SEQ ID NO: 277747 - DNA, 201 bp, Homo sapiens; identical to SEQ ID NO: 276966

SEQ ID NO: 277748 - DNA, 201 bp, Homo sapiens; identical to SEQ ID NO: 276968

SEQ ID NO: 277749 - DNA, 201 bp, Homo sapiens; identical to SEQ ID NO: 276972

SEQ ID NO: 277750 - DNA, 201 bp, Homo sapiens; identical to SEQ ID NO: 276973

SEQ ID NO: 277751 - DNA, 201 bp, Homo sapiens; identical to SEQ ID NO: 276974

SEQ ID NO: 277752 - DNA, 201 bp, Homo sapiens; identical to SEQ ID NO: 276975

SEQ ID NO: 277753 - DNA, 201 bp, Homo sapiens; identical to SEQ ID NO: 276976

SEQ ID NO: 277754 - DNA, 201 bp, Homo sapiens; identical to SEQ ID NO: 277396

SEQ ID NO: 277755 - DNA, 201 bp, Homo sapiens; identical to SEQ ID NO: 277398

SEQ ID NO: 277756 - DNA, 201 bp, Homo sapiens; identical to SEQ ID NO: 277400

SEQ ID NO: 277757 - DNA, 201 bp, Homo sapiens; identical to SEQ ID NO: 277401

SEQ ID NO: 277758 - DNA, 201 bp, Homo sapiens; identical to SEQ ID NO: 276983

SEQ ID NO: 277759 - DNA, 201 bp, Homo sapiens; identical to SEQ ID NO: 277402

SEQ ID NO: 277760 - DNA, 201 bp, Homo sapiens; identical to SEQ ID NO: 276984

SEQ ID NO: 277761 - DNA, 201 bp, Homo sapiens; identical to SEQ ID NO: 277403

SEQ ID NO: 277762 - DNA, 201 bp, Homo sapiens; identical to SEQ ID NO: 276985

SEQ ID NO: 277763 - DNA, 201 bp, Homo sapiens; identical to SEQ ID NO: 276987

SEQ ID NO: 277764 - DNA, 201 bp, Homo sapiens; identical to SEQ ID NO: 277405

SEQ ID NO: 277765 - DNA, 201 bp, Homo sapiens; identical to SEQ ID NO: 276989

SEQ ID NO: 277766 - DNA, 201 bp, Homo sapiens; identical to SEQ ID NO: 276990

SEQ ID NO: 277767 - DNA, 201 bp, Homo sapiens; identical to SEQ ID NO: 276992

SEQ ID NO: 277768 - DNA, 201 bp, Homo sapiens; identical to SEQ ID NO: 276993

SEQ ID NO: 277769 - DNA, 201 bp, Homo sapiens; identical to SEQ ID NO: 55696

SEQ ID NO: 277770 - DNA, 201 bp, Homo sapiens; identical to SEQ ID NO: 276996

SEQ ID NO: 277771 - DNA, 201 bp, Homo sapiens; identical to SEQ ID NO: 276999

SEQ ID NO: 277772 - DNA, 201 bp, Homo sapiens; identical to SEQ ID NO: 277002

SEQ ID NO: 277773 - DNA, 201 bp, Homo sapiens
gaccagttctaaaattccttggggatgtcattgatttaatcacaccttctcagttggtgttgcattgattatctctgcattatttagattgtcactggcartgatgctaaaaaatgccaaatgccaccttgcaaacctactgtgggtcccagtcggaaatggagccctccacctcagtgccagatatactgctcctccaga

SEQ ID NO: 277774 - DNA, 201 bp, Homo sapiens; identical to SEQ ID NO: 277407

SEQ ID NO: 277775 - DNA, 201 bp, Homo sapiens; identical to SEQ ID NO: 277005

SEQ ID NO: 277776 - DNA, 201 bp, Homo sapiens; identical to SEQ ID NO: 277008

SEQ ID NO: 277777 - DNA, 201 bp, Homo sapiens; identical to SEQ ID NO: 277011

SEQ ID NO: 277778 - DNA, 201 bp, Homo sapiens; identical to SEQ ID NO: 277012

SEQ ID NO: 277779 - DNA, 201 bp, Homo sapiens; identical to SEQ ID NO: 277014

SEQ ID NO: 277780 - DNA, 201 bp, Homo sapiens; identical to SEQ ID NO: 277016

SEQ ID NO: 277781 - DNA, 201 bp, Homo sapiens; identical to SEQ ID NO: 277017

SEQ ID NO: 277782 - DNA, 201 bp, Homo sapiens; identical to SEQ ID NO: 277018

SEQ ID NO: 277783 - DNA, 201 bp, Homo sapiens; identical to SEQ ID NO: 277021

SEQ ID NO: 277784 - DNA, 201 bp, Homo sapiens; identical to SEQ ID NO: 277023

SEQ ID NO: 277785 - DNA, 201 bp, Homo sapiens; identical to SEQ ID NO: 277024

SEQ ID NO: 277786 - DNA, 201 bp, Homo sapiens; identical to SEQ ID NO: 277025

SEQ ID NO: 277787 - DNA, 201 bp, Homo sapiens; identical to SEQ ID NO: 277026

SEQ ID NO: 277788 - DNA, 201 bp, Homo sapiens; identical to SEQ ID NO: 277027

SEQ ID NO: 277789 - DNA, 201 bp, Homo sapiens; identical to SEQ ID NO: 277028

SEQ ID NO: 277790 - DNA, 201 bp, Homo sapiens; identical to SEQ ID NO: 277029

SEQ ID NO: 277791 - DNA, 201 bp, Homo sapiens; identical to SEQ ID NO: 277030

SEQ ID NO: 277792 - DNA, 201 bp, Homo sapiens; identical to SEQ ID NO: 277031

SEQ ID NO: 277793 - DNA, 201 bp, Homo sapiens; identical to SEQ ID NO: 277032

SEQ ID NO: 277794 - DNA, 201 bp, Homo sapiens; identical to SEQ ID NO: 277033

SEQ ID NO: 277795 - DNA, 201 bp, Homo sapiens; identical to SEQ ID NO: 277034

SEQ ID NO: 277796 - DNA, 201 bp, Homo sapiens; identical to SEQ ID NO: 277412

SEQ ID NO: 277797 - DNA, 201 bp, Homo sapiens; identical to SEQ ID NO: 277036

SEQ ID NO: 277798 - DNA, 201 bp, Homo sapiens; identical to SEQ ID NO: 277037

SEQ ID NO: 277799 - DNA, 201 bp, Homo sapiens; identical to SEQ ID NO: 277038

SEQ ID NO: 277800 - DNA, 201 bp, Homo sapiens; identical to SEQ ID NO: 277039

SEQ ID NO: 277801 - DNA, 201 bp, Homo sapiens; identical to SEQ ID NO: 55698

SEQ ID NO: 277802 - DNA, 201 bp, Homo sapiens; identical to SEQ ID NO: 277418

SEQ ID NO: 277803 - DNA, 201 bp, Homo sapiens; identical to SEQ ID NO: 277041

SEQ ID NO: 277804 - DNA, 201 bp, Homo sapiens; identical to SEQ ID NO: 277042

SEQ ID NO: 277805 - DNA, 201 bp, Homo sapiens; identical to SEQ ID NO: 277420

SEQ ID NO: 277806 - DNA, 201 bp, Homo sapiens; identical to SEQ ID NO: 277421

SEQ ID NO: 277807 - DNA, 201 bp, Homo sapiens; identical to SEQ ID NO: 277044

SEQ ID NO: 277808 - DNA, 201 bp, Homo sapiens; identical to SEQ ID NO: 277422

SEQ ID NO: 277809 - DNA, 201 bp, Homo sapiens; identical to SEQ ID NO: 277047

SEQ ID NO: 277810 - DNA, 201 bp, Homo sapiens; identical to SEQ ID NO: 277423

SEQ ID NO: 277811 - DNA, 201 bp, Homo sapiens; identical to SEQ ID NO: 277052

SEQ ID NO: 277812 - DNA, 201 bp, Homo sapiens; identical to SEQ ID NO: 277053

SEQ ID NO: 277813 - DNA, 201 bp, Homo sapiens; identical to SEQ ID NO: 277054

SEQ ID NO: 277814 - DNA, 201 bp, Homo sapiens; identical to SEQ ID NO: 277056

SEQ ID NO: 277815 - DNA, 201 bp, Homo sapiens; identical to SEQ ID NO: 277055

SEQ ID NO: 277816 - DNA, 201 bp, Homo sapiens; identical to SEQ ID NO: 55862

SEQ ID NO: 277817 - DNA, 201 bp, Homo sapiens; identical to SEQ ID NO: 55864

SEQ ID NO: 277818 - DNA, 201 bp, Homo sapiens; identical to SEQ ID NO: 55866

SEQ ID NO: 277819 - DNA, 201 bp, Homo sapiens
gatttatgcagatgttggaaataaaacctgcgcaggcttccctgggagttttggatactacgacattgatgcccagacctttgctgactggggagtagatstgctaaaatttgatggttgttactgtgacagtttggaaaatttggcagatggtaatgtttcattccagagatttagccacaaaggaaagaactttgaggc

SEQ ID NO: 277820 - DNA, 201 bp, Homo sapiens; identical to SEQ ID NO: 55867

SEQ ID NO: 277821 - DNA, 201 bp, Homo sapiens
gggatttatgcagatgttggaaataaaacctgcgcaggcttccctgggagttttggatactacgacattgatgcccagacctttgctgactggggagtagwtctgctaaaatttgatggttgttactgtgacagtttggaaaatttggcagatggtaatgtttcattccagagatttagccacaaaggaaagaactttgag

SEQ ID NO: 277822 - DNA, 201 bp, Homo sapiens; identical to SEQ ID NO: 55868

SEQ ID NO: 277823 - DNA, 201 bp, Homo sapiens; identical to SEQ ID NO: 55869

SEQ ID NO: 277824 - DNA, 201 bp, Homo sapiens
tgaagctagggatttatgcagatgttggaaataaaacctgcgcaggcttccctgggagttttggatactacgacattgatgcccagacctttgctgactgsggagtagatctgctaaaatttgatggttgttactgtgacagtttggaaaatttggcagatggtaatgtttcattccagagatttagccacaaaggaaaga

SEQ ID NO: 277825 - DNA, 201 bp, Homo sapiens
tttattcatgtctaatgacctccgacacatcagccctcaagccaaagctctccttcaggataaggacgtaattgccatcaatcaggaccccttgggcaagmaagggtaccagcttagacaggtaaataagagtatatattttaagatggctttatatacccaataccaactttgtcttgggcctaaatctatttttttccc

SEQ ID NO: 277826 - DNA, 201 bp, Homo sapiens
ttcatgtctaatgacctccgacacatcagccctcaagccaaagctctccttcaggataaggacgtaattgccatcaatcaggaccccttgggcaagcaagsgtaccagcttagacaggtaaataagagtatatattttaagatggctttatatacccaataccaactttgtcttgggcctaaatctatttttttcccttgc

SEQ ID NO: 277827 - DNA, 201 bp, Homo sapiens
ctgaagctagggatttatgcagatgttggaaataaaacctgcgcaggcttccctgggagttttggatactacgacattgatgcccagacctttgctgactrgggagtagatctgctaaaatttgatggttgttactgtgacagtttggaaaatttggcagatggtaatgtttcattccagagatttagccacaaaggaaag

SEQ ID NO: 277828 - DNA, 201 bp, Homo sapiens
actgaagctagggatttatgcagatgttggaaataaaacctgcgcaggcttccctgggagttttggatactacgacattgatgcccagacctttgctgacyggggagtagatctgctaaaatttgatggttgttactgtgacagtttggaaaatttggcagatggtaatgtttcattccagagatttagccacaaaggaaa

SEQ ID NO: 277829 - DNA, 201 bp, Homo sapiens
ggttcacagcaaaggactgaagctagggatttatgcagatgttggaaataaaacctgcgcaggcttccctgggagttttggatactacgacattgatgccyagacctttgctgactggggagtagatctgctaaaatttgatggttgttactgtgacagtttggaaaatttggcagatggtaatgtttcattccagagatt

SEQ ID NO: 277830 - DNA, 201 bp, Homo sapiens
caggttcacagcaaaggactgaagctagggatttatgcagatgttggaaataaaacctgcgcaggcttccctgggagttttggatactacgacattgatgyccagacctttgctgactggggagtagatctgctaaaatttgatggttgttactgtgacagtttggaaaatttggcagatggtaatgtttcattccagaga

SEQ ID NO: 277831 - DNA, 201 bp, Homo sapiens; identical to SEQ ID NO: 55878

SEQ ID NO: 277832 - DNA, 201 bp, Homo sapiens; identical to SEQ ID NO: 55880

SEQ ID NO: 277833 - DNA, 201 bp, Homo sapiens; identical to SEQ ID NO: 55881

SEQ ID NO: 277834 - DNA, 201 bp, Homo sapiens
tcacaaggatgttagtagaaagtaaacagaagagtcatatctgttttcacagcccaattatacagaaatccgacagtactgcaatcactggcgaaattttrctgacattgatgattcctggaaaagtataaagagtatcttggactggacatcttttaaccaggagagaattgttgatgttgctggaccagggggttggaa

SEQ ID NO: 277835 - DNA, 201 bp, Homo sapiens
aatgggaggtacctaagtgttcatttaatgaattgtaatgattattggaatttctctttcagtgagaagctcttcatggagatggcagagctcatggtctsagaaggctggaaggatgcaggttatgagtacctctgcattgatgactgttggatggctccccaaagagattcagaaggcagacttcaggcagaccctcag

SEQ ID NO: 277836 - DNA, 201 bp, Homo sapiens
atgcctgtaatcccagctacttgggaagctgagacagaagagtcacttgaacctgggaaacagaggttgcagtgagccaagatcgcaccactgcactccascctggatgacagactgaaccccatctcaaaaaattaaaataaaataaaataaaataactatatatatagccccagctggaaattcatttctttcccttat

SEQ ID NO: 277837 - DNA, 201 bp, Homo sapiens
tgactcttttcctccctctcatttcaggttcacagcaaaggactgaagctagggatttatgcagatgttggaaataaaacctgcgcaggcttccctgggarttttggatactacgacattgatgcccagacctttgctgactggggagtagatctgctaaaatttgatggttgttactgtgacagtttggaaaatttggca

SEQ ID NO: 277838 - DNA, 201 bp, Homo sapiens
tttattctttgtcttccaacaaactcatctggatgattttgggggtttgtggggaaaagcccccaatacctggtgaagtaaccttgtctcttcccccagcctggaatggttctctctttctgctacctcacgattgtgcttctacaatggtgactcttttcctccctctcatttcaggttcacagcaaaggactgaagcta

SEQ ID NO: 277839 - DNA, 201 bp, Homo sapiens
atttattctttgtcttccaacaaactcatctggatgattttgggggtttgtggggaaaagcccccaatacctggtgaagtaaccttgtctcttcccccagcctggaatggttctctctttctgctacctcacgattgtgcttctacaatggtgactcttttcctccctctcatttcaggttcacagcaaaggactgaagct

SEQ ID NO: 277840 - DNA, 201 bp, Homo sapiens
gggatttattctttgtcttccaacaaactcatctggatgattttgggggtttgtggggaaaagcccccaatacctggtgaagtaaccttgtctcttcccccagcctggaatggttctctctttctgctacctcacgattgtgcttctacaatggtgactcttttcctccctctcatttcaggttcacagcaaaggactgaa

SEQ ID NO: 277841 - DNA, 201 bp, Homo sapiens
ttctctttcagtgagaagctcttcatggagatggcagagctcatggtctcagaaggctggaaggatgcaggttatgagtacctctgcattgatgactgttsgatggctccccaaagagattcagaaggcagacttcaggcagaccctcagcgctttcctcatgggattcgccagctagctaattatgtgagtttatagata

SEQ ID NO: 277842 - DNA, 201 bp, Homo sapiens
gggatttaagttttcttaatacttgatggagtcctatgtaattttgcagcttttaattttactaagaccattttagttctgattatagaagtaaattaacwttaagggatttcaagttatatggcctacttctgaagcaaacttcttacagtgaaaattcattataagggtttagacctccttatggagacgttcaatctg

SEQ ID NO: 277843 - DNA, 201 bp, Homo sapiens
agaccattttagttctgattatagaagtaaattaactttaagggatttcaagttatatggcctacttctgaagcaaacttcttacagtgaaaattcattayaagggtttagacctccttatggagacgttcaatctgtaaactcaagagaaggctacaagtgcctcctttaaactgttttcatctcacaaggatgttagta

SEQ ID NO: 277844 - DNA, 201 bp, Homo sapiens
ttctctttctcttctttcctctctctttctctctctccctgcccggttctcttttttcactgctccttgcagagcagggccaccccataggcagtgtgccyaaagtagccctgcccggttctattcagacccttcttgtgaacttctgctcttcctctgccgggtgctaaccgttagaacatctagggtgggtaggaggaa

SEQ ID NO: 277845 - DNA, 201 bp, Homo sapiens
aagcaaccacactttcttggtttttcagggagacaactttgaagtgtgggaacgacctctctcaggcttagcctgggctgtagctatgataaaccggcagragattggtggacctcgctcttataccatcgcagttgcttccctgggtaaaggagtggcctgtaatcctgcctgcttcatcacacagctcctccctgtgaa

SEQ ID NO: 277846 - DNA, 201 bp, Homo sapiens
attcatgtctaatgacctccgacacatcagccctcaagccaaagctctccttcaggataaggacgtaattgccatcaatcaggaccccttgggcaagcaarggtaccagcttagacaggtaaataagagtatatattttaagatggctttatatacccaataccaactttgtcttgggcctaaatctatttttttcccttg

SEQ ID NO: 277847 - DNA, 201 bp, Homo sapiens
ttctgacattaagaatgaatgccaaactaacagggccacttatcactagttgctaagcaaccacactttcttggtttttcagggagacaactttgaagtgygggaacgacctctctcaggcttagcctgggctgtagctatgataaaccggcaggagattggtggacctcgctcttataccatcgcagttgcttccctggg

SEQ ID NO: 277848 - DNA, 201 bp, Homo sapiens
ctgacattaagaatgaatgccaaactaacagggccacttatcactagttgctaagcaaccacactttcttggtttttcagggagacaactttgaagtgtgrgaacgacctctctcaggcttagcctgggctgtagctatgataaaccggcaggagattggtggacctcgctcttataccatcgcagttgcttccctgggta

SEQ ID NO: 277849 - DNA, 201 bp, Homo sapiens
tcaggttcacagcaaaggactgaagctagggatttatgcagatgttggaaataaaacctgcgcaggcttccctgggagttttggatactacgacattgatrcccagacctttgctgactggggagtagatctgctaaaatttgatggttgttactgtgacagtttggaaaatttggcagatggtaatgtttcattccagag

SEQ ID NO: 277850 - DNA, 201 bp, Homo sapiens
tgacattaagaatgaatgccaaactaacagggccacttatcactagttgctaagcaaccacactttcttggtttttcagggagacaactttgaagtgtggraacgacctctctcaggcttagcctgggctgtagctatgataaaccggcaggagattggtggacctcgctcttataccatcgcagttgcttccctgggtaa

SEQ ID NO: 277851 - DNA, 201 bp, Homo sapiens
acaatggtgactcttttcctccctctcatttcaggttcacagcaaaggactgaagctagggatttatgcagatgttggaaataaaacctgcgcaggcttcyctgggagttttggatactacgacattgatgcccagacctttgctgactggggagtagatctgctaaaatttgatggttgttactgtgacagtttggaaaa

SEQ ID NO: 277852 - DNA, 201 bp, Homo sapiens
cttctacaatggtgactcttttcctccctctcatttcaggttcacagcaaaggactgaagctagggatttatgcagatgttggaaataaaacctgcgcagkcttccctgggagttttggatactacgacattgatgcccagacctttgctgactggggagtagatctgctaaaatttgatggttgttactgtgacagtttg

SEQ ID NO: 277853 - DNA, 201 bp, Homo sapiens
tgtgcttctacaatggtgactcttttcctccctctcatttcaggttcacagcaaaggactgaagctagggatttatgcagatgttggaaataaaacctgcscaggcttccctgggagttttggatactacgacattgatgcccagacctttgctgactggggagtagatctgctaaaatttgatggttgttactgtgacag

SEQ ID NO: 277854 - DNA, 201 bp, Homo sapiens; identical to SEQ ID NO: 55912

SEQ ID NO: 277855 - DNA, 201 bp, Homo sapiens
attgtgcttctacaatggtgactcttttcctccctctcatttcaggttcacagcaaaggactgaagctagggatttatgcagatgttggaaataaaacctrcgcaggcttccctgggagttttggatactacgacattgatgcccagacctttgctgactggggagtagatctgctaaaatttgatggttgttactgtgac

SEQ ID NO: 277856 - DNA, 201 bp, Homo sapiens
aatttctctttcagtgagaagctcttcatggagatggcagagctcatggtctcagaaggctggaaggatgcaggttatgagtacctctgcattgatgactvttggatggctccccaaagagattcagaaggcagacttcaggcagaccctcagcgctttcctcatgggattcgccagctagctaattatgtgagtttatag

SEQ ID NO: 277857 - DNA, 201 bp, Homo sapiens
ttcctggccctcgtttcctgggacatccctggggctagagcactggacaatggattggcaaggacgcctaccatgggctggctgcactgggagcgcttcawgtgcaaccttgactgccaggaagagccagattcctgcatcaggtatcagatattgggtactcccttccctttgcttttccatgtgtttgggtgtgtttgg

SEQ ID NO: 277858 - DNA, 201 bp, Homo sapiens
gcttgcgcttcgcttcctggccctcgtttcctgggacatccctggggctagagcactggacaatggattggcaaggacgcctaccatgggctggctgcackgggagcgcttcatgtgcaaccttgactgccaggaagagccagattcctgcatcaggtatcagatattgggtactcccttccctttgcttttccatgtgtt

SEQ ID NO: 277859 - DNA, 201 bp, Homo sapiens
cgcgcttgcgcttcgcttcctggccctcgtttcctgggacatccctggggctagagcactggacaatggattggcaaggacgcctaccatgggctggctgyactgggagcgcttcatgtgcaaccttgactgccaggaagagccagattcctgcatcaggtatcagatattgggtactcccttccctttgcttttccatgt

SEQ ID NO: 277860 - DNA, 201 bp, Homo sapiens
gaactacatctgggctgcgcgcttgcgcttcgcttcctggccctcgtttcctgggacatccctggggctagagcactggacaatggattggcaaggacgcytaccatgggctggctgcactgggagcgcttcatgtgcaaccttgactgccaggaagagccagattcctgcatcaggtatcagatattgggtactcccttc

SEQ ID NO: 277861 - DNA, 201 bp, Homo sapiens
tgcccatatgacagaacataataaaaatcaatcagttcaagattttttccagtttttaaaaggaagatttatttaacaagtttcacttagtacaatacatytaaatggaaatcacaatacaaggaaagatttaaaccaaagcctcagattttcatacaaacgacacgaccaaacttctaaagtattggtattacatcttaa

SEQ ID NO: 277862 - DNA, 201 bp, Homo sapiens
  misc_feature (1)...(201): n = A,T,C or G
tggagacgttcaatctgtaaactcaagagaaggctacaagtgcctcctttaaactgttttcatctcacaaggatgttagtagaaagtaaacagaagagtcntatctgttttcacagcccaattatacagaaatccgacagtactgcaatcactggcgaaattttgctgacattgatgattcctggaaaagtataaagagta

SEQ ID NO: 277863 - DNA, 201 bp, Homo sapiens; identical to SEQ ID NO: 55769

SEQ ID NO: 277864 - DNA, 201 bp, Homo sapiens
ggctgcgcgcttgcgcttcgcttcctggccctcgtttcctgggacatccctggggctagagcactggacaatggattggcaaggacgcctaccatgggctrgctgcactgggagcgcttcatgtgcaaccttgactgccaggaagagccagattcctgcatcaggtatcagatattgggtactcccttccctttgcttttc

SEQ ID NO: 277865 - DNA, 201 bp, Homo sapiens
gattattggaatttctctttcagtgagaagctcttcatggagatggcagagctcatggtctcagaaggctggaaggatgcaggttatgagtacctctgcaytgatgactgttggatggctccccaaagagattcagaaggcagacttcaggcagaccctcagcgctttcctcatgggattcgccagctagctaattatgtg

SEQ ID NO: 277866 - DNA, 201 bp, Homo sapiens
aagctagggatttatgcagatgttggaaataaaacctgcgcaggcttccctgggagttttggatactacgacattgatgcccagacctttgctgactgggkagtagatctgctaaaatttgatggttgttactgtgacagtttggaaaatttggcagatggtaatgtttcattccagagatttagccacaaaggaaagaac

SEQ ID NO: 277867 - DNA, 201 bp, Homo sapiens
  misc_feature (1)...(201): n = A,T,C or G
ctacaggatcattttaatttttcctacaagtgcttgatagttctgacattaagaatgaatgccaaactaacagggccacttatcactagttgctaagcaancacactttcttggtttttcagggagacaactttgaagtgtgggaacgacctctctcaggcttagcctgggctgtagctatgataaaccggcaggagattg

SEQ ID NO: 277868 - DNA, 201 bp, Homo sapiens
ttggtttttcagggagacaactttgaagtgtgggaacgacctctctcaggcttagcctgggctgtagctatgataaaccggcaggagattggtggacctcrctcttataccatcgcagttgcttccctgggtaaaggagtggcctgtaatcctgcctgcttcatcacacagctcctccctgtgaaaaggaagctagggttc

SEQ ID NO: 277869 - DNA, 201 bp, Homo sapiens; identical to SEQ ID NO: 55941

SEQ ID NO: 277870 - DNA, 201 bp, Homo sapiens
gttgctaagcaaccacactttcttggtttttcagggagacaactttgaagtgtgggaacgacctctctcaggcttagcctgggctgtagctatgataaacyggcaggagattggtggacctcgctcttataccatcgcagttgcttccctgggtaaaggagtggcctgtaatcctgcctgcttcatcacacagctcctccc

SEQ ID NO: 277871 - DNA, 201 bp, Homo sapiens
agagctcatggtctcagaaggctggaaggatgcaggttatgagtacctctgcattgatgactgttggatggctccccaaagagattcagaaggcagacttyaggcagaccctcagcgctttcctcatgggattcgccagctagctaattatgtgagtttatagataatgttcttgttcattcagaggactgtaagcacttc

SEQ ID NO: 277872 - DNA, 201 bp, Homo sapiens
attttataaaattttctaattttgtatgtggatggtttatctgaaatggtctgggagcactgggcctcttggaaacaaagtacaaagtgtaataacggccwtaaaactacactgaggaaacgatttaacaaacatttactgattgccgattatgtgcctagcacactgcatctgcagtgataacagttttcctattaacca

SEQ ID NO: 277873 - DNA, 201 bp, Homo sapiens
aagctcttcatggagatggcagagctcatggtctcagaaggctggaaggatgcaggttatgagtacctctgcattgatgactgttggatggctccccaaavagattcagaaggcagacttcaggcagaccctcagcgctttcctcatgggattcgccagctagctaattatgtgagtttatagataatgttcttgttcatt

SEQ ID NO: 277874 - DNA, 201 bp, Homo sapiens
tgagaagctcttcatggagatggcagagctcatggtctcagaaggctggaaggatgcaggttatgagtacctctgcattgatgactgttggatggctcccyaaagagattcagaaggcagacttcaggcagaccctcagcgctttcctcatgggattcgccagctagctaattatgtgagtttatagataatgttcttgtt

SEQ ID NO: 277875 - DNA, 201 bp, Homo sapiens; identical to SEQ ID NO: 55949

SEQ ID NO: 277876 - DNA, 201 bp, Homo sapiens; identical to SEQ ID NO: 55779

SEQ ID NO: 277877 - DNA, 201 bp, Homo sapiens; identical to SEQ ID NO: 55781

SEQ ID NO: 277878 - DNA, 201 bp, Homo sapiens; identical to SEQ ID NO: 55782

SEQ ID NO: 277879 - DNA, 201 bp, Homo sapiens
ttcagggagacaactttgaagtgtgggaacgacctctctcaggcttagcctgggctgtagctatgataaaccggcaggagattggtggacctcgctcttawaccatcgcagttgcttccctgggtaaaggagtggcctgtaatcctgcctgcttcatcacacagctcctccctgtgaaaaggaagctagggttctatgaat

SEQ ID NO: 277880 - DNA, 201 bp, Homo sapiens
cactttcttggtttttcagggagacaactttgaagtgtgggaacgacctctctcaggcttagcctgggctgtagctatgataaaccggcaggagattggtrgacctcgctcttataccatcgcagttgcttccctgggtaaaggagtggcctgtaatcctgcctgcttcatcacacagctcctccctgtgaaaaggaagct

SEQ ID NO: 277881 - DNA, 201 bp, Homo sapiens
ttcagtgagaagctcttcatggagatggcagagctcatggtctcagaaggctggaaggatgcaggttatgagtacctctgcattgatgactgttggatggytccccaaagagattcagaaggcagacttcaggcagaccctcagcgctttcctcatgggattcgccagctagctaattatgtgagtttatagataatgttc

SEQ ID NO: 277882 - DNA, 201 bp, Homo sapiens
ctgctacctcacgattgtgcttctacaatggtgactcttttcctccctctcatttcaggttcacagcaaaggactgaagctagggatttatgcagatgttrgaaataaaacctgcgcaggcttccctgggagttttggatactacgacattgatgcccagacctttgctgactggggagtagatctgctaaaatttgatgg

SEQ ID NO: 277883 - DNA, 201 bp, Homo sapiens
gactcttttcctccctctcatttcaggttcacagcaaaggactgaagctagggatttatgcagatgttggaaataaaacctgcgcaggcttccctgggagktttggatactacgacattgatgcccagacctttgctgactggggagtagatctgctaaaatttgatggttgttactgtgacagtttggaaaatttggcag

SEQ ID NO: 277884 - DNA, 201 bp, Homo sapiens
tggaatttctctttcagtgagaagctcttcatggagatggcagagctcatggtctcagaaggctggaaggatgcaggttatgagtacctctgcattgatgrctgttggatggctccccaaagagattcagaaggcagacttcaggcagaccctcagcgctttcctcatgggattcgccagctagctaattatgtgagttta

SEQ ID NO: 277885 - DNA, 201 bp, Homo sapiens
  misc_feature (1)...(201): n = A,T,C or G
ttattggaatttctctttcagtgagaagctcttcatggagatggcagagctcatggtctcagaaggctggaaggatgcaggttatgagtacctctgcattnatgactgttggatggctccccaaagagattcagaaggcagacttcaggcagaccctcagcgctttcctcatgggattcgccagctagctaattatgtgag

SEQ ID NO: 277886 - DNA, 201 bp, Homo sapiens
tgtaatgattattggaatttctctttcagtgagaagctcttcatggagatggcagagctcatggtctcagaaggctggaaggatgcaggttatgagtaccbctgcattgatgactgttggatggctccccaaagagattcagaaggcagacttcaggcagaccctcagcgctttcctcatgggattcgccagctagctaat

SEQ ID NO: 277887 - DNA, 201 bp, Homo sapiens
catttaatgaattgtaatgattattggaatttctctttcagtgagaagctcttcatggagatggcagagctcatggtctcagaaggctggaaggatgcagrttatgagtacctctgcattgatgactgttggatggctccccaaagagattcagaaggcagacttcaggcagaccctcagcgctttcctcatgggattcgc

SEQ ID NO: 277888 - DNA, 201 bp, Homo sapiens
agaactacatctgggctgcgcgcttgcgcttcgcttcctggccctcgtttcctgggacatccctggggctagagcactggacaatggattggcaaggacgyctaccatgggctggctgcactgggagcgcttcatgtgcaaccttgactgccaggaagagccagattcctgcatcaggtatcagatattgggtactccctt

SEQ ID NO: 277889 - DNA, 201 bp, Homo sapiens
tacctaagtgttcatttaatgaattgtaatgattattggaatttctctttcagtgagaagctcttcatggagatggcagagctcatggtctcagaaggctrgaaggatgcaggttatgagtacctctgcattgatgactgttggatggctccccaaagagattcagaaggcagacttcaggcagaccctcagcgctttcct

SEQ ID NO: 277890 - DNA, 201 bp, Homo sapiens; identical to SEQ ID NO: 55794

SEQ ID NO: 277891 - DNA, 201 bp, Homo sapiens; identical to SEQ ID NO: 55795

SEQ ID NO: 277892 - DNA, 201 bp, Homo sapiens
cagatggccctctgggctatcatggctgctcctttattcatgtctaatgacctccgacacatcagccctcaagccaaagctctccttcaggataaggacgwaattgccatcaatcaggaccccttgggcaagcaagggtaccagcttagacaggtaaataagagtatatattttaagatggctttatatacccaataccaa

SEQ ID NO: 277893 - DNA, 201 bp, Homo sapiens
gcaagtaactcagatggccctctgggctatcatggctgctcctttattcatgtctaatgacctccgacacatcagccctcaagccaaagctctccttcagkataaggacgtaattgccatcaatcaggaccccttgggcaagcaagggtaccagcttagacaggtaaataagagtatatattttaagatggctttatatac

SEQ ID NO: 277894 - DNA, 201 bp, Homo sapiens
gttagtgattggcaactttggcctcagctggaatcagcaagtaactcagatggccctctgggctatcatggctgctcctttattcatgtctaatgacctcbgacacatcagccctcaagccaaagctctccttcaggataaggacgtaattgccatcaatcaggaccccttgggcaagcaagggtaccagcttagacaggt

SEQ ID NO: 277895 - DNA, 201 bp, Homo sapiens; identical to SEQ ID NO: 55865

SEQ ID NO: 277896 - DNA, 201 bp, Homo sapiens
taatgaattgtaatgattattggaatttctctttcagtgagaagctcttcatggagatggcagagctcatggtctcagaaggctggaaggatgcaggttakgagtacctctgcattgatgactgttggatggctccccaaagagattcagaaggcagacttcaggcagaccctcagcgctttcctcatgggattcgccagc

SEQ ID NO: 277897 - DNA, 201 bp, Homo sapiens
gattgtgcttctacaatggtgactcttttcctccctctcatttcaggttcacagcaaaggactgaagctagggatttatgcagatgttggaaataaaaccygcgcaggcttccctgggagttttggatactacgacattgatgcccagacctttgctgactggggagtagatctgctaaaatttgatggttgttactgtga

SEQ ID NO: 277898 - DNA, 201 bp, Homo sapiens
gttggaaataaaacctgcgcaggcttccctgggagttttggatactacgacattgatgcccagacctttgctgactggggagtagatctgctaaaatttgwtggttgttactgtgacagtttggaaaatttggcagatggtaatgtttcattccagagatttagccacaaaggaaagaactttgaggccatggtagctgag

SEQ ID NO: 277899 - DNA, 201 bp, Homo sapiens; identical to SEQ ID NO: 55803

SEQ ID NO: 277900 - DNA, 201 bp, Homo sapiens; identical to SEQ ID NO: 55804

SEQ ID NO: 277901 - DNA, 201 bp, Homo sapiens
tgggaggtacctaagtgttcatttaatgaattgtaatgattattggaatttctctttcagtgagaagctcttcatggagatggcagagctcatggtctcakaaggctggaaggatgcaggttatgagtacctctgcattgatgactgttggatggctccccaaagagattcagaaggcagacttcaggcagaccctcagcg

SEQ ID NO: 277902 - DNA, 201 bp, Homo sapiens
tatctgttttcacagcccaattatacagaaatccgacagtactgcaatcactggcgaaattttgctgacattgatgattcctggaaaagtataaagagtawcttggactggacatcttttaaccaggagagaattgttgatgttgctggaccagggggttggaatgacccagatatggtaaaaacttgagccctccttgtt

SEQ ID NO: 277903 - DNA, 201 bp, Homo sapiens; identical to SEQ ID NO: 55890

SEQ ID NO: 277904 - DNA, 201 bp, Homo sapiens
ttgttgacttgttaccatgtctccccactagagtgtaagtttcatgagggcagggaccttgtctgactttgactgtatctctcgcatatggttaagtgttraatagttatttatggaatgaatccctattattccctcattatctctgcaaaatagtcttttttctcaacatcttaaacctgatatcccacctgcctatct

SEQ ID NO: 277905 - DNA, 201 bp, Homo sapiens; identical to SEQ ID NO: 55892

SEQ ID NO: 277906 - DNA, 201 bp, Homo sapiens
cttcgcttcctggccctcgtttcctgggacatccctggggctagagcactggacaatggattggcaaggacgcctaccatgggctggctgcactgggagcbcttcatgtgcaaccttgactgccaggaagagccagattcctgcatcaggtatcagatattgggtactcccttccctttgcttttccatgtgtttgggtgt

SEQ ID NO: 277907 - DNA, 201 bp, Homo sapiens
aaggacgcctaccatgggctggctgcactgggagcgcttcatgtgcaaccttgactgccaggaagagccagattcctgcatcaggtatcagatattgggtrctcccttccctttgcttttccatgtgtttgggtgtgtttggggaactggagagtctcaacgggaacagttgagcccgagggagagctcccccacccgact

SEQ ID NO: 277908 - DNA, 201 bp, Homo sapiens; identical to SEQ ID NO: 55894

SEQ ID NO: 277909 - DNA, 201 bp, Homo sapiens
gcttcgcttcctggccctcgtttcctgggacatccctggggctagagcactggacaatggattggcaaggacgcctaccatgggctggctgcactgggagmgcttcatgtgcaaccttgactgccaggaagagccagattcctgcatcaggtatcagatattgggtactcccttccctttgcttttccatgtgtttgggtg

SEQ ID NO: 277910 - DNA, 201 bp, Homo sapiens
ctgggctgcgcgcttgcgcttcgcttcctggccctcgtttcctgggacatccctggggctagagcactggacaatggattggcaaggacgcctaccatggrctggctgcactgggagcgcttcatgtgcaaccttgactgccaggaagagccagattcctgcatcaggtatcagatattgggtactcccttccctttgctt

SEQ ID NO: 277911 - DNA, 201 bp, Homo sapiens; identical to SEQ ID NO: 55898

SEQ ID NO: 277912 - DNA, 201 bp, Homo sapiens
ttgtgcttctacaatggtgactcttttcctccctctcatttcaggttcacagcaaaggactgaagctagggatttatgcagatgttggaaataaaacctgmgcaggcttccctgggagttttggatactacgacattgatgcccagacctttgctgactggggagtagatctgctaaaatttgatggttgttactgtgaca

SEQ ID NO: 277913 - DNA, 201 bp, Homo sapiens
acatctgggctgcgcgcttgcgcttcgcttcctggccctcgtttcctgggacatccctggggctagagcactggacaatggattggcaaggacgcctaccrtgggctggctgcactgggagcgcttcatgtgcaaccttgactgccaggaagagccagattcctgcatcaggtatcagatattgggtactcccttcccttt

SEQ ID NO: 277914 - DNA, 201 bp, Homo sapiens; identical to SEQ ID NO: 55901

SEQ ID NO: 277915 - DNA, 201 bp, Homo sapiens; identical to SEQ ID NO: 55903

SEQ ID NO: 277916 - DNA, 201 bp, Homo sapiens; identical to SEQ ID NO: 55905

SEQ ID NO: 277917 - DNA, 201 bp, Homo sapiens
gcgcttgcgcttcgcttcctggccctcgtttcctgggacatccctggggctagagcactggacaatggattggcaaggacgcctaccatgggctggctgcrctgggagcgcttcatgtgcaaccttgactgccaggaagagccagattcctgcatcaggtatcagatattgggtactcccttccctttgcttttccatgtg

SEQ ID NO: 277918 - DNA, 201 bp, Homo sapiens
ttaatgaattgtaatgattattggaatttctctttcagtgagaagctcttcatggagatggcagagctcatggtctcagaaggctggaaggatgcaggttrtgagtacctctgcattgatgactgttggatggctccccaaagagattcagaaggcagacttcaggcagaccctcagcgctttcctcatgggattcgccag

SEQ ID NO: 277919 - DNA, 201 bp, Homo sapiens
gatgttggaaataaaacctgcgcaggcttccctgggagttttggatactacgacattgatgcccagacctttgctgactggggagtagatctgctaaaatytgatggttgttactgtgacagtttggaaaatttggcagatggtaatgtttcattccagagatttagccacaaaggaaagaactttgaggccatggtagct

SEQ ID NO: 277920 - DNA, 201 bp, Homo sapiens
cttgcgcttcgcttcctggccctcgtttcctgggacatccctggggctagagcactggacaatggattggcaaggacgcctaccatgggctggctgcactkggagcgcttcatgtgcaaccttgactgccaggaagagccagattcctgcatcaggtatcagatattgggtactcccttccctttgcttttccatgtgttt

SEQ ID NO: 277921 - DNA, 201 bp, Homo sapiens; identical to SEQ ID NO: 55916

SEQ ID NO: 277922 - DNA, 201 bp, Homo sapiens; identical to SEQ ID NO: 55824

SEQ ID NO: 277923 - DNA, 201 bp, Homo sapiens; identical to SEQ ID NO: 55825

SEQ ID NO: 277924 - DNA, 201 bp, Homo sapiens
gttctattcagacccttcttgtgaacttctgctcttcctctgccgggtgctaaccgttagaacatctagggtgggtaggaggaatggggaactaagattcrtgccattttttctccttttggggtcgtggatttctcggcagtatctcgagggagttagagagaccataaggtcgctgagatctctcccacctcgcccatg

SEQ ID NO: 277925 - DNA, 201 bp, Homo sapiens
gcagctgaggaacccagaactacatctgggctgcgcgcttgcgcttcgcttcctggccctcgtttcctgggacatccctggggctagagcactggacaatrgattggcaaggacgcctaccatgggctggctgcactgggagcgcttcatgtgcaaccttgactgccaggaagagccagattcctgcatcaggtatcagat

SEQ ID NO: 277926 - DNA, 201 bp, Homo sapiens
atgcagctgaggaacccagaactacatctgggctgcgcgcttgcgcttcgcttcctggccctcgtttcctgggacatccctggggctagagcactggacartggattggcaaggacgcctaccatgggctggctgcactgggagcgcttcatgtgcaaccttgactgccaggaagagccagattcctgcatcaggtatcag

SEQ ID NO: 277927 - DNA, 201 bp, Homo sapiens
gtgacaatgcagctgaggaacccagaactacatctgggctgcgcgcttgcgcttcgcttcctggccctcgtttcctgggacatccctggggctagagcacyggacaatggattggcaaggacgcctaccatgggctggctgcactgggagcgcttcatgtgcaaccttgactgccaggaagagccagattcctgcatcagg

SEQ ID NO: 277928 - DNA, 201 bp, Homo sapiens; identical to SEQ ID NO: 55829

SEQ ID NO: 277929 - DNA, 201 bp, Homo sapiens; identical to SEQ ID NO: 55830

SEQ ID NO: 277930 - DNA, 201 bp, Homo sapiens; identical to SEQ ID NO: 55831

SEQ ID NO: 277931 - DNA, 201 bp, Homo sapiens
catccctggggctagagcactggacaatggattggcaaggacgcctaccatgggctggctgcactgggagcgcttcatgtgcaaccttgactgccaggaaragccagattcctgcatcaggtatcagatattgggtactcccttccctttgcttttccatgtgtttgggtgtgtttggggaactggagagtctcaacggga

SEQ ID NO: 277932 - DNA, 201 bp, Homo sapiens
gttttcacagcccaattatacagaaatccgacagtactgcaatcactggcgaaattttgctgacattgatgattcctggaaaagtataaagagtatcttgvactggacatcttttaaccaggagagaattgttgatgttgctggaccagggggttggaatgacccagatatggtaaaaacttgagccctccttgttcaaga

SEQ ID NO: 277933 - DNA, 201 bp, Homo sapiens
ggttggaaaaaattgtgaaatcccaaggtgcctaataaatgggaggtacctaagtgttcatttaatgaattgtaatgattattggaatttctctttcagtsagaagctcttcatggagatggcagagctcatggtctcagaaggctggaaggatgcaggttatgagtacctctgcattgatgactgttggatggctcccca

SEQ ID NO: 277934 - DNA, 201 bp, Homo sapiens
agtaaacagaagagtcatatctgttttcacagcccaattatacagaaatccgacagtactgcaatcactggcgaaattttgctgacattgatgattcctgsaaaagtataaagagtatcttggactggacatcttttaaccaggagagaattgttgatgttgctggaccagggggttggaatgacccagatatggtaaaaa

SEQ ID NO: 277935 - DNA, 201 bp, Homo sapiens
caaggatgttagtagaaagtaaacagaagagtcatatctgttttcacagcccaattatacagaaatccgacagtactgcaatcactggcgaaattttgctracattgatgattcctggaaaagtataaagagtatcttggactggacatcttttaaccaggagagaattgttgatgttgctggaccagggggttggaatga

SEQ ID NO: 277936 - DNA, 201 bp, Homo sapiens
ttttcatctcacaaggatgttagtagaaagtaaacagaagagtcatatctgttttcacagcccaattatacagaaatccgacagtactgcaatcactggcraaattttgctgacattgatgattcctggaaaagtataaagagtatcttggactggacatcttttaaccaggagagaattgttgatgttgctggaccaggg

SEQ ID NO: 277937 - DNA, 201 bp, Homo sapiens
gaattgtaatgattattggaatttctctttcagtgagaagctcttcatggagatggcagagctcatggtctcagaaggctggaaggatgcaggttatgagkacctctgcattgatgactgttggatggctccccaaagagattcagaaggcagacttcaggcagaccctcagcgctttcctcatgggattcgccagctagc

SEQ ID NO: 277938 - DNA, 201 bp, Homo sapiens
gctaagcaaccacactttcttggtttttcagggagacaactttgaagtgtgggaacgacctctctcaggcttagcctgggctgtagctatgataaaccggyaggagattggtggacctcgctcttataccatcgcagttgcttccctgggtaaaggagtggcctgtaatcctgcctgcttcatcacacagctcctccctgt

SEQ ID NO: 277939 - DNA, 201 bp, Homo sapiens
gacatatgtgtgcatgtatttccatataacctttaggaagctattgcaatggtactataaactagaattttagaagatagaaggaaaatattctggagatmattgaagagaaatggagtccaacactagttaaagatgatgaagacagatttttttttttgacggagtctcgctctgtcgcccaggctggagtgcagtggc

SEQ ID NO: 277940 - DNA, 201 bp, Homo sapiens
ggatttattctttgtcttccaacaaactcatctggatgattttgggggtttgtggggaaaagcccccaatacctggtgaagtaaccttgtctcttcccccmgcctggaatggttctctctttctgctacctcacgattgtgcttctacaatggtgactcttttcctccctctcatttcaggttcacagcaaaggactgaag

SEQ ID NO: 277941 - DNA, 201 bp, Homo sapiens
aaactaatgcatgatcattgcaaaaaatgtagataaagaagagcaaaatgaaaataaagatttccccccaccgttccaccacccagaaataatcatggttwaaatgttaatatacaaccttacaattgttttctatataaatgaaaacatagatttctttatttcattattttccataaaaaatggatcatgtttatgtca

SEQ ID NO: 277942 - DNA, 201 bp, Homo sapiens
taatgtttcattccagagatttagccacaaaggaaagaactttgaggccatggtagctgagccaaagaaccaatcttcagaattttaaataccctgtcacratactggaaataattattctccatgtgccagagctcccatctcttctctttcagttcattaattaattaattaattcatgtaaaatccatgcatacctaa

SEQ ID NO: 277943 - DNA, 201 bp, Homo sapiens
aatcccaaggtgcctaataaatgggaggtacctaagtgttcatttaatgaattgtaatgattattggaatttctctttcagtgagaagctcttcatggagrtggcagagctcatggtctcagaaggctggaaggatgcaggttatgagtacctctgcattgatgactgttggatggctccccaaagagattcagaaggcag

SEQ ID NO: 277944 - DNA, 201 bp, Homo sapiens
gagtggcctctttatatgtggccctttcaaaaggtgagatagtgagcccagaatccaatagaactgtactgatagatagaacttgacaacaaaggaaaccraggtctccttcaaagtccaacgttacttactatcatcctaccatctctcccaggttccaaccacttctcaccatccccactgctgtaattatagcctaag

SEQ ID NO: 277945 - DNA, 201 bp, Homo sapiens
ttatgagtacctctgcattgatgactgttggatggctccccaaagagattcagaaggcagacttcaggcagaccctcagcgctttcctcatgggattcgcyagctagctaattatgtgagtttatagataatgttcttgttcattcagaggactgtaagcacttctgtacagaagcttgtttagaaacagccctcatggcc

SEQ ID NO: 277946 - DNA, 201 bp, Homo sapiens
ttcccccagcctggaatggttctctctttctgctacctcacgattgtgcttctacaatggtgactcttttcctccctctcatttcaggttcacagcaaagractgaagctagggatttatgcagatgttggaaataaaacctgcgcaggcttccctgggagttttggatactacgacattgatgcccagacctttgctgac

SEQ ID NO: 277947 - DNA, 201 bp, Homo sapiens
gttttcatctcacaaggatgttagtagaaagtaaacagaagagtcatatctgttttcacagcccaattatacagaaatccgacagtactgcaatcactggygaaattttgctgacattgatgattcctggaaaagtataaagagtatcttggactggacatcttttaaccaggagagaattgttgatgttgctggaccagg

SEQ ID NO: 277948 - DNA, 201 bp, Homo sapiens
ccccagcctggaatggttctctctttctgctacctcacgattgtgcttctacaatggtgactcttttcctccctctcatttcaggttcacagcaaaggacygaagctagggatttatgcagatgttggaaataaaacctgcgcaggcttccctgggagttttggatactacgacattgatgcccagacctttgctgactgg

SEQ ID NO: 277949 - DNA, 201 bp, Homo sapiens
cctggaatggttctctctttctgctacctcacgattgtgcttctacaatggtgactcttttcctccctctcatttcaggttcacagcaaaggactgaagcyagggatttatgcagatgttggaaataaaacctgcgcaggcttccctgggagttttggatactacgacattgatgcccagacctttgctgactggggagta

SEQ ID NO: 277950 - DNA, 201 bp, Homo sapiens
ctcaaaaaattaaaataaaataaaataaaataactatatatatagccccagctggaaattcatttctttcccttattttacccattgttttctcatacagrttataagcacatgtccttggccctgaataggactggcagaagcattgtgtactcctgtgagtggcctctttatatgtggccctttcaaaaggtgagatag

SEQ ID NO: 277951 - DNA, 201 bp, Homo sapiens
aaaataaaataaaataaaataactatatatatagccccagctggaaattcatttctttcccttattttacccattgttttctcatacaggttataagcacrtgtccttggccctgaataggactggcagaagcattgtgtactcctgtgagtggcctctttatatgtggccctttcaaaaggtgagatagtgagcccagaa

SEQ ID NO: 277952 - DNA, 201 bp, Homo sapiens
actcaagagaaggctacaagtgcctcctttaaactgttttcatctcacaaggatgttagtagaaagtaaacagaagagtcatatctgttttcacagcccarttatacagaaatccgacagtactgcaatcactggcgaaattttgctgacattgatgattcctggaaaagtataaagagtatcttggactggacatctttt

SEQ ID NO: 277953 - DNA, 201 bp, Homo sapiens
tcaagagaaggctacaagtgcctcctttaaactgttttcatctcacaaggatgttagtagaaagtaaacagaagagtcatatctgttttcacagcccaatkatacagaaatccgacagtactgcaatcactggcgaaattttgctgacattgatgattcctggaaaagtataaagagtatcttggactggacatcttttaa

SEQ ID NO: 277954 - DNA, 201 bp, Homo sapiens
tacaagtgcctcctttaaactgttttcatctcacaaggatgttagtagaaagtaaacagaagagtcatatctgttttcacagcccaattatacagaaatcygacagtactgcaatcactggcgaaattttgctgacattgatgattcctggaaaagtataaagagtatcttggactggacatcttttaaccaggagagaat

SEQ ID NO: 277955 - DNA, 201 bp, Homo sapiens
gcctgtaatcctgcctgcttcatcacacagctcctccctgtgaaaaggaagctagggttctatgaatggacttcaaggttaagaagtcacataaatcccamaggcactgttttgcttcagctagaaaatacaatgcagatgtcattaaaagacttactttaaaatgtttattttattgccaactactacttcctgtccacc

SEQ ID NO: 277956 - DNA, 201 bp, Homo sapiens
agaaagtaaacagaagagtcatatctgttttcacagcccaattatacagaaatccgacagtactgcaatcactggcgaaattttgctgacattgatgattsctggaaaagtataaagagtatcttggactggacatcttttaaccaggagagaattgttgatgttgctggaccagggggttggaatgacccagatatggta

SEQ ID NO: 277957 - DNA, 201 bp, Homo sapiens
agtggcctgtaatcctgcctgcttcatcacacagctcctccctgtgaaaaggaagctagggttctatgaatggacttcaaggttaagaagtcacataaatvccacaggcactgttttgcttcagctagaaaatacaatgcagatgtcattaaaagacttactttaaaatgtttattttattgccaactactacttcctgtc

SEQ ID NO: 277958 - DNA, 201 bp, Homo sapiens
aagtaaacagaagagtcatatctgttttcacagcccaattatacagaaatccgacagtactgcaatcactggcgaaattttgctgacattgatgattcctkgaaaagtataaagagtatcttggactggacatcttttaaccaggagagaattgttgatgttgctggaccagggggttggaatgacccagatatggtaaaa

SEQ ID NO: 277959 - DNA, 201 bp, Homo sapiens; identical to SEQ ID NO: 55855

SEQ ID NO: 277960 - DNA, 201 bp, Homo sapiens; identical to SEQ ID NO: 55856

SEQ ID NO: 277961 - DNA, 201 bp, Homo sapiens
aacagggccacttatcactagttgctaagcaaccacactttcttggtttttcagggagacaactttgaagtgtgggaacgacctctctcaggcttagcctrggctgtagctatgataaaccggcaggagattggtggacctcgctcttataccatcgcagttgcttccctgggtaaaggagtggcctgtaatcctgcctgc

SEQ ID NO: 277962 - DNA, 201 bp, Homo sapiens
ctgggctatcatggctgctcctttattcatgtctaatgacctccgacacatcagccctcaagccaaagctctccttcaggataaggacgtaattgccatcwatcaggaccccttgggcaagcaagggtaccagcttagacaggtaaataagagtatatattttaagatggctttatatacccaataccaactttgtcttgg

SEQ ID NO: 277963 - DNA, 201 bp, Homo sapiens
ttagtgattggcaactttggcctcagctggaatcagcaagtaactcagatggccctctgggctatcatggctgctcctttattcatgtctaatgacctccvacacatcagccctcaagccaaagctctccttcaggataaggacgtaattgccatcaatcaggaccccttgggcaagcaagggtaccagcttagacaggta

SEQ ID NO: 277964 - DNA, 201 bp, Homo sapiens
gatttattctttgtcttccaacaaactcatctggatgattttgggggtttgtggggaaaagcccccaatacctggtgaagtaaccttgtctcttcccccascctggaatggttctctctttctgctacctcacgattgtgcttctacaatggtgactcttttcctccctctcatttcaggttcacagcaaaggactgaagc

SEQ ID NO: 277965 - DNA, 201 bp, Homo sapiens; identical to SEQ ID NO: 55986

SEQ ID NO: 277966 - DNA, 201 bp, Homo sapiens
cgaactcctgacctcagatgatccacctgcctcggcctcccaaagtgctgggattacaggcatgagccaccgtgcccagcctctacaaactttttattccrttaacaaactatatgctgggatttaagttttcttaatacttgatggagtcctatgtaattttgcagcttttaattttactaagaccattttagttctgat

SEQ ID NO: 277967 - DNA, 201 bp, Homo sapiens; identical to SEQ ID NO: 55988

SEQ ID NO: 277968 - DNA, 201 bp, Homo sapiens
ccattctattcaactcccacaaatgtacagcttttatatctggagtagctatttagtgctccttctctacctaagcaaggtttgactgatagtcactggarttttcctgcagaacttggtcatatccactcatactgctctgaccaccataaccacctccataaccaccactcagctgctggctagcaggacctccataac

SEQ ID NO: 277969 - DNA, 201 bp, Homo sapiens
agggatgcaggagggaagccatggctaagctgtgggcctggacaaaggccacagatggggttgaaaggtgagaagcggtaagctagaggagacagacggcrttgccattaaaaacaattcaacttcattttaatgttgctatgtaagttcacaataaaatccctggaagttcaaattggaaagagcagtttggggtcatgg

SEQ ID NO: 277970 - DNA, 201 bp, Homo sapiens
gtcacaaaaaagtttgcttctcattgtcacatagctatggggactggtggccttctaaaatcactgtccagctgctgcaagtgtgaggccagcaacccacrgcagggatgcaggagggaagccatggctaagctgtgggcctggacaaaggccacagatggggttgaaaggtgagaagcggtaagctagaggagacagacg

SEQ ID NO: 277971 - DNA, 201 bp, Homo sapiens
ttttgcaaatgctgattcaaaacgtaccaatccccatctatcatgcctatgccaatacaatctgtcacaaaaaagtttgcttctcattgtcacatagctayggggactggtggccttctaaaatcactgtccagctgctgcaagtgtgaggccagcaacccacggcagggatgcaggagggaagccatggctaagctgtgg

SEQ ID NO: 277972 - DNA, 201 bp, Homo sapiens
acgaggccatgtcctgatgcagaaggctgagcccaggctctctgtggcgccgctgagagcagagggctgtcttggggtcttcgagctctggagccaaggayggcctggtcctacttctctgcccccaccaatgggggacttgaatgtggccagagaatacagtcagtcagggccagccagggtgtctgtcagggtgggcac

SEQ ID NO: 277973 - DNA, 201 bp, Homo sapiens
accaatgggggacttgaatgtggccagagaatacagtcagtcagggccagccagggtgtctgtcagggtgggcacagggtcctctccaaacctgcttctcmctccctggtcaggccttcatccccaccacccgcacctgtaccctggacgctggctcagaggcctacaggtgtgtggacacctgggcagtcactgtgtcct

SEQ ID NO: 277974 - DNA, 201 bp, Homo sapiens
tttgcgaaacttaatcactgttaacaattgttacaatgcattattaaaataggggaagccacagttattacagcctaccttagagatcactgttaaaattyctacatagtggcccatgagtggtaggtattgtgtctcgtttgtgttgctgttttctttgatgatttctctttacttttaaaggtaaccctcttccatgac

SEQ ID NO: 277975 - DNA, 201 bp, Homo sapiens
ggatgggggtgccaggtacaaagacttagcataaagaaaacgaccatttactttgaaacataaacaaaggccaattaataatttatgagtctgttccttgyccctcgagtttttagcaggcatggaatcattccacaggtcattatttcagtttggtctctgttcctaaggggtgaaggttttctgagggctgtggatccc

SEQ ID NO: 277976 - DNA, 201 bp, Homo sapiens
ccggcaggattagtatttggacagggaggagagaaggctcttgcagcgtctagaaaggctaaggtactctgcagttttcctaatttgttttgttcgcacayctttgctattcaaacacgaccccaccagcttcccagcgtgggcgagactaagggagaggacttgtgtcttaaagcgtgtcctccttgtgtcttaaagcgt

SEQ ID NO: 277977 - DNA, 201 bp, Homo sapiens
ccaggcctcactcccggcaggattagtatttggacagggaggagagaaggctcttgcagcgtctagaaaggctaaggtactctgcagttttcctaatttgktttgttcgcacatctttgctattcaaacacgaccccaccagcttcccagcgtgggcgagactaagggagaggacttgtgtcttaaagcgtgtcctccttg

SEQ ID NO: 277978 - DNA, 201 bp, Homo sapiens
ccgaaaatgattggtccacctggcagctggctggctggctggcaactggaggcctttctgtcctggctgagggccctggccccttggtggcctttgggaarcagcatctcatcgggccgttttttcgttctggcgggcggccggcttggcccgcggggtcgggctctccgcgcagtgcagagacgtctccaccctcaggga

SEQ ID NO: 277979 - DNA, 201 bp, Homo sapiens
tagcataaagaaaacgaccatttactttgaaacataaacaaaggccaattaataatttatgagtctgttccttgcccctcgagtttttagcaggcatggartcattccacaggtcattatttcagtttggtctctgttcctaaggggtgaaggttttctgagggctgtggatcccaaactcacctggctcagaggctcaaa

SEQ ID NO: 277980 - DNA, 201 bp, Homo sapiens
ggccgctgccgtcgccctggagacaggtgagtagcgctctgagcctggagtcttcgcagatagaactctccttggcccagacctcttctcccgcttcccckgcctccttccaggcctcactcccggcaggattagtatttggacagggaggagagaaggctcttgcagcgtctagaaaggctaaggtactctgcagttttc

SEQ ID NO: 277981 - DNA, 201 bp, Homo sapiens
gaggctcaaacagcctctctttgtccatcaacccgatttagacagcatcctgggcctgaaaaccttctgtgctggcttcaagtgaaaatagttcactgggwcaaaagtaggctggtccaagacgcaggacggtcagtaaacgttggctgtgttcagaaactgcggcttggctgtttcttacattgatttatggtttgtttc

SEQ ID NO: 277982 - DNA, 201 bp, Homo sapiens
tggccgctgccgtcgccctggagacaggtgagtagcgctctgagcctggagtcttcgcagatagaactctccttggcccagacctcttctcccgcttccckggcctccttccaggcctcactcccggcaggattagtatttggacagggaggagagaaggctcttgcagcgtctagaaaggctaaggtactctgcagtttt

SEQ ID NO: 277983 - DNA, 201 bp, Homo sapiens
gaacatctagtgcctggcacagagccggttctcaataaatataactcttctccatcttcttcaaacctcaggccaggtttcagtgacctcctctcactttytaagattatttttgcttgctggtgggtttactgtcatttttaaccacatctaacctaccttaaaaaagtgtatggatgggggtgccaggtacaaagactt

SEQ ID NO: 277984 - DNA, 201 bp, Homo sapiens
gtacaaagacttagcataaagaaaacgaccatttactttgaaacataaacaaaggccaattaataatttatgagtctgttccttgcccctcgagtttttakcaggcatggaatcattccacaggtcattatttcagtttggtctctgttcctaaggggtgaaggttttctgagggctgtggatcccaaactcacctggctc

SEQ ID NO: 277985 - DNA, 201 bp, Homo sapiens
tgagcatgtttaaggtaggctaggctaagccatgatgtttagtaggttaggggtattaagtgcattttcaaattaccatattttcaacttacaatagtttyaacgggaggtaaccccatcgtaagtggaggaacatctagtgcctggcacagagccggttctcaataaatataactcttctccatcttcttcaaacctcag

SEQ ID NO: 277986 - DNA, 201 bp, Homo sapiens
acagacagttcccaacttaagatggtttgacttatgatttttcgactttacaatggtacaaaagtgacattcagtagaaatagtactttaagtactcatasaaccattctttttcacttttagtacagtatgcaataaattacatgagatattcaacattttattataaaacaggctttctgttagatgattttgctcaac

SEQ ID NO: 277987 - DNA, 201 bp, Homo sapiens
tgtctctagaggttgccatatatcctctgggggacaaaatcacacttagttgagaaccactgtcccacattctacacacagaagccaaaaggatatttttwaaatgtaaatggcatcatgtcgttcccctgttggaaacccttcaatgttttcctgttgaccttagaataatctcaaattccttactgtggcttagaagac

SEQ ID NO: 277988 - DNA, 201 bp, Homo sapiens
aatacagacagttcccaacttaagatggtttgacttatgatttttcgactttacaatggtacaaaagtgacattcagtagaaatagtactttaagtactcwtagaaccattctttttcacttttagtacagtatgcaataaattacatgagatattcaacattttattataaaacaggctttctgttagatgattttgctc

SEQ ID NO: 277989 - DNA, 201 bp, Homo sapiens
tgtgtctcgtttgtgttgctgttttctttgatgatttctctttacttttaaaggtaaccctcttccatgactgttccttaaagtggtgcgctgtcccaatrgaccatgctctagctttccaagctgctagaactgtcagtgtttctcagccttggcactattgacattttgggaccagtgattcttcatcgttggcagagg

SEQ ID NO: 277990 - DNA, 201 bp, Homo sapiens
tccccatattcctcggtgccccgggatcgcaagagggagccgtggtttccggaactcctcccgcccctccgggcttttcctctgttaggcaggtggcgatycgctgtctttgcctgttatggccgctgccgtcgccctggagacaggtgagtagcgctctgagcctggagtcttcgcagatagaactctccttggcccaga

SEQ ID NO: 277991 - DNA, 201 bp, Homo sapiens
attgtgtctcgtttgtgttgctgttttctttgatgatttctctttacttttaaaggtaaccctcttccatgactgttccttaaagtggtgcgctgtcccartggaccatgctctagctttccaagctgctagaactgtcagtgtttctcagccttggcactattgacattttgggaccagtgattcttcatcgttggcaga

SEQ ID NO: 277992 - DNA, 201 bp, Homo sapiens
ccggcaccgccccctcgccattccggagccagcgcgggctaagcgggcctggccggggatgagcggagccaccgtccccatattcctcggtgccccgggaycgcaagagggagccgtggtttccggaactcctcccgcccctccgggcttttcctctgttaggcaggtggcgatccgctgtctttgcctgttatggccgct

SEQ ID NO: 277993 - DNA, 201 bp, Homo sapiens
cattattaaaataggggaagccacagttattacagcctaccttagagatcactgttaaaatttctacatagtggcccatgagtggtaggtattgtgtctcrtttgtgttgctgttttctttgatgatttctctttacttttaaaggtaaccctcttccatgactgttccttaaagtggtgcgctgtcccaatggaccatgc

SEQ ID NO: 277994 - DNA, 201 bp, Homo sapiens
ttttttttttttttttgagatggagtcttgctctgtcgcccaggctggagtctcctgcctcagcctcccaagtagctgggactacaggcgcctgccaccaygcccggctaattttttgtatttttagtagagacagggtttcaccgtgttagccaggatggtctcgatctcctgacctcatgatccacccacctcggcctc

SEQ ID NO: 277995 - DNA, 201 bp, Homo sapiens
agatgagggccctgattttcattttgcacaggaccctgtaaattatggggccaagatccccagtatttgactctttgctccctgctacaccccaattgtcytaggccatacctgagcagcctgtgaacttccacttcataagcttctttcttcagactgaagaggagggagaaatgggtcaggggagtgggcaggccctca

SEQ ID NO: 277996 - DNA, 201 bp, Homo sapiens
ttggaaatctggacaaagagaaggctgagaggaggcctggtccagtgtctaagggtctctgagtgagtctgtgtcagcatgtgggccccagctgggcctgyccatgggttgggcacagcagtttcctgagtaagagccagccccaccctcagggcagcattccagcccaaaaagaaatccaggccctccaggttcggcctg

SEQ ID NO: 277997 - DNA, 201 bp, Homo sapiens
gccctgctgccagccccaacctgtccacattcctgagctggacacctggaaccgtgttgaacttgtgcttcttgaagtaggcctcctggagtgggtatgaragtgaaaatcagcacctcacattgtctggcccacacccacttgctgaccagccagacatctataagacacacaaatgaagtcctagacctgtaaagagcc

SEQ ID NO: 277998 - DNA, 201 bp, Homo sapiens
gaagaggtgttctaagagtataaagaggaggttctgaggttgaagattccagagcaaaggctccctggatcttggggcagtatgtgtgtgagggggagggkttctccagggtgggcatggtattggagcaccttggcaagctgggtccaggtggtgaagtcatcatctttctccattcgaataaaggccacgtaggtgtgg

SEQ ID NO: 277999 - DNA, 201 bp, Homo sapiens
ctgattttcattttgcacaggaccctgtaaattatggggccaagatccccagtatttgactctttgctccctgctacaccccaattgtcctaggccatacytgagcagcctgtgaacttccacttcataagcttctttcttcagactgaagaggagggagaaatgggtcaggggagtgggcaggccctcaggtcccatggg

SEQ ID NO: 278000 - DNA, 201 bp, Homo sapiens
ggtcacatgggaatctgtagccgcagggctggagtaaacacacaggcccagcattggaagggactttcagggactggcctccaaatctcctagatatccaycccttgccctgctgccagccccaacctgtccacattcctgagctggacacctggaaccgtgttgaacttgtgcttcttgaagtaggcctcctggagtggg

SEQ ID NO: 278001 - DNA, 201 bp, Homo sapiens; identical to SEQ ID NO: 55995

SEQ ID NO: 278002 - DNA, 201 bp, Homo sapiens; identical to SEQ ID NO: 55996

SEQ ID NO: 278003 - DNA, 201 bp, Homo sapiens; identical to SEQ ID NO: 55997

SEQ ID NO: 278004 - DNA, 201 bp, Homo sapiens; identical to SEQ ID NO: 55998

SEQ ID NO: 278005 - DNA, 201 bp, Homo sapiens
accagggccaccttatttgcgagcgggtcccggcgggtcatcccggagctggccatccgcaccgaattccaagcccgggcacagaggcctagcagccccgycttgtgcatggatcagaccagcaagtatgggttccactcttcccaggggcggtgacagagtagggcgaggggcaggacgaagggcgggccgattccctgc

SEQ ID NO: 278006 - DNA, 201 bp, Homo sapiens
gttttcactagttcaaggcaaaatgagaaaaggaaacaattacagtgagtttcataaagctaagcttatttaacagtcctttattgtggagtatacgtttscttctttttgtgtgtgtgtgtgtgtgttagtgttttcttttagaaaagatgatgaaagcagatgggtaggtttagagatgtgttattggtgaaatcacca

SEQ ID NO: 278007 - DNA, 201 bp, Homo sapiens
ttatttgcgagcgggtcccggcgggtcatcccggagctggccatccgcaccgaattccaagcccgggcacagaggcctagcagccccgccttgtgcatggmtcagaccagcaagtatgggttccactcttcccaggggcggtgacagagtagggcgaggggcaggacgaagggcgggccgattccctgcccgccctgctcc

SEQ ID NO: 278008 - DNA, 201 bp, Homo sapiens
tcagcctggccaacatggtgaaacctcatctctactaaaaatacaaaaaccagccgggcctggtggcatgtgcctgtaatcccagctactcaggaggctgwggcaggagaattgcttgaacgtgggaggcagaggttgcagtgagccaaaatcatgccattgcactccagcctgggcagcagaatgaaagactccatctaa

SEQ ID NO: 278009 - DNA, 201 bp, Homo sapiens
ttttcttttagaaaagatgatgaaagcagatgggtaggtttagagatgtgttattggtgaaatcaccagtttggcagccttatgccagtccctacaattaraggggaaagaatcctggtttgtgaaatccagttctaggcatgacttttgaatagaattcatgtttgctcaagattcatttagtatatgtgcaggtaagct

SEQ ID NO: 278010 - DNA, 201 bp, Homo sapiens
gtggcaggagaattgcttgaacgtgggaggcagaggttgcagtgagccaaaatcatgccattgcactccagcctgggcagcagaatgaaagactccatctmaataaataaataaataaataaataaataaataaataaataacgggaaatctttcagggaaatacatgcatatgtgggagtatctctttgaaatgggaact

SEQ ID NO: 278011 - DNA, 201 bp, Homo sapiens
ggcagccagggcctcagaaactccggccggagcactcacccgtcggtggaggccgttaccagggccaccttatttgcgagcgggtcccggcgggtcatccyggagctggccatccgcaccgaattccaagcccgggcacagaggcctagcagccccgccttgtgcatggatcagaccagcaagtatgggttccactcttcc

SEQ ID NO: 278012 - DNA, 201 bp, Homo sapiens; identical to SEQ ID NO: 56010

SEQ ID NO: 278013 - DNA, 201 bp, Homo sapiens
taaaagatgaaatgctcctgattattgtaaatacaaaattgcatgcaggattgtctaaagacaatgccaggttggactgccagaatgaaccaacagcacgygatgtgcttccctctgcagagagcctatgaatggacatgcagtcagggaggtttcacatcaccaagattcctatcccagaaaagcagatgttcatagctc

SEQ ID NO: 278014 - DNA, 201 bp, Homo sapiens
aatgctcctgattattgtaaatacaaaattgcatgcaggattgtctaaagacaatgccaggttggactgccagaatgaaccaacagcacgtgatgtgcttscctctgcagagagcctatgaatggacatgcagtcagggaggtttcacatcaccaagattcctatcccagaaaagcagatgttcatagctctgggaatgga

SEQ ID NO: 278015 - DNA, 201 bp, Homo sapiens
aatacaaaattgcatgcaggattgtctaaagacaatgccaggttggactgccagaatgaaccaacagcacgtgatgtgcttccctctgcagagagcctatkaatggacatgcagtcagggaggtttcacatcaccaagattcctatcccagaaaagcagatgttcatagctctgggaatggaatgcggcccttgtggagag

SEQ ID NO: 278016 - DNA, 201 bp, Homo sapiens
taaagacaatgccaggttggactgccagaatgaaccaacagcacgtgatgtgcttccctctgcagagagcctatgaatggacatgcagtcagggaggtttyacatcaccaagattcctatcccagaaaagcagatgttcatagctctgggaatggaatgcggcccttgtggagagcctataaatggatgcatggggggcac

SEQ ID NO: 278017 - DNA, 201 bp, Homo sapiens; identical to SEQ ID NO: 56003

SEQ ID NO: 278018 - DNA, 201 bp, Homo sapiens
cagtgtggtcaaggacctcactatttctgcccaacatgtggcttctctaaaggtcctctttgctttggagctctcaggcatttgtcagacctgcatctcayggtctaacactttcttctcaatcctgcttccttccttttcctttcacaggtgccacttcggataaaccctttggactcctaactccaatcaggtgtctgc

SEQ ID NO: 278019 - DNA, 201 bp, Homo sapiens; identical to SEQ ID NO: 56008

SEQ ID NO: 278020 - DNA, 201 bp, Homo sapiens; identical to SEQ ID NO: 56002

SEQ ID NO: 278021 - DNA, 201 bp, Homo sapiens
ccggccggagcactcacccgtcggtggaggccgttaccagggccaccttatttgcgagcgggtcccggcgggtcatcccggagctggccatccgcaccgamttccaagcccgggcacagaggcctagcagccccgccttgtgcatggatcagaccagcaagtatgggttccactcttcccaggggcggtgacagagtaggg

SEQ ID NO: 278022 - DNA, 201 bp, Homo sapiens
ctaataaaatgagttagggaggactccctctttatctattgattggaatagttttagaaggaatggtaccagctcctctttgtacctctggtagaattcarctgtgaatccatctggtcctggactttttttggttggtaggctattaattattatctcaattttagaacctgatattggtctattcaaagattcaacttc

SEQ ID NO: 278023 - DNA, 201 bp, Homo sapiens
gttaccagggccaccttatttgcgagcgggtcccggcgggtcatcccggagctggccatccgcaccgaattccaagcccgggcacagaggcctagcagccycgccttgtgcatggatcagaccagcaagtatgggttccactcttcccaggggcggtgacagagtagggcgaggggcaggacgaagggcgggccgattccc

SEQ ID NO: 278024 - DNA, 201 bp, Homo sapiens
aatgaaccaacagcacgtgatgtgcttccctctgcagagagcctatgaatggacatgcagtcagggaggtttcacatcaccaagattcctatcccagaaargcagatgttcatagctctgggaatggaatgcggcccttgtggagagcctataaatggatgcatggggggcacctgtccatatagataagatagggctata

SEQ ID NO: 278025 - DNA, 201 bp, Homo sapiens
acgatgggttagaacatgctcctttagctcggagaagtttgttattactgactttctgaagcctacttctgtcaactctctgtctaattttgttccctgtmtggccaggacttgtattcctttggaggagaagagttgttctggtttttggatgttttggctgttctgctctggtttctcccatctttgtggttttatcta

SEQ ID NO: 278026 - DNA, 201 bp, Homo sapiens
atttaagctcttctctacactggttattctagttagccatttgtctaaccttttttcaaggtttttagcttccttacgatgggttagaacatgctcctttrgctcggagaagtttgttattactgactttctgaagcctacttctgtcaactctctgtctaattttgttccctgtatggccaggacttgtattcctttgga

SEQ ID NO: 278027 - DNA, 201 bp, Homo sapiens
tcagtctgcacttctgccaagtgggctgaaatgatctccctcctgggtttccgggagaatgaagaaatctggatggcttatggtacagtgtagaaaggccscaacagacccaaatgcaagcatctgaattggtttaacccactggcctccaaagccagactgagaagcagtgctggttcatggcagcgttttcactagttc

SEQ ID NO: 278028 - DNA, 201 bp, Homo sapiens
aaatcagctattgaagcttgtgtatccttcatgaagttctcctactgtggttttcagccccatcaggtcatttaagctcttctctacactggttattctarttagccatttgtctaaccttttttcaaggtttttagcttccttacgatgggttagaacatgctcctttagctcggagaagtttgttattactgactttct

SEQ ID NO: 278029 - DNA, 201 bp, Homo sapiens
acagacccaaatgcaagcatctgaattggtttaacccactggcctccaaagccagactgagaagcagtgctggttcatggcagcgttttcactagttcaargcaaaatgagaaaaggaaacaattacagtgagtttcataaagctaagcttatttaacagtcctttattgtggagtatacgtttgcttctttttgtgtgtg

SEQ ID NO: 278030 - DNA, 201 bp, Homo sapiens; identical to SEQ ID NO: 56013

SEQ ID NO: 278031 - DNA, 201 bp, Homo sapiens
cagcgttttcactagttcaaggcaaaatgagaaaaggaaacaattacagtgagtttcataaagctaagcttatttaacagtcctttattgtggagtatacstttgcttctttttgtgtgtgtgtgtgtgtgttagtgttttcttttagaaaagatgatgaaagcagatgggtaggtttagagatgtgttattggtgaaatc

SEQ ID NO: 278032 - DNA, 201 bp, Homo sapiens; identical to SEQ ID NO: 55999

SEQ ID NO: 278033 - DNA, 201 bp, Homo sapiens; identical to SEQ ID NO: 56001

SEQ ID NO: 278034 - DNA, 201 bp, Homo sapiens
tactaacaatacgaaaattagctgggcgtggtcagaagttcgagatcagcctggccaacatggtgaaacctcatctctactaaaaatacaaaaaccagccsggcctggtggcatgtgcctgtaatcccagctactcaggaggctgtggcaggagaattgcttgaacgtgggaggcagaggttgcagtgagccaaaatcatg

SEQ ID NO: 278035 - DNA, 201 bp, Homo sapiens
cctgtttccaggcagccagggcctcagaaactccggccggagcactcacccgtcggtggaggccgttaccagggccaccttatttgcgagcgggtcccggygggtcatcccggagctggccatccgcaccgaattccaagcccgggcacagaggcctagcagccccgccttgtgcatggatcagaccagcaagtatgggtt

SEQ ID NO: 278036 - DNA, 201 bp, Homo sapiens
ctagacaggactcatggcccagctgctgagagcctgattagctgtgagtgtccagctgttaactccttctggtctacttcagcttctggaaggaggttacrttcttctcagggcggctctggccatttactgagcaggacagtgtggtcaaggacctcactatttctgcccaacatgtggcttctctaaaggtcctctttg

SEQ ID NO: 278037 - DNA, 201 bp, Homo sapiens
ctccaccatctaccttccgcctgactggggcttgcctttccgggctggcgggtgagctctccgttcaagttgcctgtagggctcgcccctcccctggcccytgcaggaacccgcaggctttggctgctgcctttctgcatctgcttgcccaccttttcttctctgggaagtgggggttttgagttggttgcttttgcttct

SEQ ID NO: 278038 - DNA, 201 bp, Homo sapiens
cccgccccggtaccgctgtgagcggtctgtggccctgggcacctccatccgccgcggcgcccctccaccatctaccttccgcctgactggggcttgccttyccgggctggcgggtgagctctccgttcaagttgcctgtagggctcgcccctcccctggcccttgcaggaacccgcaggctttggctgctgcctttctgca

SEQ ID NO: 278039 - DNA, 201 bp, Homo sapiens; identical to SEQ ID NO: 56012

SEQ ID NO: 278040 - DNA, 201 bp, Homo sapiens
actcacccgtcggtggaggccgttaccagggccaccttatttgcgagcgggtcccggcgggtcatcccggagctggccatccgcaccgaattccaagcccdggcacagaggcctagcagccccgccttgtgcatggatcagaccagcaagtatgggttccactcttcccaggggcggtgacagagtagggcgaggggcagg

SEQ ID NO: 278041 - DNA, 201 bp, Homo sapiens
gagtctttcataagccttcaagtcaataagacttctgtaagcctttgaggtcatgatcatgaatataaattactgatcttcagttttgtgaaaataccaawcaagaattacagaatttcaaaatgacaaaacatcagacgtatgtgttcaattcagcccttattgaaaacacacttactctgcggactgctacttgattgt

SEQ ID NO: 278042 - DNA, 201 bp, Homo sapiens; identical to SEQ ID NO: 56014

SEQ ID NO: 278043 - DNA, 201 bp, Homo sapiens
aatttacaataaaattatatatcatttcttcaagagtctttcataagccttcaagtcaataagacttctgtaagcctttgaggtcatgatcatgaatatamattactgatcttcagttttgtgaaaataccaaacaagaattacagaatttcaaaatgacaaaacatcagacgtatgtgttcaattcagcccttattgaaa

SEQ ID NO: 278044 - DNA, 201 bp, Homo sapiens
aaaaggtctcttatcctataaaaatcttgacaaaggcagccttctaatccaatgcgtccagtttccgtctagaaaccaaataaaaaaaattctttagtacrttttctattcattaatatgcagacataataaccgaaatatatgaaatagattactttatgattggtcaggacatgggttgctctgattcacagcatatgg

SEQ ID NO: 278045 - DNA, 201 bp, Homo sapiens; identical to SEQ ID NO: 56015

SEQ ID NO: 278046 - DNA, 201 bp, Homo sapiens
aacatggagaaaccccgtctctactaaaaatacaaaattagctgggcgtggtggtgcatgcctgtaatcccagctactcgagatgctgaggcaggagaatygcttgaacccaggaggcagaggttgcggtgagccgagatcgtgtgccattgcactccagtctgggcaacaagagcaaaactccatctcaaaaaacaaaaa

SEQ ID NO: 278047 - DNA, 201 bp, Homo sapiens
aaacaaaacaaaaaaaaacacccatcagatctcatgagaactcaccatcacaagaacagcatgagggtaaccaccaccatgattaaattactgcccactgrgtccctcccacaacacgtagggattatgggaactattaacacaattcaatttggtggggacacagccaaactgtatcagtattacaatacaatatgcaaa

SEQ ID NO: 278048 - DNA, 201 bp, Homo sapiens; identical to SEQ ID NO: 56019

SEQ ID NO: 278049 - DNA, 201 bp, Homo sapiens
  misc_feature (1)...(201): n = A,T,C or G
aataattaaaatttacaataaaattatatatcatttcttcaagagtctttcataagccttcaagtcaataagacttctgtaagcctttgaggtcatgatcntgaatataaattactgatcttcagttttgtgaaaataccaaacaagaattacagaatttcaaaatgacaaaacatcagacgtatgtgttcaattcagccc

SEQ ID NO: 278050 - DNA, 201 bp, Homo sapiens; identical to SEQ ID NO: 56016

SEQ ID NO: 278051 - DNA, 201 bp, Homo sapiens; identical to SEQ ID NO: 56017

SEQ ID NO: 278052 - DNA, 201 bp, Homo sapiens
gaagaagtgccaagcaaagggggaaaattcccttacaaaaccatcagatcttgggccaggagcagtggctcacgcctgtaatcccagcactttgggaggcycaggcgggcggatcacctgaggtcgggagtttgaggccagcctaaccaacatggagaaaccccgtctctactaaaaatacaaaattagctgggcgtggtg

SEQ ID NO: 278053 - DNA, 201 bp, Homo sapiens
cacaaaaaaggaaaaaccaaggaaccgctccagattgaggaagactaaagggaaaatgtaactaaatgcgtgcttcatcctgattggactgtggaccaaaraaggaaagggttattgtaaggatatttttggagtaaatggcaacatttgaatggggttcgtggatcaaatggtagaattttatcaatgctggtttcctga

SEQ ID NO: 278054 - DNA, 201 bp, Homo sapiens
ggaaacgcgtccgggccaactctcgagagggtttcacccctgcccagtgcgggcactgcccgctcccttccgcccccaggcctcgcaggcccctccggggrtgctgcccacccccacttacctttctaggctctgctgacccttcgggattcgcggctagctgtgatgtgtccgccaagatctcttctcttgtctgtaaac

SEQ ID NO: 278055 - DNA, 201 bp, Homo sapiens; identical to SEQ ID NO: 56020

SEQ ID NO: 278056 - DNA, 201 bp, Homo sapiens
tcaccccaatatcattctctccctcctcctccaactcctccgagcccaggtccgacatggtctcgccccagcctggatcacagccgcagcgcctctagcargtgggtagcaaccgcctccaccgccgcgtcccgcgtcgccatggagacgcggccggtcccgcctccctcccagcccggaagatggggagcggggacaggc

SEQ ID NO: 278057 - DNA, 201 bp, Homo sapiens
gcacctcgaccaatcaccgcccgggaatacggaggggcggggcggaagggacgaggtggagccagtggcagcactctggtgccgtcatagcaacgaggggscgcttcggccaatcactgctcgggaagcgagggggcggggactgggcagggcctgagcgggttctgtgcctggctgcccaccggctctctgacctggacc

SEQ ID NO: 278058 - DNA, 201 bp, Homo sapiens; identical to SEQ ID NO: 56022

SEQ ID NO: 278059 - DNA, 201 bp, Homo sapiens; identical to SEQ ID NO: 56023

SEQ ID NO: 278060 - DNA, 201 bp, Homo sapiens; identical to SEQ ID NO: 56024

SEQ ID NO: 278061 - DNA, 201 bp, Homo sapiens; identical to SEQ ID NO: 56025

SEQ ID NO: 278062 - DNA, 201 bp, Homo sapiens; identical to SEQ ID NO: 56026

SEQ ID NO: 278063 - DNA, 201 bp, Homo sapiens
ggcagagaacgtggagtgatcatctccaactcaactcaatcacactacctaaaatcggcactgacaaagtacaaataatccacctatccagtagaggcagyactgatctggctgattcctggatatggggaatcctctttatgaaacaaacttacaataagaaagaatatgtttgtgggagctctggctgctcttcttgat

SEQ ID NO: 278064 - DNA, 201 bp, Homo sapiens; identical to SEQ ID NO: 56028

SEQ ID NO: 278065 - DNA, 201 bp, Homo sapiens
atgtcatgtgcacccaccagccaggatgacacggtctctctttactctgcatccacagaatttcagtctgccacatcagcacatttgctaaaagaattaaygtgggatggaatggaatcgaaccaagtgctacagctcagggaggaaatgcctccttgaccgagtgtgctcatatgagactccacatcgcgggacacttac

SEQ ID NO: 278066 - DNA, 201 bp, Homo sapiens; identical to SEQ ID NO: 56030

SEQ ID NO: 278067 - DNA, 201 bp, Homo sapiens
tcggcactgacaaagtacaaataatccacctatccagtagaggcagcactgatctggctgattcctggatatggggaatcctctttatgaaacaaacttayaataagaaagaatatgtttgtgggagctctggctgctcttcttgattttgctagctaagagtaaagtggttaagagagtcaggattagagtgttctggat

SEQ ID NO: 278068 - DNA, 201 bp, Homo sapiens; identical to SEQ ID NO: 56032

SEQ ID NO: 278069 - DNA, 201 bp, Homo sapiens; identical to SEQ ID NO: 56033

SEQ ID NO: 278070 - DNA, 201 bp, Homo sapiens; identical to SEQ ID NO: 56034

SEQ ID NO: 278071 - DNA, 201 bp, Homo sapiens
tgacagagaagaggccagccagtatatgccaggtggggcggtcattaggtacaaagttgtccagtcttaggtgctgaggccagtatgggtgcaaggggccmgcgttggtagtcatgtctttgtgggctgatggctgcgtgtgtataggcaggaagttaaaaaaaaaaaaaaaaaaggaacagaaaaacctggacaaataga

SEQ ID NO: 278072 - DNA, 201 bp, Homo sapiens
gggtggcacatgcctataatcccagctactagggaggctgaggcaggaggattgcttgattgcccaggagttcaaggttgcagtgagctataatcatgccwctgcactctagcctgggtgacagagcgagaccccgtctcaaaaaagaaaatggcttctttggttttcttgtaaggaaagaaagaaaaagagaaaagatta

SEQ ID NO: 278073 - DNA, 201 bp, Homo sapiens
ccagcaaatcccatcccacagcatatgaaagaaatcaggactcacagagttgagataagaaggcttggtctccaagcaggtcttcgtagtagagaacgaascagccctcgatcaccaggtgaatgaacccacacactgcaaaccagcacagggacagtcgccgccaagtccccaatgggacaaccgcagcacgacctgaca

SEQ ID NO: 278074 - DNA, 201 bp, Homo sapiens
gccgccaagtccccaatgggacaaccgcagcacgacctgacaacagccatgtggtcacgactaagacccctgtgacagagaagaggccagccagtatatgycaggtggggcggtcattaggtacaaagttgtccagtcttaggtgctgaggccagtatgggtgcaaggggcccgcgttggtagtcatgtctttgtgggctg

SEQ ID NO: 278075 - DNA, 201 bp, Homo sapiens
tagtgccctttccttacccacagagaccacaagctgtagaatgaagcggaggggatgctggcggagaaaggcgatcaccacccacaggctgagtggtcccyacaggcaagctgtgatggtttccatgcacactgtgaagttgtcacccctgcaggagaaagcatgaggggacactggtatcggtgtgctcttcctacaggt

SEQ ID NO: 278076 - DNA, 201 bp, Homo sapiens
tgtccagtcttaggtgctgaggccagtatgggtgcaaggggcccgcgttggtagtcatgtctttgtgggctgatggctgcgtgtgtataggcaggaagttaaaaaaaaaaaaaaaaaaggaacagaaaaacctggacaaatagaaagtacagaatgagataataaaatcaaattcaaatagtttattatcatgagaaatgt

SEQ ID NO: 278077 - DNA, 201 bp, Homo sapiens
cccagtgcccctctagtgccctttccttacccacagagaccacaagctgtagaatgaagcggaggggatgctggcggagaaaggcgatcaccacccacagsctgagtggtccccacaggcaagctgtgatggtttccatgcacactgtgaagttgtcacccctgcaggagaaagcatgaggggacactggtatcggtgtgc

SEQ ID NO: 278078 - DNA, 201 bp, Homo sapiens
acagcatcaagcacaaggactccaggcagcaccagccacagggcattcatgaagacaaagtaaaaccagaagtagagagggtggcccagctctccgtgctrgaatccgtcgcggtgctctgtcaggaagtagagcacatccccatagatctggcctgtgggtggcaggaggggaaggagaagccccagtgaggaaggggac

SEQ ID NO: 278079 - DNA, 201 bp, Homo sapiens
ctggtccaccactcctcagttcttcttgctcttggcttttgtggccttggcatccagcgtgctctgggcatgagtgaggtgcttcacagcatcaagcacarggactccaggcagcaccagccacagggcattcatgaagacaaagtaaaaccagaagtagagagggtggcccagctctccgtgctggaatccgtcgcggtg

SEQ ID NO: 278080 - DNA, 201 bp, Homo sapiens
tcacgactaagacccctgtgacagagaagaggccagccagtatatgccaggtggggcggtcattaggtacaaagttgtccagtcttaggtgctgaggccastatgggtgcaaggggcccgcgttggtagtcatgtctttgtgggctgatggctgcgtgtgtataggcaggaagttaaaaaaaaaaaaaaaaaaggaacaga

SEQ ID NO: 278081 - DNA, 201 bp, Homo sapiens
acagagttgagataagaaggcttggtctccaagcaggtcttcgtagtagagaacgaaccagccctcgatcaccaggtgaatgaacccacacactgcaaacyagcacagggacagtcgccgccaagtccccaatgggacaaccgcagcacgacctgacaacagccatgtggtcacgactaagacccctgtgacagagaagag

SEQ ID NO: 278082 - DNA, 201 bp, Homo sapiens
acctgacaacagccatgtggtcacgactaagacccctgtgacagagaagaggccagccagtatatgccaggtggggcggtcattaggtacaaagttgtccrgtcttaggtgctgaggccagtatgggtgcaaggggcccgcgttggtagtcatgtctttgtgggctgatggctgcgtgtgtataggcaggaagttaaaaaa

SEQ ID NO: 278083 - DNA, 201 bp, Homo sapiens
cgaaccagccctcgatcaccaggtgaatgaacccacacactgcaaaccagcacagggacagtcgccgccaagtccccaatgggacaaccgcagcacgaccwgacaacagccatgtggtcacgactaagacccctgtgacagagaagaggccagccagtatatgccaggtggggcggtcattaggtacaaagttgtccagtc

SEQ ID NO: 278084 - DNA, 201 bp, Homo sapiens
aaggcttggtctccaagcaggtcttcgtagtagagaacgaaccagccctcgatcaccaggtgaatgaacccacacactgcaaaccagcacagggacagtcrccgccaagtccccaatgggacaaccgcagcacgacctgacaacagccatgtggtcacgactaagacccctgtgacagagaagaggccagccagtatatgc

SEQ ID NO: 278085 - DNA, 201 bp, Homo sapiens
tcccatcccacagcatatgaaagaaatcaggactcacagagttgagataagaaggcttggtctccaagcaggtcttcgtagtagagaacgaaccagccctygatcaccaggtgaatgaacccacacactgcaaaccagcacagggacagtcgccgccaagtccccaatgggacaaccgcagcacgacctgacaacagccat

SEQ ID NO: 278086 - DNA, 201 bp, Homo sapiens
catccagcgtgctctgggcatgagtgaggtgcttcacagcatcaagcacaaggactccaggcagcaccagccacagggcattcatgaagacaaagtaaaaycagaagtagagagggtggcccagctctccgtgctggaatccgtcgcggtgctctgtcaggaagtagagcacatccccatagatctggcctgtgggtggca

SEQ ID NO: 278087 - DNA, 201 bp, Homo sapiens
atgtatcggctgtctcccttggcatactctttccctgaagaaaagaagagagagatatgaagaataaaggcagtgaaaggaacacacacttgtgagagctkggggtccctgcaagaagacagacttcataaccttcccatgcgtctgcttcctcatccgtgaaatggggtaactgtttggattctagtggtttatttctct

SEQ ID NO: 278088 - DNA, 201 bp, Homo sapiens
cctcgatcaccaggtgaatgaacccacacactgcaaaccagcacagggacagtcgccgccaagtccccaatgggacaaccgcagcacgacctgacaacagycatgtggtcacgactaagacccctgtgacagagaagaggccagccagtatatgccaggtggggcggtcattaggtacaaagttgtccagtcttaggtgct

SEQ ID NO: 278089 - DNA, 201 bp, Homo sapiens
aggccagccagtatatgccaggtggggcggtcattaggtacaaagttgtccagtcttaggtgctgaggccagtatgggtgcaaggggcccgcgttggtagycatgtctttgtgggctgatggctgcgtgtgtataggcaggaagttaaaaaaaaaaaaaaaaaaggaacagaaaaacctggacaaatagaaagtacagaat

SEQ ID NO: 278090 - DNA, 201 bp, Homo sapiens
agcacaaggactccaggcagcaccagccacagggcattcatgaagacaaagtaaaaccagaagtagagagggtggcccagctctccgtgctggaatccgtygcggtgctctgtcaggaagtagagcacatccccatagatctggcctgtgggtggcaggaggggaaggagaagccccagtgaggaaggggacactttcgcc

SEQ ID NO: 278091 - DNA, 201 bp, Homo sapiens
cttcttgctcttggcttttgtggccttggcatccagcgtgctctgggcatgagtgaggtgcttcacagcatcaagcacaaggactccaggcagcaccagcyacagggcattcatgaagacaaagtaaaaccagaagtagagagggtggcccagctctccgtgctggaatccgtcgcggtgctctgtcaggaagtagagcac

SEQ ID NO: 278092 - DNA, 201 bp, Homo sapiens
agcctgacagtggggctgcctggggagagaagagttaaggcatgacatcaccagagaagcctcggcgggagaatccccggaagacaggaggcagatggatsgggcacgtgaccaccccctccgggagcaggcaacagggaaacagggccaggatcccggcagccctccacacaatcggctcactggctgtccgggccatct

SEQ ID NO: 278093 - DNA, 201 bp, Homo sapiens; identical to SEQ ID NO: 56045

SEQ ID NO: 278094 - DNA, 201 bp, Homo sapiens; identical to SEQ ID NO: 56048

SEQ ID NO: 278095 - DNA, 201 bp, Homo sapiens
cacgccctgagcaacgcggcgcacctggacgtccagcgccgctcaggccggccgcccttcccgcccgaggtcctggccgaggccctcaacacacacctgcrgcacccggccatcaggtgagcccgcgacctaagcagccctggggctgtgccttcccgactccatctgtcgcgggcggaggctggagatctggacagactt

SEQ ID NO: 278096 - DNA, 201 bp, Homo sapiens
aaccacccctcccccagggtctagtgtggcccttgcctgggacacggcagagcccccagggctgtcccccaaccccacactgacttgaaaatgtgggattccccccccccccgactagaggagcagaaacgtgccccccccaacccgacgccggccttcaggtgagccagcgcagctcggttccaggccaggcacagccca

SEQ ID NO: 278097 - DNA, 201 bp, Homo sapiens; identical to SEQ ID NO: 56042

SEQ ID NO: 278098 - DNA, 201 bp, Homo sapiens; identical to SEQ ID NO: 56049

SEQ ID NO: 278099 - DNA, 201 bp, Homo sapiens
ctgccggtgtttgaacgcaacctatgctggactctcccggcagagtgagtgtggccctgacagcggggagggggcgggcaggccggccccaccctcctgayggtcaccctggtccctgaagctgcctggatatggtcgccatgcaggaagccgcccagcacctcctcggcacacacgacttcagcgccttccagtccgctg

SEQ ID NO: 278100 - DNA, 201 bp, Homo sapiens; identical to SEQ ID NO: 56051

SEQ ID NO: 278101 - DNA, 201 bp, Homo sapiens; identical to SEQ ID NO: 56052

SEQ ID NO: 278102 - DNA, 201 bp, Homo sapiens; identical to SEQ ID NO: 56044

SEQ ID NO: 278103 - DNA, 201 bp, Homo sapiens
tcatggacacggctcccccctccacggcctgttgccccctcccctttctcagccccagccccagccacaccaaggctcagcccacacagcagctgtccccrtgtcaccagcccagcagaggggacgggcagccaccgtgggtcggggactcaccacagcccagcccctcccagatgggacgagactcagggccagccacat

SEQ ID NO: 278104 - DNA, 201 bp, Homo sapiens; identical to SEQ ID NO: 56047

SEQ ID NO: 278105 - DNA, 201 bp, Homo sapiens
caacacacacctgcggcacccggccatcaggtgagcccgcgacctaagcagccctggggctgtgccttcccgactccatctgtcgcgggcggaggctggaratctggacagacttccttgtctggtcggagctcgagggggaaggagagccaatgtgacaccgcgggcgggcggggtcgttcctccggtgagctttacctg

SEQ ID NO: 278106 - DNA, 201 bp, Homo sapiens
gggggagagtccaaggcagagcttcccaacaatccccaggttcaagtcccccacttcattctacttatgcccatttctttcgcgtcccacccacctgccartcctctcttactgggaccaaacccggtcctaggcgctcccaattgagagaacaatgccttttccctaaagctccgcccgctctgatgtttacctgctctt

SEQ ID NO: 278107 - DNA, 201 bp, Homo sapiens
gaatcgcttgaacccggaaggcagaggttgcagtgagccaagatcacgccactgcactccagcctaggagacagagcaagactccatctcaaaaaaaaaaagaaaaaaagaaaaagttatggcacagccttcactggccaaccacccctccagctgggcccccagagtctgctcaccagcgattctgcagcccagggctgc

SEQ ID NO: 278108 - DNA, 201 bp, Homo sapiens
gcattttgggttcctacattggccttccttccttccgctggtacatgtagttggggaaagggtcggttttcttctttagttctgttgaggccccagagaascaaaggatccccaaaggacaacagctgtcaggcctccatgtccaaggctgagcccaaatgcgtggggttggacttcccagccccatcctgccccttctgt

SEQ ID NO: 278109 - DNA, 201 bp, Homo sapiens
ccttcactggccaaccacccctccagctgggcccccagagtctgctcaccagcgattctgcagcccagggctgcgtccagtgctagctccctcctgatcgyctcctcagaaggcctaggggccccagggaagcagaccaggatgcaggtcatgttgtccaggctgccctgaagccggtggagaaaaaggagcccggtgggg

SEQ ID NO: 278110 - DNA, 201 bp, Homo sapiens
ccaaggcagagcttcccaacaatccccaggttcaagtcccccacttcattctacttatgcccatttctttcgcgtcccacccacctgccaatcctctcttmctgggaccaaacccggtcctaggcgctcccaattgagagaacaatgccttttccctaaagctccgcccgctctgatgtttacctgctcttccaccttcca

SEQ ID NO: 278111 - DNA, 201 bp, Homo sapiens
caagagttaggctgggcacagtggcgcacgcctgtaatcccagcactttgggagaccaaggcgggcggatcacttgaggccaggggttcgagaccagcctrgacaacatcgtgaaaccccgtctatactaacaatacaaaaattagctgggtgtgattgtgcatgcctgtaatcccagctactcaggaggctgaggcagga

SEQ ID NO: 278112 - DNA, 201 bp, Homo sapiens
gtccaaggcagagcttcccaacaatccccaggttcaagtcccccacttcattctacttatgcccatttctttcgcgtcccacccacctgccaatcctctcytactgggaccaaacccggtcctaggcgctcccaattgagagaacaatgccttttccctaaagctccgcccgctctgatgtttacctgctcttccaccttc

SEQ ID NO: 278113 - DNA, 201 bp, Homo sapiens
cccttccactaactctcccgtgcctcaaagcatccctcaggctccgcccctgtattttggccctgcccacttcaggccacgcccttcgcttgagtcctatyccctcctttgctagctttactcttgcctctctatcaaagccctcctccccaaaaccccgaggctctctccctctgctgcaccaagccccaaaggtaccac

SEQ ID NO: 278114 - DNA, 201 bp, Homo sapiens
tgcctcaaagcatccctcaggctccgcccctgtattttggccctgcccacttcaggccacgcccttcgcttgagtcctatcccctcctttgctagctttamtcttgcctctctatcaaagccctcctccccaaaaccccgaggctctctccctctgctgcaccaagccccaaaggtaccacgccacgcccccaggaccttg

SEQ ID NO: 278115 - DNA, 201 bp, Homo sapiens
gatggggcactgcagagcgttgccggctcacatttcttggaggggaatcacagtctcttctctgcatctgcgtctccctcctcatgccttgcacaatgctycagggctgggagtaggaatgtattaatatagcaagctggctgggttgcagtggctcccgcctgtaatcccagcactttgggaggccaaagcaggaggatc

SEQ ID NO: 278116 - DNA, 201 bp, Homo sapiens
ttagtgaggccttttaaaaaacaaacaggttgaaaaatagattaaagtaggcaaatacagcatctgtctttagagctatcaactcaggaattctctcaatttttttttttttttttttttttttgagatggagtcttgctctgtcacccaggctggagtgcagtggtgcaatctcggctcactacaagctctgcctcccag

SEQ ID NO: 278117 - DNA, 201 bp, Homo sapiens
tcgaacatcacatgcaaatgcagttcgattgcaacacttctgatttctatagcacaccatattcctacaacgagactgatcatgggaaatggtcaaaggayaccttctgggtagggaagataatttatccttggacataactaaattaaagaaacaaatttttgaagcctctcaagctcatttatccattgtgcctggagc

SEQ ID NO: 278118 - DNA, 201 bp, Homo sapiens
agtagggaggatcacttgagctcaggaattcaagaccagcctggggatcatggtgaaaccccatccctatgaaaaattcaaacattagctgagcgtgaagrtgtgcgcctgtagtcccagctacttgggaggctgaggtgggaggatcacctgaacccaggaagtcgaggctgaagtgagccgtgattgcaccactgcact

SEQ ID NO: 278119 - DNA, 201 bp, Homo sapiens
agcgattctcctgcctcagcctcccaagtagctgggattgcagatgcacgccaccatgaccagctaatttgtgtatttttagtagagatggggttttggcrtgtcagtcaggctggtcttgaactcctggcctcatgtgatccacctgcattggcctcccaaagtgctgggattataggcgtgggccactgcgcccagccc

SEQ ID NO: 278120 - DNA, 201 bp, Homo sapiens
acttccagctcacctcggagctccgggagcctttcagcacctgcttggtgagcgcgattacgtcagtaccacaggtggtcaccttctccgtgagaagcccyttcacggactgaccgaaccgcgcttgagactctggcgttccagtcgccatcatttcagttagcgaacggttgcgcactgacgatggtgagtcgccggggc

SEQ ID NO: 278121 - DNA, 201 bp, Homo sapiens
gctggtcttgaactcctgacctcatgatcggcccaccttggcctcccaaagtgctgggattacagacatgagccaccacgcccggccccttgtctcaattaaaaaaaaaaaaaaaaagatgcaaaacatttcatcaccctcagaagtttccaagtgccctttaaagtccatctctccttctctgtctcacccgggcaacca

SEQ ID NO: 278122 - DNA, 201 bp, Homo sapiens
aatgtggtagtagaaaactaatatattaccagaactcatttgaaatctgttcagctgggcgcagtggctcacactggtaatcccagcactttgggaggccragtagggaggatcacttgagctcaggaattcaagaccagcctggggatcatggtgaaaccccatccctatgaaaaattcaaacattagctgagcgtgaag

SEQ ID NO: 278123 - DNA, 201 bp, Homo sapiens
tgcaacgcgacctccttcccacagcaacgaaagactgcgactccccggactatcaggccgggagagtccacttccagctcacctcggagctccgggagccyttcagcacctgcttggtgagcgcgattacgtcagtaccacaggtggtcaccttctccgtgagaagccccttcacggactgaccgaaccgcgcttgagact

SEQ ID NO: 278124 - DNA, 201 bp, Homo sapiens
aatgggacacctcagactcagacgaatgttgcctttctgcttcaatcggtcccaacgcagcccccagcacaaacaaatttacctacagccaacccagatgwgtcccagcctcttcttctgtctcagtacaacgcttatctatgctccagagtaaggggaggggcggtcaatctctgtagtaccattcctctaaatttacta

SEQ ID NO: 278125 - DNA, 201 bp, Homo sapiens
gcaacctttgcctccctggttcaagcgattctcctgcctcagcctcccgagtagctgggattacaggtgcccactatcacgcctggctaatttttgtattkttagtagagatgggtttcaccatgttggctaggctggtcttgaactcctgacctcaggtgatccacctgccttggcctcccaaagtgctgggattacagg

SEQ ID NO: 278126 - DNA, 201 bp, Homo sapiens
agatgtgcgcctgtagtcccagctacttgggaggctgaggtgggaggatcacctgaacccaggaagtcgaggctgaagtgagccgtgattgcaccactgcrctcagactaagtgacagaaccagaccctgtctcaaaaaaaaaaaaaagaaaagaaacagaaaaagaaatctgttcaatcaatttatgacaactcacctca

SEQ ID NO: 278127 - DNA, 201 bp, Homo sapiens
ctcactccccgcccctctgctgtgaggacacagcctgagcgcagccctgtcctccacaggtagatgatgagctggagatcaaggcctactatgcaggccaygtgctgggggcagccatgttccagattaaagtgggctcagagtctgtggtctacacggtcagtggaagggcttgaggcttgggaggggctgctggggtgg

SEQ ID NO: 278128 - DNA, 201 bp, Homo sapiens
cgtggggaacaggcagctggagccgcgtttaaggcctggggtagggtgcttggaaacgtgaagtggtttgaatgacccaggggcttggaggggtggcggcygagaagagcggcggggaaggtcaggtagggggtaggggttgtgtgcacaccgagtctgcatgttttccatcattcgtggcgtgcaggcgtgtacacctgc

SEQ ID NO: 278129 - DNA, 201 bp, Homo sapiens
agcaagacctcttccttctcatcgagacactgcttgaaactgaccaggacgactttcagattgaaacctgtctccgagtcatccattttttgataggaacrgaaatacagtagggctggggggctgtgtcgctggggtcagcttgctctgtggctcattttctgtgtgtggaggggaacaaaatagctgcgatcccattgc

SEQ ID NO: 278130 - DNA, 201 bp, Homo sapiens
gtgggggcgtcggcccctggtctctgacttgatcctgtgtccagagcagcgcgtggggaacaggcagctggagccgcgtttaaggcctggggtagggtgcytggaaacgtgaagtggtttgaatgacccaggggcttggaggggtggcggccgagaagagcggcggggaaggtcaggtagggggtaggggttgtgtgcaca

SEQ ID NO: 278131 - DNA, 201 bp, Homo sapiens
cggcggggtggggaggtcagcgccgggccgggccgcggccgccggggaggggctggaggaccggcctcggacaaagcggcggccccgccccgccatgcccygggggttggaacaaaagacgctcctgccctgtgcggccgccccgggtggagggcgtgcgcgtgggcagccgtgggcacctcgggaccgtccgcccccgct

SEQ ID NO: 278132 - DNA, 201 bp, Homo sapiens
cagcggactggaaggcgctgaagtcgtgtgtgccgaggaggtgctgggcggcttcctgcatggcgaccatatccaggcagcttcagggaccagggtgaccrtcaggagggtggggccggcctgcccgccccctccccgctgtcagggccacactcactctgccgggagagtccagcataggttgcgttcaaacaccggcag

SEQ ID NO: 278133 - DNA, 201 bp, Homo sapiens
acaagtgccgccccaacctgctcatcacagagtccacgtacgccacgaccatccgtgactccaagcgctgccgggagcgagacttcctgaagaaagtccaygagaccgtggagcgtggtgggaaggtagctgcagcaggggtggggacatgggccctcggccatgctgggctggtctttctggcaggcttggctgcccttg

SEQ ID NO: 278134 - DNA, 201 bp, Homo sapiens
gggtgggcccaggctgacctgtgctgcgtccccctagccacttccacctggaccactgcggggcactcccctacttcagcgagatggtgggctacgacggscccatctacatgactcaccccacccaggccatctgccccatcttgctggaggactaccgcaagatcgccgtagacaagaagggcgaggccaacttcttca

SEQ ID NO: 278135 - DNA, 201 bp, Homo sapiens
ctacacgtgtctggtgcttgcccaggggatcttggctctccagaatcgtcttcacctgggcaggtgccaaagcccccagccccacggccaccagcacagcygtcatcctccgtacctgtgacccagagccacctgtgacccagagccgcccgtgacccaccagcacagccgtcatcctccgtacctgtgacccagagccgc

SEQ ID NO: 278136 - DNA, 201 bp, Homo sapiens
gtccagcttgtcacacccagccctgcaaccgtggggacagtgcatcgtggctcacacccccacccccgtgttccagagctgcctggattgacaagtgccgycccaacctgctcatcacagagtccacgtacgccacgaccatccgtgactccaagcgctgccgggagcgagacttcctgaagaaagtccacgagaccgtgg

SEQ ID NO: 278137 - DNA, 201 bp, Homo sapiens
cccgtttctcgtggagccaggtgcgcgccgcgggcgtcctccggtctcctccccgcgcgggccctggtgggagccgagaggcggcctagtccctgcacccygggcctccggcagtgacgcgagaacgcgagccccgaggttcaggcggccgtgaggggacgtcgcagatggggccgcggggccttcgcgctcgctgtgcgc

SEQ ID NO: 278138 - DNA, 201 bp, Homo sapiens
cggcgccccaggccttgtgggtgggaccagaccctgtcgagcgagcgctacgagtctcacctgggaagggggcttcagatggcaccggactggatgggcascggttcgggtccctgctccaccgagaggcccaggaaggggcggaggcccggggtggtgttggggaggggccgacctgagccacggctccgtcctgcgcgg

SEQ ID NO: 278139 - DNA, 201 bp, Homo sapiens
ccactttccttcctgggatcactgtgggtcctgtcgggaggcgggactgccagtacttcaggactgggctttggaattcagaaaaccagcccgggccccaygcctcggggccgtgtgccacaagtgcctctgtggccttaggtccctgggcatgaagaggggcggccctcccttcccacaggtgccagagggcctctgtga

SEQ ID NO: 278140 - DNA, 201 bp, Homo sapiens
cctcgcctagcatctgcacggcctgctccgggggccccacgttcatggcctccaggaagacctcgcgtgtgggcagcgtgcagaaggccacggtgacggcrcggcgcacgacccaggggtggtaggcggccagcgaggcgttgtaggagtcggcgcagagcgcggaggtgcgtgcgtcctcggggctggtacgcaggccct

SEQ ID NO: 278141 - DNA, 201 bp, Homo sapiens
  misc_feature (1)...(201): n = A,T,C or G
tggggacaccaggaggcgtcagcgcgaggatgcgggtcccagaccagactgggcgccgacccgggagagcacgtgcagggtgggggtatgcactggcttangaacccaccaggctctgtccgagcggcattgaaatggccagagtgggacaggctggtgccctcagagcgcttggagcggccagagactcgctggagctcc

SEQ ID NO: 278142 - DNA, 201 bp, Homo sapiens
  misc_feature (1)...(201): n = A,T,C or G
agcaccgtggggacaccaggaggcgtcagcgcgaggatgcgggtcccagaccagactgggcgccgacccgggagagcacgtgcagggtgggggtatgcacnggcttacgaacccaccaggctctgtccgagcggcattgaaatggccagagtgggacaggctggtgccctcagagcgcttggagcggccagagactcgctg

SEQ ID NO: 278143 - DNA, 201 bp, Homo sapiens; identical to SEQ ID NO: 56065

SEQ ID NO: 278144 - DNA, 201 bp, Homo sapiens
ggctcacacccccacccccgtgttccagagctgcctggattgacaagtgccgccccaacctgctcatcacagagtccacgtacgccacgaccatccgtgaytccaagcgctgccgggagcgagacttcctgaagaaagtccacgagaccgtggagcgtggtgggaaggtagctgcagcaggggtggggacatgggccctcg

SEQ ID NO: 278145 - DNA, 201 bp, Homo sapiens
ttcccgcagcgcccagaaggctctgccacgggactcacggccctggccaccgcagcccagatctgcagcaggaaagccggtgcggccctggcttcccgccyctagggcaggtccagcagggagtgctcggcgtagagcttctgggagacgttgtagacacgctggatgaaggggagggcctcgcctagcatctgcacggcc

SEQ ID NO: 278146 - DNA, 201 bp, Homo sapiens
gaggctgggagagccggccatccacagctggaccctgggcctcagagccgggacagtggggtggtgggcagcagtggttgtgcttggatggctgcaccctktggggagcagggatgggtgggcctggccgaggtgagcccctgcatggtggggtccccctgtgctggcgctgagccccagccccggggtcctgtaggctgg

SEQ ID NO: 278147 - DNA, 201 bp, Homo sapiens
aagtctgtccagatctccagcctccgcccgcgacagatggagtcgggaaggcacagccccagggctgcttaggtcgcgggctcacctgatggccgggtgcygcaggtgtgtgttgagggcctcggccaggacctcgggcgggaagggcggccggcctgagcggcgctggacgtccaggtgcgccgcgttgctcagggcgtg

SEQ ID NO: 278148 - DNA, 201 bp, Homo sapiens
cgccccgccctcgcccgccgccctgattggttggatgctgcccaatcaggaggcccggcgccccgacccgcgtttccggctagcgcaccggaagttgcagmgaggtggttgcgcctgcgcagtgcatcaccgcaggcgggcctcgcgggtccgggagcgcggcggagacgatgcctgagatcagagtcacgcccttgggtg

SEQ ID NO: 278149 - DNA, 201 bp, Homo sapiens
ctttctgatctttcatgtggcttcaattacccgcaatctgtacctgggtatattctcaaggtcacctcagccaaggtatcatcaaagccgaagtcctgttkcaccgcttccctgcaccagggactgcctcgggctccgtgtccgcgctcactggaccactgctgtgtccttggggtcactcccacgccttggcctgtgtgt

SEQ ID NO: 278150 - DNA, 201 bp, Homo sapiens
ctttagggttcagcagctcatgacccgctggtctgggtggcctcgtctggacggccacagcactcctgctggccccctgcccttccctgccctgtcctcccagcagccaggcccgtgaagcctggagaagccccttctcctctccggaggcagtgtcctcagctgcccctgagcccctcgtggttgtggtttcttctcaga

SEQ ID NO: 278151 - DNA, 201 bp, Homo sapiens
gtggctcacgcctgcaatcacagcactttggaaggcagaggtgggaggatcgcttgagcccaggagttcaagaccaacctagccaacatggcaagaccccatcactccaaaaaaaaaaaatgctaaaattggcagggcgtggtggtgtgtgcctgtggttcaagctacttgggaggctgagttgtgaggattgcttgagcc

SEQ ID NO: 278152 - DNA, 201 bp, Homo sapiens
cacgtgacttgagggcagggccacagcccaggggcccttcctcacctgctctcctcgggggtgaccaaggggctggcttggcctggggaaacggagacccrgcgcagcgttcgcacggggctcggcaccgggctgccagcggactggaaggcgctgaagtcgtgtgtgccgaggaggtgctgggcggcttcctgcatggcg

SEQ ID NO: 278153 - DNA, 201 bp, Homo sapiens
aggatggagcctccacaccccgggacctgtgacttcaccctggttcgcagatgcaccccacaggctagggggtggcgacctttcgggctcttgcgggcccrgcccccacccctgcctgctctgctctgcaccgcaccctggcgaggcctggctgcgcacgcgtgtaataggccgagggggagccgtggccgaggcgtcttg

SEQ ID NO: 278154 - DNA, 201 bp, Homo sapiens
gcttcttggcccatgtgtctgtccacacagcagacttggtccggtttcctcagtgcactggggtcctgcagagcttggggaggcagcacagggggcggggkgcgcagcagtgactcatctgccctccctcgagtaggggccggccaggacgtgggccgaagctgcatcctggtctccattgcgggcaagaatgtcatgctg

SEQ ID NO: 278155 - DNA, 201 bp, Homo sapiens
tgcacagcatacatgcaaatggcacacgtgtacggtgcacacgaatggcacatgcgcatggtacacacaaatggcacacgcacggcaagtgcatggcacacgcgcatggcacacacaaaacggcacatgcaaatggcacacacacggcacacacaatacacacggaaacggcacatacacaaatgccacacatgcatggca

SEQ ID NO: 278156 - DNA, 201 bp, Homo sapiens; identical to SEQ ID NO: 56087

SEQ ID NO: 278157 - DNA, 201 bp, Homo sapiens
atgaaggggagggcctcgcctagcatctgcacggcctgctccgggggccccacgttcatggcctccaggaagacctcgcgtgtgggcagcgtgcagaaggycacggtgacggcacggcgcacgacccaggggtggtaggcggccagcgaggcgttgtaggagtcggcgcagagcgcggaggtgcgtgcgtcctcggggctg

SEQ ID NO: 278158 - DNA, 201 bp, Homo sapiens
gggcagggggtcgagggcaccttccagcacagacaccaggacgggattccatgtcctcccccatggcgtgagcgcttcctcggagggtgccccccgccccrgtgtggacactgtgctgtgaacacccctggcctgtgcacaccccatggcattttgcagctgtttgcatgggccccactgccctcccctgctctctgggtc

SEQ ID NO: 278159 - DNA, 201 bp, Homo sapiens
cttcccccggggtccaggggtcaactgctacatgccggccaatggcgagacggtgacgctgcccacaagccccagcatccccgtaggcatctcgctggggytgctgaagcgggagatggcgcagggtatgcgggctgggcagggcagggcagggtgctcggggcaggcggctgggagcggccctcacattgatggctcctg

SEQ ID NO: 278160 - DNA, 201 bp, Homo sapiens
gccccgccccccccccactcccttgggccctggaggccaggcagggtctcaccgagcctccccacagcgtcctgaaggaccactgtgtgcagcacctcccrgacggctctgtgactgtggagtccgtcctcctccaggccgccgccccttctgaggacccaggcaccaaggtgctgctggtctcctggacctaccaggtaa

SEQ ID NO: 278161 - DNA, 201 bp, Homo sapiens
ggctcagcttccagctcacatctgtcagtgaggttgggggtaacctcggcccctccggatgctgtgagcagccaggggtcctggtgccacctgcgggatgrgagtgcccagcctgagtctgcacatagaaccccccttcctgggggcccctccctggggcatgggtggccccagatgctgcctggagaccactgtgcaacc

SEQ ID NO: 278162 - DNA, 201 bp, Homo sapiens
tggtacacgcgaatggcacatgcacggcacacgtgcatgggacacgcacggcacacgcaaggaacacatgcatggcatgcaaacggcacacatgcatgccrcacgtgcacagcatacatgcaaatggcacacgtgtacggtgcacacgaatggcacatgcgcatggtacacacaaatggcacacgcacggcaagtgcatgg

SEQ ID NO: 278163 - DNA, 201 bp, Homo sapiens
cctcgggtcagcacgggcagcctgggctgaggctctctcttcccccggggtccaggggtcaactgctacatgccggccaatggcgagacggtgacgctgcmcacaagccccagcatccccgtaggcatctcgctggggctgctgaagcgggagatggcgcagggtatgcgggctgggcagggcagggcagggtgctcgggg

SEQ ID NO: 278164 - DNA, 201 bp, Homo sapiens
cctcttggttctgggtgactctgtgtctctcttgtctcacctgtacaacaggcatagtgatgggacctctctgggagaatgggcacacagcagccctgccyccaaggctggccttttctcagggtgtttgttgagccctggggctaacacagccccctgagcctggcagtggggcctcagctcccttggagttaggtgcac

SEQ ID NO: 278165 - DNA, 201 bp, Homo sapiens
cgcaagcaaacgacgtgtggcacacgcgcatcgcacgcaaatggcacgtgcatgacacaaatggcacatgcaaacagcacacacatggtacacgcaaagcrcatggcacgcacatgcgcacagcatacgctcacagcacacacggcatacacaaatggcacacatgcacgtggcacacgtgcacggccaacacgcagcaca

SEQ ID NO: 278166 - DNA, 201 bp, Homo sapiens
tgaaggtgcccatctacttctccacggggctgaccgagaaggccaaccactactacaagctgttcatcccctggaccaaccagaagatccgcaagactttygtgcagaggaacatgtttgagttcaagcacatcaaggccttcgaccgggcttttgctgacaacccaggaccgatggtgaggcccgcggcagggccggcca

SEQ ID NO: 278167 - DNA, 201 bp, Homo sapiens; identical to SEQ ID NO: 56093

SEQ ID NO: 278168 - DNA, 201 bp, Homo sapiens; identical to SEQ ID NO: 56067

SEQ ID NO: 278169 - DNA, 201 bp, Homo sapiens; identical to SEQ ID NO: 56107

SEQ ID NO: 278170 - DNA, 201 bp, Homo sapiens
gtgtctggtgcttgcccaggggatcttggctctccagaatcgtcttcacctgggcaggtgccaaagcccccagccccacggccaccagcacagccgtcatyctccgtacctgtgacccagagccacctgtgacccagagccgcccgtgacccaccagcacagccgtcatcctccgtacctgtgacccagagccgcccgtga

SEQ ID NO: 278171 - DNA, 201 bp, Homo sapiens
cagagactcgctggagctcccggggtgttgccgggcagggaggcaggggctggaggggagatgggccagctctggagggtgcctggttctgggtgtgggtyagggaagaagtgaaggttaaatcagcgagtgacaggtgaaattccatttctgacaaagattatgggtttgtctgtgtctcactcgaatctctgggtattg

SEQ ID NO: 278172 - DNA, 201 bp, Homo sapiens
tatttagtgcctgctgtgttctgcaggccctgccataggcgcttgatacagcggtgcatagcgtatgaaaaagatctgtcctggtaagcttacattcttasagcagacgataagtattttaagtattaagtaaataaggttatttcacgtataaggtgttaaatgctatgaaaagaaaaataaaacagggtaacgtggtgt

SEQ ID NO: 278173 - DNA, 201 bp, Homo sapiens; identical to SEQ ID NO: 56136

SEQ ID NO: 278174 - DNA, 201 bp, Homo sapiens
tatagatggaatcatacagagtgcaaccttttagaatttttttttcactcagcataattatctggagactcatccaagttgttgcatgtatcaatagcgcrtttctttttattgatgagtagtagtccatagtatgaatgtaccacagtttgtttagccattcactcactgaagaacacctgggttgtttccagttttcag

SEQ ID NO: 278175 - DNA, 201 bp, Homo sapiens
ataaaatacagtgtacagtaaccttttagtcaaaacagcatcatacttggaaactgaaagcctactgttatttgttattgttgcttaacagctgatacagrtattctggtgacactactgtgctggcttacttaacctgaatacactatttttttcgttgtattactggtatgtcattttttttactgttaagtacttatg

SEQ ID NO: 278176 - DNA, 201 bp, Homo sapiens
gtactgttgagttttgagatatctttatatattctagatattagccctttgtcaaatatgtgctttgtaaacagtttctcacagtgtatggcttgtatttkcatcctcttaaccgtatcttttgcagagcaaaagtttgtcattgtgataaggtccaatttatccacttttccttttattgatgcttttggtttaataact

SEQ ID NO: 278177 - DNA, 201 bp, Homo sapiens
ttgagatatctttatatattctagatattagccctttgtcaaatatgtgctttgtaaacagtttctcacagtgtatggcttgtattttcatcctcttaacygtatcttttgcagagcaaaagtttgtcattgtgataaggtccaatttatccacttttccttttattgatgcttttggtttaataactctttgcccagccc

SEQ ID NO: 278178 - DNA, 201 bp, Homo sapiens
ttgagttaattttttatttattattattatactttaagttttagggtacatgtgcacaatgtgcaggttagttacatatgtatacatgtgccatgctggtrtgctgcacccattaactcgtcatttagcattaggtatatctcctaatgctatccctccccccccccacaaaattgacaaatgggatctagttaaactaaa

SEQ ID NO: 278179 - DNA, 201 bp, Homo sapiens
cacctggggaggagctgtgaatttttttttttttttttttttttttggcaagactgcttccctcggtggagggcggcccccggagaaggactcagttgtgwatcatcagtaaccaactccagaagctgagggaatgactgtctaggccctgagggggtgtctggaccacaacatcagctatgttgcagttagagtatcatt

SEQ ID NO: 278180 - DNA, 201 bp, Homo sapiens; identical to SEQ ID NO: 56141

SEQ ID NO: 278181 - DNA, 201 bp, Homo sapiens
cagtcatggatacaggctacacctggggaggagctgtgaatttttttttttttttttttttttttggcaagactgcttccctcggtggagggcggcccccrgagaaggactcagttgtgaatcatcagtaaccaactccagaagctgagggaatgactgtctaggccctgagggggtgtctggaccacaacatcagctatg

SEQ ID NO: 278182 - DNA, 201 bp, Homo sapiens; identical to SEQ ID NO: 56142

SEQ ID NO: 278183 - DNA, 201 bp, Homo sapiens
aggccctgccataggcgcttgatacagcggtgcatagcgtatgaaaaagatctgtcctggtaagcttacattcttacagcagacgataagtattttaagtrttaagtaaataaggttatttcacgtataaggtgttaaatgctatgaaaagaaaaataaaacagggtaacgtggtgtgtcctgtgttgagcccctggggga

SEQ ID NO: 278184 - DNA, 201 bp, Homo sapiens
atgacccttcagagtagttccacattaaagcaagggggccagaaactcttatccttgcattgaccagtcatggatacaggctacacctggggaggagctgkgaatttttttttttttttttttttttttggcaagactgcttccctcggtggagggcggcccccggagaaggactcagttgtgaatcatcagtaaccaact

SEQ ID NO: 278185 - DNA, 201 bp, Homo sapiens; identical to SEQ ID NO: 56137

SEQ ID NO: 278186 - DNA, 201 bp, Homo sapiens; identical to SEQ ID NO: 56140

SEQ ID NO: 278187 - DNA, 201 bp, Homo sapiens; identical to SEQ ID NO: 56139

SEQ ID NO: 278188 - DNA, 201 bp, Homo sapiens
gggtttatcccgggaatgcaaggttggttttgcattctgaaatcaaacaatgtaatttaccttaaaagagaaaagccttcattggaagaaataataaaaawtttttttaaagaaaagctatgattatgttaaaaaatacagataaatctattggcaaaaataaacacctcttctgaccaaaatacttagcaatctaggaat

SEQ ID NO: 278189 - DNA, 201 bp, Homo sapiens
atcttttcatgtgcttatcttccatgtgtatattcccttcagtgaaatgtctgttcatgtcttttgcccattttctaattaattgtttttcgtactgttgagttttgagatatctttatatattctagatattagccctttgtcaaatatgtgctttgtaaacagtttctcacagtgtatggcttgtattttcatcctctt

SEQ ID NO: 278190 - DNA, 201 bp, Homo sapiens
gggccagactcatcggttcattcaacaaccagtatttagtgcctgctgtgttctgcaggccctgccataggcgcttgatacagcggtgcatagcgtatgaraaagatctgtcctggtaagcttacattcttacagcagacgataagtattttaagtattaagtaaataaggttatttcacgtataaggtgttaaatgctat

SEQ ID NO: 278191 - DNA, 201 bp, Homo sapiens
acccttcagagtagttccacattaaagcaagggggccagaaactcttatccttgcattgaccagtcatggatacaggctacacctggggaggagctgtgawtttttttttttttttttttttttttggcaagactgcttccctcggtggagggcggcccccggagaaggactcagttgtgaatcatcagtaaccaactcca

SEQ ID NO: 278192 - DNA, 201 bp, Homo sapiens; identical to SEQ ID NO: 56144

SEQ ID NO: 278193 - DNA, 201 bp, Homo sapiens; identical to SEQ ID NO: 56145

SEQ ID NO: 278194 - DNA, 201 bp, Homo sapiens
tatagctcaggcaatgccaggagtgtttctgcagagatgtctttgtcaaggactccaaagacaagaggaggcaaggaggtaaagaagagattgaagaataycatctgccagtaatcaatcatggtggagctggagaaaccacagaagaactgataccagaagagcaggttgacgtagcactgcaggcagagagcatggcct

SEQ ID NO: 278195 - DNA, 201 bp, Homo sapiens
tgtgtacatgtaccctaaaacttaaagtataataacaataaaaaaaaaattaaaaatacccactagtctggcccaacaccctcaatagcaagtaagaaackggtcaggaaaggagagaggagttactcaaagtaaatgatggaacagtggtcagaatgcaggcttctgaccccagcatacagctctttctctgatgcctcc

SEQ ID NO: 278196 - DNA, 201 bp, Homo sapiens
gagctggagaaaccacagaagaactgataccagaagagcaggttgacgtagcactgcaggcagagagcatggccttgtgagtggggctccatgtgcagccrgtcaccagctcctgcttgggacctctgggagctgctggagtggcagttgcctcatttataacacacagggttatgtaaggatgagagagaattctaatcc

SEQ ID NO: 278197 - DNA, 201 bp, Homo sapiens
catacaattgaatccttttaacattactctagtgctatagaaagtcattgctatagtgcttagcttgagagatgtcatttcttctttggaaaataagtccyaccattttctttaccattcagcaaatataggacttaccaagtgtctttttttctaggcacagtgttaggtattggggatataatggtaatcaagagactt

SEQ ID NO: 278198 - DNA, 201 bp, Homo sapiens
gctgaggatcctgtctgttagaaggaaaactaacaaatagaaaggacatccacagcaaaaacccatctgtacatcaccatcatcaaagaccaaaagtagakaaaaccacaaagatggggaaaaaacagagcagaaaaactggaaactctaaaaagcagagcgcctctcctcctccaaaggaacgtagttcctcaccagcaa

SEQ ID NO: 278199 - DNA, 201 bp, Homo sapiens
atttcttctttggaaaataagtcctaccattttctttaccattcagcaaatataggacttaccaagtgtctttttttctaggcacagtgttaggtattggrgatataatggtaatcaagagacttgggcagttttcaaaaaaatgccttcacaaatgttacaatgaactttactgatgagcaaatggagaatttgagcaac

SEQ ID NO: 278200 - DNA, 201 bp, Homo sapiens
taacacagcctatctccttggggttcaagaggagtaaatgcaattgtgcctacctagtaagtactcaggccttagtgcctagccaagtactcagttattcrttgttatcaatcattagttcttttgctactgttgctacaaacctggcaagtgtaaagattctaaagtttctaagtggcatctgagagatctcaatcgtag

SEQ ID NO: 278201 - DNA, 201 bp, Homo sapiens
gcttccatccatggctgccagtgccccagagggactctctcaagggcgttgctttggtctaggcctacggccagcagagtcctaaagaccccttgttgtgktcactcttgggtagctttttggattctgacaccccaccctcccttctgggaaatccaaacctctctagaatccaaggagggcagatcagaagggatcagt

SEQ ID NO: 278202 - DNA, 201 bp, Homo sapiens
agccttctcaggcatcaatctttgtgccttccccaggaaaagtgaaatctttacagtttttgggtcttgcttaacttttagatactcaaggaatttgccaygcagtcagcactttgatgggaagggtaaacttagaagagcccaaggtgaacatgcactctcaccatgcccccttcgtctggactgcttgggtttctgtgt

SEQ ID NO: 278203 - DNA, 201 bp, Homo sapiens
gggatgccctctctcaccactcctattcaacatagtgttggaagttctggccagggcaattaggcaggagaaggaaataaagggtattcaattaggaaaakaggaagtcaaattgtccctgtttgcagatgacatgattgtatatctagaaaaccccattgtctcagcccaaaatctccttaagctgataagcaacttcag

SEQ ID NO: 278204 - DNA, 201 bp, Homo sapiens
caagccttctcaggcatcaatctttgtgccttccccaggaaaagtgaaatctttacagtttttgggtcttgcttaacttttagatactcaaggaatttgcyacgcagtcagcactttgatgggaagggtaaacttagaagagcccaaggtgaacatgcactctcaccatgcccccttcgtctggactgcttgggtttctgt

SEQ ID NO: 278205 - DNA, 201 bp, Homo sapiens
gtggttctcccagcacgcagctggagatctgagaatgggcagactgcctcctcaagtgggtccgtgacccctgacccctgagcagcctaactgggaggcaycccctcagtaggcgcagactgacacctcacatggccgggtacttctctgagacaaaacttccagaggaacaatcagacagcagcattcgcagttcacaaa

SEQ ID NO: 278206 - DNA, 201 bp, Homo sapiens
agctcgaatcacaggttcccccaagtttctgaagttcaacagctccagaaacaaggcttctcaggcatcagcggctccagaaacaagccttctcaggcatyaatctttgtgccttccccaggaaaagtgaaatctttacagtttttgggtcttgcttaacttttagatactcaaggaatttgccacgcagtcagcactttg

SEQ ID NO: 278207 - DNA, 201 bp, Homo sapiens
cgctgattgctagcacagcagtctgagatcaaactgcaaggcagcagcgaggctgggggaggggcgcctgccattgcccatgcttgcttaggtaaataaarcagctgggaagctcgaactgggtggagcccaccacagctcaaggaggcctgcctgcctctgtaggctccacctctgggggcaggccacagatgaacaaaa

SEQ ID NO: 278208 - DNA, 201 bp, Homo sapiens
attcatgtttttgaaatatatttagtcacactgagtttccattcaatgaactgagttgtttcaggaaactggaggtaaggcatagacacacacacacacayaaacacacacacacggtctccttctataccaagactgttcaagatctttccatgatgagggaaacgttctatatctgcactgtccaatatagaaaccagg

SEQ ID NO: 278209 - DNA, 201 bp, Homo sapiens
ccatctgaggtaccgggttcatctcactagggagtgccagacagtgggcacaggacagtgggtgcagtgcaccatgcacgagccaaagcagggcgaggcaytgcctcattcgggaagcacaaggggtcagggagttccccttcctagtcaaagaaaggggtgacagatggcacctggaaaatcgggtcactcccaccctaa

SEQ ID NO: 278210 - DNA, 201 bp, Homo sapiens
cggggcgaacggaagccgggaaggcgattcatagctcgcggggtacgggcgcgcgtgcgcactccgcagcccgttcaggaccccggcgcgggcagggcgcscacgagctggctggctgcttgcacccacatccttctttctctgggacctggggtcgcggttacttgggctggccggcgaacccttgagtggcctggcggg

SEQ ID NO: 278211 - DNA, 201 bp, Homo sapiens
cagggcacacagcatggcagaaaaccgagagccccgcggtgctgtggaggctgaactggatccagtggaatacacccttaggaaaaggcttcccagccgcytgccccggagacccaatgacatttatgtcaacatgaagacggactttaaggcccagctggcccgctgccagaagctgctggacggaggggcccggggtca

SEQ ID NO: 278212 - DNA, 201 bp, Homo sapiens
gcggttacttgggctggccggcgaacccttgagtggcctggcggggagcgggcctcgcgcgcctggagggccctgtggaacgaagagagtaagcacgggakgggcggcggaggggcgcgagtttgagggcgacgcgatgaatgaatcggaacggggggtggggagacgcgggatctggaggtgagtgggagaggacgaggg

SEQ ID NO: 278213 - DNA, 201 bp, Homo sapiens; identical to SEQ ID NO: 56150

SEQ ID NO: 278214 - DNA, 201 bp, Homo sapiens
gaggcacatcatgtgtggaggaatgaatcgctcccaacaattatgtgaacatttcgaaaatttctttttttttttttttgagatggagtctggctctgtcycccaggctggagtgcagtggcgcgatcttggctctctgcaagctccgcctcgtgggttcacgccattctcctgcctcagcctcccgagtagctgggacta

SEQ ID NO: 278215 - DNA, 201 bp, Homo sapiens
cgggtaattaaaaaaatttttcttaagacagggtcttgctatgttgcccaggctgatctcaaacacccgggctccagtgatcctcccgcctcgaccttccraagtgctgaggttacaggcgtgagccactgcccggccaggtgcaccctttgtacaggaaaaggggtaggaaaggcttcgaggtccctctgagccctctga

SEQ ID NO: 278216 - DNA, 201 bp, Homo sapiens
cctcggaccagagccatgtaagaaaaggcctgttccctggaagcccaaaggactctgcattgagggtgggggtaattgtctcttggtgggcccagttagtkggccttcctgagtgtgtgtatgcggtctgtaactattgccatataaataaaaaatcctgttgcactagtgtcctgccatcccactgccactgattctttc

SEQ ID NO: 278217 - DNA, 201 bp, Homo sapiens; identical to SEQ ID NO: 56151

SEQ ID NO: 278218 - DNA, 201 bp, Homo sapiens; identical to SEQ ID NO: 56152

SEQ ID NO: 278219 - DNA, 201 bp, Homo sapiens
aagcttttttttcaaaaacagggtggccattttggaaaagaattatgtgataagttgaaaatgctaggctaagcatttcaactagctcacacctgtaatcstagcactttgggaggccaaggcaggtggattgcctgagcccaggagttcgggaccagcctgggcaacatggtgaaaccccgtctctactaaaatacaaaa

SEQ ID NO: 278220 - DNA, 201 bp, Homo sapiens
cctaacccccagatctgtccacttctccagattccacagaatccaatttctgttcctttgggaagttaagccactcagtatgtaatgccagtggtactacmccatgtcttacccagggttggcactacgaggtccattctgtgcagtgcacactgtaaatgcaataggaatttagtgaaggggtagggtgggtgacctggg

SEQ ID NO: 278221 - DNA, 201 bp, Homo sapiens; identical to SEQ ID NO: 56154

SEQ ID NO: 278222 - DNA, 201 bp, Homo sapiens; identical to SEQ ID NO: 56153

SEQ ID NO: 278223 - DNA, 201 bp, Homo sapiens
aatagcatgggcgagaaggcggtccctttgctaaggaggaggcgggtgagctagaactttaagactgaggttaagaatgaacgcggagcccctggccggcsgggaacgcagttcgccgctgcagtggcgagtgcgagctggacgtgttagggggctagccggcgtccagggcttgaggggattcgggcgactgcttgaggc

SEQ ID NO: 278224 - DNA, 201 bp, Homo sapiens
gggctctattttctactccttccacctcttcctgagtaacaaggacactcccttcatccacaccccatgcctcctgccttgcttcctgtaccttcaagtasttggaagaggtcatgggtgagaattccttctccttggcctagtctggcccaggtctggagagaaggcaatggagatgtgaagtggaggccaggtgtggtg

SEQ ID NO: 278225 - DNA, 201 bp, Homo sapiens
cacataggaacctgaaatcaagggctcatttcccaactctggacccaagcatttcacttcccaccccaggatccagctgccccagccccatcccattttgmaactctagatcccagacgccctcatcttttcccccagtttgcctcggacccaaggtgtgacacagtttaccgtaaatacctctacgtcttggccactcgg

SEQ ID NO: 278226 - DNA, 201 bp, Homo sapiens
ggccagatcaccgaggggccaccaaagactccccgcttcttccctcctccctcccaggtggagcatatcatctcattcctcccagtcagagaccttgttgycctcggccagacctgccgctacttccacgaagtgtgcgatggggaaggcgtgtggagacgcatctgtcgcagactcagtccgcgcctccaagatcagggt

SEQ ID NO: 278227 - DNA, 201 bp, Homo sapiens
tttcctcctccccagttcattctgccccgagccttccagtcaaccttttcccaccccagcccccccgtcccttggtgctccctgctcagggaccctggccrtgtgtccccaggtttgttacctgcagcggcccatcaccctgtggtgcggcctcaaccactccctggtgctgagccagagctcagagttcagcaaggagct

SEQ ID NO: 278228 - DNA, 201 bp, Homo sapiens
ccgcccgccagtgcgccctgcggccccagacttccccgagccgcgctcctcccggccgctctctgttaacctgcccccatcttacctccccttcttctcgycccctcatcctgagccccagacatccgagctgcctgccggggctcccagcctagagttctcctgaagctgaccgagggtctccaccgccccccacccccg

SEQ ID NO: 278229 - DNA, 201 bp, Homo sapiens
cagcgggcgggccacctcgggcactggtgagaactccctcacctccgccttccccccctccaggccccgccccggccgcagccccgcccccagccctaacytccgccccgcccaccccgcgccccagtgcctagggccccctacctccctgacccattttcctcactaaccgccccttcagtccctcctccccgtcttctc

SEQ ID NO: 278230 - DNA, 201 bp, Homo sapiens
cctgcctctgcctcccaaagtactgggatcacaggcgtgagccaccgcacccggcccacagtggactttttctttcttttgagacagagtcgctctgttgyccaggctggagtgcagtggcttgatcgcagctcactgcagcctcaacctcccacctcagcctcccgagtaactgggactacaagcacgcaccaccatgcc

SEQ ID NO: 278231 - DNA, 201 bp, Homo sapiens
  misc_feature (1)...(201): n = A,T,C or G
cgcctcccaggctggcccaaggggagtgcctccttcgtcaagctccaagtcaaggtcagagcggggtcaggagagtgggcacccagggaggatgagagccntgaaccaggaagcccacaggctgtagctggggctcctgcagggacccagggggtcccatttccctagcaccaccccacctccctcctctgccgcacacca

SEQ ID NO: 278232 - DNA, 201 bp, Homo sapiens
tgaggcttgactcacctgtcacagttaagtcccccaccccctaccatccacagacaccagggtggagggtgcatggttggacagatcctgcgggtggaggygtggaaggacagtctctagctggccagcactcccagctaggagataagatttccttccctccagcaacggcctcaagtccctcccccgggggaaagcaga

SEQ ID NO: 278233 - DNA, 201 bp, Homo sapiens
caaggagctgattttctgggggcatagatgagataccaacagaagtgcaagaccctatgtgaccagttagagtatgggggctgcaggggtcagcagggcakacctggggcgtgggacagtgctggctcccatttcctcctccccagttcattctgccccgagccttccagtcaaccttttcccaccccagcccccccgtcc

SEQ ID NO: 278234 - DNA, 201 bp, Homo sapiens
ggtaggttgcccagaaataagtcactgaagttgctttctccttagttcacatctcagaggttgatattcctgagtagttgctgaagaattaaaattccatytcaggcatcccagcctagccatggctaggcaccatacataagggaatttgggtggtcagtctggtgcagtcaatgaacggatctgtgacactgtgtggtg

SEQ ID NO: 278235 - DNA, 201 bp, Homo sapiens
gggcagggctaaggtgtggagctcgcggagcctggcctccaggttcaatcagagggccatcgccactgcagctccctccatctctccaccccctccccccyaccgcctcgtggctgtgtccacatctggaagtagttaggcggctcctgtccctggactgccaggcagagtgaggcgggagtctggaaggggggccgagga

SEQ ID NO: 278236 - DNA, 201 bp, Homo sapiens
cagcctgggtgatgtctgacaggtcgtagctacgggccgcgccccgggggaagtgcttcaagcgccggttagacaggttcagggtcccggtggccacggcstcctctagggcccgctctgcactgcgtctccccggcagacctggagacccgggcacggaggtcgtggctgccgcctcctcacccccggcggcgagtggag

SEQ ID NO: 278237 - DNA, 201 bp, Homo sapiens
ggcagcaggcgagagcacacaagcaagagcagggaaaactgccttataaatccgtcagacctcgtgagaacccactatcacgaaaacaacatgggggaaaytgcccccgtgagccaatcacctcccactgggtattacaattcgagatgagatttgggtgggggcacagagcctaaccatatcaccacctctcttttgagg

SEQ ID NO: 278238 - DNA, 201 bp, Homo sapiens
ggggccgcctcccaggctggcccaaggggagtgcctccttcgtcaagctccaagtcaaggtcagagcggggtcaggagagtgggcacccagggaggatgaragccatgaaccaggaagcccacaggctgtagctggggctcctgcagggacccagggggtcccatttccctagcaccaccccacctccctcctctgccgca

SEQ ID NO: 278239 - DNA, 201 bp, Homo sapiens
atcaacacccttcacccttactccagctgcatggtgaacccctgagggcatcctagtgaaaagatgtgtttagggccggcatggtgactcatgcctgtaaycccatcactttgggaaaccgaggcaggtgaatcacctgaggtcaggagttcaagaccagcctggccaacatggcgaaaccccatctctactaaaatacaa

SEQ ID NO: 278240 - DNA, 201 bp, Homo sapiens
gaagcttttttttcaaaaacagggtggccattttggaaaagaattatgtgataagttgaaaatgctaggctaagcatttcaactagctcacacctgtaatsctagcactttgggaggccaaggcaggtggattgcctgagcccaggagttcgggaccagcctgggcaacatggtgaaaccccgtctctactaaaatacaaa

SEQ ID NO: 278241 - DNA, 201 bp, Homo sapiens
atgtgagcaggggccaggtgcagagcctcacgcctgtaatcccgacactttgggaggccgaggtggacagatcacttgaggtcaggagttctagaccagcmtgggcaacatggtgaaaccccgtctctaccaaaaatataaaaaattagctggctgtggtggcacatgcctgcaatcccagctactcaggaggttgaggca

SEQ ID NO: 278242 - DNA, 201 bp, Homo sapiens
ctgtgagattccccaaggctgggttcaggcatctcaggcaattgtggtagaggctcaggccctccagggacaccagctggcacgccgcctcgggcacctcrggaaaccggttccgggacaggtctggggaaaaggaggtgtcggggagagttgcggaaaggcccagcccggacaggaccttcagtccccccagagccggct

SEQ ID NO: 278243 - DNA, 201 bp, Homo sapiens
gggccggatcgtgctgtgtcatgcaggccccggcccgcccgattggctcccttagaacggacgtctgggcctggccaggtcttccggcccactccgccggsgcggcgccccggggctttggggcgccagtctgccgtccggcctaccacccgccgaaagcctttggtccccggagagagcaggccccgcgagcccgaggcc

SEQ ID NO: 278244 - DNA, 201 bp, Homo sapiens
aatattcttagtgctggctgctcaactgcacagtaagtcacttgattttctttctgaggtctgagagacctagtgttattttttttttctctctctctctygagacagggtctggctctgttgcccaggttggagggcagtggtacagtcatggctcactgtaaccttgaaacctgggcttaagcaattctcctacttcag

SEQ ID NO: 278245 - DNA, 201 bp, Homo sapiens; identical to SEQ ID NO: 56162

SEQ ID NO: 278246 - DNA, 201 bp, Homo sapiens
tcgttgtccccaggcttgcttggtagaacttaaggcctccctgagcctcaagggaggttgtctggcttacttaattccctggaaagttagcttatgctttrctctatactgttaatcatggtgaccattaataccatgtgccaggtattatgttaagcattttacattcattatctcccttaagacaataagcctctgaga

SEQ ID NO: 278247 - DNA, 201 bp, Homo sapiens
tgggtctgactatagagttcctgctcttaaccactcttctgtaagtctaagactatttttatttctctaacaactattcagcctccatttctattatgtcwtcttcttaggccattattttctgaccctggggcaggatcactcacttggggccttatagctgggacactgacgctcaaaataccaggagctgctggaatg

SEQ ID NO: 278248 - DNA, 201 bp, Homo sapiens
cgtcccaatcggttaattgttgatgaagccatcaatgaggacaacagtgtggtgtccttgtcccaggtaagctgtggccacagactagtctttccttactrcacttacttgagggattttcccaggtttcttttctcatttttcttgcagtgactgcagatagagtggggtttactgggaatcccaatctccagggctgct

SEQ ID NO: 278249 - DNA, 201 bp, Homo sapiens
aagctggcagatgatgtggacctggaacaggtgaagtgatgatgatggctgaccaggcgttacagtgtctctaggcagttgctgggaactggctagagacrtaaggttaagatgtgaggagatgggttttgatttctggacaggggaaaggaagtaatctgagattgaatccaggaaatgggagttggcatttttcatagt

SEQ ID NO: 278250 - DNA, 201 bp, Homo sapiens
ttgtaggcttggagcttctggttgtccttctttccccagagtggagcctctaaggatctgctgttacttctgaaaacttggagtcccccagctgaggaatkagatgctccattgaccctgcaggatgcccagggattgaaggatgtcctcctgacagcatttgcctaccgccaaggtcagctagcaacctgactcatctct

SEQ ID NO: 278251 - DNA, 201 bp, Homo sapiens
atggcctaaagcagagggcacatgtgattgttatggcagcaaccaacagacccaacagcattgacccagctctacggcgatttggtaaggactccagatayttttgaccccgtccttgcttaggtcctacttctctccttcatctaagtcacctaatcctcttgaagcccttcacagtgattgggtccaggggtctttttc

SEQ ID NO: 278252 - DNA, 201 bp, Homo sapiens; identical to SEQ ID NO: 56169

SEQ ID NO: 278253 - DNA, 201 bp, Homo sapiens
gctttatgacaagtgtgtgtaagttctataactactaccacagttgagacttaaaatttctactatctcaaaaagtttccttagccacttcagtcaacatytcccctccttaagccccatcactgatgtgatttctgtccctacagttttcccttttccagagtgcattgacaagtttttaagcagagcagtgactcaatt

SEQ ID NO: 278254 - DNA, 201 bp, Homo sapiens
gagctggtccaggtagggcaacttggtccagggtgagtcactgtctcagtacattgtaattgatctgggtgatctcagggtgtcaacacatttgctgcaakagttgtgagagcacgacttaggaacctactgttcttaggtttgaggcactaaggagtcttcttctagagaacctggatctgataccattgggtacaccat

SEQ ID NO: 278255 - DNA, 201 bp, Homo sapiens
cttggtccagggtgagtcactgtctcagtacattgtaattgatctgggtgatctcagggtgtcaacacatttgctgcaagagttgtgagagcacgacttargaacctactgttcttaggtttgaggcactaaggagtcttcttctagagaacctggatctgataccattgggtacaccatgaaataatggaggggatgctt

SEQ ID NO: 278256 - DNA, 201 bp, Homo sapiens
ccgaggtcatgaactctctagcagttactatggatgacttccgggtaaggaccacacccgtgcctcaggtacacacatacgtgctttgacccctcccttgrtaagtctcatccccagttttccctccttttctagtgggccttgagccagagtaacccatcagcactgcgggaaaccgtggtagaggtgccacaggtaacc

SEQ ID NO: 278257 - DNA, 201 bp, Homo sapiens; identical to SEQ ID NO: 56163

SEQ ID NO: 278258 - DNA, 201 bp, Homo sapiens
cactgcaacttctgcctcccaggttcaagcgattctcctgcctcagcctcccgagtagctgggactacaggcacatgccaccatgtccggctagttttttstattttttttttagtagaaacgtggtttcaccacgttagccaggatggtctcgatctcctgaccttgtgatgtgcccacctcggcctcccaaagtgctgg

SEQ ID NO: 278259 - DNA, 201 bp, Homo sapiens
gcaaattggctggtgagtctgagagcaaccttcgtaaagcctttgaggaggctgagaagaatgctcctgccatcatcttcattgatgagctagatgccatygctcccaaaagagagaaagtaggagcttacctgaggggatagaggggggttgaaaggccctgacttcacttctgaccagacatcctgttctggcagactc

SEQ ID NO: 278260 - DNA, 201 bp, Homo sapiens
ttgccagcctgtctagagcaatgtcacccagtagaagtaaggaagttaaggaaattttcagagtgttaaagggttctgagtctaaaacatttgagaactaytggtctagagtgtagcttctcaatcttttcctagtgggaaagtgtttccatggaacacactgaagatgaagttactcattttcctagtgggtggcacaca

SEQ ID NO: 278261 - DNA, 201 bp, Homo sapiens
agggacagcttcatctattcactgtttctttcctaagtatgagttttagagactggcgaggcgcttggggcaggagtatctactgactccatttcctcctyctagttcaaaaggtgatgacctatcaacagccattctcaaacagaagaaccgtcccaatcggttaattgttgatgaagccatcaatgaggacaacagtgt

SEQ ID NO: 278262 - DNA, 201 bp, Homo sapiens
aaggccgagaagagatggtcaggctccattctcagtctgaaccaagctccatgagggaaatcaaagtatgagagtgcagcaaacacagcaaggttttttttgttttttgttttttgttttttttttgagacgaagtctcactctgttgcccagactggagtgcagtggcacgatcttggctcactgcaacttctgcctccc

SEQ ID NO: 278263 - DNA, 201 bp, Homo sapiens
gccgccctaattagtcgtggactggaatgggtagccagcggccaggataccaaagccttacaggacttcctcctcagtgtgcagatgtgcccaggtatgtrtacttgcatgacgtcggctatgcatagatgtgcaaggacagagaggcccatgggaaatacttgggcgtaagtgtaagagtggtgttctcagacaggaggg

SEQ ID NO: 278264 - DNA, 201 bp, Homo sapiens
tgttgtacttggttgcagccctgaaagagggatcagcctggggtcctccacttctggaggcctctaggctctatcagcaactgggggacacaacagcagagctggagagtctggagctgctagttgaggtagggaactgccaggtgaagatgtggggtggaggattcctgaggtgcttgtgatggggtgacttgactagtc

SEQ ID NO: 278265 - DNA, 201 bp, Homo sapiens
gggaggccgaggtgggcagatcacctgaggtcaggagttcgagaccagcctgaccaccatggtgaaaccccatctctagtaaaaatgcaaaattagccagktgtggtggcgcatgcctgtaatcccagctactcgggaggctgaggcaggagaatcacttgaacccgggaggtggaggttgcagttagctgagatcgcagc

SEQ ID NO: 278266 - DNA, 201 bp, Homo sapiens
ggcataccactcatctccagagccagagtccgggatggtaggcagaatggaggttttcctaggatacagctttgagattaaaatacaaactattgaccggrcacagtggctcaggcctgtaatcccagcattttgggaggccgaggcaggcagatcacttgaggtcaggagtttgagaccagcccgggcaacatggagaaa

SEQ ID NO: 278267 - DNA, 201 bp, Homo sapiens; identical to SEQ ID NO: 56165

SEQ ID NO: 278268 - DNA, 201 bp, Homo sapiens
ttaattgttgatgaagccatcaatgaggacaacagtgtggtgtccttgtcccaggtaagctgtggccacagactagtctttccttactgcacttacttgarggattttcccaggtttcttttctcatttttcttgcagtgactgcagatagagtggggtttactgggaatcccaatctccagggctgctgcttactccccg

SEQ ID NO: 278269 - DNA, 201 bp, Homo sapiens; identical to SEQ ID NO: 56167

SEQ ID NO: 278270 - DNA, 201 bp, Homo sapiens
agagcactgttgtacttggttgcagccctgaaagagggatcagcctggggtcctccacttctggaggcctctaggctctatcagcaactgggggacacaayagcagagctggagagtctggagctgctagttgaggtagggaactgccaggtgaagatgtggggtggaggattcctgaggtgcttgtgatggggtgacttg

SEQ ID NO: 278271 - DNA, 201 bp, Homo sapiens; identical to SEQ ID NO: 56166

SEQ ID NO: 278272 - DNA, 201 bp, Homo sapiens; identical to SEQ ID NO: 56168

SEQ ID NO: 278273 - DNA, 201 bp, Homo sapiens
gtctccaggagctgatcacagggaacccagacaaggcactaagcagccttcatgaagcggcctcaggcctgtgtccacggcctgtgttggtccaggtgtayacagcactggggtcctgtcaccgtaagatggtaaagacagtcctagggtggattggggaaaccacaagcattatgtatagctttttgctttgtaagggta

SEQ ID NO: 278274 - DNA, 201 bp, Homo sapiens
tgccaggccaacttcatctccatcaagggtcctgagctgctcaccatgtggtttggggagtctgaggccaatgtcagagaaatctttgacaaggtgagctrcaataggctgaactatgtattgatttgcctgagggcaaggaatagaggctgtttttctttaagagggttgaaatattcttagtgctggctgctcaactgc

SEQ ID NO: 278275 - DNA, 201 bp, Homo sapiens
ctgatattctagaatttttatggtttcaggttttagacttaagtctttgaaccatctggagttgatttttttttttttttgagacggagtctccctttgtygcccagcctcagagtactccatctcagctcagcgcaacttctgcctcccgggctcaagtgattctcctgcttcaagcctcccaagtagctgggattgcag

SEQ ID NO: 278276 - DNA, 201 bp, Homo sapiens
cctgcaggagaggaaagccagagtgtgtggggagatggaggatgaggtgctacttcagctgtgtgtgtgtctatgtgtgtgtgtatactctacagtgctgkagacacaggagcagcaggggcccaggttggaacaggggctcagggagctgtgggactctgtccttcgtgcttcctgccttctgccggagctgctgtctgc

SEQ ID NO: 278277 - DNA, 201 bp, Homo sapiens
  misc_feature (1)...(201): n = A,T,C or G
catcgggggcctagaggatgtcaaacgtgagctacaggagctggtccaggtagggcaacttggtccagggtgagtcactgtctcagtacattgtaattganctgggtgatctcagggtgtcaacacatttgctgcaagagttgtgagagcacgacttaggaacctactgttcttaggtttgaggcactaaggagtcttctt

SEQ ID NO: 278278 - DNA, 201 bp, Homo sapiens
gggtctggctctgttgcccaggttggagggcagtggtacagtcatggctcactgtaaccttgaaacctgggcttaagcaattctcctacttcagcctcctkagtagctgggactataggcatgcgtcaccacatctggctaattttttattttttgtagagacaaagtctcagtatgttgcccatgctggtttcggatttc

SEQ ID NO: 278279 - DNA, 201 bp, Homo sapiens
tggagtggggtgatctctgagttgggattttatttggaggatcttccatgggggagcagtctgtaagaccaacattgttgctccagggctccctgcagctkttcctgttcttcccttggagctgactgtcacctgcaacttcattatcctgagggcaagcttggcccagggtttcacagaggatcaggcccaggatatcca

SEQ ID NO: 278280 - DNA, 201 bp, Homo sapiens
cacagtaagtcacttgattttctttctgaggtctgagagacctagtgttattttttttttctctctctctctcgagacagggtctggctctgttgcccagrttggagggcagtggtacagtcatggctcactgtaaccttgaaacctgggcttaagcaattctcctacttcagcctcctgagtagctgggactataggcat

SEQ ID NO: 278281 - DNA, 201 bp, Homo sapiens
taaagtattactcagttgcttatttaaaagagtcacttattctgaaagtattcttttggtttatatgcagtcagcctcttattttcaaaagtaaaaatctraaattcttggaacctggcatcatcagctgtttctaacctcttggtcaccttgatgactcttagctgaaacccttccaagtcccgtggagtcccctgtgca

SEQ ID NO: 278282 - DNA, 201 bp, Homo sapiens
tgctcattggcaacttggcacccttatgtgtctaaaccatacttaagacaataacaaggtaatacttctgtataacatgatgcaactgtcttgtttacaaygaaaaacatactaatcctttccccagaatttgaaattttattttgtccaggttgtgattttaaggattttgatcttttgggacttcaacatttggggtta

SEQ ID NO: 278283 - DNA, 201 bp, Homo sapiens
ctttgggagtggtccccaggggcagctttcaactgtgagcagggatgtaagtcagatgcggcactgcagcagcttcgggcagccgccctaattagtcgtgractggaatgggtagccagcggccaggataccaaagccttacaggacttcctcctcagtgtgcagatgtgcccaggtatgtatacttgcatgacgtcggct

SEQ ID NO: 278284 - DNA, 201 bp, Homo sapiens
ggggaggttgtaggcttggagcttctggttgtccttctttccccagagtggagcctctaaggatctgctgttacttctgaaaacttggagtcccccagctkaggaattagatgctccattgaccctgcaggatgcccagggattgaaggatgtcctcctgacagcatttgcctaccgccaaggtcagctagcaacctgact

SEQ ID NO: 278285 - DNA, 201 bp, Homo sapiens
cctgctagggcctagggtgaggcttatgggcttttactcctcagggcaggagacgctgcagagcattacttggacctgctggccctgttgctggatagctyggagccaagggtgggtgtgtcttcaagcttctctgcaatggggtagacgggttggtgtcccctttgaaatacagcaagactgcaattttttgttttttcc

SEQ ID NO: 278286 - DNA, 201 bp, Homo sapiens
gacgaagtctcactctgttgcccagactggagtgcagtggcacgatcttggctcactgcaacttctgcctcccaggttcaagcgattctcctgcctcagcytcccgagtagctgggactacaggcacatgccaccatgtccggctagttttttgtattttttttttagtagaaacgtggtttcaccacgttagccaggatg

SEQ ID NO: 278287 - DNA, 201 bp, Homo sapiens
gaatggttagtgatttgagagggtttggggcaaatgaactttgatcactggctcttggagaatgctgtttagtggtgtgccatctggtgtgccatctctcytgctctagccagaggtcctagagcatttgctgtcacctttacagttcaactgtgagaagagtatagtgagtccctgggcttctctccagccttgcctggt

SEQ ID NO: 278288 - DNA, 201 bp, Homo sapiens
gtcccattcagttccatgggcttcttagacccttgttccccatcatgacccctgctctatagccctctccaagctcacaccctgactgtcctcaggtctcyaggagctgatcacagggaacccagacaaggcactaagcagccttcatgaagcggcctcaggcctgtgtccacggcctgtgttggtccaggtgtacacagc

SEQ ID NO: 278289 - DNA, 201 bp, Homo sapiens
tagaggaatcctgctttacggacctcctggaacaggaaagaccctgattgctcgagctgtagcaaatgagactggagccttcttcttcttgatcaatggtragatatttggttcatcttatgtctagctagacccaattttgaactgggcttatgagctggagcacttatgaacacatcctttttgcacccatgccctcct

SEQ ID NO: 278290 - DNA, 201 bp, Homo sapiens
cattgaggtagaattactactgccaccacctgacctagcctcaccccttcattgtggcactcagagccagaccaagcacatactagcaagcaggtgcctayagacggggaggtgaggttccccttgctcacctgagcttctcttcccacttctgatgcctcccctggggtgtgactctgcttttgttcttgtgacttgggg

SEQ ID NO: 278291 - DNA, 201 bp, Homo sapiens
aactcttagaatataaaagccattcttgtatcaatggaccctgtaaaaacaaatctcaccatagtttgccagcctgtctagagcaatgtcacccagtagamgtaaggaagttaaggaaattttcagagtgttaaagggttctgagtctaaaacatttgagaactattggtctagagtgtagcttctcaatcttttcctagt

SEQ ID NO: 278292 - DNA, 201 bp, Homo sapiens
ggttcaagcgattctcctgcctcagcctcccgagtagctgggactacaggcacatgccaccatgtccggctagttttttgtattttttttttagtagaaaygtggtttcaccacgttagccaggatggtctcgatctcctgaccttgtgatgtgcccacctcggcctcccaaagtgctgggattacaggcgtgaaccacag

SEQ ID NO: 278293 - DNA, 201 bp, Homo sapiens
acttcctctctctaggcctcagtttccctttttataaaacaatgcctaagactatgtcaagttctaagactctgtactctgggctggggctacaggtaatygagacacttactttcacctgcttcagactctgaagaggctagatcggagggatgaggccactgcactctggtggaggctggaggcccaaactaaggggtc

SEQ ID NO: 278294 - DNA, 201 bp, Homo sapiens
tgtctcaaaaaagaaaaagactgggtgttctttggagaactaaccatctttcagggatgagaaacctgccagctattcatttctgggcctaattgtttctyggatttacctaatgccaggaatttcaaaaaactagactgaacccaaaatatataagtgattgaaatcatttttgaagtaaagctgatggtggcttcaggc

SEQ ID NO: 278295 - DNA, 201 bp, Homo sapiens; identical to SEQ ID NO: 56170

SEQ ID NO: 278296 - DNA, 201 bp, Homo sapiens
gctctcaactgtcacattgagcatgcttggcctctagtgtgttgataagcattggaagagtctgcctactcagcagcattgtgcctggagtggcagacttktggaatgggggaagcaaatttgagcagaggaaactgtcgttagaaactagtttagaggcagtggttaaaaatgcagcctatgtgtgagggttagcagaag

SEQ ID NO: 278297 - DNA, 201 bp, Homo sapiens; identical to SEQ ID NO: 56171

SEQ ID NO: 278298 - DNA, 201 bp, Homo sapiens; identical to SEQ ID NO: 56182

SEQ ID NO: 278299 - DNA, 201 bp, Homo sapiens; identical to SEQ ID NO: 56183

SEQ ID NO: 278300 - DNA, 201 bp, Homo sapiens; identical to SEQ ID NO: 56184

SEQ ID NO: 278301 - DNA, 201 bp, Homo sapiens; identical to SEQ ID NO: 56185

SEQ ID NO: 278302 - DNA, 201 bp, Homo sapiens; identical to SEQ ID NO: 56186

SEQ ID NO: 278303 - DNA, 201 bp, Homo sapiens
agcctcccaaagtgccgggattacaggcgtgagccaccgcgcccggcctatggggttttctaaaatggccattaggtaccatggagatttgctccttcaasccataaaaggaaggacaataggaatagttagttttgtctagaaattttccaaatttcagttaattcaagcctgctatgtgaactcttttgtttatcaaat

SEQ ID NO: 278304 - DNA, 201 bp, Homo sapiens
ccagcgggccggcactgctgggggacccggtgtaccctccgcagctgctggcccaggtgctaagcccctcactgctcagggcaggtggcgccggcccaccrctccgagtgcggggtcgccgagctcacacccacccggaacttgcgctggccggagagcactgcgtgcagcctgggttcccgcccgcgcctctccctccac

SEQ ID NO: 278305 - DNA, 201 bp, Homo sapiens
aagttggagccacagaaattgctgcatcgtgagatgtttctcatctcaggaaacatcaccaccattgactgcattgctcacgctgcagaccttgagtcccrggctgtctggcatcttggggaaaagcatggcctctggagccagctgcatggttccagattttaaaatcctacttctgatgcggcatggtggctcacacgt

SEQ ID NO: 278306 - DNA, 201 bp, Homo sapiens
ctggccggagagcactgcgtgcagcctgggttcccgcccgcgcctctccctccacacctccctgcaagcagagggagccggctccgatcttggccagcccrgagaggggctcccatagtgcagcagcaggctgaagggctcctcaagcatggccagagtgggctctgaggccagcgagcaagggctgccagcatgctgtca

SEQ ID NO: 278307 - DNA, 201 bp, Homo sapiens
gatgtccttcctgcccttgagataggaccccgggatcttcgcactgttggtgacacaggcaggtgggacctgctcatcaggagagcagcctgtgctcctcwtgggagagccagcctgactgcctgctgccactcactctgccagcttgggagttgctcaggcttgtcctccagggaggtggcattctcttctttgcatcag

SEQ ID NO: 278308 - DNA, 201 bp, Homo sapiens
acagtcccagccactcaggaggctgaggtgggaggattgcttgaacctgggagttcgaggctgcagtgagccatgatcgtgccactgcactctagctggtrtaacagagtgagaccctgtctctaaaaacattaatgagttaatttaaatagttcattactcactactcaccagccagtgtgacccccttgggcaagtgct

SEQ ID NO: 278309 - DNA, 201 bp, Homo sapiens
attgggcagaaaccaaacactgacccgattcctcccccaggaggtggacgtgggtttggctgccgatgtaggaacactgcagcgcctgcccaaggtcatcrggaaccagaggtgggtgcagggggtgtgggggtgtgggcaggagaccccagagcatctcccagccccggggtggcagccgcctcctgatgcacgcttgcc

SEQ ID NO: 278310 - DNA, 201 bp, Homo sapiens
ccgagagagtgttctgccactctcctaagtggtcactccctccagaatctgcccagtgccttcagataattgtttgtttcttgtccagccagcgtatgtarttgtccgtgggagggttggccctttaggactgaaccagaagcaaaatatttcatacactgatttctgcacagggcccagagcctggtgctgggaacccag

SEQ ID NO: 278311 - DNA, 201 bp, Homo sapiens
gctcagtgctgggggcagccaggcctggagggttggaggcctctccgggtccccttgtctcctcgctctagaattcctagtggcatcctttcttggtgagstcatttctttattgtggggtcagccccctgctctgattgggctgtttctctggggtcttgggccttcctctgtgagtggccacttcttcatctgcgggag

SEQ ID NO: 278312 - DNA, 201 bp, Homo sapiens
catctgagcaggaagacatttctctttcctttatgccattttttgtttttgttatttgcaaaagatcttgtattcctttttttttttttttttttttttttaaatgctaggtttgtagaggcttacttaaccttaatggaaacgctggaaatctgcagggggagggagaggggaactgttatctcccaagattaaccttca

SEQ ID NO: 278313 - DNA, 201 bp, Homo sapiens
cccagccccggggtggcagccgcctcctgatgcacgcttgcctttgcagcctggtcaacgagctggccttcaccgcccgcaagatgatggctgacgaggcyctgggcagtgggctggtcaggtagggccatggccgtggtagctcagtgctgggggcagccaggcctggagggttggaggcctctccgggtccccttgtct

SEQ ID NO: 278314 - DNA, 201 bp, Homo sapiens
attcggtggccgagagcctcaactacgtggtaaggtgcacgctccgaccaatcacagccctcctctaaccccaggcgaccaaccagggtgcagggtgctckcatgctttatcctgattggcccctgctaatctctctcctcgttctctctcaacaccctcggtaccaggcgtcctggaacatgagcatgctgcagacccaa

SEQ ID NO: 278315 - DNA, 201 bp, Homo sapiens
acgttactccgtccgaacgcagtagacgaaggcggcggcgatggcggcggggatagtggcttctcgcagactccgcgacctactgacccggcgtgagtcamctcttgccttatgggggtgcgtcgcgctgtcgtgctgttatagcagatgtaggacggggagggctatccggggtcacgaagggcccgagtcccctaaatt

SEQ ID NO: 278316 - DNA, 201 bp, Homo sapiens
atggcggccttctgtgcccgccccctccgctaacgggcacgttactccgtccgaacgcagtagacgaaggcggcggcgatggcggcggggatagtggcttstcgcagactccgcgacctactgacccggcgtgagtcacctcttgccttatgggggtgcgtcgcgctgtcgtgctgttatagcagatgtaggacggggagg

SEQ ID NO: 278317 - DNA, 201 bp, Homo sapiens
gccgcaggcggagcactcctcagcccttgggcagttgatgggaccaggcgccgccgagcagggggtggcgctcctcggggaggctcgggctgtgcaggagyccacggcggcggggggaggctcgggcatggcaggctgcaggtcccaagccctgccccacagggaggcagctgaggcccggcaagaattcgagtgcagcac

SEQ ID NO: 278318 - DNA, 201 bp, Homo sapiens
tccaactacccgggactcagtattagccttcgcctcactggctcctctgcacaagaggcggcttccggagtagccctcggtgaagccccagaccacagctrtgagtcccttcgtgtgacgtctgcgcagaaacatgttctgcatgtccagctcaaccggcccaacaagaggaatgccatgaacaaggtcttctggaggtct

SEQ ID NO: 278319 - DNA, 201 bp, Homo sapiens
tgggttctgatccctggttgagtcaatgggtggggcctgggagcctggatgagctccatcatgccttctcaccaggtattgacctgatggacatggcttcrgacatcctgcagcccaaaggagatgatgtggcccggatcagctggtacctccgtgacatcatcactcgataccaggagaccttcaacgtcatcgagaggg

SEQ ID NO: 278320 - DNA, 201 bp, Homo sapiens
cttcaacaagatttcgagagacgctgactgtcgggcggtggtgatctctggtgcaggaaaaatgttcactgcaggtaccagacgctcttcacacaccctgscagccttcctagctcctggcaatagacagtggagcagtgcttctgaattagggttttaagcagcttctgacttacacactttttttttttttttttgaga

SEQ ID NO: 278321 - DNA, 201 bp, Homo sapiens
gctgccctgagggaatgggagggtgcatgagtgggaaggtgggctctattctaggttgaaggaacttgcctgagtcaagaagctgcctgggcaatggaatrggactttggaggaagtcactggggtgaaggtggggcgggactctccagtagacatgaaatttcatggacgttgacattgcgaggggcacagtattgggca

SEQ ID NO: 278322 - DNA, 201 bp, Homo sapiens; identical to SEQ ID NO: 56188

SEQ ID NO: 278323 - DNA, 201 bp, Homo sapiens
tttgagccagggtcttgctctgtcgcccaggctggagtgcagtggtgcgatcatagctgaccgcagcctccaactcctgggctcaaatgcacgtgcccgcrcacacacacacacacacacacacacacacagagttggagaccagtgtgcccaaagtaacaggttgggaacagtgcacacacacacacacacacacacaca

SEQ ID NO: 278324 - DNA, 201 bp, Homo sapiens
agccactacgcccagccccaaaatatacttttttattcatttgtttgcctccccatgaggacagggactgttgtctgtattgatcatttattgagcagctygtgtgcgccaggccctgtgctaggcccaggggatgcagcagtggacagaaagacaaaaactcctgtgttctcagagctcacattctagaaagggagtcag

SEQ ID NO: 278325 - DNA, 201 bp, Homo sapiens
ccttaccctgggtataagagccaccaccgcctgccatccgccaccatctcccactcctgcagctcttctcacaggaccagccactagcgcagcctcgagckatggcctatgtccccgcaccgggctaccagcccacctacaacccggtgagatgccagctcaggccccactccgcccgcagctccgtccataagccctcac

SEQ ID NO: 278326 - DNA, 201 bp, Homo sapiens
gaacaactgatgcaggaaaggtcagattcaggatcatcttgaagttggagccacagaaattgctgcatcgtgagatgtttctcatctcaggaaacatcacyaccattgactgcattgctcacgctgcagaccttgagtcccaggctgtctggcatcttggggaaaagcatggcctctggagccagctgcatggttccagat

SEQ ID NO: 278327 - DNA, 201 bp, Homo sapiens
gcgccggcccaccgctccgagtgcggggtcgccgagctcacacccacccggaacttgcgctggccggagagcactgcgtgcagcctgggttcccgcccgcrcctctccctccacacctccctgcaagcagagggagccggctccgatcttggccagcccagagaggggctcccatagtgcagcagcaggctgaagggctcc

SEQ ID NO: 278328 - DNA, 201 bp, Homo sapiens
gggtcatcaaaggctgttcctttctccccaggactgacaggctccaactacccgggactcagtattagccttcgcctcactggctcctctgcacaagaggmggcttccggagtagccctcggtgaagccccagaccacagctatgagtcccttcgtgtgacgtctgcgcagaaacatgttctgcatgtccagctcaaccgg

SEQ ID NO: 278329 - DNA, 201 bp, Homo sapiens
aaatggagactatcctggctaacacagtgaaaccccgtctctactaaaaatgtaaaaaattagccgggcatggtggcaggcgcctgtagtcccagctactrgggaggctgaggcaggagaatggcgtgaacccaggaggcggagcttgcagtgagccgagatcgcgccactacacgccagcctgggcgatagagtgagact

SEQ ID NO: 278330 - DNA, 201 bp, Homo sapiens
tctcgctttgtcacccaggctggagtatagtgatgcaattttggctcattgcaacatctgcctcctgggttgaagcaattctcctgcctcagcctcctgcrtagctgggattacagatgcccgccaccaggcctagctaattttttttttttttttttttttttttggagaaggagtctcactctgttgaccaggctggag

SEQ ID NO: 278331 - DNA, 201 bp, Homo sapiens
gggttggctggcttcaggccagggatgtccttcctgcccttgagataggaccccgggatcttcgcactgttggtgacacaggcaggtgggacctgctcatyaggagagcagcctgtgctcctcatgggagagccagcctgactgcctgctgccactcactctgccagcttgggagttgctcaggcttgtcctccagggagg

SEQ ID NO: 278332 - DNA, 201 bp, Homo sapiens
ctcttcaagcacaatttcagtctgccctcaggctgaaagttttcaaaaccattttcaaaaacaccgagagagtgttctgccactctcctaagtggtcactscctccagaatctgcccagtgccttcagataattgtttgtttcttgtccagccagcgtatgtagttgtccgtgggagggttggccctttaggactgaacca

SEQ ID NO: 278333 - DNA, 201 bp, Homo sapiens
cccccaggaggtggacgtgggtttggctgccgatgtaggaacactgcagcgcctgcccaaggtcatcgggaaccagaggtgggtgcagggggtgtgggggygtgggcaggagaccccagagcatctcccagccccggggtggcagccgcctcctgatgcacgcttgcctttgcagcctggtcaacgagctggccttcaccg

SEQ ID NO: 278334 - DNA, 201 bp, Homo sapiens
cctgggtcattcctgcagcctgccctgccctgcctggtctcaccctccctctgccaacagaagtctgggcagggttttatgggctctgataaggccctggmagggccgaagttcatgagcacttcctctttgcaggagggcgtaggggaggggacccaggtgatttgggtcctggctggtcaccagggaagctggcaaggg

SEQ ID NO: 278335 - DNA, 201 bp, Homo sapiens
gcggcatcggtgccctcgctcaacatggcggccttctgtgcccgccccctccgctaacgggcacgttactccgtccgaacgcagtagacgaaggcggcggmgatggcggcggggatagtggcttctcgcagactccgcgacctactgacccggcgtgagtcacctcttgccttatgggggtgcgtcgcgctgtcgtgctgt

SEQ ID NO: 278336 - DNA, 201 bp, Homo sapiens
agtaaagatggcggaaagaacggcgtcattgcctgtcaggttgcggcatcggtgccctcgctcaacatggcggccttctgtgcccgccccctccgctaacsggcacgttactccgtccgaacgcagtagacgaaggcggcggcgatggcggcggggatagtggcttctcgcagactccgcgacctactgacccggcgtgag

SEQ ID NO: 278337 - DNA, 201 bp, Homo sapiens
ccagctcaaccggcccaacaagaggaatgccatgaacaaggtcttctggaggtctgacctgcagatcctggaggcctgcctgcggggggaggcggggctgygggactgggtgaaagtggaacgttgtgggaagatggacatgagggcagggtattcccgccccatttgtaacccttcactcgttgcttcacagagagatgg

SEQ ID NO: 278338 - DNA, 201 bp, Homo sapiens
cctctctcctgcttaagggactggggggcttttctgggaggggtaaaggctgcaacaggcagatggcttgtgagtcccctcaccaggcctcttctccagaygctgccttactaccagcccatcccgggcgggctcaacgtgggaatgtctgtttacatccaaggagtggccagcgagcacatgaagcggtaagaccctccc

SEQ ID NO: 278339 - DNA, 201 bp, Homo sapiens
taggaacactgcagcgcctgcccaaggtcatcgggaaccagaggtgggtgcagggggtgtgggggtgtgggcaggagaccccagagcatctcccagccccrgggtggcagccgcctcctgatgcacgcttgcctttgcagcctggtcaacgagctggccttcaccgcccgcaagatgatggctgacgaggccctgggcagt

SEQ ID NO: 278340 - DNA, 201 bp, Homo sapiens
tgagctcatttctttattgtggggtcagccccctgctctgattgggctgtttctctggggtcttgggccttcctctgtgagtggccacttcttcatctgcrggaggctggaggagagagcccttcccagcccacccggtccctgatctctttcactgcagccgggtgttcccagacaaagaggtcatgctggatgctgcct

SEQ ID NO: 278341 - DNA, 201 bp, Homo sapiens
cgtgattgctgccgtccatgggggctgcattggcggaggtgagtctgcggctatcctcctgctcgggtgctccccaggtggggctgctgctccgatgccgsggccactggcatccagcctcagctctgtcatgggccagactgtgtcccaagaggcagccccacctcccgggagccagggttggttctggtggtcattcag

SEQ ID NO: 278342 - DNA, 201 bp, Homo sapiens
tgggttgaagcaattctcctgcctcagcctcctgcatagctgggattacagatgcccgccaccaggcctagctaattttttttttttttttttttttttttggagaaggagtctcactctgttgaccaggctggagtacagtggtgcagtctgggctcactgcaacctccacctcccagattcaagccattctcctgcctg

SEQ ID NO: 278343 - DNA, 201 bp, Homo sapiens
atcagctggtacctccgtgacatcatcactcgataccaggagaccttcaacgtcatcgagagggtgactctaggggtctggaggggatctttctccatacrcgcctcccctgggccagccctgaccccactcttcctgttccctctcagtgccccaagcccgtgattgctgccgtccatgggggctgcattggcggaggtg

SEQ ID NO: 278344 - DNA, 201 bp, Homo sapiens
  misc_feature (1)...(201): n = A,T,C or G
actcttcctgttccctctcagtgccccaagcccgtgattgctgccgtccatgggggctgcattggcggaggtgagtctgcggctatcctcctgctcgggtnctccccaggtggggctgctgctccgatgccgcggccactggcatccagcctcagctctgtcatgggccagactgtgtcccaagaggcagccccacctccc

SEQ ID NO: 278345 - DNA, 201 bp, Homo sapiens
cctgatctctttcactgcagccgggtgttcccagacaaagaggtcatgctggatgctgccttagcgctggcggccgagatttccagcaagagccccgtggyggtgcagagcaccaaggtcaacctgctgtattcccgcgaccattcggtggccgagagcctcaactacgtggtaaggtgcacgctccgaccaatcacagcc

SEQ ID NO: 278346 - DNA, 201 bp, Homo sapiens
tgcccaggatgctttcttccaggtgaaggtgagtcatcctcccgagctcctgcttagagctgggcagtggggtgaggttggggggcctggagtgagcctcragggcttcatggaagagtcggagttgaacccgacaaagtaagacttgcccatagaggaagtcaagaggtgaagttgtgagtgggtaaggtatgaggtggg

SEQ ID NO: 278347 - DNA, 201 bp, Homo sapiens
ttagctagacataaagagtctccaagtccccaccagattagctagatacagagtgctgattggtgcatttacaaaccttgagctagacacagggtgctgaytggtgcatttacaaaccttgagctagacacagagtgctgattggttgtttacaatcccttagctagacataaagtttctccaagtccccaccagatgagc

SEQ ID NO: 278348 - DNA, 201 bp, Homo sapiens
cgggctgtgcaggagcccacggcggcggggggaggctcgggcatggcaggctgcaggtcccaagccctgccccacagggaggcagctgaggcccggcaagwattcgagtgcagcaccagcgggccggcactgctgggggacccggtgtaccctccgcagctgctggcccaggtgctaagcccctcactgctcagggcaggt

SEQ ID NO: 278349 - DNA, 201 bp, Homo sapiens
ggtcctgggtgcggccgccctccacaaggacaatctggtgctcctgcagggtgtggccctccccagggatgaagcagacggcctcgcggccagtgctgagmcgcactcgacagcacttgcgattggctgagttgggcttcttcggcttgcgggtaaacgtgcacaggaccacacccttcagctgcggccggccttccgtgg

SEQ ID NO: 278350 - DNA, 201 bp, Homo sapiens
atggccactgagggctaggtagggatctctgcctcactgcgccgcaggtccaggtggccagtgggctccagagagaagggtaggggtgatggctgcttcawatccttttctcttatatccaccccagatctcgacatggcaggagctgaggcagctgcaggagcagatccggagcctggaggaagagaaggcagctgtgac

SEQ ID NO: 278351 - DNA, 201 bp, Homo sapiens
cttgcgctaggtcatgcaactgggaagtggcagagtgggaattttaacctgtgctttctggcctagaatccactttttttttttttttttttgagataggrtgttgttctgtcgcccaggatggcaggatggagtacagtggtacaattatagctcactggaaccttgaattcctgagctcaaataatcctcccactcagc

SEQ ID NO: 278352 - DNA, 201 bp, Homo sapiens
ggaggcacacaagtccaagagcgaataaccctccccctctagcctcgtccctgaagcccaagtcccccacttaccacaagttagggacgtgttgaggccayggagaaggccagaccaggacatcctgccacctgggccgtccctgtggtaggggataagagactcagaaaggaggaaaaagtgaccgatccgcaaatgctc

SEQ ID NO: 278353 - DNA, 201 bp, Homo sapiens
ccttcagctgcggccggccttccgtggggcccagcttccgaggcggccgcttggggggccccaggcggtgcatctggttcagggtagccatggagcaggtrgcccagagccggggaaccagagctgggcctggagagggccgaaaggggttattatcccagagaacagatcttagagtagtagcaactcaattttggtgtt

SEQ ID NO: 278354 - DNA, 201 bp, Homo sapiens
caccagtgcttccaactgcacagacttccagagccgccgcctccacatcatgttccagaccgaggctggggagctgcagtttgcccacacggtgaggcccrcacagcctcctgcccgcgtgccctcgcccgcagcctctgccgccctagacccacccaccttggctcctccccgggctcagcttggggtgggcgccagttc

SEQ ID NO: 278355 - DNA, 201 bp, Homo sapiens; identical to SEQ ID NO: 56197

SEQ ID NO: 278356 - DNA, 201 bp, Homo sapiens
gagggctacagcgcactccctcagctggacatagagcggttctgcgcatgcccagaagaggccgcacacgccctggagctccgcaagggggagctgcgctyggcggacctgcccgcgatcgtgagtgcgcctgcgccggccggggggcgcagacgtttgctttacggaagaattgggtttgcaagatgccctccggcaggg

SEQ ID NO: 278357 - DNA, 201 bp, Homo sapiens
tcactctgtcacccacgctggagtgcagtggcatgatcttggctcatggcagcctctcaggctccgtgagacttccaggctcaagcacaagcaatcctccmacctcagcctcccaagtagctgggattacaagcatgtgccaccatgcccagctaatttttgtagagacagggtttctccatgttgcccaggctggtctcg

SEQ ID NO: 278358 - DNA, 201 bp, Homo sapiens; identical to SEQ ID NO: 56201

SEQ ID NO: 278359 - DNA, 201 bp, Homo sapiens
gactcaacagccgatttggataccatcaagacacctgaaaccttatcatgagccagatgctgaggaagagattccgggaggaaactgaggacccccccccacccccggttgcagccatgtcgagactgacgctgaggaagaccccaactgtcacgagcaacacctgtcaaacacagccacccacctggagacagatcaaga

SEQ ID NO: 278360 - DNA, 201 bp, Homo sapiens
tcctcccaggctacttcatggaccacaccgtggccttcagggacctgccagtcaggtgacacctggtttccttagaccttgaccccacctgtgacaatcastcttccctccttgacccgactttccctgctctctgccaggatggtttgctccagcacctgctaccgggcagagacaaacacgggacaggaaccccggggg

SEQ ID NO: 278361 - DNA, 201 bp, Homo sapiens
cctttcaccattttttctcttccccaccctcgactttgtcaacctaatcacccaccctgtctcttttctaccaggcaaaccaggacagtggtgaagtgcarcaggtactgtgaagagttgatgtcctatccagggttgggggtgggcagggaggataccctgccagtcacgattctactattgtaacagaaaacaactcaa

SEQ ID NO: 278362 - DNA, 201 bp, Homo sapiens
ctgacagagcaggagactaagatcctctggccttgtttgacctttcaccattttttctcttccccaccctcgactttgtcaacctaatcacccaccctgtytcttttctaccaggcaaaccaggacagtggtgaagtgcagcaggtactgtgaagagttgatgtcctatccagggttgggggtgggcagggaggataccct

SEQ ID NO: 278363 - DNA, 201 bp, Homo sapiens
gctcactcatcctctcccctgaacagggcttcacccccatgacggtgccagaccttctccgcggagcagtgtttgtgagtgaggcctctccgcttccctcrcccacctgggtgtcaggccctgccgtgggtgcccgaggcagggaaacctgaggagaccgccctggggctgggttgagggggccaggccataccagggagg

SEQ ID NO: 278364 - DNA, 201 bp, Homo sapiens
agactggagtgcagtagcacgatctccatgccggctaatttttgcctttttagtggagagggggttttgccatgttggccaggctggtctcaaactcctgrcctcaagtgatccgcccacctcagcctcccaaagtgctgggattacatgggtgagccactgcgccagcccctgcctcagtttcgtctgaggaggaagggg

SEQ ID NO: 278365 - DNA, 201 bp, Homo sapiens
gaaacctgaggagaccgccctggggctgggttgagggggccaggccataccagggaggccagggcagctccagatgttttcaggggaggagctggggttgkgactgtaaaacgagaggccagggttacctgtcccctgatccctgtggcctggcctcctcccccaggaaggctgtgggatgacaccaaatgccaacccatc

SEQ ID NO: 278366 - DNA, 201 bp, Homo sapiens
ctttacagagagggcttgaggcccagagaggggaggtacctatagcccaaggtctcacagccagtctggagctgggcctagagcctgtgcttgtaatcatygcacctcactgcctgcttgcggtataaagggagcatttgggaatcatagcatccattgaaacatggcagggactggttgcatggagcattggtcacggtg

SEQ ID NO: 278367 - DNA, 201 bp, Homo sapiens
ttctcctctggcctctctcctctgtttctaactctgccttccccaccccgcgccctcttatttccctctctgcctcctctcatttcctctccctgtctctstttttatctccctcccttcctgtctgtcttttcttccctttccctccctttccgtgtcttcttctcccttctctcctcctgcccctcctttattttctct

SEQ ID NO: 278368 - DNA, 201 bp, Homo sapiens
actgtgtgtcatgtgtgtctgtatctgtgtatctgtgtgtctgtatctgtatgtgtgtgtctgtatctgtgtatctgtgtgtgtctgtatctgtgtgtgtctgtatctgtgtgtgtgtgtctgtgtttgtgtgtgtctgtgtctgtgtctatctgtgtgtgtgtctatgtgtgtgtctatctctgtgtgtgtatatctgtg

SEQ ID NO: 278369 - DNA, 201 bp, Homo sapiens
gagatattatttgggtggagacacagccaaaccatatcacagggtttacacgaatgcctacctcctaaagtggattttgaagaaatcatggcatgggagarccctgtacatagagcctggcatggaggcatcacttcctatacggatctgcggctgtgattactgttaattatcttgcctccttgtagcgttagcaataga

SEQ ID NO: 278370 - DNA, 201 bp, Homo sapiens
ttctcctgccttggcctcctgagtagctgggattacaggcgcacgcctccacccccaattaatttttgtatttttagtagagacagggtttcaccatcttrgccaggctggtctcgaactcctaactttgtgatccacctgcctcggcctcccaaagtgctgggattacaggtgtgagccaccacacccagcctcaagtag

SEQ ID NO: 278371 - DNA, 201 bp, Homo sapiens
ctgttcgattccctcagctgcttaggatcatggaaggttcagaatgtcaaggggccttggttgcaggccctcaaatgcacactgatagactttacctctcygagcttccattttcgaatctacagacagggtatattagtccattttcttcttttttttttttgagacagagtctcactgtgtcacccagaccagagtaca

SEQ ID NO: 278372 - DNA, 201 bp, Homo sapiens
ctgtctgtctgtctcccaggcgcctgtcccacgtgtctggccaccggtcctattacctgcgcggggctggagccctcctgcagcacggcctggtcaacttcacattcaacaagcttctccgccgggtatgggccaagataggagggctgcctggagggggtggcatcgaagctgagctcagagggcccaacggggatggga

SEQ ID NO: 278373 - DNA, 201 bp, Homo sapiens
  misc_feature (1)...(201): n = A,T,C or G
tggccactgagggctaggtagggatctctgcctcactgcgccgcaggtccaggtggccagtgggctccagagagaagggtaggggtgatggctgcttcaantccttttctcttatatccaccccagatctcgacatggcaggagctgaggcagctgcaggagcagatccggagcctggaggaagagaaggcagctgtgact

SEQ ID NO: 278374 - DNA, 201 bp, Homo sapiens
cggaggttgtggtgagtggagatcgcgccactgcactccagcatgggctacagtgcgagactccatctaaaaaaaaaaagagctgggtgtggtggcgggcrcctgtaatcccagctgcttgggaggctgaggcagaattcttgaacccgggaggcagaggttgcagtgagctgggatcacactactacactccagcctggg

SEQ ID NO: 278375 - DNA, 201 bp, Homo sapiens
cctccccctctagcctcgtccctgaagcccaagtcccccacttaccacaagttagggacgtgttgaggccatggagaaggccagaccaggacatcctgccrcctgggccgtccctgtggtaggggataagagactcagaaaggaggaaaaagtgaccgatccgcaaatgctccccgatccgctctcaggactttctggctt

SEQ ID NO: 278376 - DNA, 201 bp, Homo sapiens; identical to SEQ ID NO: 56199

SEQ ID NO: 278377 - DNA, 201 bp, Homo sapiens; identical to SEQ ID NO: 56200

SEQ ID NO: 278378 - DNA, 201 bp, Homo sapiens
gactgtgtgtcatgtgtgtctgtatctgtgtatctgtgtgtctgtatctgtatgtgtgtgtctgtatctgtgtatctgtgtgtgtctgtatctgtgtgtgtctgtatctgtgtgtgtgtgtctgtgtttgtgtgtgtctgtgtctgtgtctatctgtgtgtgtgtctatgtgtgtgtctatctctgtgtgtgtatatctgt

SEQ ID NO: 278379 - DNA, 201 bp, Homo sapiens
tccccacattccctgccagcctggcccatgtgcacccgcctgtctgtctgtctcccaggcgcctgtcccacgtgtctggccaccggtcctattacctgcgyggggctggagccctcctgcagcacggcctggtcaacttcacattcaacaagcttctccgccgggtatgggccaagataggagggctgcctggagggggtg

SEQ ID NO: 278380 - DNA, 201 bp, Homo sapiens
taggggtgatggctgcttcaaatccttttctcttatatccaccccagatctcgacatggcaggagctgaggcagctgcaggagcagatccggagcctggargaagagaaggcagctgtgactgaggcagtgcgggccctgctggtgagcatggtgccctgagtaggtggggagtggccacgagggtgtctctagacacagg

SEQ ID NO: 278381 - DNA, 201 bp, Homo sapiens
gtgactgtgtgtcatgtgtgtctgtatctgtgtatctgtgtgtctgtatctgtatgtgtgtgtctgtatctgtgtatctgtgtgtgtctgtatctgtgtgtgtctgtatctgtgtgtgtgtgtctgtgtttgtgtgtgtctgtgtctgtgtctatctgtgtgtgtgtctatgtgtgtgtctatctctgtgtgtgtatatct

SEQ ID NO: 278382 - DNA, 201 bp, Homo sapiens
acatagcgagctgttgcaggaccctggcatccctagggctgattaattagcggttcttccagcatccccagcccaggtcctttccttctctctgtaccggmaacttcactgcactgatctttcctcagtttcccatcagggtttccagatggctgctgtagtccagcatctcctcacatgactgtgccaggggaaggagac

SEQ ID NO: 278383 - DNA, 201 bp, Homo sapiens
acgccaccgcctgtgctgtcccccgccttctcatcgcgctcctggagagtaaccagcagaaggtgaggggctgaggggcccacccagagaggcagctcagygccggggagggctggggcatctgcagtgtcctgaggtctgctctgtccccaggacggctcagtgctcgtgccccctgccctccagtcctacctcggcact

SEQ ID NO: 278384 - DNA, 201 bp, Homo sapiens
tgtgactgtgtgtcatgtgtgtctgtatctgtgtatctgtgtgtctgtatctgtatgtgtgtgtctgtatctgtgtatctgtgtgtgtctgtatctgtgtgtgtctgtatctgtgtgtgtgtgtctgtgtttgtgtgtgtctgtgtctgtgtctatctgtgtgtgtgtctatgtgtgtgtctatctctgtgtgtgtatatc

SEQ ID NO: 278385 - DNA, 201 bp, Homo sapiens
ggctggtctggaactcctgggctcactcaagcagtcctcccacctaggcctcccaaagtgccacacccagccatgattttttaaagtgctagtttagagaytttttttgtttgagacagagtttcactcttgttgcccaggctggagtgtgcagtggcacgatctcagctcagtgcaacctccgcttcctggtttcaagcg

SEQ ID NO: 278386 - DNA, 201 bp, Homo sapiens
actccagcctgggcgacagagcgagactccctaaataaataaataagcaagcgtgaacaatgtggacatgcattacctcacatagcgagctgttgcaggaycctggcatccctagggctgattaattagcggttcttccagcatccccagcccaggtcctttccttctctctgtaccggcaacttcactgcactgatcttt

SEQ ID NO: 278387 - DNA, 201 bp, Homo sapiens
ttttggagtagatgaggtctccttatgttgcccaggctggtctcaaactcctgggctttttcctgctttttggctgccttctcttccatcgtttccatttkttcctcttgctcctcctctcacccgctgaccttccccacaccttcgtccttgaccgcagggtcctggatatgcccacccaagaactgggcctccccgcct

SEQ ID NO: 278388 - DNA, 201 bp, Homo sapiens
aggtggaggctacaatgagctgtgatcatgccactgcactctagcctggggcaacagagtgagaccctgtctctaaaaaaaaaaaataaaggccaggcacrgtggctcacacctacaatcccagcactttgggaggccgggacaggcggatcacctgaggtcaggagttcaagaccagcctggccaacatggtgaaacccc

SEQ ID NO: 278389 - DNA, 201 bp, Homo sapiens
tccgctctcaggactttctggcttaaatcaaaggaaatacctctataggtctaaccacaggccctcatgctgctaacagaaagtccctccgtaaatttagmctcgctctgagtgggttcccgagggcccaaccactctcgcccgcacgcaggaagaactgggaaactggggagatggcctggtagatttggaggaccccag

SEQ ID NO: 278390 - DNA, 201 bp, Homo sapiens
ggtctaaccacaggccctcatgctgctaacagaaagtccctccgtaaatttagcctcgctctgagtgggttcccgagggcccaaccactctcgcccgcacrcaggaagaactgggaaactggggagatggcctggtagatttggaggaccccaggattccaccgacctcacaggacctaaaggtgaggtcgcggacacgct

SEQ ID NO: 278391 - DNA, 201 bp, Homo sapiens
aatttttgtagagacagggtttctccatgttgcccaggctggtctcgaactcctgggctcaaatgatccacctgcctcagcctcccatattatgtacattktaacaattttttttgtttttgagacaaggtgtcaatctgtcacccagctaatttttttaaagtttttttgtagagaccgggtgctgtggctcacacctgc

SEQ ID NO: 278392 - DNA, 201 bp, Homo sapiens
gtggaaacgtcggaatcgttgtgcattgctgttgggaatgtgtataaagtggtacggctgccatggaaaaccgtatggcagttcctcaaaaaaataataawttttttttttttttggagacaaggtctcactctgtcacccacgctggagtgcagtggcatgatcttggctcatggcagcctctcaggctccgtgagactt

SEQ ID NO: 278393 - DNA, 201 bp, Homo sapiens
gctaattcacttgcgctaggtcatgcaactgggaagtggcagagtgggaattttaacctgtgctttctggcctagaatccactttttttttttttttttttgagatagggtgttgttctgtcgcccaggatggcaggatggagtacagtggtacaattatagctcactggaaccttgaattcctgagctcaaataatcctc

SEQ ID NO: 278394 - DNA, 201 bp, Homo sapiens
ggcaggggtggggtaggggagggacaaggggctggccagctgctcttcgctctggaaccacctctccagccccctcgttgcccccattttcctgtacaagrattacaggagcatatacaggatcccaatctgtctgccgtgtgccggtcgtccctcacaggactgtaacagaagcacgaacagtgcacggtgtgccagagt

SEQ ID NO: 278395 - DNA, 201 bp, Homo sapiens
cagagtttatgtgcccagaacccatggcctgcaggaagaagacctgggcctctgtgccacctacctgactcctaagcttaaaatacagtagccctctgccrggcgtggtggctcacgcctgtaatcccagcactttgggaggccaaggtgggcagatcacccgagctcaggagtttgagaccagcctggccaacatggtga

SEQ ID NO: 278396 - DNA, 201 bp, Homo sapiens
acctgtgtgtgtgtgccattcaccctcttaactgtgagggtcaggaaaatcatcatgttagtttacattaagcatggacttctgacacacagatttgcacrcagatatttgggggaaatcacgagtgggtttgatgagcgtgtccaatactgtctcttctccagtctttcctgtatatgaatcaggatgcacgggtgggaa

SEQ ID NO: 278397 - DNA, 201 bp, Homo sapiens
ggaagggtggctcctgggccttgaagatcctagagctttgcctgtcctgtgtgtgagatggctggtcttggggcgacctgtctgctgcttcataggatgcrttgtgtgttcgtctgtcactgcgtggccactgtggcagaggccaggcaaggcacatttcagtgatttgtgatccaggcagccatggctgtgtggatggct

SEQ ID NO: 278398 - DNA, 201 bp, Homo sapiens
tacactgagtcagcccaggttgtcggtgactgggcagggtgcctcccagtgcactgtctaaaatcccttcccagctccaggcctcgccctggaacactccsggtgggccaccagggactgacacacgccagggtcatgggtggagggcagcttagctgcttggctctggaagaggacttggaatgtttggctttgtaattt

SEQ ID NO: 278399 - DNA, 201 bp, Homo sapiens
acaataccaggtcaccccgagcaccttctgtgtgctgggcactatgctgttgccacaagaagacactattattcttattcccatttgcaaatgagcagttkgacacagtggctttctgaggtcctgcagcttctgggagggcaggactcacatttgggcaagtgtggccgggcggccatgctgcttcccatttccctgctt

SEQ ID NO: 278400 - DNA, 201 bp, Homo sapiens
cactgcagagctggtggatttcatcctggccttcatcatcctggtgtttccgctcctggccaccatactgtcatattggcacatcaccctggctgtcctgygcatcccctcggccaccggctgctggagagccttctctacctgcgcctctcacctcaccgtggtcaccgtcttctatacagccttgcttttcatgtatgt

SEQ ID NO: 278401 - DNA, 201 bp, Homo sapiens
acggacttctccactgcagagctggtggatttcatcctggccttcatcatcctggtgtttccgctcctggccaccatactgtcatattggcacatcacccyggctgtcctgcgcatcccctcggccaccggctgctggagagccttctctacctgcgcctctcacctcaccgtggtcaccgtcttctatacagccttgctt

SEQ ID NO: 278402 - DNA, 201 bp, Homo sapiens
gagcagactcaggagccaggggacacggctccaattctagctctgtgaacacactggccgtgtgccaccctcagcaagttacttaatctctctctcttaggaaaaaaaaaaaaaaaaaaaagaaatccttgcacatgctgtaaaattcaaaagatgagagatgttccttctttgttccccagccgcccagggcccctccct

SEQ ID NO: 278403 - DNA, 201 bp, Homo sapiens
catcctcaagctggcctgcacggacttctccactgcagagctggtggatttcatcctggccttcatcatcctggtgtttccgctcctggccaccatactgycatattggcacatcaccctggctgtcctgcgcatcccctcggccaccggctgctggagagccttctctacctgcgcctctcacctcaccgtggtcaccgt

SEQ ID NO: 278404 - DNA, 201 bp, Homo sapiens
  misc_feature (1)...(201): n = A,T,C or G
tttcttcaatattaatattaaataatattaaatatttaataattgggcctaaggtgggtatttcacatttttgtttattgaaaaagctgttttataaaacnaaacaagaaaaagctgtttttaatcttttatgtttggaaaatttgtgaaaatccatgctggttgtcaatttgaattggaattttatgtgggcagtgtaag

SEQ ID NO: 278405 - DNA, 201 bp, Homo sapiens
gtgaggttttaaatttgagcaggagactttagcggtatgtattcatttgtacatttaacttcagcttggaaaagtttacactgaatttcatcttgtttttycttacagtgaaaaatgtgaggttttacaatattctgcaagggaagctcaagattcaaaaaaggtaagaaaatggttgaaaagttgaaagttattcctaca

SEQ ID NO: 278406 - DNA, 201 bp, Homo sapiens
attggctccatccctggcggtgagattcgggcgggctgtgtgttttggctagtccccactgctccctgcggggagtgagtgatgtgcatcagactgcatcygactgtttctcttttcaggcttcaagcactttcctgaagcggggattcattatccagacagtaccacaggagatgggaagcccctcgccaccgactataa

SEQ ID NO: 278407 - DNA, 201 bp, Homo sapiens; identical to SEQ ID NO: 56222

SEQ ID NO: 278408 - DNA, 201 bp, Homo sapiens
ggggcaaaggcagagggccaaggcggtcagggagggtcctggtggtgcaggtgagagtgctggtgctatgggcgggggcgctgagagtaggcactgtctcttttcccgagagcccccacttaacaggggcattgttgcccctccttgcccagccaagttgcttcttgctttttaggttttcaaaattaagcagactattgc

SEQ ID NO: 278409 - DNA, 201 bp, Homo sapiens
gggggcaaaggcagagggccaaggcggtcagggagggtcctggtggtgcaggtgagagtgctggtgctatgggcgggggcgctgagagtaggcactgtctcttttcccgagagcccccacttaacaggggcattgttgcccctccttgcccagccaagttgcttcttgctttttaggttttcaaaattaagcagactattg

SEQ ID NO: 278410 - DNA, 201 bp, Homo sapiens
acagccgctcagctctgtgctgtgtgaaagcaccaccagccagtgtgtaaatgcatgggccaggttgtgccagtgaggcctcatttacagaagcagtcagyggcgagatttgatctgtgggctacagtttgccgacccatgcatgaggcagtaaaaggccaagagcctggtataaattcataacgagaaaccaaggctctg

SEQ ID NO: 278411 - DNA, 201 bp, Homo sapiens
gggttgtggtttgtgtacctgtggcatccttgcactcacaggagacacctgccacagatcatgtgctcaccagcattgctgaaggaactcatgaagtacasgcatctgccgggtagacattgaactatgagctggggaaacattcattcacgttaaacagaatgcaccaatgcctttttcccccacagctgccgggccgca

SEQ ID NO: 278412 - DNA, 201 bp, Homo sapiens
agtagtgagctctcatatctcacatccagtttccattttattaacttcttctgtgagtatggtacacttgttataattaatgaattaataatacttactgkgtttttgttttttgttttttttttttggaaaccgattgtcactctatcgcccaggctggagtgcaatggcatgatcttgactcactgtaacctccacctc

SEQ ID NO: 278413 - DNA, 201 bp, Homo sapiens
actaaagcccacactttgaattattcagattaccttagtttttccctaatgtcctttttctgttccaataccccgtctagaatatcacatgacattgggtmctcatgtctccttaggtacctcttggttgtaacattttctcagactttgtttttaataaggagtgctggtgaggtattttgtagactctccctcagttga

SEQ ID NO: 278414 - DNA, 201 bp, Homo sapiens
ccttaggtacctcttggttgtaacattttctcagactttgtttttaataaggagtgctggtgaggtattttgtagactctccctcagttgagggttgcccratgtttctctagcgattagattggactgtgtgttttggggaggaatccacagaggtgaagcatcaggggcacttgctgtcagtgcagcctggcaccatgg

SEQ ID NO: 278415 - DNA, 201 bp, Homo sapiens
cttaggtacctcttggttgtaacattttctcagactttgtttttaataaggagtgctggtgaggtattttgtagactctccctcagttgagggttgcccgrtgtttctctagcgattagattggactgtgtgttttggggaggaatccacagaggtgaagcatcaggggcacttgctgtcagtgcagcctggcaccatggc

SEQ ID NO: 278416 - DNA, 201 bp, Homo sapiens
cccgatgtttctctagcgattagattggactgtgtgttttggggaggaatccacagaggtgaagcatcaggggcacttgctgtcagtgcagcctggcaccrtggccctgaccgtgggctcctggctgaggtcgtgcttgctgggtctccactggaagctgctcttcctctttccagaaagccccatgcacaccacagcctt

SEQ ID NO: 278417 - DNA, 201 bp, Homo sapiens
ctgactgtttagaggattttgtttaaggaaattcggttgcttgatattaaaaaatgatcagttgaaattaaatagtaataaataataatgaccatttctgkaaattcatagaattccttttgtccatcagagacatcagcagcagttctcattgcatttccttctggaaacagcattgtggggatacctggaggtgaatga

SEQ ID NO: 278418 - DNA, 201 bp, Homo sapiens
caaccatgcagggctccgtgtcggcatggtgtggactcgggtgctctgatcatcccctgtgtttgcgtctgaccctgtgtggttgcattcccttgatggartgggaagtatgtaatttgtagtgctgaggacattcgtctgtttgattttctggtgttttcaatgacatgcatgttcagcagagaaagatgaataaacact

SEQ ID NO: 278419 - DNA, 201 bp, Homo sapiens
taatctaaaagtagcttactgaaatgattggctctctagaaagtcttttgaaaggaatctagcaaatcttccattagaaagtaaaacaaacaacaaaaccygctttccttgtcttttttttttttttttttttttttttgagtcagagttttgctcttgttgcccagactggagtgcagtggcgcaatctcagctcactgc

SEQ ID NO: 278420 - DNA, 201 bp, Homo sapiens
cattgaattgtttcctctgctacatctctttgaatctggatcagttcctcaggcttttcttggcattcaagaccttgacatttttgaagactacagaacasttaccttgctgaatatccctcaatgtggttttgagggatatttggcatatggttcccatttgtcccatcactgcttttgttacctttattgcttgttaag

SEQ ID NO: 278421 - DNA, 201 bp, Homo sapiens
caatatcaattgtgtttattttcatttgagtaccatttctcaattgagggactcaagtgataattatgaccaattttctaacataattattgtaaacatgycgcttaccagtgacattcattttatccataacctgaccaaattattggtttagaacatttctgcaccatctcagttacgtgttgccagtgtctaattatg

SEQ ID NO: 278422 - DNA, 201 bp, Homo sapiens
tgtgccctgggccatcttgccttccctcctgccgtctgttcaggcttgaatcctggtggaacctttgactcctctgtcaaccataatcctagcttgaaccytcctttttccctgctgacccccttatcctccccaaagtcacaccctgcaggtcagtgtgccactttcagtgacttctctcccttgtctctaacactgctg

SEQ ID NO: 278423 - DNA, 201 bp, Homo sapiens
gtggggcatctcacctctcgggctgcaggagctagagctgctgctctctgcatcctctgtgtggtcctgtgccctgggccatcttgccttccctcctgccrtctgttcaggcttgaatcctggtggaacctttgactcctctgtcaaccataatcctagcttgaaccctcctttttccctgctgacccccttatcctcccc

SEQ ID NO: 278424 - DNA, 201 bp, Homo sapiens
gttccacagcacttctgtggggcgggactccctcattttacaaggaggagaccatgactcgagagctcgagcctgccaaggttgtgtgactgtgtggggcrtctcacctctcgggctgcaggagctagagctgctgctctctgcatcctctgtgtggtcctgtgccctgggccatcttgccttccctcctgccgtctgttc

SEQ ID NO: 278425 - DNA, 201 bp, Homo sapiens
gatcatcaggcattagattctcataaggagtgtgcaaactagatcccttgtatgcacagttcacaatagggtttgtgctcctgtgagaatctcatgctgcsctggtctgacagcaggtggagctcaggcagtaatgcgagcaggggaatcggctataaatacagatgaagcttcactggcttgcttgctcacctcctgctg

SEQ ID NO: 278426 - DNA, 201 bp, Homo sapiens
cagtttccattttattaacttcttctgtgagtatggtacacttgttataattaatgaattaataatacttactgggtttttgttttttgttttttttttttggaaaccgattgtcactctatcgcccaggctggagtgcaatggcatgatcttgactcactgtaacctccacctcccgggtttaagcgattcttgtgcctc

SEQ ID NO: 278427 - DNA, 201 bp, Homo sapiens
tctgtggctccaacgtcttgaaccacttcttctgtgacatttcccccatcctcaagctggcctgcacggacttctccactgcagagctggtggatttcatyctggccttcatcatcctggtgtttccgctcctggccaccatactgtcatattggcacatcaccctggctgtcctgcgcatcccctcggccaccggctgct

SEQ ID NO: 278428 - DNA, 201 bp, Homo sapiens
ataaagagcttaatggaacaaaacaagagtccagaaacatgtatgcacctgtgtgtaagtatcttcagtttggcaaagttagttccttaaaggataattayaaaaatgaagtagaggaaaattgtttcctaaatggtactgaggcaactgagcatccatttgttaaaaaacaagttttttattttgtattttatatattaa

SEQ ID NO: 278429 - DNA, 201 bp, Homo sapiens
accatgtcattgtgcggtgatgaccattcatagtcttgagttggtcactgcaggtgtttttcatataaagtagagggagaaagaaacaacctgccacagarttcctggagtccccgcttctgtggtgagttcggagacccaagttcactttggtagcttccttggttcccacagcctcctcccctctgccagcagctcagc

SEQ ID NO: 278430 - DNA, 201 bp, Homo sapiens
caccgtggtcaccgtcttctatacagccttgcttttcatgtatgtccggccccaagccattgattcccagagctccaacaagctcatctctgccgtgtacrctgttgtcacgccaataattaaccctttgatttactgcctgaggaacaaggaatttaaggacgccttgaaaaaggccttgggcttgggtcaaacttcaca

SEQ ID NO: 278431 - DNA, 201 bp, Homo sapiens
gtcatccactctaccatttttattaaagagatggaaaattgaaagttggattagttaatgggaaagatttacatgtaaagataacagttttccttaaattmgtgtgttttgtgaaagtctagtaaatcttggtgtagttttcagggaactttatgaataacagccagacaaacattaaaacatctgaagaagaataacgaa

SEQ ID NO: 278432 - DNA, 201 bp, Homo sapiens
gggcttctcctttgtgagtggcttcaccatctccatgatcaaggtctgttttatctccagcgtcacgttctgtggctccaacgtcttgaaccacttcttcygtgacatttcccccatcctcaagctggcctgcacggacttctccactgcagagctggtggatttcatcctggccttcatcatcctggtgtttccgctcct

SEQ ID NO: 278433 - DNA, 201 bp, Homo sapiens
gccacccgctgcgctaccacgtccttgtgaccccggggctgtgcctccagctggtgggcttctcctttgtgagtggcttcaccatctccatgatcaaggtstgttttatctccagcgtcacgttctgtggctccaacgtcttgaaccacttcttctgtgacatttcccccatcctcaagctggcctgcacggacttctcca

SEQ ID NO: 278434 - DNA, 201 bp, Homo sapiens
actagtcattctacttagtttgttaattcctgcccccctgttaaaatagtatttgcaaaatcagttttctagttagtggaatggatactgaagggtgagcraggtaggcacactgtggggtcctcatgtcagactgaggagacgggaagggtcaggtcagcccttagctggctgtgtgacttgggacaagtcactttatct

SEQ ID NO: 278435 - DNA, 201 bp, Homo sapiens
actgaaatgtcttgtgtgaagccttctgtaactccttgcacacacccctgagagagtgcaggccttccccaggagtaggaggagatggagggtttttattwctaacaaaaggccccaccctggtgagagtggcttccttttatctggccacccgacagacagcttgtgctagcagcaatttccatcagatgctgagcggaa

SEQ ID NO: 278436 - DNA, 201 bp, Homo sapiens
ctaatagttactaatgcctacaggaaccagagtggtcacaatgtgctgctgtgtgattttgtgtttttcagagaggaattcatagcagtgtgcagtgcaarctgcgctatggaatgtggcatttcctacttggggataaagcaagcaaaagactgacagaacgcagcagagtgataactgtagatggcaatatatgtactg

SEQ ID NO: 278437 - DNA, 201 bp, Homo sapiens
ctgaaatgtcttgtgtgaagccttctgtaactccttgcacacacccctgagagagtgcaggccttccccaggagtaggaggagatggagggtttttatttmtaacaaaaggccccaccctggtgagagtggcttccttttatctggccacccgacagacagcttgtgctagcagcaatttccatcagatgctgagcggaaa

SEQ ID NO: 278438 - DNA, 201 bp, Homo sapiens
ggaggtgggaagaccttctcatcggtcttcaggtacacgtgtcaggtcactggtttgctgcaggggagcaaacagcatttgaggacattccacagaacgtrtgactattagagcagaaggtagttggcagccggttatttcctggagcaagtggaggccatggatgccttttcatggcagtggttcttagaagcccattac

SEQ ID NO: 278439 - DNA, 201 bp, Homo sapiens
tgacggtggtattcaagtcatcggtatccttactgattttctctctgctgggtccatcggttactcagagttggggtcatcggtatctttactgattttcyctctgctggatctgttggttactcagagttggggtcatcggtctccttacggattttctctctgctggatctgtcggttactgagagttgggtttaaatt

SEQ ID NO: 278440 - DNA, 201 bp, Homo sapiens; identical to SEQ ID NO: 56223

SEQ ID NO: 278441 - DNA, 201 bp, Homo sapiens
tgtgagatgggtctagatttgaatttttctttatgccagtgctatttgcatcttgttggtaggatcttattccttgttggtaattcccccattgcttctctctgtagacattttaaacctagttattttatgctctgtctctggagcgctgctctggacgctgtctgatcttgttcgttgtttcttctttttctcacccat

SEQ ID NO: 278442 - DNA, 201 bp, Homo sapiens
tgttctccataactcccatcgtaccctggtagggctgagtttgctgcccagcctcattagcatggggcactttttagaagctgagtttccagaagccaacmaagggccagcctcgcaaggaggccctgccacagacagcagcataggcctgctctgtgtgtggcgaaggaaaggctttctgagagcgcaagagctgtgctt

SEQ ID NO: 278443 - DNA, 201 bp, Homo sapiens; identical to SEQ ID NO: 56224

SEQ ID NO: 278444 - DNA, 201 bp, Homo sapiens
tttcttctttttctcacccatggtggcttcttttcttgactgtgttggagactttgggtacagagcttctgccctgtggggctccatccatgggcatttgrtgagagtgggtccctcctgagtcaggttgccagatgaagtacaggatgccaaggtaagcttgaactgagagcagctagtattttagtataagtatgtccc

SEQ ID NO: 278445 - DNA, 201 bp, Homo sapiens
ccacgactggcagtgcagtaggtttgtcaatgccacatcaccgcagacacgggagtcatgcgctgagccacggcgctgtgacagctgctgtgataggaagygttcagctccactagaatcttgtaggaccacattgtatatgtgacctgttgtggatggaaacgccatgctgtgcataactggaaaccggcaggaacctgt

SEQ ID NO: 278446 - DNA, 201 bp, Homo sapiens
gaaaccctgttttggtgctggttctttctgtagccattctgtggaggacctgtctgaattagaaagtctacattttatatactcaataggtatttacccartgaacagtcccccagaatgcagaattgattaaatccccaaccccgaaggcacagaagggaaacctggctgatcaaagaattcttgccttttaatttaatc

SEQ ID NO: 278447 - DNA, 201 bp, Homo sapiens
acagggatatgttctaagaaaggtgtcgttaggcgatttcatcatcgtgaaaacatcatagtgtgtgtttacacaagcgtagatgctataacctgcacacytaggtggtgtggtggagcctgttgctcctaggccataaacctgtacagcatggtacagtactgaatactgttggcagttgtaacacgacggtaagtattt

SEQ ID NO: 278448 - DNA, 201 bp, Homo sapiens
ctggtggtggcctttcctcaccggacggtggagccctgggcctctgctgtgttgcctctcctgcagagttgtgtgtgtgactggaggagaggggtggagcsagttcagccagcactggggtctaactataaagcacaatagagacaggtagtggcagctgggtggggtgggctgtggggtggggttctaagataggaattt

SEQ ID NO: 278449 - DNA, 201 bp, Homo sapiens
atttttgttctttaatactaagctttttttcttttactttttaagtagtatttttctgatcttagaaataatttacattaattatcctcaattcacgcttyatggaaatctacagtgaagttgaacgaacccacctcctaaagacaaccgtgttgaagatgctattcatatttttttctgtgcatgccccagtgcagttga

SEQ ID NO: 278450 - DNA, 201 bp, Homo sapiens
aggaatcccaggcatacttcctcatggatcttttcctgacccttatgtttaatttaatttactgatggatggatgagcccagaaagggttacacaggagcrcacttctcagggagtggtgtgacgctggggaggctcgcccaccctgtgtctgagctaatttctgaaatctgtttggagcttatatattgaaacaaagccg

SEQ ID NO: 278451 - DNA, 201 bp, Homo sapiens
ggacagggatgcgtaggtgatggagaccaagaggagaaaataaaagtatatttctgagaagaaaatgattgttgtaataccagagactcaccatttcatamccaggtcagaaggatcccttgagagggactcagccactcacctgtcactgtgcccctgggcaaggggcctaacctctctgagcctctgtctccttgttgt

SEQ ID NO: 278452 - DNA, 201 bp, Homo sapiens
atcccaggcatacttcctcatggatcttttcctgacccttatgtttaatttaatttactgatggatggatgagcccagaaagggttacacaggagcacacytctcagggagtggtgtgacgctggggaggctcgcccaccctgtgtctgagctaatttctgaaatctgtttggagcttatatattgaaacaaagccgttat

SEQ ID NO: 278453 - DNA, 201 bp, Homo sapiens
tccttgtctttctgagccattactaggagatggaagtaaagcacaaagcactgcttttggcctctgaataaatattctgcatcctggagacaatggccaarggttacagtgcctactccaggtggacaacacatttcaacctgagggccgtgagtttgctgattgacagggcgaccgaccagaaattagaggggtcctctg

SEQ ID NO: 278454 - DNA, 201 bp, Homo sapiens
gcttcttctctggaccttggcatccagggccctccctgccctgttgcctttacagcctgatgttgcctttgtagaattcttttctacattgtcccctgtttggttgttcaggaggggacagatgtgttagccgttttaacagttacatggtgagctcacctagcagtttttcaatcactgtgttttatgtggttttgtctg

SEQ ID NO: 278455 - DNA, 201 bp, Homo sapiens
tgcattttataaacactaaacttcaatttatatttttattggctatttatttgctctttgtgaattttcccttcatatttattaactttttcgaagaaccwggtttttgttttgatgatttatccagttgttttctgttttattgatgtataccctagttttattattttttctctgctttctttaggcttcacttgttct

SEQ ID NO: 278456 - DNA, 201 bp, Homo sapiens
aggcggattcagaagaaaggagatgtaatgcagttttcaatcaaaggccaagcatctctattttgaatgcagatcagcactaaaagccctgttttaatagyatttatactaattcctaccagtcctcacgaggagggtgacacacaccctgttcccacttgagagagggcatctgcaggggtggaggggagaccccatggc

SEQ ID NO: 278457 - DNA, 201 bp, Homo sapiens
tgcccggtgtgagttgtaagaaaatggtggtcagtgattgtcttcgcattttatatacgcacaggtcaaagagaatgaactctaaatgtttcccagtttgrtttttctgcttctgtttagccacatgaaatgaagatcacctctgcctatctacaggacattgagaatgcctataagaaaacctttctccctgagatgagg

SEQ ID NO: 278458 - DNA, 201 bp, Homo sapiens
tagcggtatgtattcatttgtacatttaacttcagcttggaaaagtttacactgaatttcatcttgttttttcttacagtgaaaaatgtgaggttttacartattctgcaagggaagctcaagattcaaaaaaggtaagaaaatggttgaaaagttgaaagttattcctacatttgattcatgtgtaaggttcttgcaaat

SEQ ID NO: 278459 - DNA, 201 bp, Homo sapiens
tttggccattcccgtgttcaacatatacttatttactcagctccaacactgctagctcccagtgtcagtgttagctgagacacagaggtacacaagacagrgtagggaaggcctttctgagaaagaatcgtcacctctgagatttcagagacaagaagaggagcactgagtgaccagcctgacatgtagcgagttttgtaa

SEQ ID NO: 278460 - DNA, 201 bp, Homo sapiens
gtctctgttcattgttaaagtagatcttatctgacagctcaagccgtatggattgatgggagccacttgatgtaggggtcatttgtcacacattgaagaakgagtaccagatgtactctatgcagtatgcattattttaagtgctgaattgtagaccaagatcaaactgcagctttgtgatggacttggatcttaaaagtt

SEQ ID NO: 278461 - DNA, 201 bp, Homo sapiens
gggtgcatgacgcagctctacttcttcagctccctggtgtgcaccgagtgtgtgcttctggcctccatggcctacgaccgctacgtggccatctgccaccygctgcgctaccacgtccttgtgaccccggggctgtgcctccagctggtgggcttctcctttgtgagtggcttcaccatctccatgatcaaggtctgtttt

SEQ ID NO: 278462 - DNA, 201 bp, Homo sapiens
gcagaaacgcatctctttcgtcgggtgcatgacgcagctctacttcttcagctccctggtgtgcaccgagtgtgtgcttctggcctccatggcctacgacygctacgtggccatctgccacccgctgcgctaccacgtccttgtgaccccggggctgtgcctccagctggtgggcttctcctttgtgagtggcttcaccat

SEQ ID NO: 278463 - DNA, 201 bp, Homo sapiens
tggagagccttctctacctgcgcctctcacctcaccgtggtcaccgtcttctatacagccttgcttttcatgtatgtccggccccaagccattgattcccwgagctccaacaagctcatctctgccgtgtacactgttgtcacgccaataattaaccctttgatttactgcctgaggaacaaggaatttaaggacgccttg

SEQ ID NO: 278464 - DNA, 201 bp, Homo sapiens
gtgcttgtggaaagagggaaaagatgcaagagaggaatgggaccgttgatggagcagggatcccagaggcaggggggcctcttggctcctcagagatcccrgttcaccaagcagggatcccagaggcagggaggcctctcagctcatcagagatcccagttcaccaagcaggcgtggccaggccagatcactgtttgtttc

SEQ ID NO: 278465 - DNA, 201 bp, Homo sapiens
ggattatttcagtttcttcatgttcataatacagtaaagagcatgtagtaccccttcttgttcaatttcaggttacttaaggtataaaagtggtcagagtrtatgaacgcattttacagctattgagtttttgcaaaatgattctccggaatatgtgtaccagtattcatacttggacctggttctctgaatttccctata

SEQ ID NO: 278466 - DNA, 201 bp, Homo sapiens
ttggatgtaaattaggaagttggtgcctacagatggcagctctgttcttggccctgtgatgttggtgttcttaggccgttggtgcttaccttctttctctrcctgatgggatgtgagtgatacagtagtctcctaggatgaccagagggacagctggctcactgcacatgtcactaaaagttcactgatcaaaatgtaaac

SEQ ID NO: 278467 - DNA, 201 bp, Homo sapiens
cctgagcctgccctgtgctgcttcctgcctctacccaggatgctctgtgcagactgcaccaacactttgcctctcgagggcctggaggcacaaggatggcmggggcactcaacttccctctcctcaacgtttggatgtaaattaggaagttggtgcctacagatggcagctctgttcttggccctgtgatgttggtgttct

SEQ ID NO: 278468 - DNA, 201 bp, Homo sapiens
ttggccagccatggtggctcacgtctataatcccagcactttgggaggctgaggcaggaggatcgcttgagcccaggagtttgagaccagcctgggcaacrtggtgagaccccatctctactaaaaatacaaacatcagccaggtgtggtggcatatgcctgtagtcccagcaactcgggaggctgaggtgctgaggtggg

SEQ ID NO: 278469 - DNA, 201 bp, Homo sapiens
ctgtatgttcttgcctttatgaaattcaccttacagaaaggcactaggatcagtttacctaaacatgcgggagacggaaggccagacgtgactgctttagrttcctcatgacattcagaccttacttggaactcagtttggtatctagttgtgttaaaatacaaattttcagtttataagttacttaattaagtttgaaag

SEQ ID NO: 278470 - DNA, 201 bp, Homo sapiens
tttgttaaaaaacaagttttttattttgtattttatatattaagcataaattactaaaaacaaaacgaggtgtaacaattctagaagaaaatacaagtttyaggatctggtcttgaagtgtgagtggtgcccgtgtaacagagaagctttgcatagttggctgctggggtgacaagcgtgcttcagttgcctctcagcatt

SEQ ID NO: 278471 - DNA, 201 bp, Homo sapiens
agtccaggaaaggccattgattttcagttttttcttattggaaggatggaaattacagcttccagccttcaccctttggagctgaagctggaagttccctstttgttttttaaaactctgttaacattttggactagatgcctatatttgtgtgtgtgtttgtaaatttacctaaatgatatactctattattcaaaactt

SEQ ID NO: 278472 - DNA, 201 bp, Homo sapiens
gcatgtgcgtctgtactcacttggcctgaggttcataacactctttgagcctttggctggtgttcattgtctgtagcacttttttttttttttttttttttgagacagaatctcactcttgtcacccaggctggagtgcagtggtgtgatctcagctcattgcaacctctgcctcccaggttcaagcgattctgctgcctc

SEQ ID NO: 278473 - DNA, 201 bp, Homo sapiens
acctgtgtggagagaagctctggttacgaattcccagtggagaatggtttcaccactgggtgccagctggggtctccttgctggcaggaggccttctcccygcactgaggtgtggcccttcaggagtcacctcacagggacaccaggccgtgtcttgtggctctctgcagctcttgggcgtcccgagggcaccgcggcttc

SEQ ID NO: 278474 - DNA, 201 bp, Homo sapiens
taggtgttagcagcaccaacccaatacttagaggtattttttcttccaaacagctcctgaatcccctggtctgatacttaatttattgagtgccattattratttaacaggcattttgcttccactatgtgcaacaccgttccagatttaagagatatagtgtcagataaaattcttgatgtctttgaaaatgtgttttag

SEQ ID NO: 278475 - DNA, 201 bp, Homo sapiens
tgcatgtgcgtctgtactcacttggcctgaggttcataacactctttgagcctttggctggtgttcattgtctgtagcacttttttttttttttttttttttgagacagaatctcactcttgtcacccaggctggagtgcagtggtgtgatctcagctcattgcaacctctgcctcccaggttcaagcgattctgctgcct

SEQ ID NO: 278476 - DNA, 201 bp, Homo sapiens
ccttctccccgcactgaggtgtggcccttcaggagtcacctcacagggacaccaggccgtgtcttgtggctctctgcagctcttgggcgtcccgagggcascgcggcttcagctcaccactctggcttttccactcactcttccttcttagccctttgtgatttcttgcggagctcagctgtacatgtagaagcatttcca

SEQ ID NO: 278477 - DNA, 201 bp, Homo sapiens
  misc_feature (1)...(201): n = A,T,C or G
ttacatcgatgtgcccgttccagaggtccagaggcggattcagaagaaaggagatgtaatgcagttttcaatcaaaggccaagcatctctattttgaatgnagatcagcactaaaagccctgttttaatagcatttatactaattcctaccagtcctcacgaggagggtgacacacaccctgttcccacttgagagagggc

SEQ ID NO: 278478 - DNA, 201 bp, Homo sapiens
cagcactaaaagccctgttttaatagcatttatactaattcctaccagtcctcacgaggagggtgacacacaccctgttcccacttgagagagggcatctkcaggggtggaggggagaccccatggctcggcctggtgccacagcctgcgggcctgccgcccaccagtgctctgcggtcccactgtggtccccgagtcccc

SEQ ID NO: 278479 - DNA, 201 bp, Homo sapiens
ccctgggctgtcttggcatcactggctgaatgacctgggctttcatctcagtctctcttcagatttcaaactcctgaaggagctgggtttttctttttttktgtgtgtcccagaattctcctggcacccaaacaaaaccgtctgtatccacactgtatcctgggccagaaagctggaggctggctgtgccaccctcccccc

SEQ ID NO: 278480 - DNA, 201 bp, Homo sapiens
tcctatctttctcccggaagtcaccattggagctcatcagactgaccgtgtcttacatcagttcagagaggtaagactgtggaaatggagaaagctggccrgtggatgagtctgcagcacctggggacaatgcagtcacttctccagaaaggagtttttgttgttgctgtgttttgtttgttttagtgaaggagcctcttt

SEQ ID NO: 278481 - DNA, 201 bp, Homo sapiens
aacagcaggcgaaaggaaccacccatgggagggaatgtcgcagggcagcggcaggtcgggcggcagtgcagcagccgtgagaacgcaggactcacacttcygggctgtgtcgccaacattggcaaccagtcgtcacctgccaacagcgccacccacttgggggagcatggatggtattggtcgggctctatccagctgttt

SEQ ID NO: 278482 - DNA, 201 bp, Homo sapiens
tgcctttaacgaaacttacatggacagagtggtgggggatagacagataattaaacaaattaataggcaataaagatgtagatgttggcatttttatcacyaagaggtttcttggtatttttacctaatagttactaatgcctacaggaaccagagtggtcacaatgtgctgctgtgtgattttgtgtttttcagagagga

SEQ ID NO: 278483 - DNA, 201 bp, Homo sapiens
ctttggtggcagagtgtcacatatttttaaatgaccagctctttggtggcggagtgtcacgtatttttaaatgaccagatctttggtggtagagtgtcacrtatttttaaatgaccaggtcttgtgtgaactcagagtaagagcctactcatcaccaaggagatggcccaagccattcatgagggatcagcccgcatgatc

SEQ ID NO: 278484 - DNA, 201 bp, Homo sapiens
atgaccagctctttggtggcagagtgtcacatatttttaaatgaccagatctttggtggcagagtgtcacatatttttaaatgaccagatctttggtggcrgagtgtcacatatttttaaatgaccagctctttggtggcggagtgtcacgtatttttaaatgaccagatctttggtggtagagtgtcacatatttttaaa

SEQ ID NO: 278485 - DNA, 201 bp, Homo sapiens
tctcaaatggagtttctagctacaacatcagcaaaataatggctggtttcagcctgtgcacagggcaagagtttcttttactttgccgccctcatagactsgttaagcctcaagcatttatttcttaccacttggtcttgctgtgtttttaactcctgttttaggaacagatacagtctctgttcattgttaaagtagatc

SEQ ID NO: 278486 - DNA, 201 bp, Homo sapiens
atttttaaatgaccagatctttggtggcggagtgtcacatatttttaaatgaccagatctttggtggcggagtgtctgtcacatatttttaaatgaccagmtctttggtggcggaggagtgtcacatgtttttaaatgaccagctctttggtggcggaggagtgtcacatgtttttaaatgaccagctctttggtggcgga

SEQ ID NO: 278487 - DNA, 201 bp, Homo sapiens
aggtcaaagagaatgaactctaaatgtttcccagtttgatttttctgcttctgtttagccacatgaaatgaagatcacctctgcctatctacaggacattragaatgcctataagaaaacctttctccctgagatgaggtgagccaaacacacgactgatttacagggctaaaacttcttcgccactcgtttcttaggccc

SEQ ID NO: 278488 - DNA, 201 bp, Homo sapiens
tattcctcagccttagctgctttcaatttcatgttgtcactaaatctgactcagtagatacttctgtgcagctgattatactactgaaacgggataaatgyagcttgatgattttcagctgagttatttgaaaaataaagtatttaaagctgttctttattcttcagagaagaccagactcttgtatctattattactgtg

SEQ ID NO: 278489 - DNA, 201 bp, Homo sapiens
gacagtgatggctgtggtctgtcacgcccttggcttgggggcagtgtagtcaggagaagggaaacgaggaaatggtcctgctgttgtcactgtcaagccakccatgagaacattctggcttttaacatgtcctcctgaaccagtcaagctctaatgcaccctcacatgcccagcacaatgcccagtgcagagaatgtgagg

SEQ ID NO: 278490 - DNA, 201 bp, Homo sapiens
gagcaagagaatggggcagcagagtgtcacatatttttaaatgaccagatctttggtggcagagtgtcacatatttttaaatgaccagatctttggtggcrgagtgtcacatatttttaaatgaccagatctttggtggcggagtgtctgtcacatatttttaaatgaccagctctttggtggcggaggagtgtcacatgt

SEQ ID NO: 278491 - DNA, 201 bp, Homo sapiens
gagacccagagctcaaggtaggactactaaatggatgatgtggagtgatggttaagatgacattttcctggctggtgctgtggctttggttgggaacagcragagatacagaaccgacggtctgggatccaggagggtggctggcaatagggaggaagtgtggacgcttgatccaggaggcacttaggattaatctggcag

SEQ ID NO: 278492 - DNA, 201 bp, Homo sapiens
gactgtaaggagttttaaattttaaaacttgctactcataattagatattcaagtttctgaaattcgcatagtgcatttcagatgatgagagaggtgacarccgtagaaagtgggagaagtggttgcggggagatgggtgagcgatggaggtggcgagcaagttggagagatgcagggagagtcaggtgacaagaagagag

SEQ ID NO: 278493 - DNA, 201 bp, Homo sapiens
ctttaggagaattattcctcagccttagctgctttcaatttcatgttgtcactaaatctgactcagtagatacttctgtgcagctgattatactactgaamcgggataaatgcagcttgatgattttcagctgagttatttgaaaaataaagtatttaaagctgttctttattcttcagagaagaccagactcttgtatct

SEQ ID NO: 278494 - DNA, 201 bp, Homo sapiens
ttcttattttgaacagctttaatgaggtataatttatgctccataaaattcacccattttaagggtacgactgaatgattttgggtaaatttaccaagttrttgccactcttgccataatccagttttagaatgttttcatcattttgtaggttgaaaccgcaggcctattcatttctttcttccttcctctctctcctgt

SEQ ID NO: 278495 - DNA, 201 bp, Homo sapiens
tgggtggcacgggccctgcgggtgccccctggattatgcattctgtgtagtgatcactttaggagaattattcctcagccttagctgctttcaatttcatkttgtcactaaatctgactcagtagatacttctgtgcagctgattatactactgaaacgggataaatgcagcttgatgattttcagctgagttatttgaaa

SEQ ID NO: 278496 - DNA, 201 bp, Homo sapiens
atccttcatgaatggcttggtgccctcctggaggtaattagtatgttctcacagagtgcacgtcgacctctcattttaaagtatatggcagctcccacccsctacccgcctcatgctcttgctcttgctcctactcccactatgtggcgtacctgcccctgctttgctttccactatgattggaagcttcctgaggccttc

SEQ ID NO: 278497 - DNA, 201 bp, Homo sapiens
ggtcaggtcaccagcaagtgtttctggagtgcctgtggtgtggcaggctctcttaggtgctagggatatgaatatgaagaaacttaagacaaggctcccaygggcccggggttgggggctgttgaaccaatggggatggttcattgtaataaagtgtacttagcactcctgagcattactcctgggtgctttgggggcaca

SEQ ID NO: 278498 - DNA, 201 bp, Homo sapiens; identical to SEQ ID NO: 56220

SEQ ID NO: 278499 - DNA, 201 bp, Homo sapiens
tcctgtggctcttgtcaccctcctgacattaatgagaacactcagtagttcgtttccatttgtggctcccagccctaggacagaagcttctggcaggcagrgctgggttgtggtttgtgtacctgtggcatccttgcactcacaggagacacctgccacagatcatgtgctcaccagcattgctgaaggaactcatgaagt

SEQ ID NO: 278500 - DNA, 201 bp, Homo sapiens
cacaggtagcagcaaatggcacatctgtgtgcggagagagggagatgggtggactcttagggccttcgtgtctgttttatattgcagtgcttgctgctttygttgattggcagtgcccctgatgagcttctcacgcacaagctcagccgccactagggttggcttcatggggtctgagccgtgagaacaagaatgtggttt

SEQ ID NO: 278501 - DNA, 201 bp, Homo sapiens
tgaaagttattcctacatttgattcatgtgtaaggttcttgcaaatcagatcgtcagttagattcccactggtcttaacaaacatcactgttttatcaccygaaagcagtgccagtcaaacccatcatcacactcccctggccatgaggtttcgagtttctttcaagtaattcggtttctacgatctgaaaattacagatg

SEQ ID NO: 278502 - DNA, 201 bp, Homo sapiens
aggcaggtgttctccataactcccatcgtaccctggtagggctgagtttgctgcccagcctcattagcatggggcactttttagaagctgagtttccagaagccaaccaagggccagcctcgcaaggaggccctgccacagacagcagcataggcctgctctgtgtgtggcgaaggaaaggctttctgagagcgcaagagc

SEQ ID NO: 278503 - DNA, 201 bp, Homo sapiens
atctctctcaaagtagttaggacacagcgtttcaccagtagaaggagtttcctccattagaatgagtgactgtgtgtgtgtgtgtgtgtgtgtgtgtgtgkatatttttttccttgactgatttctgtgcgaacagctggcatttgaagcactatatagggcatgtctaaattgtgcacccaagagaagagcctgggagaa

SEQ ID NO: 278504 - DNA, 201 bp, Homo sapiens
gcagtggaccgatgtggcttcatgtttgggcgttggattcctgagtgtgaggttcccatggcaaggtggcaggagatacctgtcggcatctgctgagtgtytgctgaagtctgaggactggcctgggctggagtctgcaggcgttgggggtccagcactgaccgtgagcatgctttccttgggaaagcccaaggggtgatg

SEQ ID NO: 278505 - DNA, 201 bp, Homo sapiens
tgacccagatcttaggcgtacatgtctttctcctcattaccttaattgtgaatgtgttaatgagtatcaacttagtttcaccaacatttggccattcccgygttcaacatatacttatttactcagctccaacactgctagctcccagtgtcagtgttagctgagacacagaggtacacaagacagagtagggaaggcctt

SEQ ID NO: 278506 - DNA, 201 bp, Homo sapiens
ccttccgtgcagcgggcactgcctttggcgatggtatgtgcagctgctgacatggctcatgtaccttgctcctgtggacagtgatggctgtggtctgtcaygcccttggcttgggggcagtgtagtcaggagaagggaaacgaggaaatggtcctgctgttgtcactgtcaagccagccatgagaacattctggcttttaa

SEQ ID NO: 278507 - DNA, 201 bp, Homo sapiens
gtgcagtgcaagctgcgctatggaatgtggcatttcctacttggggataaagcaagcaaaagactgacagaacgcagcagagtgataactgtagatggcartatatgtactggaaaaggcaaacttgcaaaagaaatagcagagaaactaggtatgattttatgttacacagaatgatacctttttctcagatatatggtt

SEQ ID NO: 278508 - DNA, 201 bp, Homo sapiens
cgagacgcagaagtcgctccacgccctgggcggcctcagctcccgcgacaccgcagcaactcagaacccaggcaggggccgggcagccagcatgctgcccscacgttcacctccaactcccacctctcggccctcgccccaacccgcaggaccctggcagcgcactggctgtctccgcggaagcccccgagggcctcggcg

SEQ ID NO: 278509 - DNA, 201 bp, Homo sapiens
atccgcagttcccaggaatttgtccgattgataacgcccaaagccccgggtctatcatcttgtaatagtcttaaagcccctgcaccttgaactgtttactytcctgtaaccatttacccttttaactttttgactactttacttctgtaaaattgttttaactagaccccccccccttcctaaaccaaggtataaaagtta

SEQ ID NO: 278510 - DNA, 201 bp, Homo sapiens
gtagagtgtcacatatttttaaatgaccaggtcttgtgtgaactcagagtaagagcctactcatcaccaaggagatggcccaagccattcatgagggatcmgcccgcatgatccaaacacttcccaccaggccccacctctgacactgtgagttacatctcagcatgagatttggaggggacatccacactctcatttgat

SEQ ID NO: 278511 - DNA, 201 bp, Homo sapiens
gtatttcgggagggggcatttttccatgtcagggcttctttaagaccacaaagctgaagtctgtgctcgctgctcagcggaggccgtgctctgcgcattgygtgcatttgctgcctcctccctcctcctgaatggccacctcttccctgctgatccgcatgctgtctgcacctgaagcctctctccgtgttggtcaggtag

SEQ ID NO: 278512 - DNA, 201 bp, Homo sapiens
cccagtatcaaggcatggccatggggtccctgttgaatgctgcatgcgtgcagcgagaggcccctctgctctggccagtgggagctcgccgactctcagcyctaagtgaactctgggagtcatctgcttgcaactccctggaaactgttctttcccagaagtcgactttgtccagcttcatggagttttaccccctgcaca

SEQ ID NO: 278513 - DNA, 201 bp, Homo sapiens
ggcaccagaagctcttctgtgctccatcactgaccaggcacattctgtaacgtgcgtggccgtggcatgaacaggcagcagatcctgagggtcaggagcakcaggagcgttgcagaggagcacactttcctccctgcagtaggagctcggcagagcacattttcatggccaccacacttatccaatagaattgtgttttag

SEQ ID NO: 278514 - DNA, 201 bp, Homo sapiens
gctggagtgcagtggcacgatctcggctcactgcaagctccgcctcccgggttcacgccattctcctgcctcagcctcccaagtagctgggactacaggcrcacgccaccatgcccggctaatttttttgtatttttagtagagacggggtttcactgcttgtttaatactatgttattttttcctggaggagaatatggt

SEQ ID NO: 278515 - DNA, 201 bp, Homo sapiens
ggctggagtgcagtggcacgatctcggctcactgcaagctccgcctcccgggttcacgccattctcctgcctcagcctcccaagtagctgggactacaggygcacgccaccatgcccggctaatttttttgtatttttagtagagacggggtttcactgcttgtttaatactatgttattttttcctggaggagaatatgg

SEQ ID NO: 278516 - DNA, 201 bp, Homo sapiens
ccctgtggccgttggtagctctgttggcggcttgatggaggatcctgagatgaaacaaagaccgtctttgccctgtggcgagttctttgttttttttttttgagacagagtctcgctctgtcacccaggctggagtgcagtggcacgatctcggctcactgcaagctccgcctcccgggttcacgccattctcctgcctca

SEQ ID NO: 278517 - DNA, 201 bp, Homo sapiens
taaaactgcgtcaggtcacaaaggccagggagagaagtaaccctgagtaacagggtggtgagtagctaggggtgacaaagggcctctctcgggatgaggcytaagtgaggccaggattgggtcctgtgggccgtggggtgagcagagggcaggggcttggcaggtgcagaggctcttcaggcaggagtgtggtgggaaggt

SEQ ID NO: 278518 - DNA, 201 bp, Homo sapiens
ccagaggtccagaggcggattcagaagaaaggagatgtaatgcagttttcaatcaaaggccaagcatctctattttgaatgcagatcagcactaaaagccctgttttaatagcatttatactaattcctaccagtcctcacgaggagggtgacacacaccctgttcccacttgagagagggcatctgcaggggtggagggg

SEQ ID NO: 278519 - DNA, 201 bp, Homo sapiens
tttcctaagttctttttagaatggttatgtactgtaattccatcttatttcctttgtggccttacgagctacccctctttatttcatttctgatgattgcygtagggtttcaccacgggcaactctaacttgtcacagtcaatccacaccttgtcagcatttaaccgcctcacacagaatgcaggtatctggcccgaggcc

SEQ ID NO: 278520 - DNA, 201 bp, Homo sapiens
taacgtgcgtggccgtggcatgaacaggcagcagatcctgagggtcaggagcagcaggagcgttgcagaggagcacactttcctccctgcagtaggagctyggcagagcacattttcatggccaccacacttatccaatagaattgtgttttaggaatcctgttttttagctctagaaattctgtttggtgctttttatgt

SEQ ID NO: 278521 - DNA, 201 bp, Homo sapiens
ttatcatttcttcagatttttttctatcctcccccttttggggactcttatgtatccatgcattaggtgacttgctattttccacaggtccctgtgactctgtccatttgtttttggcctttttctttctgtgcctaattttggatagtttctgctgctctgccttcaagctcacttatcttctgtgggtgtatgatatgc

SEQ ID NO: 278522 - DNA, 201 bp, Homo sapiens
gttatcatttcttcagatttttttctatcctcccccttttggggactcttatgtatccatgcattaggtgacttgctattttccacaggtccctgtgactctgtccatttgtttttggcctttttctttctgtgcctaattttggatagtttctgctgctctgccttcaagctcacttatcttctgtgggtgtatgatatg

SEQ ID NO: 278523 - DNA, 201 bp, Homo sapiens
cgctggaaaaaggaacttcctaagtatcttccaccctttctccctcctgaaataggtgtcttttgtgctgtcatgtctccctgtgaaagcagattggagcyctggacctcaaacacacgcagcttaaagtgcagcccccacagcctcccgttagaacctcccccgctcttagcttgccctagcaatacctaggctgtagct

SEQ ID NO: 278524 - DNA, 201 bp, Homo sapiens
ccaggcgcaggacctggcacctgtaggcacttagccggcacaggacctcgtacctgtgggcacttaggaagtaattgtgggctaagtgaacttaaaccacrtcgtggactcagctttactgtcttgttgttaccttcctgtactttcttaggccagtgatcagcaaaggtttcctttaaagagccagagagtaaaggttcc

SEQ ID NO: 278525 - DNA, 201 bp, Homo sapiens
atctctttgaatctggatcagttcctcaggcttttcttggcattcaagaccttgacatttttgaagactacagaacagttaccttgctgaatatccctcaatgtggttttgagggatatttggcatatggttcccatttgtcccatcactgcttttgttacctttattgcttgttaaggtggtgtcttcactataaagtta

SEQ ID NO: 278526 - DNA, 201 bp, Homo sapiens
aatattcatagcttataatgtattaaaatgttacctcttggccagccatggtggctcacgtctataatcccagcactttgggaggctgaggcaggaggatygcttgagcccaggagtttgagaccagcctgggcaacgtggtgagaccccatctctactaaaaatacaaacatcagccaggtgtggtggcatatgcctgta

SEQ ID NO: 278527 - DNA, 201 bp, Homo sapiens
cctggctcctggtggggcttcagctaatgtctgttcagttatgtgtgttgaacgaaactgtcacatcgtcctgatctctcatgaccactcttgtgcaaatrtgtcaaatagtttgtgacctttcatattgctgtgtgagaacaaataatgtttctgtgccagccctgttcatcagggatgtttaagacctctgtctcctat

SEQ ID NO: 278528 - DNA, 201 bp, Homo sapiens
tgtaaagatgccttctgcctgtgctcggttaggccctgggcttcgttgtccttccgtgcagcgggcactgcctttggcgatggtatgtgcagctgctgacrtggctcatgtaccttgctcctgtggacagtgatggctgtggtctgtcacgcccttggcttgggggcagtgtagtcaggagaagggaaacgaggaaatggt

SEQ ID NO: 278529 - DNA, 201 bp, Homo sapiens
cttgcacttactgtgtttatgaatgtctgttagatagatgaataaatgccattacttaatcggtctccgctggaaaaaggaacttcctaagtatcttccaycctttctccctcctgaaataggtgtcttttgtgctgtcatgtctccctgtgaaagcagattggagccctggacctcaaacacacgcagcttaaagtgcag

SEQ ID NO: 278530 - DNA, 201 bp, Homo sapiens
gtttttgaaaatggtttcccacttacaaatatgtctatgttcttttcagtattttggtgtggaaatggaattgtaaatgattgttattttcttttctctgraatgcagtgatcagttgacagtgctttgctatctgtctgattttcaatttctgtttgcctatgtttaaacaggacaaggtgttgtgttggagcgctccat

SEQ ID NO: 278531 - DNA, 201 bp, Homo sapiens
gcccctgcaccttgaactgtttactttcctgtaaccatttacccttttaactttttgactactttacttctgtaaaattgttttaactagaccccccccccttcctaaaccaaggtataaaagttaatcaagccccttcctcggggctgagagaattttgagcgttagccgtctctcggtcgccagctaataaaggactct

SEQ ID NO: 278532 - DNA, 201 bp, Homo sapiens
catttcctgagatatatctactatcaagttaatcacattcactcaccaaataagttcttttctgctttcttcttacaaagtagcatttgagaatgtttttrtgtggcacttctttcattactgtagttctctgataagtaactgcctagagcagtagtagggctgttaagtgttagaggctgtctttgcaaaaactgaaat

SEQ ID NO: 278533 - DNA, 201 bp, Homo sapiens
tacgtcttgcctcaggagcaaaagtgaacccttaaatgtggctaagatgtgctaaagatctgtcttttaggatgattaaggtcacagtttaaatgctgctrttttactctgtgtaagtagcttaatttctctgggcctcagacctttggtttgtaaatacagtggaggcgacaagccctgttttcagggttgtgggcacca

SEQ ID NO: 278534 - DNA, 201 bp, Homo sapiens
agctccactctctctctgcctcagctgccctgcagccctttcctcttgctctttgatgttttgtaggcctgcagctcccaagcacagaggcatgagtgggragaatgtcaccaaggtcagcaccttcatcctggtgggcctccccacggccccagggctgcagtacctgctcttcctcctcttcctgctcacctacctctt

SEQ ID NO: 278535 - DNA, 201 bp, Homo sapiens
gtgggcctccccacggccccagggctgcagtacctgctcttcctcctcttcctgctcacctacctctttgtcctggtggagaacctggccatcatcctcaycgtctggagcagcacctccctccacaggcccatgtactactttctgagctccatgtctttcctggagatctggtacgtgtctgacatcacccccaagatg

SEQ ID NO: 278536 - DNA, 201 bp, Homo sapiens
cttgactggcctttaaggggcacggtcgtccagctgtggagcactcgtggagtcagatctccacacagtggttcaggtccctgtgaatcctctcacctgcrtgaagggcctggctgcctcttctaggtgtctgggaagcctgctctttcccatcaactgcacccttaaatggggactccagaaacaggagcagtgtcaggg

SEQ ID NO: 278537 - DNA, 201 bp, Homo sapiens
agcactcgtggagtcagatctccacacagtggttcaggtccctgtgaatcctctcacctgcgtgaagggcctggctgcctcttctaggtgtctgggaagcmtgctctttcccatcaactgcacccttaaatggggactccagaaacaggagcagtgtcaggggcgagttagagggcctagcacgccatactcagggacagt

SEQ ID NO: 278538 - DNA, 201 bp, Homo sapiens
agcagactcaggagccaggggacacggctccaattctagctctgtgaacacactggccgtgtgccaccctcagcaagttacttaatctctctctcttaggaaaaaaaaaaaaaaaaaaaagaaatccttgcacatgctgtaaaattcaaaagatgagagatgttccttctttgttccccagccgcccagggcccctccctc

SEQ ID NO: 278539 - DNA, 201 bp, Homo sapiens
ctggagctctttttctgcctaggccccacccctttagtgctctactccgtaaaatctagtcactgtgtcctgcccagagtcagatgcaaccaccagactcrgtttctccagtttctaaatgtatctggctgggaggcaagtacagaccctgttactgcctcatgaaaggaaactgttgactactacttggcctggtgcctc

SEQ ID NO: 278540 - DNA, 201 bp, Homo sapiens
ctctatggggcaacccgccatgtagcccccacaccctgcacatattctataagcagaccggacacttaccttccctggggctgaccagctctttctctctstcacccaggccttcctgaccccgtcaggccctttgaggccagccccaggtgcccgtcactgctccccggtctagaaatagcacctacagcccgtctgaca

SEQ ID NO: 278541 - DNA, 201 bp, Homo sapiens
cccctgggctgtcttggcatcactggctgaatgacctgggctttcatctcagtctctcttcagatttcaaactcctgaaggagctgggtttttcttttttygtgtgtgtcccagaattctcctggcacccaaacaaaaccgtctgtatccacactgtatcctgggccagaaagctggaggctggctgtgccaccctccccc

SEQ ID NO: 278542 - DNA, 201 bp, Homo sapiens
atatttttttccttgactgatttctgtgcgaacagctggcatttgaagcactatatagggcatgtctaaattgtgcacccaagagaagagcctgggagaarcctcattgtgcggccttggccctcatggcacagatcccaggttggctgtagcatttagaagtggacacttttctaacatcagaactcatccagtccttac

SEQ ID NO: 278543 - DNA, 201 bp, Homo sapiens
agaaaccaaggctctgaatcagccccgaagtgtaagcagcagcataatgatctggagcagcatcttggcgttattaaattcaacccattccgatggctgcrtcagcatctattgctctgtttattgtttttccttaagcaagcagttccatttctagaaatttatctcaagcacataaatctagagggggcacatcggtgt

SEQ ID NO: 278544 - DNA, 201 bp, Homo sapiens
gaggtggggtctggtgggtggtgtttaggtcatgggagtagatccttcatgaatggcttggtgccctcctggaggtaattagtatgttctcacagagtgcrcgtcgacctctcattttaaagtatatggcagctcccaccccctacccgcctcatgctcttgctcttgctcctactcccactatgtggcgtacctgcccct

SEQ ID NO: 278545 - DNA, 201 bp, Homo sapiens
gccgcccagggcccctccctcaggcagcctggttcaggtttctttgtagccttccggttggtgggggagagggtagcacctgtgtgtgtgtgccattcacyctcttaactgtgagggtcaggaaaatcatcatgttagtttacattaagcatggacttctgacacacagatttgcacacagatatttgggggaaatcacga

SEQ ID NO: 278546 - DNA, 201 bp, Homo sapiens
ggaatgactttgagttctgcctgtcctttggttgtccacaaggaatttccttatgggcaaattgtgagggaggtatgtagctttttaaaaatctttgtagygatcttatttaggaatagaaagggagagaggtttgcccaacacaattcccaacttgacttttccttttggtttagtgattttggggagatttgttttcct

SEQ ID NO: 278547 - DNA, 201 bp, Homo sapiens
aattctaaattctaaatccaattactgaacttttttcatgtataaattttcaatgtattttgtttatttatgagactaaagttaaggactactttacctgytctttcacttatttgtttcaaattttttgtttccagcattagatatcatgcattctacaacatatttcttgaggctatttcagtaaataggagtcaataa

SEQ ID NO: 278548 - DNA, 201 bp, Homo sapiens
ataaaatttcatcttttcataggatatgaagagatcacattttatgaatatttaaagactcaaaaattaacccccaacctccaatatattgtcatgcattmaattgcaatgacatcagagacagccagcagcaccatagatggtctcaaagctaccaaaaactttcttcactgtcttgggcggtatggcaacactccattt

SEQ ID NO: 278549 - DNA, 201 bp, Homo sapiens
tattagggaaccaaaaacaaggaaggagagtaagaactaagtctacttcatgtgtatatccccagctcctagctcaatgcctaacacgcataaaagacacrtgctcttaaatgagagaacatgtgctcaaaatggcattcactgttatgacttcatttttgatatttgttggttgtcattaattttttaatccaataagac

SEQ ID NO: 278550 - DNA, 201 bp, Homo sapiens
ttctactatttcaacttttatcttgtaaaatattttctttgtacagctgctgtattctcgaggattactaattgatcttctaatcaaatctaatgttagtygatatgcagagtttaaaaatattaccaggattcttgcatttcgagaaggacgagtggaacaggtactgtgctgatcaagaattgtaactgggcatcagct

SEQ ID NO: 278551 - DNA, 201 bp, Homo sapiens
tttggtcctcaaaacaatcttatgagataagtatttgtgatatacccatttatagataaggaagctaagtcctgaaggggctgaataacttgtccagaggycccatagctagtaagttcttgagccaagaattaaactcaactcttttggatcccagtgcttgtacactcacccagtgttatatgctactttcagcttatg

SEQ ID NO: 278552 - DNA, 201 bp, Homo sapiens
ctgtactaaaaatacaaaaattatccaggcgtagtggcaggagcctgtaatcccagctccttgggaagctgaggcaggagaatcgcttgaacccgggaggyggaggttgcagtgagccgagactgtgccactgtaccccagcctgggtgacaagagtgaaactctgtctcaaaaaaaaaaaaaaaaaaaaaaaggaaaaat

SEQ ID NO: 278553 - DNA, 201 bp, Homo sapiens
gattcggtagagaggtagtggtctttgcttgtaattgcatgcaattttcagagtccagggtgttgaccattacaccatggggctggcttaattgcatgcarttttcttacagaagatgtacttgttgttgttgtttttttaaacaacactttaacaacaacttttttttttgaaaaaattgtttttcaattgattgtaatg

SEQ ID NO: 278554 - DNA, 201 bp, Homo sapiens
attgttccatgatcatggtcagaatttgtaaccctggccatcttgccagatgtatatcgttgaccatatgggagattcaataaataaattaaccctttcarttcaccatcacatctagaacaacagcagttagcacatatcctggcatcatcttgtcatatgaaggaccttccttacctttgttacttggcagagcaccat

SEQ ID NO: 278555 - DNA, 201 bp, Homo sapiens
taccaaattagcaataagaccaaaaagttttaagtatgttaacttttcctaaataaattttttttttttgagacggagtttttctcttgttgcccaggctrgagtgcaatggtgcgatcttggctcaccgcaacctttgccttccgggttcaagcgattctcctgcctcagcctcccgagtagctgggatgattatgggca

SEQ ID NO: 278556 - DNA, 201 bp, Homo sapiens
actcaatataatagtatatgactggtgggaccagaaacttacattgttccatgatcatggtcagaatttgtaaccctggccatcttgccagatgtatatcrttgaccatatgggagattcaataaataaattaaccctttcagttcaccatcacatctagaacaacagcagttagcacatatcctggcatcatcttgtcat

SEQ ID NO: 278557 - DNA, 201 bp, Homo sapiens
actgccatccttgaagagtggacctcaatacatgtatagaattaaagggagaagtcatagaattctgaaaacagacttacggaagttcatgtattctgatwaagtactgtagcctgtttaagcaaatttttaaggataaaacacttatttttttttagttaatgccagaaatgcacacacattttaaaccgatttccaaaa

SEQ ID NO: 278558 - DNA, 201 bp, Homo sapiens
gggagaaatgtgccatagcaaaatggctatagggcccatgcaagtccgaaatctagtggagcagtcaaattttaaagctccagaatgatctcctttgactycaggtcctttgacatccaggtcaccctgatgcaagagttgggtttccatggtcttgggcagctccgcccctgtaactctgcagggtacagcctccctcct

SEQ ID NO: 278559 - DNA, 201 bp, Homo sapiens
tatttaaaacatggatatacagtggaataagatgcaaaatataccagatttttttgttaggatgacccatgaaaattaaacattttgtgtttatataggaygactgtaagctctctcctggcttcccctagcataagctttcccttaagccatgagagctgctttgaaggaaatgttggaagccttgtgttagtgtacact

SEQ ID NO: 278560 - DNA, 201 bp, Homo sapiens
gtggacctcaatacatgtatagaattaaagggagaagtcatagaattctgaaaacagacttacggaagttcatgtattctgattaagtactgtagcctgtktaagcaaatttttaaggataaaacacttatttttttttagttaatgccagaaatgcacacacattttaaaccgatttccaaaaacgattttatcttttct

SEQ ID NO: 278561 - DNA, 201 bp, Homo sapiens
tcctgtctttttctgagccctccaaactgttccaacctctgcctgttaccctgttccaaagtcacttccacattttcgagtatctttcagcaacaccccaytctactggtaccaatttactgtatcggtctgttttcacgctactgataaagtcatacccgagattgagatgaaaaagatgtttaattggacttacagttc

SEQ ID NO: 278562 - DNA, 201 bp, Homo sapiens
ttccatctccttcttctgcctttgaattttttgcctccccattttaaggaactttgtgattacattagggcctacctggataatccaggataatcttcccrtgtgaagatccttaattgcattaacaaaatcctttttgccatataagataatatattcatagcttctgggtattaggacttgagcatctttggggagcca

SEQ ID NO: 278563 - DNA, 201 bp, Homo sapiens
cactggaggtgacccgcccactcagcctgtgttgcagattgtactcgagtttggtggttccccgagctcttttcctgtgttcaggaagaatgaggatacaytgacaattagaagggtctggatgggcagagaagaattttattgagcgatggaagaggaaaggggactccaggtggtttctctctctctgtcagtatggct

SEQ ID NO: 278564 - DNA, 201 bp, Homo sapiens
acaattgtagtggctaaaaccaatacagacttattcttttacagttctgtaggtcagaagttcaaaatgagtcttacggggacgaagtcaaggtgtaggcrgtgctgcattagttttggaggttccaggggaaaatcggtttccttatcttttccagtttctagaggtcacctgaatcctttggctcatggcccttcctcc

SEQ ID NO: 278565 - DNA, 201 bp, Homo sapiens
gacagtggggtgttaaagtctcccattattattgtgtgggagtctaagtctctttgtaggtctctaaggacttgctttatacatctgggtcctcctgtgtytggtgcatatatatttaggatagttagctcttcttgttgaattgatccctttaccgttatgtaatggccttctttgtctcttttgatctttgttggttca

SEQ ID NO: 278566 - DNA, 201 bp, Homo sapiens
attttagaatgtaaataaaatttatttctatatttagaaaatgaacaagtagaaaagccaagaattctgtgggctctttacttcaatatgagagattcgtsagacatcagcaggagctgttataatgatttaccatccaacgtttatgtctgctctggcccagattgtggtttaggaaatgataatgcagtcaaacaggta

SEQ ID NO: 278567 - DNA, 201 bp, Homo sapiens
tttctcctaggcctgcaggcctgtgatgggtggggctgctgtgaagacttcctacatgccctggagacattttccccattgtcttggggattaacattggrctcctagttacttatgcaaattcctgcagctggcttgagtttttcttcagaatttttttttttctatcacattgtcaggctgcaaattttctgaactttt

SEQ ID NO: 278568 - DNA, 201 bp, Homo sapiens
tttttgaaaatgtgacatttcaaattattattgttagtattatcacaaaacaaagatttgattttattatatgtaaactaatttttcttcctgatcttaargtgatgttctggagttcttaaattctactgagaaagtataagccgactatagactttttcatagttgaattaaaaaattaaattgtgtgtcatatatcat

SEQ ID NO: 278569 - DNA, 201 bp, Homo sapiens
gagttgaaattagaagaattaaactggaatcattctgaggaccttgtatgctgaggtaggaagtactgatttttgtctttaataattatctttaatctcatctgtctttccttcaaactcatatttcatgcttcagcatatcctgtcacctctacttccaaaaacagtttaaatctgttttctctgtctccactcttcctc

SEQ ID NO: 278570 - DNA, 201 bp, Homo sapiens
agctcattttgatggggtacattttagaaaaggttaatttagtaatcaggaccaggcactactcaattaagtgtttgacttcattgaaccacagctaccawtatatcttgtggactaaatggtgctagccagcttaaaagtttgggaatttgtaggttgtaatggacaggattagagttcaggagaactgagtttcaattg

SEQ ID NO: 278571 - DNA, 201 bp, Homo sapiens
tactaacatgtacatagggagaaccacagtgtttgttttagatagcactgctaaatttttctctgttaggatgacatgccgttggccttttaatggcatgrggagtaacttggcagaattaagtaagaaagctcacaattagctctgaagttagcagagatgccattagtactgatggacggtgatgtgaaaaagcctggc

SEQ ID NO: 278572 - DNA, 201 bp, Homo sapiens
aatccttttctcccattaatcaagattttggagagggaaaagaaagaaacggtgatttttgctgtccacttgatcagattccacacagaggaggaggcccrgagcctggttgggaaaaaattcttacccttatgacagctgatcagatcctgggttcttcactgcagcttccagaagagcagagctttgctatcctgctca

SEQ ID NO: 278573 - DNA, 201 bp, Homo sapiens
cattagtactgatggacggtgatgtgaaaaagcctggctagagtggaaacgataatcctgttatatgtaaaggggaaaaaagtgtaatttggaatagttakatcattaggaagcagtttcttaacttaaaatcataatatttttcaggttccgtgttccagagcagatgtctttaatagcaaacaacttactatggtagaa

SEQ ID NO: 278574 - DNA, 201 bp, Homo sapiens
ttcataggatatgaagagatcacattttatgaatatttaaagactcaaaaattaacccccaacctccaatatattgtcatgcattcaattgcaatgacatsagagacagccagcagcaccatagatggtctcaaagctaccaaaaactttcttcactgtcttgggcggtatggcaacactccatttttgtttcctttatat

SEQ ID NO: 278575 - DNA, 201 bp, Homo sapiens
ttagttctgattttaagtgataaaatttcatcttttcataggatatgaagagatcacattttatgaatatttaaagactcaaaaattaacccccaacctcyaatatattgtcatgcattcaattgcaatgacatcagagacagccagcagcaccatagatggtctcaaagctaccaaaaactttcttcactgtcttgggcg

SEQ ID NO: 278576 - DNA, 201 bp, Homo sapiens
tccctcccacaacacacgggaattcaagatgagatttgagtggggacactgtcaaaccacatcagagtgacacatgaagaagtttctattcctttagaataaaaaaaaaataactttttcatgtatatattgaaactaaacttctaagctaatcaaagtgttttctcaagcaatgcaaggcccacccctctcatgtttttt

SEQ ID NO: 278577 - DNA, 201 bp, Homo sapiens
ctcagcctcccgagtagctgggactacaggcacatgccaccatgcctagctaatttttgtatttttagtagagacggggtttcaaaacatcttggccaggrtggtctcaaaactcctgacctcatgatccgcctgtctcggccacccaaattgctgggattacaggcatgagccaccgtccctggcctatttcattgtttt

SEQ ID NO: 278578 - DNA, 201 bp, Homo sapiens
tttctcttttggattcttcagtgttgacatatagaaatgctattaattttgtatgttgattttataccctgcaactttactaaatttgtcagtctaatagktttttgatggggtctttaggattctccaaatataaaattatatcatctgcaaacaaggataatttgacttctctcagcctctcccagtggccaccacagc

SEQ ID NO: 278579 - DNA, 201 bp, Homo sapiens
tttatggaccttaaagtgggagcttagggttgtaaaatgagtttcaacatggcattccagagatgtatagaaattttagttacttataaaagttgaaagakgcctggaatcagatgtcaactttatataccagggaagtttaattatttctaaattccctagataaggagtttatcctccaaatggcctgtttgatggcca

SEQ ID NO: 278580 - DNA, 201 bp, Homo sapiens
tgtaatggccttctttgtctcttttgatctttgttggttcaaagtctgttttatcagagactagaattgcaaaccctgcttttttttatgctttccatttrcttggtagatcttcctccatccttttattttgagtctatgtgcgtctttgcctgtgagattggtcttctgaatacagcacactgatgggtcttgactcta

SEQ ID NO: 278581 - DNA, 201 bp, Homo sapiens
gaggtgacagagaacaaatgctgccattatgagctacacatagcttccctttctaacaaagactggtatgggggaaaaacaaatgagaagcaatatgaaaratgtatgtgcacatgtaaccatatacctttccaagagcacaaaatacttcttatgttctcatttaaaattaagaggatatttaaatgaattatcacaatt

SEQ ID NO: 278582 - DNA, 201 bp, Homo sapiens
ttttattttatttatttatttttttgaaacggagtcttgctctgtagccaggctgtagtgcagtggcgcgatctcggctcactgcaacctctgcctcttgrgttcaagagattctcctgcctcagcctctcgagtagctgggactgcaggcgcccgccaccatgcccagctaatttttgtatttttagtagagatggggtt

SEQ ID NO: 278583 - DNA, 201 bp, Homo sapiens
cagcactcactgacttaaaagccttatttatttaatacatatttctgacaacctcattttctttctgtgtgtgtgtgtgtgtgtgtgtgtgtgtgtgtgtgttgtgtgtgttttccccctagcattgtagtttaaagcagcaaataggaaaggggtatctgctagaggcaagcaaactgagaaccacatggagactagggt

SEQ ID NO: 278584 - DNA, 201 bp, Homo sapiens
agagggacctcgtgagagtaggagtggttcatgtgtctgttactaccagtaccttagtgaatttctaacattctttgatagccatatgagttttgtctatrtatgcatacacagacacactttaaggcatgttaggtatggtttaatggttatggaatttctttcttttttaaaaaacttattttttttattttctatttt

SEQ ID NO: 278585 - DNA, 201 bp, Homo sapiens
agcactcactgacttaaaagccttatttatttaatacatatttctgacaacctcattttctttctgtgtgtgtgtgtgtgtgtgtgtgtgtgtgtgtgtgttgtgtgtgttttccccctagcattgtagtttaaagcagcaaataggaaaggggtatctgctagaggcaagcaaactgagaaccacatggagactagggtt

SEQ ID NO: 278586 - DNA, 201 bp, Homo sapiens
caatcgacactctgtatctagctgctctggtggggccttggagaacctttgtatctatactctgtatctaactaatctgatggggatgtggagaacctttmtatctagctcagggattgtaaacgcaccaatcagcaccctgtcaaaacagaccacttggctctaccaatcagcgggatgtgggtggggccagataagaca

SEQ ID NO: 278587 - DNA, 201 bp, Homo sapiens
caccctgtcaaaacagaccacttggctctaccaatcagcgggatgtgggtggggccagataagacaataaaagcaggctgcccagccagcagtggcaaccmgctccggtccccttccacactgtggaggctttgctcttttgctctttgcaataaatcttgctgctgctcggtctttaggtccacgctgcttttatgagct

SEQ ID NO: 278588 - DNA, 201 bp, Homo sapiens
agttgctcattgatggtaatttacatacaaaaagattgtaagtacttttaaaaattattttttcttgccaaattaagcagaactgctttttaaaaaatatmtctggccgggcacagtggctcacgcctataatctcagcactttgggaggccgaggtgggcggatcacaaggtcaggacattgagaccatcctggccaaca

SEQ ID NO: 278589 - DNA, 201 bp, Homo sapiens
tccaaactctcagagtagtatatgaattttggcaattagtgaaaaatgcatttacaaaaagcagtgttaagcagtttttattaagaaaaattatctaaaaratattgttacattataaatgacctttggaattaaagctagcaatgtaaatgacactaaatttaatttgtgaaatcaattttgatagtgaacatttttata

SEQ ID NO: 278590 - DNA, 201 bp, Homo sapiens
gggcacttaggttgcttccaaatcttggttattgtgaacagtgctgcgacaaatgtggtatgtagatatccctttgatacactgatttcctttcttttggrtatatacctagcagtgggattgctagatcgtatggtagctctatttttacttttctgaggaacttccaaactgttctccacagtggttgtactaattaac

SEQ ID NO: 278591 - DNA, 201 bp, Homo sapiens
caccttctgtgtgtcctcatacaggcaaggggataaaaaagcttccttgaacccttttttaagagcactaatcccatttatgagggcagagctcttgttayctaaccatcttccaaagcccctacctcttaataacttttgcattgtgggtctacttgaggtattaagaggtaatacttttgtattgcatatgtcaacaaa

SEQ ID NO: 278592 - DNA, 201 bp, Homo sapiens
tcctgattccaacattttggtaaagggtgaccatctagaattgctactatagctgaaattctagctaaattttaaagaccattggagattctggacagtgyatgaatttacattatttccgaagagaccatcagatgtaagtacgatatgatctatattaataaagctactttcacaggcattttatttaacccttttctc

SEQ ID NO: 278593 - DNA, 201 bp, Homo sapiens
gttctttgtgtttcaatttattacattgtttttcttttcttttttttttttgagacgaagtcttgttccattgccaggctggagtgcagtggcacaatctyggctcactgcaacctctgcctcccgggttcaggcagttctcctgcctcagcctcccgagtagctgggactacaggcacatgccaccatgcctagctaatt

SEQ ID NO: 278594 - DNA, 201 bp, Homo sapiens; identical to SEQ ID NO: 56248

SEQ ID NO: 278595 - DNA, 201 bp, Homo sapiens
  misc_feature (1)...(201): n = A,T,C or G
gagagttctgcatgttgattcgtaagtttatcaacgatagcatttaatatttcctaaatatctctatacaggattaaaatttacataaacacatatatgtntgtacgtatgtacatgtatgtgtatatcatacataaacttaagttagaagaaagatcggagttgtttaattttaaccactaatatgtgaaatatatagca

SEQ ID NO: 278596 - DNA, 201 bp, Homo sapiens
tcaacagttatcaactcatggccagtcttgttttctctgtaatgaggactaagctctgattttttatcttgcccaaattcctacctaaggggtctagggartcatgccctacaaaccataaattctcatcagatgggttttatttgaccctatatattgtgacttatttttcagtctgactctggcattaacattatgaga

SEQ ID NO: 278597 - DNA, 201 bp, Homo sapiens
atttcaaacccctaacatgtatgagggcagactactgataatattaataaatacacagtgtaatcttcctccattcagggatccacccaaagaaaaatggkttttttttgcttgttttctccctctttttgtacgtggatttcttttcttggttaccctttaactgaggcatagctctttaataatccagatattataaga

SEQ ID NO: 278598 - DNA, 201 bp, Homo sapiens
aacgtatttagtaacctatttttgttgttctacttaacatggattaagccagcgtttctcaacagatgctctattaagccctaatcctttaatatactttaaaaaaaaaaaacatgtttgttggttaactgaatttgagaaattctgcctactgctataattccctcttggagagctataacagacattaacatatttaat

SEQ ID NO: 278599 - DNA, 201 bp, Homo sapiens
cccatccatcaaagttgaggcatttttccctagaatgtaggaatagaaaacagtatatatgtttatatgctactttttgcaagactaaagcgtgccagttwtgatgttaaattagaaactagacatttcaataaaatcagccttttctacgtcagaggttttttaaaaacaaaactgtaaaagaaatttaaataggaactt

SEQ ID NO: 278600 - DNA, 201 bp, Homo sapiens
tcctttagggcaaaacatttttattcttacctcttagaacagtgcttggcacatggttgttatgctatacatttatgttgaacaaatgaactaccaatttsctagcaggtcattatcatattagacattgtaagagtctaaggcagtatcagtggagacggagagaagaggctagtttcaggaagtatttataaagcggaa

SEQ ID NO: 278601 - DNA, 201 bp, Homo sapiens
cacaaagttttacattatacaggaggttatcatcagcactcactgacttaaaagccttatttatttaatacatatttctgacaacctcattttctttctgkgtgtgtgtgtgtgtgtgtgtgtgtgtgtgtgtgttgtgtgtgttttccccctagcattgtagtttaaagcagcaaataggaaaggggtatctgctagagg

SEQ ID NO: 278602 - DNA, 201 bp, Homo sapiens
aaaaatatagcaaaattatgtatctttattgttttccaatttttctactatttcaacttttatcttgtaaaatattttctttgtacagctgctgtattctygaggattactaattgatcttctaatcaaatctaatgttagtcgatatgcagagtttaaaaatattaccaggattcttgcatttcgagaaggacgagtgga

SEQ ID NO: 278603 - DNA, 201 bp, Homo sapiens
acagctgctgtattctcgaggattactaattgatcttctaatcaaatctaatgttagtcgatatgcagagtttaaaaatattaccaggattcttgcatttygagaaggacgagtggaacaggtactgtgctgatcaagaattgtaactgggcatcagcttaagttattatggtttgttttggaaagataagcaaataagat

SEQ ID NO: 278604 - DNA, 201 bp, Homo sapiens
gtattctcgaggattactaattgatcttctaatcaaatctaatgttagtcgatatgcagagtttaaaaatattaccaggattcttgcatttcgagaaggaygagtggaacaggtactgtgctgatcaagaattgtaactgggcatcagcttaagttattatggtttgttttggaaagataagcaaataagattgttatttt

SEQ ID NO: 278605 - DNA, 201 bp, Homo sapiens
gtgccagttatgatgttaaattagaaactagacatttcaataaaatcagccttttctacgtcagaggttttttaaaaacaaaactgtaaaagaaatttaawtaggaactttgaccttggggacttgtactagttttgatctaattttcttctacccattgactatgtcctctttgaaaacagactgcttccctgtccaaag

SEQ ID NO: 278606 - DNA, 201 bp, Homo sapiens
caacagaccacatatatgatggtgttcctataagattctattactgtattttgactgtaccttttctatgttgttgagatatgttcagatacacaaatacyattgtgttacgtttgtctatggtattcagtacagtcacacattgcacaggtttgtagcctaggaacaataggctatatagcatatagcctaggcatgtca

SEQ ID NO: 278607 - DNA, 201 bp, Homo sapiens
tgcattcggaaaggttttagaagtacccttatatagtgaggttaagaaatacgaatctgtcaaccttgcagattaaattagagcttctgtgcagtttgctmcccctggaagatatcaaaggagctatgggtgacatatctccataagtagggatattttctatagtgatacaaagctaagtttgccagattaaattgagtt

SEQ ID NO: 278608 - DNA, 201 bp, Homo sapiens
atgtacatgtatgtgtatatcatacataaacttaagttagaagaaagatcggagttgtttaattttaaccactaatatgtgaaatatatagcatacaagtkttactattttgtgaaatagtgatctttgagaataaaccaaatgcatcattttatttttctcatgagtgattttgtttaaaataacaagtaattctccaag

SEQ ID NO: 278609 - DNA, 201 bp, Homo sapiens
ccatatcttagtagttagaaaaagaataagaatatggggggaataatgtgcacatacgcatatcctcctcaattttataaagaaatagaagcaccattccrcaccttcatattccacccttaatcattgttaagttggttgcatgtcttcctacattttacatgcttgtacaggtaactgtgtataaatgagtacatatat

SEQ ID NO: 278610 - DNA, 201 bp, Homo sapiens
gcaaggatgggtctctttggtggttaaactgttctatacagcaatggcatgtattgaacattttatgtaaaatatatatatttctacattctaaatgataygggtgtgtgtttttgtaggtttgcctgaatccatcattgcagctgcatgttcaagaagtggccggagagttctgcatgttgattcgtaagtttatcaacg

SEQ ID NO: 278611 - DNA, 201 bp, Homo sapiens
gtctctgagaaattttaaactttccctcatcttactatcttcttctgggtcctctaatttcttccaacctttgctcattgtgcagttctaaagttgcttcygtattttcaggtatctttatagcaatgccccattcctctgtacaagttttctgtattagtcagttcttgcactcgtataaagaaatacctgacactgggc

SEQ ID NO: 278612 - DNA, 201 bp, Homo sapiens
cgttggccttttaatggcatggggagtaacttggcagaattaagtaagaaagctcacaattagctctgaagttagcagagatgccattagtactgatggayggtgatgtgaaaaagcctggctagagtggaaacgataatcctgttatatgtaaaggggaaaaaagtgtaatttggaatagttatatcattaggaagcagt

SEQ ID NO: 278613 - DNA, 201 bp, Homo sapiens
aacatattgtattttagaatgtaaataaaatttatttctatatttagaaaatgaacaagtagaaaagccaagaattctgtgggctctttacttcaatatgwgagattcgtcagacatcagcaggagctgttataatgatttaccatccaacgtttatgtctgctctggcccagattgtggtttaggaaatgataatgcagt

SEQ ID NO: 278614 - DNA, 201 bp, Homo sapiens
ttggaataagttttatatactacgtcaggtatttataacctgttaattggagcagtatcagtgggaacaaacttcacattttttttttatgtgtagatgtraactgcccagagattgttacttaattttgttaaaggagggcatttaactgtcaaccttctagataattcagcctttcattattctgtggcctagatttga

SEQ ID NO: 278615 - DNA, 201 bp, Homo sapiens
ctttgtcattttttattatgacaagttacaaagatatctttttttctctcacattgtttttaatatagtttgtcttttgtattctatatttttactacagygaatcttaggtgttaatttctttgtatttatcttgcttagtataggttgaaccatatgaaattaacattattcaaccattttagacctacattatcctat

SEQ ID NO: 278616 - DNA, 201 bp, Homo sapiens
taccctaaaacttaaagtatatatatataaaaaaaaaaaagaaaacattgacctgtttcatgtccccatccccattggtttcctcccacagtgtcatagarccacgtgatatagctaaatctaggtgcagaaactgaccctgcgtcaaatgggtagatttgactagtccagatgtgtgtgtgtgaagctcgattattgaat

SEQ ID NO: 278617 - DNA, 201 bp, Homo sapiens
cacttaaaccccaagtacccttcagtaagcttgtgttgaatgcttccaggcctgggccttacccttcatggcagtgggctcccctctggccgagggtaggyccagaaaggctttctaagagcctaggcctcgacttgagttcccaagagcctgcttggtgctctgcacccctgtgtctgagttggtgtttaacacacaaca

SEQ ID NO: 278618 - DNA, 201 bp, Homo sapiens
catacctatctttaacatggtgcgtatatgtttgagatactaaattgtttcagagactcatggtttagaccagagtttctcaatctcagcactatttacattttttttttttgccaggataattttctctgtgttggggaaagggctgtcttgtgcattgtaaaatgttagcaacatacctggattctacccactagatgc

SEQ ID NO: 278619 - DNA, 201 bp, Homo sapiens
ataatatctggcacatgatcagcactatatgagccattgttagttaaaataatttccaaactgtgttaagttgtgaatatatgaattcagattttttttcttatttatttattttattttattttttgagacagagtctcactaaatcccatgctggagtgcaatggctcttcagaggtgcgatcttggtgcactgcagcc

SEQ ID NO: 278620 - DNA, 201 bp, Homo sapiens
tggaagaattgtgatattatgcagagtgggaagaaaaggacagaagaaacaaatgatatgaaccaaactgtcatgatttgacaattagaattgataaattyggagttagagatgccatgttggaaagtaggtggagatgaaaccagaagattagtaaataaggaaggtggtttggtttagagacaggaaaaggaagatttt

SEQ ID NO: 278621 - DNA, 201 bp, Homo sapiens
taatatctggcacatgatcagcactatatgagccattgttagttaaaataatttccaaactgtgttaagttgtgaatatatgaattcagattttttttcttatttatttattttattttattttttgagacagagtctcactaaatcccatgctggagtgcaatggctcttcagaggtgcgatcttggtgcactgcagcct

SEQ ID NO: 278622 - DNA, 201 bp, Homo sapiens
attgtgttatttttaataaggcacttctttttttcacttaactcggactttctaatttacaataccgtgtttttttcttggccttattttttgtgtttttygcaacaagtttgtttcgcatttgaaacaaaaatagtctgcacgtataaaccattattaattaagcatttattggataccacatctatagagcagtgtggt

SEQ ID NO: 278623 - DNA, 201 bp, Homo sapiens
tgggaaatattttttcctctgggaggagagaagtctagaaaagcatctctcagtagtaccatttctgtaatttgccctaaaagttttttctatgacctacraagctactttaaatatactttaaatacaggatcaggtattttcactttcttgaataaaatgttgagttacagagattttttatgagttccatcgtgggaa

SEQ ID NO: 278624 - DNA, 201 bp, Homo sapiens
aatatctggcacatgatcagcactatatgagccattgttagttaaaataatttccaaactgtgttaagttgtgaatatatgaattcagattttttttcttatttatttattttattttattttttgagacagagtctcactaaatcccatgctggagtgcaatggctcttcagaggtgcgatcttggtgcactgcagcctc

SEQ ID NO: 278625 - DNA, 201 bp, Homo sapiens
agtgggtgttttcctcactttggtttcctagatctcaaaaatattcatgtaacattaatgttatcaatttgtttcttcactagattttattagaattactrtaacagtaaatatggcattttatttcttgacatttgagtgttattctatcattgtccctcatttttttttgtagtgttcattgtgttatttttaataagg

SEQ ID NO: 278626 - DNA, 201 bp, Homo sapiens
atatctggcacatgatcagcactatatgagccattgttagttaaaataatttccaaactgtgttaagttgtgaatatatgaattcagattttttttcttatttatttattttattttattttttgagacagagtctcactaaatcccatgctggagtgcaatggctcttcagaggtgcgatcttggtgcactgcagcctca

SEQ ID NO: 278627 - DNA, 201 bp, Homo sapiens
tttggtggaatttattgtcttcgccattcagtacagtgccttgtagtggacaaagaatccagaaagtaaggatgatataagtaaccttcatatatatatatatatatatattcatatatatatattcatatatatatattcatatatatattcatatatatatacatatatatatatatatatatatatatatatatacat

SEQ ID NO: 278628 - DNA, 201 bp, Homo sapiens
ttggtggaatttattgtcttcgccattcagtacagtgccttgtagtggacaaagaatccagaaagtaaggatgatataagtaaccttcatatatatatathtatatatattcatatatatatattcatatatatatattcatatatatattcatatatatatacatatatatatatatatatatatatatatatatacata

SEQ ID NO: 278629 - DNA, 201 bp, Homo sapiens
tgtagtggacaaagaatccagaaagtaaggatgatataagtaaccttcatatatatatatatatatatattcatatatatatattcatatatatatattcwtatatatattcatatatatatacatatatatatatatatatatatatatatatatacatatacacacacacatatcccaaacacaagtgaaaaatgctga

SEQ ID NO: 278630 - DNA, 201 bp, Homo sapiens
taaacttttacactctgctttcccattaaatataagttccaacttaagtcatttatttgctccctcattgagcataggctattagaagcagccaggtcacwtctggaatgctttgctgcttagaaatttctttaaccagataccctaaatcatcactctcaagtcaagcttccacagatcccccggacatgaacagaacgc

SEQ ID NO: 278631 - DNA, 201 bp, Homo sapiens
ctatttcaacttttatcttgtaaaatattttctttgtacagctgctgtattctcgaggattactaattgatcttctaatcaaatctaatgttagtcgatakgcagagtttaaaaatattaccaggattcttgcatttcgagaaggacgagtggaacaggtactgtgctgatcaagaattgtaactgggcatcagcttaagt

SEQ ID NO: 278632 - DNA, 201 bp, Homo sapiens
ggtaatgttcttagaaagtacttggcttttccttatttagaaataaattatcttaaagtattttatatgctcaaatgtaagccattctcacataatgcatmatcttcagtcccagtgagaaatttaaagaagttgaacaacttggatgtgcctgcttttatgaatataaattaaatagcacacagtcttcttgtgctatta

SEQ ID NO: 278633 - DNA, 201 bp, Homo sapiens
aataaatattaaagatatttaaaagttattatctatgagaattatgaaaatgatacataaatatgtttcaaattctgttccaaaattaaatccttacaagscatatttttttcagacatgatgtttgaaaaagatactcagtttagaagttaacagcattttaatgttagaagaatgaaaatgagatctaacagctgtgtc

SEQ ID NO: 278634 - DNA, 201 bp, Homo sapiens
gggtagcagtataatatatactgtgaaaatcagaaataaatggccttagaacaaagtataaacatcaaagtaaaagaatacaatgtctgcagcaagtcgtrttgggtaagagaaggtgcaaatggctgaaaaataaatggtgaacacctgtgctgaataaattaaacacctgttcctcagtttttcatttgattcctctaa

SEQ ID NO: 278635 - DNA, 201 bp, Homo sapiens
attaggaagcagtttcttaacttaaaatcataatatttttcaggttccgtgttccagagcagatgtctttaatagcaaacaacttactatggtagaaaagygaatgctaatgaaatttcttacattttgtatggaatatgagaaatatcctgatgaatataaaggtatttttttcattaagtagtgctctccaattatttg

SEQ ID NO: 278636 - DNA, 201 bp, Homo sapiens
ctgactagcctataaataaagattctttaaatgcatttggaacaattttgcctgcttgtatagagtgaatgactgctgtatgtggtaacctcagaagcttraggaatagatttcctaccttttacagcaagcatttacttaggttttacattcacatttgtaatgccatccgttttgatttaaaatctgtcatcattgaaa

SEQ ID NO: 278637 - DNA, 201 bp, Homo sapiens
ctgcttttctgtagggctgctatggtatactgggtgcctgctccagttgctaatgaccttggattttccagtacctcaaagtatcaacatagaaggttgtraagcagcaaagatgatggcctgcccctccctctgggagatccatccgaggaagatgtggacttgttgccagccttaaggcacctgtagaatatggctgga

SEQ ID NO: 278638 - DNA, 201 bp, Homo sapiens
aggggaaaaagaaaaccattgtgatgataaaacttgtgtgccatcaacttcagcagaagacatgagtgaaaatgtgcctatagcagaagataccacagagyaaccaaagaaaaacagaattacttactcacaaattattaaagaaggcaggagatttaatattgatttagtatcaaaggtaagtactaattttacccatct

SEQ ID NO: 278639 - DNA, 201 bp, Homo sapiens
caaatgaattgtggggagacacaaacattgaaaccatagcaccttgaattctaaattctaaatccaattactgaacttttttcatgtataaattttcaatktattttgtttatttatgagactaaagttaaggactactttacctgctctttcacttatttgtttcaaattttttgtttccagcattagatatcatgcatt

SEQ ID NO: 278640 - DNA, 201 bp, Homo sapiens
gtctaacaaaaaatgcctgggtaacagttctcagaacagcatggacaggtttattcttagcctgaaaataactgcatggctgcaaataacctggttgtagytgctatgaacagatgttggatgagagctggaaagagccaatggactattcattttttcttttaagtctatactaaaactgagaacagcatccattttgga

SEQ ID NO: 278641 - DNA, 201 bp, Homo sapiens
tgccaagtgtttcctaagtgataaatctaggatagaacaaagtgggtgttttcctcactttggtttcctagatctcaaaaatattcatgtaacattaatgwtatcaatttgtttcttcactagattttattagaattactataacagtaaatatggcattttatttcttgacatttgagtgttattctatcattgtccctc

SEQ ID NO: 278642 - DNA, 201 bp, Homo sapiens
taagccaccgtgcccggcctgattagtatcttatctttgattaaccttttagagtttataaactacttttcatatatgttagcttccttatctcacaacartttcataaaaggtaaggcaaatggactgatccccattttatatgtggtgaatcagagagattaaatgacttgccaagtgtttcctaagtgataaatctag

SEQ ID NO: 278643 - DNA, 201 bp, Homo sapiens
cttgagttttataatcttgctttttttgtgtaggaacttgaggtgtttttaacaatttttttaatcaacaattttttttttcaggtctgggttcaaatttyaattgatgaatgttaattcttatgaatgatgctaatgtttttcataaatattttgccttctgtacagttcagaattggaagacatccatcctgatggagt

SEQ ID NO: 278644 - DNA, 201 bp, Homo sapiens
ttttttttttttttttagacggagttttgctcttgttgcccaggctggagtgcaatgggacgatcttggctcactgctacctccgcctcctgggttcaagygattctctggcctcagcctcccaagtagctgagattacaggtgcccatcaccacgcccagctaatttttgcattttagtagagactaggtttcaccatgt

SEQ ID NO: 278645 - DNA, 201 bp, Homo sapiens; identical to SEQ ID NO: 56255

SEQ ID NO: 278646 - DNA, 201 bp, Homo sapiens
gggaactaacctaaatgttatagttgtaaatgatgagatttgacattaagaatttggattaaagggggattttgaaaaatgaatagataatggttttatcyctgtaaaatatcttaggtgaggttcttgggtcctgattttagcctagctccttcatttgataataaaacatctctatttcatctagacaggtttttagaa

SEQ ID NO: 278647 - DNA, 201 bp, Homo sapiens
atatgccacattttccttgttaattcatttgttgatgggcatttaagttgattccatattttcgcaattgtgaatagtgctccaataaacatgggagtgcrgatgtctcttcaacctactgatttcatttcctttggctatatacccagtagtgagggtgaagattgctggatcatatgatagatttatttttaatttttt

SEQ ID NO: 278648 - DNA, 201 bp, Homo sapiens
gggattttgaaaaatgaatagataatggttttatccctgtaaaatatcttaggtgaggttcttgggtcctgattttagcctagctccttcatttgataatraaacatctctatttcatctagacaggtttttagaaaattgcagaaagctggtaccatacatattagtgtatgatgatataacattccataagcttctaat

SEQ ID NO: 278649 - DNA, 201 bp, Homo sapiens
atttttctttctgttctcagcttatttcacttaatataatgttctccaggctcatccatgttgtcacaaatgacaggatttaattttttttatggctgtgyagtattctattgtgtatatatgccacattttccttgttaattcatttgttgatgggcatttaagttgattccatattttcgcaattgtgaatagtgctcc

SEQ ID NO: 278650 - DNA, 201 bp, Homo sapiens
aaataagagagagagattgtttccattttttcctaagatcaaccatcagtgtccaaaatgtaataccacctatgtcctttgtgaggtctgtgaaacacacktcatctcctttttgtggggtggttttaaatagaagtttagttctgattttaagtgataaaatttcatcttttcataggatatgaagagatcacattttat

SEQ ID NO: 278651 - DNA, 201 bp, Homo sapiens
ctagtatatatatatatactactttctatttcatatatgctagtatatactttcatatatgctggtatatatatactttataatatatagtatatatataatatatatattagatatatatgctatatattatatatacttattatttatatattatatatacttcatatatgctgttatatatattatatattatgtaat

SEQ ID NO: 278652 - DNA, 201 bp, Homo sapiens
ccaagcaccattgcattgattgattgatttaatcaatgtacatgacttaatcagtatacatgactcaaaaagtgcctctcatgatgacaaagacactgatrttgaagatgcagtgaaaattcagtttgaatattgttgcatgaaatgagtatagagaaacaagcagtatttgtaaagtagcatttcatataataattcaaa

SEQ ID NO: 278653 - DNA, 201 bp, Homo sapiens
tagtatatatatatatactactttctatttcatatatgctagtatatactttcatatatgctggtatatatatactttataatatatagtatatatataatatatatattagatatatatgctatatattatatatacttattatttatatattatatatacttcatatatgctgttatatatattatatattatgtaatt

SEQ ID NO: 278654 - DNA, 201 bp, Homo sapiens
ctttggccaaggctttcactcagcataatgcttttgagatgcatttatgttgtatatagcaggtgattattcctttctattggtgaatagtatcccatttyatggatatacgacagtttgtttattcattctcctgttgatggatacttggattattatcagtttggggctattaataaagctgctgtggaaagacttgta

SEQ ID NO: 278655 - DNA, 201 bp, Homo sapiens
ttagggcaaaacatttttattcttacctcttagaacagtgcttggcacatggttgttatgctatacatttatgttgaacaaatgaactaccaatttgctakcaggtcattatcatattagacattgtaagagtctaaggcagtatcagtggagacggagagaagaggctagtttcaggaagtatttataaagcggaatcaa

SEQ ID NO: 278656 - DNA, 201 bp, Homo sapiens
tatatataatatatatattagatatatatgctatatattatatatacttattatttatatattatatatacttcatatatgctgttatatatattatatawtatgtaattaatatataatatattatgtaatgtattatatattatgttattatataattaatatattatatattatatgtattatataattaatatatag

SEQ ID NO: 278657 - DNA, 201 bp, Homo sapiens
acatacaacactggccatttgagttacccgagttcgtgcattgattctttcccatatctgcctgtgggtattcctttaactaaagtgtagagtgagtacartcagtagacttcttttctggttattttcacaggaccgaggcttcgtacagggtctttattggaagctgacttcttgtctttggtttaagagaggtacgta

SEQ ID NO: 278658 - DNA, 201 bp, Homo sapiens
aatatattatatattatatgtattatataattaatatatagtatatattatatgtattatatattaatttcatgtattatatattatgtattacgtattayatattatgtattatatatagtatgtattatatactatatataatatgtaatacatattatatactatatataatacgtattatataatatattatataat

SEQ ID NO: 278659 - DNA, 201 bp, Homo sapiens
tgatctgattgccaaagcaacttcttgtagattcatagggctctcttaaaaccaagtaacatttcaaaacaacatgttgtacgtgagaaatatatatacaytttttgcttgtcaattaataaaagcaaataagatcctggtcttcctctctgacattagaattgcttctgcataccttgtcatagaggcccactttccttg

SEQ ID NO: 278660 - DNA, 201 bp, Homo sapiens
tatgtattatatatagtatgtattatatactatatataatatgtaatacatattatatactatatataatacgtattatataatatattatataattatayattatataagtttgtactcttggcttccatgaaactgccctttggttcccctcatgactctggctgtttcctctctacttctttagtgggctcttgttcc

SEQ ID NO: 278661 - DNA, 201 bp, Homo sapiens
agttacctccccctgggtccctcccacaacacatgggaattctgggagatacaattcaagttgagatttcagtggggacacagccaaaccatatcattctkcccctggcccctccaaatctcatgtcctcacatttcaaaagcaatcatgccttcccaacagtcccccaaagtcttatttcagcattaacccaaaagtcca

SEQ ID NO: 278662 - DNA, 201 bp, Homo sapiens
atttcattgtaggaatcgtacacttctttgattaagctaattcctaggtatttaattgcatttgtgggtattctaattgagattactttttaaaatttctyttttggattcttcagtgttgacatatagaaatgctattaattttgtatgttgattttataccctgcaactttactaaatttgtcagtctaataggttttt

SEQ ID NO: 278663 - DNA, 201 bp, Homo sapiens
gcagctcatttcctatgtgggttgcttattttcttaatgcagagatagtgcatagaggggggtttatttacataagaagacaaactgttctgttctttaattttttttttaattttatgggtacatactaggcgtatatatttattgggtacatgagatatattgatacaggcatacaatgtggagtaatcacatcatggt

SEQ ID NO: 278664 - DNA, 201 bp, Homo sapiens
aggctttctaagagcctaggcctcgacttgagttcccaagagcctgcttggtgctctgcacccctgtgtctgagttggtgtttaacacacaacacaaagtyccctttacttttctctctgcttttctcaaacagaagtcttttgccatagataccacagctgggaatgtactgggtctcacctgaagccagcatgtctcag

SEQ ID NO: 278665 - DNA, 201 bp, Homo sapiens
ccggccgggaccacgtcgccaggaaacgacgtctccccgacaccttccctccccgtccgggctctctgcagcaattcatcccgtcactctcccaacgaccycgggcacacctccggcagatgcgaaatatgctgctcctcaggaggaaagatgacccggaggaccgcgggaggaccttcccactcgcgatcttcccagtgc

SEQ ID NO: 278666 - DNA, 201 bp, Homo sapiens
tttgttctatttgttcttcttttcacccatagccttgtgttcctgtcatccctcctttcagcaaaagtccttttcccattccctctgtccccaccaactgytgttccccaagaaaataagctatcattgtatttgcaatctatggattagaggttgaagtatttattattattggttaattattattaattatataaaata

SEQ ID NO: 278667 - DNA, 201 bp, Homo sapiens; identical to SEQ ID NO: 56258

SEQ ID NO: 278668 - DNA, 201 bp, Homo sapiens; identical to SEQ ID NO: 56259

SEQ ID NO: 278669 - DNA, 201 bp, Homo sapiens; identical to SEQ ID NO: 56260

SEQ ID NO: 278670 - DNA, 201 bp, Homo sapiens; identical to SEQ ID NO: 56261

SEQ ID NO: 278671 - DNA, 201 bp, Homo sapiens
tgacttgcagaggaaatccaaactagtatcttccgtgccatgcaataagggctacattgcaaggctgcacagggtgctactggggcacagaagtgagtcaraggcttcccacagacacacacacgagcggaaacagaaagtctttatatatcaccatatgtcaaggaacactggccgggagttaggagagctgggcactag

SEQ ID NO: 278672 - DNA, 201 bp, Homo sapiens; identical to SEQ ID NO: 56262

SEQ ID NO: 278673 - DNA, 201 bp, Homo sapiens
aaagggaccctttgggaacatcggaacttcaagaccaattagtggaaatgatgcttcttgtgtttgggcattaaatactgggcagggttctctttagagcrgctaatgctggcagggaaagaggtaccgacctaattactcttccgcaagagtaaaaaatgccttttgaatgcctctttggcaaatatgtctcattaagga

SEQ ID NO: 278674 - DNA, 201 bp, Homo sapiens
ctctattagagccaattgtaactatttaatgtgaattcaagtggcaatgtgtttaatgtgatattctcaccttcttcttcttcttctttttttttttttttaccgtcaggtgaaattgggtgaggatgcccccaattccagtgtggtgcatgtctccagtacagaaggaggtgacaacagtggcaatggtacccaggagaa

SEQ ID NO: 278675 - DNA, 201 bp, Homo sapiens
acagtcccaaaagaacacaaagcaggccacagccagagcttgtccatcacttggataaaacattggggaatgatagagcttagagctacattttcaaggtrcaaattaaaaagagaatagctaaaagggaattgagctcagaggaaggagtacgtagcctattcttcaactctgatttatttggccaatctgaatataaat

SEQ ID NO: 278676 - DNA, 201 bp, Homo sapiens
agtagaccatttgcttctaatttttaaaatgaagtcaattaatcatttgttatagaatgcatgttaagaattgacagcaaaataaggatagtaaagaatamcagccttggcttaattttaaaaagagttaactccagtgccttcagtgatgaaaataattatcttcagtgactatacagaatgaaaaagacttttattgtc

SEQ ID NO: 278677 - DNA, 201 bp, Homo sapiens
tcctgggtaaatgtggtgagaatgcacgcgtgcatatgctacacatatgtgcttctcagttgcagaaaatgaactgctttgggagattatcagtagaaagrgtgttatcatattggtgctgagtgctatgtgtgcttatacaatttgttcttgtattttaataaactttgaataaaagaataaagctactctttggttcta

SEQ ID NO: 278678 - DNA, 201 bp, Homo sapiens; identical to SEQ ID NO: 56263

SEQ ID NO: 278679 - DNA, 201 bp, Homo sapiens
atcaatttacagattcaaaggctgcaaactttccttcattctgttctcaactatttaaaccatgtgcaaagggagcacatgaaacaatttttatctctacytcttctgccccaatattttataattcagaggagcttgttaacaaattgtggggtagaaaagtactttttaatgtgacttcctagataaaaagaaggaaac

SEQ ID NO: 278680 - DNA, 201 bp, Homo sapiens; identical to SEQ ID NO: 56265

SEQ ID NO: 278681 - DNA, 201 bp, Homo sapiens; identical to SEQ ID NO: 56266

SEQ ID NO: 278682 - DNA, 201 bp, Homo sapiens; identical to SEQ ID NO: 56267

SEQ ID NO: 278683 - DNA, 201 bp, Homo sapiens; identical to SEQ ID NO: 56268

SEQ ID NO: 278684 - DNA, 201 bp, Homo sapiens; identical to SEQ ID NO: 56270

SEQ ID NO: 278685 - DNA, 201 bp, Homo sapiens
tatttaatgtgaattcaagtggcaatgtgtttaatgtgatattctcaccttcttcttcttcttctttttttttttttttaccgtcaggtgaaattgggtgmggatgcccccaattccagtgtggtgcatgtctccagtacagaaggaggtgacaacagtggcaatggtacccaggagaagatagctgagggagccacatgc

SEQ ID NO: 278686 - DNA, 201 bp, Homo sapiens
atgtgaattcaagtggcaatgtgtttaatgtgatattctcaccttcttcttcttcttctttttttttttttttaccgtcaggtgaaattgggtgaggatgmccccaattccagtgtggtgcatgtctccagtacagaaggaggtgacaacagtggcaatggtacccaggagaagatagctgagggagccacatgccacctt

SEQ ID NO: 278687 - DNA, 201 bp, Homo sapiens
ttttcagggctttggatagcaagtagtatgtgtgaaaattctgctaccacacacccacccttcatttttataatttgctttagtttctgttatgagattaygtgatatattgtccacaaggctttctcaggctgtggaaaagaaaaagaaataaaatcccaaaacaagaaacaaggttagtagtatatgctgtattttctg

SEQ ID NO: 278688 - DNA, 201 bp, Homo sapiens
gaaaaagaaataaaatcccaaaacaagaaacaaggttagtagtatatgctgtattttctgcttctacttgatgaatggttcttttctcccccttgccctgyatttcacagtccacatgctaaagcagcatttcctttttccccatgcactgaacactgaacatcatcaagggaatcaaatttttatatatgctatatgttt

SEQ ID NO: 278689 - DNA, 201 bp, Homo sapiens
tctgaatgctcttgtcatttgtgccactgtctttgggtgtagtcatttccagagacgttgtaagaggttctgtttgagatggcatcacactatttcataamcctgacttgcattattttgaggctacccatccccagaagtgaagttttccaggatgagaggggtgtgtgctcatgtgatacaactacacatgtgatttac

SEQ ID NO: 278690 - DNA, 201 bp, Homo sapiens; identical to SEQ ID NO: 56272

SEQ ID NO: 278691 - DNA, 201 bp, Homo sapiens; identical to SEQ ID NO: 56273

SEQ ID NO: 278692 - DNA, 201 bp, Homo sapiens; identical to SEQ ID NO: 56274

SEQ ID NO: 278693 - DNA, 201 bp, Homo sapiens; identical to SEQ ID NO: 56275

SEQ ID NO: 278694 - DNA, 201 bp, Homo sapiens; identical to SEQ ID NO: 56276

SEQ ID NO: 278695 - DNA, 201 bp, Homo sapiens; identical to SEQ ID NO: 56277

SEQ ID NO: 278696 - DNA, 201 bp, Homo sapiens
atattctcaccttcttcttcttcttctttttttttttttttaccgtcaggtgaaattgggtgaggatgcccccaattccagtgtggtgcatgtctccagtrcagaaggaggtgacaacagtggcaatggtacccaggagaagatagctgagggagccacatgccaccttcttgactttgccagccctgagcgcccactagt

SEQ ID NO: 278697 - DNA, 201 bp, Homo sapiens; identical to SEQ ID NO: 56279

SEQ ID NO: 278698 - DNA, 201 bp, Homo sapiens
aaattcttcactgacctagaattataacaactagcattcattcaataaaataaatacttcccagtctaaccctaatcctaacaaaatgctaaatcccccccataaagagcattacgaatttggtaactttcctaatttttttattttagactgacagtgttgtacttactctaaatttcccaaggcaaattagtctgtgtt

SEQ ID NO: 278699 - DNA, 201 bp, Homo sapiens; identical to SEQ ID NO: 56280

SEQ ID NO: 278700 - DNA, 201 bp, Homo sapiens
taaatttatctgcctcagtgagcttatccgtcacccaaatatgattatgttcattgcaggtcagggttatcattaagtgtaaaattcttcactgacctagrattataacaactagcattcattcaataaaataaatacttcccagtctaaccctaatcctaacaaaatgctaaatcccccccataaagagcattacgaatt

SEQ ID NO: 278701 - DNA, 201 bp, Homo sapiens; identical to SEQ ID NO: 56281

SEQ ID NO: 278702 - DNA, 201 bp, Homo sapiens
aaggacagatcaataacattgagtgctgattttggtagtactctatgagagggccccaggattcatatttctaaatttatctgcctcagtgagcttatccrtcacccaaatatgattatgttcattgcaggtcagggttatcattaagtgtaaaattcttcactgacctagaattataacaactagcattcattcaataaa

SEQ ID NO: 278703 - DNA, 201 bp, Homo sapiens; identical to SEQ ID NO: 56282

SEQ ID NO: 278704 - DNA, 201 bp, Homo sapiens; identical to SEQ ID NO: 56283

SEQ ID NO: 278705 - DNA, 201 bp, Homo sapiens
cagtgtgggtctcaataaatcctttgcttttgcttgtgctgtgtgcccatattgcctactgcatcactccctatttaaatgctgcccattcttcagtgccrtgctcaactcccaactctgccaagaagccccaactgattcgacagctgactttgagctctcctttttcttaattctcgtgcccctcaaagtctgctgttt

SEQ ID NO: 278706 - DNA, 201 bp, Homo sapiens
cctgagctgctggaacctattctctatggattcatagcataataggtgttaaaatacccctggactgtttgtaaaaaaaaaaaaaaaaaaaaaagactttrcagcttggtgtgatgcctcacttagcactctgggaggtcagggcggaaggattgcttgaggtaaggagttcaagatcatcctggacaacatggtgagact

SEQ ID NO: 278707 - DNA, 201 bp, Homo sapiens
cttgagaatacccagaaagccagacacatttgcataggggtagatgtctaatgttcatcaaaacctacctgttcattaacttgaagcatgaccaaaaaaayatggggagtaaataacaaaatagtgagtataaagatgtcaaaattatttgaataactgatggagaatttccccctcttctttttttcccacccatctttt

SEQ ID NO: 278708 - DNA, 201 bp, Homo sapiens
gctacttgggtggctgaggcaggagaatcacttcaacctgggaggcggaggttgcagtgagccaagatcgtgccattgccctccagcctgggtgacaaaaygagacacagtctccaaaaaataaaatttttgagaagactctttgccatttagatactcagggtgccatctattttgagttctagattccagtcttagatg

SEQ ID NO: 278709 - DNA, 201 bp, Homo sapiens
tctttcttcacaatctgtaagcatacttaggtcttgccagtccttaaaaaccaaaaactaccctcttaactctatttttctgtgactatgcctaagctttwattttctttcatagctggtcttacaaaaaggagtttaacttgtctttattgccccctctccagacaaggttttttatcactttatctctaattctttttt

SEQ ID NO: 278710 - DNA, 201 bp, Homo sapiens
gagttcctgaggtaagtcttgtcaatcagaatgaagtgttaatactcagctcagatcatcacaggtctttgaaggaactgttctataacaatgcagtaaamgtgactggctgggtttttttttcccttcattgtttccaagcaaaaacagcacaattgtattctttccccaggaacatttggacagatgctttgacagtta

SEQ ID NO: 278711 - DNA, 201 bp, Homo sapiens
gcacaaaaataatgtgtggttgttatccatattgtaattgttcaaatcagctagttgctgtcagtggccaagccttatatttttccctaaattattagttrtctgtctcctgttgtgtcagggagtccccaaaaccacacccaaatttgatgattcgccaggaagactcaggactcagcagatggttgcacttacagattt

SEQ ID NO: 278712 - DNA, 201 bp, Homo sapiens
gcagtaactttcccagtcatagttaataaacaaaatttatacttttttattgttgtgtgtttttacttattttttgtagctttggacagtccgccatcttyctcctgggtggtcttcaaagggatgaggcccccacggccatgtttatgcacagtggtgacatcatgataatgtcgggtttcagccgcctcttgaaccacg

SEQ ID NO: 278713 - DNA, 201 bp, Homo sapiens
gtaagaaatgaaggtattggactggataagccattcaaggtaattgaatcatgggcagtcagggtcatgtggacagtacctggcagctctcccaactttgycagagtctctcagaacaggagagagtctgttgagttcaaaacagttcccctggagattttgattaggtatcataacatcctctgacattgagaaccactg

SEQ ID NO: 278714 - DNA, 201 bp, Homo sapiens
cccacgcagcccgtggcaagggtcctggtgcccaaaaggtacagagagaggagtggcgcgcgtctctccatcgctttgccccgcgtcttggagggacttasgtgtcttcttcgcctcttttcacctccagaccgattgttattgaacgattcctgacctcctttggctgcagagtcgaactccccactaaccgtcacactt

SEQ ID NO: 278715 - DNA, 201 bp, Homo sapiens
atagaagagcaaactatagagcaaagcacaaaagcctgagtagtttactctccttgtctccctaaaagtaagtttaaatttgtgccaagttttgcacctgyatctcgggaaagtgccttttattaattgccttatctttaaaatgaggaaaggtaaacatagtaaagaactcaaatgattttattgaaagactcaaagaca

SEQ ID NO: 278716 - DNA, 201 bp, Homo sapiens
ggactaaaccagaagtattattcctttagtctaatatgtttgggaatattataatattctttatttcgtgaaattgtggtgatagcaggtggtaggttgtyggggggtttcctatctttttccataatattgatgatcctatcattctcccaaactatttggagaattttactgataaatgaaacataaaatccaaatgta

SEQ ID NO: 278717 - DNA, 201 bp, Homo sapiens
gaacccaggaggctgaggttgcagtgagccgagatcgcgccgctgcactccagccactccagcctgggtgacgaaataaggctctgtctttaaaaaaaaaaccatcaataaaacttaaatggataacattaaagctaagttctccatttgcttatttaactgcatccaattttattttgcagcagttctgtgggctgtcat

SEQ ID NO: 278718 - DNA, 201 bp, Homo sapiens
gggcatagtggtgtgtgcctgtagtcctagctactcggcaggctgaggagagactgtctctaaaaataaataaattaaataaataaataaataaataaatwcaatttggtaggtgcagggacagacattataagatataatgggaatggtcacttaagtagctaggctggaggtagattatagaaaatgcttcctggaagc

SEQ ID NO: 278719 - DNA, 201 bp, Homo sapiens
aagagtcttccttacacctgaagttaaaggtcgcttctggccaaagtaaatacttgctgtccagacctatgactgctgcttcagctagaatatattcagaygctagtagagatatgagacaaaagtagattttctgatcagatttgaggttaatttagcaaagaaagaagtgagagcagaggagcatcaagacaaaagaag

SEQ ID NO: 278720 - DNA, 201 bp, Homo sapiens
cttgaactcccgacctcaggtgatctgcccacctcggcctcccaaagtgctgggattacaggtgtaaggcacttcccggccccaaaaaaatttttttttttaattagctgggcatagtggtgtgtgcctgtagtcctagctactcggcaggctgaggagagactgtctctaaaaataaataaattaaataaataaataaat

SEQ ID NO: 278721 - DNA, 201 bp, Homo sapiens
ctttcagcaatacagactcagtaggaaactagatattttttgaggggaaatgccatgtgattttctttggattagacagcctgagtttgaatccttcctcyggtaatgatagtgcctacctcataaggcagttgtgaaaattaagtgatcagtgcctgtaaagtgatctcaatggtgtctggctattctaagcagttaaat

SEQ ID NO: 278722 - DNA, 201 bp, Homo sapiens
aaaaaaaatttttttttttttttttgagacggagtttcgctcttgttgcccaggctggagtgcaatggcatgatcttggcccactgcaacctccacctccygggttcaagcaattctcctgcctcagcctccagagtagctgggattacaggcaagcgccaccacacccggctaattttgtatttttagtagaggtagggg

SEQ ID NO: 278723 - DNA, 201 bp, Homo sapiens
tggagtgcagtggcacaatcactatagcctcgacctccccagactcaggtgatcctcacacctcagcctcacagtaactagttactttctaaaagctccayagtttcagccaacccaacttagatacattaactgctccaaatgatgacagatttgttttaaaaatatttgtgatataattctgactttcagcaatacaga

SEQ ID NO: 278724 - DNA, 201 bp, Homo sapiens
tcgtgtaatcatgcctgtaataaatgaaatagggaggtaaagaagtctcggatgactctaagtgtcaagacctgataaaaattagaggtgtacttttaccrcttccaattctaaagtttgctttgggataacagttgttgtggaatatttatttctcttgagaatacccagaaagccagacacatttgcataggggtagat

SEQ ID NO: 278725 - DNA, 201 bp, Homo sapiens
gggagtatactgattataagaataaaatgaaaaaaaaatattggtatagaccattttctttgcctactaaccagttactttgtctgttttttttttttttttgtaatggtcttacactgtcacctaggctggagtgcagtggcacaatcactatagcctcgacctccccagactcaggtgatcctcacacctcagcctcac

SEQ ID NO: 278726 - DNA, 201 bp, Homo sapiens
taattcttttttctaagacattttactctaaaataaatacaggtatttaactttaaaaaagtggttggactctataatcttccacttctgggaattttaayaaattatagttagtatctctgtttaagacacatggagcctaccttttattttatttttattttttattattgtttttttttgaaacagagtctcgctctg

SEQ ID NO: 278727 - DNA, 201 bp, Homo sapiens
gatctggagttcaaccaggaactgaagaagaccttcaaattattgccagcatttaattcagaaatccttaagctttagtctgttcatctgtttttaaaatycttttgcaaggggaacattacactaatatatgatgcttggcttttatatcattgcttggattccttcttgttcctcaggacctgtccaaccatgctcact

SEQ ID NO: 278728 - DNA, 201 bp, Homo sapiens
agtacagagagagctcgtgctctccccctattattaacattttaccttagtatggtacctttgtctcaaatagttaaccaatagtaatacattactgtaayagcatttgtacttcatttagatttccttagtttttaactaatatctttgttcttatatctaattttctaatatccaggatcttatccaggatactacatt

SEQ ID NO: 278729 - DNA, 201 bp, Homo sapiens
agggagtatactgattataagaataaaatgaaaaaaaaatattggtatagaccattttctttgcctactaaccagttactttgtctgttttttttttttttttgtaatggtcttacactgtcacctaggctggagtgcagtggcacaatcactatagcctcgacctccccagactcaggtgatcctcacacctcagcctca

SEQ ID NO: 278730 - DNA, 201 bp, Homo sapiens
aaacttttggtattttgtccaggaatctccacacttggagaagttgataagataaaagatcattctctttcaaagagaatgtttcatatatatatatatgwgtgtgtgtatatatgtgtgtgtatatataatatatatacttttttttactgagacagcgtctcactgtgtcacccaggctgaagtgcagtggcgtgatct
